(19) United States
(12) Patent Application Publication
(10) Pub. No.: US 2022/0403001 A1
(43) Pub. Date: Dec. 22, 2022

(54) PDE5 DERIVED REGULATORY CONSTRUCTS AND METHODS OF USE IN IMMUNOTHERAPY

(71) Applicant: Obsidian Therapeutics, Inc., Cambridge, MA (US)

(72) Inventors: Vipin SURI, Belmont, MA (US); Celeste RICHARDSON, Brookline, MA (US); Brian DOLINSKI, Cambridge, MA (US); Abhishek KULKARNI, Brookline, MA (US); Mara Christine INNISS, Beverly, MA (US); Dexue SUN, Cambridge, MA (US); Dan Jun LI, Cambridge, MA (US); Grace Y. OLINGER, Cambridge, MA (US); Scott Francis HELLER, Stoughton, MA (US); Jennifer Leah GORI, Jamaica Plain, MA (US); Byron DELABARRE, Arlington, MA (US)

(73) Assignee: Obsidian Therapeutics, Inc., Cambridge, MA (US)

(21) Appl. No.: 17/251,635

(22) PCT Filed: Jun. 12, 2019
(86) PCT No.: PCT/US2019/036654

§ 371 Date: Jul. 12, 2021

Related U.S. Application Data
(60) Provisional application No. 62/835,545, filed on Apr. 18, 2019.
(60) Provisional application No. 62/777,893, filed on Dec. 11, 2018.
(60) Provisional application No. 62/756,124, filed on Nov. 6, 2018.
(60) Provisional application No. 62/683,972, filed on Jun. 12, 2018.

(51) Int. Cl. C07K 14/705; C12N 9/16; A61K 31/53; A61K 31/519; A61K 31/4985

(52) U.S. Cl. CPC C07K 14/70503; C12N 9/16; A61K 38/00; A61K 31/519; A61K 31/4985; A61K 31/53

(57) ABSTRACT

The present disclosure relates to tunable biocircuit systems for the development of controlled and/or regulated therapeutic systems. In particular, regulatable biocircuits containing destabilizing domains (DD) derived from mutant human cGMP-specific phosphodiesterase type 5 (PDE5) are disclosed. Especially, the present disclosure provides an effector module. Such effector module may include (a) a stimulus response element (SRE), wherein the SRE is a DD, said DD comprising at least one mutation relative to cGMP-specific 3′,5′-cyclic phosphodiesterase (hPDE5; SEQ ID NO: 1) and (b) at least one payload, which is attached, appended or associated with said SRE. The SRE may be responsive to one or more stimuli.

### CROSS REFERENCE TO RELATED APPLICATIONS

[0001] This application claims priority to the U.S. Provisional Patent Application No. 62/835,545 filed Apr. 18, 2019 entitled PDE5 DERIVED REGULATORY CONSTRUCTS AND METHODS OF USE IN IMMUNOTHERAPY, the U.S. Provisional Patent Application No. 62/777,893 filed Dec. 11, 2018 entitled PDE5 DERIVED REGULATORY CONSTRUCTS AND METHODS OF USE IN IMMUNOTHERAPY, the U.S. Provisional Patent Application No. 62/756,124 filed Nov. 6, 2018 entitled PDE5 DERIVED REGULATORY CONSTRUCTS AND METHODS OF USE IN IMMUNOTHERAPY, and the U.S. Provisional Patent Application No. 62/683,972 filed Jun. 12, 2018 entitled PDE5 DERIVED REGULATORY CONSTRUCTS AND METHODS OF USE IN IMMUNOTHERAPY, the contents of each of which are herein incorporated by reference in their entirety.

### REFERENCE TO THE SEQUENCE LISTING

[0002] The present application is being filed along with a Sequence Listing in electronic format. The Sequence Listing is provided as a file entitled 2095_1008 PCT_SL.txt, created on Jun. 11, 2019, which is 20,431,626 bytes in size. The information in the electronic format of the sequence listing is incorporated herein by reference in its entirety.

### FIELD

[0003] The present disclosure relates to tunable biocircuit systems for the development of controlled and/or regulated therapeutic systems. In particular, regulatable biocircuits containing destabilizing domains (DD) derived from mutant human cGMP-specific phosphodiesterase type 5 (PDE5) are disclosed. The present disclosure also relates to compositions and methods for immunotherapy.

[0004] Provided in the present disclosure include polypeptides of biocircuit systems, effector modules, stimulus response elements (SREs) and immunotherapeutic agents, polynucleotides encoding the same, vectors and cells containing the polypeptides and/or polynucleotides for use in cancer immunotherapy. In one embodiment, the compositions comprise destabilizing domains (DDs) which tune protein stability.

### BACKGROUND

[0005] Safe and effective gene therapy requires tightly regulated expression of a therapeutic transgenic product (e.g., the protein product). Similarly, the analysis of gene function in development, cell differentiation and other physiological activities requires the controllable expression of a protein under investigation. However, current technologies do not allow titration of levels of target protein induced or kinetics of induction. Inadequate exogenous and/or endogenous gene control is a critical issue in numerous settings including ex vivo and in vivo gene therapy. This lack of tunability also makes it difficult to safely express proteins with narrow or uncertain therapeutic windows or those requiring more titrated, controlled or transient expression.

[0006] One approach to regulated protein expression or function is the use of Destabilizing Domains (DDs). Destabilizing domains are small protein domains that can be appended to a payload such as a protein of interest (POI). DDs render the attached protein of interest (POI) unstable in the absence of a DD binding ligand such that the protein is rapidly degraded by the ubiquitin-proteasome system of the cell (Stankunas, K., et al., (2003). Mol. Cell 12, 1615-1624; Banaszynski, L. A., et al., (2006) Cell; 126(5): 995-1004; reviewed in Banaszynski, L. A., and Wandless, T. J. (2006) Chem. Biol. 13, 11-21; Iwamoto, M., et al. (2010). Chem Biol. 17(9):981-8; Egeler, E. L. et al. (2011). J Biol Chem. 286(36):31328-36; and Rakhit R, Navarro R, Wandless T J (2014) Chem Biol. September 18; 21(9):1238-52; Navarro, R. et al. (2016) ACS Chem Biol. 11(8): 2101-2104). In some cases, the protein of interest is not completely processed and may not be secreted or presented on the membrane in the absence of DD-binding ligand (Sellmeyer et al., (2012), doi.org/10.1371/journal.pone.0043297; the contents of which are incorporated by reference in their entirety). However, when a specific small molecule ligand binds its intended DD as a ligand binding partner, the instability is reversed and protein function is restored or, in some cases, processing is restored and the protein of interest is presented on the membrane or secreted. Such a system is herein referred to as a biocircuit, with the canonical DD-containing biocircuit described above being the prototypical model biocircuit

[0007] It is believed that improvements of biocircuits, including those containing DDs can form the basis of a new class of cell and gene therapies that employ tunable and temporal control of gene expression and function. Such novel moieties are described by the present inventors as stimulus response elements (SREs) which act in the context of an effector module to complete a biocircuit arising from a stimulus and ultimately producing a signal or outcome. When properly formatted with a polypeptide payload, and when activated by a particular stimulus, e.g., a small molecule, biocircuit systems can be used to regulate transgene and/or protein levels either up or down by perpetuating a stabilizing signal or destabilizing signal. This approach has many advantages over existing methods of regulating protein function and/or expression, which are currently focused on top level transcriptional regulation via inducible promoters.

[0008] The present disclosure provides novel protein domains, in particular, destabilizing domains (DDs) derived from mutant human cGMP-specific phosphodiesterase type 5 (PDE5), particularly the catalytic domain of human PDE5, that display small molecule dependent stability, and the biocircuit systems and effector modules comprising such DDs. Methods for tuning transgene functions using the same are also provided.

[0009] Cancer immunotherapy aims to eradicate cancer cells by rejuvenating the tumoricidal functions of tumor-reactive immune cells, predominantly T cells. Strategies of cancer immunotherapy including the recent development of checkpoint blockade, adoptive cell transfer (ACT) and cancer vaccines which can increase the anti-tumor immune effector cells have produced remarkable results in several tumors.

[0010] The impact of host anti-tumor immunity and cancer immunotherapy is impeded by three major hurdles: 1) low number of tumor antigen-specific T cells due to clonal deletion; 2) poor activation of innate immune cells and accumulation of tolerogenic antigen-presenting cells in the tumor microenvironment; and 3) formation of an immunosuppressive tumor microenvironment. Particularly, in solid tumors the therapeutic efficacy of immunotherapeutic regimens remains unsatisfactory due to lack of an effective an anti-tumor response in the immunosuppressive tumor microenvironment. Tumor cells often induce immune tolerance or suppression and such tolerance is acquired because even truly foreign tumor antigens will become tolerated. Such tolerance is also active and dominant because cancer vaccines and adoptive transfer of pre-activated immune effector cells (e.g., T cells), are subject to suppression by inhibitory factors in the tumor microenvironment (TME).

[0011] In addition, administration of engineered T cells could result in on/off target toxicities as well as a cytokine release syndrome (reviewed by Tey Clin. Tranl. Immunol., 2014, 3: e1710.1038).

[0012] Development of a tunable switch that can turn on or off the transgenic immunotherapeutic agent expression is needed in case of adverse events. For example, adoptive cell therapies may have a very long and an indefinite half-life. Since toxicity can be progressive, a safety switch is desired to eliminate the infused cells. Systems and methods that can tune the transgenic protein level and expression window with high flexibility can enhance therapeutic benefit, and reduce potential side effects.

[0013] In an effort to develop regulatable therapeutic agents for disease therapy, in particular cancer immunotherapy, the present disclosure provides biocircuit systems to control the expression of immunotherapeutic agents. The biocircuit system comprises a stimulus and at least one effector module that responds to the stimulus. The effector module may include a stimulus response element (SRE) that binds and is responsive to a stimulus and an immunotherapeutic agent operably linked to the SRE. In one example, a SRE is a destabilizing domain (DD) which is destabilized in the absence of its specific ligand and can be stabilized by binding to its specific ligand.

### SUMMARY

[0014] The present disclosure provides compositions and methods for immunotherapy. The compositions relate to tunable systems and agents that induce anti-cancer immune responses in a cell or in a subject. The tunable system and agent may be a biocircuit system comprising at least one effector module that is responsive to at least one stimulus. The biocircuit system may be, but is not limited to, a destabilizing domain (DD) biocircuit system, a dimerization biocircuit system, a receptor biocircuit system, and a cell biocircuit system. These systems are further taught in co-owned U.S. Provisional Patent Application No. 62/320,864 filed Apr. 11, 2016, 62/466,596 filed Mar. 3, 2017 and the International Publication WO2017/180587 (the contents of each of which are herein incorporated by reference in their entirety).

[0015] The present disclosure provides an effector module. Such effector module may include (a) a stimulus response element (SRE), wherein the SRE is a DD, said DD comprising at least one mutation relative to cGMP-specific 3′,5′-cyclic phosphodiesterase (hPDE5; SEQ ID NO:1) and (b) at least one payload, which is attached, appended or associated with said SRE. The SRE may be responsive to one or more stimuli. The effector module of the may include at least one mutation which may include but is not limited to T537A, E539G, V548E, D558G, F559S, E565G, C574N, R577Q, R577W, N583S, Q586R, Q589L, K591R, K591R, L595P, C596R, W615R, F619S, Q623R, K633I, Q635R, N636S, T639S, D640N, E642G, I643T, L646S, A649V, A650T, S652G, H653A, D654G, V660A, V660A, L672P, A673T, C677Y, M681T, E682G, H685R, F686S, Q688R, M691T, S695G, G697D, S702I, I706T, E707K, Y709H, Y709C, I715V, I720V, A722V, D724G, Y728C, K730E, R732L, L738I, I739M, K741N, K741R, F744L, D748N, K752E, K752E, K752E, E753K, L756V, M758T, M760T, A762V, C763R, D764N, D764N, I774V, L781F, L781P, E785K, R794G, M805T, R807G, K812R, I813T, I813T, M816R, Q817R, V818A, F820S, I821V, C825R, Y829C, E830K, L832P, S836L, C846Y, C846S, L856P, L856P, A857T, or E8586.

[0016] In some embodiments, the SRE may include two mutations. The mutation pairs may be selected from but not limited to E536K, I739W; H678F, S702F; E669G, I700T; G632S, I648T; T639S, M816R; Q586R, D724G; E539G, L738I; L672P, S836L; M691T, D764N; I720V, F820S; E682G, D748N; S652G, Q688R; Y728C, Q817R; H653, R732L; and L595P, K741R.

[0017] In some embodiments, the SRE may include three mutations. The three mutation may be selected from but not limited to Q623R, D654G, K741N; A673T, L756V, C846Y; E642G, G697D, I813T; C677Y, H685R, A722V; Q635R, E753K, I813T; Y709H, K812R, L832P; N583S, K752E, C846S; K591R, I643T, L856P; F619S, V818A, Y829C; and F559S, Y709C, M760T.

[0018] In some embodiments, the SRE may include four mutations. The four mutations may be selected from but not limited to S695G, E707K, I739M, C763R; A649V, A650T, K730E, E830K; and R577W, W615R, M805T, I821V.

[0019] In some embodiments, the SRE may include five mutations. The five mutations may be selected from but not limited to V660A, L781F, R794G, C825R, E858G; and T537A, D558G, I706T, F744L, D764N.

[0020] In one embodiment, the SRE may include six mutations. The six mutations may be R577Q, C596R, V660A, I715V, E785K, and L856P. In one embodiment, the SRE may include eight mutations. The eight mutations include V548E, Q589L, K633I, M681T, S702I, K752E, L781P, and A857T.

[0021] In some embodiments, the SRE may include two mutations. The mutation pairs may be selected from but not limited to R732D, F736S; R732E, F736D; R732V, F736G; R732W, F736G; R732W, F736V; R732L, F736W; R732P, F736Q; R732A, F736A; R732S, F736G; R732T, F736P; R732M, F736H; R732Y, F736M; R732P, F736D; R732P, F736G; R732W, F736L; R732L, F736S; R732D, F736T; R732L, F736V; R732G, F736V; and R732W, F736A.

[0022] The payload of the effector module may be a chimeric antigen receptor (CAR). The CAR may include (a) an extracellular target moiety; (b) a hinge and transmembrane domain; (c) an intracellular signaling domain; and (d) optionally, one or more co-stimulatory domains The CAR may comprise the mutation H653A or R732L or H653A and R732L.

[0023] In some embodiments the CAR is a CD19 CAR. The CAR can comprises the amino acid sequence of OT-001455, SEQ ID NO: 8282. In some embodiments, the CAR comprises the amino acid sequence of OT-001456, SEQ ID NO: 8283.

[0024] The one or more stimuli of the effector modules as described herein can be responsive to a small molecule. In some embodiments, the small molecule is selected from Tadalafil, Vardenafil, Sildenafil, Avanafil, Lodenafil, Mirodenafil, Udenafil, Benzamidenafil, Dasantafil, and Beminafil

[0025] Also provided herein are pharmaceutical compositions which include effector modules, polynucleotides and vectors.

### BRIEF DESCRIPTION OF THE DRAWINGS

[0026] The foregoing and other objects, features and advantages will be apparent from the following description of particular embodiments of the disclosure, as illustrated in the accompanying drawings. The drawings are not necessarily to scale; emphasis instead being placed upon illustrating the principles of various embodiments of the disclosure.

[0027] FIG. 1 shows an overview diagram of a biocircuit system of the disclosure. The biocircuit comprises a stimulus and at least one effector module responsive to a stimulus, where the response to the stimulus produces a signal or outcome. The effector module comprises at least one stimulus response element (SRE) and one payload.

[0028] FIG. 2 shows representative effector modules carrying one payload. The signal sequence (SS), SRE and payload may be located or positioned in various arrangements without (A to F) or with (G to Z, and AA to DD) a cleavage site. An optional linker may be inserted between each component of the effector module.

[0029] FIG. 3 shows representative effector modules carrying two payloads without a cleavage site. The two payloads may be either directly linked to each other or separated.

[0030] FIG. 4 shows representative effector modules carrying two payloads with a cleavage site. In one embodiment, an SS is positioned at the N-terminus of the construct, while other components: SRE, two payloads and the cleavage site may be located at different positions (A to L). In another embodiment, the cleavage site is positioned at the N-terminus of the construct (M to X). An optional linker may be inserted between each component of the effector module.

[0031] FIG. 5 shows effector modules of the disclosure carrying two payloads, where an SRE is positioned at the N-terminus of the construct (A to L), while SS, two payloads and the cleavage site can be in any configuration. An optional linker may be inserted between each component of the effector module.

[0032] FIG. 6 shows effector modules of the disclosure carrying two payloads, where either the two payloads (A to F) or one of the two payloads (G to X) is positioned at the N-terminus of the construct (A to L), while SS, SRE and the cleavage site can be in any configuration. An optional linker may be inserted between each component of the effector module.

[0033] FIG. 7A shows the percent of CAR positive cells obtained with cells transduced with different volumes of virus related to the CAR constructs. FIG. 7B shows the percentage of CAR positive cells with vardenafil treatment. FIG. 7C shows the expression of the CAR with CD3/CD28 bead restimulation. FIG. 7D shows the percentage of CAR positive cells with different concentrations of virus and in the presence or absence of CD3/CD28 bead restimulation. FIG. 7E shows the dose response of CD19 CAR constructs to sildenafil, vardenafil and tadalafil. FIG. 7F shows the response of CD19 CAR constructs to different ligands and with varying the duration of ligand treatment. FIG. 7G shows IL2 and IFNγ levels obtained from the supernatants of cocultures of effector and target cells in the presence of vardenafil. FIG. 7H shows the percentage of CAR positive T cells obtained with Tadalafil treatment. FIG. 7I shows the IL2 and IFNγ levels obtained from the supernatants of cocultures of effector and target cells in the presence of tadalafil. FIG. 7J shows the target cell killing by CAR expressing T cells in the presence of vardenafil. FIG. 7K shows the proliferation of target cells cocultured with CAR expressing T cells in the presence of vardenafil.

[0034] FIG. 8A shows the total flux of Nalm6 luc cells in mice, in the presence of tadalafil. FIG. 8B and FIG. 8C show the pharmacokinetics of vardenafil and tadalafil in plasma of mice after injections of ligand at indicated doses.

[0035] FIG. 9A shows antitumor efficacy of Vardenafil. FIG. 9B shows that increased Tadalafil dose density significantly increases DD regulated CAR-Ts antitumor efficacy.

[0036] FIG. 10 shows the total flux of Nalm6 luc cells in mice with initial high dose of tadalafil compared to lower dose. A high initial dose of tadalafil with later shift to maintenance dosing does not improve efficacy of PDE5-regulated CD19 CAR-mediated cytotoxicity.

[0037] FIG. 11 shows the total flux of Nalm6 luc cells in mice with pre-infusion tadalafil exposure. Ligand pre-treatment prior to freezing CAR T cells increases basal CAR activity in vehicle treated animals but does not improve efficacy of ligand-regulated CAR-mediated cytotoxicity.

[0038] FIG. 12 shows the total flux of Nalm6 luc cells in mice with variable cell dosing. Increased cell dose fractionated over 3 days led to increased anti-tumor efficacy as compared to a single cell infusion.

[0039] FIG. 13 shows the total flux of Nalm6 luc cells in mice comparing efficacy of OT-001455 and OT-001456 constructs. OT-001455 showed higher increased efficacy but higher basal activity compared to OT-001456.

[0040] FIG. 14A shows a timecourse of CD19 CAR expression upon exposure to saturating dose of tadalafil. PDE5-regulated CD19 CAR expression responded similarly to constitutively expressed CD19 CAR, with low and high tadalafil concentrations achieving similar timecourse.

[0041] FIG. 14B shows a timecourse of CD19 CAR expression upon exposure to saturating dose of vardenafil. PDE5-regulated CD19 CAR expression responded similarly to constitutively expressed CD19 CAR, with low and high vardenafil concentrations achieving similar timecourse.

[0042] FIG. 15 shows CD19 CAR expression upon washout of tadalafil or vardenafil. PDE5-regulated CD19 CAR expression on the surface of T cells drops rapidly following removal of ligand.

[0043] FIG. 16 shows that OT-001456 allows reversibility of CAR expression based on ligand exposure time course, along with the ability to perform multiple rounds of pulsed ligand dosing while maintaining equal expression levels.

### DETAILED DESCRIPTION

[0044] The details of one or more embodiments of the disclosure are set forth in the accompanying description below. Although any materials and methods similar or equivalent to those described herein can be used in the practice or testing of the present disclosure, the preferred materials and methods are now described. Other features, objects and advantages of the disclosure will be apparent from the description. In the description, the singular forms also include the plural unless the context clearly dictates otherwise. Unless defined otherwise, all technical and scientific terms used herein have the same meaning as commonly understood by one of ordinal), skill in the art to which this disclosure belongs. In the case of conflict, the present description will control.

### I. Introduction

### Protein Regulation

[0045] The ability to conditionally control protein levels is a powerful tool in gene and cell therapy. Techniques to control protein expression on a genetic level have been widely studied. The Cre-Lox technology provides a useful approach to activate or inactivate genes. Tissue or cell specific promoters can be used to control spatial and temporal expression of genes of interest. However, this system is limited in application due to the irreversible nature of the perturbation. The transcription of the gene of interest can be conditionally regulated using tools such as Doxycycline (Dox)-inducible system. Alternatively, the stability of mRNA can be regulated using RNA interference techniques. However, methods targeting DNA or RNA are slow acting, irreversible and have low efficiency.

[0046] Direct manipulation of activities at the protein level provides significant advantages in flexibility, reversibility and speed. Strategies which directly trigger a cell's natural degradation system have been developed. Szostak and colleagues showed that a small peptide sequence could be fused to the N-terminus of a protein of interest to modulate protein stability (Park, E-C., et al., Proc. Natl. Acad. Sci. U.S.A. 1992, 89:1249-1252). Varshaysky and coworkers isolated a temperature-sensitive peptide sequence that greatly reduced the half-life of dihydrofolate reductase (DHFR) at the non-permissive temperatures (Dohmen et al. Science 1994, 263:1273-1276). These mutants have been widely used to study protein functions in yeast (Labib et al. Science 2000, 288:1643-1646; and Kanemaki et al. Nature 2003, 423:720-724).

[0047] Subsequently, reversible systems employing a rapamycin derivative for the regulation of GSK-3β kinase fused to an unstable triple-mutant of the FRB domain (FRB*) were developed. The rapamycin derivative induces dimerization of the FRB*-GSK-3β and endogenous FKBP12 and stabilizes the FRB* fusion thus restoring the function of the fused kinase. (Stankunas et al., Mol Cell. 2003; 12:1615-1624 and Liu et al., Nature. 2007; 446:79-82).

[0048] Building on the FRB* domain system, Banaszynski, et al., developed a cell-permeable ligand system using mutants of FKBP12 protein which were engineered to be unstable in the absence of a high-affinity ligand, Shield-1. (Banaszynski et al., Cell. 2006; 126:995-1004). They termed these unstable domains, destabilizing domains (DDs).

[0049] The FKBP/shield-1 tuning system has been successfully used in several studies to control target proteins. For example, Dettwier et al., fused FKBP to tune the express of NADPH P450 oxidoreductase (POR) (Dettwier et al., PLoS One, 2014, 9(11): e113540).

[0050] The FKBP DD-shield system has been used in cell lines, transgenic mice, protozoan Entamoeba histolytica, the flatworm Caenorhabditis elegans, the medaka, and transgenic xenografts to investigate the activity of a protein of interest (Maynard-Smith et al., J Biol Chem. 2007, 282(34): 24866-24872; Liu et al., Int J Parasitol. 2014, 44(10):729-735; Cho et al., PLoS One. 2013, 8(8): e72393); Banaszynski et al. Nat Med. 2008, 14(10):1123-1127; Rodriguez and Wolfgang, Chem Biol. 2011, 19(3):391-398; and Froschauer et al., PLoS One, 2015, 10(7): e0131252), for iPSC reprogramming (Sui et al., Stem cell Reports., 2014, 2(5): 721-733).

[0051] In addition, the destabilizing domain has been used for the conditional knock-down or knock-out of the target gene fused with the destabilizing domain. Park et al achieved this genomic engineering by CRISPR/Cas9-mediated homologous recombination and a donor template coding for a resistance cassette and the DD-tagged TCOF1 sequence (Park et al., PLoS One. 2014, 9(4): e95101).

[0052] More recently protein switches useful as biosensors as well as new chimeric antigen receptors and other small molecule stabilization frameworks have been disclosed (An W, et al. PLoS ONE, 2015, 10(12): e0145783. doi: 10.1371/journal.pone.0145783; Nicholes, et al., Protein Engineering, Design & Selection, 2016, vol. 29 no. 2, pp. 77-85; Nath, et al., Biochemical and Biophysical Research Communications, 2016, 470: 411e416); Stevers, et al., PNAS, 2016, vol. 119, no. 9, pp. E112-1161; Juillerat, A. et al., Sci. Rep. 2016, 6: 18950; Roybal, Cell, 2016, vol. 164, pp. 1-10; and Morsut, Cell, 2016, vol. 164, pp. 1-12).

[0053] One drawback of the FKBP/Shield-1 is that Shield-1 is a novel drug whose biodistribution is not fully characterized and it is not known to what extent Shield-1 crosses the blood-brain barrier.

[0054] Other DD ligand pairs include estrogen receptor domains which can be regulated by several estrogen receptor antagonists (Miyazaki et al., J Am Chem. Soc., 2012, 134(9): 3942-3945), and fluorescent destabilizing domain (FDD) derived from bilirubin-inducible fluorescent protein, UnaG. A FDD and its cognate ligand bilirubin (BR) can induce degradation of a protein fused to the FDD (Navarro et al., ACS Chem Biol., 2016, Jun. 6, Epub). Other known DDs and their applications in protein stability include those described in U.S. Pat. Nos. 8,173,792 and 8,530,636, the contents of which are each incorporated herein by reference in their entirety.

[0055] In an orthogonal approach, the destabilizing domains of the bacterial dihydrofolate reductase (ecDHFR) were explored. (Iwamoto et al., Chem Biol. 2010, 17(9):981-988; and Tai et al., PLoS One. 2012, 7(9): e46269). Numerous inhibitors of DHFR have been developed as drugs and one such inhibitor Trimethoprim (TMP), inhibits ecDHFR much more potently than mammalian DHFR providing specificity to the interaction. Additionally, TMP is commercially available and has desirable pharmacological properties making this protein-ligand pair ideal for development for use as a biocircuit (Iwamoto, et al., Chem Biol. (2010) Sep. 24; 17(9): 981-988).

[0056] The present disclosure provides novel protein domains displaying small molecule dependent stability. Such protein domains are called destabilizing domains (DDs). In the absence of its binding ligand, the DD is destabilizing and causes degradation of a payload fused to the DD (e.g., a protein of interest (POI), while in the presence of its binding ligand, the fused DD and payload can be stabilized and its stability is dose dependent. Methods for tuning the expression level and activity of a protein of interest using the DDs, effector modules, biocircuit systems and compositions of the disclosure are also provided. In some embodiments, the SRE may be a destabilizing domain (DD). In some examples, the DD may be a portion or region of human protein PDE5. In this context, the biocircuit system is a DD biocircuit system.

[0057] The present disclosure expands upon the technology of tuning protein stability using novel destabilizing domains derived from human PDE5 protein. The destabilization and stabilization of a protein of interest, e.g., a transgene for gene therapy, can be controlled by PDE5 mutant DDs having destabilizing or stabilizing properties and their ligands, e.g. Sildenafil and Vardenafil specifically binding to such protein domains The presence and/or absence of a small molecule ligand can tune the activity of a payload (e.g., a protein of interest) that is operably linked to the destabilizing domain.

### Immunotherapy

[0058] Cancer immunotherapy aims' at the induction or restoration of the reactivity of the immune system towards cancer. Significant advances in immunotherapy research have led to the development of various strategies which may broadly be classified into active immunotherapy and passive immunotherapy. In general, these strategies may be utilized to directly kill cancer cells or to counter the immunosuppressive tumor microenvironment. Active immunotherapy aims at induction of an endogenous, long-lasting tumor-antigen specific immune response. The response can further be enhanced by non-specific stimulation of immune response modifiers such as cytokines. In contrast, passive immunotherapy includes approaches where immune effector molecules such as tumor-antigen specific cytotoxic T cells or antibodies are administered to the host. This approach is short lived and requires multiple applications.

[0059] Despite significant advances, the efficacy of current immunotherapy strategies is limited by associated toxicities. These are often related to the narrow therapeutic window associated with immunotherapy, which in part, emerges from the need to push therapy dose to the edge of potentially fatal toxicity to get a clinically meaningful treatment effect. Further, dose expands in vivo since adoptively transferred immune cells continue to proliferate within the patient, often unpredictably.

[0060] A major risk involved in immunotherapy is the on-target but off tumor side effects resulting from T-cell activation in response to normal tissue expression of the tumor associated antigen (TAA). Clinical trials utilizing T cells expressing T-cell receptor against specific TAA reported skin rash, colitis and hearing loss in response to immunotherapy.

[0061] Immunotherapy may also produce on target, on-tumor toxicities that emerge when tumor cells are killed in response to the immunotherapy. The adverse effects include tumor lysis syndrome, cytokine release syndrome and the related macrophage activation syndrome. Importantly, these adverse effects may occur during the destruction of tumors, and thus even a successful on-tumor immunotherapy might result in toxicity. Approaches to regulatably control immunotherapy are thus highly desirable since they have the potential to reduce toxicity and maximize efficacy.

[0062] The present disclosure provides systems, compositions, immunotherapeutic agents and methods for cancer immunotherapy. These compositions provide tunable regulation of gene expression and function in immunotherapy. The present disclosure also provides biocircuit systems, effector modules, stimulus response elements (SREs) and payloads, as well as polynucleotides encoding any of the foregoing. In one aspect, the systems, compositions, immunotherapeutic agents and other components of the disclosure can be controlled by a separately added stimulus, which provides a significant flexibility to regulate cancer immunotherapy. Further, the systems, compositions and the methods of the present disclosure may also be combined with therapeutic agents such as chemotherapeutic agents, small molecules, gene therapy, and antibodies.

[0063] The tunable nature of the systems and compositions of the disclosure has the potential to improve the potency and duration of the efficacy of immunotherapies. Reversibly silencing the biological activity of adoptively transferred cells using compositions of the present disclosure allows maximizing the potential of cell therapy without irretrievably killing and terminating the therapy.

[0064] In particular, present disclosure provides methods for fine tuning of immunotherapy after administration to patients. This in turn improves the safety and efficacy of immunotherapy and increases the subject population that may benefit from immunotherapy.

### II. Compositions of the Disclosure

[0065] A variety of strategies that can directly control protein, e.g., a transgene, expression and function are available. The present disclosure provides novel protein domains displaying small molecule dependent stability. Such protein domains are called destabilizing domains (DDs). In the absence of its binding ligand, the DD causes degradation of a payload such as a protein of interest (POI) that is operably linked to the DD, while in the presence of its binding ligand, the fused DD and payload can be stabilized and its stability is dose dependent.

[0066] According to the present disclosure, novel destabilizing domains derived from human hPDE5 (cGMP-specific phosphodiesterase type 5; also referred to as cGMP-specific 3′,5′-cyclic phosphodiesterase) protein are provided. The destabilizing domain (DD) mutants are derived from the human PDE5 protein, comprising the amino acid sequence of SEQ ID NO: 1 (encoded by the nucleic acid sequence of SEQ ID NO: 2). The hPDE5 DD mutant may also comprise more than one mutation in the catalytic domain of human PDE5 (SEQ ID NO: 3), encoded by nucleic acid sequence of SEQ ID NO:339, e.g., two, three, four, five or more mutations. These hPDE5 DDs can bind to Sildenafil and/or Vardenafil and be stabilized. In some embodiments, the hPDE5 DD may include a methionine appended to the N terminus of catalytic domain (SEQ ID NO: 237), encoded by SEQ ID NO: 4.

[0067] According to the present disclosure, biocircuit systems are provided which comprise, at their core, at least one effector module system. Such effector module systems comprise at least one effector module having associated, or integral therewith, one or more stimulus response elements (SREs). The overall architecture of a biocircuit system of the disclosure is illustrated in FIG. 1. In general, a stimulus response element (SRE) may be operably linked to a payload construct which could be any protein of interest (POI) (e.g., an immunotherapeutic agent), to form an effector module. The SRE, when activated by a particular stimulus, e.g., a small molecule, can produce a signal or outcome, to regulate transcription and/or protein levels of the linked payload either up or down by perpetuating a stabilizing signal or destabilizing signal, or any other types of regulation. A much-detailed description of a biocircuit system can be found in co-owned U.S. Provisional Patent Application No. 62/320,864 filed Apr. 11, 2016, 62/466,596 filed Mar. 3, 2017 and the International Publication WO2017/180587 (the contents of each of which are herein incorporated by reference in their entirety). In accordance with the present disclosure, biocircuit systems, effector modules, SREs and components that tune expression levels and activities of any agents used for immunotherapy are provided. In particular, biocircuit systems and effector modules comprising the novel hPDE5 destabilizing domains discussed herein are provided.

[0068] As used herein, a “biocircuit” or “biocircuit system” is defined as a circuit within or useful in biologic systems comprising a stimulus and at least one effector module responsive to a stimulus, where the response to the stimulus produces at least one signal or outcome within, between, as an indicator of, or on a biologic system. Biologic systems are generally understood to be any cell, tissue, organ, organ system or organism, whether animal, plant, fungi, bacterial, or viral. It is also understood that biocircuits may be artificial circuits which employ the stimuli or effector modules taught by the present disclosure and effect signals or outcomes in acellular environments such as with diagnostic, reporter systems, devices, assays or kits. The artificial circuits may be associated with one or more electronic, magnetic, or radioactive components or parts.

[0069] In accordance with the present disclosure, a biocircuit system may be a destabilizing domain (DD) biocircuit system, a dimerization biocircuit system, a receptor biocircuit system, and a cell biocircuit system. Any of these systems may act as a signal to any other of these biocircuit systems. In some embodiments, the present disclosure provides biocircuit systems, effector modules and compositions comprising the DDs of the present disclosure. In one aspect, the biocircuit system is a DD biocircuit system.

[0070] In one aspect of the present disclosure, the biocircuit system is a DD biocircuit system. The DD is a hPDE5 derived DD. The present disclosure provides isolated polypeptide variants. Such variants may include one to ten mutations relative to SEQ ID NO:3. In some embodiments, the isolated polypeptide variant comprises mutations that may independently selected from, but not limited to L573M, F735L, R658H, S562G, L727P, R847T, Q666H, L781P, A767E, T571S, V585M, T723S, Q743L, Y709H, F787V, N605Y, I715K, F564I, N662Y, H685L, L693P, F736I, A722V, F755L, M760I, V594I, H592R, E858V, T784I, S542L, E708V, W772C, I700F, E7960, D7240, K848N, T712M, M758I, Q859R, I556S, E796D, I680S, H613L, D724Y, F755Y, A611T, N661S, L569M, T833S, I768N, R607W, N620S, L554R, Q589E, M691I, W615R, T723R, A762T, E808G, C574Y, L554R, Q586P, K710N, K730E, H613R, Q586L, S663Y, A762T, E808G, V548M, D803N, L554R, Q589E, A823T, T571I, K604R, I706N, E795R, G659A, T784I, Q666H, H617L, A722V, N609Y, I799L, F561L, G659A, T784I, K795N, K770Q, K848N, N605D, I680S, V548M, F820I, I799L, R607Q, S550F, L554R, P549S, F564I, R658H, A779T, and R847G.

[0071] In some embodiments, the isolated polypeptide variant may comprise the mutations, L554R, Q589E and A823T. In one embodiment, the isolated polypeptide variant may be SEQ ID NO: 8423.

[0072] In some embodiments, the isolated polypeptide variant may comprise the mutations K770Q, and K848N. In one embodiment, the isolated polypeptide variant may be SEQ ID NO: 8431.

[0073] In some embodiments, the isolated polypeptide variant may comprise the mutations L573M, and F735L. In one embodiment, the isolated polypeptide variant may comprise the SEQ ID NO: 8387.

[0074] In some embodiments, the isolated polypeptide variant may be a stimulus response element (SRE). In one aspect, the SRE may be responsive to one or more stimuli.

[0075] The present disclosure also provides polynucleotides encoding the polypeptides described herein. In some embodiments, the polynucleotide may be codon optimized. In some aspects, the polynucleotide may comprise spatiotemporally selected codons.

### Effector Modules and SREs for Immunotherapy

[0076] In accordance with the present disclosure, biocircuit systems, effector modules, SREs, and components that tune expression levels and activities of any agents used for immunotherapy are provided. As non-limiting examples, an immunotherapeutic agent may be an antibody and fragments and variants thereof, a cancer specific T cell receptor (TCR) and variants thereof, an anti-tumor specific chimeric antigen receptor (CAR), a chimeric switch receptor, an inhibitor of a co-inhibitory receptor or ligand, an agonist of a co-stimulatory receptor and ligand, a cytokine, chemokine, a cytokine receptor, a chemokine receptor, a soluble growth factor, a metabolic factor, a suicide gene, a homing receptor, or any agent that induces an immune response in a cell and a subject.

[0077] As stated, the biocircuits of the disclosure include at least one effector module as a component of an effector module system. As used herein, an “effector module” is a single or multi-component construct or complex comprising at least (a) one or more stimulus response elements (SREs) and (b) one or more payloads (i.e. proteins of interest (POIs)). In the context of the present disclosure, the SRE is a DD derived from human PDE5 protein.

[0078] As used herein a “stimulus response element (SRE)” is a component of an effector module which is joined, attached, linked to or associated with one or more payloads of the effector module and in some instances, is responsible for the responsive nature of the effector module to one or more stimuli. As used herein, the “responsive” nature of an SRE to a stimulus may be characterized by a covalent or non-covalent interaction, a direct or indirect association or a structural or chemical reaction to the stimulus. Further, the response of any SRE to a stimulus may be a matter of degree or kind. The response may be a partial response. The response may be a reversible response. The response may ultimately lead to a regulated signal or output. Such output signal may be of a relative nature to the stimulus, e.g., producing a modulatory effect of between 1% and 100% or a factored increase or decrease such as 2-fold, 3-fold, 4-fold, 5-fold, 10-fold or more.

[0079] In some embodiments, the biocircuit system of the present disclosure comprising a stimulus and an effector module of the disclosure. The DD of the effector module binds to the stimulus and regulates the stability of the linked payload. The DD may destabilize the protein of interest by a destabilization ratio between 0, and 0.09, wherein the destabilization ratio comprises the ratio of expression, function or level of a protein of interest in the absence of the stimulus specific to the DD to the expression, function or level of the protein of interest that is expressed constitutively, and in the absence of the stimulus specific to the DD. In some embodiments, the DD may stabilize the protein of interest by a stabilization ratio of 1 or more, wherein the stabilization ratio comprises the ratio of expression, function or level of a protein of interest in the presence of the stimulus to the expression, function or level of the protein of interest in the absence of the stimulus.

[0080] In some embodiments, the present disclosure provides methods for modulating protein expression, function or level. In some aspects, the modulation of protein expression, function or level refers to modulation of expression, function or level by at least about 20%, such as by at least about 30%, 40%, 50%, 60%, 70%, 80%, 85%, 90%, 95% and 100%, or at least 20-30%, 20-40%, 20-50%, 20-60%, 20-70%, 20-80%, 20-90%, 20-95%, 20-100%, 30-40%, 30-50%, 30-60%, 30-70%, 30-80%, 30-90%, 30-95%, 30-100%, 40-50%, 40-60%, 40-70%, 40-80%, 40-90%, 40-95%, 40-100%, 50-60%, 50-70%, 50-80%, 50-90%, 50-95%, 50-100%, 60-70%, 60-80%, 60-90%, 60-95%, 60-100%, 70-80%, 70-90%, 70-95%, 70-100%, 80-90%, 80-95%, 80-100%, 90-95%, 90-100% or 95-100%.

[0081] According to the present disclosure, biocircuit systems and effector modules of the disclosure can be used to regulate the expression and activity of a payload in response to the presence or absence of a ligand that specifically binds to the DD integrated within the biocircuit system and effector module.

[0082] In some aspects, DDs, effector modules and biocircuit systems of the disclosure may be used to regulate the expression, function and activity of a payload in a cell or a subject. The regulation refers to a level of change of its expression, function and activity, by at least about 10%, or at least about 20%, or at least about 30%, or at least about 40%, or at least about 50%, or at least about 60%, or at least about 70%, or at least about 80%, or at least about 85%, or at least about 90%, or at least about 95%, or at least about 100%, or at least 20-30%, 20-40%, 20-50%, 20-60%, 20-70%, 20-80%, 20-90%, 20-95%, 20-100%, 30-40%, 30-50%, 30-60%, 30-70%, 30-80%, 30-90%, 30-95%, 30-100%, 40-50%, 40-60%, 40-70%, 40-80%, 40-90%, 40-95%, 40-100%, 50-60%, 50-70%, 50-80%, 50-90%, 50-95%, 50-100%, 60-70%, 60-80%, 60-90%, 60-95%, 60-100%, 70-80%, 70-90%, 70-95%, 70-100%, 80-90%, 80-95%, 80-100%, 90-95%, 90-100% or 95-100%.

[0083] In some embodiments, the mutation co-efficient of the biocircuits of the disclosure may also be measured as a way of evaluating the ability of the DD to modulate protein expression, function or level. As used herein, the “mutation co-efficient” refers to the expression, function or level or a protein of interest, appended to a particular DD mutant, in the absence of the stimulus specific to the SRE; to the protein expression, function or level of the protein of interest, appended to the corresponding wildtype sequence from which the particular DD mutant is derived and in the absence of the stimulus. The mutation co-efficient is indicative of the contribution of the destabilizing mutations towards the basal expression of the protein independent of the whether the corresponding wildtype protein can be destabilized without any mutations. In some aspects, the mutation co-efficient ratio is at least 0, such as by at least 0.1, 0.2, 0.3, 0.4, 0.5, 0.6, 0.7, 0.8, 0.9, or at least, 0-0.1, 0-0.2, 0-0.3, 0-0.4, 0-0.5, 0-0.6, 0-0.7, 0-0.8, 0-0.9, 0.1-0.2, 0.1-0.3, 0.1-0.4, 0.1-0.5, 0.1-0.6, 0.1-0.7, 0.1-0.8, 0.1-0.9, 0.2-0.3, 0.2-0.4, 0.2-0.5, 0.2-0.6, 0.2-0.7, 0.2-0.8, 0.2-0.9, 0.3-0.4, 0.3-0.5, 0.3-0.6, 0.3-0.7, 0.3-0.8, 0.3-0.9, 0.4-0.5, 0.4-0.6, 0.4-0.7, 0.4-0.8, 0.4-0.9, 0.5-0.6, 0.5-0.7, 0.5-0.8, 0.5-0.9, 0.6-0.7, 0.6-0.8, 0.6-0.9, 0.7-0.8, 0.7-0.9 or 0.8-0.9.

[0084] In some embodiments, the present disclosure provides methods for modulating protein, expression, function or level by measuring the stabilization ratio, destabilization ratio, and/or destabilizing mutation co-efficient. As used herein, the “stabilization ratio” is the ratio of expression, function or level of a protein of interest in response to the stimulus to the expression, function or level of the protein of interest in the absence of the stimulus specific to the SRE. In some aspects, the stabilization ratio is at least 1, such as by at least 1-10, 1-20, 1-30, 1-40, 1-50, 1-60, 1-70, 1-80, 1-90, 1-100, 20-30, 20-40, 20-50, 20-60, 20-70, 20-80, 20-90, 20-95, 20-100, 30-40, 30-50, 30-60, 30-70, 30-80, 30-90, 30-95, 30-100, 40-50, 40-60, 40-70, 40-80, 40-90, 40-95, 40-100, 50-60, 50-70, 50-80, 50-90, 50-95, 50-100, 60-70, 60-80, 60-90, 60-95, 60-100, 70-80, 70-90, 70-95, 70-100, 80-90, 80-95, 80-100, 90-95, 90-100 or 95-100. As used herein, the “destabilization ratio” is the ratio of expression, function or level of a protein of interest in the absence of the stimulus specific to the effector module to the expression, function or level of the protein of interest, that is expressed constitutively and in the absence of the stimulus specific to the SRE. As used herein “constitutively” refers to the expression, function or level a protein of interest that is not linked to an SRE, and is therefore expressed both in the presence and absence of the stimulus to the SRE. As used herein, the “destabilizing mutation co-efficient” may be defined as the ratio of expression or level of a protein of interest that is appended to a DD, in the absence of the stimulus specific to the effector module to the expression, function or level of the protein that is appended to the wild type protein from which the DD is derived. In some aspects, the destabilization ratio and/or the destabilizing mutation co-efficient is at least 0, such as by at least 0.1, 0.2, 0.3, 0.4, 0.5, 0.6, 0.7, 0.8, 0.9, or at least, 0-0.1, 0-0.2, 0-0.3, 0-0.4, 0-0.5, 0-0.6, 0-0.7, 0-0.8, 0-0.9, 0.1-0.2, 0.1-0.3, 0.1-0.4, 0.1-0.5, 0.1-0.6, 0.1-0.7, 0.1-0.8, 0.1-0.9, 0.2-0.3, 0.2-0.4, 0.2-0.5, 0.2-0.6, 0.2-0.7, 0.2-0.8, 0.2-0.9, 0.3-0.4, 0.3-0.5, 0.3-0.6, 0.3-0.7, 0.3-0.8, 0.3-0.9, 0.4-0.5, 0.4-0.6, 0.4-0.7, 0.4-0.8, 0.4-0.9, 0.5-0.6, 0.5-0.7, 0.5-0.8, 0.5-0.9, 0.6-0.7, 0.6-0.8, 0.6-0.9, 0.7-0.8, 0.7-0.9 or 0.8-0.9.

[0085] The SRE of the effector module may be selected from, but is not limited to, a peptide, peptide complex, peptide-protein complex, protein, fusion protein, protein complex, protein-protein complex. The SRE may comprise one or more regions derived from any natural or mutated protein, or antibody. In this aspect, the SRE is an element, when responding to a stimulus, can tune intracellular localization, intramolecular activation, and/or degradation of payloads.

[0086] In some embodiments, effector modules of the present disclosure may comprise additional features that facilitate the expression and regulation of the effector module, such as one or more signal sequences (SSs), one or more cleavage and/or processing sites, one or more targeting and/or penetrating peptides, one or more tags, and/or one or more linkers. Additionally, effector modules of the present disclosure may further comprise other regulatory moieties such as inducible promoters, enhancer sequences, microRNA sites, and/or microRNA targeting sites. Each aspect or tuned modality may bring to the effector module or biocircuit a differentially tuned feature. For example, an SRE may represent a destabilizing domain, while mutations in the protein payload may alter its cleavage sites or dimerization properties or half-life and the inclusion of one or more microRNA or microRNA binding site may impart cellular detargeting or trafficking features. Consequently, the present disclosure embraces biocircuits which are multifactorial in their tenability. Such biocircuits may be engineered to contain one, two, three, four or more tuned features.

[0087] As shown in FIG. 2, representative effector module embodiments comprising one payload, i.e. one immunotherapeutic agent are illustrated. Each components of the effector module may be located or positioned in various arrangements without (A to F) or with (0 to Z, and AA to DD) a cleavage site. An optional linker may be inserted between each component of the effector module.

[0088] FIGS. 3 to 6 illustrate representative effector module embodiments comprising two payloads, i.e. two immunotherapeutic agents. In some aspects, more than two immunotherapeutic agents (payloads) may be included in the effector module under the regulation of the same SRE (e.g., the same DD). The two or more agents may be either directly linked to each other or separated (FIG. 3). The SRE may be positioned at the N-terminus of the construct, or the C-terminus of the construct, or in the internal location.

[0089] In some aspects, the two or more immunotherapeutic agents may be the same type such as two antibodies, or different types such as a CAR construct and a cytokine IL12. Biocircuits and components utilizing such effector molecules are given in FIGS. 7-12 in International Publication No. WO2017/180587, the contents of which are herein incorporated by reference in their entirety.

[0090] FIG. 7 in International Publication No. WO2017/180587, the contents of which are herein incorporated by reference in their entirety, depicts representative configurations of the stimulus and effector module within a biocircuit system. A trans-membrane effector module is activated either by a free stimulus (A) or a membrane bound stimulus (B) which binds to SRE. The response to the stimulus causes the cleavage of the intracellular signal/payload, which activates down-stream effector/payload.

[0091] FIG. 8 in International Publication No. WO2017/180587, the contents of which are herein incorporated by reference in their entirety, depicts a dual stimulus-dual presenter biocircuit system, where two bound stimuli (A and B) from two different presenters (e.g., different cells) bind to two different effector modules in a single receiver (e.g., another single cell) simultaneously and create a dual-signal to downstream payloads.

[0092] FIG. 9 in International Publication No. WO2017/180587, the contents of which are herein incorporated by reference in their entirety, depicts a dual stimulus-single presenter biocircuit system, where two bound stimuli (A and B) from the same presenter (e.g., a single cell) bind to two different effector modules in another single cell simultaneously and create a dual-signal.

[0093] FIG. 10 in International Publication No. WO2017/180587, the contents of which are herein incorporated by reference in their entirety, depicts a single-stimulus-bridged receiver biocircuit system. In this configuration, a bound stimulus (A) binds to an effector module in the bridge cell and creates a signal to activate a payload which is a stimulus (B) for another effector module in the final receiver (e.g., another cell).

[0094] FIG. 11 in International Publication No. WO2017/180587, the contents of which are herein incorporated by reference in their entirety depicts a single stimulus-single receiver biocircuit system, wherein the single receiver contains the two effector modules which are sequentially activated by a single stimulus.

[0095] FIG. 12 in International Publication No. WO2017/180587, the contents of which are herein incorporated by reference in their entirety, depicts a biocircuit system which requires a dual activation. In this embodiment, one stimulus must bind the transmembrane effector module first to prime the receiver cell being activated by the other stimulus. The receiver only activates when it senses both stimuli (B).

[0096] FIG. 13 in International Publication No. WO2017/180587, the contents of which are herein incorporated by reference in their entirety, depicts a standard effector module of a chimeric antigen receptor (CAR) system which comprises an antigen binding domain as an SRE, and signaling domain(s) as payload.

[0097] FIG. 14 in International Publication No. WO2017/180587, the contents of which are herein incorporated by reference in their entirety, depicts the structure design of a regulatable CAR system, where the trans-membrane effector modules comprise antigen binding domains sensing an antigen and a first switch domain and the intracellular module comprises a second switch domain and signaling domains A stimulus (e.g., a dimerization small molecule) can dimerize the first and second switch domains and assemble an activated CAR system.

[0098] FIG. 15 in International Publication No. WO2017/180587, the contents of which are herein incorporated by reference in their entirety, shows schematic representation of CAR systems having one (A) or two (B and C) SREs incorporated into the effector module.

[0099] FIG. 16 in International Publication No. WO2017/180587, the contents of which are herein incorporated by reference in their entirety, depicts a split CAR design to control T cell activation by a dual stimulus (e.g., an antigen and small molecule). (A) shows normal T cell activation which entails a dual activation of TCR and co-stimulatory receptor. The regular CAR design (B) combines the antigen recognition domain with TCR signaling motif and co-stimulatory motif in a single molecule. The split CAR system separates the components of the regular CAR into two separate effector modules which can be reassembled when a heterodimerizing small molecule (stimulus) is present.

[0100] FIG. 17 in International Publication No. WO2017/180587, the contents of which are herein incorporated by reference in their entirety, depicts the positive and negative regulation of CAR engineered T cell activation. The absence or presence of a second stimulus can negatively (A) or positively (B) control T cell activation.

[0101] FIG. 18 in International Publication No. WO2017/180587, the contents of which are herein incorporated by reference in their entirety, shows schematic representation of gated activation of CAR engineered T cells. If a normal cell that has no stimulus (e.g., an antigen) (A) or an antigen that cannot bind to the trans-membrane effector module (B), or only an antigen that activates the trans-membrane effector module and primes the receiver T cell to express the second effector (FIG. 18C), the receiver T cell remains inactive. When both stimuli (e.g. two antigens) that bind the trans-membrane effector module and the primed effector, are present on the presenter cell (e.g. a cancer cell), the T cell is activated (D).

[0102] As used herein a “payload” or “target payload” is defined as any protein or nucleic acid whose function is to be altered. Payloads may include any coding or non-coding gene or any protein or fragment thereof, or fusion constructs, or antibodies.

[0103] Payloads are often associated with one or more SREs (e.g., DDs) and may be encoded alone or in combination with one or more DD in a polynucleotide of the disclosure. Payloads themselves may be altered (at the protein or nucleic acid level) thereby providing for an added layer of tenability of the effector module. For example, payloads may be engineered or designed to contain mutations, single or multiple, which affect the stability of the payload or its susceptibility to degradation, cleavage or trafficking. The combination of a DD which can have a spectrum of responses to a stimulus with a payload which is altered to exhibit a variety of responses or gradations of output signals, e.g., expression levels, produce biocircuits which are superior to those in the art. For example, mutations or substitutional designs such as those created for IL12 in WO2016048903 (specifically in Example 1 therein), the contents of which are incorporated herein by reference in their entirety, may be used in any protein payload in conjunction with a DD of the present disclosure to create dual tunable biocircuits. The ability to independently tune both the DD and the payload greatly increases the scope of uses of the effector modules of the present disclosure.

[0104] Effector modules may be designed to include one or more payloads, one or more DDs, one or more cleavage sites, one or more signal sequences, one or more tags, one or more targeting peptides, and one or more additional features including the presence or absence of one or more linkers. Representative effector module embodiments of the disclosure are illustrated in FIGS. 2-6. In some aspects, the DD can be positioned at the N-terminal end, or the C-terminal end, or internal of the effector module construct. Different components of an effector module such as DDs, payloads and additional features are organized linearly in one construct, or are separately constructed in separate constructs.

[0105] Additionally, effector modules of the present disclosure may further comprise other regulatory moieties such as inducible promoters, enhancer sequences, microRNA sites, and/or microRNA targeting sites that provide flexibility on controlling the activity of the payload. The payloads of the present disclosure may be any natural proteins and their variants, or fusion polypeptides, antibodies and variants thereof, transgenes and therapeutic agents.

[0106] The stimulus of the biocircuit system may be, but is not limited to, a ligand, a small molecule, an environmental signal (e.g., pH, temperature, light and subcellular location), a peptide or a metabolite. In one aspect of the present disclosure, the stimulus is a hPDE5 DD binding ligand including Sildenafil and Vardenafil.

[0107] Polypeptides of DDs, biocircuit systems and effector modules comprising such DDs and payload constructs, other components, polynucleotides encoding these polypeptides and variants thereof, vectors comprising these polynucleotides, are provided in the present disclosure. The vector may be a plasmid or a viral vector including but not limited to a lentiviral vector, a retroviral vector, a recombinant AAV vector and oncolytic viral vector.

[0108] The position of the payload with respect to the DD, within the SRE may be varied to achieve optimal DD regulation. In some embodiments, the payload may be fused to the N terminus of the DD. In another embodiment, the payload may be fused to the C terminus of the DDs. An optional start codon nucleotide sequence encoding for methionine may be added to the DD and/or payload.

[0109] In some embodiments, more than one biocircuit system may be used in combination to control various protein functions in the same cell or organism, each of which uses different DD and ligand pair and can be regulated separately.

[0110] In some embodiments, biocircuits of the disclosure may be modified to reduce their immunogenicity. Immunogenicity is the result of a complex series of responses to a substance that is perceived as foreign and may include the production of neutralizing and non-neutralizing antibodies, formation of immune complexes, complement activation, mast cell activation, inflammation, hypersensitivity responses, and anaphylaxis. Several factors can contribute to protein immunogenicity, including, but not limited to protein sequence, route and frequency of administration and patient population. In a preferred embodiment, protein engineering may be used to reduce the immunogenicity of the compositions of the disclosure. In some embodiments, modifications to reduce immunogenicity may include those that reduce binding of the processed peptides derived from the sequence of the compositions of the disclosure, to the MK proteins. For example, amino acid may be modified such that virtually none or a minimal of number of immune epitopes predicted to bind to any prevalent MK alleles are present in the compositions of the disclosure. Several methods to identify MK binding epitopes of known protein sequences are known in the art and may be used to score epitopes in the compositions of the present disclosure. Such methods are disclosed in US Patent Publication No. US20020119492, US20040230380, and US 20060148009; the contents of each of which are incorporated by reference in their entirety.

[0111] Epitope identification and subsequent sequence modification may be applied to reduce immunogenicity. The identification of immunogenic epitopes may be achieved either physically or computationally. Physical methods of epitope identification may include, for example, mass spectrometry and tissue culture/cellular techniques. Computational approaches that utilize information related to antigen processing, loading and display, structural and/or proteomic data for identifying peptides that may result from antigen processing, and that are likely to have good binding characteristics in the groove of the MHC may also be utilized. One or more mutations may be introduced into the biocircuits of the disclosure to render the identified epitope less or non-immunogenic, while maintaining functionality.

[0112] In some embodiments, protein modifications engineered into the structure of the compositions of the disclosure to interfere with antigen processing and peptide loading such as glycosylation and PEGylation, may also be useful in the present disclosure. Compositions of the disclosure may also be engineered to include non-classical amino acid sidechains. Any of the methods discussed in International Patent Publication No. WO2005051975 for reducing immunogenicity may be useful in the present disclosure (the contents of which are incorporated by reference in their entirety).

[0113] In one embodiment, patients may also be stratified according to the immunogenic peptides presented by their immune cells and may be utilized as a parameter to determine patient cohorts that may therapeutically benefit from the compositions of the disclosure.

[0114] In some embodiments, reduced immunogenicity may be achieved by limiting immunoproteasome processing. The proteasome is an important cellular protease that is found in two forms: the constitutive proteasome, which is expressed in all cell types and which contains catalytic subunits and the immunoproteasome that is expressed in cells of the hematopoietic lineage, and which contains different active subunits termed low molecular weight proteins (LMP) namely LMP-2, LMP-7 and LMP-10. Immunoproteasomes exhibit altered peptidase activities and cleavage site preferences that result in more efficient liberation of many MHC class I epitopes. A well described function of the immunoproteasome is to generate peptides with hydrophobic C terminus that can be processed to fit in the groove of MHC class I molecules. Deol P et al. have shown that immunoproteasomes may lead to a frequent cleavage of specific peptide bonds and thereby to a faster appearance of a certain peptide on the surface of the antigen presenting cells; and enhanced peptide quantities (Deol P et al. (2007) J Immunol 178 (12) 7557-7562; the contents of which are incorporated herein reference in its entirety). This study indicates that reduced immunoproteasome processing may be accompanied by reduced immunogenicity. In some embodiments, immunogenicity of the compositions of the disclosure may be reduced by modifying the sequence encoding the compositions of the disclosure to prevent immunoproteasome processing. Biocircuits of the present disclosure may also be combined with immunoproteasome-selective inhibitors to achieve the same effects. Examples of inhibitors useful in the present disclosure include UK-101 (Bli selective compound), IPSI-001, ONX 0914 (PR-957), and PR-924 (IPSI).

[0115] In some embodiments, effector modules of the present disclosure may include one or more degrons to tune expression. As used herein, a “degron” refers to a minimal sequence within a protein that is sufficient for the recognition and the degradation by the proteolytic system. An important property of degrons is that they are transferrable, that is, appending a degron to a sequence confers degradation upon the sequence. In some embodiments, the degron may be appended to the destabilizing domains, the payload or both. Incorporation of the degron within the effector module of the disclosure, confers additional protein instability to the effector module and may be used to reduce basal expression. In some embodiments, the degron may be an N-degron, a phospho degron, a heat inducible degron, a photosensitive degron, an oxygen dependent degron. As a non-limiting example, the degron may be an Ornithine decarboxylase degron as described by Takeuchi et al. (Takeuchi J et al. (2008). Biochem J. 2008 Mar. 1; 410(2):401-7; the contents of which are incorporated by reference in their entirety). Other examples of degrons useful in the present disclosure include degrons described in International patent publication Nos. WO2017004022, WO2016210343, and WO2011062962; the contents of each of which are incorporated by reference in their entirety.

[0116] In some embodiments, the effector modules of the present disclosure may include degrons at their C termini. The degrons may comprise -GU, -RG, -KG, -QG, -WG, -PG, and -AG as the penultimate and the ultimate amino acids of the SREs. Furthermore, certain −2 amino acids (D, E, V, I and L) may be more enriched in the C terminus of the of the effector modules. Other degrons include, but are not limited, to RxxG motif, wherein x is any amino acid, C-terminal twin glutamic acid (EE) motif, and motifs that comprise an arginine at the −3 positions. Degrons may also be selected from the R-3 motif, G-end, Rat −3, A-end, A at −2, Vat −2 positions. Any of the degrons described in Koren et al., 2018, Cell 173, 1-14, may be useful in the present disclosure (the contents of which are incorporated by reference in their entirety). In some aspects, the expression of the effector module may be tuned by altering its overall amino acid composition. In some aspects, the amino acid composition of the effector module may be tuned to reduce basal expression. In some embodiments, basal expression may be tuned by increasing the number of bulky aromatic residues such as tryptophan (W), phenylalanine (F), and tyrosine (Y) in the effector module. Such bulky amino acids are known to reduce protein stability. In some embodiments, the amino acid composition of the SREs may be enriched with acidic residues such as, but not limited to, aspartic acid (D) and glutamic acid (E), and positively charged lysine (K), if an increase in the basal expression of the SRE is desired.

[0117] In some embodiments, the endoplasmic reticulum associated degradation (ERAD) pathway may be used to optimize degradation of the payloads described herein e.g. secreted and membrane cargos. In one embodiment, the effector modules of the disclosure may be directed to the ER E3 ligases by using adaptor proteins or protein domains The endoplasmic reticulum is endowed with a specialized machinery to ensure proteins deployed to the distal secretory pathway are correctly folded and assembled into native oligomeric complexes. Proteins failing to meet this conformational standard are degraded by the ERAD pathway, a process through which folding defective proteins are selected and ultimately degraded by the ubiquitin proteasome system. ERAD proceeds through four main steps involving substrate selection, dislocation across the ER membrane, covalent conjugation with polyubiquitin, and proteasome degradation. Any of these steps may be modulated to optimize the degradation of the payloads and the effector modules described herein. Protein adaptors within the ER membrane, link substrate recognition to the ERAD machinery (herein referred to as the “dislocon”), which causes the dislocation of the proteins from the ER. Non-limiting examples of protein adaptors that may be used to optimize ERAD pathway degradation include, but are not limited to SEL1L (an adaptor that links glycan recognition to the dislocon), Erlins (intermembrane substrate adaptors), Insigs (client specific adaptors), F-Box proteins (act as adaptors for dislocated glycoproteins in the cytoplasm) and viral-encoded adaptors.

[0118] According to the present disclosure, novel destabilizing domains derived from human hPDE5 (cGMP-specific phosphodiesterase type 5) protein are provided. The destabilizing mutants are derived from the human PDE5 protein, comprising the amino acid sequence of SEQ ID NO: 1 (encoded by the nucleic acid sequence of SEQ ID NO: 2). The hPDE5 DD mutant may also comprise more than one mutation in the catalytic domain of human PDE5 of SEQ ID NO: 3 (encoded by nucleic acid sequence of SEQ ID NO: 339), e.g., two, three, four, five or more mutations. These hPDE5 DDs can bind to Sildenafil and/or Vardenafil and be stabilized.

### Destabilizing Domains (DDs)

[0119] As used herein, the term “destabilizing domains (DDs)” refers to protein domains that are unstable and degraded in the absence of ligand, but whose stability is rescued by binding to a high affinity cell-permeable ligand. Destabilizing domains (DDs) can be appended to a target protein of interest (POI) and can convey its destabilizing property to the protein of interest, causing protein degradation. The presence, absence or an amount of a small molecule ligand that binds to or interacts with the DD, can, upon such binding or interaction modulate the stability of the payload(s) and consequently the function of the payload. A protein domain with destabilizing property (e.g. a DD) is used in conjunction with a cell-permeable ligand to regulate any protein of interest when it is fused with the destabilizing domain. DDs render the attached protein of interest unstable in the absence of a DD-binding ligand such that the protein is rapidly degraded by the ubiquitin-proteasome system of the cell. However, when a specific small molecule ligand binds its intended DD as a ligand binding partner, the instability is reversed and protein function is restored. The conditional nature of DD stability allows a rapid and non-perturbing switch from stable protein to unstable substrate for degradation. Moreover, its dependency on the concentration of its ligand further provides tunable control of degradation rates. Depending on the degree of binding and/or interaction the altered function of the payload may vary, hence providing a “tuning” of the payload function.

[0120] Due to its reversibility, specificity and the fast and easy regulation on protein level, the post-transcriptional tuning system provides a useful system for gene regulation. Furthermore, the regulation may be dose-dependent, thereby altering the protein-turnover rate to transform a short-lived or no detectable protein into a protein that functions for a precisely controlled period of time (Iwamoto et al., Chem. Biol. 2010, 17: 981-988).

[0121] In some embodiments, the desired characteristics of the DDs may include, but are not limited to, low protein levels in the absence of a ligand of the DD (i.e. low basal stability), large dynamic range, robust and predictable dose-response behavior, and rapid kinetics of degradation. Candidate DDs that bind to a desired ligand but not endogenous molecules may be preferred.

[0122] Candidate destabilizing domain sequence identified from protein domains of known wildtype proteins (as a template) may be mutated to generate libraries of mutants based on the template candidate domain sequence. Mutagenesis strategies used to generate DD libraries may include site-directed mutagenesis e.g. by using structure guided information, or random mutagenesis e.g. using error-prone PCR, or a combination of both. In some embodiments, destabilizing domains identified using random mutagenesis may be used to identify structural properties of the candidate DDs that may be required for destabilization, which may then be used to further generate libraries of mutations using site directed mutagenesis.

[0123] In some embodiments, novel DDs may be identified by mutating one or more amino acids in the candidate destabilizing domain to an amino acid that is vicinal to the mutation site. As used herein a vicinal amino acid refers to an amino acid that is located 1, 2, 3, 4, 5 or more amino acids upstream or downstream of the mutation site in the linear sequence and/or the crystal structure of the candidate destabilizing domain. In some embodiments, the vicinal amino acid may be a conserved amino acid (with similar physicochemical properties as the amino acid at the mutation site), a semi-conserved amino acid (e.g. negatively to positively charge amino acid) or a non-conserved amino acid (with different physicochemical properties than the amino acid at the mutation site).

[0124] In some embodiments, DD mutant libraries may be screened for mutations with altered, preferably higher binding affinity to the ligand, as compared to the wild type protein. DD libraries may also be screened using two or more ligands and DD mutations that are stabilized by some ligands but not others may be preferentially selected. DD mutations that bind preferentially to the ligand compared to a naturally occurring protein may also be selected. Such methods may be used to optimize ligand selection and ligand binding affinity of the DD. Additionally, such approaches can be used to minimize deleterious effects caused by off-target ligand binding.

[0125] In some embodiments, suitable DDs may be identified by screening mutant libraries using barcodes. Such methods may be used to detect, identify and quantify individual mutant clones within the heterogeneous mutant library. Each DD mutant within the library may have distinct barcode sequences (with respect to each other). In other instances, the polynucleotides can also have different barcode sequences with respect to 2, 3, 4, 5, 6, 7, 8, 9, 10 or more nucleic acid bases. Each DD mutant within the library may also comprise a plurality of barcode sequences. When used in plurality barcodes may be used such that each barcode is unique to any other barcode. Alternatively, each barcode used may not be unique, but the combination of barcodes used may create a unique sequence that can be individually tracked. The barcode sequence may be placed upstream of the SRE, downstream of the SRE, or in some instances may be placed within the SRE. DD mutants may be identified by barcodes using sequencing approaches such as Sanger sequencing, and next generation sequencing, but also by polymerase chain reaction and quantitative polymerase chain reaction. In some embodiments, polymerase chain reaction primers that amplify a different size product for each barcode may be used to identify each barcode on an agarose gel. In other instances, each barcode may have a unique quantitative polymerase chain reaction probe sequence that enables targeted amplification of each barcode.

[0126] Inventors of the present disclosure investigated several human proteins and identified novel human DDs which can confer its instability features to the fused payload and facilitate the rapid degradation of the fusion polypeptide in the absence of its ligand but stabilize the fused payload in response to the binding to its ligand. Specifically, the new DDs are derived from human PDE5 protein.

### Human PDE5 Mutants

[0127] In some embodiments, DDs of the disclosure may be derived from human cGMP-specific phosphodiesterase type 5 (PDE5); gene name: PDE5A (herein referred to as “hPDE5”). hPDE5 (phosphodiesterase 5) is a member of the 3,5′-cyclic nucleotide phosphodiesterase family which degrades/hydrolyzes cyclic GMP (cGMP) into its inactive form, GMP, and regulates cGMP signaling. The cGMP/PDE 5 signaling contributes to the development of hypertension in the vasculature, the central nervous system, and the kidney. hPDE5 is known to bind to small molecule such as Sildenafil, Vardenafil, Tadalafil, Avanafil, Lodenafil, Mirodenafil, Udenafil, Benzamidenafil, Dasantafil, Beminafil, SLx-2101, LAS 34179, UK-343,664, UK-357903, UK-371800, and BMS-341400. Sildenafil, Vardenafil, Avanafil, and Tadalafil are hPDE5 inhibitors clinically approved for the treatment of erectile dysfunction. In particular, the binding of these small molecules to hPDE5 occurs within the catalytic domain. In some embodiments, the DDs of the disclosure may be derived from the catalytic domain of hPDE5 (SEQ ID NO: 3) includes residues 535 to 860 of hPDE5 (SEQ ID NO: 1; GenBank Access NO. 076074.2) which may be stabilized by ligands such as small molecule inhibitors of hPDE5 e.g. Sildenafil and Vardenafil. As used herein the term “PDE5 WT” or “hPDE5 WT”, refers to the human wildtype PDE5 protein sequence, which is defined as SEQ ID NO: 1, with the GenBank Access NO. 076074.2. In some embodiments, DDs of the present disclosure may be identified by utilizing a cocktail of hPDE5 inhibitors. In other instances, the suitable DDs may be identified by screening first with one hPDE5 inhibitor and subsequently screening with a second hPDE5 inhibitor.

[0128] In one embodiment, the hPDE5 derived DD may comprise the amino acid sequence of UniProt ID: 076074 (SEQ ID NO: 1) or a portion or a fragment thereof. In another embodiment, the hPDE5 derived DD may comprise the catalytic domain of UniProt ID: 076074, spanning from amino acid position 535 to position 860 (SEQ ID NO: 3); encoded by SEQ ID NO: 339. In addition to the catalytic domain, hPDE5 derived DDs may also comprise one or more GAF domains and/or the C terminal portion that extends beyond the catalytic domain In some embodiment, the hPDE5 derived DD may be identified by testing constructs generated by truncating the 5′ and/or the 3′ end of hPDE5. In one embodiment, the hPDE5 derived DD may be truncated and the smallest hPDE5 based DD may be identified. In another embodiment, the hPDE5 derived DD may include amino acids from position 535 to 836 of SEQ ID NO: 1 which removes the C terminal helix. In another embodiment, the hPDE5 derived DD may consist of amino acids from position 567 to 860 of UniProt ID: 076074 (SEQ ID NO: 1), or position 590 to 860 of UniProt ID: 076074 (SEQ ID NO: 1), which removes a portion of the N terminal domain. In another embodiment, the hPDE5 derived DD may consist of amino acids from position 590 to 836 of UniProt ID: 076074 (SEQ ID NO: 1), which removes a portion of the N terminal domain and the C terminal helix. The DD may include amino acids from position 535 to position 875 of UniProt ID: 076074 (SEQ ID NO: 1). In another embodiment, the hPDE5 derived DD may consist of amino acids from position 466 to 875 of UniProt ID: 076074 (SEQ ID NO: 1) or position 420 to 875 of UniProt ID: 076074 (SEQ ID NO: 1).

[0129] According to the present disclosure, several hPDE5 destabilizing mutations were discovered by site directed mutagenesis of the catalytic domain of wildtype human PDE5 using site directed mutagenesis. The destabilization of the mutants in the absence of its binding ligands is tested. Binding to hPDE5 ligands, Sildenafil, Tadalafil and Vardenafil to human PDE5 was tested and ligand dependent stabilization was characterized. Based on the structural analysis of hPDE5 bound to Sildenafil, several residues were selected for mutagenesis. In some embodiments one or more of the residues described herein may be mutagenized to obtain hPDE5 derived DDs. The tryptophan at position 853 of SEQ ID NO:1 may be mutated to phenylalanine to induce hydrophobic packing near binding site, while maintaining pi bond with the nearby tryptophan at position 772. The isoleucine at position 821 may be mutated to valine or alanine, which results in hydrophobic packing near binding site. The tyrosine at position 829 may be mutated to isoleucine, valine or alanine, which results in hydrophobic packing near binding site. The aspartate at position 656 may be mutated to asparagine or leucine to break up the charge and the salt bridge on loop/helix. The tyrosine at position 728 may be mutated to phenylalanine or leucine to break the salt bridges at position 732 and to affect hydrophobic packing. Alternatively, the arginine at position 732 may be mutated to lysine or leucine to generate the inverse of the effects of mutating tyrosine at position 728. The methionine at position 625 may be mutated to leucine or isoleucine to alter packing in away from the binding site. In some embodiments, destabilizing mutations that do not affect ligand binding may be preferentially selected.

[0130] In some embodiments, new destabilizing domains of the present disclosure are derived from the catalytic domain of human PDE5 protein comprising the amino acid sequence of SEQ ID NO: 3. In some aspects, the destabilizing mutant domain may comprise one, two, three, four, five or more mutations such as but not limited to M625I, D656L, Y728L, R732L, F736A, F787A, I821A, Y829A and W853F. The DDs of the disclosure may further include additional mutations e.g. E535D, E5360, Q541R, K555R, S560G, F559L, F561L, F564L, F564S, S766F, V585A, N587S, K591E, I599V, K604E, K608E, N609H, K630R, K633E, N636S, I648V, N661S, S663P, L675P, Y676D, Y676N, C677R, H678R, D687A, T711A, T712S, D724N, L738H, N742S, F744L, L746S, F755L, A762S, D764V, D764N, D764G, K795E, L797F, I799T, L804P, T802P, S815C, M816A, M816T, I824T, C839S, F840S, and K852E. In some embodiments, any of the mutation sites disclosed herein may be mutated to any of the known amino acids such as Histidine, Alanine, Isoleucine, Arginine, Leucine, Aspartic acid, Lysine, Cysteine, Methionine, Glutamic acid, Phenylalanine, Glutamine, Threonine, Glycine, Tryptophan, Proline, Valine, Serine, Tyrosine, Asparagine, Selenocysteine, Pyrrolysine. In some embodiments, DDs of the present disclosure may be stabilized by ligands such as Sildenafil, Vardenafil, Tadalafil, Avanafil, Lodenafil, Mirodenafil, Udenafil, Benzamidenafil, Dasantafil, and Beminafil.

[0131] The amino acid sequences of the destabilizing domains encompassed in the disclosure have at least about 40%, 50 or 60% identity, further at least about 70% identity, preferably at least about 75% or 80% identity, more preferably at least about 85%, 86%, 87%, 88%, 89% or 90% identity, and further preferably at least about 91%, 92%, 93%, 94%, 95%, 96%, 97%, 98% or 99% identity to the amino acid sequence set forth therein. Percent identity may be determined, for example, by comparing sequence information using the advanced BLAST computer program, including version Magic-BLAST 1.2.0, available from the National Institutes of Health. The BLAST program is based on the alignment method discussed in Karl and Altschul (1990) Proc. Natl. Acad. Sci USA, 87:2264-68 (the contents of which are incorporated by reference in their entirety).

[0132] Several hPDE5 destabilizing mutants were identified by structure guided mutagenesis and are provided in Table 1. The position of the mutated amino acids listed in Table 1 is relative to the full length hPDE5 of SEQ ID NO:1. The domains described in Table 1 include the catalytic domain of hPDE5 (e.g. 535-860 of SEQ ID NO:1). In some embodiments, the hPDE5 DDs described in Table 1 may include a methionine at the N terminal of the catalytic domain of hPDE5, i.e. amino acid 535-860 of PDE5 WT. In Table 1, the mutated amino acids are in bold and underlined.

TABLE 1
hPDE5 DDs

| | | AA | NA |
|---|---|---|---|
| hPDE5 mutant | | SEQ | SEQ |
| description | Amino Acid Sequence | ID NO | ID NO |
| hPDE5 (Amino | EETRELQSLAAAVVPSAQTLKITDFSFSDFELSDLETALCTIRMFTDLNLVQNFQM | 5 | 350 |
| acid 535-860 | KHEVLCRWILSVKKNYRKNVAYHNWRHAFNTAQCMFAALKAGKIQNKLTDLEI | | |
| of WT, W853F) | LALLIAALSHDLDHRGVNNSYIQRSEHPLAQLYCHSIMEHHHFDQCLMILNSPGN | | |
| | QILSGLSIEEYKTTLKIIKQAILATDLALYIKRRGEFFELIRKNQFNLEDPHQKELFL | | |
| | AMLMTACDLSAITKPWPIQQRIAELVATEFFDQGDRERKELNIEPTDLMNREKKN | | |
| | KIPSMQVGFIDAICLQLYEALTHVSEDCFPLLDGCRKNRQKFQALAEQQ | | |
| hPDE5 (Amino | EETRELQSLAAAVVPSAQTLKITDFSFSDFELSDLETALCTIRMFTDLNLVQNFQM | 6 | 351 |
| acid 535-860 | KHEVLCRWILSVKKNYRKNVAYHNWRHAFNTAQCMFAALKAGKIQNKLTDLEI | | |
| of WT, I821A) | LALLIAALSHDLDHRGVNNSYIQRSEHPLAQLYCHSIMEHHHFDQCLMILNSPGN | | |
| | QILSGLSIEEYKTTLKIIKQAILATDLALYIKRRGEFFELIRKNQFNLEDPHQKELFL | | |
| | AMLMTACDLSAITKPWPIQQRIAELVATEFFDQGDRERKELNIEPTDLMNREKKN | | |
| | KIPSMQVGFADAICLQLYEALTHVSEDCFPLLDGCRKNRQKWQALAEQQ | | |
| hPDE5 (Amino | EETRELQSLAAAVVPSAQTLKITDFSFSDFELSDLETALCTIRMFTDLNLVQNFQM | 7 | 352 |
| acid 535-860 | KHEVLCRWILSVKKNYRKNVAYHNWRHAFNTAQCMFAALKAGKIQNKLTDLEI | | |
| of WT, Y829A) | LALLIAALSHDLDHRGVNNSYIQRSEHPLAQLYCHSIMEHHHFDQCLMILNSPGN | | |
| | QILSGLSIEEYKTTLKIIKQAILATDLALYIKRRGEFFELIRKNQFNLEDPHQKELFL | | |
| | AMLMTACDLSAITKPWPIQQRIAELVATEFFDQGDRERKELNIEPTDLMNREKKN | | |
| | KIPSMQVGFIDAICLQLAEALTHVSEDCFPLLDGCRKNRQKWQALAEQQ | | |
| hPDE5 (Amino | EETRELQSLAAAVVPSAQTLKITDFSFSDFELSDLETALCTIRMFTDLNLVQNFQM | 8 | 353 |
| acid 535-860 | KHEVLCRWILSVKKNYRKNVAYHNWRHAFNTAQCMFAALKAGKIQNKLTDLEI | | |
| of WT, F787A) | LALLIAALSHDLDHRGVNNSYIQRSEHPLAQLYCHSIMEHHHFDQCLMILNSPGN | | |
| | QILSGLSIEEYKTTLKIIKQAILATDLALYIKRRGEFFELIRKNQFNLEDPHQKELFL | | |
| | AMLMTACDLSAITKPWPIQQRIAELVATEFADQGDRERKELNIEPTDLMNREKKN | | |
| | KIPSMQVGFIDAICLQLYEALTHVSEDCFPLLDGCRKNRQKWQALAEQQ | | |
| hPDE5 (Amino | EETRELQSLAAAVVPSAQTLKITDFSFSDFELSDLETALCTIRMFTDLNLVQNFQM | 9 | 354; |
| acid 535-860 | KHEVLCRWILSVKKNYRKNVAYHNWRHAFNTAQCMFAALKAGKIQNKLTDLEI | | 355 |
| of WT, F736A) | LALLIAALSHDLDHRGVNNSYIQRSEHPLAQLYCHSIMEHHHFDQCLMILNSPGN | | |
| | QILSGLSIEEYKTTLKIIKQAILATDLALYIKRRGEFAELIRKNQFNLEDPHQKELFL | | |
| | AMLMTACDLSAITKPWPIQQRIAELVATEFFDQGDRERKELNIEPTDLMNREKKN | | |
| | KIPSMQVGFIDAICLQLYEALTHVSEDCFPLLDGCRKNRQKWQALAEQQ | | |
| hPDE5 (Amino | EETRELQSLAAAVVPSAQTLKITDFSFSDFELSDLETALCTIRMFTDLNLVQNFQM | 10 | 356 |
| acid 535-860 | KHEVLCRWILSVKKNYRKNVAYHNWRHAFNTAQCMFAALKAGKIQNKLTDLEI | | |
| of WT, D656L) | LALLIAALSHDLLHRGVNNSYIQRSEHPLAQLYCHSIMEHHHFDQCLMILNSPGN | | |
| | QILSGLSIEEYKTTLKIIKQAILATDLALYIKRRGEFFELIRKNQFNLEDPHQKELFL | | |
| | AMLMTACDLSAITKPWPIQQRIAELVATEFFDQGDRERKELNIEPTDLMNREKKN | | |
| | KIPSMQVGFIDAICLQLYEALTHVSEDCFPLLDGCRKNRQKWQALAEQQ | | |
| hPDE5 (Amino | EETRELQSLAAAVVPSAQTLKITDFSFSDFELSDLETALCTIRMFTDLNLVQNFQM | 11 | 357 |
| acid 535-860 | KHEVLCRWILSVKKNYRKNVAYHNWRHAFNTAQCMFAALKAGKIQNKLTDLEI | | |
| of WT, Y728L) | LALLIAALSHDLDHRGVNNSYIQRSEHPLAQLYCHSIMEHHHFDQCLMILNSPGN | | |
| | QILSGLSIEEYKTTLKIIKQAILATDLALLIKRRGEFFELIRKNQFNLEDPHQKELFL | | |
| | AMLMTACDLSAITKPWPIQQRIAELVATEFFDQGDRERKELNIEPTDLMNREKKN | | |
| | KIPSMQVGFIDAICLQLYEALTHVSEDCFPLLDGCRKNRQKWQALAEQQ | | |
| hPDE5 (Amino | EETRELQSLAAAVVPSAQTLKITDFSFSDFELSDLETALCTIRMFTDLNLVQNFQM | 12 | 358; |
| acid 535-860 | KHEVLCRWILSVKKNYRKNVAYHNWRHAFNTAQCMFAALKAGKIQNKLTDLEI | | 359 |
| of WT, R732L) | LALLIAALSHDLDHRGVNNSYIQRSEHPLAQLYCHSIMEHHHFDQCLMILNSPGN | | |
| | QILSGLSIEEYKTTLKIIKQAILATDLALYIKRLGEFFELIRKNQFNLEDPHQKELFL | | |
| | AMLMTACDLSAITKPWPIQQRIAELVATEFFDQGDRERKELNIEPTDLMNREKKN | | |
| | KIPSMQVGFIDAICLQLYEALTHVSEDCFPLLDGCRKNRQKWQALAEQQ | | |
| hPDE5 (Amino | EETRELQSLAAAVVPSAQTLKITDFSFSDFELSDLETALCTIRMFTDLNLVQNFQM | 13 | 360 |
| acid 535-860 | KHEVLCRWILSVKKNYRKNVAYHNWRHAFNTAQCIFAALKAGKIQNKLTDLEIL | | |
| of WT, M625I) | ALLIAALSHDLDHRGVNNSYIQRSEHPLAQLYCHSIMEHHHFDQCLMILNSPGNQI | | |
| | LSGLSIEEYKTTLKIIKQAILATDLALYIKRRGEFFELIRKNQFNLEDPHQKELFLAM | | |
| | LMTACDLSAITKPWPIQQRIAELVATEFFDQGDRERKELNIEPTDLMNREKKNKIP | | |
| | SMQVGFIDAICLQLYEALTHVSEDCFPLLDGCRKNRQKWQALAEQQ | | |
| Methionine; | MEETRELQSLAAAVVPSAQTLKITDFSFSDFELSDLETALCTIRMFTDLNLVQNFQ | 340 | 14 |
| hPDE5 (Amino | MKHEVLCRWILSVKKNYRKNVAYHNWRHAFNTAQCMFAALKAGKIQNKLTDL | | |
| acid 535-860 | EILALLIAALSHDLDHRGVNNSYIQRSEHPLAQLYCHSIMEHHHFDQCLMILNSPG | | |
| of WT; W853F) | NQILSGLSIEEYKTTLKIIKQAILATDLALYIKRRGEFFELIRKNQFNLEDPHQKELF | | |
| | LAMLMTACDLSAITKPWPIQQRIAELVATEFFDQGDRERKELNIEPTDLMNREKK | | |
| | NKIPSMQVGFIDAICLQLYEALTHVSEDCFPLLDGCRKNRQKFQALAEQQ | | |
| Methionine; | MEETRELQSLAAAVVPSAQTLKITDFSFSDFELSDLETALCTIRMFTDLNLVQNFQ | 341 | 15 |
| hPDE5 (Amino | MKHEVLCRWILSVKKNYRKNVAYHNWRHAFNTAQCMFAALKAGKIQNKLTDL | | |
| acid 535-860 | EILALLIAALSHDLDHRGVNNSYIQRSEHPLAQLYCHSIMEHHHFDQCLMILNSPG | | |
| of WT, I821A) | NQILSGLSIEEYKTTLKIIKQAILATDLALYIKRRGEFFELIRKNQFNLEDPHQKELF | | |
| | LAMLMTACDLSAITKPWPIQQRIAELVATEFFDQGDRERKELNIEPTDLMNREKK | | |
| | NKIPSMQVGFADAICLQLYEALTHVSEDCFPLLDGCRKNRQKWQALAEQQ | | |
| Methionine; | MEETRELQSLAAAVVPSAQTLKITDFSFSDFELSDLETALCTIRMFTDLNLVQNFQ | 342 | 16 |
| hPDE5 (Amino | MKHEVLCRWILSVKKNYRKNVAYHNWRHAFNTAQCMFAALKAGKIQNKLTDL | | |
| acid 535-860 | EILALLIAALSHDLDHRGVNNSYIQRSEHPLAQLYCHSIMEHHHFDQCLMILNSPG | | |
| of WT, Y829A) | NQILSGLSIEEYKTTLKIIKQAILATDLALYIKRRGEFFELIRKNQFNLEDPHQKELF | | |
| | LAMLMTACDLSAITKPWPIQQRIAELVATEFFDQGDRERKELNIEPTDLMNREKK | | |
| | NKIPSMQVGFIDAICLQLAEALTHVSEDCFPLLDGCRKNRQKWQALAEQQ | | |
| Methionine; | MEETRELQSLAAAVVPSAQTLKITDFSFSDFELSDLETALCTIRMFTDLNLVQNFQ | 343 | 17 |
| hPDE5 (Amino | MKHEVLCRWILSVKKNYRKNVAYHNWRHAFNTAQCMFAALKAGKIQNKLTDL | | |
| acid 535-860 | EILALLIAALSHDLDHRGVNNSYIQRSEHPLAQLYCHSIMEHHHFDQCLMILNSPG | | |
| of WT, F787A) | NQILSGLSIEEYKTTLKIIKQAILATDLALYIKRRGEFFELIRKNQFNLEDPHQKELF | | |
| | LAMLMTACDLSAITKPWPIQQRIAELVATEFADQGDRERKELNIEPTDLMNREKK | | |
| | NKIPSMQVGFIDAICLQLAEALTHVSEDCFPLLDGCRKNRQKWQALAEQQ | | |
| Methionine; | MEETRELQSLAAAVVPSAQTLKITDFSFSDFELSDLETALCTIRMFTDLNLVQNFQ | 344 | 18 |
| hPDE5 (Amino | MKHEVLCRWILSVKKNYRKNVAYHNWRHAFNTAQCMFAALKAGKIQNKLTDL | | |
| acid 535-860 | EILALLIAALSHDLDHRGVNNSYIQRSEHPLAQLYCHSIMEHHHFDQCLMILNSPG | | |
| of WT, F736A) | NQILSGLSIEEYKTTLKIIKQAILATDLALYIKRRGEFAELIRKNQFNLEDPHQKELF | | |
| | LAMLMTACDLSAITKPWPIQQRIAELVATEFFDQGDRERKELNIEPTDLMNREKK | | |
| | NKIPSMQVGFIDAICLQLYEALTHVSEDCFPLLDGCRKNRQKWQALAEQQ | | |
| Methionine; | MEETRELQSLAAAVVPSAQTLKITDFSFSDFELSDLETALCTIRMFTDLNLVQNFQ | 345 | 19 |
| hPDE5 (Amino | MKHEVLCRWILSVKKNYRKNVAYHNWRHAFNTAQCMFAALKAGKIQNKLTDL | | |
| acid 535-860 | EILALLIAALSHDLLHRGVNNSYIQRSEHPLAQLYCHSIMEHHHFDQCLMILNSPG | | |
| of WT, D656L) | NQILSGLSIEEYKTTLKIIKQAILATDLALYIKRRGEFFELIRKNQFNLEDPHQKELF | | |
| | LAMLMTACDLSAITKPWPIQQRIAELVATEFFDQGDRERKELNIEPTDLMNREKK | | |
| | NKIPSMQVGFIDAICLQLYEALTHVSEDCFPLLDGCRKNRQKWQALAEQQ | | |
| Methionine; | MEETRELQSLAAAVVPSAQTLKITDFSFSDFELSDLETALCTIRMFTDLNLVQNFQ | 346 | 20 |
| hPDE5 (Amino | MKHEVLCRWILSVKKNYRKNVAYHNWRHAFNTAQCMFAALKAGKIQNKLTDL | | |
| acid 535-860 | EILALLIAALSHDLDHRGVNNSYIQRSEHPLAQLYCHSIMEHHHFDQCLMILNSPG | | |
| of WT, Y728L) | NQILSGLSIEEYKTTLKIIKQAILATDLALLIKRRGEFFELIRKNQFNLEDPHQKELF | | |
| | LAMLMTACDLSAITKPWPIQQRIAELVATEFFDQGDRERKELNIEPTDLMNREKK | | |
| | NKIPSMQVGFIDAICLQLYEALTHVSEDCFPLLDGCRKNRQKWQALAEQQ | | |
| Methionine; | MEETRELQSLAAAVVPSAQTLKITDFSFSDFELSDLETALCTIRMFTDLNLVQNFQ | 238 | 21 |
| hPDE5 (Amino | MKHEVLCRWILSVKKNYRKNVAYHNWRHAFNTAQCMFAALKAGKIQNKLTDL | | |
| acid 535-860 | EILALLIAALSHDLDHRGVNNSYIQRSEHPLAQLYCHSIMEHHHFDQCLMILNSPG | | |
| of WT, R732L) | NQILSGLSIEEYKTTLKIIKQAILATDLALYIKRLGEFFELIRKNQFNLEDPHQKELF | | |
| | LAMLMTACDLSAITKPWPIQQRIAELVATEFFDQGDRERKELNIEPTDLMNREKK | | |
| | NKIPSMQVGFIDAICLQLYEALTHVSEDCFPLLDGCRKNRQKWQALAEQQ | | |
| Methionine; | MEETRELQSLAAAVVPSAQTLKITDFSFSDFELSDLETALCTIRMFTDLNLVQNFQ | 347 | 22 |
| hPDE5 (Amino | MKHEVLCRWILSVKKNYRKNVAYHNWRHAFNTAQCIFAALKAGKIQNKLTDLEI | | |
| acid 535-860 | LALLIAALSHDLDHRGVNNSYIQRSEHPLAQLYCHSIMEHHHFDQCLMILNSPGN | | |
| of WT, M625I) | QILSGLSIEEYKTTLKIIKQAILATDLALYIKRRGEFFELIRKNQFNLEDPHQKELFL | | |
| | AMLMTACDLSAITKPWPIQQRIAELVATEFFDQGDRERKELNIEPTDLMNREKKN | | |
| | KIPSMQVGFIDAICLQLYEALTHVSEDCFPLLDGCRKNRQKWQALAEQQ | | |
| hPDE5 (Amino | EETRELQSLAAAVVPSAQTLKITDFSFSDFELSDLETALCTIRMFTDLNLVQNFQM | 348 | 361 |
| acid 535-860 | KHEVLCRWILSVKKNYRKNVAYHNWRHAFNTAQCMFAALKAGKIQNKLTDLEI | | |
| of WT, 11653A) | LALLIAALSADLDHRGVNNSYIQRSEHPLAQLYCHSIMEHHHFDQCLMILNSPGN | | |
| | QILSGLSIEEYKTTLKIIKQAILATDLALYIKRRGEFFELIRKNQFNLEDPHQKELFL | | |
| | AMLMTACDLSAITKPWPIQQRIAELVATEFFDQGDRERKELNIEPTDLMNREKKN | | |
| | KIPSMQVGFIDAICLQLYEALTHVSEDCFPLLDGCRKNRQKWQALAEQQ | | |
| hPDE5 (Amino | EETRELQSLAAAVVPSAQTLKITDFSFSDFELSDLETALCTIRMFTDLNLVQNFQM | 349 | 362 |
| acid 535-860 | KHEVLCRWILSVKKNYRKNVAYHNWRHAFNTAQCMFAALKAGKIQNKLTDLEI | | |
| of WT, D764A) | LALLIAALSHDLDHRGVNNSYIQRSEHPLAQLYCHSIMEHHHFDQCLMILNSPGN | | |
| | QILSGLSIEEYKTTLKIIKQAILATDLALYIKRRGEFFELIRKNQFNLEDPHQKELFL | | |
| | AMLMTACALSAITKPWPIQQRIAELVATEFFDQGDRERKELNIEPTDLMNREKKN | | |
| | KIPSMQVGFIDAICLQLYEALTHVSEDCFPLLDGCRKNRQKWQALAEQQ | | |
| hPDE5 (Amino | EETRELQSLAAAVVPSAQTLKITDFSFSDFELSDLETALCTIRMFTDLNLVQNFQM | 8383 | 8385 |
| acid 535-860 | KHEVLCRWILSVKKNYRKNVAYHNWRHAFNTAQCMFAALKAGKIQNKLTDLEI | | |
| of WT, E682A) | LALLIAALSHDLDHRGVNNSYIQRSEHPLAQLYCHSIMAHHHFDQCLMILNSPGN | | |
| | QILSGLSIEEYKTTLKIIKQAILATDLALYIKRRGEFFELIRKNQFNLEDPHQKELFL | | |
| | AMLMTACDLSAITKPWPIQQRIAELVATEFFDQGDRERKELNIEPTDLMNREKKN | | |
| | KIPSMQVGFIDAICLQLYEALTHVSEDCFPLLDGCRKNRQKWQALAEQQ | | |
| hPDE5 (Amino | EETRELQSLAAAVVPSAQTLKITDFSFSDFELSDLETALCTIRMFTDLNLVQNFQM | 8384 | 8386 |
| acid 535-860 | KHEVLCRWILSVKKNYRKNVAYHNWRHAFNTAQCMFAALKAGKIQNKLTDLEI | | |
| of WT, D724A) | LALLIAALSHDLDHRGVNNSYIQRSEHPLAQLYCHSIMEHHHEDQCLMILNSPGN | | |
| | QILSGLSIEEYKTTLKIIKQAILATALALYIKRRGEFFELIRKNQFNLEDPHQKELFL | | |
| | AMLMTACDLSAITKPWPIQQRIAELVATEFFDQGDRERKELNIEPTDLMNREKKN | | |
| | KIPSMQVGFIDAICLQLYEALTHVSEDCFPLLDGCRKNRQKWQALAEQQ | | |

[0133] Also provided herein are hPDE5 mutants identified by random mutagenesis screening, using a combination of nucleotide analog mutagenesis and error-prone PCR, to generate libraries of mutants. The hPDE5 DDs identified by random mutagenesis are provided in Table 2.

TABLE 2
hPDE5 DDs generated by random mutagenesis

| | | | AA | NA |
|---|---|---|---|---|
| | | | SEQ | SEQ |
| | | | ID | ID |
| Description | Library ID | Amino acid sequence | NO: | NO: |
| hPDE5 (Amino | LibC000009 | EETRELQSLAAAVVPSAQTLKITDFSFSDFELSDLETAMCTIRMFTDL | 8387 | 8439 |
| acid 535-860 of | | NLVQNFQMKHEVLCRWILSVKKNYRKNVAYHNWRHAFNTAQCMF | | |
| WT, L573M, | | AALKAGKIQNKLTDLEILALLIAALSHDLDHRGVNNSYIQRSEHPLA | | |
| F735L) | | QLYCHSIMEHHHFDQCLMILNSPGNQILSGLSIEEYKTTLKIIKQAILA | | |
| | | TDLALYIKRRGELFELIRKNQFNLEDPHQKELFLAMLMTACDLSAIT | | |
| | | KPWPIQQRIAELVATEFFDQGDRERKELNIEPTDLMNREKKNKIPSM | | |
| | | QVGFIDAICLQLYEALTHVSEDCFPLLDGCRKNRQKWQALAEQQ | | |
| hPDE5 (Amino | LibC000010 | EETRELQSLAAAVVPSAQTLKITDFSFSDFELSDLETALCTIRMFTDL | 8388 | 8440 |
| acid 535-860 of | | NLVQNFQMKHEVLCRWILSVKKNYRKNVAYHNWRHAFNTAQCMF | | |
| WT, R658H) | | AALKAGKIQNKLTDLEILALLIAALSHDLDHHGVNNSYIQRSEHPLA | | |
| | | QLYCHSIMEHHHFDQCLMILNSPGNQILSGLSIEEYKTTLKIIKQAILA | | |
| | | TDLALYIKRRGEFFELIRKNQFNLEDPHQKELFLAMLMTACDLSAIT | | |
| | | KPWPIQQRIAELVATEFFDQGDRERKELNIEPTDLMNREKKNKIPSM | | |
| | | QVGFIDAICLQLYEALTHVSEDCFPLLDGCRKNRQKWQALAEQQ | | |
| hPDE5 (Amino | LibC000011 | EETRELQSLAAAVVPSAQTLKITDFSFGDFELSDLETALCTIRMFTDL | 8389 | 8441 |
| acid 535-860 of | | NLVQNFQMKHEVLCRWILSVKKNYRKNVAYHNWRHAFNTAQCMF | | |
| WT, S562G, | | AALKAGKIQNKLTDLEILALLIAALSHDLDHRGVNNSYIQRSEHPLA | | |
| L727P, R847T) | | QLYCHSIMEHHHFDQCLMILNSPGNQILSGLSIEEYKTTLKIIKQAILA | | |
| | | TDLAPYIKRRGEFFELIRKNQFNLEDPHQKELFLAMLMTACDLSAIT | | |
| | | KPWPIQQRIAELVATEFFDQGDRERKELNIEPTDLMNREKKNKIPSM | | |
| | | QVGFIDAICLQLYEALTHVSEDCFPLLDGCTKNRQKWQALAEQQ | | |
| hPDE5 (Amino | LibC000012 | EETRELQSLAAAVVPSAQTLKITDFSFSDFELSDLETALCTIRMFTDL | 8390 | 8442 |
| acid 535-860 of | | NLVQNFQMKHEVLCRWILSVKKNYRKNVAYHNWRHAFNTAQCMF | | |
| WT, Q666H) | | AALKAGKIQNKLTDLEILALLIAALSHDLDHRGVNNSYIHRSEHPLA | | |
| | | QLYCHSIMEHHHFDQCLMILNSPGNQILSGLSIEEYKTTLKIIKQAILA | | |
| | | TDLALYIKRRGEFFELIRKNQFNLEDPHQKELFLAMLMTACDLSAIT | | |
| | | KPWPIQQRIAELVATEFFDQGDRERKELNIEPTDLMNREKKNKIPSM | | |
| | | QVGFIDAICLQLYEALTHVSEDCFPLLDGCRKNRQKWQALAEQQ | | |
| hPDE5 (Amino | LibC000013 | EETRELQSLAAAVVPSAQTLKITDFSFSDFELSDLETALCTIRMFTDL | 8391 | 8443 |
| acid 535-860 of | | NLVQNFQMKHEVLCRWILSVKKNYRKNVAYHNWRHAFNTAQCMF | | |
| WT, L781P) | | AALKAGKIQNKLTDLEILALLIAALSHDLDHRGVNNSYIQRSEHPLA | | |
| | | QLYCHSIMEHHHEDQCLMILNSPGNQILSGLSIEEYKTTLKIIKQAILA | | |
| | | TDLALYIKRRGEFFELIRKNQFNLEDPHQKELFLAMLMTACDLSAIT | | |
| | | KPWPIQQRIAEPVATEFFDQGDRERKELNIEPTDLMNREKKNKIPSM | | |
| | | QVGFIDAICLQLYEALTHVSEDCFPLLDGCRKNRQKWQALAEQQ | | |
| hPDE5 (Amino | LibC000014 | EETRELQSLAAAVVPSAQTLKITDFSFSDFELSDLETALCTIRMFTDL | 8392 | 8444 |
| acid 535-860 of | | NLVQNFQMKHEVLCRWILSVKKNYRKNVAYHNWRHAFNTAQCMF | | |
| WT, A767E) | | AALKAGKIQNKLTDLEILALLIAALSHDLDHRGVNNSYIQRSEHPLA | | |
| | | QLYCHSIMEHHHFDQCLMILNSPGNQILSGLSIEEYKTTLKIIKQAILA | | |
| | | TDLALYIKRRGEFFELIRKNQFNLEDPHQKELFLAMLMTACDLSEIT | | |
| | | KPWPIQQRIAELVATEFFDQGDRERKELNIEPTDLMNREKKNKIPSM | | |
| | | QVGFIDAICLQLYEALTHVSEDCFPLLDGCRKNRQKWQALAEQQ | | |
| hPDE5 (Amino | LibC000015 | EETRELQSLAAAVVPSAQTLKITDFSFSDFELSDLESALCTIRMFTDL | 8393 | 8445 |
| acid 535-860 of | | NLMQNFQMKHEVLCRWILSVKKNYRKNVAYHNWRHAFNTAQCM | | |
| WT, T571S, | | FAALKAGKIQNKLTDLEILALLIAALSHDLDHRGVNNSYIQRSEHPL | | |
| V585M, T723S) | | AQLYCHSIMEHHHFDQCLMILNSPGNQILSGLSIEEYKTTLKIIKQAIL | | |
| | | ASDLALYIKRRGEFFELIRKNQFNLEDPHQKELFLAMLMTACDLSAI | | |
| | | TKPWPIQQRIAELVATEFFDQGDRERKELNIEPTDLMNREKKNKIPS | | |
| | | MQVGFIDAICLQLYEALTHVSEDCFPLLDGCRKNRQKWQALAEQQ | | |
| hPDE5 (Amino | LibC000016 | EETRELQSLAAAVVPSAQTLKITDFSFSDFELSDLETALCTIRMFTDL | 8394 | 8446 |
| acid 535-860 of | | NLVQNFQMKHEVLCRWILSVKKNYRKNVAYHNWRHAFNTAQCMF | | |
| WT, Q743L) | | AALKAGKIQNKLTDLEILALLIAALSHDLDHRGVNNSYIQRSEHPLA | | |
| | | QLYCHSIMEHHHFDQCLMILNSPGNQILSGLSIEEYKTTLKIIKQAILA | | |
| | | TDLALYIKRRGEFFELIRKNLFNLEDPHQKELFLAMLMTACDLSAIT | | |
| | | KPWPIQQRIAELVATEFFDQGDRERKELNIEPTDLMNREKKNKIPSM | | |
| | | QVGFIDAICLQLYEALTHVSEDCFPLLDGCRKNRQKWQALAEQQ | | |
| hPDE5 (Amino | LibC000017 | EETRELQSLAAAVVPSAQTLKITDFSFSDFELSDLETALCTIRMFTDL | 8395 | 8447 |
| acid 535-860 of | | NLVQNFQMKHEVLCRWILSVKKNYRKNVAYHNWRHAFNTAQCMF | | |
| WT, Y709H, | | AALKAGKIQNKLTDLEILALLIAALSHDLDHRGVNNSYIQRSEHPLA | | |
| F787V) | | QLYCHSIMEHHHFDQCLMILNSPGNQILSGLSIEEHKTTLKIIKQAILA | | |
| | | TDLALYIKRRGEFFELIRKNQFNLEDPHQKELFLAMLMTACDLSAIT | | |
| | | KPWPIQQRIAELVATEFVDQGDRERKELNIEPTDLMNREKKNKIPSM | | |
| | | QVGFIDAICLQLYEALTHVSEDCFPLLDGCRKNRQKWQALAEQQ | | |
| hPDE5 (Amino | LibC000018 | EETRELQSLAAAVVPSAQTLKITDFSFSDFELSDLETALCTIRMFTDL | 8396 | 8448 |
| acid 535-860 of | | NLVQNFQMKHEVLCRWILSVKKYYRKNVAYHNWRHAFNTAQCMF | | |
| WT, N605Y, | | AALKAGKIQNKLTDLEILALLIAALSHDLDHRGVNNSYIQRSEHPLA | | |
| I715K) | | QLYCHSIMEHHHFDQCLMILNSPGNQILSGLSIEEYKTTLKKIKQAIL | | |
| | | ATDLALYIKRRGEFFELIRKNQFNLEDPHQKELFLAMLMTACDLSAI | | |
| | | TKPWPIQQRIAELVATEFFDQGDRERKELNIEPTDLMNREKKNKIPS | | |
| | | MQVGFIDAICLQLYEALTHVSEDCFPLLDGCRKNRQKWQALAEQQ | | |
| hPDE5 (Amino | LibC000019 | EETRELQSLAAAVVPSAQTLKITDFSFSDIELSDLETALCTIRMFTDL | 8397 | 8449 |
| acid 535-860 of | | NLVQNFQMKHEVLCRWILSVKKNYRKNVAYHNWRHAFNTAQCMF | | |
| WT, F564I, | | AALKAGKIQNKLTDLEILALLIAALSHDLDHRGVNYSYIQRSEHPLA | | |
| N662Y, H685L, | | QLYCHSIMEHHLFDQCLMIPNSPGNQILSGLSIEEYKTTLKIIKQAILA | | |
| L693P, F736I) | | TDLALYIKRRGEFIELIRKNQFNLEDPHQKELFLAMLMTACDLSAIT | | |
| | | KPWPIQQRIAELVATEFFDQGDRERKELNIEPTDLMNREKKNKIPSM | | |
| | | QVGFIDAICLQLYEALTHVSEDCFPLLDGCRKNRQKWQALAEQQ | | |
| hPDE5 (Amino | LibC000020 | EETRELQSLAAAVVPSAQTLKITDFSFSDFELSDLETALCTIRMFTDL | 8398 | 8450 |
| acid 535-860 of | | NLVQNFQMKHEVLCRWILSVKKNYRKNVAYHNWRHAFNTAQCMF | | |
| WT, A722V, | | AALKAGKIQNKLTDLEILALLIAALSHDLDHRGVNNSYIQRSEHPLA | | |
| F755L, M760I) | | QLYCHSIMEHHHFDQCLMILNSPGNQILSGLSIEEYKTTLKIIKQAILV | | |
| | | TDLALYIKRRGEFFELIRKNQFNLEDPHQKELLLAMLITACDLSAITK | | |
| | | PWPIQQRIAELVATEFFDQGDRERKELNIEPTDLMNREKKNKIPSMQ | | |
| | | VGFIDAICLQLYEALTHVSEDCFPLLDGCRKNRQKWQALAEQQ | | |
| hPDE5 (Amino | LibC000021 | EETRELQSLAAAVVPSAQTLKITDFSFSDFELSDLETALCTIRMFTDL | 8399 | 8451 |
| acid 535-860 of | | NLVQNFQMKHEILCRWILSVKKNYRKNVAYHNWRHAFNTAQCMF | | |
| WT, V594I) | | AALKAGKIQNKLTDLEILALLIAALSHDLDHRGVNNSYIQRSEHPLA | | |
| | | QLYCHSIMEHHHFDQCLMILNSPGNQILSGLSIEEYKTTLKIIKQAILA | | |
| | | TDLALYIKRRGEFFELIRKNQFNLEDPHQKELFLAMLMTACDLSAIT | | |
| | | KPWPIQQRIAELVATEFFDQGDRERKELNIEPTDLMNREKKNKIPSM | | |
| | | QVGFIDAICLQLYEALTHVSEDCFPLLDGCRKNRQKWQALAEQQ | | |
| hPDE5 (Amino | LibC000022 | EETRELQSLAAAVVPSAQTLKITDFSFSDFELSDLETALCTIRMFTDL | 8400 | 8452 |
| acid 535-860 of | | NLVQNFQMKREVLCRWILSVKKNYRKNVAYHNWRHAFNTAQCMF | | |
| WT, H592R) | | AALKAGKIQNKLTDLEILALLIAALSHDLDHRGVNNSYIQRSEHPLA | | |
| | | QLYCHSIMEHHHFDQCLMILNSPGNQILSGLSIEEYKTTLKIIKQAILA | | |
| | | TDLALYIKRRGEFFELIRKNQFNLEDPHQKELFLAMLMTACDLSAIT | | |
| | | KPWPIQQRIAELVATEFFDQGDRERKELNIEPTDLMNREKKNKIPSM | | |
| | | QVGFIDAICLQLYEALTHVSEDCFPLLDGCRKNRQKWQALAEQQ | | |
| hPDE5 (Amino | LibC000023 | EETRELQSLAAAVVPSAQTLKITDFSFSDFELSDLETALCTIRMFTDL | 8401 | 8453 |
| acid 535-860 of | | NLVQNFQMKHEVLCRWILSVKKNYRKNVAYHNWRHAFNTAQCMF | | |
| WT, E858V) | | AALKAGKIQNKLTDLEILALLIAALSHDLDHRGVNNSYIQRSEHPLA | | |
| | | QLYCHSIMEHHHFDQCLMILNSPGNQILSGLSIEEYKTTLKIIKQAILA | | |
| | | TDLALYIKRRGEFFELIRKNQFNLEDPHQKELFLAMLMTACDLSAIT | | |
| | | KPWPIQQRIAELVATEFFDQGDRERKELNIEPTDLMNREKKNKIPSM | | |
| | | QVGFIDAICLQLYEALTHVSEDCFPLLDGCRKNRQKWQALAVQQ | | |
| hPDE5 (Amino | LibC000024 | EETRELQSLAAAVVPSAQTLKITDFSFSDFELSDLETALCTIRMFTDL | 8402 | 8454 |
| acid 535-860 of | | NLVQNFQMKHEVLCRWILSVKKNYRKNVAYHNWRHAFNTAQCMF | | |
| WT, T784I) | | AALKAGKIQNKLTDLEILALLIAALSHDLDHRGVNNSYIQRSEHPLA | | |
| | | QLYCHSIMEHHHFDQCLMILNSPGNQILSGLSIEEYKTTLKIIKQAILA | | |
| | | TDLALYIKRRGEFFELIRKNQFNLEDPHQKELFLAMLMTACDLSAIT | | |
| | | KPWPIQQRIAELVAIEFFDQGDRERKELNIEPTDLMNREKKNKIPSM | | |
| | | QVGFIDAICLQLYEALTHVSEDCFPLLDGCRKNRQKWQALAEQQ | | |
| hPDE5 (Amino | LibC000001 | EETRELQLLAAAVVPSAQTLKITDFSFSDFELSDLETALCTIRMFTDL | 8403 | 8455 |
| acid 535-860 of | | NLVQNFQMKHEVLCRWILSVKKNYRKNVAYHNWRHAFNTAQCMF | | |
| WT, S542L, | | AALKAGKIQNKLTDLEILALLIAALSHDLDHRGVNNSYIQRSEHPLA | | |
| E708V, W772C) | | QLYCHSIMEHHHFDQCLMILNSPGNQILSGLSIEVYKTTLKIIKQAILA | | |
| | | TDLALYIKRRGEFFELIRKNQFNLEDPHQKELFLAMLMTACDLSAIT | | |
| | | KPCPIQQRIAELVATEFFDQGDRERKELNIEPTDLMNREKKNKIPSM | | |
| | | QVGFIDAICLQLYEALTHVSEDCFPLLDGCRKNRQKWQALAEQQ | | |
| hPDE5 (Amino | LibC000002 | EETRELQSLAAAVVPSAQTLKITDFSFSDFELSDLETALCTIRMFTDL | 8404 | 8456 |
| acid 535-860 of | | NLVQNFQMKHEVLCRWILSVKKNYRKNVAYHNWRHAFNTAQCMF | | |
| WT, I700F, | | AALKAGKIQNKLTDLEILALLIAALSHDLDHRGVNNSYIQRSEHPLA | | |
| E796G) | | QLYCHSIMEHHHFDQCLMILNSPGNQFLSGLSIEEYKTTLKIIKQAIL | | |
| | | ATDLALYIKRRGEFFELIRKNQFNLEDPHQKELFLAMLMTACDLSAI | | |
| | | TKPWPIQQRIAELVATEFFDQGDRERKGLNIEPTDLMNREKKNKIPS | | |
| | | MQVGFIDAICLQLYEALTHVSEDCFPLLDGCRKNRQKWQALAEQQ | | |
| hPDE5 (Amino | LibC000003 | EETRELQSLAAAVVPSAQTLKITDFSFSDFELSDLETALCTIRMFTDL | 8405 | 8457 |
| acid 535-860 of | | NLVQNFQMKHEVLCRWILSVKKNYRKNYAYHNWRHAFNTAQCMF | | |
| WT, D724G, | | AALKAGKIQNKLTDLEILALLIAALSHDLDHRGVNNSYIQRSEHPLA | | |
| K848N) | | QLYCHSIMEHHHFDQCLMILNSPGNQILSGLSIEEYKTTLKIIKQAILA | | |
| | | TGLALYIKRRGEFFELIRKNQFNLEDPHQKELFLAMLMTACDLSAIT | | |
| | | KPWPIQQRIAELVATEFFDQGDRERKELNIEPTDLMNREKKNKIPSM | | |
| | | QVGFIDAICLQLYEALTHVSEDCFPLLDGCRNNRQKWQALAEQQ | | |
| hPDE5 (Amino | LibC000004 | EETRELQSLAAAVVPSAQTLKITDFSFSDFELSDLETALCTIRMFTDL | 8406 | 8458 |
| acid 535-860 of | | NLVQNFQMKHEVLCRWILSVKKNYRKNVAYHNWRHAFNTAQCMF | | |
| WT, T712M, | | AALKAGKIQNKLTDLEILALLIAALSHDLDHRGVNNSYIQRSEHPLA | | |
| M758I, Q859R) | | QLYCHSIMEHHHFDQCLMILNSPGNQILSGLSIEEYKTMLKIIKQAIL | | |
| | | ATDLALYIKRRGEFFELIRKNQFNLEDPHQKELFLAILMTACDLSAIT | | |
| | | KPWPIQQRIAELVATEFFDQGDRERKELNIEPTDLMNREKKNKIPSM | | |
| | | QVGFIDAICLQLYEALTHVSEDCFPLLDGCRKNRQKWQALAERQ | | |
| hPDE5 (Amino | LibC000005 | EETRELQSLAAAVVPSAQTLKSTDFSFSDFELSDLETALCTIRMFTDL | 8407 | 8459 |
| acid 535-860 of | | NLVQNFQMKHEVLCRWILSVKKNYRKNVAYHNWRHAFNTAQCMF | | |
| WT, I556S, | | AALKAGKIQNKLTDLEILALLIAALSHDLDHRGVNNSYIQRSEHPLA | | |
| E796D) | | QLYCHSIMEHHHFDQCLMILNSPGNQILSGLSIEEYKTTLKIIKQAILA | | |
| | | TDLALYIKRRGEFFELIRKNQFNLEDPHQKELFLAMLMTACDLSAIT | | |
| | | KPWPIQQRIAELVATEFFDQGDRERKDLNIEPTDLMNREKKNKIPSM | | |
| | | QVGFIDAICLQLYEALTHVSEDCFPLLDGCRKNRQKWQALAEQQ | | |
| hPDE5 (Amino | LibC000006 | EETRELQSLAAAVVPSAQTLKITDFSFSDFELSDLETALCTIRMFTDL | 8408 | 8460 |
| acid 535-860 of | | NLVQNFQMKHEVLCRWILSVKKNYRKNVAYHNWRHAFNTAQCMF | | |
| WT, I680S) | | AALKAGKIQNKLTDLEILALLIAALSHDLDHRGVNNSYIQRSEHPLA | | |
| | | QLYCHSSMEHHHFDQCLMILNSPGNQILSGLSIEEYKTTLKIIKQAIL | | |
| | | ATDLALYIKRRGEFFELIRKNQFNLEDPHQKELYLAMLMTACDLSAI | | |
| | | TKPWPIQQRIAELVATEFFDQGDRERKELNIEPTDLMNREKKNKIPS | | |
| | | MQVGFIDAICLQLYEALTHVSEDCFPLLDGCRKNRQKWQALAEQQ | | |
| hPDE5 (Amino | LibC000007 | EETRELQSLAAAVVPSAQTLKITDFSFSDFELSDLETALCTIRMFTDL | 8409 | 8461 |
| acid 535-860 of | | NLVQNFQMKHEVLCRWILSVKKNYRKNVAYLNWRHAFNTAQCMF | | |
| WT, H613L, | | AALKAGKIQNKLTDLEILALLIAALSHDLDHRGVNNSYIQRSEHPLA | | |
| D724Y, F755Y) | | QLYCHSIMEHHHFDQCLMILNSPGNQILSGLSIEEYKTTLKIIKQAILA | | |
| | | TYLALYIKRRGEFFELIRKNQFNLEDPHQKELYLAMLMTACDLSAIT | | |
| | | KPWPIQQRIAELVATEFFDQGDRERKELNIEPTDLMNREKKNKIPSM | | |
| | | QVGFIDAICLQLYEALTHVSEDCFPLLDGCRKNRQKWQALAEQQ | | |
| hPDE5 (Amino | LibC000008 | EETRELQSLAAAVVPSAQTLKITDFSFSDFELSDLETALCTIRMFTDL | 8410 | 8462 |
| acid 535-860 of | | NLVQNFQMKHEVLCRWILSVKKNYRKNVTYHNWRHAFNTAQCMF | | |
| WT, A611T) | | AALKAGKIQNKLTDLEILALLIAALSHDLDHRGVNNSYIQRSEHPLA | | |
| | | QLYCHSIMEHHHFDQCLMILNSPGNQILSGLSIEEYKTTLKIIKQAILA | | |
| | | TDLALYIKRRGEFFELIRKNQFNLEDPHQKELFLAMLMTACDLSAIT | | |
| | | KPWPIQQRIAELVATEFFDQGDRERKELNIEPTDLMNREKKNKIPSM | | |
| | | QVGFIDAICLQLYEALTHVSEDCFPLLDGCRKNRQKWQALAEQQ | | |
| hPDE5 (Amino | - | EETRELQSLAAAVVPSAQTLKITDFSFSDFELSDLETALCTIRMFTDL | 8411 | 8463 |
| acid 535-860 of | | NLVQNFQMKHEVLCRWILSVKKNYRKNVAYHNWRHAFNTAQCMF | | |
| WT, N661S) | | AALKAGKIQNKLTDLEILALLIAALSHDLDHRGVSNSYIQRSEHPLA | | |
| | | QLYCHSIMEHHHFDQCLMILNSPGNQILSGLSIEEYKTTLKIIKQAILA | | |
| | | TDLALYIKRRGEFFELIRKNQFNLEDPHQKELFLAMLMTACDLSAIT | | |
| | | KPWPIQQRIAELVATEFFDQGDRERKELNIEPTDLMNREKKNKIPSM | | |
| | | QVGFIDAICLQLYEALTHVSEDCFPLLDGCRKNRQKWQALAEQQ | | |
| hPDE5 (Amino | - | EETRELQSLAAAVVPSAQTLKITDFSFSDFELSDMETALCTIRMFTDL | 8412 | 8464 |
| acid 535-860 of | | NLVQNFQMKHEVLCRWILSVKKNYRKNVAYHNWRHAFNTAQCMF | | |
| WT, L569M, | | AALKAGKIQNKLTDLEILALLIAALSHDLDHRGVNNSYIQRSEHPLA | | |
| T833S) | | QLYCHSIMEHHHFDQCLMILNSPGNQILSGLSIEEYKTTLKIIKQAILA | | |
| | | TDLALYIKRRGEFFELIRKNQFNLEDPHQKELFLAMLMTACDLSAIT | | |
| | | KPWPIQQRIAELVATEFFDQGDRERKELNIEPTDLMNREKKNKIPSM | | |
| | | QVGFIDAICLQLYEALSHVSEDCFPLLDGCRKNRQKWQALAEQQ | | |
| hPDE5 (Amino | - | EETRELQSLAAAVVPSAQTLKITDFSFSDFELSDLETALCTIRMFTDL | 8413 | 8465 |
| acid 535-860 of | | NLVQNFQMKHEVLCRWILSVKKNYRKNVAYHNWRHAFNTAQCMF | | |
| WT, I768N) | | AALKAGKIQNKLTDLEILALLIAALSHDLDHRGVNNSYIQRSEHPLA | | |
| | | QLYCHSIMEHHHFDQCLMILNSPGNQILSGLSIEEYKTTLKIIKQAILA | | |
| | | TDLALYIKRRGEFFELIRKNQFNLEDPHQKELFLAMLMTACDLSANT | | |
| | | KPWPIQQRIAELVATEFFDQGDRERKELNIEPTDLMNREKKNKIPSM | | |
| | | QVGFIDAICLQLYEALTHVSEDCFPLLDGCRKNRQKWQALAEQQ | | |
| hPDE5 (Amino | - | EETRELQSLAAAVVPSAQTLKITDFSFSDFELSDLETALCTIRMFTDL | 8414 | 8466 |
| acid 535-860 of | | NLVQNFQMKHEVLCRWILSVKKNYWKNVAYHNWRHAFNTAQCM | | |
| WT, R607W) | | FAALKAGKIQNKLTDLEILALLIAALSHDLDHRGVNNSYIQRSEHPL | | |
| | | AQLYCHSIMEHHHFDQCLMILNSPGNQILSGLSIEEYKTTLKIIKQAIL | | |
| | | ATDLALYIKRRGEFFELIRKNQFNLEDPHQKELFLAMLMTACDLSAI | | |
| | | TKPWPIQQRIAELVATEFFDQGDRERKELNIEPTDLMNREKKNKIPS | | |
| | | MQVGFIDAICLQLYEALTHVSEDCFPLLDGCRKNRQKWQALAEQQ | | |
| hPDE5 (Amino | - | EETRELQSLAAAVVPSAQTLKITDFSFSDFELSDLETALCTIRMFTDL | 8415 | 8467 |
| acid 535-860 of | | NLVQNFQMKHEVLCRWILSVKKNYRKNVAYHNWRHAFSTAQCMF | | |
| WT, N620S) | | AALKAGKIQNKLTDLEILALLIAALSHDLDHRGVNNSYIQRSEHPLA | | |
| | | QLYCHSIMEHHHFDQCLMILNSPGNQILSGLSIEEYKTTLKIIKQAILA | | |
| | | TDLALYIKRRGEFFELIRKNQFNLEDPHQKELFLAMLMTACDLSAIT | | |
| | | KPWPIQQRIAELVATEFFDQGDRERKELNIEPTDLMNREKKNKIPSM | | |
| | | QVGFIDAICLQLYEALTHVSEDCFPLLDGCRKNRQKWQALAEQQ | | |
| hPDE5 (Amino | - | EETRELQSLAAAVVPSAQTRKITDFSFSDFELSDLETALCTIRMFTDL | 8416 | 8468 |
| acid 535-860 of | | NLVQNFEMKHEVLCRWILSVKKNYRKNVAYHNWRHAFNTAQCMF | | |
| WT, L554R, | | AALKAGKIQNKLTDLEILALLIAALSHDLDHRGVNNSYIQRSEHPLA | | |
| Q589E, M691I) | | QLYCHSIMEHHHFDQCLIILNSPGNQILSGLSIEEYKTTLKIIKQAILA | | |
| | | TDLALYIKRRGEFFELIRKNQFNLEDPHQKELFLAMLMTACDLSAITK | | |
| | | PWPIQQRIAELVATEFFDQGDRERKELNIEPTDLMNREKKNKIPSMQ | | |
| | | VGFIDAICLQLYEALTHVSEDCFPLLDGCRKNRQKWQALAEQQ | | |
| hPDE5 (Amino | - | EETRELQSLAAAVVPSAQTLKITDFSFSDFELSDLETALCTIRMFTDL | 8417 | 8469 |
| acid 535-860 of | | NLVQNFQMKHEVLCRWILSVKKNYRKNVAYHNRRHAFNTAQCMF | | |
| WT, W615R, | | AALKAGKIQNKLTDLEILALLIAALSHDLDHRGVNNSYIQRSEHPLA | | |
| T723R, A762T, | | QLYCHSIMEHHHFDQCLMILNSPGNQILSGLSIEEYKTTLKIIKQAILA | | |
| E808G) | | RDLALYIKRRGEFFELIRKNQFNLEDPHQKELFLAMLMTTCDLSAIT | | |
| | | KPWPIQQRIAELVATEFFDQGDRERKELNIEPTDLMNRGKKNKIPSM | | |
| | | QVGFIDAICLQLYEALTHVSEDCFPLLDGCRKNRQKWQALAEQQ | | |
| hPDE5 (Amino | - | EETRELQSLAAAVVPSAQTLKITDFSFSDFELSDLETALYTIRMFTDL | 8418 | 8470 |
| acid 535-860 of | | NLVQNFQMKHEVLCRWILSVKKNYRKNVAYHNWRHAFNTAQCMF | | |
| WT, C574Y) | | AALKAGKIQNKLTDLEILALLIAALSHDLDHRGVNNSYIQRSEHPLA | | |
| | | QLYCHSIMEHHHFDQCLMILNSPGNQILSGLSIEEYKTTLKIIKQAILA | | |
| | | TDLALYIKRRGEFFELIRKNQFNLEDPHQKELFLAMLMTACDLSAIT | | |
| | | KPWPIQQRIAELVATEFFDQGDRERKELNIEPTDLMNREKKNKIPSM | | |
| | | QVGFIDAICLQLYEALTHVSEDCFPLLDGCRKNRQKWQALAEQQ | | |
| hPDE5 (Amino | - | EETRELQSLAAAVVPSAQTRKITDFSFSDFELSDLETALCTIRMFTDL | 8419 | 8471 |
| acid 535-860 of | | NLVPNFQMKHEVLCRWILSVKKNYRKNVAYHNWRHAFNTAQCMF | | |
| WT, L554R, | | AALKAGKIQNKLTDLEILALLIAALSHDLDHRGVNNSYIQRSEHPLA | | |
| Q586P, K710N, | | QLYCHSIMEHHHFDQCLMILNSPGNQILSGLSIEEYNTTLKIIKQAILA | | |
| K730E) | | TDLALYIERRGEFFELIRKNQFNLEDPHQKELFLAMLMTACDLSAIT | | |
| | | KPWPIQQRIAELVATEFFDQGDRERKELNIEPTDLMNREKKNKIPSM | | |
| | | QVGFIDAICLQLYEALTHVSEDCFPLLDGCRKNRQKWQALAEQQ | | |
| hPDE5 (Amino | - | EETRELQSLAAAVVPSAQTLKITDFSFSDFELSDLETALCTIRMFTDL | 8420 | 8472 |
| acid 535-860 of | | NLVQNFQMKHEVLCRWILSVKKNYRKNVAYRNWRHAFNTAQCMF | | |
| WT, H613R) | | AALKAGKIQNKLTDLEILALLIAALSHDLDHRGVNNSYIQRSEHPLA | | |
| | | QLYCHSIMEHHHFDQCLMILNSPGNQILSGLSIEEYNTTLKIIKQAILA | | |
| | | TDLALYIKRRGEFFELIRKNQFNLEDPHQKELFLAMLMTACDLSAIT | | |
| | | KPWPIQQRIAELVATEFFDQGDRERKELNIEPTDLMNREKKNKIPSM | | |
| | | QVGFIDAICLQLYEALTHVSEDCFPLLDGCRKNRQKWQALAEQQ | | |
| hPDE5 (Amino | - | EETRELQSLAAAVVPSAQTLKITDFSFSDFELSDLETALCTIRMFTDL | 8421 | 8473 |
| acid 535-860 of | | NLVLNFQMKHEVLCRWILSVKKNYRKNVAYHNWRHAFNTAQCMF | | |
| WT, Q586L, | | AALKAGKIQNKLTDLEILALLIAALSHDLDHRGVNNYYIQRSEHPLA | | |
| S663Y, A762T, | | QLYCHSIMEHHHFDQCLMILNSPGNQILSGLSIEEYKTTLKIIKQAILA | | |
| E808G) | | TDLALYIKRRGEFFELIRKNQFNLEDPHQKELFLAMLMTTCDLSAIT | | |
| | | KPWPIQQRIAELVATEFFDQGDRERKELNIEPTDLMNRGKKNKIPSM | | |
| | | QVGFIDAICLQLYEALTHVSEDCFPLLDGCRKNRQKWQALAEQQ | | |
| hPDE5 (Amino | - | EETRELQSLAAAVMPSAQTLKITDFSFSDFELSDLETALCTIRMFTDL | 8422 | 8474 |
| acid 535-860 of | | NLVQNFQMKHEVLCRWILSVKKNYRKNVAYHNWRHAFNTAQCMF | | |
| WT, V548M, | | AALKAGKIQNKLTDLEILALLIAALSHDLDHRGVNNSYIQRSEHPLA | | |
| D803N) | | QLYCHSIMEHHHFDQCLMILNSPGNQILSGLSIEEYKTTLKIIKQAILA | | |
| | | TDLALYIKRRGEFFELIRKNQFNLEDPHQKELFLAMLMTACDLSAIT | | |
| | | KPWPIQQRIAELVATEFFDQGDRERKELNIEPTNLMNREKKNKIPSM | | |
| | | QVGFIDAICLQLYEALTHVSEDCFPLLDGCRKNRQKWQALAEQQ | | |
| hPDE5 (Amino | - | EETRELQSLAAAVVPSAQTRKITDFSFSDFELSDLETALCTIRMFTDL | 8423 | 8475 |
| acid 535-860 of | | NLVQNFEMKHEVLCRWILSVKKNYRKNVAYHNWRHAFNTAQCMF | | |
| WT, L554R, | | AALKAGKIQNKLTDLEILALLIAALSHDLDHRGVNNSYIQRSEHPLA | | |
| Q589E, A823T) | | QLYCHSIMEHHHFDQCLMILNSPGNQILSGLSIEEYKTTLKIIKQAILA | | |
| | | TDLALYIKRRGEFFELIRKNQFNLEDPHQKELFLAMLMTACDLSAIT | | |
| | | KPWPIQQRIAELVATEFFDQGDRERKELNIEPTDLMNREKKNKIPSM | | |
| | | QVGFIDTICLQLYEALTHVSEDCFPLLDGCRKNRQKWQALAEQQ | | |
| hPDE5 (Amino | - | EETRELQSLAAAVVPSAQTLKITDFSFSDFELSDLEIALCTIRMFTDLN | 8424 | 8476 |
| acid 535-860 of | | LVQNFQMKHEVLCRWILSVKRNYRKNVAYHNWRHAFNTAQCMFA | | |
| WT, T571I, | | ALKAGKIQNKLTDLEILALLIAALSHDLDHRGVNNSYIQRSEHPLAQ | | |
| K604R, I706N, | | LYCHSIMEHHHFDQCLMILNSPGNQILSGLSNEEYKTTLKIIKQAILA | | |
| E795R) | | TDLALYIKRRGEFFELIRKNQFNLEDPHQKELFLAMLMTACDLSAIT | | |
| | | KPWPIQQRIAELVATEFFDQGDRERRELNIEPTDLMNREKKNKIPSM | | |
| | | QVGFIDAICLQLYEALTHVSEDCFPLLDGCRKNRQKWQALAEQQ | | |
| hPDE5 (Amino | - | EETRELQSLAAAVVPSAQTLKITDFSFSDFELSDLETALCTIRMFTDL | 8425 | 8477 |
| acid 535-860 of | | NLVQNFQMKHEVLCRWILSVKKNYRKNVAYHNWRHAFNTAQCMF | | |
| WT, G659A, | | AALKAGKIQNKLTDLEILALLIAALSHDLDHRAVNNSYIQRSEHPLA | | |
| T784I) | | QLYCHSIMEHHHFDQCLMILNSPGNQILSGLSIEEYKTTLKIIKQAILA | | |
| | | TDLALYIKRRGEFFELIRKNQFNLEDPHQKELFLAMLMTACDLSAIT | | |
| | | KPWPIQQRIAELVAIEFFDQGDRERKELNIEPTDLMNREKKNKIPSM | | |
| | | QVGFIDAICLQLYEALTHVSEDCFPLLDGCRKNRQKWQALAEQQ | | |
| hPDE5 (Amino | - | EETRELQSLAAAVVPSAQTLKITDFSFSDFELSDLETALCTIRMFTDL | 8426 | 8478 |
| acid 535-860 of | | NLVQNFQMKHEVLCRWILSVKKNYRKNVAYHNWRHAFNTAQCMF | | |
| WT, Q666H) | | AALKAGKIQNKLTDLEILALLIAALSHDLDHRGVNNSYIHRSEHPLA | | |
| | | QLYCHSIMEHHHFDQCLMILNSPGNQILSGLSIEEYKTTLKIIKQAILA | | |
| | | TDLALYIKRRGEFFELIRKNQFNLEDPHQKELFLAMLMTACDLSAIT | | |
| | | KPWPIQQRIAELVATEFFDQGDRERKELNIEPTDLMNREKKNKIPSM | | |
| | | QVGFIDAICLQLYEALTHVSEDCFPLLDGCRKNRQKWQALAEQQ | | |
| hPDE5 (Amino | - | EETRELQSLAAAVVPSAQTLKITDFSFSDFELSDLETALCTIRMFTDL | 8427 | 8479 |
| acid 535-860 of | | NLVQNFQMKHEVLCRWILSVKKNYRKNVAYHNWRLAFNTAQCMF | | |
| WT, H617L, | | AALKAGKIQNKLTDLEILALLIAALSHDLDHRGVNNSYIQRSEHPLA | | |
| A722V) | | QLYCHSIMEHHHFDQCLMILNSPGNQILSGLSIEEYKTTLKIIKQAILV | | |
| | | TDLALYIKRRGEFFELIRKNQFNLEDPHQKELFLAMLMTACDLSAIT | | |
| | | KPWPIQQRIAELVATEFFDQGDRERKELNIEPTDLMNREKKNKIPSM | | |
| | | QVGFIDAICLQLYEALTHVSEDCFPLLDGCRKNRQKWQALAEQQ | | |
| hPDE5 (Amino | - | EETRELQSLAAAVVPSAQTLKITDFSFSDFELSDLETALCTIRMFTDL | 8428 | 8480 |
| acid 535-860 of | | NLVQNFQMKHEVLCRWILSVKKNYRKYVAYHNWRHAFNTAQCMF | | |
| WT, N609Y, | | AALKAGKIQNKLTDLEILALLIAALSHDLDHRGVNNSYIQRSEHPLA | | |
| I799L) | | QLYCHSIMEHHHFDQCLMILNSPGNQILSGLSIEEYKTTLKIIKQAILA | | |
| | | TDLALYIKRRGEFFELIRKNQFNLEDPHQKELFLAMLMTACDLSAIT | | |
| | | KPWPIQQRIAELVATEFFDQGDRERKELNLEPTDLMNREKKNKIPSM | | |
| | | QVGFIDAICLQLYEALTHVSEDCFPLLDGCRKNRQKWQALAEQQ | | |
| hPDE5 (Amino | - | EETRELQSLAAAVVPSAQTLKITDFSLSDFELSDLETALCTIRMFTDL | 8429 | 8481 |
| acid 535-860 of | | NLVQNFQMKHEVLCRWILSVKKNYRKNVAYHNWRHAFNTAQCMF | | |
| WT, F561L, | | AALKAGKIQNKLTDLEILALLIAALSHDLDHRAVNNSYIQRSEHPLA | | |
| G659A, T784I) | | QLYCHSIMEHHHFDQCLMILNSPGNQILSGLSIEEYKTTLKIIKQAILA | | |
| | | TDLALYIKRRGEFFELIRKNQFNLEDPHQKELFLAMLMTACDLSAIT | | |
| | | KPWPIQQRIAELVAIEFFDQGDRERKELNIEPTDLMNREKKNKIPSM | | |
| | | QVGFIDAICLQLYEALTHVSEDCFPLLDGCRKNRQKWQALAEQQ | | |
| hPDE5 (Amino | - | EETRELQSLAAAVVPSAQTLKITDFSFSDFELSDLETALCTIRMFTDL | 8430 | 8482 |
| acid 535-860 of | | NLVQNFQMKHEVLCRWILSVKKNYRKNVAYHNWRHAFNTAQCMF | | |
| WT, K795N) | | AALKAGKIQNKLTDLEILALLIAALSHDLDHRGVNNSYIQRSEHPLA | | |
| | | QLYCHSIMEHHHFDQCLMILNSPGNQILSGLSIEEYKTTLKIIKQAILA | | |
| | | TDLALYIKRRGEFFELIRKNQFNLEDPHQKELFLAMLMTACDLSAIT | | |
| | | KPWPIQQRIAELVATEFFDQGDRERNELNIEPTDLMNREKKNKIPSM | | |
| | | QVGFIDAICLQLYEALTHVSEDCFPLLDGCRKNRQKWQALAEQQ | | |
| hPDE5 (Amino | - | EETRELQSLAAAVVPSAQTLKITDFSFSDFELSDLETALCTIRMFTDL | 8431 | 8483 |
| acid 535-860 of | | NLVQNFQMKHEVLCRWILSVKKNYRKNVAYHNWRHAFNTAQCMF | | |
| WT, K770Q, | | AALKAGKIQNKLTDLEILALLIAALSHDLDHRGVNNSYIQRSEHPLA | | |
| K848N) | | QLYCHSIMEHHHFDQCLMILNSPGNQILSGLSIEEYKTTLKIIKQAILA | | |
| | | TDLALYIKRRGEFFELIRKNQFNLEDPHQKELFLAMLMTACDLSAIT | | |
| | | QPWPIQQRIAELVATEFFDQGDRERKELNIEPTDLMNREKKNKIPSM | | |
| | | QVGFIDAICLQLYEALTHVSEDCFPLLDGCRNNRQKWQALAEQQ | | |
| hPDE5 (Amino | - | EETRELQSLAAAVVPSAQTLKITDFSFSDFELSDLETALCTIRMFTDL | 8432 | 8484 |
| acid 535-860 of | | NLVQNFQMKHEVLCRWILSVKKDYRKNVAYHNWRHAFNTAQCMF | | |
| WT, N605D) | | AALKAGKIQNKLTDLEILALLIAALSHDLDHRGVNNSYIQRSEHPLA | | |
| | | QLYCHSIMEHHHFDQCLMILNSPGNQILSGLSIEEYKTTLKIIKQAILA | | |
| | | TDLALYIKRRGEFFELIRKNQFNLEDPHQKELFLAMLMTACDLSAIT | | |
| | | KPWPIQQRIAELVATEFFDQGDRERKELNIEPTDLMNREKKNKIPSM | | |
| | | QVGFIDAICLQLYEALTHVSEDCFPLLDGCRKNRQKWQALAEQQ | | |
| hPDE5 (Amino | - | EETRELQSLAAAVVPSAQTLKITDFSFSDFELSDLETALCTIRMFTDL | 8433 | 8485 |
| acid 535-860 of | | NLVQNFQMKHEVLCRWILSVKKNYRKNVAYHNWRHAFNTAQCMF | | |
| WT, I680S) | | AALKAGKIQNKLTDLEILALLIAALSHDLDHRGVNNSYIQRSEHPLA | | |
| | | QLYCHSSMEHHHFDQCLMILNSPGNQILSGLSIEEYKTTLKIIKQAIL | | |
| | | ATDLALYIKRRGEFFELIRKNQFNLEDPHQKELFLAMLMTACDLSAI | | |
| | | TKPWPIQQRIAELVATEFFDQGDRERKELNIEPTDLMNREKKNKIPS | | |
| | | MQVGFIDAICLQLYEALTHVSEDCFPLLDGCRKNRQKWQALAEQQ | | |
| hPDE5 (Amino | - | EETRELQSLAAAVMPSAQTLKITDFSFSDFELSDLETALCTIRMFTDL | 8434 | 8486 |
| acid 535-860 of | | NLVQNFQMKHEVLCRWILSVKKNYRKNVAYHNWRHAFNTAQCMF | | |
| WT, V548M, | | AALKAGKIQNKLTDLEILALLIAALSHDLDHRGVNNSYIQRSEHPLA | | |
| F820I) | | QLYCHSIMEHHHFDQCLMILNSPGNQILSGLSIEEYKTTLKIIKQAILA | | |
| | | TDLALYIKRRGEFFELIRKNQFNLEDPHQKELFLAMLMTACDLSAIT | | |
| | | KPWPIQQRIAELVATEFFDQGDRERKELNIEPTDLMNREKKNKIPSM | | |
| | | QVGIIDAICLQLYEALTHVSEDCFPLLDGCRKNRQKWQALAEQQ | | |
| hPDE5 (Amino | - | EETRELQSLAAAVVPSAQTLKITDFSFSDFELSDLETALCTIRMFTDL | 8435 | 8487 |
| acid 535-860 of | | NLVQNFQMKHEVLCRWILSVKKNYRKNVAYHNWRHAFNTAQCMF | | |
| WT, I799L) | | AALKAGKIQNKLTDLEILALLIAALSHDLDHRGVNNSYIQRSEHPLA | | |
| | | QLYCHSIMEHHHFDQCLMILNSPGNQILSGLSIEEYKTTLKIIKQAILA | | |
| | | TDLALYIKRRGEFFELIRKNQFNLEDPHQKELFLAMLMTACDLSAIT | | |
| | | KPWPIQQRIAELVATEFFDQGDRERKELNLEPTDLMNREKKNKIPSM | | |
| | | QVGFIDAICLQLYEALTHVSEDCFPLLDGCRKNRQKWQALAEQQ | | |
| hPDE5 (Amino | - | EETRELQSLAAAVVPSAQTLKITDFSFSDFELSDLETALCTIRMFTDL | 8436 | 8488 |
| acid 535-860 of | | NLVQNFQMKHEVLCRWILSVKKNYQKNVAYHNWRHAFNTAQCM | | |
| WT, R607Q) | | FAALKAGKIQNKLTDLEILALLIAALSHDLDHRGVNNSYIQRSEHPL | | |
| | | AQLYCHSIMEHHHFDQCLMILNSPGNQILSGLSIEEYKTTLKIIKQAIL | | |
| | | ATDLALYIKRRGEFFELIRKNQFNLEDPHQKELFLAMLMTACDLSAI | | |
| | | TKPWPIQQRIAELVATEFFDQGDRERKELNIEPTDLMNREKKNKIPS | | |
| | | MQVGFIDAICLQLYEALTHVSEDCFPLLDGCRKNRQKWQALAEQQ | | |
| hPDE5 (Amino | - | EETRELQSLAAAVVPFAQTRKITDFSFSDFELSDLETALCTIRMFTDL | 8437 | 8489 |
| acid 535-860 of | | NLVQNFQMKHEVLCRWILSVKKNYRKNVAYHNWRHAFNTAQCMF | | |
| WT, S550F, | | AALKAGKIQNKLTDLEILALLIAALSHDLDHRGVNNSYIQRSEHPLA | | |
| L554R) | | QLYCHSIMEHHHFDQCLMILNSPGNQILSGLSIEEYKTTLKIIKQAILA | | |
| | | TDLALYIKRRGEFFELIRKNQFNLEDPHQKELFLAMLMTACDLSAIT | | |
| | | KPWPIQQRIAELVATEFFDQGDRERKELNIEPTDLMNREKKNKIPSM | | |
| | | QVGFIDAICLQLYEALTHVSEDCFPLLDGCRKNRQKWQALAEQQ | | |
| hPDE5 (Amino | - | EETRELQSLAAAVVSSAQTLKITDFSFSDIELSDLETALCTIRMFTDL | 8438 | 8490 |
| acid 535-860 of | | NLVQNFQMKHEVLCRWILSVKKNYRKNVAYHNWRHAFNTAQCMF | | |
| WT, P549S, | | AALKAGKIQNKLTDLEILALLIAALSHDLDHHGVNNSYIQRSEHPLA | | |
| F564I, R658H, | | QLYCHSIMEHHHFDQCLMILNSPGNQILSGLSIEEYKTTLKIIKQAILA | | |
| A779T, R847G) | | TDLALYIKRRGEFFELIRKNQFNLEDPHQKELFLAMLMTACDLSAIT | | |
| | | KPWPIQQRITELVATEFFDQGDRERKELNIEPTDLMNREKKNKIPSM | | |
| | | QVGFIDAICLQLYEALTHVSEDCFPLLDGCGKNRQKWQALAEQQ | | |

[0134] In some embodiments, DDs derived from hPDE5 may include one, two, three, four, five, or more of the mutations described in the previous Tables (Table 1 or Table 2).

[0135] In some embodiments, DDs derived from hPDE5 may further comprise one, two, three, four, five or more mutations to the catalytic domain of hPDE5 and may be selected from E535D, E536G, Q541R, K555R, S560G, F559L, F561L, F564L, F564S, S766F, V585A, N587S, K591E, I599V, K604E, K608E, N609H, K630R, K633E, N636S, I648V, N661S, S663P, L675P, Y676D, Y676N, C677R, H678R, D687A, T711A, T712S, D724N, L738H, N742S, F744L, L746S, F755L, A762S, D764V, D764N, D764G, K795E, L797F, I799T, L804P, T802P, S815C, M816A, M816T, I824T, C839S, F840S, and K852E (as listed in Table 3). The position of the mutated amino acid is with respect to the hPDE5 of SEQ ID NO: 1. In Table 3, the mutated amino acids are underlined and in bold. The position of the mutated amino acids listed in Table 3 is relative to the full length hPDE5 of SEQ ID NO:1

TABLE 3
Additional hPDE5 DDs

| | | AA |
|---|---|---|
| hPDE5 mutant | | SEQ |
| description | Amino Acid Sequence | ID NO |
| hPDE5 (Amino | DETRELQSLAAAVVPSAQTLKITDFSFSDFELSDLETALCTIRMFTDLNLVQNFQMKHEVLC | 23 |
| acid 535-860 of | RWILSVKKNYRKNVAYHNWRHAFNTAQCMFAALKAGKIQNKLTDLEILALLIAALSHDLD | |
| WT, E535D) | HRGVNNSYIQRSEHPLAQLYCHSIMEHHHFDQCLMILNSPGNQILSGLSIEEYKTTLKIIKQAI | |
| | LATDLALYIKRRGEFFELIRKNQFNLEDPHQKELFLAMLMTACDLSAITKPWPIQQRIAELV | |
| | ATEFFDQGDRERKELNIEPTDLMNREKKNKIPSMQVGFIDAICLQLYEALTHVSEDCFPLLD | |
| | GCRKNRQKWQALAEQQ | |
| hPDE5 (Amino | EGTRELQSLAAAVVPSAQTLKITDFSFSDFELSDLETALCTIRMFTDLNLVQNFQMKHEVLC | 24 |
| acid 535-860 of | RWILSVKKNYRKNVAYHNWRHAFNTAQCMFAALKAGKIQNKLTDLEILALLIAALSHDLD | |
| WT, E536G) | HRGVNNSYIQRSEHPLAQLYCHSIMEHHHFDQCLMILNSPGNQILSGLSIEEYKTTLKIIKQAI | |
| | LATDLALYIKRRGEFFELIRKNQFNLEDPHQKELFLAMLMTACDLSAITKPWPIQQRIAELV | |
| | ATEFFDQGDRERKELNIEPTDLMNREKKNKIPSMQVGFIDAICLQLYEALTHVSEDCFPLLD | |
| | GCRKNRQKWQALAEQQ | |
| hPDE5 (Amino | EETREERSLAAAVVPSAQTLKITDFSFSDFELSDLETALCTIRMFTDLNLVQNFQMKHEVLC | 25 |
| acid 535-860 of | RWILSVKKNYRKNVAYHNWRHAFNTAQCMFAALKAGKIQNKLTDLEILALLIAALSHDLD | |
| WT, Q541R) | HRGVNNSYIQRSEHPLAQLYCHSIMEHHHFDQCLMILNSPGNQILSGLSIEEYKTTLKIIKQAI | |
| | LATDLALYIKRRGEFFELIRKNQFNLEDPHQKELFLAMLMTACDLSAITKPWPIQQRIAELV | |
| | ATEFFDQGDRERKELNIEPTDLMNREKKNKIPSMQVGFIDAICLQLYEALTHVSEDCFPLLD | |
| | GCRKNRQKWQALAEQQ | |
| hPDE5 (Amino | EETRELQSLAAAVVPSAQTLRITDFSFSDFELSDLETALCTIRMFTDLNLVQNFQMKHEVLC | 26 |
| acid 535-860 of | RWILSVKKNYRKNVAYHNWRHAFNTAQCMFAALKAGKIQNKLTDLEILALLIAALSHDLD | |
| WT, K555R) | HRGVNNSYIQRSEHPLAQLYCHSIMEHHHFDQCLMILNSPGNQILSGLSIEEYKTTLKIIKQAI | |
| | LATDLALYIKRRGEFFELIRKNQFNLEDPHQKELFLAMLMTACDLSAITKPWPIQQRIAELV | |
| | ATEFFDQGDRERKELNIEPTDLMNREKKNKIPSMQVGFIDAICLQLYEALTHVSEDCFPLLD | |
| | GCRKNRQKWQALAEQQ | |
| hPDE5 (Amino | EETRELQSLAAAVVPSAQTLKITDLSFSDFELSDLETALCTIRMFTDLNLVQNFQMKHEVLC | 27 |
| acid 535-860 of | RWILSVKKNYRKNVAYHNWRHAFNTAQCMFAALKAGKIQNKLTDLEILALLIAALSHDLD | |
| WT, F559L) | HRGVNNSYIQRSEHPLAQLYCHSIMEHHHFDQCLMILNSPGNQILSGLSIEEYKTTLKIIKQAI | |
| | LATDLALYIKRRGEFFELIRKNQFNLEDPHQKELFLAMLMTACDLSAITKPWPIQQRIAELV | |
| | ATEFFDQGDRERKELNIEPTDLMNREKKNKIPSMQVGFIDAICLQLYEALTHVSEDCFPLLD | |
| | GCRKNRQKWQALAEQQ | |
| hPDE5 (Amino | EETRELQSLAAAVVPSAQTLKITDFSLSDFELSDLETALCTIRMFTDLNLVQNFQMKHEVLC | 28 |
| acid 535-860 of | RWILSVKKNYRKNVAYHNWRHAFNTAQCMFAALKAGKIQNKLTDLEILALLIAALSHDLD | |
| WT, F561L) | HRGVNNSYIQRSEHPLAQLYCHSIMEHHHFDQCLMILNSPGNQILSGLSIEEYKTTLKIIKQAI | |
| | LATDLALYIKRRGEFFELIRKNQFNLEDPHQKELFLAMLMTACDLSAITKPWPIQQRIAELV | |
| | ATEFFDQGDRERKELNIEPTDLMNREKKNKIPSMQVGFIDAICLQLYEALTHVSEDCFPLLD | |
| | GCRKNRQKWQALAEQQ | |
| hPDE5 (Amino | EETRELQSLAAAVVPSAQTLKITDFSFSDLELSDLETALCTIRMFTDLNLVQNFQMKHEVLC | 29 |
| acid 535-860 of | RWILSVKKNYRKNVAYHNWRHAFNTAQCMFAALKAGKIQNKLTDLEILALLIAALSHDLD | |
| WT, F564L) | HRGVNNSYIQRSEHPLAQLYCHSIMEHHHFDQCLMILNSPGNQILSGLSIEEYKTTLKIIKQAI | |
| | LATDLALYIKRRGEFFELIRKNQFNLEDPHQKELFLAMLMTACDLSAITKPWPIQQRIAELV | |
| | ATEFFDQGDRERKELNIEPTDLMNREKKNKIPSMQVGFIDAICLQLYEALTHVSEDCFPLLD | |
| | GCRKNRQKWQALAEQQ | |
| hPDE5 (Amino | EETRELQSLAAAVVPSAQTLKITDFSFSDSELSDLETALCTIRMFTDLNLVQNFQMKHEVLC | 30 |
| acid 535-860 of | RWILSVKKNYRKNVAYHNWRHAFNTAQCMFAALKAGKIQNKLTDLEILALLIAALSHDLD | |
| WT, F564S) | HRGVNNSYIQRSEHPLAQLYCHSIMEHHHFDQCLMILNSPGNQILSGLSIEEYKTTLKIIKQAI | |
| | LATDLALYIKRRGEFFELIRKNQFNLEDPHQKELFLAMLMTACDLSAITKPWPIQQRIAELV | |
| | ATEFFDQGDRERKELNIEPTDLMNREKKNKIPSMQVGFIDAICLQLYEALTHVSEDCFPLLD | |
| | GCRKNRQKWQALAEQQ | |
| hPDE5 (Amino | EETRELQSLAAAVVPSAQTLKITDFSFSDFELSDLETALCTIRMFTDENLVQNFQMEHEVLC | 31 |
| acid 535-860 of | RWILSVKKNYRKNVAYHNWRHAFNTAQCMFAALKAGKIQNKLTDLEILALLIAALSHDLD | |
| WT, K591E) | HRGVNNSYIQRSEHPLAQLYCHSIMEHHHFDQCLMILNSPGNQILSGLSIEEYKTTLKIIKQAI | |
| | LATDLALYIKRRGEFFELIRKNQFNLEDPHQKELFLAMLMTACDLSAITKPWPIQQRIAELV | |
| | ATEFFDQGDRERKELNIEPTDLMNREKKNKIPSMQVGFIDAICLQLYEALTHVSEDCFPLLD | |
| | GCRKNRQKWQALAEQQ | |
| hPDE5 (Amino | EETRELQSLAAAVVPSAQTLKITDFSFSDFELSDLETALCTIRMFTDENLVQSFQMKHEVLC | 32 |
| acid 535-860 of | RWILSVKKNYRKNVAYHNWRHAFNTAQCMFAALKAGKIQNKLTDLEILALLIAALSHDLD | |
| WT, N587S) | HRGVNNSYIQRSEHPLAQLYCHSIMEHHHFDQCLMILNSPGNQILSGLSIEEYKTTLKIIKQAI | |
| | LATDLALYIKRRGEFFELIRKNQFNLEDPHQKELFLAMLMTACDLSAITKPWPIQQRIAELV | |
| | ATEFFDQGDRERKELNIEPTDLMNREKKNKIPSMQVGFIDAICLQLYEALTHVSEDCFPLLD | |
| | GCRKNRQKWQALAEQQ | |
| hPDE5 (Amino | EETRELQSLAAAVVPSAQTLKITDFSFSDFELSDLETALCTIRMFTDLNLVQNFQMKHEVLC | 33 |
| acid 535-860 of | RWILSVKENYRKNVAYHNWRHAFNTAQCMFAALKAGKIQNKLTDLEILALLIAALSHDLD | |
| WT, K604E) | HRGVNNSYIQRSEHPLAQLYCHSIMEHHHFDQCLMILNSPGNQILSGLSIEEYKTTLKIIKQAI | |
| | LATDLALYIKRRGEFFELIRKNQFNLEDPHQKELFLAMLMTACDLSAITKPWPIQQRIAELV | |
| | ATEFFDQGDRERKELNIEPTDLMNREKKNKIPSMQVGFIDAICLQLYEALTHVSEDCFPLLD | |
| | GCRKNRQKWQALAEQQ | |
| hPDE5 (Amino | EETRELQSLAAAVVPSAQTLKITDFSFSDFELSDLETALCTIRMFTDLNLVQNFQMKHEVLC | 34 |
| acid 535-860 of | RWILSVKKNYRENVAYHNWRHAFNTAQCMFAALKAGKIQNKLTDLEILALLIAALSHDLD | |
| WT, K608E) | HRGVNNSYIQRSEHPLAQLYCHSIMEHHHFDQCLMILNSPGNQILSGLSIEEYKTTLKIIKQAI | |
| | LATDLALYIKRRGEFFELIRKNQFNLEDPHQKELFLAMLMTACDLSAITKPWPIQQRIAELV | |
| | ATEFFDQGDRERKELNIEPTDLMNREKKNKIPSMQVGFIDAICLQLYEALTHVSEDCFPLLD | |
| | GCRKNRQKWQALAEQQ | |
| hPDE5 (Amino | EETRELQSLAAAVVPSAQTLKITDFSFSDFELSDLETALCTIRMFTDLNLVQNFQMKHEVLC | 35 |
| acid 535-860 of | RWILSVKKNYRKHVAYHNWRHAFNTAQCMFAALKAGKIQNKLTDLEILALLIAALSHDLD | |
| WT, N609H) | HRGVNNSYIQRSEHPLAQLYCHSIMEHHHFDQCLMILNSPGNQILSGLSIEEYKTTLKIIKQAI | |
| | LATDLALYIKRRGEFFELIRKNQFNLEDPHQKELFLAMLMTACDLSAITKPWPIQQRIAELV | |
| | ATEFFDQGDRERKELNIEPTDLMNREKKNKIPSMQVGFIDAICLQLYEALTHVSEDCFPLLD | |
| | GCRKNRQKWQALAEQQ | |
| hPDE5 (Amino | EETRELQSLAAAVVPSAQTLKITDFSFSDFELSDLETALCTIRMFTDLNLVQNFQMKHEVLC | 36 |
| acid 535-860 of | RWILSVKKNYRKNVAYHNWRHAFNTAQCMFAALRAGKIQNKLTDLEILALLIAALSHDLD | |
| WT, K630R) | HRGVNNSYIQRSEHPLAQLYCHSIMEHHHFDQCLMILNSPGNQILSGLSIEEYKTTLKIIKQAI | |
| | LATDLALYIKRRGEFFELIRKNQFNLEDPHQKELFLAMLMTACDLSAITKPWPIQQRIAELV | |
| | ATEFFDQGDRERKELNIEPTDLMNREKKNKIPSMQVGFIDAICLQLYEALTHVSEDCFPLLD | |
| | GCRKNRQKWQALAEQQ | |
| hPDE5 (Amino | EETRELQSLAAAVVPSAQTLKITDFSFSDFELSDLETALCTIRMFTDLNLVQNFQMKHEVLC | 37 |
| acid 535-860 of | RWILSVKKNYRKNVAYHNWRHAFNTAQCMFAALKAGEIQNKLTDLEILALLIAALSHDLD | |
| WT, K633E) | HRGVNNSYIQRSEHPLAQLYCHSIMEHHHFDQCLMILNSPGNQILSGLSIEEYKTTLKIIKQAI | |
| | LATDLALYIKRRGEFFELIRKNQFNLEDPHQKELFLAMLMTACDLSAITKPWPIQQRIAELV | |
| | ATEFFDQGDRERKELNIEPTDLMNREKKNKIPSMQVGFIDAICLQLYEALTHVSEDCFPLLD | |
| | GCRKNRQKWQALAEQQ | |
| hPDE5 (Amino | EETRELQSLAAAVVPSAQTLKITDFSFSDFELSDLETALCTIRMFTDLNLVQNFQMKHEVLC | 38 |
| acid 535-860 of | RWILSVKKNYRKNVAYHNWRHAFNTAQCMFAALKAGKIQSKLTDLEILALLIAALSHDLD | |
| WT, N636S) | HRGVNNSYIQRSEHPLAQLYCHSIMEHHHFDQCLMILNSPGNQILSGLSIEEYKTTLKIIKQAI | |
| | LATDLALYIKRRGEFFELIRKNQFNLEDPHQKELFLAMLMTACDLSAITKPWPIQQRIAELV | |
| | ATEFFDQGDRERKELNIEPTDLMNREKKNKIPSMQVGFIDAICLQLYEALTHVSEDCFPLLD | |
| | GCRKNRQKWQALAEQQ | |
| hPDE5 (Amino | EETRELQSLAAAVVPSAQTLKITDFSFSDFELSDLETALCTIRMFTDLNLVQNFQMKHEVLC | 39 |
| acid 535-860 of | RWILSVKKNYRKNVAYHNWRHAFNTAQCMFAALKAGKIQNKLTDLEILALLIAALSHDLD | |
| WT, N661S) | HRGVSNSYIQRSEHPLAQLYCHSIMEHHHFDQCLMILNSPGNQILSGLSIEEYKTTLKIIKQAI | |
| | LATDLALYIKRRGEFFELIRKNQFNLEDPHQKELFLAMLMTACDLSAITKPWPIQQRIAELV | |
| | ATEFFDQGDRERKELNIEPTDLMNREKKNKIPSMQVGFIDAICLQLYEALTHVSEDCFPLLD | |
| | GCRKNRQKWQALAEQQ | |
| hPDE5 (Amino | EETRELQSLAAAVVPSAQTLKITDFSFSDFELSDLETALCTIRMFTDLNLVQNFQMKHEVLC | 40 |
| acid 535-860 of | RWILSVKKNYRKNVAYHNWRHAFNTAQCMFAALKAGKIQNKLTDLEILALLIAALSHDLD | |
| WT, Y676D) | HRGVNNSYIQRSEHPLAQLDCHSIMEHHHFDQCLMILNSPGNQILSGESIEEYKTTLKIIKQAI | |
| | LATDLALYIKRRGEFFELIRKNQFNLEDPHQKELFLAMLMTACDLSAITKPWPIQQRIAELV | |
| | ATEFFDQGDRERKELNIEPTDLMNREKKNKIPSMQVGFIDAICLQLYEALTHVSEDCFPLLD | |
| | GCRKNRQKWQALAEQQ | |
| hPDE5 (Amino | EETRELQSLAAAVVPSAQTLKITDFSFSDFELSDLETALCTIRMFTDLNLVQNFQMKHEVLC | 41 |
| acid 535-860 of | RWILSVKKNYRKNVAYHNWRHAFNTAQCMFAALKAGKIQNKLTDLEILALLIAALSHDLD | |
| WT, Y676N) | HRGVNNSYIQRSEHPLAQLNCHSIMEHHHFDQCLMILNSPGNQILSGLSIEEYKTTLKIIKQAI | |
| | LATDLALYIKRRGEFFELIRKNQFNLEDPHQKELFLAMLMTACDLSAITKPWPIQQRIAELV | |
| | ATEFFDQGDRERKELNIEPTDLMNREKKNKIPSMQVGFIDAICLQLYEALTHVSEDCFPLLD | |
| | GCRKNRQKWQALAEQQ | |
| hPDE5 (Amino | EETRELQSLAAAVVPSAQTLKITDFSFSDFELSDLETALCTIRMFTDLNLVQNFQMKHEVLC | 42 |
| acid 535-860 of | RWILSVKKNYRKNVAYHNWRHAFNTAQCMFAALKAGKIQNKLTDLEILALLIAALSHDLD | |
| WT, C677R) | HRGVNNSYIQRSEHPLAQLYRHSIMEHHHFDQCLMILNSPGNQILSGLSIEEYKTTLKIIKQA | |
| | ILATDLALYIKRRGEFFELIRKNQFNLEDPHQKELFLAMLMTACDLSAITKPWPIQQRIAELV | |
| | ATEFFDQGDRERKELNIEPTDLMNREKKNKIPSMQVGFIDAICLQLYEALTHVSEDCFPLLD | |
| | GCRKNRQKWQALAEQQ | |
| hPDE5 (Amino | EETRELQSLAAAVVPSAQTLKITDFSFSDFELSDLETALCTIRMFTDLNLVQNFQMKHEVLC | 43 |
| acid 535-860 of | RWILSVKKNYRKNVAYHNWRHAFNTAQCMFAALKAGKIQNKLTDLEILALLIAALSHDLD | |
| WT, H678R) | HRGVNNSYIQRSEHPLAQLYCRSIMEHHHFDQCLMILNSPGNQILSGESIEEYKTTLKIIKQAI | |
| | LATDLALYIKRRGEFFELIRKNQFNLEDPHQKELFLAMLMTACDLSAITKPWPIQQRIAELV | |
| | ATEFFDQGDRERKELNIEPTDLMNREKKNKIPSMQVGFIDAICLQLYEALTHVSEDCFPLLD | |
| | GCRKNRQKWQALAEQQ | |
| hPDE5 (Amino | EETRELQSLAAAVVPSAQTLKITDFSFSDFELSDLETALCTIRMFTDLNLVQNFQMKHEVLC | 44 |
| acid 535-860 of | RWILSVKKNYRKNVAYHNWRHAFNTAQCMFAALKAGKIQNKLTDLEILALLIAALSHDLD | |
| WT, D687A) | HRGVNNSYIQRSEHPLAQLYCHSIMEHHHFAQCLMILNSPGNQILSGESIEEYKTTLKIIKQAI | |
| | LATDLALYIKRRGEFFELIRKNQFNLEDPHQKELFLAMLMTACDLSAITKPWPIQQRIAELV | |
| | ATEFFDQGDRERKELNIEPTDLMNREKKNKIPSMQVGFIDAICLQLYEALTHVSEDCFPLLD | |
| | GCRKNRQKWQALAEQQ | |
| hPDE5 (Amino | EETRELQSLAAAVVPSAQTLKITDFSFSDFELSDLETALCTIRMFTDLNLVQNFQMKHEVLC | 45 |
| acid 535-860 of | RWILSVKKNYRKNVAYHNWRHAFNTAQCMFAALKAGKIQNKLTDLEILALLIAALSHDLD | |
| WT, T712S) | HRGVNNSYIQRSEHPLAQLYCHSIMEHHHFDQCLMILNSPGNQILSGESIEEYKTSLKIIKQAI | |
| | LATDLALYIKRRGEFFELIRKNQFNLEDPHQKELFLAMLMTACDLSAITKPWPIQQRIAELV | |
| | ATEFFDQGDRERKELNIEPTDLMNREKKNKIPSMQVGFIDAICLQLYEALTHVSEDCFPLLD | |
| | GCRKNRQKWQALAEQQ | |
| hPDE5 (Amino | EETRELQSLAAAVVPSAQTLKITDFSFSDFELSDLETALCTIRMFTDLNLVQNFQMKHEVLC | 46 |
| acid 535-860 of | RWILSVKKNYRKNVAYHNWRHAFNTAQCMFAALKAGKIQNKLTDLEILALLIAALSHDLD | |
| WT, D724N) | HRGVNNSYIQRSEHPLAQLYCHSIMEHHHFDQCLMILNSPGNQILSGLSIEEYKTTLKIIKQAI | |
| | LATNLALYIKRRGEFFELIRKNQFNLEDPHQKELFLAMLMTACDLSAITKPWPIQQRIAELV | |
| | ATEFFDQGDRERKELNIEPTDLMNREKKNKIPSMQVGFIDAICLQLYEALTHVSEDCFPLLD | |
| | GCRKNRQKWQALAEQQ | |
| hPDE5 (Amino | EETRELQSLAAAVVPSAQTLKITDFSFSDFELSDLETALCTIRMFTDLNLVQNFQMKHEVLC | 47 |
| acid 535-860 of | RWILSVKKNYRKNVAYHNWRHAFNTAQCMFAALKAGKIQNKLTDLEILALLIAALSHDLD | |
| WT, D724G) | HRGVNNSYIQRSEHPLAQLYCHSIMEHHHFDQCLMILNSPGNQILSGLSIEEYKTTLKIIKQAI | |
| | LATGLALYIKRRGEFFELIRKNQFNLEDPHQKELFLAMLMTACDLSAITKPWPIQQRIAELV | |
| | ATEFFDQGDRERKELNIEPTDLMNREKKNKIPSMQVGFIDAICLQLYEALTHVSEDCFPLLD | |
| | GCRKNRQKWQALAEQQ | |
| hPDE5 (Amino | EETRELQSLAAAVVPSAQTLKITDFSFSDFELSDLETALCTIRMFTDLNLVQNFQMKHEVLC | 48 |
| acid 535-860 of | RWILSVKKNYRKNVAYHNWRHAFNTAQCMFAALKAGKIQNKLTDLEILALLIAALSHDLD | |
| WT, L738H) | HRGVNNSYIQRSEHPLAQLYCHSIMEHHHFDQCLMILNSPGNQILSGLSIEEYKTTLKIIKQAI | |
| | LATDLALYIKRRGEFFEHIRKNQFNLEDPHQKELFLAMLMTACDLSAITKPWPIQQRIAELV | |
| | ATEFFDQGDRERKELNIEPTDLMNREKKNKIPSMQVGFIDAICLQLYEALTHVSEDCFPLLD | |
| | GCRKNRQKWQALAEQQ | |
| hPDE5 (Amino | EETRELQSLAAAVVPSAQTLKITDFSFSDFELSDLETALCTIRMFTDLNLVQNFQMKHEVLC | 49 |
| acid 535-860 of | RWILSVKKNYRKNVAYHNWRHAFNTAQCMFAALKAGKIQNKLTDLEILALLIAALSHDLD | |
| WT, N742S) | HRGVNNSYIQRSEHPLAQLYCHSIMEHHHFDQCLMILNSPGNQILSGLSIEEYKTTLKIIKQAI | |
| | LATDLALYIKRRGEFFELIRKSQFNLEDPHQKELFLAMLMTACDLSAITKPWPIQQRIAELV | |
| | ATEFFDQGDRERKELNIEPTDLMNREKKNKIPSMQVGFIDAICLQLYEALTHVSEDCFPLLD | |
| | GCRKNRQKWQALAEQQ | |
| hPDE5 (Amino | EETRELQSLAAAVVPSAQTLKITDFSFSDFELSDLETALCTIRMFTDLNLVQNFQMKHEVLC | 50 |
| acid 535-860 of | RWILSVKKNYRKNVAYHNWRHAFNTAQCMFAALKAGKIQNKLTDLEILALLIAALSHDLD | |
| WT, A762S) | HRGVNNSYIQRSEHPLAQLYCHSIMEHHHFDQCLMILNSPGNQILSGLSIEEYKTTLKIIKQAI | |
| | LATDLALYIKRRGEFFELIRKNQFNLEDPHQKELFLAMLMTSCDLSAITKPWPIQQRIAELV | |
| | ATEFFDQGDRERKELNIEPTDLMNREKKNKIPSMQVGFIDAICLQLYEALTHVSEDCFPLLD | |
| | GCRKNRQKWQALAEQQ | |
| hPDE5 (Amino | EETRELQSLAAAVVPSAQTLKITDFSFSDFELSDLETALCTIRMFTDLNLVQNFQMKHEVLC | 51 |
| acid 535-860 of | RWILSVKKNYRKNVAYHNWRHAFNTAQCMFAALKAGKIQNKLTDLEILALLIAALSHDLD | |
| WT, D764N) | HRGVNNSYIQRSEHPLAQLYCHSIMEHHHFDQCLMILNSPGNQILSGLSIEEYKTTLKIIKQAI | |
| | LATDLALYIKRRGEFFELIRKNQFNLEDPHQKELFLAMLMTACNLSAITKPWPIQQRIAELV | |
| | ATEFFDQGDRERKELNIEPTDLMNREKKNKIPSMQVGFIDAICLQLYEALTHVSEDCFPLLD | |
| | GCRKNRQKWQALAEQQ | |
| hPDE5 (Amino | EETRELQSLAAAVVPSAQTLKITDFSFSDFELSDLETALCTIRMFTDLNLVQNFQMKHEVLC | 52 |
| acid 535-860 of | RWILSVKKNYRKNVAYHNWRHAFNTAQCMFAALKAGKIQNKLTDLEILALLIAALSHDLD | |
| WT, D764G) | HRGVNNSYIQRSEHPLAQLYCHSIMEHHHFDQCLMILNSPGNQILSGLSIEEYKTTLKIIKQAI | |
| | LATDLALYIKRRGEFFELIRKNQFNLEDPHQKELFLAMLMTACGLSAITKPWPIQQRIAELV | |
| | ATEFFDQGDRERKELNIEPTDLMNREKKNKIPSMQVGFIDAICLQLYEALTHVSEDCFPLLD | |
| | GCRKNRQKWQALAEQQ | |
| hPDE5 (Amino | EETRELQSLAAAVVPSAQTLKITDFSFSDFELSDLETALCTIRMFTDLNLVQNFQMKHEVLC | 53 |
| acid 535-860 of | RWILSVKKNYRKNVAYHNWRHAFNTAQCMFAALKAGKIQNKLTDLEILALLIAALSHDLD | |
| WT, D764V) | HRGVNNSYIQRSEHPLAQLYCHSIMEHHHFDQCLMILNSPGNQILSGLSIEEYKTTLKIIKQAI | |
| | LATDLALYIKRRGEFFELIRKNQFNLEDPHQKELFLAMLMTACVLSAITKPWPIQQRIAELV | |
| | ATEFFDQGDRERKELNIEPTDLMNREKKNKIPSMQVGFIDAICLQLYEALTHVSEDCFPLLD | |
| | GCRKNRQKWQALAEQQ | |
| hPDE5 (Amino | EETRELQSLAAAVVPSAQTLKITDFSFSDFELSDLETALCTIRMFTDLNLVQNFQMKHEVLC | 54 |
| acid 535-860 of | RWILSVKKNYRKNVAYHNWRHAFNTAQCMFAALKAGKIQNKLTDLEILALLIAALSHDLD | |
| WT, S766F) | HRGVNNSYIQRSEHPLAQLYCHSIMEHHHFDQCLMILNSPGNQILSGLSIEEYKTTLKIIKQAI | |
| | LATDLALYIKRRGEFFELIRKNQFNLEDPHQKELFLAMLMTACDLFAITKPWPIQQRIAELV | |
| | ATEFFDQGDRERKELNIEPTDLMNREKKNKIPSMQVGFIDAICLQLYEALTHVSEDCFPLLD | |
| | GCRKNRQKWQALAEQQ | |
| hPDE5 (Amino | EETRELQSLAAAVVPSAQTLKITDFSFSDFELSDLETALCTIRMFTDLNLVQNFQMKHEVLC | 55 |
| acid 535-860 of | RWILSVKKNYRKNVAYHNWRHAFNTAQCMFAALKAGKIQNKLTDLEILALLIAALSHDLD | |
| WT, K795E) | HRGVNNSYIQRSEHPLAQLYCHSIMEHHHFDQCLMILNSPGNQILSGLSIEEYKTTLKIIKQAI | |
| | LATDLALYIKRRGEFFELIRKNQFNLEDPHQKELFLAMLMTACDLSAITKPWPIQQRIAELV | |
| | ATEFFDQGDREREELNIEPTDLMNREKKNKIPSMQVGFIDAICLQLYEALTHVSEDCFPLLD | |
| | GCRKNRQKWQALAEQQ | |
| hPDE5 (Amino | EETRELQSLAAAVVPSAQTLKITDFSFSDFELSDLETALCTIRMFTDLNLVQNFQMKHEVLC | 56 |
| acid 535-860 of | RWILSVKKNYRKNVAYHNWRHAFNTAQCMFAALKAGKIQNKLTDLEILALLIAALSHDLD | |
| WT, L797F) | HRGVNNSYIQRSEHPLAQLYCHSIMEHHHFDQCLMILNSPGNQILSGLSIEEYKTTLKIIKQAI | |
| | LATDLALYIKRRGEFFELIRKNQFNLEDPHQKELFLAMLMTACDLSAITKPWPIQQRIAELV | |
| | ATEFFDQGDRERKEFNIEPTDLMNREKKNKIPSMQVGFIDAICLQLYEALTHVSEDCFPLLD | |
| | GCRKNRQKWQALAEQQ | |
| hPDE5 (Amino | EETRELQSLAAAVVPSAQTLKITDFSFSDFELSDLETALCTIRMFTDLNLVQNFQMKHEVLC | 57 |
| acid 535-860 of | RWILSVKKNYRKNVAYHNWRHAFNTAQCMFAALKAGKIQNKLTDLEILALLIAALSHDLD | |
| WT, I799T) | HRGVNNSYIQRSEHPLAQLYCHSIMEHHHFDQCLMINSPGNQILSGLSIEEYKTTLKIIKQAI | |
| | LATDLALYIKRRGEFFELIRKNQFNLEDPHQKELFLAMLMTACDLSAITKPWPIQQRIAELV | |
| | ATEFFDQGDRERKELNTEPTDLMNREKKNKIPSMQVGFIDAICLQLYEALTHVSEDCFPLLD | |
| | GCRKNRQKWQALAEQQ | |
| hPDE5 (Amino | EETRELQSLAAAVVPSAQTLKITDFSFSDFELSDLETALCTIRMFTDLNLVQNFQMKHEVLC | 58 |
| acid 535-860 of | RWILSVKKNYRKNVAYHNWRHAFNTAQCMFAALKAGKIQNKLTDLEILALLIAALSHDLD | |
| WT, T802P) | HRGVNNSYIQRSEHPLAQLYCHSIMEHHHFDQCLMINSPGNQILSGLSIEEYKTTLKIIKQAI | |
| | LATDLALYIKRRGEFFEHIRKNQFNLEDPHQKELFLAMLMTACDLSAITKPWPIQQRIAELV | |
| | ATEFFDQGDRERKELNIEPPDLMNREKKNKIPSMQVGFIDAICLQLYEALTHVSEDCFPLLD | |
| | GCRKNRQKWQALAEQQ | |
| hPDE5 (Amino | EETRELQSLAAAVVPSAQTLKITDFSFSDFELSDLETALCTIRMFTDLNLVQNFQMKHEVLC | 59 |
| acid 535-860 of | RWILSVKKNYRKNVAYHNWRHAFNTAQCMFAALKAGKIQNKLTDLEILALLIAALSHDLD | |
| WT, S815C) | HRGVNNSYIQRSEHPLAQLYCHSIMEHHHFDQCLMINSPGNQILSGLSIEEYKTTLKIIKQAI | |
| | LATDLALYIKRRGEFFELIRKNQFNLEDPHQKELFLAMLMTACDLSAITKPWPIQQRIAELV | |
| | ATEFFDQGDRERKELNIEPTDLMNREKKNKIPCMQVGFIDAICLQLYEALTHVSEDCFPLLD | |
| | GCRKNRQKWQALAEQQ | |
| hPDE5 (Amino | EETRELQSLAAAVVPSAQTLKITDFSFSDFELSDLETALCTIRMFTDLNLVQNFQMKHEVLC | 60 |
| acid 535-860 of | RWILSVKKNYRKNVAYHNWRHAFNTAQCMFAALKAGKIQNKLTDLEILALLIAALSHDLD | |
| WT, M816A) | HRGVNNSYIQRSEHPLAQLYCHSIMEHHHFDQCLMINSPGNQILSGLSIEEYKTTLKIIKQAI | |
| | LATDLALYIKRRGEFFELIRKNQFNLEDPHQKELFLAMLMTACDLSAITKPWPIQQRIAELV | |
| | ATEFFDQGDRERKELNIEPTDLMNREKKNKIPSAQVGFIDAICLQLYEALTHVSEDCFPLLD | |
| | GCRKNRQKWQALAEQQ | |
| hPDE5 (Amino | EETRELQSLAAAVVPSAQTLKITDFSFSDFELSDLETALCTIRMFTDLNLVQNFQMKHEVLC | 61 |
| acid 535-860 of | RWILSVKKNYRKNVAYHNWRHAFNTAQCMFAALKAGKIQNKLTDLEILALLIAALSHDLD | |
| WT, I824T) | HRGVNNSYIQRSEHPLAQLYCHSIMEHHHFDQCLMINSPGNQILSGLSIEEYKTTLKIIKQAI | |
| | LATDLALYIKRRGEFFELIRKNQFNLEDPHQKELFLAMLMTACDLSAITKPWPIQQRIAELV | |
| | ATEFFDQGDRERKELNIEPTDLMNREKKNKIPSMQVGFIDATCLQLYEALTHVSEDCFPLLD | |
| | GCRKNRQKWQALAEQQ | |
| hPDE5 (Amino | EETRELQSLAAAVVPSAQTLKITDFSFSDFELSDLETALCTIRMFTDLNLVQNFQMKHEVLC | 62 |
| acid 535-860 of | RWILSVKKNYRKNVAYHNWRHAFNTAQCMFAALKAGKIQNKLTDLEILALLIAALSHDLD | |
| WT, C839S) | HRGVNNSYIQRSEHPLAQLYCHSIMEHHHFDQCLMINSPGNQILSGLSIEEYKTTLKIIKQAI | |
| | LATDLALYIKRRGEFFELIRKNQFNLEDPHQKELFLAMLMTACDLSAITKPWPIQQRIAELV | |
| | ATEFFDQGDRERKELNIEPTDLMNREKKNKIPSMQVGFIDAICLQLYEALTHVSEDSFPLLD | |
| | GCRKNRQKWQALAEQQ | |
| hPDE5 (Amino | EETRELQSLAAAVVPSAQTLKITDFSFSDFELSDLETALCTIRMFTDLNLVQNFQMKHEVLC | 63 |
| acid 535-860 of | RWILSVKKNYRKNVAYHNWRHAFNTAQCMFAALKAGKIQNKLTDLEILALLIAALSHDLD | |
| WT, K852E) | HRGVNNSYIQRSEHPLAQLYCHSIMEHHHFDQCLMINSPGNQILSGLSIEEYKTTLKIIKQAI | |
| | LATDLALYIKRRGEFFELIRKNQFNLEDPHQKELFLAMLMTACDLSAITKPWPIQQRIAELV | |
| | ATEFFDQGDRERKELNIEPTDLMNREKKNKIPSMQVGFIDAICLQLYEALTHVSEDCFPLLD | |
| | GCRKNRQEWQALAEQQ | |
| hPDE5 (Amino | EETRELQSLAAAVVPSAQTLKITDFGFSDFELSDLETALCTIRMFTDLNLVQNFQMKHEVLC | 64 |
| acid 535-860 of | RWILSVKKNYRKNVAYHNWRHAFNTAQCMFAALKAGKIQNKLTDLEILALLIAALSHDLD | |
| WT, S560G) | HRGVNNSYIQRSEHPLAQLYCHSIMEHHHFDQCLMINSPGNQILSGLSIEEYKTTLKIIKQAI | |
| | LATDLALYIKRRGEFFELIRKNQFNLEDPHQKELFLAMLMTACDLSAITKPWPIQQRIAELV | |
| | ATEFFDQGDRERKELNIEPTDLMNREKKNKIPSMQVGFIDAICLQLYEALTHVSEDCFPLLD | |
| | GCRKNRQKWQALAEQQ | |
| hPDE5 (Amino | EETRELQSLAAAVVPSAQTLKITDFSFSDFELSDLETALCTIRMFTDLNLAQNFQMKHEVLC | 65 |
| acid 535-860 of | RWILSVKKNYRKNVAYHNWRHAFNTAQCMFAALKAGKIQNKLTDLEILALLIAALSHDLD | |
| WT, V585A) | HRGVNNSYIQRSEHPLAQLYCHSIMEHHHFDQCLMINSPGNQILSGLSIEEYKTTLKIIKQAI | |
| | LATDLALYIKRRGEFFELIRKNQFNLEDPHQKELFLAMLMTACDLSAITKPWPIQQRIAELV | |
| | ATEFFDQGDRERKELNIEPTDLMNREKKNKIPSMQVGFIDAICLQLYEALTHVSEDCFPLLD | |
| | GCRKNRQKWQALAEQQ | |
| hPDE5 (Amino | EETRELQSLAAAVVPSAQTLKITDFSFSDFELSDLETALCTIRMFTDLNLVQNFQMKHEVLC | 66 |
| acid 535-860 of | RWVLSVKKNYRKNVAYHNWRHAFNTAQCMFAALKAGKIQNKLTDLEILALLIAALSHDL | |
| WT, I599V) | DHRGVNNSYIQRSEHPLAQLYCHSIMEHHHFDQCLMINSPGNQILSGLSIEEYKTTLKIIKQ | |
| | AILATDLALYIKRRGEFFELIRKNQFNLEDPHQKELFLAMLMTACDLSAITKPWPIQQRIAEL | |
| | VATEFFDQGDRERKELNIEPTDLMNREKKNKIPSMQVGFIDAICLQLYEALTHVSEDCFPLL | |
| | DGCRKNRQKWQALAEQQ | |
| hPDE5 (Amino | EETRELQSLAAAVVPSAQTLKITDFSFSDFELSDLETALCTIRMFTDLNLVQNFQMKHEVLC | 67 |
| acid 535-860 of | RWILSVKKNYRKNVAYHNWRHAFNTAQCMFAALKAGKIQNKLTDLEILALLVAALSHDL | |
| WT, I648V) | DHRGVNNSYIQRSEHPLAQLYCHSIMEHHHEDQCLMILNSPGNQILSGLSIEEYKTTLKIIKQ | |
| | AILATDLALYIKRRGEFFELIRKNQFNLEDPHQKELFLAMLMTACDLSAITKPWPIQQRIAEL | |
| | VATEFFDQGDRERKELNIEPTDLMNREKKNKIPSMQVGFIDAICLQLYEALTHVSEDCFPLL | |
| | DGCRKNRQKWQALAEQQ | |
| hPDE5 (Amino | EETRELQSLAAAVVPSAQTLKITDFSFSDFELSDLETALCTIRMFTDLNLVQNFQMKHEVLC | 68 |
| acid 535-860 of | RWILSVKKNYRKNVAYHNWRHAFNTAQCMFAALKAGKIQNKLTDLEILALLIAALSHDLD | |
| WT, S663P) | HRGVNNPYIQRSEHPLAQLYCHSIMEHHHFDQCLMILNSPGNQILSGLSIEEYKTTLKIIKQA | |
| | ILATDLALYIKRRGEFFELIRKNQFNLEDPHQKELFLAMLMTACDLSAITKPWPIQQRIAELV | |
| | ATEFFDQGDRERKELNIEPTDLMNREKKNKIPSMQVGFIDAICLQLYEALTHVSEDCFPLLD | |
| | GCRKNRQKWQALAEQQ | |
| hPDE5 (Amino | EETRELQSLAAAVVPSAQTLKITDFSFSDFELSDLETALCTIRMFTDLNLVQNFQMKHEVLC | 69 |
| acid 535-860 of | RWILSVKKNYRKNVAYHNWRHAFNTAQCMFAALKAGKIQNKLTDLEILALLIAALSHDLD | |
| WT, L675P) | HRGVNNSYIQRSEHPLAQPYCHSIMEHHHFDQCLMILNSPGNQILSGLSIEEYKTTLKIIKQAI | |
| | LATDLALYIKRRGEFFELIRKNQFNLEDPHQKELFLAMLMTACDLSAITKPWPIQQRIAELV | |
| | ATEFFDQGDRERKELNIEPTDLMNREKKNKIPSMQVGFIDAICLQLYEALTHVSEDCFPLLD | |
| | GCRKNRQKWQALAEQQ | |
| hPDE5 (Amino | EETRELQSLAAAVVPSAQTLKITDFSFSDFELSDLETALCTIRMFTDLNLVQNFQMKHEVLC | 70 |
| acid 535-860 of | RWILSVKKNYRKNVAYHNWRHAFNTAQCMFAALKAGKIQNKLTDLEILALLIAALSHDLD | |
| WT, T711A) | HRGVNNSYIQRSEHPLAQLYCHSIMEHHHFDQCLMILNSPGNQILSGLSIEEYKATLKIIKQA | |
| | ILATDLALYIKRRGEFFELIRKNQFNLEDPHQKELFLAMLMTACDLSAITKPWPIQQRIAELV | |
| | ATEFFDQGDRERKELNIEPTDLMNREKKNKIPSMQVGFIDAICLQLYEALTHVSEDCFPLLD | |
| | GCRKNRQKWQALAEQQ | |
| hPDE5 (Amino | EETRELQSLAAAVVPSAQTLKITDFSFSDFELSDLETALCTIRMFTDLNLVQNFQMKHEVLC | 71 |
| acid 535-860 of | RWILSVKKNYRKNVAYHNWRHAFNTAQCMFAALKAGKIQNKLTDLEILALLIAALSHDLD | |
| WT, F744L) | HRGVNNSYIQRSEHPLAQLYCHSIMEHHHFDQCLMILNSPGNQILSGLSIEEYKTTLKIIKQAI | |
| | LATDLALYIKRRGEFFELIRKNQLNLEDPHQKELFLAMLMTACDLSAITKPWPIQQRIAELV | |
| | ATEFFDQGDRERKELNIEPTDLMNREKKNKIPSMQVGFIDAICLQLYEALTHVSEDCFPLLD | |
| | GCRKNRQKWQALAEQQ | |
| hPDE5 (Amino | EETRELQSLAAAVVPSAQTLKITDFSFSDFELSDLETALCTIRMFTDLNLVQNFQMKHEVLC | 72 |
| acid 535-860 of | RWILSVKKNYRKNVAYHNWRHAFNTAQCMFAALKAGKIQNKLTDLEILALLIAALSHDLD | |
| WT, L746S) | HRGVNNSYIQRSEHPLAQLYCHSIMEHHHFDQCLMILNSPGNQILSGLSIEEYKTTLKIIKQAI | |
| | LATDLALYIKRRGEFFELIRKNQFNSEDPHQKELFLAMLMTACDLSAITKPWPIQQRIAELV | |
| | ATEFFDQGDRERKELNIEPTDLMNREKKNKIPSMQVGFIDAICLQLYEALTHVSEDCFPLLD | |
| | GCRKNRQKWQALAEQQ | |
| hPDE5 (Amino | EETRELQSLAAAVVPSAQTLKITDFSFSDFELSDLETALCTIRMFTDLNLVQNFQMKHEVLC | 73 |
| acid 535-860 of | RWILSVKKNYRKNVAYHNWRHAFNTAQCMFAALKAGKIQNKLTDLEILALLIAALSHDLD | |
| WT, F755L) | HRGVNNSYIQRSEHPLAQLYCHSIMEHHHFDQCLMILNSPGNQILSGLSIEEYKTTLKIIKQAI | |
| | LATDLALYIKRRGEFFELIRKNQFNLEDPHQKELLLAMLMTACDLSAITKPWPIQQRIAELV | |
| | ATEFFDQGDRERKELNIEPTDLMNREKKNKIPSMQVGFIDAICLQLYEALTHVSEDCFPLLD | |
| | GCRKNRQKWQALAEQQ | |
| hPDE5 (Amino | EETRELQSLAAAVVPSAQTLKITDFSFSDFELSDLETALCTIRMFTDLNLVQNFQMKHEVLC | 74 |
| acid 535-860 of | RWILSVKKNYRKNVAYHNWRHAFNTAQCMFAALKAGKIQNKLTDLEILALLIAALSHDLD | |
| WT, L804P) | HRGVNNSYIQRSEHPLAQLYCHSIMEHHHEDQCLMILNSPGNQILSGESIEEYKTTLKIIKQAI | |
| | LATDLALYIKRRGEFFELIRKNQFNLEDPHQKELFLAMLMTACDLSAITKPWPIQQRIAELV | |
| | ATEFFDQGDRERKELNIEPTDPMNREKKNKIPSMQVGFIDAICLQLYEALTHVSEDCFPLLD | |
| | GCRKNRQKWQALAEQQ | |
| hPDE5 (Amino | EETRELQSLAAAVVPSAQTLKITDFSFSDFELSDLETALCTIRMFTDLNLVQNFQMKHEVLC | 75 |
| acid 535-860 of | RWILSVKKNYRKNVAYHNWRHAFNTAQCMFAALKAGKIQNKLTDLEILALLIAALSHDLD | |
| WT, M816T) | HRGVNNSYIQRSEHPLAQLYCHSIMEHHHFDQCLMILNSPGNQILSGLSIEEYKTTLKIIKQAI | |
| | LATDLALYIKRRGEFFELIRKNQFNLEDPHQKELFLAMLMTACDLSAITKPWPIQQRIAELV | |
| | ATEFFDQGDRERKELNIEPTDLMNREKKNKIPSTQVGFIDAICLQLYEALTHVSEDCFPLLD | |
| | GCRKNRQKWQALAEQQ | |
| hPDE5 (Amino | EETRELQSLAAAVVPSAQTLKITDFSFSDFELSDLETALCTIRMFTDLNLVQNFQMKHEVLC | 76 |
| acid 535-860 of | RWILSVKKNYRKNVAYHNWRHAFNTAQCMFAALKAGKIQNKLTDLEILALLIAALSHDLD | |
| WT, F840S) | HRGVNNSYIQRSEHPLAQLYCHSIMEHHHEDQCLMILNSPGNQILSGLSIEEYKTTLKIIKQAI | |
| | LATDLALYIKRRGEFFELIRKNQFNLEDPHQKELFLAMLMTACDLSAITKPWPIQQRIAELV | |
| | ATEFFDQGDRERKELNIEPTDLMNREKKNKIPSMQVGFIDAICLQLYEALTHVSEDCSPLLD | |
| | GCRKNRQKWQALAEQQ | |

[0136] In some embodiments, DDs derived from hPDE5 may include the combination of at least one, two, three, four or five mutations listed in Table 1 or Table 2 with at least 0, 1, 2, 3, 4, 5 or more mutations listed in Table 3.

[0137] In some embodiments, the DDs may be derived from hPDE5 (SEQ ID NO: 3), by mutating one or more amino acids residues between positions 530-550, 550-570, 570-590, 590-610, 620-640, 640-660, 660-680, 680-700, 710-730, 730-750, 750-770, 770-790, 790-810-830, 830-850, 850-860 of the catalytic domain of human PDE5 (SEQ ID NO: 1). In some embodiments, the mutation may be a conserved (with similar physicochemical properties as the amino acid at the mutation site), a semi conserved (e.g., negatively to positively charge amino acid) or a non-conserved (amino acid with different physicochemical properties than the amino acid at the mutation site). In some embodiments, the amino acid lysine may be mutated to glutamic acid or arginine; the amino acid phenylalanine may be mutated to leucine; the amino acid leucine may be mutated to phenylalanine; or the amino acid asparagine may be mutated to serine. Regions or portions or domains of wild type proteins may be utilized as SREs/DDs in whole or in part. They may be combined or rearranged to create new peptides, proteins, regions or domains of which any may be used as SREs/DDs or the starting point for the design of further SREs and/or DDs.

[0138] In some embodiments, DDs may be derived from hPDE5 by mutating amino acid residues conserved within all members of the PDE family. Exemplary conserved residues include but are not limited to, E682, H613, H617, H653, D654, and H657 residues of full length human PDE5 (SEQ ID NO: 1) and are taught in Sung et al. Nature (2003) 425, 98-102 (the contents of which are incorporated herein by reference in their entirety). In other embodiments, residues that are critical for binding to metals such as zinc and magnesium may be mutated to identify novel hPDE5 DDs. In some embodiments, hPDE5 derived DDs may be identified from a library of mutants of hPDE5 catalytic domain generated using a combination of error-prone PCR and nucleotide analog mutagenesis through random mutagenesis. Any of the mutations identified by site directed mutagenesis may be combined with the mutations identified by random mutagenesis. In some embodiments, DDs described herein may be derived by mutating the Y612 amino acid of hPDE5 (SEQ ID NO:1). In some embodiments, the mutations to the Y612 amino acid may be combined with any of the mutations described herein. Independent co-crystals of hPDE5 with vardenafil and with sildenafil, have demonstrated that one of the rings of the both ligand, interacts with Y612 of hPDE5, an amino acid located within the catalytic site of hPDE5. Interactions occur via a hydrogen bond with a water molecule and via hydrophobic bonds. Y612F mutation, which ablates the hydrogen bonding potential, increases the inhibition of hPDE5 activity by both ligands. The Y612A mutation, which leads to the ablation of both hydrogen bonding and hydrophobic bonding potential has been shown to weaken the inhibition of hPDE5 catalytic activity by vardenafil and sildenafil to a lesser extent. These studies suggest that hydrophobic bonding involving Y612 is stronger for vardenafil than for sildenafil (Corbin et al. 2006, International Journal of Impotence Research 18, 251-257; the contents of which are incorporated by reference in their entirety).

[0139] The destabilization domains described herein may also include amino acid and nucleotide substitutions that do not affect stability, including conservative, non-conservative substitutions and or polymorphisms.

[0140] In some embodiments, hPDE5 DDs described herein may also be fragments of the above destabilizing domains, including fragments containing variant amino acid sequences. Preferred fragments are unstable in the absence of the stimulus and stabilized upon addition of the stimulus. Preferred fragments retain the ability to interact with the stimulus with similar efficiency as the DDs described herein.

[0141] In one embodiment, hPDE5 mutants are fused to AcGFP through a linker sequence at either the N-terminal or the C-terminal end of the fusion constructs. The AcGFP of Uniprot ID BAE93141 (SEQ ID NO: 363), may be used as the GFP template and is referred to as the wildtype or “WT” version of AcGFP. In some embodiments, the hPDE5 mutants described herein may also be operably linked to a luciferase (luc) gene, such as the firefly luciferase (Flue) or Renilla luciferase (Rluc). The position of the mutations in the Fluc protein sequence described herein are based on the comparison of the SEQ ID NO: 223 with the wildtype luciferase sequence of Photinus pyralis (Uniprot ID: P08659.1) or “Fluc WT”, comprising the amino acid sequence of SEQ ID NO: 364. The destabilizing and ligand dependent stabilization properties of the fusion proteins may be evaluated by methods such as western blotting, and FACS. hPDE5 mutants that are fused to the N terminus of GFP are provided in Table 4. Constructs may be cloned into any vector known in the art, such as, but not limited to pLVX.IRES. Puro vectors. OT-001232 was placed under the transcriptional control of the EF1a promoter, while the other constructs described in Table 4 were placed under the transcriptional control of CMV promoter. In Table 4, an asterisk indicates the translation of the stop codon.

TABLE 4
hPDE5-AcGFP constructs

| | | Amino | Nucleic |
|---|---|---|---|
| Construct ID/ | | acid | Acid |
| Description | Amino Acid Sequence | SEQ ID NO: | SEQ ID NO: |
| Linker | GGSGGGSGG | 77 | 92 |
| Linker | GGSGGG | 78 | 93; 300 |
| Linker | SG | — | AGTGGT |
| AcGFP (Amino | VSKGAELFTGIVPILIELNGDVNGHKFSVSGEGEGDATYGKLTLKFICTTGK | 79 | 372 |
| acid 2-239 of WT) | LPVPWPTLVTTLSYGVQCFSRYPDHMKQHDFFKSAMPEGYIQERTIFFEDD | | |
| | GNYKSRAEVKFEGDTLVNRIELTGTDFKEDGNILGNKMEYNYNAHNVYIM | | |
| | TDKAKNGIKVNFKIRHNIEDGSVQLADHYQQNTPIGDGPVLLPDNHYLSTQ | | |
| | SALSKDPNEKRDHMIYFGFVTAAAITHGMDELYK | | |
| AcGFP (Amino | MVSKGAELFTGIVPILIELNGDVNGHKFSVSGEGEGDATYGKLTLKFICTTG | 365 | 94, 373 |
| acid 1-239 of WT) | KLPVPWPTLVTTLSYGVQCFSRYPDHMKQHDFFKSAMPEGYIQERTIFFED | | |
| | DGNYKSRAEVKFEGDTLVNRIELTGTDFKEDGNILGNKMEYNYNAHNVYI | | |
| | MTDKAKNGIKVNFKIRHNIEDGSVQLADHYQQNTPIGDGPVLLPDNHYLST | | |
| | QSALSKDPNEKRDHMIYFGFVTAAAITHGMDELYK | | |
| Fluc (Amino acid 2- | EDAKNIKKGPAPFYPLEDGTAGEQLHKAMKRYALVPGTIAFTDAHIEVDIT | 366 | 374 |
| 549 of WT, N50D, | YAEYFEMSVRLAEAMKRYGLNTNHRIVVCSENSLQFFMPVLGALFIGVAV | | |
| N119G, S548I, | APANDIYNERELLNSMGISQPTVVFVSKKGLQKILNVQKKLPIIQKIIIMDSK | | |
| K549A, L550V) | TDYQGFQSMYTFVTSHLPPGFNEYDFVPESFDRDKTIALIMNSSGSTGLPKG | | |
| | VALPHRTACVRFSHARDPIFGNQIIPDTAILSVVPFHHGFGMFTTLGYLICGF | | |
| | RVVLMYRFEEELFLRSLQDYKIQSALLVPTLFSFFAKSTLIDKYDLSNLHEIA | | |
| | SGGAPLSKEVGEAVAKRFHLPGIRQGYGLTETTSAILITPEGDDKPGAVGK | | |
| | VVPFFEAKVVDLDTGKTLGVNQRGELCVRGPMIMSGYVNNPEATNALIDK | | |
| | DGWLHSGDIAYWDEDEHFFIVDRLKSLIKYKGYQVAPAELESILLQHPNIFD | | |
| | AGVAGLPDDDAGELPAAVVVLEHGKTMTEKEIVDYVASQVTTAKKLRGG | | |
| | VVFVDEVPKGLTGKLDARKIREILIKAKKGGKIAV | | |
| OT-001075 | MEETRELQSLAAAVVPSAQTLKITDFSFSDFELSDLETALCTIRMFTDLNLV | 80 | 95 |
| (Methionine; | QNFQMKHEVLCRWILSVKKNYRKNVAYHNWRHAFNTAQCMFAALKAGK | | |
| hPDE5 (Amino acid | IQNKLTDLEILALLIAALSHDLDHRGVNNSYIQRSEHPLAQLYCHSIMEHHH | | |
| 535-860 of WT); | FDQCLMILNSPGNQILSGLSIEEYKIILKIIKQAILATDLALYIKRRGEFFELI | | |
| linker | RKNQFNLEDPHQKELFLAMLMTACDLSAITKPWPIQQRIAELVATEFFDQG | | |
| (GGSGGGSGG | DRERKELNIEPTDLMNREKKNKIPSMQVGFIDAICLQLYEALTHVSEDCFPL | | |
| (SEQ ID NO: 77)); | LDGCRKNRQKWQALAEQQGGSGGGSGGVSKGAELFTGIVPILIELNGDVN | | |
| AcGFP (Amino | GHKFSVSGEGEGDATYGKLTLKFICTTGKLPVPWPTLVTTLSYGVQCFSRY | | |
| acid 2-239 of WT); | PDHMKQHDFFKSAMPEGYIQERTIFFEDDGNYKSRAEVKFEGDTLVNRIEL | | |
| stop) | TGTDFKEDGNILGNKMEYNYNAHNVYIMTDKAKNGIKVNFKIRHNIEDGS | | |
| | VQLADHYQQNTPIGDGPVLLPDNHYLSTQSALSKDPNEKRDHMIYFGFVT | | |
| | AAAITHGMDELYK* | | |
| OT-001078 | MEETRELQSLAAAVVPSAQTLKITDFSFSDFELSDLETALCTIRMFTDLNLV | 81 | 96 |
| (Methionine; | QNFQMKHEVLCRWILSVKKNYRKNVAYHNWRHAFNTAQCMFAALKAGK | | |
| hPDE5 (Amino acid | IQNKLTDLEILALLIAALSHDLDHRGVNNSYIQRSEHPLAQLYCHSIMEHHH | | |
| 535-860 of WT, | FDQCLMILNSPGNQILSGLSIEEYKTTLKIIKQAILATDLALYIKRRGEFFELI | | |
| W853F); linker | RKNQFNLEDPHQKELFLAMLMTACDLSAITKPWPIQQRIAELVATEFFDQG | | |
| (GGSGGGSGG | DRERKELNIEPTDLMNREKKNKIPSMQVGFIDAICLQLYEALTHVSEDCFPL | | |
| (SEQ ID NO: 77)); | LDGCRKNRQKFQALAEQQGGSGGGSGGVSKGAELFTGIVPILIELNGDVNG | | |
| AcGFP (Amino | HKFSVSGEGEGDATYGKLTLKFICTTGKLPVPWPTLVTTLSYGVQCFSRYP | | |
| acid 2-239 of WT); | DHMKQHDFFKSAMPEGYIQERTIFFEDDGNYKSRAEVKFEGDTLVNRIELT | | |
| stop) | GTDFKEDGNILGNKMEYNYNAHNVYIMTDKAKNGIKVNFKIRHNIEDGSV | | |
| | QLADHYQQNTPIGDGPVLLPDNHYLSTQSALSKDPNEKRDHMIYFGFVTA | | |
| | AAITHGMDELYK* | | |
| OT-001080 | MEETRELQSLAAAVVPSAQTLKITDFSFSDFELSDLETALCTIRMFTDLNLV | 82 | 97 |
| (Methionine; | QNFQMKHEVLCRWILSVKKNYRKNVAYHNWRHAFNTAQCMFAALKAGK | | |
| hPDE5 (Amino acid | IQNKLTDLEILALLIAALSHDLDHRGVNNSYIQRSEHPLAQLYCHSIMEHHH | | |
| 535-860 of WT, | FDQCLMILNSPGNQILSGLSIEEYKTTLKIIKQAILATDLALYIKRRGEFFELI | | |
| I821A); linker | RKNQFNLEDPHQKELFLAMLMTACDLSAITKPWPIQQRIAELVATEFFDQG | | |
| (GGSGGGSGG | DRERKELNIEPTDLMNREKKNKIPSMQVGFADAICLQLYEALTHVSEDCFP | | |
| (SEQ ID NO: 77)); | LLDGCRKNRQKWQALAEQQGGSGGGSGGVSKGAELFTGIVPILIELNGDV | | |
| AcGFP (Amino | NGHKFSVSGEGEGDATYGKLTLKFICTTGKLPVPWPTLVTTLSYGVQCFSR | | |
| acid 2-239 of WT); | YPDHMKQHDFFKSAMPEGYIQERTIFFEDDGNYKSRAEVKFEGDTLVNRIE | | |
| stop) | LTGTDFKEDGNILGNKMEYNYNAHNVYIMTDKAKNGIKVNFKIRHNIEDG | | |
| | SVQLADHYQQNTPIGDGPVLLPDNHYLSTQSALSKDPNEKRDHMIYFGFVT | | |
| | AAAITHGMDELYK* | | |
| OT-001081 | MEETRELQSLAAAVVPSAQTLKITDFSFSDFELSDLETALCTIRMFTDLNLV | 83 | 98 |
| (Methionine; | QNFQMKHEVLCRWILSVKKNYRKNVAYHNWRHAFNTAQCMFAALKAGK | | |
| hPDE5 (Amino acid | IQNKLTDLEILALLIAALSHDLDHRGVNNSYIQRSEHPLAQLYCHSIMEHHH | | |
| 535-860 of WT, | FDQCLMILNSPGNQILSGLSIEEYKTTLKIIKQAILATDLALYIKRRGEFFELI | | |
| Y829A); linker | RKNQFNLEDPHQKELFLAMLMTACDLSAITKPWPIQQRIAELVATEFFDQG | | |
| (GGSGGGSGG | DRERKELNIEPTDLMNREKKNKIPSMQVGFIDAICLQLYEALTHVSEDCFPL | | |
| (SEQ ID NO: 77)); | LDGCRKNRQKWQALAEQQGGSGGGSGGVSKGAELFTGIVPILIELNGDVN | | |
| AcGFP (Amino | GHKFSVSGEGEGDATYGKLTLKFICTTGKLPVPWPTLVTTLSYGVQCFSRY | | |
| acid 2-239 of WT); | PDHMKQHDFFKSAMPEGYIQERTIFFEDDGNYKSRAEVKFEGDTLVNRIEL | | |
| stop) | TGTDFKEDGNILGNKMEYNYNAHNVYIMTDKAKNGIKVNFKIRHNIEDGS | | |
| | VQLADHYQQNTPIGDGPVLLPDNHYLSTQSALSKDPNEKRDHMIYFGFVT | | |
| | AAAITHGMDELYK* | | |
| OT-001074 | MEETRELQSLAAAVVPSAQTLKITDFSFSDFELSDLETALCTIRMFTDLNLV | 84 | 99 |
| (Methionine; | QNFQMKHEVLCRWILSVKKNYRKNVAYHNWRHAFNTAQCMFAALKAGK | | |
| hPDE5 (Amino acid | IQNKLTDLEILALLIAALSHDLDHRGVNNSYIQRSEHPLAQLYCHSIMEHHH | | |
| 535-860 of WT, | FDQCLMILNSPGNQILSGLSIEEYKTTLKIIKQAILATDLALYIKRRGEFFELI | | |
| F787A); linker | RKNQFNLEDPHQKELFLAMLMTACDLSAITKPWPIQQRIAELVATEFADQG | | |
| (GGSGGGSGG | DRERKELNIEPTDLMNREKKNKIPSMQVGFIDAICLQLYEALTHVSEDCFPL | | |
| (SEQ ID NO: 77)); | LDGCRKNRQKWQALAEQQGGSGGGSGGVSKGAELFTGIVPILIELNGDVN | | |
| AcGFP (Amino | GHKFSVSGEGEGDATYGKLTLKFICTTGKLPVPWPTLVTTLSYGVQCFSRY | | |
| acid 2-239 of WT); | PDHMKQHDFFKSAMPEGYIQERTIFFEDDGNYKSRAEVKFEGDTLVNRIEL | | |
| stop) | TGTDFKEDGNILGNKMEYNYNAHNVYIMTDKAKNGIKVNFKIRHNIEDGS | | |
| | VQLADHYQQNTPIGDGPVLLPDNHYLSTQSALSKDPNEKRDHMIYFGFVT | | |
| | AAAITHGMDELYK* | | |
| OT-001076 | MEETRELQSLAAAVVPSAQTLKITDFSFSDFELSDLETALCTIRMFTDLNLV | 85 | 100 |
| (Methionine; | QNFQMKHEVLCRWILSVKKNYRKNVAYHNWRHAFNTAQCMFAALKAGK | | |
| hPDE5 (Amino acid | IQNKLTDLEILALLIAALSHDLDHRGVNNSYIQRSEHPLAQLYCHSIMEHHH | | |
| 535-860 of WT, | FDQCLMILNSPGNQILSGLSIEEYKTTLKIIKQAILATDLALYIKRRGEFAELI | | |
| F736A); linker | RKNQFNLEDPHQKELFLAMLMTACDLSAITKPWPIQQRIAELVATEFFDQG | | |
| (GGSGGGSGG | DRERKELNIEPTDLMNREKKNKIPSMQVGFIDAICLQLYEALTHVSEDCFPL | | |
| (SEQ ID NO: 77)); | LDGCRKNRQKWQALAEQQGGSGGGSGGVSKGAELFTGIVPILIELNGDVN | | |
| AcGFP (Amino | GHKFSVSGEGEGDATYGKLTLKFICTTGKLPVPWPTLVTTLSYGVQCFSRY | | |
| acid 2-239 of WT); | PDHMKQHDFFKSAMPEGYIQERTIFFEDDGNYKSRAEVKFEGDTLVNRIEL | | |
| stop) | TGTDFKEDGNILGNKMEYNYNAHNVYIMTDKAKNGIKVNFKIRHNIEDGS | | |
| | VQLADHYQQNTPIGDGPVLLPDNHYLSTQSALSKDPNEKRDHMIYFGFVT | | |
| | AAAITHGMDELYK* | | |
| OT-001082 | MEETRELQSLAAAVVPSAQTLKITDFSFSDFELSDLETALCTIRMFTDLNLV | 86 | 101 |
| (Methionine; | QNFQMKHEVLCRWILSVKKNYRKNVAYHNWRHAFNTAQCMFAALKAGK | | |
| hPDE5 (Amino acid | IQNKLTDLEILALLIAALSHDLLHRGVNNSYIQRSEHPLAQLYCHSIMEHHH | | |
| 535-860 of WT, | FDQCLMILNSPGNQILSGLSIEEYKTTLKIIKQAILATDLALYIKRRGEFFELI | | |
| D656L); linker | RKNQFNLEDPHQKELFLAMLMTACDLSAITKPWPIQQRIAELVATEFFDQG | | |
| (GGSGGGSGG | DRERKELNIEPTDLMNREKKNKIPSMQVGFIDAICLQLYEALTHVSEDCFPL | | |
| (SEQ ID NO: 77)); | LDGCRKNRQKWQALAEQQGGSGGGSGGVSKGAELFTGIVPILIELNGDVN | | |
| AcGFP (Amino | GHKFSVSGEGEGDATYGKLTLKFICTTGKLPVPWPTLVTTLSYGVQCFSRY | | |
| acid 2-239 of WT); | PDHMKQHDFFKSAMPEGYIQERTIFFEDDGNYKSRAEVKFEGDTLVNRIEL | | |
| stop) | TGTDFKEDGNILGNKMEYNYNAHNVYIMTDKAKNGIKVNFKIRHNIEDGS | | |
| | VQLADHYQQNTPIGDGPVLLPDNHYLSTQSALSKDPNEKRDHMIYFGFVT | | |
| | AAAITHGMDELYK* | | |
| OT-001083 | MEETRELQSLAAAVVPSAQTLKITDFSFSDFELSDLETALCTIRMFTDLNLV | 87 | 102 |
| (Methionine; | QNFQMKHEVLCRWILSVKKNYRKNVAYHNWRHAFNTAQCMFAALKAGK | | |
| hPDE5 (Amino acid | IQNKLTDLEILALLIAALSHDLDHRGVNNSYIQRSEHPLAQLYCHSIMEHHH | | |
| 535-860 of WT, | FDQCLMILNSPGNQILSGLSIEEYKTTLKIIKQAILATDLALLIKRRGEFFELIR | | |
| Y728L); linker | KNQFNLEDPHQKELFLAMLMTACDLSAITKPWPIQQRIAELVATEFFDQGD | | |
| (GGSGGGSGG | RERKELNIEPTDLMNREKKNKIPSMQVGFIDAICLQLYEALTHVSEDCFPLL | | |
| (SEQ ID NO: 77)); | DGCRKNRQKWQALAEQQGGSGGGSGGVSKGAELFTGIVPILIELNGDVNG | | |
| AcGFP (Amino | HKESVSGEGEGDATYGKLTLKFICTTGKLPVPWPTLVTTLSYGVQCFSRYP | | |
| acid 2-239 of WT); | DHMKQHDFFKSAMPEGYIQERTIFFEDDGNYKSRAEVKFEGDTLVNRIELT | | |
| stop) | GTDEKEDGNILGNKMEYNYNAHNVYIMTDKAKNGIKVNFKIRHNIEDGSV | | |
| | QLADHYQQNTPIGDGPVLLPDNHYLSTQSALSKDPNEKRDHMIYFGFVTA | | |
| | AAITHGMDELYK* | | |
| OT-001084 | MEETRELQSLAAAVVPSAQTLKITDFSFSDFELSDLETALCTIRMFTDLNLV | 88 | 103 |
| (Methionine; | QNFQMKHEVLCRWILSVKKNYRKNVAYHNWRHAFNTAQCMFAALKAGK | | |
| hPDE5 (Amino acid | IQNKLTDLEILALLIAALSHDLDHRGVNNSYIQRSEHPLAQLYCHSIMEHHH | | |
| 535-860 of WT, | FDQCLMILNSPGNQILSGLSIEEYKTTLKIIKQAILATDLALYIKRLGEFFELIR | | |
| R732L); linker | KNQFNLEDPHQKELFLAMLMTACDLSAITKPWPIQQRIAELVATEFFDQGD | | |
| (GGSGGGSGG | RERKELNIEPTDLMNREKKNKIPSMQVGFIDAICLQLYEALTHVSEDCFPLL | | |
| (SEQ ID NO: 77)); | DGCRKNRQKWQALAEQQGGSGGGSGGVSKGAELFTGIVPILIELNGDVNG | | |
| AcGFP (Amino | HKESVSGEGEGDATYGKLTLKFICTTGKLPVPWPTLVTTLSYGVQCFSRYP | | |
| acid 2-239 of WT); | DHMKQHDFFKSAMPEGYIQERTIFFEDDGNYKSRAEVKFEGDTLVNRIELT | | |
| stop) | GTDEKEDGNILGNKMEYNYNAHNVYIMTDKAKNGIKVNFKIRHNIEDGSV | | |
| | QLADHYQQNTPIGDGPVLLPDNHYLSTQSALSKDPNEKRDHMIYFGFVTA | | |
| | AAITHGMDELYK* | | |
| OT-001070 | MEETRELQSLAAAVVPSAQTLKITDFSFSDFELSDLETALCTIRMFTDLNLV | 89 | 104 |
| (Methionine; | QNFQMKHEVLCRWILSVKKNYRKNVAYHNWRHAFNTAQCIFAALKAGKI | | |
| hPDE5 (Amino acid | QNKLTDLEILALLIAALSHDLDHRGVNNSYIQRSEHPLAQLYCHSIMEHHHF | | |
| 535-860 of WT, | DQCLMILNSPGNQILSGLSIEEYKTTLKIIKQAILATDLALYIKRRGEFFELIR | | |
| M625I); linker | KNQFNLEDPHQKELFLAMLMTACDLSAITKPWPIQQRIAELVATEFFDQGD | | |
| (GGSGGGSGG | RERKELNIEPTDLMNREKKNKIPSMQVGFIDAICLQLYEALTHVSEDCFPLL | | |
| (SEQ ID NO: 77)); | DGCRKNRQKWQALAEQQGGSGGGSGGVSKGAELFTGIVPILIELNGDVNG | | |
| AcGFP (Amino | IIKESVSGEGEGDATYGKLTLKFICTTGKLPVPWPTLVTTLSYGVQCFSRYP | | |
| acid 2-239 of WT); | DHMKQHDFFKSAMPEGYIQERTIFFEDDGNYKSRAEVKFEGDTLVNRIELT | | |
| stop) | GTDFIKEDGNILGNIKMEYNYNAHNVYIMTDKAKNGIKVNFKIRHNIEDGSV | | |
| | QLADHYQQNTPIGDGPVLLPDNHYLSTQSALSIKDPNEKRDHMIYFGFVTA | | |
| | AAITHGMDELYK* | | |
| OT-001224 | MEETRELQSLAAAVVPSAQTLKITDFSFSDFELSDLETALCTIRMFTDLNLV | 90 | 105 |
| (Methionine; | QNFQMIKHEVLCRWILSVIKIKNYRIKNVAYHNWRHAFNTAQCMFAALKAGK | | |
| hPDE5 (Amino acid | IQNKLTDLEILALLIAALSHDLDHRGVNNSYIQRSEHPLAQLYCHSIMEHHH | | |
| 535-860 of WT); | FDQCLMILNSPGNQILSGLSIEEYKTTLKIIKQAILATDLALYIKRRGEFFELI | | |
| linker (GGSGGG | RKNQFNLEDPHQKELFLAMLMTACDLSAITIKPWPIQQRIAELVATEFFDQG | | |
| (SEQ ID NO: 78)); | DRERKELNIEPTDLMNREKKNKIPSMQVGFIDAICLQLYEALTHVSEDCFPL | | |
| AcGFP (Amino | LDGCRIKNRQKWQALAEQQGGSGGGVSKGAELFTGIVPILIELNGDVNGHK | | |
| acid 2-239 of WT); | FSVSGEGEGDATYGKLTLKFICTTGKLPVPWPTLVTTLSYGVQCFSRYPDH | | |
| stop) | MKQHDFFKSAMPEGYIQERTIFFEDDGNYKSRAEVKFEGDTLVNRIELTGT | | |
| | DFIKEDGNILGNKMEYNYNAHNVYIMTDKAKNGIKVNFKIRHNIEDGSVQL | | |
| | ADHYQQNTPIGDGPVLLPDNHYLSTQSALSIKDPNEKRDHMIYFGFVTAAAI | | |
| | THGMDELYK* | | |
| OT-001232 | MVSKGAELFTGIVPILIELNGDVNGIIKESVSGEGEGDATYGKLTLKFICTTG | 91 | 106 |
| (AcGFP (Amino | KLPVPWPTLVTTLSYGVQCFSRYPDHMKQHDFFKSAMPEGYIQERTIFFED | | |
| acid 1-239 of WT); | DGNYKSRAEVIKFEGDTLVNRIELTGTDFIKEDGNILGNIKMEYNYNAHNVYI | | |
| linker (SG); hPDE5 | MTDKAKNGIKVNFKIRHNIEDGSVQLADHYQQNTPIGDGPVLLPDNHYLST | | |
| (Amino acid 535- | QSALSIKDPNEKRDHMIYFGFVTAAAITHGMDELYKSGEETRELQSLAAAV | | |
| 860 of WT); stop) | VPSAQTLKITDFSFSDFELSDLETALCTIRMFTDLNLVQNFQMIKHEVLCRWI | | |
| | LSVKKNYRKNVAYHNWRHAFNTAQCMFAALKAGKIQNKLTDLEILALLIA | | |
| | ALSHDLDHRGVNNSYIQRSEHPLAQLYCHSIMEHHHFDQCLMILNSPGNQI | | |
| | LSGLSIEEYKTTLKIIKQAILATDLALYIKRRGEFFELIRKNQFNLEDPHQKEL | | |
| | FLAMLMTACDLSAITKPWPIQQRIAELVATEFFDQGDRERKELNIEPTDLM | | |
| | NREKKNKIPSMQVGFIDAICLQLYEALTHVSEDCFPLLDGCRKNRQKWQA | | |
| | LAEQQ* | | |
| OT-001227 | MEETRELQSLAAAVVPSAQTLKITDFSFSDFELSDLETALCTIRMFTDLNLV | 367 | 375 |
| (Methionine; | QNFQMIKHEVLCRWILSVKKNYRKNVAYHNWRHAFNTAQCMFAALKAGK | | |
| hPDE5 (Amino acid | IQNKLTDLEILALLIAALSHDLDHRGVNNSYIQRSEHPLAQLYCHSIMEHHH | | |
| 535-860 of WT); | FDQCLMILNSPGNQILSGLSIEEYKTTLKIIKQAILATDLALYIKRRGEFFELI | | |
| linker (SG); Fluc | RKNQFNLEDPHQKELFLAMLMTACDLSAITKPWPIQQRIAELVATEFFDQG | | |
| (N50D, N119G, | DRERKELNIEPTDLMNREKKNKIPSMQVGFIDAICLQLYEALTHVSEDCFPL | | |
| S548I, K549A, | LDGCRKNRQKWQALAEQQSGEDAKNIKKGPAPFYPLEDGTAGEQLHKAM | | |
| L550V); stop) | KRYALVPGTIAFTDAHIEVDITYAEYFEMSVRLAEAMKRYGLNTNHRIVVC | | |
| | SENSLQFFMPVLGALFIGVAVAPANDIYNERELLNSMGISQPTVVFVSKKGL | | |
| | QKILNVQKKLPIIQKIIIMDSKTDYQGFQSMYTFVTSHLPPGFNEYDFVPESF | | |
| | DRDKTIALIMNSSGSTGLPKGVALPHRTACVRFSHARDPIFGNQIIPDTAILS | | |
| | VVPFHHGFGMFTTLGYLICGFRVVLMYRFEEELFLRSLQDYKIQSALLVPTL | | |
| | FSFFAKSTLIDKYDLSNLHEIASGGAPLSKEVGEAVAKRFHLPGIRQGYGLT | | |
| | ETTSAILITPEGDDKPGAVGKVVPFFEAKVVDLDTGKTLGVNQRGELCVRG | | |
| | PMIMSGYVNNPEATNALIDKDGWLHSGDIAYWDEDEHFFIVDRLKSLIKYK | | |
| | GYQVAPAELESILLQHPNIFDAGVAGLPDDDAGELPAAVVVLEHGKTMTE | | |
| | KEIVDYVASQVTTAKKLRGGVVFVDEVPKGLTGKLDARKIREILIKAKKGG | | |
| | KIAV* | | |
| OT-001228 | MEETRELQSLAAAVVPSAQTLKITDFSFSDFELSDLETALCTIRMFTDLNLV | 368 | 376 |
| (Methionine; | QNFQMKHEVLCRWILSVKKNYRKNVAYHNWRHAFNTAQCMFMLKAGK | | |
| hPDE5 (Amino acid | IQNKLTDLEILALLIAALSHDLDHRGVNNSYIQRSEHPLAQLYCHSIMEHHH | | |
| 535-860 of WT, | FDQCLMILNSPGNQILSGLSIEEYKTTLKIIKQAILATDLALYIKRRGEFAELI | | |
| F736A); linker | RKNQFNLEDPHQKELFLAMLMTACDLSAITKPWPIQQRIAELVATEFFDQG | | |
| (SG); Fluc (N50D, | DRERKELNIEPTDLMNREKKNKIPSMQVGFIDAICLQLYEALTHVSEDCFPL | | |
| N119G, S548I, | LDGCRKNRQKWQALAEQQSGEDAKNIKKGPAPFYPLEDGTAGEQLHKAM | | |
| K549A, L550V); | KRYALVTGTIAFTDAHIEVDITYAEYFEMSVRLAEAMKRYGLNTNHRIVVC | | |
| stop) | SENSLQFFMPVLGALFIGVAVAPANDIYNERELLNSMGISQPTVVFVSKKGL | | |
| | QKILNVQKKLPIIQKIIIMDSKTDYQGFQSMYTFVTSHLPPGFNEYDFVPESF | | |
| | DRDKTIALIMNSSGSTGLPKGVALPHRTACVRFSHARDPIFGNQIIPDTAILS | | |
| | VVPFHHGFGMFTTLGYLICGFRVVLMYRFEEELFLRSLQDYKIQSALLVPTL | | |
| | FSFFAKSTLIDKYDLSNLHEIASGGAPLSKEVGEAVAKRFHLPGIRQGYGLT | | |
| | ETTSAILITPEGDDKPGAVGKVVPFFEAKVVDLDTGKTLGVNQRGELCVRG | | |
| | PMIMSGYVNNPEATNALIDKDGWLHSGDIAYWDEDEHFFIVDRLKSLIKYK | | |
| | GYQVAPAELESILLQHPNIFDAGVAGLPDDDAGELPAAVVVLEHGKTMTE | | |
| | KEIVDYVASQVTTAKKLRGGVVFVDEVPKGLTGKLDARKIREILIKAKKGG | | |
| | KIAV* | | |
| OT-001229 | MEETRELQSLAAAVVPSAQTLKITDFSFSDFELSDLETALCTIRMFTDLNLV | 369 | 377 |
| (Methionine; | QNFQMKHEVLCRWILSVKKNYRKNVAYHNWRHAFNTAQCMFMLKAGK | | |
| hPDE5 (Amino acid | IQNKLTDLEILALLIAALSHDLDHRGVNNSYIQRSEHPLAQLYCHSIMEHHH | | |
| 535-860 of WT, | FDQCLMILNSPGNQILSGLSIEEYKTTLKIIKQAILATDLALYIKRRGEFFELIR | | |
| R732L); linker | KNQFNLEDPHQKELFLAMLMTACDLSAITKPWPIQQRIAELVATEFFDQGD | | |
| (SG); Fluc (N50D, | RERKELNIEPTDLMNREKKNKIPSMQVGFIDAICLQLYEALTHVSEDCFPLL | | |
| N119G, S548I, | DGCRKNRQKWQALAEQQSGEDAKNIKKGPAPFYPLEDGTAGEQLHKAMK | | |
| K549A, L550V); | RYALVTGTIAFTDAHIEVDITYAEYFEMSVRLAEAMKRYGLNTNHRIVVCS | | |
| stop) | ENSLQFFMPVLGALFIGVAVAPANDIYNERELLNSMGISQPTVVFVSKKGL | | |
| | QKILNVQKKLPIIQKIIIMDSKTDYQGFQSMYTFVTSHLPPGFNEYDFVPESF | | |
| | DRDKTIALIMNSSGSTGLPKGVALPHRTACVRFSHARDPIFGNQIIPDTAILS | | |
| | VVPFHHGFGMFTTLGYLICGFRVVLMYRFEEELFLRSLQDYKIQSALLVPTL | | |
| | FSFFAKSTLIDKYDLSNLHEIASGGAPLSKEVGEAVAKRFHLPGIRQGYGLT | | |
| | ETTSAILITPEGDDKPGAVGKVVPFFEAKVVDLDTGKTLGVNQRGELCVRG | | |
| | PMIMSGYVNNPEATNALIDKDGWLHSGDIAYWDEDEHFFIVDRLKSLIKYK | | |
| | GYQVAPAELESILLQHPNIFDAGVAGLPDDDAGELPAAVVVLEHGKTMTE | | |
| | KEIVDYVASQVTTAKKLRGGVVFVDEVPKGLTGKLDARKIREILIKAKKGG | | |
| | KIAV* | | |
| OT-001211 | MVSKGAELFTGIVPILIELNGDVNGHKFSVSGEGEGDATYGKLTLKFICTTG | 370 | 378 |
| (AcGFP (Amino | KLPVPWPTLVTTLSYGVQCFSRYPDHMKQHDFFKSAMPEGYIQERTIFFED | | |
| acid 1-239 of WT); | DGNYKSRAEVKFEGDTLVNRIELTGTDFKEDGNILGNKMEYNYNAHNVYI | | |
| linker (SG); hPDE5 | MTDKAKNGIKVNFKIRHNIEDGSVQLADHYQQNTPIGDGPVLLPDNHYLST | | |
| (Amino acid 535- | QSALSKDPNEKRDHMIYFGFVTAAAITHGMDELYKSGEETRELQSLAAAV | | |
| 860 of WT, | VPSAQTLKITDFSFSDFELSDLETALCTIRMFTDLNLVQNFQMKHEVLCRWI | | |
| H653A); stop) | LSVKKNYRKNVAYHNWRHAFNTAQCMFAALKAGKIQNKLTDLEILALLIA | | |
| | ALSADLDHRGVNNSYIQRSEHPLAQLYCHSIMEHHHFDQCLMILNSPGNQI | | |
| | LSGLSIEEYKTTLKIIKQAILATDLALYIKRRGEFFELIRKNQFNLEDPHQKEL | | |
| | FLAMLMTACDLSAITKPWPIQQRIAELVATEFFDQGDRERKELNIEPTDLM | | |
| | NREKKNKIPSMQVGFIDAICLQLYEALTHVSEDCFPLLDGCRKNRQKWQA | | |
| | LAEQQ* | | |
| OT-001208 | MVSKGAELFTGIVPILIELNGDVNGHKFSVSGEGEGDATYGKLTLKFICTTG | 371 | 379 |
| (AcGFP (Amino | KLPVPWPTLVTTLSYGVQCFSRYPDHMKQHDFFKSAMPEGYIQERTIFFED | | |
| acid 1-239 of WT); | DGNYKSRAEVKFEGDTLVNRIELTGTDFKEDGNILGNKMEYNYNAHNVYI | | |
| linker (SG); hPDE5 | MTDKAKNGIKVNFKIRHNIEDGSVQLADHYQQNTPIGDGPVLLPDNHYLST | | |
| (Amino acid 535- | QSALSKDPNEKRDHMIYFGFVTAAAITHGMDELYKSGEETRELQSLAAAV | | |
| 860 of WT, | VPSAQTLKITDFSFSDFELSDLETALCTIRMFTDLNLVQNFQMKHEVLCRWI | | |
| D764A); stop) | LSVKKNYRKNVAYHNWRHAFNTAQCMFAALKAGKIQNKLTDLEILALLIA | | |
| | ALSHDLDHRGVNNSYIQRSEHPLAQLYCHSIMEHHHFDQCLMILNSPGNQI | | |
| | LSGLSIEEYKTTLKIIKQAILATDLALYIKRRGEFFELIRKNQFNLEDPHQKEL | | |
| | FLAMLMTACDLSAITKPWPIQQRIAELVATEFFDQGDRERKELNIEPTDLM | | |
| | NREKKNKIPSMQVGFIDAICLQLYEALTHVSEDCFPLLDGCRKNRQKWQA | | |
| | LAEQQ* | | |
| OT-001209 | MVSKGAELFTGIVPILIELNGDVNGHKFSVSGEGEGDATYGKLTLKFICTTG | 8491 | 8521 |
| (AcGFP (1-239 of | KLPVPWPTLVTTLSYGVQCFSRYPDHMKQHDFFKSAMPEGYIQERTIFFED | | |
| WT); linker (SG); | DGNYKSRAEVKFEGDTLVNRIELTGTDFKEDGNILGNKMEYNYNAHNVYI | | |
| hPDE5 (Amino acid | MTDKAKNGIKVNFKIRHNIEDGSVQLADHYQQNTPIGDGPVLLPDNHYLST | | |
| 535-860 of WT, | QSALSKDPNEKRDHMIYFGFVTAAAITHGMDELYKSGEETRELQSLAAAV | | |
| E682A); stop) | VPSAQTLKITDFSFSDFELSDLETALCTIRMFTDLNLVQNFQMKHEVLCRWI | | |
| | LSVKKNYRKNVAYHNWRHAFNTAQCMFAALKAGKIQNKLTDLEILALLIA | | |
| | ALSHDLDHRGVNNSYIQRSEHPLAQLYCHSIMAHHHFDQCLMILNSPGNQI | | |
| | LSGLSIEEYKTTLKIIKQAILATDLALYIKRRGEFFELIRKNQFNLEDPHQKEL | | |
| | FLAMLMTACDLSAITKPWPIQQRIAELVATEFFDQGDRERKELNIEPTDLM | | |
| | NREKKNKIPSMQVGFIDAICLQLYEALTHVSEDCFPLLDGCRKNRQKWQA | | |
| | LAEQQ* | | |
| OT-001210 | MVSKGAELFTGIVPILIELNGDVNGHKFSVSGEGEGDATYGKLTLKFICTTG | 8492 | 8522 |
| (AcGFP (1-239 of | KLPVPWPTLVTTLSYGVQCFSRYPDHMKQHDFFKSAMPEGYIQERTIFFED | | |
| WT); Linker (SG); | DGNYKSRAEVKFEGDTLVNRIELTGTDFKEDGNILGNKMEYNYNAHNVYI | | |
| hPDE5 (Amino acid | MTDKAKNGIKVNFKIRHNIEDGSVQLADHYQQNTPIGDGPVLLPDNHYLST | | |
| 535-860 of WT, | QSALSKDPNEKRDHMIYFGFVTAAAITHGMDELYKSGEETRELQSLAAAV | | |
| D724A); stop) | VPSAQTLKITDFSFSDFELSDLETALCTIRMFTDLNLVQNFQMKHEVLCRWI | | |
| | LSVKKNYRKNVAYHNWRHAFNTAQCMFAALKAGKIQNKLTDLEILALLIA | | |
| | ALSHDLDHRGVNNSYIQRSEHPLAQLYCHSIMEHHHFDQCLMILNSPGNQI | | |
| | LSGLSIEEYKTTLKIIKQAILATALALYIKRRGEFFELIRKNQFNLEDPHQKEL | | |
| | FLAMLMTACDLSAITKPWPIQQRIAELVATEFFDQGDRERKELNIEPTDLM | | |
| | NREKKNKIPSMQVGFIDAICLQLYEALTHVSEDCFPLLDGCRKNRQKWQA | | |
| | LAEQQ* | | |
| OT-001358 (Met; | MEETRELQSLAAAVVPSAQTLKITDFSFSDFELSDLETALCTIRMFTDLNLV | 8493 | 8523 |
| hPDE5 (535- 860 of | QNFQMKHEVLCRWILSVKKNYRKNVAYHNWRHAFNTAQCMFAALKAGK | | |
| WT, N661S); linker | IQNKLTDLEILALLIAALSHDLDHRGVSNSYIQRSEHPLAQLYCHSIMEHHH | | |
| (GGSGGGSGG | FDQCLMILNSPGNQILSGLSIEEYKTTLKIIKQAILATDLALYIKRRGEFFELI | | |
| (SEQ ID NO: 77)); | RKNQFNLEDPHQKELFLAMLMTACDLSAITKPWPIQQRIAELVATEFFDQG | | |
| AcGFP (2-239 of | DRERKELNIEPTDLMNREKKNKIPSMQVGFIDAICLQLYEALTHVSEDCFPL | | |
| WT); stop) | LDGCRKNRQKWQALAEQQGGSGGGSGGVSKGAELFTGIVPILIELNGDVN | | |
| | GHKFSVSGEGEGDATYGKLTLKFICTTGKLPVPWPTLVTTLSYGVQCFSRY | | |
| | PDHMKQHDFFKSAMPEGYIQERTIFFEDDGNYKSRAEVKFEGDTLVNRIEL | | |
| | TGTDFKEDGNILGNKMEYNYNAHNVYIMTDKAKNGIKVNFKIRHNIEDGS | | |
| | VQLADHYQQNTPIGDGPVLLPDNHYLSTQSALSKDPNEKRDHMIYFGFVT | | |
| | AAAITHGMDELYK* | | |
| OT-001359 (Met; | MEETRELQSLAAAVVPSAQTLKITDFSFSDFELSDMetALCTIRMFTDLNLV | 8494 | 8524 |
| hPDE5 (535-830 of | QNFQMKHEVLCRWILSVKKNYRKNVAYHNWRHAFNTAQCMFAALKAGK | | |
| WT, L569M, | IQNKLTDLEILALLIAALSHDLDHRGVNNSYIQRSEHPLAQLYCHSIMEHHH | | |
| T833S); linker | FDQCLMILNSPGNQILSGLSIEEYKTTLKIIKQAILATDLALYIKRRGEFFELI | | |
| (GGSGGGSGG | RKNQFNLEDPHQKELFLAMLMTACDLSAITKPWPIQQRIAELVATEFFDQG | | |
| (SEQ ID NO: 77)); | DRERKELNIEPTDLMNREKKNKIPSMQVGFIDAICLQLYEALSHVSEDCFPL | | |
| AcGFP (2-239 of | LDGCRKNRQKWQALAEQQGGSGGGSGGVSKGAELFTGIVPILIELNGDVN | | |
| WT); stop) | GHKFSVSGEGEGDATYGKLTLKFICTTGKLPVPWPTLVTTLSYGVQCFSRY | | |
| | PDHMKQHDFFKSAMPEGYIQERTIFFEDDGNYKSRAEVKFEGDTLVNRIEL | | |
| | TGTDFKEDGNILGNKMEYNYNAHNVYIMTDKAKNGIKVNFKIRHNIEDGS | | |
| | VQLADHYQQNTPIGDGPVLLPDNHYLSTQSALSKDPNEKRDHMIYFGFVT | | |
| | AAAITHGMDELYK* | | |
| OT-001360 (Met; | MEETRELQSLAAAVVPSAQTLKITDFSFSDFELSDLETALCTIRMFTDLNLV | 8495 | 8525 |
| hPDE5 (535-860 of | QNFQMKHEVLCRWILSVKKNYRKNVAYHNWRHAFNTAQCMFAALKAGK | | |
| WT, I768N); linker | IQNKLTDLEILALLIAALSHDLDHRGVNNSYIQRSEHPLAQLYCHSIMEHHH | | |
| (GGSGGGSGG | FDQCLMILNSPGNQILSGLSIEEYKTTLKIIKQAILATDLALYIKRRGEFFELI | | |
| (SEQ ID NO: 77)); | RKNQFNLEDPHQKELFLAMLMTACDLSANTKPWPIQQRIAELVATEFFDQ | | |
| AcGFP (2-239 of | GDRERKELNIEPTDLMNREKKNKIPSMQVGFIDAICLQLYEALTHVSEDCFP | | |
| WT); stop) | LLDGCRKNRQKWQALAEQQGGSGGGSGGVSKGAELFTGIVPILIELNGDV | | |
| | NGHKFSVSGEGEGDATYGKLTLKFICTTGKLPVPWPTLVTTLSYGVQCFSR | | |
| | YPDHMKQHDFFKSAMPEGYIQERTIFFEDDGNYKSRAEVKFEGDTLVNRIE | | |
| | LTGTDFKEDGNILGNKMEYNYNAHNVYIMTDKAKNGIKVNEKIRHNIEDG | | |
| | SVQLADHYQQNTPIGDGPVLLPDNHYLSTQSALSKDPNEKRDHMIYFGFVT | | |
| | AAAITHGMDELYK* | | |
| OT-001361 (Met; | MEETRELQSLAAAVVPSAQTLKITDFSFSDFELSDLETALCTIRMFTDLNLV | 8496 | 8526 |
| hPDE5 (535-860 of | QNFQMKHEVLCRWILSVKKNYWKNVAYHNWRHAFNTAQCMFAALKAG | | |
| WT, R607W); | KIQNKLTDLEILALLIAALSHDLDHRGVNNSYIQRSEHPLAQLYCHSIMEHH | | |
| linker | HFDQCLMILNSPGNQILSGLSIEEYKTTLKIIKQAILATDLALYIKRRGEFFEL | | |
| (GGSGGGSGG | IRKNQFNLEDPHQKELFLAMLMTACDLSAITKPWPIQQRIAELVATEFFDQ | | |
| (SEQ ID NO: 77)); | GDRERKELNIEPTDLMNREKKNKIPSMQVGFIDAICLQLYEALTHVSEDCFP | | |
| AcGFP (2-239 of | LLDGCRKNRQKWQALAEQQGGSGGGSGGVSKGAELFTGIVPILIELNGDV | | |
| WT); stop) | NGHKFSVSGEGEGDATYGKLTLKFICTTGKLPVPWPTLVTTLSYGVQCFSR | | |
| | YPDHMKQHDFFKSAMPEGYIQERTIFFEDDGNYKSRAEVKFEGDTLVNRIE | | |
| | LTGTDEKEDGNILGNKMEYNYNAHNVYIMTDKAKNGIKVNEKIRHNIEDG | | |
| | SVQLADHYQQNTPIGDGPVLLPDNHYLSTQSALSKDPNEKRDHMIYFGFVT | | |
| | AAAITHGMDELYK* | | |
| OT-001362 (Met; | MEETRELQSLAAAVVPSAQTLKITDFSFSDFELSDLETALCTIRMFTDLNLV | 8497 | 8527 |
| hPDE5 (535-860 of | QNFQMKHEVLCRWILSVKKNYRKNVAYHNWRHAFSTAQCMFAALKAGK | | |
| WT, N620S); linker | IQNKLTDLEILALLIAALSHDLDHRGVNNSYIQRSEHPLAQLYCHSIMEHHH | | |
| (GGSGGGSGG | FDQCLMILNSPGNQILSGLSIEEYKTTLKIIKQAILATDLALYIKRRGEFFELI | | |
| (SEQ ID NO: 77)); | RKNQFNLEDPHQKELFLAMLMTACDLSAITKPWPIQQRIAELVATEFFDQG | | |
| AcGFP (2-239 of | DRERKELNIEPTDLMNREKKNKIPSMQVGFIDAICLQLYEALTHVSEDCFPL | | |
| WT); stop) | LDGCRKNRQKWQALAEQQGGSGGGSGGVSKGAELFTGIVPILIELNGDVN | | |
| | GHKFSVSGEGEGDATYGKLTLKFICTTGKLPVPWPTLVTTLSYGVQCFSRY | | |
| | PDHMKQHDFFKSAMPEGYIQERTIFFEDDGNYKSRAEVKFEGDTLVNRIEL | | |
| | TGTDFKEDGNILGNKMEYNYNAHNVYIMTDKAKNGIKVNFKIRHNIEDGS | | |
| | VQLADHYQQNTPIGDGPVLLPDNHYLSTQSALSKDPNEKRDHMIYFGFVT | | |
| | AAAITHGMDELYK* | | |
| OT-001363 (Met; | MEETRELQSLAAAVVPSAQTRKITDFSFSDFELSDLETALCTIRMFTDLNLV | 8498 | 8528 |
| hPDE5 (535-860 of | QNFEMKHEVLCRWILSVKKNYRKNVAYHNWRHAFNTAQCMFAALKAGK | | |
| WT, L554R, | IQNKLTDLEILALLIAALSHDLDHRGVNNSYIQRSEHPLAQLYCHSIMEHHH | | |
| Q589E, M691I); | FDQCLIILNSPGNQILSGLSIEEYKTTLKIIKQAILATDLALYIKRRGEFFELIR | | |
| linker | KNQFNLEDPHQKELFLAMLMTACDLSAITKPWPIQQRIAELVATEFFDQGD | | |
| (GGSGGGSGG | RERKELNIEPTDLMNREKKNKIPSMQVGFIDAICLQLYEALTHVSEDCFPLL | | |
| (SEQ ID NO: 77)); | DGCRKNRQKWQALAEQQGGSGGGSGGVSKGAELFTGIVPILIELNGDVNG | | |
| AcGFP (2-239 of | HKFSVSGEGEGDATYGKLTLKFICTTGKLPVPWPTLVTTLSYGVQCFSRYP | | |
| WT); stop) | DHMKQHDFFKSAMPEGYIQERTIFFEDDGNYKSRAEVKFEGDTLVNRIELT | | |
| | GTDFKEDGNILGNKMEYNYNAHNVYIMTDKAKNGIKVNEKIRHNIEDGSV | | |
| | QLADHYQQNTPIGDGPVLLPDNHYLSTQSALSKDPNEKRDHMIYFGFVTA | | |
| | AAITHGMDELYK* | | |
| OT-001364 (Met; | MEETRELQSLAAAVVPSAQTLKITDFSFSDFELSDLETALCTIRMFTDLNLV | 8499 | 8529 |
| hPDE5 (535-860 of | QNFQMKHEVLCRWILSVKKNYRKNVAYHNRRHAFNTAQCMFAALKAGK | | |
| WT, W615R, | IQNKLTDLEILALLIAALSHDLDHRGVNNSYIQRSEHPLAQLYCHSIMEHHH | | |
| T723R, A762T, | FDQCLMILNSPGNQILSGLSIEEYKTTLKIIKQAILARDLALYIKRRGEFFELI | | |
| E808G); linker | RKNQFNLEDPHQKELFLAMLMTTCDLSAITKPWPIQQRIAELVATEFFDQG | | |
| (GGSGGGSGG | DRERKELNIEPTDLMNRGKKNKIPSMQVGFIDAICLQLYEALTHVSEDCFPL | | |
| (SEQ ID NO: 77)); | LDGCRKNRQKWQALAEQQGGSGGGSGGVSKGAELFTGIVPILIELNGDVN | | |
| AcGFP (2-239 of | GHKFSVSGEGEGDATYGKLTLKFICTTGKLPVPWPTLVTTLSYGVQCFSRY | | |
| WT); stop) | PDHMKQHDFFKSAMPEGYIQERTIFFEDDGNYKSRAEVKFEGDTLVNRIEL | | |
| | TGTDFKEDGNILGNKMEYNYNAHNVYIMTDKAKNGIKVNFKIRHNIEDGS | | |
| | VQLADHYQQNTPIGDGPVLLPDNHYLSTQSALSKDPNEKRDHMIYFGFVT | | |
| | AAAITHGMDELYK* | | |
| OT-001365 (Met; | MEETRELQSLAAAVVPSAQTLKITDFSFSDFELSDLETALYTIRMFTDLNLV | 8500 | 8530 |
| hPDE5 (535-860 of | QNFQMKHEVLCRWILSVKKNYRKNVAYHNWRHAFNTAQCMFAALKAGK | | |
| WT, C574Y); linker | IQNKLTDLEILALLIAALSHDLDHRGVNNSYIQRSEHPLAQLYCHSIMEHHH | | |
| (GGSGGGSGG | FDQCLMILNSPGNQILSGLSIEEYKTTLKIIKQAILATDLALYIKRRGEFFELI | | |
| (SEQ ID NO: 77)); | RKNQFNLEDPHQKELFLAMLMTACDLSAITKPWPIQQRIAELVATEFFDQG | | |
| AcGFP (2-239 of | DRERKELNIEPTDLMNREKKNKIPSMQVGFIDAICLQLYEALTHVSEDCFPL | | |
| WT); stop) | LDGCRKNRQKWQALAEQQGGSGGGSGGVSKGAELFTGIVPILIELNGDVN | | |
| | GHKFSVSGEGEGDATYGKLTLKFICTTGKLPVPWPTLVTTLSYGVQCFSRY | | |
| | PDHMKQHDFFKSAMPEGYIQERTIFFEDDGNYKSRAEVKFEGDTLVNRIEL | | |
| | TGTDFKEDGNILGNKMEYNYNAHNVYIMTDKAKNGIKVNFKIRHNIEDGS | | |
| | VQLADHYQQNTPIGDGPVLLPDNHYLSTQSALSKDPNEKRDHMIYFGFVT | | |
| | AAAITHGMDELYK* | | |
| OT-001366 (Met; | MEETRELQSLAAAVVPSAQTRKITDFSFSDFELSDLETALCTIRMFTDLNLV | 8501 | 8531 |
| hPDE5 (535-860 of | PNFQMKHEVLCRWILSVKKNYRKNVAYHNWRHAFNTAQCMFAALKAGK | | |
| WT, L554R, | IQNKLTDLEILALLIAALSHDLDHRGVNNSYIQRSEHPLAQLYCHSIMEHHH | | |
| Q586P, K710N, | FDQCLMILNSPGNQILSGLSIEEYNTTLKIIKQAILATDLALYIERRGEFFELIR | | |
| K730E); linker | KNQFNLEDPHQKELFLAMLMTACDLSAITKPWPIQQRIAELVATEFFDQGD | | |
| (GGSGGGSGG | RERKELNIEPTDLMNREKKNKIPSMQVGFIDAICLQLYEALTHVSEDCFPLL | | |
| (SEQ ID NO: 77)); | DGCRKNRQKWQALAEQQGGSGGGSGGVSKGAELFTGIVPILIELNGDVNG | | |
| AcGFP (2-239 of | HKFSVSGEGEGDATYGKLTLKFICTTGKLPVPWPTLVTTLSYGVQCFSRYP | | |
| WT); stop) | DHMKQHDFFKSAMPEGYIQERTIFFEDDGNYKSRAEVKFEGDTLVNRIELT | | |
| | GTDFKEDGNILGNKMEYNYNAHNVYIMTDKAKNGIKVNEKIRHNIEDGSV | | |
| | QLADHYQQNTPIGDGPVLLPDNHYLSTQSALSKDPNEKRDHMIYFGFVTA | | |
| | AAITHGMDELYK* | | |
| OT-001367 (Met; | MEETRELQSLAAAVVPSAQTLKITDFSFSDFELSDLETALCTIRMFTDLNLV | 8502 | 8532 |
| hPDE5 (535-860 of | QNFQMKHEVLCRWILSVKKNYRKNVAYRNWRHAFNTAQCMFAALKAGK | | |
| WT, H4613R); linker | IQNKLTDLEILALLIAALSHDLDHRGVNNSYIQRSEHPLAQLYCHSIMEHHH | | |
| (GGSGGGSGG | FDQCLMILNSPGNQILSGLSIEEYKTTLKIIKQAILATDLALYIKRRGEFFELI | | |
| (SEQ ID NO: 77)); | RKNQFNLEDPHQKELFLAMLMTACDLSAITKPWPIQQRIAELVATEFFDQG | | |
| AcGFP (2-239 of | DRERKELNIEPTDLMNREKKNKIPSMQVGFIDAICLQLYEALTHVSEDCFPL | | |
| WT); stop) | LDGCRKNRQKWQALAEQQGGSGGGSGGVSKGAELFTGIVPILIELNGDVN | | |
| | GHKFSVSGEGEGDATYGKLTLKFICTTGKLPVPWPTLVTTLSYGVQCFSRY | | |
| | PDHMKQHDFFKSAMPEGYIQERTIFFEDDGNYKSRAEVKFEGDTLVNRIEL | | |
| | TGTDFKEDGNILGNKMEYNYNAHNVYIMTDKAKNGIKVNFKIRHNIEDGS | | |
| | VQLADHYQQNTPIGDGPVLLPDNHYLSTQSALSKDPNEKRDHMIYFGFVT | | |
| | AAAITHGMDELYK* | | |
| OT-001368 (Met; | MEETRELQSLAAAVVPSAQTLKITDFSFSDFELSDLETALCTIRMFTDLNLV | 8503 | 8533 |
| hPDE5 (535-860 of | LNFQMKHEVLCRWILSVKKNYRKNVAYHNWRHAFNTAQCMFAALKAGK | | |
| WT, Q586L, | IQNKLTDLEILALLIAALSHDLDHRGVNNYYIQRSEHPLAQLYCHSIMEHHH | | |
| 5663Y, A762T, | FDQCLMILNSPGNMSGLSIEEYKTTLKIIKQAILATDLALYIKRRGEFFELI | | |
| E808G); linker | RKNQFNLEDPHQKELFLAMLMTTCDLSAITKPWPIQQRIAELVATEFFDQG | | |
| (GGSGGGSGG | DRERKELNIEPTDLMNRGKKNKIPSMQVGFIDAICLQLYEALTHVSEDCFPL | | |
| (SEQ ID NO: 77)); | LDGCRKNRQKWQALAEQQGGSGGGSGGVSKGAELFTGIVPILIELNGDVN | | |
| AcGFP (2-239 of | GHKFSVSGEGEGDATYGKLTLKFICTTGKLPVPWPTLVTTLSYGVQCFSRY | | |
| WT); stop) | PDHMKQHDFFKSAMPEGYIQERTIFFEDDGNYKSRAEVKFEGDTLVNRIEL | | |
| | TGTDFKEDGNILGNKMEYNYNAHNVYIMTDKAKNGIKVNFKIRHNIEDGS | | |
| | VQLADHYQQNTPIGDGPVLLPDNHYLSTQSALSKDPNEKRDHMIYFGFVT | | |
| | AAAITHGMDELYK* | | |
| OT-001369 (Met; | MEETRELQSLAAAVMPSAQTLKITDFSFSDFELSDLETALCTIRMFTDLNLV | 8504 | 8534 |
| hPDE5 (535-860 of | QNFQMKHEVLCRWILSVKKNYRKNVAYHNWRHAFNTAQCMFAALKAGK | | |
| WT, V548M, | IQNKLTDLEILALLIAALSHDLDHRGVNNSYIQRSEHPLAQLYCHSIMEHHH | | |
| D803N); linker | FDQCLMILNSPGNQILSGLSIEEYKTTLKIIKQAILATDLALYIKRRGEFFELI | | |
| (GGSGGGSGG | RKNQFNLEDPHQKELFLAMLMTACDLSAITKPWPIQQRIAELVATEFFDQG | | |
| (SEQ ID NO: 77)); | DRERKELNIEPTNLMNREKKNKIPSMQVGFIDAICLQLYEALTHVSEDCFPL | | |
| AcGFP (2-239 of | LDGCRKNRQKWQALAEQQGGSGGGSGGVSKGAELFTGIVPILIELNGDVN | | |
| WT); stop) | GHKFSVSGEGEGDATYGKLTLKFICTTGKLPVPWPTLVTTLSYGVQCFSRY | | |
| | PDHMKQHDFFKSAMPEGYIQERTIFFEDDGNYKSRAEVKFEGDTLVNRIEL | | |
| | TGTDFKEDGNILGNKMEYNYNAHNVYIMTDKAKNGIKVNFKIRHNIEDGS | | |
| | VQLADHYQQNTPIGDGPVLLPDNHYLSTQSALSKDPNEKRDHMIYFGFVT | | |
| | AAAITHGMDELYK* | | |
| OT-001370 (Met; | MEETRELQSLAAAVVPSAQTRKITDFSFSDFELSDLETALCTIRMFTDLNLV | 8505 | 8535 |
| hPDE5 (535-860 | QNFEMKREVLCRWILSVKKNYRKNVAYHNWRHAFNTAQCMFAALKAGK | | |
| OF WT, L554R, | IQNKLTDLEILALLIAALSHDLDHRGVNNSYIQRSEHPLAQLYCHSIMEHHH | | |
| Q589E, A823T); | FDQCLMILNSPGNMSGLSIEEYKTTLKIIKQAILATDLALYIKRRGEFFELI | | |
| linker | RKNQFNLEDPHQKELFLAMLMTACDLSAITKPWPIQQRIAELVATEFFDQG | | |
| (GGSGGGSGG | DRERKELNIEPTDLMNREKKNKIPSMQVGFIDTICLQLYEALTHVSEDCFPL | | |
| (SEQ ID NO: 77)); | LDGCRKNRQKWQALAEQQGGSGGGSGGVSKGAELFTGIVPILIELNGDVN | | |
| AcGFP (2-239 of | GHKFSVSGEGEGDATYGKLTLKFICTTGKLPVPWPTLVTTLSYGVQCFSRY | | |
| WT); stop) | PDHMKQHDFFKSAMPEGYIQERTIFFEDDGNYKSRAEVKFEGDTLVNRIEL | | |
| | TGTDFKEDGNILGNKMEYNYNAHNVYIMTDKAKNGIKVNFKIRHNIEDGS | | |
| | VQLADHYQQNTPIGDGPVLLPDNHYLSTQSALSKDPNEKRDHMIYFGFVT | | |
| | AAAITHGMDELYK* | | |
| OT-001371 (Met; | MEETRELQSLAAAVVPSAQTLKITDFSFSDFELSDLEIALCITRMFTDLNLV | 8506 | 8536 |
| hPDE5 (535-860 of | QNFQMKHEVLCRWILSVKRNYRKNVAYHNWRHAFNTAQCMFAALKAGK | | |
| WT, T5711, K604R, | IQNKLTDLEILALLIAALSHDLDHRGVNNSYIQRSEHPLAQLYCHSIMEHHH | | |
| 1706N, E795R); | FDQCLMILNSPGNQILSGLSNEEYKTTLKIIKQAILATDLALYIKRRGEFFELI | | |
| linker | RKNQFNLEDPHQKELFLAMLMTACDLSAITKPWPIQQRIAELVATEFFDQG | | |
| (GGSGGGSGG | DRERRELNIEPTDLMNREKKNKIPSMQVGFIDAICLQLYEALTHVSEDCFPL | | |
| (SEQ ID NO: 77)); | LDGCRKNRQKWQALAEQQGGSGGGSGGVSKGAELFTGIVPILIELNGDVN | | |
| AcGFP (2-239 of | GHKFSVSGEGEGDATYGKLTLKFICTTGKLPVPWPTLVTTLSYGVQCFSRY | | |
| WT); stop) | PDHMKQHDFFKSAMPEGYIQERTIFFEDDGNYKSRAEVKFEGDTLVNRIEL | | |
| | TGTDFKEDGNILGNKMEYNYNAHNVYIMTDKAKNGIKVNFKIRHNIEDGS | | |
| | VQLADHYQQNTPIGDGPVLLPDNHYLSTQSALSKDPNEKRDHMIYFGFVT | | |
| | AAAITHGMDELYK* | | |
| OT-001372 (Met; | MEETRELQSLAAAVVPSAQTLKITDFSFSDFELSDLETALCTIRMFTDLNLV | 8507 | 8537 |
| hPDE5 (535-860 of | QNFQMKHEVLCRWILSVKKNYRKNVAYHNWRHAFNTAQCMFAALKAGK | | |
| WT, G659A, | IQNKLTDLEILALLIAALSHDLDHRAVNNSYIQRSEHPLAQLYCHSIMEHHH | | |
| T784I); linker | FDQCLMILNSPGNQILSGLSIEEYKTTLKIIKQAILATDLALYIKRRGEFFELI | | |
| (GGSGGGSGG | RKNQFNLEDPHQKELFLAMLMTACDLSAITKPWPIQQRIAELVAIEFFDQG | | |
| (SEQ ID NO: 77)); | DRERKELNIEPTDLMNREKKNKIPSMQVGFIDAICLQLYEALTHVSEDCFPL | | |
| AcGFP (2-239 of | LDGCRKNRQKWQALAEQQGGSGGGSGGVSKGAELFTGIVPILIELNGDVN | | |
| WT); stop) | GHKFSVSGEGEGDATYGKLTLKFICTTGKLPVPWPTLVTTLSYGVQCFSRY | | |
| | PDHMKQHDFFKSAMPEGYIQERTIFFEDDGNYKSRAEVKFEGDTLVNRIEL | | |
| | TGTDFKEDGNILGNKMEYNYNAHNVYIMTDKAKNGIKVNFKIRHNIEDGS | | |
| | VQLADHYQQNTPIGDGPVLLPDNHYLSTQSALSKDPNEKRDHMIYFGFVT | | |
| | AAAITHGMDELYK* | | |
| OT-001373 (Met; | MEETRELQSLAAAVVPSAQTLKITDFSFSDFELSDLETALCTIRMFTDLNLV | 8508 | 8538 |
| hPDE5 (535-860 of | QNFQMKHEVLCRWILSVKKNYRKNVAYHNWRHAFNTAQCMFAALKAGK | | |
| WT, Q666H); | IQNKLTDLEILALLIAALSHDLDHRGVNNSYIHRSEHPLAQLYCHSIMEHHH | | |
| linker | FDQCLMILNSPGNQILSGLSIEEYKTTLKIIKQAILATDLALYIKRRGEFFELI | | |
| (GGSGGGSGG | RKNQFNLEDPHQKELFLAMLMTACDLSAITKPWPIQQRIAELVATEFFDQG | | |
| (SEQ ID NO: 77)); | DRERKELNIEPTDLMNREKKNKIPSMQVGFIDAICLQLYEALTHVSEDCFPL | | |
| AcGFP (2-239 of | LDGCRKNRQKWQALAEQQGGSGGGSGGVSKGAELFTGIVPILIELNGDVN | | |
| WT); stop) | GHKFSVSGEGEGDATYGKLTLKFICTTGKLPVPWPTLVTTLSYGVQCFSRY | | |
| | PDHMKQHDFFKSAMPEGYIQERTIFFEDDGNYKSRAEVKFEGDTLVNRIEL | | |
| | TGTDFKEDGNILGNKMEYNYNAHNVYIMTDKAKNGIKVNFKIRHNIEDGS | | |
| | VQLADHYQQNTPIGDGPVLLPDNHYLSTQSALSKDPNEKRDHMIYFGFVT | | |
| | AAAITHGMDELYK* | | |
| OT-001374 (Met; | MEETRELQSLAAAVVPSAQTLKITDFSFSDFELSDLETALCTIRMFTDLNLV | 8509 | 8539 |
| hPDE5 (535-860 of | QNFQMKHEVLCRWILSVKKNYRKNVAYHNWRLAFNTAQCMFAALKAGK | | |
| WT, H617L, | IQNKLTDLEILALLIAALSHDLDHRGVNNSYIQRSEHPLAQLYCHSIMEHHH | | |
| A722V); linker | FDQCLMILNSPGNQILSGLSIEEYKTTLKIIKQAILVTDLALYIKRRGEFFELI | | |
| (GGSGGGSGG | RKNQFNLEDPHQKELFLAMLMTACDLSAITKPWPIQQRIAELVATEFFDQG | | |
| (SEQ ID NO: 77)); | DRERKELNIEPTDLMNREKKNKIPSMQVGFIDAICLQLYEALTHVSEDCFPL | | |
| AcGFP (2-239 of | LDGCRKNRQKWQALAEQQGGSGGGSGGVSKGAELFTGIVPILIELNGDVN | | |
| WT); stop) | GHKFSVSGEGEGDATYGKLTLKFICTTGKLPVPWPTLVTTLSYGVQCFSRY | | |
| | PDHMKQHDFFKSAMPEGYIQERTIFFEDDGNYKSRAEVKFEGDTLVNRIEL | | |
| | TGTDFKEDGNILGNKMEYNYNAHNVYIMTDKAKNGIKVNFKIRHNIEDGS | | |
| | VQLADHYQQNTPIGDGPVLLPDNHYLSTQSALSKDPNEKRDHMIYFGFVT | | |
| | AAAITHGMDELYK* | | |
| OT-001375 (Met; | MEETRELQSLAAAVVPSAQTLKITDFSFSDFELSDLETALCTIRMFTDLNLV | 8510 | 8540 |
| hPDE5 (535-860 of | QNFQMKHEVLCRWILSVKKNYRKYVAYHNWRHAFNTAQCMFAALKAGK | | |
| WT, N609Y, | IQNKLTDLEILALLIAALSHDLDHRGVNNSYIQRSEHPLAQLYCHSIMEHHH | | |
| I799L); linker | FDQCLMILNSPGNQILSGLSIEEYKTTLKIIKQAILATDLALYIKRRGEFFELI | | |
| (GGSGGGSGG | RKNQFNLEDPHQKELFLAMLMTACDLSAITKPWPIQQRIAELVATEFFDQG | | |
| (SEQ ID NO: 77)); | DRERKELNLEPTDLMNREKKNKIPSMQVGFIDAICLQLYEALTHVSEDCFP | | |
| AcGFP (2-239 of | LLDGCRKNRQKWQALAEQQGGSGGGSGGVSKGAELFTGIVPILIELNGDV | | |
| WT); stop) | NGHKFSVSGEGEGDATYGKLTLKFICTTGKLPVPWPTLVTTLSYGVQCFSR | | |
| | YPDHMKQHDFFKSAMPEGYIQERTIFFEDDGNYKSRAEVKFEGDTLVNRIE | | |
| | LTGTDFKEDGNILGNKMEYNYNAHNVYIMTDKAKNGIKVNEKIRHNIEDG | | |
| | SVQLADHYQQNTPIGDGPVLLPDNHYLSTQSALSKDPNEKRDHMIYFGFVT | | |
| | AAAITHGMDELYK* | | |
| OT-001376 (Met; | MEETRELQSLAAAVVPSAQTLKITDFSLSDFELSDLETALCTIRMFTDLNLV | 8511 | 8541 |
| hPDE5 (535-860 of | QNFQMKHEVLCRWILSVKKNYRKNVAYHNWRHAFNTAQCMFAALKAGK | | |
| WT, F561L, | IQNKLTDLEILALLIAALSHDLDHRAVNNSYIQRSEHPLAQLYCHSIMEHHH | | |
| G659A, T784I); | FDQCLMILNSPGNQILSGLSIEEYKTTLKIIKQAILATDLALYIKRRGEFFELI | | |
| linker | RKNQFNLEDPHQKELFLAMLMTACDLSAITKPWPIQQRIAELVAIEFFDQG | | |
| (GGSGGGSGG | DRERKELNIEPTDLMNREKKNKIPSMQVGFIDAICLQLYEALTHVSEDCFPL | | |
| (SEQ ID NO: 77)); | LDGCRKNRQKWQALAEQQGGSGGGSGGVSKGAELFTGIVPILIELNGDVN | | |
| AcGFP (2-239 of | GHKFSVSGEGEGDATYGKLTLKFICTTGKLPVPWPTLVTTLSYGVQCFSRY | | |
| WT); stop) | PDHMKQHDFFKSAMPEGYIQERTIFFEDDGNYKSRAEVKFEGDTLVNRIEL | | |
| | TGTDFKEDGNILGNKMEYNYNAHNVYIMTDKAKNGIKVNFKIRHNIEDGS | | |
| | VQLADHYQQNTPIGDGPVLLPDNHYLSTQSALSKDPNEKRDHMIYFGFVT | | |
| | AAAITHGMDELYK* | | |
| OT-001377 (Met; | MEETRELQSLAAAVVPSAQTLKITDFSFSDFELSDLETALCTIRMFTDLNLV | 8512 | 8542 |
| hPDE5 (535-860 of | QNFQMKHEVLCRWILSVKKNYRKNVAYHNWRHAFNTAQCMFAALKAGK | | |
| WT, K795N); | IQNKLTDLEILALLIAALSHDLDHRGVNNSYIQRSEHPLAQLYCHSIMEHHH | | |
| linker | FDQCLMILNSPGNQILSGLSIEEYKTTLKIIKQAILATDLALYIKRRGEFFELI | | |
| (GGSGGGSGG | RKNQFNLEDPHQKELFLAMLMTACDLSAITKPWPIQQRIAELVATEFFDQG | | |
| (SEQ ID NO: 77)); | DRERNELNIEPTDLMNREKKNKIPSMQVGFIDAICLQLYEALTHVSEDCFPL | | |
| AcGFP (2-239 of | LDGCRKNRQKWQALAEQQGGSGGGSGGVSKGAELFTGIVPILIELNGDVN | | |
| WT); stop) | GHKFSVSGEGEGDATYGKLTLKFICTTGKLPVPWPTLVTTLSYGVQCFSRY | | |
| | PDHMKQHDFFKSAMPEGYIQERTIFFEDDGNYKSRAEVKFEGDTLVNRIEL | | |
| | TGTDFKEDGNILGNKMEYNYNAHNVYIMTDKAKNGIKVNFKIRHNIEDGS | | |
| | VQLADHYQQNTPIGDGPVLLPDNHYLSTQSALSKDPNEKRDHMIYFGFVT | | |
| | AAAITHGMDELYK* | | |
| OT-001378 (Met; | MEETRELQSLAAAVVPSAQTLKITDFSFSDFELSDLETALCTIRMFTDLNLV | 8513 | 8543 |
| hPDE5 (535-860 of | QNFQMKHEVLCRWILSVKKNYRKNVAYHNWRHAFNTAQCMFAALKAGK | | |
| WT, K770Q, | IQNKLTDLEILALLIAALSHDLDHRGVNNSYIQRSEHPLAQLYCHSIMEHHH | | |
| K848N); linker | FDQCLMILNSPGNQILSGLSIEEYKTTLKIIKQAILATDLALYIKRRGEFFELI | | |
| (GGSGGGSGG | RKNQFNLEDPHQKELFLAMLMTACDLSAITQPWPIQQRIAELVATEFFDQG | | |
| (SEQ ID NO: 77)); | DRERKELNIEPTDLMNREKKNKIPSMQVGFIDAICLQLYEALTHVSEDCFPL | | |
| AcGFP (2-239 of | LDGCRNNRQKWQALAEQQGGSGGGSGGVSKGAELFTGIVPILIELNGDVN | | |
| WT); stop) | GHKFSVSGEGEGDATYGKLTLKFICTTGKLPVPWPTLVTTLSYGVQCFSRY | | |
| | PDHMKQHDFFKSAMPEGYIQERTIFFEDDGNYKSRAEVKFEGDTLVNRIEL | | |
| | TGTDFKEDGNILGNKMEYNYNAHNVYIMTDKAKNGIKVNFKIRHNIEDGS | | |
| | VQLADHYQQNTPIGDGPVLLPDNHYLSTQSALSKDPNEKRDHMIYFGFVT | | |
| | AAAITHGMDELYK* | | |
| OT-001379 (Met; | MEETRELQSLAAAVVPSAQTLKITDFSFSDFELSDLETALCTIRMFTDLNLV | 8514 | 8544 |
| hPDE5 (535-860 of | QNFQMKHEVLCRWILSVKKDYRKNVAYHNWRHAFNTAQCMFAALKAGK | | |
| WT, N605D); | IQNKLTDLEILALLIAALSHDLDHRGVNNSYIQRSEHPLAQLYCHSIMEHHH | | |
| linker | FDQCLMILNSPGNQILSGLSIEEYKTTLKIIKQAILATDLALYIKRRGEFFELI | | |
| (GGSGGGSGG | RKNQFNLEDPHQKELFLAMLMTACDLSAITKPWPIQQRIAELVATEFFDQG | | |
| (SEQ ID NO: 77)); | DRERKELNIEPTDLMNREKKNKIPSMQVGFIDAICLQLYEALTHVSEDCFPL | | |
| AcGFP (2-239 of | LDGCRKNRQKWQALAEQQGGSGGGSGGVSKGAELFTGIVPILIELNGDVN | | |
| WT); stop) | GHKFSVSGEGEGDATYGKLTLKFICTTGKLPVPWPTLVTTLSYGVQCFSRY | | |
| | PDHMKQHDFFKSAMPEGYIQERTIFFEDDGNYKSRAEVKFEGDTLVNRIEL | | |
| | TGTDFKEDGNILGNKMEYNYNAHNVYIMTDKAKNGIKVNFKIRHNIEDGS | | |
| | VQLADHYQQNTPIGDGPVLLPDNHYLSTQSALSKDPNEKRDHMIYFGFVT | | |
| | AAAITHGMDELYK* | | |
| OT-001380 (Met; | MEETRELQSLAAAVVPSAQTLKITDFSFSDFELSDLETALCTIRMFTDLNLV | 8515 | 8545 |
| hPDE5 (535-860 of | QNFQMKHEVLCRWILSVKKNYRKNVAYHNWRHAFNTAQCMFAALKAGK | | |
| WT, I680S); linker | IQNKLTDLEILALLIAALSHDLDHRGVNNSYIQRSEHPLAQLYCHSSMEHHH | | |
| (GGSGGGSGG | FDQCLMILNSPGNQILSGLSIEEYKTTLKIIKQAILATDLALYIKRRGEFFELI | | |
| (SEQ ID NO: 77)); | RKNQFNLEDPHQKELFLAMLMTACDLSAITKPWPIQQRIAELVATEFFDQG | | |
| AcGFP (2-239 of | DRERKELNIEPTDLMNREKKNKIPSMQVGFIDAICLQLYEALTHVSEDCFPL | | |
| WT); stop) | LDGCRKNRQKWQALAEQQGGSGGGSGGVSKGAELFTGIVPILIELNGDVN | | |
| | GHKFSVSGEGEGDATYGKLTLKFICTTGKLPVPWPTLVTTLSYGVQCFSRY | | |
| | PDHMKQHDFFKSAMPEGYIQERTIFFEDDGNYKSRAEVKFEGDTLVNRIEL | | |
| | TGTDFKEDGNILGNKMEYNYNAHNVYIMTDKAKNGIKVNFKIRHNIEDGS | | |
| | VQLADHYQQNTPIGDGPVLLPDNHYLSTQSALSKDPNEKRDHMIYFGFVT | | |
| | AAAITHGMDELYK* | | |
| OT-001381 (Met; | MEETRELQSLAAAVMPSAQTLKITDFSFSDFELSDLETALCTIRMFTDLNLV | 8516 | 8546 |
| hPDE5 (535-860 of | QNFQMKHEVLCRWILSVKKNYRKNVAYHNWRHAFNTAQCMFAALKAGK | | |
| WT, V548M, | IQNKLTDLEILALLIAALSHDLDHRGVNNSYIQRSEHPLAQLYCHSIMEHHH | | |
| F820I); linker | FDQCLMILNSPGNQILSGLSIEEYKTTLKIIKQAILATDLALYIKRRGEFFELI | | |
| (GGSGGGSGG | RKNQFNLEDPHQKELFLAMLMTACDLSAITKPWPIQQRIAELVATEFFDQG | | |
| (SEQ ID NO: 77)); | DRERKELNIEPTDLMNREKKNKIPSMQVGIIDAICLQLYEALTHVSEDCFPL | | |
| AcGFP (2-239 of | LDGCRKNRQKWQALAEQQGGSGGGSGGVSKGAELFTGIVPILIELNGDVN | | |
| WT); stop) | GHKFSVSGEGEGDATYGKLTLKFICTTGKLPVPWPTLVTTLSYGVQCFSRY | | |
| | PDHMKQHDFFKSAMPEGYIQERTIFFEDDGNYKSRAEVKFEGDTLVNRIEL | | |
| | TGTDFKEDGNILGNKMEYNYNAHNVYIMTDKAKNGIKVNFKIRHNIEDGS | | |
| | VQLADHYQQNTPIGDGPVLLPDNHYLSTQSALSKDPNEKRDHMIYFGFVT | | |
| | AAAITHGMDELYK* | | |
| OT-001382 (Met; | MEETRELQSLAAAVVPSAQTLKITDFSFSDFELSDLETALCTIRMFTDLNLV | 8517 | 8547 |
| hPDE5 (535-860 of | QNFQMKHEVLCRWILSVKKNYRKNVAYHNWRHAFNTAQCMFAALKAGK | | |
| WT, I799L); linker | IQNKLTDLEILALLIAALSHDLDHRGVNNSYIQRSEHPLAQLYCHSIMEHHH | | |
| (GGSGGGSGG | FDQCLMILNSPGNQILSGLSIEEYKTTLKIIKQAILATDLALYIKRRGEFFELI | | |
| (SEQ ID NO: 77)); | RKNQFNLEDPHQKELFLAMLMTACDLSAITKPWPIQQRIAELVATEFFDQG | | |
| AcGFP (2-239 of | DRERKELNLEPTDLMNREKKNKIPSMQVGFIDAICLQLYEALTHVSEDCFP | | |
| WT); stop) | LLDGCRKNRQKWQALAEQQGGSGGGSGGVSKGAELFTGIVPILIELNGDV | | |
| | NGHKFSVSGEGEGDATYGKLTLKFICTTGKLPVPWPTLVTTLSYGVQCFSR | | |
| | YPDHMKQHDFFKSAMPEGYIQERTIFFEDDGNYKSRAEVKFEGDTLVNRIE | | |
| | LTGTDFKEDGNILGNKMEYNYNAHNVYIMTDKAKNGIKVNFKIRHNIEDG | | |
| | SVQLADHYQQNTPIGDGPVLLPDNHYLSTQSALSKDPNEKRDHMIYFGFVT | | |
| | AAAITHGMDELYK* | | |
| OT-001383 (Met; | MEETRELQSLAAAVVPSAQTLKITDFSFSDFELSDLETALCTIRMFTDLNLV | 8518 | 8548 |
| hPDE5 (535-860 of | QNFQMKHEVLCRWILSVKKNYQKNVAYHNWRHAFNTAQCMFAALKAG | | |
| WT, R607Q); linker | KIQNKLTDLEILALLIAALSHDLDHRGVNNSYIQRSEHPLAQLYCHSIMEHH | | |
| (GGSGGGSGG | HFDQCLMILNSPGNQILSGLSIEEYKTTLKIIKQAILATDLALYIKRRGEFFEL | | |
| (SEQ ID NO: 77)); | IRKNQFNLEDPHQKELFLAMLMTACDLSAITKPWPIQQRIAELVATEFFDQ | | |
| AcGFP (2-239 of | GDRERKELNIEPTDLMNREKKNKIPSMQVGFIDAICLQLYEALTHVSEDCFP | | |
| WT); stop) | LLDGCRKNRQKWQALAEQQGGSGGGSGGVSKGAELFTGIVPILIELNGDV | | |
| | NGHKFSVSGEGEGDATYGKLTLKFICTTGKLPVPWPTLVTTLSYGVQCFSR | | |
| | YPDHMKQHDFFKSAMPEGYIQERTIFFEDDGNYKSRAEVKFEGDTLVNRIE | | |
| | LTGTDFKEDGNILGNKMEYNYNAHNVYIMTDKAKNGIKVNFKIRHNIEDG | | |
| | SVQLADHYQQNTPIGDGPVLLPDNHYLSTQSALSKDPNEKRDHMIYFGFVT | | |
| | AAAITHGMDELYK* | | |
| OT-001384 (Met; | MEETRELQSLAAAVVPFAQTRKITDFSFSDFELSDLETALCTIRMFTDLNLV | 8519 | 8549 |
| hPDE5 (535-860 of | QNFQMKHEVLCRWILSVKKNYRKNVAYHNWRHAFNTAQCMFAALKAGK | | |
| WT, S550F, | IQNKLTDLEILALLIAALSHDLDHRGVNNSYIQRSEHPLAQLYCHSIMEHHH | | |
| L554R); linker | FDQCLMILNSPGNQILSGLSIEEYKTTLKIIKQAILATDLALYIKRRGEFFELI | | |
| (GGSGGGSGG | RKNQFNLEDPHQKELFLAMLMTACDLSAITKPWPIQQRIAELVATEFFDQG | | |
| (SEQ ID NO: 77)); | DRERKELNIEPTDLMNREKKNKIPSMQVGFIDAICLQLYEALTHVSEDCFPL | | |
| AcGFP (2-239 of | LDGCRKNRQKWQALAEQQGGSGGGSGGVSKGAELFTGIVPILIELNGDVN | | |
| WT); stop) | GHKFSVSGEGEGDATYGKLTLKFICTTGKLPVPWPTLVTTLSYGVQCFSRY | | |
| | PDHMKQHDFFKSAMPEGYIQERTIFFEDDGNYKSRAEVKFEGDTLVNRIEL | | |
| | TGTDFKEDGNILGNKMEYNYNAHNVYIMTDKAKNGIKVNFKIRHNIEDGS | | |
| | VQLADHYQQNTPIGDGPVLLPDNHYLSTQSALSKDPNEKRDHMIYFGFVT | | |
| | AAAITHGMDELYK* | | |
| OT-001385 (Met; | MEETRELQSLAAAVVSSAQTLKITDFSFSDIELSDLETALCTIRMFTDLNLV | 8520 | 8550 |
| hPDE5 (535-860 of | QNFQMKHEVLCRWILSVKKNYRKNVAYHNWRHAFNTAQCMFAALKAGK | | |
| WT, P549S, F564I, | IQNKLTDLEILALLIAALSHDLDHHGVNNSYIQRSEHPLAQLYCHSIMEHHH | | |
| R658H, A779T, | FDQCLMILNSPGNQILSGLSIEEYKTTLKIIKQAILATDLALYIKRRGEFFELI | | |
| R847G); linker | RKNQFNLEDPHQKELFLAMLMTACDLSAITKPWPIQQRITELVATEFFDQG | | |
| (GGSGGGSGG | DRERKELNIEPTDLMNREKKNKIPSMQVGFIDAICLQLYEALTHVSEDCFPL | | |
| (SEQ ID NO: 77)); | LDGCGKNRQKWQALAEQQGGSGGGSGGVSKGAELFTGIVPILIELNGDVN | | |
| AcGFP (2-239 of | GHKFSVSGEGEGDATYGKLTLKFICTTGKLPVPWPTLVTTLSYGVQCFSRY | | |
| WT); stop) | PDHMKQHDFFKSAMPEGYIQERTIFFEDDGNYKSRAEVKFEGDTLVNRIEL | | |
| | TGTDFKEDGNILGNKMEYNYNAHNVYIMTDKAKNGIKVNFKIRHNIEDGS | | |
| | VQLADHYQQNTPIGDGPVLLPDNHYLSTQSALSKDPNEKRDHMIYFGFVT | | |
| | AAAITHGMDELYK* | | |

[0142] In addition to human PDE5, other phosphodiesterases may also be used to generate novel destabilizing domains The human PDE superfamily includes 11 structurally related but functionally distinct gene families (hPDE1 to hPDE11). These differ in their cellular functions, primary structures, affinities for cAMP and cGMP, catalytic properties and response to specific activators, inhibitors, effectors and mechanisms of regulation. As modular proteins, hPDEs exhibit a common structural organization with divergent amino-terminal regulatory regions and conserved carboxy-terminal catalytic core. The hPDE family proteins contain an N terminal regulatory region and a C terminal catalytic region. The N-terminal regulatory regions contain structural determinants that target individual hPDEs to different subcellular locations, and allow individual hPDEs to specifically respond to different post translational modification. The structural elements include dimerization domains, auto-inhibitory modules, binding sites for ligands and allosteric effectors. In contrast, the X ray crystal structure isolated catalytic domains of nine hPDE families (hPDE1 to hPDE5 and hPDE7 to hPDE10) have demonstrated that the catalytic domains of hPDEs share a similar topography, composed of ˜350 amino acids folded into 16 helices. Across the hPDE families, the active site forms a deep hydrophobic pocket that contains a hPDE specific, histidine-containing signature motif, HD(X2) H(X4) N (SEQ ID NO: 8377), and binding sites for two divalent metal ions that are essential for catalytic function. The affinity of hPDEs to specific cyclic nucleotides varies within the family-some hPDEs specifically hydrolyze cAMP (hPDE4, hPDE7 and hPDE8), whereas others hydrolyze cGMP (hPDE5, hPDE6 and hPDE9), and some hydrolyze both cAMP and cGMP (hPDE1, hPDE2, hPDE3, hPDE10 and hPDE11).

[0143] Similar to hPDE5, the catalytic domain or other functional domain of any hPDE family member may be mutagenized and screened for destabilizing mutations. Known inhibitors for each hPDE protein may also be tested for ligand-dependent stabilization.

[0144] In some embodiments, known mutations in phosphodiesterases that affect protein stability may be utilized to identify novel hPDE derived DDs. Mutations previously identified include, but are not limited to, hPDE5 (I778T), or hPDE6C (H602L), hPDE6C (E790K), hPDE6C (R104W), hPDE6C (Y323N), and hPDE6C (P391L) or hPDE4D (5752A), hPDE4D (5754A), hPDE4D (S752A, S754A), and hPDE4D (E757A, E758A, D759A) (Zhu et al. (2010) Mol Cell Biol. 4379-4390; Alexandre et al. (2015). Endocr. Relat. Cancer 22(4):519-30; Cheguru P. et al. (2015) Mol Cell Neurosci; 64: 1-8; the contents of each of which are incorporated herein by reference in their entirety).

[0145] In some embodiments, novel DDs may be generated from hPDE1 which is also known as calcium and calmodulin dependent phosphodiesterase. It has three subtypes hPDE1A, hPDE1B and hPDE1C. The enzyme contains three functional domains; a conserved catalytic core, a regulatory N-terminus and a C-terminus. The catalytic domains of hPDE1 have three helical subdomains; an N-terminal cyclin fold region, a linker region and a C-terminal helical bundle. Vinpocetine is a known inhibitor of hPDE1.

[0146] In some embodiments, novel DDs may be generated from hPDE2, a dual substrate enzyme that hydrolyzes both cAMP and cGMP. The distinguishing feature of this hPDE is that it is allosterically stimulated by cGMP binding to one of its GAF domains The crystal structure of hPDE2 GAF-B domain reveals that the GAF-B domain binds cGMP with high affinity and selectivity. Exemplary hPDE2 inhibitors include EHNA (erythro-9-(2-hydroxy-3-nonyl) adenine), Oxindole, PDP and BAY 60-7550. Inhibitors that selectively inhibit a hPDE2 isoform may also be used, for example, substituted pyrido (2,3-b) pyrazines having a hPDE2A selective inhibitory action (See, e.g., U.S. Pat. No. 9,527,841; the contents of which are incorporated by reference in its entirety.)

[0147] In some embodiments, novel DDs may be generated from hPDE3 which preferentially hydrolyses cAMP. Like other hPDE family members, it comprises three functional domains, a conserved catalytic core, a regulatory terminus and the C-terminus. The catalytic core of hPDE is characterized by a unique 44-amino acid insert. Amrinone, Cilostazol, Milrinone, Enoximone and Pimobendan are inhibitors for hPDE3 enzyme.

[0148] In some embodiments, novel DDs may be generated from hPDE4, the principal second messenger for immune response regulation and is responsible for the hydrolysis of cAMP. Four isoforms of hPDE4 exist with each isoform having a unique N terminal region that specifies cellular localization by mediating interactions with scaffolding proteins which may further comprise upstream conserved regions (UCRs). All isoforms share invariant catalytic domain. The catalytic pocket is lined with highly conserved and invariant residues, including an invariant glutamine (Q369) that forms crucial hydrogen bond with substrates. Analyses of crystal structure of hPDE-inhibitor complexes suggest that two conserved residues are essential for inhibitor binding. The formation of hydrogen bonds with invariant glutamine determines the orientation of the inhibitors and conserved hydrophobic residues (1336 and F340) form a hydrophobic clamp that anchors inhibitors in the pocket. A number of small molecules can inhibit hPDE 4 activity, some of which are FDA approved such as AN2728 (4-[(1-hydroxy-1,3-dihydro-2,1-benzoxaborol-5-yl) oxy]benzonitrile), Apremilast/CC10004 (N-{2-[(1S)-1-(3-Ethoxy-4-methoxyphenyl)-2-(methyl sulfonyl) ethyl]-1,3-dioxo-2,3-dihydro-1H-isoindol-4-yl}acetamide), and Roflumilast. Other small molecules that inhibit hPDE4 also include E6005/RVT501, Cilomilast/SB-207,499, Ibudilast (AV-411 or MN-166), Mesembrenone, Piclamilast/RP 73401, Rolipram, Atizoram/CP-80633, Arofylline, CC-1088, Catramilast, CGH-2466, Cipamfylline, Drotaverine, Filaminast/WAY-PDA 641, HT-0712, DNS-001, ICI-63197, Indimilast, Irsogladine/MN 1695, Lirimilast/BAY 19-8004, Oglemilast, Revamilast, Ro 20-1724, Ronomilast, GSK256066, DC-TA-46, AWD 12-281 and YM-976.

[0149] In some embodiments, novel DDs may be generated from hPDE6. This holoenzyme includes hPDE6 alpha, hPDE6 beta and/or two identical inhibitory subunits of hPDE6 gamma. hPDE6 alpha and beta forms comprise three domains: two N-terminal GAF domains and one C-terminal catalytic domain. The non-catalytic GAF domains are responsible for cGMP binding.

[0150] In some embodiments, novel DDs may be generated from hPDE7, a cAMP specific hPDE which consists of two genes, hPDE7A and hPDE7B. There are no known regulatory domains on the N terminus as established for most of the other hPDE families, although consensus PKA phosphorylation sites exist in this region. Several small molecules can inhibit PDE7, including BRL-50481 (N, N,2-Trimethyl-5-nitrobenzenesulfonamide) and ASB 16165 (1H-Thieno(2,3-C) pyrazole-5-carboxamide, 1-cyclohexyl-N-(6-(4-hydroxy-1-piperidinyl)-3-pyridinyl)-3-methyl).

[0151] In some embodiments, novel DDs may be generated from hPDE8. Two subfamilies of hPDE8 exist and both they have very high affinity for the substrate cAMP and are insensitive to the non-specific PDE inhibitor IBMX. Each protein contains a catalytic core, a PAS (Per, Arnt and Sim) and a REC (receiver) domain The crystal structure of the catalytic core of hPDE8 identified Tyr748 residue as a unique residue that distinguishes hPDE8 inhibitor binding from other hPDE proteins bound to inhibitors. PF-04957325 (Pfizer) is a small molecule inhibitor of hPDE8.

[0152] In some embodiments, novel DDs may be generated from hPDE9, which has the highest affinity for cGMP. The primary structure of hPDE9A is simple as it does not appear to contain any GAF domains or other N-terminal regulatory sequences found in other hPDEs. The catalytic pocket is lined with highly conserved and invariant residues, including an invariant glutamine Gln 453 in hPDE9A2 that forms crucial hydrogen bond with substrates. The formation of hydrogen bonds with invariant glutamine determines the orientation of the inhibitors and conserved hydrophobic residues form a hydrophobic clamp that anchors inhibitors in the pocket and wedges their ring structures against F456 in hPDE9A. Tested hPDE9 inhibitors may include BAY73-6691 (1-(2-chlorophenyl)-6-[(2R)-3,3,3-trifluoro-2-methylpropyl]-1,5-dihydro-4H-pyrazolo[3,4-d] pyrimidine-4-one), PF-04447943 (6-[(3S,4S)-4-methyl-1-(pyrimidin-2-ylmethyl)pyrrolidin-3-yl]-1-(oxan-4-yl)-2H-pyrazolo[3,4-d]pyrimidin-4-one) and WYQ-C28L.

[0153] In some embodiments, novel DDs may be generated from hPDE10, which can hydrolyze both cAMP and cGMP. Like some other hPDE family proteins, hPDE10 comprises 2 GAF domains in the N terminal region, a Protein Kinase A phosphorylation site and a catalytic domain. The catalytic pocket is lined with highly conserved and invariant residues, including an invariant glutamine Q726 in hPDE10A2 that forms crucial hydrogen bond with substrates. Several PDE10 inhibitors are under clinical trials including OMS 824, Papaverine and PF-2545920 (2-(4-(1-methyl-4-pyridin-4-yl-1H-pyrazol-3-yl) phenoxymethyl) quinolone).

[0154] In some embodiments, novel DDs may be generated from hPDE11. Like hPDE10, the recently discovered hPDE11 can hydrolyze both cAMP and cGMP. It comprises of only one gene with four isoform variants. The longest variant, hPDE11A4, has two N-terminal GAF domains, whereas the other variants are truncations of this variant of varying lengths.

[0155] In some embodiments, any of the destabilizing mutations related to hPDE5 described herein may be structurally mapped onto other phosphodiesterases to generate destabilizing domains In one embodiment, mutations that destabilize hPDE5, and which subsequently result in stabilization in the presence of sildenafil and/or vardenafil may be engineered onto hPDE6. In one embodiment, mutations that destabilize hPDE5, and which subsequently result in stabilization in the presence of Tadalafil may be engineered onto hPDE11.

[0156] The full length hPDEs and their catalytic domains that may be utilized to derive novel DDs are listed in Table 5.

TABLE 5
Sequences of human PDE proteins and their catalytic domains

| PDE protein | | |
|---|---|---|
| (Uniprot ID or | | AA |
| domain | | SEQ ID |
| description) | Amino Acid sequence | NO: |
| hPDE1A (Uniprot | MDDHVTIRKKHLQRPIFRLRCLVKQLERGDVNVVDLKKNIEYAASVLEAVYIDETRRLLDT | 107 |
| ID: P54750) | EDELSDIQTDSVPSEVRDWLASTFTRKMGMTKKKPEEKPKFRSIVHAVQAGIFVERMYRKT | |
| | YHMVGLAYPAAVIVTLKDVDKWSFDVFALNEASGEHSLKFMIYELFTRYDLINRFKIPVSC | |
| | LITFAEALEVGYSKYKNPYHNLIHAADVTQTVHYIMLHTGIMHWLTELEILAMVFAAAIHD | |
| | YEHTGTTNNFHIQTRSDVAILYNDRSVLENHHVSAAYRLMQEEEMNILINLSKDDWRDLR | |
| | NLVIEMVLSTDMSGHFQQIKNIRNSLQQPEGIDRAKTMSLILHAADISHPAKSWKLHYRWT | |
| | MALMEEFFLQGDKEAELGLPFSPLCDRKSTMVAQSQIGHDFIVEPTTSLLTDSTEKIVIPLIE | |
| | EASKAETSSYVASSSTTIVGLHIADALRRSNTKGSMSDGSYSPDYSLAAVDLKSFKNNLVDI | |
| | IQQNKERWKELAAQEARTSSQKCEFIHQ | |
| hPDE1A Catalytic | FKIPVSCLITFAEALEVGYSKYKNPYHNLIHAADVTQTVHYIMIHTGIMHWLTELEILAMV | 108 |
| domain (Amino | FAAAIHDYEHTGTTNNFHIQTRSDVAILYNDRSVLENHHVSAAYRLMQEEEMNILINLSKD | |
| acid 193-515 of | DWRDLRNLVIEMVLSTDMSGHFQQIKNIRNSLQQPEGIDRAKTMSLILHAADISHPAKSWK | |
| PDEIA) | LHYRWTMALMEEFFLQGDKEAELGLPFSPLCDRKSTMVAQSQIGFIDFIVEPTFSLLTDSTE | |
| | KIVIPLIEEASKAETSSYVASSSTTIVGLHIADALRRSNTKGSMSDGSYSPDYSLAAVDLKSF | |
| | KNNLVDIIQQNKERW | |
| hPDE1B (Uniprot | MELSPRSPPEMLEESDCPSPLELKSAPSKKMWIKLRSLLRYMVKQLENGEINIEELKKNLEY | 109 |
| ID: Q01064) | TASLLEAVYIDETRQILDTEDELQELRSDAVPSEVRDWLASTFTQQARAKGRRAEEKPKFR | |
| | SIVHAVQAGIFVERMFRRTYTSVGPTYSTAVLNCLKNLDLWCFDVFSLNQAADDHALRTI | |
| | VFELLTRHNLISRFKIPTVFLMSFLDALETGYGKYKNPYHNQIHAADVTQTVHCFLLRTGM | |
| | VHCLSEIELLAIIFAAAIHDYEHTGTTNSFHIQTKSECAIVYNDRSVLENHHISSVFRLMQDD | |
| | EMNIFINLTKDEFVELRALVIEMVLATDMSCHFQQVKTMKTALQQLERIDKPKALSLLLHA | |
| | ADISRPTKQWLVHSRWTKALMEEFFRQGDKEAELGLPFSPLCDRTSTLVAQSQIGFIDFIVE | |
| | PTFSVLTDVAEKSVQPLADEDSKSKNQPSFQWRQPSLDVEVGDPNPDVVSFRSTWVKRIQE | |
| | NKQKWKERAASGITNQMSIDELSPCEEEAPPSPAEDEHNQNGNLD | |
| hPDE1B Catalytic | FKIPTVFLMSFLDALETGYGKYKNPYHNQIHAADVTQTVHCFLLRTGMVHCLSEIELLAIIF | 110 |
| domain (Amino | AAAIHDYEHTGTTNSFHIQTKSECAIVYNDRSVLENHHISSVFRLMQDDEMNIFINLTKDEF | |
| acid 197-496 of | VELRALVIEMVLATDMSCHFQQVKTMKTALQQLERIDKPKALSLLLHAADISHPTKQWLV | |
| PDE1B) | HSRWTKALMEEFFRQGDKEAELGLPFSPLCDRTSTLVAQSQIGFIDFIVEPTFSVLTDVAEK | |
| | SVQPLADEDSKSKNQPSFQWRQPSLDVEVGDPNPDVVSFRSTWVKRIQENKQKW | |
| hPDE1C (Uniprot | MESPTKEIEEFESNSLKYLQPEQIEKIWLRLRGLRKYKKTSQRLRSLVKQLERGEASVVDLK | 111 |
| ID: Q14123) | KNLEYAATVLESVYIDETRRLLDTEDELSDIQSDAVPSEVRDWLASTFTRQMGMMLRRSD | |
| | EKPRFKSIVHAVQAGIFVERMYRRTSNMVGLSYPPAVIEALKDVDKWSFDVFSLNEASGD | |
| | HALKFIFYELLTRYDLISRFKIPISALVSFVEALEVGYSKHKNPYHNLMHAADVTQTVHYLL | |
| | YKTGVANWLTELEIFAIIFSAAIHDYEHTGTTNNFHIQTRSDPAILYNDRSVLENHRLSAAY | |
| | RLLQDDEEMNILINLSKDDWREFRTLVIEMVMATDMSCHFQQIKAMKTALQQPEAIEKPK | |
| | ALSLMLHTADISRPAKAWDLHHRWTMSLLEEFFRQGDREAELGLPFSPLCDRKSTMVAQS | |
| | QVGFIDFIVEPTFTVLTDMTEKIVSPLIDETSQTGGTGQRRSSLNSISSSDAKRSGVKTSGSEG | |
| | SAPINNSVISVDYKSFKATWTEVVHINRERWRAKVPKEEKAKKEAEEKARLAAEEQQKEM | |
| | EAKSQAEEGASGKAEKKTSGETKNQVNGTRANKSDNPRGKNSKAEKSSGEQQQNGDFKD | |
| | GKNKTDKKDHSNIGNDSKKTDGTKQRSHGSPAPSTSSTCRLTLPVIKPPLRHFKRPAYASSS | |
| | YAPSVSKKTDEHPARYKMLDQRIKMKKIQNISHNWNRK | |
| hPDE1C Catalytic | FKIPISALVSFVEALEVGYSKHKNPYHNLMHAADVTQTVHYLLYKTGVANWLTELEIFAIIF | 112 |
| domain (Amino | SAAIHDYEHTGTTNNFHIQTRSDPAILYNDRSVLENHHLSAAYRLLQDDEEMNILINLSKDD | |
| acid 202-521 of | WREFRTLVIEMVMATDMSCHFQQIKAMKTALQQPEAIEKPKALSLMLHTADISRPAKAW | |
| PDE1C) | DLHHRWTMSLLEEFFRQGDREAELGLPFSPLCDRKSTMVAQSQVGFIDFIVEPTFTVLTDM | |
| | TEKIVSPLIDETSQTGGTGQRRSSLNSISSSDAKRSGVKTSGSEGSAPINNSVISVDYKSFKAT | |
| | WTEVVHINRERW | |
| hPDE2A (Uniprot | MGQACGHSILCRSQQYPAARPAEPRGQQVFLKPDEPPPPPQPCADSLQDALLSLGSVIDISG | 113 |
| ID: O00408) | LQRAVKEALSAVLPRVETVYTYLLDGESQLVCEDPPHELPQEGKVREAIISQKRLGCNGLG | |
| | FSDLPGKPLARLVAPLAPDTQVLVMPLADKEAGAVAAVILVHCGQLSDNEEWSLQAVEK | |
| | HTLVALRRVQVLQQRGPREAPRAVQNPPEGTAEDQKGGAAYTDRDRKILQLCGELYDLD | |
| | ASSLQLKVLQYLQQETRASRCCLLLVSEDNLQLSCKVIGDKVLGEEVSFPLTGCLGQVVED | |
| | KKSIQLKDLTSEDVQQLQSMLGCELQAMLCVPVISRATDQVVALACAFNKLEGDLFTDED | |
| | EHVIQHCFHYTSTVLTSTLAFQKEQKLKCECQALLQVAKNLFTHLDDVSVLLQEIITEARNL | |
| | SNAEICSVFLLDQNELVAKVFDGGVVDDESYEIRIPADQGIAGHVATTGQILNIPDAYAHPL | |
| | FYRGVDDSTGFRTRNILCFPIKNENQEVIGVAELVNKINGPWFSKEDEDLATAFSIYCGISIA | |
| | HSLLYKKVNEAQYRSHLANEMMMYHMKVSDDEYTKLLHDGIQPVAAIDSNFASFTYTPR | |
| | SLPEDDTSMAILSMLQDMNFINNYKIDCPTLARFCLMVKKGYRDPPYHNWMHAFSVSHFC | |
| | YLLYKNLELTNYLEDIEIFALFISCMCHDLDHRGTNNSFQVASKSVLAALYSSEGSVMERH | |
| | HFAQAIAILNTHGCNIFDHFSRKDYQRMLDLMRDIILATDLAHHLRIFKDLQKMAEVGYDR | |
| | NNKQHHRLLLCLLMTSCDLSDQTKGWKTTRKIAELIYKEFFSQGDLEKAMGNRPMEMMD | |
| | REKAYIPELQISFMEHIAMPIYKLLQDLFPKAAELYERVASNREHWTKVSHKFTIRGLPSNN | |
| | SLDFLDEEYEVPDLDGTRAPINGCCSLDAE | |
| hPDE2A Catalytic | KIDCPTLARFCLMVKKGYRDPPYHNWMHAFSVSHFCYLLYKNLELTNYLEDILIFALFISC | 114 |
| domain (Amino | MCHDLDHRGTNNSFQVASKSVLAALYSSEGSVMERHHFAQAIAILNTHGCNIFDHFSRKD | |
| acid 633-891 of | YQRMLDLMRDIILATDLAHHLRIFKDLQKMAEVGYDRNNKQHHRLLLCLLMTSCDLSDQ | |
| PDE2A) | TKGWKTTRKIAELIYKEFFSQGDLEKAMGNRPMEMMDREKAYIPELQISFMEHIAMPIYKL | |
| | LQDLFPKAAELYERVASN | |
| hPDE3A (Uniprot | MAVPGDAARVRDKPVHSGVSQAPTAGRDCHHRADPASPRDSGCRGCWGDLVLQPLRSSR | 115 |
| ID: Q14432) | KLSSALCAGSLSFLLALLVRLVRGEVGCDLEQCKEAAAAEEEEAAPGAEGGVFPGPRGGA | |
| | PGGGARLSPWLQPSALLFSLLCAFFWMGLYLLRAGVRLPLAVALLAACCGGEALVQIGLG | |
| | VGEDHLLSLPAAGVVLSCLAAATWLVLRLRLGVLMIALTSAVRTVSLISLERFKVAWRPY | |
| | LAYLAGVLGILLARYVEQILPQSAEAAPREHLGSQLIAGTKEDIPVFKRRRRSSSVVSAEMS | |
| | GCSSKSHRRTSLPCIPREQLMGHSEWDHKRGPRGSQSSGTSITVDIAVMGEAHGLITDLLAD | |
| | PSLPPNVCTSLRAVSNLLSTQLTFQAIHKPRVNPVTSLSENYTCSDSEESSEKDKLAIPKRLR | |
| | RSLPPGLLRRVSSTWTTTTSATGLPTLEPAPVRRDRSTSIKLQEAPSSSPDSWNNPVMMTLT | |
| | KSRSFTSSYAISAANHVKAKKQSRPGALAKISPLSSPCSSPLQGTPASSLVSKISAVQFPESA | |
| | DTTAKQSLGSHRALTYTQSAPDLSPQILTPPVICSSCGRPYSQGNPADEPLERSGVATRTPSR | |
| | TDDTAQVTSDYETNNNSDSSDIVQNEDETECLREPLRKASACSTYAPETMMFLDKPILAPE | |
| | PLVMDNLDSIMEQLNTWNFPIFDLVENIGRKCGRILSQVSYRLFEDMGLFEAFKIPIREFMN | |
| | YFHALEIGYRDIPYHNRIHATDVLHAVWYLTTQPIPGLSTVINDHGSTSDSDSDSGFTHGHM | |
| | GYVESKTYNVTDDKYGCLSGNIPALELMALYVAAAMHDYDHPGRTNAFLVATSAPQAVL | |
| | YNDRSVLENHHAAAAWNLFMSRPEYNFLINLDHVEFKHFRFLVIEAILATDLKKHFDFVA | |
| | KFNGKVNDDVGIDWTNENDRLLVCQMCIKLADINGPAKCKELHLQWTDGIVNEFYEQGD | |
| | EEASLGLPISPFMDRSAPQLANLQESFISHIVGPLCNSYDSAGLMPGKWVEDSDESGDTDDP | |
| | EEEEEEAPAPNEEETCENNESPKKKTFKRRKIYCQITQHLLQNHKMWKKVIEEEQRLAGIE | |
| | NQSLDQTPQSHSSEQIQAIKEEEEEKGKPRGEEIPTQKPDQ | |
| hPDE3A Catalytic | FKIPIREFMNYFHALEIGYRDIPYHNRIHATDVLHAVWYLTTQPIPGLSTVINDHGSTSDSDS | 116 |
| domain (Amino | DSGFTHGHMGYVFSKTYNVTDDKYGCLSGNIPALELMALYVAAAMHDYDHPGRTNAFL | |
| acid 728-1086 of | VATSAPQAVLYNDRSVLENHHAAAAWNLFMSRPEYNFLINLDHVEFKHFRFLVIEAILATD | |
| PDE3A) | LKKHFDFVAKFNGKVNDDVGIDWTNENDRLLVCQMCIKLADINGPAKCKELHLQWTDGI | |
| | VNEFYEQGDEEASLGLPISPFMDRSAPQLANLQESFISHIVGPLCNSYDSAGLMPGKWVEDS | |
| | DESGDTDDPEEEEEEAPAPNEEETCENNESPKKKTFKRRKIYCQITQHLLQNHKMW | |
| hPDE3B (Uniprot | MRRDERDAKAMRSLQPPDGAGSPPESLRNGYVKSCVSPLRQDPPRGEFFHLCRECNVELRP | 117 |
| ID: Q13370) | PPASPQQPRRCSPFCRARLSLGALAAFVLALLLGAEPESWAAGAAWLRTLLSVCSHSLSPL | |
| | FSIACAFFFLTCFLTRTKRGPGPGRSCGSWWLLALPACCYLGDFLVWQWWSWPWGDGDA | |
| | GSAAPHTPPEAAAGRLLLVLSCVGLLLTLAHPLRLRHCVLVLLLASFVWWVSFTSLGSLPS | |
| | ALRPLLSGLVGGAGCLLALGLDHFFQIREAPLHPRLSSAAEEKVPVIRPRRRSSCVSLGETA | |
| | ASYYGSCKIFRRPSLPCISREQMILWDWDLKQWYKPHYQNSGGGNGVDLSVLNEARNMV | |
| | SDLLTDPSLPPQVISSLRSISSLMGAFSGSCRPKINPLTPFPGFYPCSEIEDPAEKGDRKLNKG | |
| | LNRNSLPTPQLRRSSGTSGLLPVEQSSRWDRNNGKRPHQEFGISSQGCYLNGPFNSNLLTIP | |
| | KQRSSSVSLTHHVGLRRAGVLSSLSPVNSSNHGPVSTGSLTNRSPIEFPDTADFLNKPSVILQ | |
| | RSLGNAPNTPDFYQQLRNSDSNLCNSCGHQMLKYVSTSESDGTDCCSGKSGEEENIFSKES | |
| | FKLMETQQEEETEKKDSRKLFQEGDKWLTEEAQSEQQTNIEQEVSLDLILVEEYDSLIEKM | |
| | SNWNFPIFELVEKMGEKSGRILSQVMYTLFQDTGLLEIFKIPTQQFMNYFRALENGYRDIPY | |
| | HNRIHATDVLHAVWYLTTRPVPGLQQIHNGCGTGNETDSDGRINHGRIAYISSKSCSNPDE | |
| | SYGCLSSNIPALELMALYVAAAMHDYDHPGRTNAFLVATNAPQAVLYNDRSVLENHHAA | |
| | SAWNLYLSRPEYNFLLHLDHVEFKRFRFLVIEAILATDLKKHFDFLAEFNAKANDVNSNGI | |
| | EWSNENDRLLVCQVCIKLADINGPAKVRDLHLKWTEGIVNEFYEQGDEEANLGLPISPFMD | |
| | RSSPQLAKLQESFITHIVGPLCNSYDAAGLLPGQWLEAEEDNDTESGDDEDGEELDTEDEE | |
| | MENNLNPKPPRRKSRRRIFCQLMHHLTENHKIWKEIVEEEEKCKADGNKLQVENSSLPQA | |
| | DEIQVIEEADEEE | |
| hPDE3B Catalytic | FKIPTQQFMNYFRALENGYRDIPYHNRIHATDVLHAVWYLTTRPVPGLQQIHNGCGTGNE | 118 |
| domain (Amino | TDSDGRINHGRIAYISSKSCSNPDESYGCLSSNIPALELMALYVAAAMHDYDHPGRTNAFL | |
| acid 713-1072 of | VATNAPQAVLYNDRSVLENHHAASAWNLYLSRPEYNFLLHLDHVEFKRFRFLVIEAILAT | |
| PDE3B) | DLKKHFDFLAEFNAKANDVNSNGIEWSNENDRLLVCQVCIKLADINGPAKVRDLHLKWTE | |
| | GIVNEFYEQGDEEANLGLPISPFMDRSSPQLAKLQESFITHIVGPLCNSYDAAGLLPGQWLE | |
| | AEEDNDTESGDDEDGEELDTEDEEMENNLNPKPPRRKSRRRIFCQLMHHLTENHKIW | |
| hPDE4A (Uniprot | MEPPTVPSERSLSLSLPGPREGQATLKPPPQHLWRQPRTPIRIQQRGYSDSAERAERERQPH | 119 |
| ID: P27815) | RPIERADAMDTSDRPGLRTTRMSWPSSFHGTGTGSGGAGGGSSRRFEAENGPTPSPGRSPL | |
| | DSQASPGLVLHAGAATSQRRESFLYRSDSDYDMSPKTMSRNSSVTSEAHAEDLIVTPFAQV | |
| | LASLRSVRSNFSLLTNVPVPSNKRSPLGGPTPVCKATLSEETCQQLARETLEELDWCLEQLE | |
| | TMQTYRSVSEMASHKFKRMLNRELTHLSEMSRSGNQVSEYISTTFLDKQNEVEIPSPTMKE | |
| | REKQQAPRPRPSQPPPPPVPHLQPMSQITGLKKLMHSNSLNNSNIPRFGVKTDQEELLAQEL | |
| | ENLNKWGLNIFCVSDYAGGRSLTCIMYMIFQERDLLKKFRIPVDTMVTYMLTLEDHYHAD | |
| | VAYHNSLHAADVLQSTHVLLATPALDAVFTDLEILAALFAAAIHDVDHPGVSNQFLINTNS | |
| | ELALMYNDESVLENHHLAVGFKLLQEDNCDIFQNLSKRQRQSLRKMVIDMVLATDMSKH | |
| | MTLLADLKTMVETKKVTSSGVLLLDNYSDRIQVLRNMVHCADLSNPTKPLELYRQWTDRI | |
| | MAEFFQQGDRERERGMEISPMCDKHTASVEKSQVGFIDYIVHPLWETWADLVHPDAQEIL | |
| | DTLEDNRDWYYSAIRQSPSPPPEEESRGPGHPPLPDKFQFELTLEEEEEEEISMAQIPCTAQE | |
| | ALTAQGLSGVEEALDATIAWEASPAQESLEVMAQEASLEAELEAVYLTQQAQSTGSAPVA | |
| | PDEFSSREEFVVAVSHSSPSALALQSPLLPAWRTLSVSEHAPGLPGLPSTAAEVEAQREHQA | |
| | AKRACSACAGTFGEDTSALPAPGGGGSGGDPT | |
| hPDE4A Catalytic | QPMSQITGLKKLMHSNSLNNSNIPRFGVKTDQEELLAQELENLNKWGLNIFCVSDYAGGRS | 120 |
| domain (Amino | LTCIMYMIFQERDLLKKFRIPVDTMVTYMLTLEDHYHADVAYHNSLHAADVLQSTHVLLA | |
| acid 330-723 of | TPALDAVFTDLEILAALFAAAIHDVDHPGVSNQFLINTNSELALMYNDESVLENHHLAVGF | |
| PDE4A) | KLLQEDNCDIFQNLSKRQRQSLRKMVIDMVLATDMSKHMTLLADLKTMVETKKVTSSGV | |
| | LLLDNYSDRIQVLRNMVHCADLSNPTKPLELYRQWTDRIMAEFFQQGDRERERGMEISPM | |
| | CDKHTASVEKSQVGFIDYIVHPLWETWADLVHPDAQEILDTLEDNRDWYYSAIRQSPSPPP | |
| | EEESRGPGHPPLPDKFQFELTLEEEEEEEISM | |
| hPDE4B (Uniprot | MKKSRSVMTVMADDNVKDYFECSLSKSYSSSSNTLGIDLWRGRRCCSGNLQLPPLSQRQS | 121 |
| ID: Q07343) | ERARTPEGDGISRPTTLPLTTLPSIAITTVSQECFDVENGPSPGRSPLDPQASSSAGLVLHATF | |
| | PGHSQRRESFLYRSDSDYDLSPKAMSRNSSLPSEQHGDDLIVTPFAQVLASLRSVRNNFTIL | |
| | TNLHGTSNKRSPAASQPPVSRVNPQEESYQKLAMETLEELDWCLDQLETIQTYRSVSEMAS | |
| | NKFKRMLNRELTHLSEMSRSGNQVSEYISNTFLDKQNDVEIPSPTQKDREKKKKQQLMTQI | |
| | SGVKKLMHSSSLNNTSISRFGVNTENEDHLAKELEDLNKWGLNIFNVAGYSHNRPLTCIMY | |
| | AIFQERDLLKTFRISSDTFITYMMTLEDHYHSDVAYHNSLHAADVAQSTHVLLSTPALDAV | |
| | FTDLEILAAIFAAAIHDVDHPGVSNQFLINTNSELALMYNDESVLENHHLAVGFKLLQEEH | |
| | CDIFMNLTKKQRQTLRKMVIDMVLATDMSKHMSLLADLKTMVETKKVTSSGVLLLDNYT | |
| | DRIQVLRNMVHCADLSNPTKSLELYRQWTDRIMEEFFQQGDKERERGMEISPMCDKHTAS | |
| | VEKSQVGFIDYIVHPLWETWADLVQPDAQDILDTLEDNRNWYQSMIPQSPSPPLDEQNRD | |
| | CQGLMEKFQFELTLDEEDSEGPEKEGEGHSYFSSTKTLCVIDPENRDSLGETDIDIATEDKSP | |
| | VDT | |
| hPDE4B Catalytic | VNTENEDHLAKELEDLNKWGLNIFNVAGYSHNRPLTCIMYAIFQERDLLKTFRISSDTFITY | 122 |
| domain (Amino | MMTLEDHYHSDVAYHNSLHAADVAQSTHVLLSTPALDAVFTDLEILAAIFAAAIHDVDHP | |
| acid 330-682 of | GVSNQFLINTNSELALMYNDESVLENHHLAVGFKLLQEEHCDIFMNLTKKQRQTLRKMVI | |
| PDE4B) | DMVLATDMSKHMSLLADLKTMVETKKVTSSGVLLLDNYTDRIQVLRNMVHCADLSNPT | |
| | KSLELYRQWTDRIMEEFFQQGDKERERGMEISPMCDKHTASVEKSQVGFIDYIVHPLWET | |
| | WADLVQPDAQDILDTLEDNRNWYQSMIPQSPSPPLDEQNRDCQGLMEKFQFEL | |
| hPDE4C (Uniprot | MENLGVGEGAEACSRLSRSRGRHSMTRAPKHLWRQPRRPIRIQQRFYSDPDKSAGCRERD | 123 |
| ID: Q08493) | LSPRPELRKSRLSWPVSSCRRFDLENGLSCGRRALDPQSSPGLGRIMQAPVPHSQRRESFLY | |
| | RSDSDYELSPKAMSRNSSVASDLHGEDMIVTPFAQVLASLRTVRSNVAALARQQCLGAAK | |
| | QGPVGNPSSSNQLPPAEDTGQKLALETLDELDWCLDQLETLQTRHSVGEMASNKFKRILN | |
| | RELTHLSETSRSGNQVSEYISRTFLDQQTEVELPKVTAEEAPQPMSRISGLHGLCHSASLSSA | |
| | TVPRFGVQTDQEEQLAKELEDTNKWGLDVFKVAELSGNRPLTAIIFSIFQERDLLKTFQIPA | |
| | DTLATYLLMLEGHYHANVAYHNSLHAADVAQSTHVLLATPALEAVFTDLEILAALFASAI | |
| | HDVDHPGVSNQFLINTNSELALMYNDASVLENHHLAVGFKLLQAENCDIFQNLSAKQRLS | |
| | LRRMVIDMVLATDMSKHMNLLADLKTMVETKKVTSLGVLLLDNYSDRIQVLQNLVHCA | |
| | DLSNPTKPLPLYRQWTDRIMAEFFQQGDRERESGLDISPMCDKHTASVEKSQVGFIDYIAH | |
| | PLWETWADLVHPDAQDLLDTLEDNREWYQSKIPRSPSDLTNPERDGPDRFQFELTLEEAEE | |
| | EDEEEEEEGEETALAKEALELPDTELLSPEAGPDPGDLPLDNQRT | |
| hPDE4C Catalytic | VQTDQEEQLAKELEDTNKWGLDVFKVAELSGNRPLTAIIFSIFQERDLLKTFQIPADTLATY | 124 |
| domain (Amino | LLMLEGHYHANVAYHNSLHAADVAQSTHVLLATPALEAVFTDLEILAALFASAIHDVDHP | |
| acid 312-677 of | GVSNQFLINTNSELALMYNDASVLENHHLAVGFKLLQAENCDIFQNLSAKQRLSLRRMVI | |
| PDE4C) | DMVLATDMSKHMNLLADLKTMVETKKVTSLGVLLLDNYSDRIQVLQNLVHCADLSNPTK | |
| | PLPLYRQWTDRIMAEFFQQGDRERESGLDISPMCDKHTASVEKSQVGFIDYIAHPLWETWA | |
| | DLVHPDAQDLLDTLEDNREWYQSKIPRSPSDLTNPERDGPDRFQFELTLEEAEEEDEEEEEE | |
| | GE | |
| hPDE4D (Uniprot | MEAEGSSAPARAGSGEGSDSAGGATLKAPKHLWRHEQHHQYPLRQPQERLLHPHHHLPPP | 125 |
| ID: Q08499) | PPPSPQPQPQCPLQPPPPPPLPPPPPPPGAARGRYASSGATGRVRHRGYSDTERYLYCRAMD | |
| | RTSYAVETGHRPGLKKSRMSWPSSFQGLRRFDVDNGTSAGRSPLDPMTSPGSGLILQANFV | |
| | HSQRRESFLYRSDSDYDLSPKSMSRNSSIASDIHGDDLIVTPEAQVLASLRTVRNNFAALTN | |
| | LQDRAPSKRSPMCNQPSINKATITEEAYQKLASETLEELDWCLDQLETLQTRHSVSEMASN | |
| | KFKRMLNRELTHLSEMSRSGNQVSEFISNTFLDKQHEVEIPSPTQKEKEKKKRPMSQISGVK | |
| | KLMHSSSLTNSSIPRFGVKTEQEDVLAKELEDVNKWGLHVFRIAELSGNRPLTVIMHTIFQE | |
| | RDLLKTFKIPVDTLITYLMTLEDHYHADVAYHNNIHAADVVQSTHVLLSTPALEAVFTDLE | |
| | ILAAIFASAIHDVDHPGVSNQFLINTNSELALMYNDSSVLENHHLAVGFKLLQEENCDIFQN | |
| | LTKKQRQSLRKMVIDIVLATDMSKHMNLLADLKTMVETKKVTSSGVLLLDNYSDRIQVLQ | |
| | NMVHCADLSNPTKPLQLYRQWTDRIMEEFFRQGDRERERGMEISPMCDKHNASVEKSQV | |
| | GFIDYIVHPLWETWADLVHPDAQDILDTLEDNREWYQSTIPQSPSPAPDDPEEGRQGQTEK | |
| | FQFELTLEEDGESDTEKDSGSQVEEDTSCSDSKTLCTQDSESTEIPLDEQVEEEAVGEEEESQ | |
| | PEACVIDDRSPDT | |
| hPDE4D Catalytic | VKTEQEDVLAKELEDVNKWGLHVERIAELSGNRPLTVIMHTIFQERDLLKTFKIPVDTLITY | 126 |
| domain (Amino | LMTLEDHYHADVAYHNNIHAADVVQSTHVLLSTPALEAVFTDLEILAAIFASAIHDVDHPG | |
| acid 386-751 of | VSNQFLINTNSELALMYNDSSVLENHHLAVGFKLLQEENCDIFQNLTKKQRQSLRKMVIDI | |
| PDE4D) | VLATDMSKHMNLLADLKTMVETKKVTSSGVLLLDNYSDRIQVLQNMVHCADLSNPTKPL | |
| | QLYRQWTDRIMEEFFRQGDRERERGMEISPMCDKHNASVEKSQVGFIDYIVHPLWETWAD | |
| | LVHPDAQDILDTLEDNREWYQSTIPQSPSPAPDDPEEGRQGQTEKFQFELTLEEDGESDTEK | |
| | D | |
| hPDE6A (Uniprot | MGEVTAEEVEKELDSNIGFAKQYYNLHYRAKLISDLLGAKEAAVDFSNYHSPSSMEESEIIF | 127 |
| ID: P16499) | DLLRDFQENLQTEKCIFNVMKKLCFLLQADRMSLFMYRTRNGIAELATRLFNVHKDAVLE | |
| | DCLVMPDQEIVEPLDMGIVGHVAHSKKIANVPNTEEDEHFCDFVDILTEYKTKNILASPIMN | |
| | GKDVVAIIMAVNKVDGSHFTKRDEEILLKYLNFANLIMKVYHLSYLHNCETRRGQILLWS | |
| | GSKVFEELTDIERQFHKALYTVRAFLNCDRYSVGLLDMTKQKEFFDVWPVLMGEVPPYSG | |
| | PRTPDGREINFYKVIDYILHGKEDIKVIPNPPPDHWALVSGLPAYVAQNGLICNIMNAPAED | |
| | FFAFQKEPLDESGWMIKNVLSMPIVNKKEEIVGVATFYNRKDGKPFDEMDETLMESLTQFL | |
| | GWSVLNPDTYESMNKLENRKDIFQDIVKYHVKCDNEEIQKILKTREVYGKEPWECEEEEL | |
| | AEILQAELPDADKYEINKFHFSDLPLTELELVKCGIQMYYELKVVDKFHIPQEALVRFMYSL | |
| | SKGYRKITYHNWRHGFNVGQTMFSLLVTGKLKRYFTDLEALAMVTAAFCHDIDHRGTNN | |
| | LYQMKSQNPLAKLHGSSILERHHLEFGKTLLRDESLNIFQNLNRRQHEHAIHMMDIAIIATD | |
| | LALYFKKRTMFQKIVDQSKTYESEQEWTQYMMLEQTRKEIVMAMMMTACDLSAITKPW | |
| | EVQSQVALLVAAEFWEQGDLERTVLQQNPIPMMDRNKADELPKLQVGFIDFVCTFVYKEF | |
| | SRFHEEITPMLDGITNNRKEWKALADEYDAKMKVQEEKKQKQQSAKSAAAGNQPGGNPS | |
| | PGGATTSKSCCIQ | |
| hPDE6A Catalytic | EEEELAEILQAELPDADKYEINKFHFSDLPLTELELVKCGIQMYYELKVVDKEHIPQEALVR | 128 |
| domain (Amino | FMYSLSKGYRKITYHNWRHGFNVGQTMFSLLVTGKLKRYFTDLEALAMVTAAFCHDIDH | |
| acid 483-819 of | RGTNNLYQMKSQNPLAKLHGSSILERHHLEFGKTLLRDESLNIFQNLNRRQHEHAIHMMDI | |
| PDE6A) | AIIATDLALYFKKRTMFQKIVDQSKTYESEQEWTQYMMLEQTRKEIVMAMMMTACDLSA | |
| | ITKPWEVQSQVALLVAAEFWEQGDLERTVLQQNPIPMMDRNKADELPKLQVGFIDFVCTF | |
| | VYKEFSREHEEITPMLDGITNNRKEWKALADEYDAK | |
| hPDE6B (Uniprot | MSLSEEQARSFLDQNPDFARQYFGKKLSPENVAAACEDGCPPDCDSLRDLCQVEESTALLE | 129 |
| ID: P35913) | LVQDMQESINMERVVFKVLRRLCTLLQADRCSLFMYRQRNGVAELATRLFSVQPDSVLED | |
| | CLVPPDSEIVEPLDIGVVGHVAQTKKMVNVEDVAECPHFSSFADELTDYKTKNMLATPIM | |
| | NGKDVVAVIMAVNKLNGPFFTSEDEDVFLKYLNFATLYLKIYHLSYLHNCETRRGQVLLW | |
| | SANKVFEELTDIERQFHKAFYTVRAYLNCERYSVGLLDMTKEKEFEDVWSVLMGESQPYS | |
| | GPRTPDGREIVFYKVIDYVLHGKEEIKVIPTPSADHWALASGLPSYVAESGFICNIMNASAD | |
| | EMFKFQEGALDDSGWLIKNVLSMPIVNKKEEIVGVATFYNRKDGKPEDEQDEVLMESLTQ | |
| | FLGWSVMNTDTYDKMNKLENRKDIAQDMVLYHVKCDRDEIQLILPTRARLGKEPADCDE | |
| | DELGEILKEELPGPTTFDIYEFHFSDLECTELDLVKCGIQMYYELGVVRKFQIPQEVLVRFLF | |
| | SISKGYRRITYHNWRHGFNVAQTMFTLLMTGKLKSYYTDLEAFAMVTAGLCHDIDHRGT | |
| | NNLYQMKSQNPLAKLHGSSILERHHLEFGKELLSEETLNIYQNLNRRQHEHVIHLMDIAIIA | |
| | TDLALYFKKRAMFQKIVDESKNYQDKKSWVEYLSLETTRKEIVMAMMMTACDLSAITKP | |
| | WEVQSKVALEVAAEFWEQGDLERTVEDQQPIPMMDRNKAAELPKEQVGFIDFVCTFVYK | |
| | EFSREHEEILPMFDRLQNNRKEWKALADEYEAKVKALEEKEEEERVAAKKVGTEICNGGP | |
| | APKSSTCCIL | |
| hPDE6B Catalytic | PADCDEDELGEILKEELPGPTTFDIYEFHFSDLECTELDLVKCGIQMYYELGVVRKFQIPQE | 130 |
| domain (Amino | VLVRFLESISKGYRRITYHNWRHGFNVAQTMFTLLMTGKLKSYYTDLEAFAMVTAGLCH | |
| acid 476-817 of | DIDHRGTNNLYQMKSQNPLAKLHGSSILERHHLEFGKFLLSEETENIYQNENRRQHEHVIH | |
| PDE6B) | LMDIAIIATDLALYFKKRAMFQKIVDESKNYQDKKSWVEYLSLETTRKEIVMAMMMTAC | |
| | DLSAITKPWEVQSKVALLVAAEFWEQGDLERTVLDQQPIPMMDRNKAAELPKEQVGFIDF | |
| | VCTFVYKEFSRFHEEILPMFDRLQNNRKEWKALADEYEAK | |
| hPDE6C (Uniprot | MGEINQVAVEKYLEENPQFAKEYFDRKLRVEVLGEIFKNSQVPVQSSMSFSELTQVEESAL | 131 |
| ID: P51160) | CLELLWTVQEEGGTPEQGVHRALQRLAHLLQADRCSMFLCRSRNGIPEVASRLLDVTPTS | |
| | KFEDNLVGPDKEVVFPLDIGIVGWAAHTKKTHNVPDVKKNSHFSDFMDKQTGYVTKNLL | |
| | ATPIVVGKEVLAVIMAVNKVNASEFSKQDEEVFSKYLNEVSIILRLHHTSYMYNIESRRSQI | |
| | LMWSANKVFEELTDVERQFHKALYTVRSYLNCERYSIGLLDMTKEKEFYDEWPIKLGEVE | |
| | PYKGPKTPDGREVNFYKIIDYILHGKEEIKVIPTPPADHWTLISGLPTYVAENGFICNMMNA | |
| | PADEYFTFQKGPVDETGWVIKNVLSLPIVNKKEDIVGVATFYNRKDGKPFDEHDEYITETL | |
| | TQFLGWSLLNTDTYDKMNKLENRKDIAQEMLMNQTKATPEEIKSILKFQEKLNVDVIDDC | |
| | EEKQEVAILKEDEPDPRSAELYEFRFSDFPLTEHGLIKCGIRLFFEINVVEKFKVPVEVLTRW | |
| | MYTVRKGYRAVTYHNWRHGFNVGQTMFTLLMTGRLKKYYTDLEAFAMLAAAECHDID | |
| | HRGTNNLYQMKSTSPLARLHGSSILERHHLEYSKTLLQDESLNIFQNLNKRQFETVIHLFEV | |
| | AIIATDLALYFKKRTMFQKIVDACEQMQTEEEAIKYVTVDPTKKEIIMAMMMTACDLSAIT | |
| | KPWEVQSQVALMVANEFWEQGDLERTVLQQQPIPMMDRNKRDELPKEQVGFIDFVCTFV | |
| | YKEFSRFHKEITPMLSGLQNNRVEWKSLADEYDAKMKVIEEEAKKQEGGAEKAAEDSGG | |
| | GDDKKSKTCLML | |
| hPDE6C Catalytic | DDCEEKQEVAILKEDLPDPRSAELYEFRFSDFPLTEHGLIKCGIRLFFEINVVEKFKVPVEVL | 132 |
| domain (Amino | TRWMYTVRKGYRAVTYHNWRHGFNVGQTMFTLLMTGRLKKYYTDLEAFAMLAAAFCH | |
| acid 483-822 of | DIDHRGTNNLYQMKSTSPLAREHGSSILERHHLEYSKTLLQDESLNIFQNLNKRQFETVIHL | |
| PDE6C) | FEVAIIATDLALYFKKRTMFQKIVDACEQMQTEEEAIKYVTVDPTKKEIIMAMMMTACDLS | |
| | AITKPWEVQSQVALMVANEFWEQGDLERTVLQQQPIPMMDRNKRDELPKEQVGFIDFVC | |
| | TFVYKEFSRFHKEITPMLSGLQNNRVEWKSLADEYDAK | |
| hPDE7A (Uniprot | MEVCYQLPVLPLDRPVPQHVLSRRGAISFSSSSALFGCPNPRQLSQRRGAISYDSSDQTALYI | 133 |
| ID: Q13946) | RMLGDVRVRSRAGFESERRGSHPYIDFRIFHSQSEIEVSVSARNIRRLLSFQRYLRSSRFFRG | |
| | TAVSNSLNILDDDYNGQAKCMLEKVGNWNFDIFLFDRLTNGNSLVSLTFHLFSLHGLIEYF | |
| | HLDMMKLRRFLVMIQEDYHSQNPYHNAVHAADVTQAMHCYLKEPKLANSVTPWDILLSE | |
| | IAAATHDLDHPGVNQPFLIKTNHYLATLYKNTSVLENHHWRSAVGLLRESGLFSHLPLESR | |
| | QQMETQIGALILATDISRQNEYLSLFRSHLDRGDLCLEDTRHRHLVLQMALKCADICNPCR | |
| | TWELSKQWSEKVTEEFFHQDIEKKYHLGVSPLCDRHTESIANIQIGFMTYLVEPLFTEWA | |
| | RFSNTRLSQTMLGHVGLNKASWKGLQREQSSSEDTDAAFELNSQLLPQENRLS | |
| hPDE7A Catalytic | FHLDMMKLRRFLVMIQEDYHSQNPYHNAVHAADVTQAMHCYLKEPKLANSVTPWDILLS | 134 |
| domain (Amino | LIAAATHDLDHPGVNQPFLIKTNHYLATLYKNTSVLENHHWRSAVGLLRESGLFSHEPLES | |
| acid 187-451 of | RQQMETQIGALILATDISRQNEYLSLFRSHLDRGDLCLEDTRHRHLVLQMALKCADICNPC | |
| PDE7A) | RTWELSKQWSEKVTEEFFHQGDIEKKYHLGVSPLCDRHTESIANIQIGFMTYLVEPLFTEW | |
| | ARFSNTRLSQTMLGHVGLNKASW | |
| hPDE7B (Uniprot | MSCLMVERCGEILFENPDQNAKCVCMLGDIRLRGQTGVRAERRGSVPFIDFRLLNSTTYSG | 135 |
| ID: Q9NP56) | EIGTKKKVKRLLSFQRYFHASRLLRGIIPQAPLHLLDEDYLGQARHMLSKVGMWDFDIFLF | |
| | DRLTNGNSLVTLLCHLFNTHGLIHHFKLDMVTLHRFLVMVQEDYHSQNPYHNAVHAADV | |
| | TQAMHCYLKEPKEASFLTPLDIMLGLLAAAAHDVDHPGVNQPFLIKTNHHLANLYQNMS | |
| | VLENHHWRSTIGMLRESRLLAHLPKEMTQDIEQQLGSLILATDINRQNEFLTRLKAHLHNK | |
| | DLRLEDAQDRHFMLQIALKCADICNPCRIWEMSKQWSERVCEEFYRQGELEQKFELEISPL | |
| | CNQQKDSIPSIQIGFMSYIVEPLFREWAHFTGNSTLSENMLGHLAHNKAQWKSLLPRQHRS | |
| | RGSSGSGPDHDHAGQGTESEEQEGDSP | |
| hPDE7B Catalytic | YHNAVHAADVTQAMHCYLKEPKEASFLTPEDIMLGLLAAAAHDVDHPGVNQPFLIKTNH | 136 |
| domain (Amino | HLANLYQNMSVLENHHWRSTIGMLRESRLLAHLPKEMTQDIEQQLGSLILATDINRQNEFL | |
| acid 172-410 of | TRLKAHLHNKDLRLEDAQDRHFMLQIALKCADICNPCRIWEMSKQWSERVCEEFYRQGEL | |
| PDE7B) | EQKFELEISPLCNQQKDSIPSIQIGFMSYIVEPLFREWAHFTGNSTLSENMLGHLAHNK | |
| hPDE8A (Uniprot | MGCAPSIHISERLVAEDAPSPAAPPLSSGGPREPQGQKTAALPRTRGAGELESEERDGSGKK | 137 |
| ID: O60658) | VAVADVQFGPMRFHQDQLQVLLVFTKEDNQCNGFCRACEKAGFKCTVTKEAQAVEACFL | |
| | DKHHDIIIIDHRNPRQLDAEALCRSIRSSKLSENTVIVGVVRRVDREELSVMPFISAGFTRRY | |
| | VENPNIMACYNELLQLEFGEVRSQLKLRACNSVFTALENSEDAIEITSEDRFIQYANPAFETT | |
| | MGYQSGELIGKELGEVPINEKKADLLDTINSCIRIGKEWQGIVYAKKKNGDNIQQNVKIIPV | |
| | IGQGGKIRHYVSIIRVCNGNNKAEKISECVQSDTHTDNQTGKHKDRRKGSLDVKAVASRA | |
| | TEVSSQRRHSSMARIHSMTIEAPITKVINIINAAQESSPMPVTEALDRVLEIERTTELYSPQFG | |
| | AKDDDPHANDLVGGLMSDGLRRLSGNEYVLSTKNTQMVSSNIITPISLDDVPPRIARAMEN | |
| | EEYWDFDIFELEAATHNRPLIYLGLKMFARFGICEFLHCSESTLRSWLQIIEANYHSSNPYH | |
| | NSTHSADVLHATAYFLSKERIKETLDPIDEVAALIAATIHDVDHPGRTNSFLCNAGSELAIL | |
| | YNDTAVLESHHAALAFQETTGDDKCNIDKNMERNDYRTLRQGIIDMVLATEMTKHFEHV | |
| | NKFVNSINKPLATLEENGETDKNQEVINTMLRTPENRTLIKRMLIKCADVSNPCRPEQYCIE | |
| | WAARISEEYFSQTDEEKQQGLPVVMPVFDRNTCSIPKSQISFIDYFITDMFDAWDAFVDLPD | |
| | LMQHLDNNFKYWKGLDEMKLRNLRPPPE | |
| hPDE8A Catalytic | LHCSESTLRSWLQIIEANYHSSNPYHNSTHSADVLHATAYFLSKERIKETLDPIDEVAALIAA | 138 |
| domain (Amino | TIHDVDHPGRTNSFLCNAGSELAILYNDTAVLESHHAALAFQLTTGDDKCNIFKNMERND | |
| acid 531-813 of | YRTLRQGIIDMVLATEMTKHDEHVNKDVNSINKPLATLEENGETDKNQEVINTMLRTPENR | |
| PDE8A) | TLIKRMLIKCADVSNPCRPEQYCIEWAARISEEYFSQTDEEKQQGLPVVMPVFDRNTCSIPK | |
| | SQISFIDYFITDMFDAWDAFVDLPDLMQHLDNNFKYW | |
| hPDE8B (Uniprot | MGCAPSIHVSQSGVIVCRDSDESSSPRQTTSVSQGPAAPEPGLFVQTDAADAIPPSRASGPPS | 139 |
| ID: O95263) | VARVRRARTELGSGSSAGSAAPAATTSRGRRRHCCSSAEAETQTCYTSVKQVSSAEVRIGP | |
| | MRLTQDPIQVLLIFAKEDSQSDGFWWACDRAGYRCNIARTPESALECFLDKHHEIIVIDHRQ | |
| | TQNFDAEAVCRSIRATNPSEHTVILAVVSRVSDDHEEASVLPLLHAGFNRRFMENSSIIACY | |
| | NELIQIEHGEVRSQFKLRACNSVFTALDHCHEAIEITSDDHVIQYVNPAFERMMGYHKGEL | |
| | LGKELADLPKSDKNRADLLDTINTCIKKGKEWQGVYYARRKSGDSIQQHVKITPVIGQGG | |
| | KIRHFVSLKKLCCTTDNNKQIHKIHRDSGDNSQTEPHSFRYKNRRKESIDVKSISSRGSDAPS | |
| | LQNRRYPSMARIHSMTIEAPITKVINIINAAQENSPVTVAEALDRVLEILRTTELYSPQLGTK | |
| | DEDPHTSDLVGGEMTDGLRRLSGNEYVFTKNVHQSHSHLAMPITINDVPPCISQLLDNEES | |
| | WDFNIFELEAITHKRPLVYLGLKVFSRFGVCEFLNCSETTLRAWFQVIEANYHSSNAYHNS | |
| | THAADVLHATAFFLGKERVKGSLDQLDEVAALIAATVHDVDHPGRTNSFLCNAGSELAVL | |
| | YNDTAVLESHHTALAFQLTVKDTKCNIFKNIDRNHYRTLRQAIIDMVLATEMTKHFEHVN | |
| | KFVNSINKPMAAEIEGSDCECNPAGKNFPENQILIKRMMIKCADVANPCRPLDLCIEWAGRI | |
| | SEEYFAQTDEEKRQGLPVVMPVFDRNTCSIPKSQISFIDYFITDMFDAWDAFAHLPALMQH | |
| | LADNYKHWKTLDDEKCKSLRLPSDS | |
| hPDE8B Catalytic | LNCSETTLRAWFQVIEANYHSSNAYHNSTHAADVLHATAFFLGKERVKGSLDQLDEVAAL | 140 |
| domain (Amino | IAATVHDVDHPGRTNSFLCNAGSELAVLYNDTAVLESHHTALAFQLTVKDTKCNIFKNIDR | |
| acid 590-868 of | NHYRTLRQAIIDMVLATEMTKHFEHVNKFVNSINKPMAAEIEGSDCECNPAGKNFPENQILI | |
| PDE8B) | KRMMIKCADVANPCRPLDLCIEWAGRISEEYFAQTDEEKRQGLPVVMPVFDRNTCSIPKSQ | |
| | ISFIDYFITDMFDAWDAFAHLPALMQHLADNYKHW | |
| hPDE9A (Uniprot | MGSGSSSYRPKAIYLDIDGRIQKVIFSKYCNSSDIMDLFCIATGLPRNTTISLLTTDDAMVSID | 141 |
| ID: O76083) | PTMPANSERTPYKVRPVAIKQLSAGVEDKRTTSRGQSAERPLRDRRVVGLEQPRREGAFES | |
| | GQVEPRPREPQGCYQEGQRIPPEREELIQSVLAQVAEQFSRAFKINELKAEVANHLAVLEKR | |
| | VELEGEKVVEIEKCKSDIKKMREELAARSSRTNCPCKYSFLDNHKKLTPRRDVPTYPKYLL | |
| | SPETIEALRKPTFDVWLWEPNEMLSCLEHMYHDLGLVRDFSINPVTLRRWLFCVHDNYRN | |
| | NPFHNFRHCFCVAQMMYSMVWLCSLQEKFSQTDILILMTAAICHDLDHPGYNNTYQINAR | |
| | TELAVRYNDISPLENHHCAVAFQILAEPECNIFSNIPPDGFKQIRQGMITLILATDMARHAEI | |
| | MDSFKEKMENFDYSNEEHMTLLKMILIKCCDISNEVRPMEVAEPWVDCLLEEYFMQSDRE | |
| | KSEGLPVAPFMDRDKVTKATAQIGFIKFVLIPMFETVTKLFPMVEEIMELQPLWESRDRYEEL | |
| | KRIDDAMKELQKKTDSLTSGATEKSRERSRDVKNSEGDCA | |
| hPDE9A Catalytic | FSINPVTLRRWLFCVHDNYRNNPFHNFRHCFCVAQMMYSMVWLCSLQEKFSQTDILILMT | 142 |
| domain (Amino | AAICHDLDHPGYNNTYQINARTELAVRYNDISPLENHHCAVAFQILAEPECNIFSNIPPDGF | |
| acid 288-550 of | KQIRQGMITLILATDMARHAEIMDSFKEKMENFDYSNEEHMTLLKMILIKCCDISNEVRPM | |
| PDE9A) | EVAEPWVDCLLEEYFMQSDREKSEGLPVAPFMDRDKVTKATAQIGFIKFVLIPMFETVTKL | |
| | FPMVEEIMLQPLWESRDRY | |
| hPDE10A (Uniprot | MRIEERKSQHLTGLTDEKVKAYLSLHPQVLDEFVSESVSAETVEKWLKRKNNKSEDESAP | 143 |
| ID: Q9Y233) | KEVSRYQDTNMQGVVYELNSYIEQRLDTGGDNQLLLYELSSIIKIATKADGFALYFLGECN | |
| | NSLCIFTPPGIKEGKPRLIPAGPITQGTTVSAYVAKSRKTLLVEDILGDERFPRGTGLESGTRI | |
| | QSVLCLPIVTAIGDLIGILELYRHWGKEAFCLSHQEVATANLAWASVAIHQVQVCRGLAKQ | |
| | TELNDFLLDVSKTYFDNIVAIDSLLEHIMIYAKNLVNADRCALFQVDHKNKELYSDLFDIGE | |
| | EKEGKPVFKKTKEIRFSIEKGIAGQVARTGEVLNIPDAYADPRFNREVDLYTGYTTRNILCM | |
| | PIVSRGSVIGVVQMVNKISGSAFSKTDENNFKMFAVFCALALHCANMYHRIRHSECIYRVT | |
| | MEKLSYHSICTSEEWQGLMQFTLPVRLCKEIELFHFDIGPFENMWPGIFVYMVHRSCGTSC | |
| | FELEKLCRFIMSVKKNYRRVPYHNWKHAVTVAHCMYAILQNNHTLFTDLERKGLLIACLC | |
| | HDLDHRGFSNSYLQKFDHPLAALYSTSTMEQHHFSQTVSILQLEGHNIFSTLSSSEYEQVLEI | |
| | IRKAIIATDLALYFGNRKQLEEMYQTGSLNLNNQSHRDRVIGLMMTACDLCSVTKLWPVT | |
| | KLTANDIYAEFWAEGDEMKKLGIQPIPMMDRDKKDEVPQGQLGFYNAVAIPCYTTLTQIL | |
| | PPTEPLLKACRDNLSQWEKVIRGEETATWISSPSVAQKAAASED | |
| hPDE10A Catalytic | CKEIELFHFDIGPFENMWPGIFVYMVIIRSCGTSCFELEKLCRFIMSVKKNYRRVPYHNWKH | 144 |
| domain (Amino | AVTVAHCMYAILQNNHTLFTDLERKGLLIACLCHDLDHRGFSNSYLQKFDHPLAALYSTST | |
| acid 458-760 of | MEQHHFSQTVSILQLEGHNIFSTLSSSEYEQVLEIIRKAIIATDLALYFGNRKQLEEMYQTGS | |
| PDE10A) | LNLNNQSHRDRVIGLMMTACDLCSVTKLWPVTKLTANDIYAEFWAEGDEMKKLGIQPIP | |
| | MMDRDKKDEVPQGQLGFYNAVAIPCYTTLTQILPPTEPLLKACRDNLSQWEKVIRGEE | |
| hPDE11A (Uniprot | MAASRLDFGEVETFLDRHPELFEDYLMRKGKQEMVEKWLQRHSQGQGALGPRPSLAGTS | 145 |
| ID: Q9HCR9) | SLAHSTCRGGSSVGGGTGPNGSAHSQPLPGGGDCGGVPLSPSWAGGSRGDGNLQRRASQK | |
| | ELRKSFARSKAIHVNRTYDEQVTSRAQEPLSSVRRRALLRKASSLPPTTAHILSALLESRVN | |
| | LPRYPPTAIDYKCHLKKHNERQFFLELVKDISNDLDLTSLSYKILIFVCLMVDADRCSLFLV | |
| | EGAAAGKKTLVSKFFDVHAGTPLLPCSSTENSNEVQVPWGKGIIGYVGEHGETVNIPDAYQ | |
| | DRRFNDEIDKLTGYKTKSLLCMPIRSSDGEIIGVAQAINKIPEGAPFTEDDEKVMQMYLPFC | |
| | GIAISNAQLFAASRKEYERSRALLEVVNDLFEEQTDLEKIVKKIMHRAQTLLKCERCSVLLL | |
| | EDIESPVVKFTKSFELMSPKCSADAENSFKESMEKSSYSDWLINNSIAELVASTGLPVNISDA | |
| | YQDPRFDAEADQISGFHIRSVLCVPIWNSNHQIIGVAQVLNRLDGKPFDDADQRLFEAFVIF | |
| | CGLGINNTIMYDQVKKSWAKQSVALDVLSYHATCSKAEVDKFKAANIPLVSELAIDDIHFD | |
| | DFSLDVDAMITAALRMFMELGMVQKFKIDYETLCRWLLTVRKNYRMVLYHNWRHAFNV | |
| | CQLMFAMITTAGFQDILTEVEILAVIVGCLCHDLDHRGTNNAFQAKSGSALAQLYGTSAT | |
| | LEHHHFNHAVMILQSEGHNIFANLSSKEYSDLMQLLKQSILATDLTLYFERRTEFFELVSKG | |
| | EYDWNIKNHRDIFRSMLMTACDLGAVTKPWEISRQVAELVTSEFFEQGDRERLELKLTPSA | |
| | IFDRNRKDELPRLQLEWIDSICMPLYQALVKVNVKLKPMLDSVATNRSKWEELHQKRLLA | |
| | STASSSPASVMVAKEDRN | |
| hPDE11A Catalytic | FKIDYETLCRWLLTVRKNYRMVLYHNWRHAFNVCQLMFAMITTAGFQDILTEVEILAVIV | 146 |
| Domain (Amino | GCLCHDLDHRGTNNAFQAKSGSALAQLYGTSATLEHHHFNHAVMILQSEGHNIFANLSSK | |
| acid 640-905 of | EYSDLMQLLKQSILATDLTLYFERRTEFFELVSKGEYDWNIKNHRDIFRSMLMTACDLGAV | |
| PDE11A) | TKPWEISRQVAELVTSEFFEQGDRERLELKLTPSAIFDRNRKDELPRLQLEWIDSICMPLYQ | |
| | ALVKVNVKLKPMLDSVATNRSKW | |

[0157] In some embodiments, the hPDE5 derived destabilizing domains may be derived from variants, and/or isoforms of hPDE5. The three isoforms hPDE5 Isoform 1, hPDE5 Isoform 2, and hPDE5 Isoform 3 differ at their N terminal regions, and all 3 have unique first exons followed by a common sequence of 823 amino acids. Accordingly, hPDE5 derived DDs may be derived from hPDE5 Isoform 1 (SEQ ID NO: 1; encoded by the nucleotide sequence of SEQ ID NO: 2; hPDE5 Isoform 2 (SEQ ID NO: 147; encoded by the nucleotides 113-2611 of the nucleotide sequence of SEQ ID NO: 148 or the nucleotide sequence of SEQ ID NO: 380) and/or hPDE5 isoform 3 (SEQ ID NO: 149; encoded by the nucleotides 95-2563 of nucleotide sequence of SEQ ID NO: 150 or SEQ ID NO: 381). In some embodiments, the hPDE5 DDs may be derived from hPDE5 Isoform X1 (SEQ ID NO: 382).

[0158] In some embodiments, the DD mutations identified herein may be mapped back to the hPDE5 sequence to identify DD hotspots. DD hotspots as used herein refer to amino acids within the hPDE5 of SEQ ID NO: 1 whose mutation results in the “responsive” nature of the stimulus responsive element generated from hPDE5. The DD characteristics may be improved by saturation mutagenesis, which involves mutating the amino acids at the hotspot position to any of the known amino acids, including, but not limited to lysine, aspartic acid, glutamic acid, glutamine, asparagine, histidine, serine, threonine, tyrosine, cysteine, methionine, tryptophan, alanine, isoleucine, leucine, phenylalanine, valine, proline, and glycine. In some instances, a library of hotspot mutations may be generated by site directed mutagenesis and each of the mutants in the library is fused to a reporter protein e.g. AcGFP (SEQ ID NO: 79) via a linker such as SG. The properties of the DDs may be analyzed in the presence and absence of ligands such as Sildenafil, Vardenafil and Tadalafil. In some embodiments, the arginine at position 732 (also referred to as R732) of the hPDE5 of SEQ ID NO: 1, may be mutated to any of the known amino acids and are provided in Table 6. The mutations of the amino acid R732 may include but are not limited to R732L, R732A, R732G, R732V, R732I, R732P, R732F, R732W, R732Y, R732H, R732S, R732T, R732D, R732E, R732Q, R732N, R732M, R732C, and R732K. The hPDE5 mutants fused either at the N terminus or the C terminus to a linker and GFP are provided in Table 8. In Table 6, the mutations are in bold. Table 7 provides the additional components that may be combined with the mutants listed in Table 6 to generate the constructs described in Table 8. In Table 8, asterisk indicates the translation of the stop codon.

TABLE 6
hPDE5 R732 mutants

| | | Amino | Nucleic |
|---|---|---|---|
| Construct ID/ | | acid SEQ | Acid SEQ |
| Description | Sequence | ID NO: | ID NO: |
| hPDE5 (Amino acid | MKHEVLCRWILSVKKNYRKNVAYHNWRHAFNTAQCMFAALKAGKIQNKLTDLEI | 151 | 169 |
| 590-836 of WT, | LALLIAALSHDLDHRGVNNSYIQRSEHPLAQLYCHSIMEHHHFDQCLMILNSPGNQI | | |
| R732G) | LSGESIEEYKTTLKIIKQAILATDLALYIKRGGEFFELIRKNQFNLEDPHQKELFLAM | | |
| | LMTACDLSAITKPWPIQQRIAELVATEFFDQGDRERKELNIEPTDEMNREKKNKIPS | | |
| | MQVGFIDAICLQLYEALTHVS | | |
| hPDE5 (Amino acid | MKHEVECRWILSVKKNYRKNVAYHNWRHAFNTAQCMFAALKAGKIQNKLTDLEI | 152 | 170 |
| 590-836 of WT, | LALLIAALSHDLDHRGVNNSYIQRSEHPLAQLYCHSIMEHHHFDQCLMILNSPGNQI | | |
| R732A) | LSGESILEYKTTLKIIKQAILATDLALYIKRAGEFFEIRKNQFNLEDPHQKELFLAM | | |
| | LMTACDLSAITKPWPIQQRIAELVATEFFDQGDRERKELNIEPTDLMNREKKNKIPS | | |
| | MQVGFIDAICLQLYEALTHVS | | |
| hPDE5 (Amino acid | MKHEVECRWILSVKKNYRKNVAYHNWRHAFNTAQCMFAALKAGKIQNKLTDLEI | 153 | 171 |
| 590-836 of WT, | LALLIAALSHDLDHRGVNNSYIQRSEHPLAQLYCHSIMEHHHFDQCLMILNSPGNQI | | |
| R732V) | LSGLSIEEYKTTLKIIKQAILATDLALYIKRVGEFFELIRKNQFNLEDPHQKELFLAM | | |
| | LMTACDLSAITKPWPIQQRIAELVATEFFDQGDRERKELNIEPTDLMNREKKNKIPS | | |
| | MQVGFIDAICLQLYEALTHVS | | |
| hPDE5 (Amino acid | MKHEVLCRWILSVKKNYRKNVAYHNWRHAFNTAQCMFAALKAGKIQNKLTDLEI | 154 | 172 |
| 590-836 of WT, | LALLIAALSHDLDHRGVNNSYIQRSEHPLAQLYCHSIMEHHHFDQCLMILNSPGNQI | | |
| R732I) | LSGLSIEEYKTTLKIIKQAILATDLALYIKRIGEFFELIRKNQFNLEDPHQKELFLAML | | |
| | MTACDLSAITKPWPIQQRIAELVATEFFDQGDRERKELNIEPTDLMNREKKNKIPSM | | |
| | QVGFIDAICLQLYEALTHVS | | |
| hPDE5 (Amino acid | MKHEVLCRWILSVKKNYRKNVAYHNWRHAFNTAQCMFAALKAGKIQNKLTDLEI | 155 | 173 |
| 590-836 of WT, | LALLIAALSHDLDHRGVNNSYIQRSEHPLAQLYCHSIMEHHHFDQCLMILNSPGNQI | | |
| R732P) | LSGLSIEEYKTTLKIIKQAILATDLALYIKRPGEFFELIRKNQFNLEDPHQKELFLAML | | |
| | MTACDLSAITKPWPIQQRIAELVATEFFDQGDRERKELNIEPTDLMNREKKNKIPSM | | |
| | QVGFIDAICLQLYEALTHVS | | |
| hPDE5 (Amino acid | MKHEVLCRWILSVKKNYRKNVAYHNWRHAENTAQCMFAALKAGKIQNKLTDLEI | 156 | 174 |
| 590-836 of WT, | LALLIAALSHDLDHRGVNNSYIQRSEHPLAQLYCHSIMEHHHFDQCLMILNSPGNQI | | |
| R732F) | LSGLSIEEYKTTLKIIKQAILATDLALYIKRFGEFFELIRKNQFNLEDPHQKELFLAML | | |
| | MTACDLSAITKPWPIQQRIAELVATEFFDQGDRERKELNIEPTDLMNREKKNKIPSM | | |
| | QVGFIDAICLQLYEALTHVS | | |
| hPDE5 (Amino acid | MKHEVLCRWILSVKKNYRKNVAYHNWRHAENTAQCMFAALKAGKIQNKLTDLEI | 157 | 175 |
| 590-836 of WT, | LALLIAALSHDLDHRGVNNSYIQRSEHPLAQLYCHSIMEHHHFDQCLMILNSPGNQI | | |
| R732W) | LSGLSILEYKTTLKIIKQAILATDLALYIKRWGEFFELIRKNQFNLEDPHQKELFLAM | | |
| | LMTACDLSAITKPWPIQQRIAELVATEFFDQGDRERKELNIEPTDLMNREKKNKIPS | | |
| | MQVGFIDAICLQLYEALTHVS | | |
| hPDE5 (Amino acid | MKHEVLCRWILSVKKNYRKNVAYHNWRHAENTAQCMFAALKAGKIQNKLTDLEI | 158 | 176 |
| 590-836 of WT, | LALLIAALSHDLDHRGVNNSYIQRSEHPLAQLYCHSIMEHHHFDQCLMILNSPGNQI | | |
| R732Y) | LSGLSILEYKTTLKIIKQAILATDLALYIKRYGEFFELIRKNQFNLEDPHQKELFLAM | | |
| | LMTACDLSAITKPWPIQQRIAELVATEFFDQGDRERKELNIEPTDLMNREKKNKIPS | | |
| | MQVGFIDAICLQLYEALTHVS | | |
| hPDE5 (Amino acid | MKHEVLCRWILSVKKNYRKNVAYHNWRHAENTAQCMFAALKAGKIQNKLTDLEI | 159 | 177 |
| 590-836 of WT, | LALLIAALSHDLDHRGVNNSYIQRSEHPLAQLYCHSIMEHHHFDQCLMILNSPGNQI | | |
| R732H) | LSGLSILEYKTTLKIIKQAILATDLALYIKRHGEFFELIRKNQFNLEDPHQKELFLAM | | |
| | LMTACDLSAITKPWPIQQRIAELVATEFFDQGDRERKELNIEPTDLMNREKKNKIPS | | |
| | MQVGFIDAICLQLYEALTHVS | | |
| hPDE5 (Amino acid | MKHEVLCRWILSVKKNYRKNVAYHNWRHAENTAQCMFAALKAGKIQNKLTDLEI | 160 | 178 |
| 590-836 of WT, | LALLIAALSHDLDHRGVNNSYIQRSEHPLAQLYCHSIMEHHHFDQCLMILNSPGNQI | | |
| R732S) | LSGLSILEYKTTLKIIKQAILATDLALYIKRSGEFFELIRKNQFNLEDPHQKELFLAML | | |
| | MTACDLSAITKPWPIQQRIAELVATEFFDQGDRERKELNIEPTDLMNREKKNKIPSM | | |
| | QVGFIDAICLQLYEALTHVS | | |
| hPDE5 (Amino acid | MKHEVLCRWILSVKKNYRKNVAYHNWRHAENTAQCMFAALKAGKIQNKLTDLEI | 161 | 179 |
| 590-836 of WT, | LALLIAALSHDLDHRGVNNSYIQRSEHPLAQLYCHSIMEHHHFDQCLMILNSPGNQI | | |
| R732T) | LSGLSILEYKTTLKIIKQAILATDLALYIKRTGEFFELIRKNQFNLEDPHQKELFLAML | | |
| | MTACDLSAITKPWPIQQRIAELVATEFFDQGDRERKELNIEPTDLMNREKKNKIPSM | | |
| | QVGFIDAICLQLYEALTHVS | | |
| hPDE5 (Amino acid | MKHEVLCRWILSVKKNYRKNVAYHNWRHAENTAQCMFAALKAGKIQNKLTDLEI | 162 | 180 |
| 590-836 of WT, | LALLIAALSHDLDHRGVNNSYIQRSEHPLAQLYCHSIMEHHHFDQCLMILNSPGNQI | | |
| R732D) | LSGLSILEYKTTLKIIKQAILATDLALYIKRDGEFFELIRKNQFNLEDPHQKELFLAM | | |
| | LMTACDLSAITKPWPIQQRIAELVATEFFDQGDRERKELNIEPTDLMNREKKNKIPS | | |
| | MQVGFIDAICLQLYEALTHVS | | |
| hPDE5 (Amino acid | MKHEVLCRWILSVKKNYRKNVAYHNWRHAFNTAQCMFAALKAGKIQNKLTDLEI | 163 | 181 |
| 590-836 of WT, | LALLIAALSHDLDHRGVNNSYIQRSEHPLAQLYCHSIMEHHHFDQCLMILNSPGNQI | | |
| R732E) | LSGLSIEEYKTTLKIIKQAILATDLALYIKREGEFFELIRKNQFNLEDPHQKELFLAML | | |
| | MTACDLSAITKPWPIQQRIAELVATEFFDQGDRERKELNIEPTDLMNREKKNKIPSM | | |
| | QVGFIDAICLQLYEALTHVS | | |
| hPDE5 (Amino acid | MKHEVLCRWILSVKKNYRKNVAYHNWRHAFNTAQCMFAALKAGKIQNKLTDLEI | 164 | 182 |
| 590-836 of WT, | LALLIAALSHDLDHRGVNNSYIQRSEHPLAQLYCHSIMEHHHFDQCLMILNSPGNQI | | |
| R732Q) | LSGLSIEEYKTTLKIIKQAILATDLALYIKRQGEFFELIRKNQFNLEDPHQKELFLAM | | |
| | LMTACDLSAITKPWPIQQRIAELVATEFFDQGDRERKELNIEPTDLMNREKKNKIPS | | |
| | MQVGFIDAICLQLYEALTHVS | | |
| hPDE5 (Amino acid | MKHEVLCRWILSVKKNYRKNVAYHNWRHAFNTAQCMFAALKAGKIQNKLTDLEI | 165 | 183 |
| 590-836 of WT, | LALLIAALSHDLDHRGVNNSYIQRSEHPLAQLYCHSIMEHHHFDQCLMILNSPGNQI | | |
| R732N) | LSGLSIEEYKTTLKIIKQAILATDLALYIKRNGEFFELIRKNQFNLEDPHQKELFLAM | | |
| | LMTACDLSAITKPWPIQQRIAELVATEFFDQGDRERKELNIEPTDLMNREKKNKIPS | | |
| | MQVGFIDAICLQLYEALTHVS | | |
| hPDE5 (Amino acid | MKHEVLCRWILSVKKNYRKNVAYHNWRHAFNTAQCMFAALKAGKIQNKLTDLEI | 166 | 184 |
| 590-836 of WT, | LALLIAALSHDLDHRGVNNSYIQRSEHPLAQLYCHSIMEHHHFDQCLMILNSPGNQI | | |
| R732M) | LSGLSIEEYKTTLKIIKQAILATDLALYIKRMGEFFELIRKNQFNLEDPHQKELFLAM | | |
| | LMTACDLSAITKPWPIQQRIAELVATEFFDQGDRERKELNIEPTDLMNREKKNKIPS | | |
| | MQVGFIDAICLQLYEALTHVS | | |
| hPDE5 (Amino acid | MKHEVLCRWILSVKKNYRKNVAYHNWRHAFNTAQCMFAALKAGKIQNKLTDLEI | 167 | 185 |
| 590-836 of WT, | LALLIAALSHDLDHRGVNNSYIQRSEHPLAQLYCHSIMEHHHFDQCLMILNSPGNQI | | |
| R732C) | LSGLSIEEYKTTLKIIKQAILATDLALYIKRCGEFFELIRKNQFNLEDPHQKELFLAM | | |
| | LMTACDLSAITKPWPIQQRIAELVATEFFDQGDRERKELNIEPTDLMNREKKNKIPS | | |
| | MQVGFIDAICLQLYEALTHVS | | |
| hPDE5 (Amino acid | MKHEVLCRWILSVKKNYRKNVAYHNWRHAFNTAQCMFAALKAGKIQNKLTDLEI | 168 | 186 |
| 590-836 of WT, | LALLIAALSHDLDHRGVNNSYIQRSEHPLAQLYCHSIMEHHHFDQCLMILNSPGNQI | | |
| R732K) | LSGLSIEEYKTTLKIIKQAILATDLALYIKRKGEFFELIRKNQFNLEDPHQKELFLAM | | |
| | LMTACDLSAITKPWPIQQRIAELVATEFFDQGDRERKELNIEPTDLMNREKKNKIPS | | |
| | MQVGFIDAICLQLYEALTHVS | | |
| hPDE5 (Amino acid | EETRELQSLAAAVVPSAQTLKITDFSFSDFELSDLETALCTIRMFTDLNLVQNFQMK | 383 | 401; 402 |
| 535-860 of WT, | HEVLCRWILSVKKNYRKNVAYHNWRHAFNTAQCMFAALKAGKIQNKLTDLEILA | | |
| R732G) | LLIAALSHDLDHRGVNNSYIQRSEHPLAQLYCHSIMEHHHFDQCLMILNSPGNQILS | | |
| | GLSIEEYKTTLKIIKQAILATDLALYIKRGGEFFELIRKNQFNLEDPHQKELFLAMLM | | |
| | TACDLSAITKPWPIQQRIAELVATEFFDQGDRERKELNIEPTDLMNREKKNKIPSMQ | | |
| | VGFIDAICLQLYEALTHVSEDCFPLLDGCRKNRQKWQALAEQQ | | |
| hPDE5 (Amino acid | EETRELQSLAAAVVPSAQTLKITDFSFSDFELSDLETALCTIRMFTDLNLVQNFQMK | 384 | 403; 404 |
| 535-860 of WT, | HEVLCRWILSVKKNYRKNVAYHNWRHAFNTAQCMFAALKAGKIQNKLTDLEILA | | |
| R732A) | LLIAALSHDLDHRGVNNSYIQRSEHPLAQLYCHSIMEHHHFDQCLMILNSPGNQILS | | |
| | GLSIEEYKTTLKIIKQAILATDLALYIKRAGEFFELIRKNQFNLEDPHQKELFLAMLM | | |
| | TACDLSAITKPWPIQQRIAELVATEFFDQGDRERKELNIEPTDLMNREKKNKIPSMQ | | |
| | VGFIDAICLQLYEALTHVSEDCFPLLDGCRKNRQKWQALAEQQ | | |
| hPDE5 (Amino acid | EETRELQSLAAAVVPSAQTLKITDFSFSDFELSDLETALCTIRMFTDLNLVQNFQMK | 12 | 405 |
| 535-860 of WT, | HEVLCRWILSVKKNYRKNVAYHNWRHAFNTAQCMFAALKAGKIQNKLTDLEILA | | |
| R732L) | LLIAALSHDLDHRGVNNSYIQRSEHPLAQLYCHSIMEHHHFDQCLMILNSPGNQILS | | |
| | GLSIEEYKTTLKIIKQAILATDLALYIKRLGEFFELIRKNQFNLEDPHQKELFLAMLM | | |
| | TACDLSAITKPWPIQQRIAELVATEFFDQGDRERKELNIEPTDLMNREKKNKIPSMQ | | |
| | VGFIDAICLQLYEALTHVSEDCFPLLDGCRKNRQKWQALAEQQ | | |
| hPDE5 (Amino acid | EETRELQSLAAAVVPSAQTLKITDFSFSDFELSDLETALCTIRMFTDLNLVQNFQMK | 385 | 406; 407 |
| 535-860 of WT, | HEVLCRWILSVKKNYRKNVAYHNWRHAFNTAQCMFAALKAGKIQNKLTDLEILA | | |
| R732V) | LLIAALSHDLDHRGVNNSYIQRSEHPLAQLYCHSIMEHHHFDQCLMILNSPGNQILS | | |
| | GLSIEEYKTTLKIIKQAILATDLALYIKRVGEFFELIRKNQFNLEDPHQKELFLAMLM | | |
| | TACDLSAITKPWPIQQRIAELVATEFFDQGDRERKELNIEPTDLMNREKKNKIPSMQ | | |
| | VGFIDAICLQLYEALTHVSEDCFPLLDGCRKNRQKWQALAEQQ | | |
| hPDE5 (Amino acid | EETRELQSLAAAVVPSAQTLKITDFSFSDFELSDLETALCTIRMFTDLNLVQNFQMK | 386 | 408; 8551 |
| 535-860 of WT, | HEVLCRWILSVKKNYRKNVAYHNWRHAFNTAQCMFAALKAGKIQNKLTDLEILA | | |
| R732I) | LLIAALSHDLDHRGVNNSYIQRSEHPLAQLYCHSIMEHHHFDQCLMILNSPGNQILS | | |
| | GLSIEEYKTTLKIIKQAILATDLALYIKRIGEFFELIRKNQFNLEDPHQKELFLAMLMT | | |
| | ACDLSAITKPWPIQQRIAELVATEFFDQGDRERKELNIEPTDLMNREKKNKIPSMQV | | |
| | GFIDAICLQLYEALTHVSEDCFPLLDGCRKNRQKWQALAEQQ | | |
| hPDE5 (Amino acid | EETRELQSLAAAVVPSAQTLKITDFSFSDFELSDLETALCTIRMFTDLNLVQNFQMK | 387 | 409; 410 |
| 535-860 of WT, | HEVLCRWILSVKKNYRKNVAYHNWRHAFNTAQCMFAALKAGKIQNKLTDLEILA | | |
| R732P) | LLIAALSHDLDHRGVNNSYIQRSEHPLAQLYCHSIMEHHHFDQCLMILNSPGNQILS | | |
| | GLSIEEYKTTLKIIKQAILATDLALYIKRPGEFFELIRKNQFNLEDPHQKELFLAMLM | | |
| | TACDLSAITKPWPIQQRIAELVATEFFDQGDRERKELNIEPTDLMNREKKNKIPSMQ | | |
| | VGFIDAICLQLYEALTHVSEDCFPLLDGCRKNRQKWQALAEQQ | | |
| hPDE5 (Amino acid | EETRELQSLAAAVVPSAQTLKITDFSFSDFELSDLETALCTIRMFTDLNLVQNFQMK | 388 | 411 |
| 535-860 of WT, | HEVLCRWILSVKKNYRKNVAYHNWRHAFNTAQCMFAALKAGKIQNKLTDLEILA | | |
| R732F) | LLIAALSHDLDHRGVNNSYIQRSEHPLAQLYCHSIMEHHHFDQCLMILNSPGNQILS | | |
| | GLSIEEYKTTLKIIKQAILATDLALYIKREGEFFELIRKNQFNLEDPHQKELFLAMLM | | |
| | TACDLSAITKPWPIQQRIAELVATEFFDQGDRERKELNIEPTDLMNREKKNKIPSMQ | | |
| | VGFIDAICLQLYEALTHVSEDCFPLLDGCRKNRQKWQALAEQQ | | |
| hPDE5 (Amino acid | EETRELQSLAAAVVPSAQTLKITDFSFSDFELSDLETALCTIRMFTDLNLVQNFQMK | 389 | 412 |
| 535-860 of WT, | HEVLCRWILSVKKNYRKNVAYHNWRHAFNTAQCMFAALKAGKIQNKLTDLEILA | | |
| R732W) | LLIAALSHDLDHRGVNNSYIQRSEHPLAQLYCHSIMEHHHFDQCLMILNSPGNQILS | | |
| | GLSIWEYKTTLKIIKQAILATDLALYIKRWGEFFELIRKNQFNLEDPHQKELFLAMLM | | |
| | TACDLSAITKPWPIQQRIAELVATEFFDQGDRERKELNIEPTDLMNREKKNKIPSMQ | | |
| | VGFIDAICLQLYEALTHVSEDCFPLLDGCRKNRQKWQALABQQ | | |
| hPDE5 (Amino acid | EETRELQSLAAAVVPSAQTLKITDFSFSDFELSDLETALCTIRMFTDLNLVQNFQMK | 390 | 413; 414 |
| 535-860 of WT, | HEVLCRWILSVKKNYRKNVAYHNWRHAFNTAQCMFAALKAGKIQNKLTDLEILA | | |
| R732Y) | LLIAALSHDLDHRGVNNSYIQRSEHPLAQLYCHSIMEHHHFDQCLMILNSPGNQILS | | |
| | GLSIEEYKTTLKIIKQAILATDLALYIKRYGEFFELIRKNQFNLEDPHQKELFLAMLM | | |
| | TACDLSAITKPWPIQQRIAELVATEFFDQGDRERKELNIEPTDLMNREKKNKIPSMQ | | |
| | VGFIDAICLQLYEALTHVSEDCFPLLDGCRKNRQKWQALAEQQ | | |
| hPDE5 (Amino acid | EETRELQSLAAAVVPSAQTLKITDFSFSDFELSDLETALCTIRMFTDLNLVQNFQMK | 391 | 415; 416 |
| 535-860 of WT, | HEVLCRWILSVKKNYRKNVAYHNWRHAFNTAQCMFAALKAGKIQNKLTDLEILA | | |
| R732H) | LLIAALSHDLDHRGVNNSYIQRSEHPLAQLYCHSIMEHHHFDQCLMILNSPGNQILS | | |
| | GLSIEEYKTTLKIIKQAILATDLALYIKRHGEFFELIRKNQFNLEDPHQKELFLAMLM | | |
| | TACDLSAITKPWPIQQRIAELVATEFFDQGDRERKELNIEPTDLMNREKKNKIPSMQ | | |
| | VGFIDAICLQLYEALTHVSEDCFPLLDGCRKNRQKWQALAEQQ | | |
| hPDE5 (Amino acid | EETRELQSLAAAVVPSAQTLKITDFSFSDFELSDLETALCTIRMFTDLNLVQNFQMK | 392 | 417; 418 |
| 535-860 of WT, | HEVLCRWILSVKKNYRKNVAYHNWRHAFNTAQCMFAALKAGKIQNKLTDLEILA | | |
| R732S) | LLIAALSHDLDHRGVNNSYIQRSEHPLAQLYCHSIMEHHHFDQCLMILNSPGNQILS | | |
| | GLSIEEYKTTLKIIKQAILATDLALYIKRSGEFFELIRKNQFNLEDPHQKELFLAMLM | | |
| | TACDLSAITKPWPIQQRIAELVATEFFDQGDRERKELNIEPTDLMNREKKNKIPSMQ | | |
| | VGFIDAICLQLYEALTHVSEDCFPLLDGCRKNRQKWQALAEQQ | | |
| hPDE5 (Amino acid | EETRELQSLAAAVVPSAQTLKITDFSFSDFELSDLETALCTIRMFTDLNLVQNFQMK | 393 | 419; 8552 |
| 535-860 of WT, | HEVLCRWILSVKKNYRKNVAYHNWRHAFNTAQCMFAALKAGKIQNKLTDLEILA | | |
| R732T) | LLIAALSHDLDHRGVNNSYIQRSEHPLAQLYCHSIMEHHHFDQCLMILNSPGNQILS | | |
| | GLSIEEYKTTLKIIKQAILATDLALYIKRTGEFFELIRKNQFNLEDPHQKELFLAMLM | | |
| | TACDLSAITKPWPIQQRIAELVATEFFDQGDRERKELNIEPTDLMNREKKNKIPSMQ | | |
| | VGFIDAICLQLYEALTHVSEDCFPLLDGCRKNRQKWQALAEQQ | | |
| hPDE5 (Amino acid | EETRELQSLAAAVVPSAQTLKITDFSFSDFELSDLETALCTIRMFTDLNLVQNFQMK | 394 | 420; 421 |
| 535-860 of WT, | HEVLCRWILSVKKNYRKNVAYHNWRHAFNTAQCMFAALKAGKIQNKLTDLEILA | | |
| R732D) | LLIAALSHDLDHRGVNNSYIQRSEHPLAQLYCHSIMEHHHFDQCLMILNSPGNQILS | | |
| | GLSIEEYKTTLKIIKQAILATDLALYIKRDGEFFELIRKNQFNLEDPHQKELFLAMLM | | |
| | TACDLSAITKPWPIQQRIAELVATEFFDQGDRERKELNIEPTDLMNREKKNKIPSMQ | | |
| | VGFIDAICLQLYEALTHVSEDCFPLLDGCRKNRQKWQALAEQQ | | |
| hPDE5 (Amino acid | EETRELQSLAAAVVPSAQTLKITDFSFSDFELSDLETALCTIRMFTDLNLVQNFQMK | 395 | 422; 423 |
| 535-860 of WT, | HEVLCRWILSVKKNYRKNVAYHNWRHAFNTAQCMFAALKAGKIQNKLTDLEILA | | |
| R732E) | LLIAALSHDLDHRGVNNSYIQRSEHPLAQLYCHSIMEHHHFDQCLMILNSPGNQILS | | |
| | GLSIEEYKTTLKIIKQAILATDLALYIKREGEFFELIRKNQFNLEDPHQKELFLAMLM | | |
| | TACDLSAITKPWPIQQRIAELVATEFFDQGDRERKELNIEPTDLMNREKKNKIPSMQ | | |
| | VGFIDAICLQLYEALTHVSEDCFPLLDGCRKNRQKWQALAEQQ | | |
| hPDE5 (Amino acid | EETRELQSLAAAVVPSAQTLKITDFSFSDFELSDLETALCTIRMFTDLNLVQNFQMK | 396 | 424; 425 |
| 535-860 of WT, | HEVLCRWILSVKKNYRKNVAYHNWRHAFNTAQCMFAALKAGKIQNKLTDLEILA | | |
| R732Q) | LLIAALSHDLDHRGVNNSYIQRSEHPLAQLYCHSIMEHHHFDQCLMILNSPGNQILS | | |
| | GLSIEEYKTTLKIIKQAILATDLALYIKRQGEFFELIRKNQFNLEDPHQKELFLAMLM | | |
| | TACDLSAITKPWPIQQRIAELVATEFFDQGDRERKELNIEPTDLMNREKKNKIPSMQ | | |
| | VGFIDAICLQLYEALTHVSEDCFPLLDGCRKNRQKWQALAEQQ | | |
| hPDE5 (Amino acid | EETRELQSLAAAVVPSAQTLKITDFSFSDFELSDLETALCTIRMFTDLNLVQNFQMK | 397 | 426; 8553 |
| 535-860 of WT, | HEVLCRWILSVKKNYRKNVAYHNWRHAFNTAQCMFAALKAGKIQNKLTDLEILA | | |
| R732N) | LLIAALSHDLDHRGVNNSYIQRSEHPLAQLYCHSIMEHHHFDQCLMILNSPGNQILS | | |
| | GLSIEEYKTTLKIIKQAILATDLALYIKRNGEFFELIRKNQFNLEDPHQKELFLAMLM | | |
| | TACDLSAITKPWPIQQRIAELVATEFFDQGDRERKELNIEPTDLMNREKKNKIPSMQ | | |
| | VGFIDAICLQLYEALTHVSEDCFPLLDGCRKNRQKWQALAEQQ | | |
| hPDE5 (Amino acid | EETRELQSLAAAVVPSAQTLKITDFSFSDFELSDLETALCTIRMFTDLNLVQNFQMK | 398 | 427 |
| 535-860 of WT, | HEVLCRWILSVKKNYRKNVAYHNWRHAFNTAQCMFAALKAGKIQNKLTDLEILA | | |
| R732M) | LLIAALSHDLDHRGVNNSYIQRSEHPLAQLYCHSIMEHHHFDQCLMILNSPGNQILS | | |
| | GLSIEEYKTTLKIIKQAILATDLALYIKRMGEFFELIRKNQFNLEDPHQKELFLAMLM | | |
| | TACDLSAITKPWPIQQRIAELVATEFFDQGDRERKELNIEPTDLMNREKKNKIPSMQ | | |
| | VGFIDAICLQLYEALTHVSEDCFPLLDGCRKNRQKWQALAEQQ | | |
| hPDE5 (Amino acid | EETRELQSLAAAVVPSAQTLKITDFSFSDFELSDLETALCTIRMFTDLNLVQNFQMK | 399 | 428; 8554 |
| 535-860 of WT, | HEVLCRWILSVKKNYRKNVAYHNWRHAFNTAQCMFAALKAGKIQNKLTDLEILA | | |
| R732C) | LLIAALSHDLDHRGVNNSYIQRSEHPLAQLYCHSIMEHHHFDQCLMILNSPGNQILS | | |
| | GLSIEEYKTTLKIIKQAILATDLALYIKRCGEFFELIRKNQFNLEDPHQKELFLAMLM | | |
| | TACDLSAITKPWPIQQRIAELVATEFFDQGDRERKELNIEPTDLMNREKKNKIPSMQ | | |
| | VGFIDAICLQLYEALTHVSEDCFPLLDGCRKNRQKWQALAEQQ | | |
| hPDE5 (Amino acid | EETRELQSLAAAVVPSAQTLKITDFSFSDFELSDLETALCTIRMFTDLNLVQNFQMK | 400 | 429 |
| 535-860 of WT, | HEVLCRWILSVKKNYRKNVAYHNWRHAFNTAQCMFAALKAGKIQNKLTDLEILA | | |
| R732K) | LLIAALSHDLDHRGVNNSYIQRSEHPLAQLYCHSIMEHHHFDQCLMILNSPGNQILS | | |
| | GLSIEEYKTTLKIIKQAILATDLALYIKRKGEFFELIRKNQFNLEDPHQKELFLAMLM | | |
| | TACDLSAITKPWPIQQRIAELVATEFFDQGDRERKELNIEPTDLMNREKKNKIPSMQ | | |
| | VGFIDAICLQLYEALTHVSEDCFPLLDGCRKNRQKWQALAEQQ | | |

TABLE 7
Additional hPDE5 R732 construct components

| | | Amino acid | Nucleic Acid |
|---|---|---|---|
| Component | Amino Acid Sequence | SEQ ID NO | SEQ ID NO |
| AcGFP (Amino | VSKGAELFTGIVPILIELNGDVNGRKFSVSGEGEGDATYGKLTLKFICTT | 79 | 372 |
| acid 2-239 of WT) | GKLPVPWPTLVTTLSYGVQCFSRYPDHMKQHDFFKSAMPEGYIQERTIF | | |
| | FEDDGNYKSRAEVKFEGDTLVNRIELTGTDFKEDGNILGNKMEYNYNA | | |
| | HNVYIMTDKAKNGIKVNEKIRHNIEDGSVQLADHYQQNTPIGDGPVLLP | | |
| | DNHYLSTQSALSKDPNEKRDHMIYFGFVTAAAITHGMDELYK | | |
| AcGFP (Amino | MVSKGAELFTGIVPILIELNGDVNGHKESVSGEGEGDATYGKLTLKFICT | 365 | 373 |
| acid 1-239 of WT) | TGKLPVPWPTLVTTLSYGVQCFSRYPDHMKQHDFFKSAMPEGYIQERTI | | |
| | FFEDDGNYKSRAEVKFEGDTLVNRIELTGTDFKEDGNILGNKMEYNYN | | |
| | AHNVYIMTDKAKNGIKVNFKIRHNIEDGSVQLADHYQQNTPIGDGPVLL | | |
| | PDNHYLSTQSALSKDPNEKRDHMIYEGFVTAAAITHGMDELYK | | |
| linker (SG) | SG | — | AGTGGT |
| linker (GS) | GS | — | GGATCC |

TABLE 8
hPDE5 R732 constructs

| | | Amino | Nucleic |
|---|---|---|---|
| | | acid | Acid |
| Construct ID/ | | SEQ | SEQ |
| Description | Sequence | ID NO: | ID NO: |
| OT-001233 (hPDE5 | MKHEVLCRWILSVKKNYRKNVAYHNWRHAFNTAQCMFAALKAGKIQNKLTDL | 187 | 205 |
| (Amino acid 590- | EILALLIAALSHDLDHRGVNNSYIQRSEHPLAQLYCHSIMEHHFIFDQCLMILNSPG | | |
| 836 of WT, | NQILSGLSIEEYKTTLKIIKQAILATDLALYIKRGGEFFEURKNQFNLEDPHQKELF | | |
| R732G); linker | LAMLMTACDLSAITKPWPIQQRIAELVATEFFDQGDRERKELNIEPTDLMNREKK | | |
| (SG); AcGFP | NKIPSMQVGFIDAICLQLYEALTHVSSGVSKGAELFTGIVPILIELNGDVNGHKFSV | | |
| (Amino acid 2-239 | SGEGEGDATYGKLTLKFICTTGKLPVPWPTLVTTLSYGVQCFSRYPDHMKQHDFF | | |
| of WT); stop) | KSAMPEGYIQERTIFFEDDGNYKSRAEVKFEGDTLVNRIELTGTDFKEDGNILGNK | | |
| | MEYNYNAHNVYIMTDKAKNGIKVNFKIRHNIEDGSVQLADHYQQNTPIGDGPVL | | |
| | LPDNHYLSTQSALSKDPNEKRDHMIYFGFVTAAAITHGMDELYK* | | |
| OT-001234 (hPDE5 | MKHEVLCRWILSVKKNYRKNVAYHNWRHAFNTAQCMFAALKAGKIQNKLTDL | 188 | 206 |
| (Amino acid 590- | EILALLIAALSHDLDHRGVNNSYIQRSEHPLAQLYCHSIMEHHHFDQCLMILNSPG | | |
| 836 of WT, | NQILSGLSIEEYKTTLKIIKQAILATDLALYIKRAGEFFLIRKNQFNLEDPHQKELF | | |
| R732A); linker | LAMLMTACDLSAITKPWPIQQRIAELVATEFFDQGDRERKELNIEPTDLMNREKK | | |
| (SG); AcGFP | NKIPSMQVGFIDAICLQLYEALTHVSSGVSKGAELFTGIVPILIELNGDVNGHKFSV | | |
| (Amino acid 2-239 | SGEGEGDATYGKLTLKFICTTGKLPVPWPTLVTTLSYGVQCFSRYPDHMKQHDFF | | |
| of WT); stop) | KSAMPEGYIQERTIFFEDDGNYKSRAEVKFEGDTLVNRIELTGTDFKEDGNILGNK | | |
| | MEYNYNAHNVYIMTDKAKNGIKVNFKIRHNIEDGSVQLADHYQQNTPIGDGPVL | | |
| | LPDNHYLSTQSALSKDPNEKRDHMIYFGFVTAAAITHGMDELYK* | | |
| OT-001235 (hPDE5 | MKREVLCRWILSVKKNYRKNVAYHNWRHAFNTAQCMFAALKAGKIQNKLTDL | 189 | 207 |
| (Amino acid 590- | EILALLIAALSHDLDHRGVNNSYIQRSEHPLAQLYCHSIMEHHHFDQCLMILNSPG | | |
| 836 of WT, | NQILSGLSIEEYKTTLKIIKQAILATDLALYIKRVGEFFELIRKNQFNLEDPHQKELF | | |
| R732V); linker | LAMLMTACDLSAITKPWPIQQRIAELVATEFFDQGDRERKELNIEPTDLMNREKK | | |
| (SG); AcGFP | NKIPSMQVGFIDAICLQLYEALTHVSSGVSKGAELFTGIVPILIELNGDVNGHKFSV | | |
| (Amino acid 2-239 | SGEGEGDATYGKLTLKFICTTGKLPVPWPTLVTTLSYGVQCFSRYPDHMKQHDFF | | |
| of WT); stop) | KSAMPEGYIQERTIFFEDDGNYKSRAEVKFEGDTLVNRIELTGTDFKEDGNILGNK | | |
| | MEYNYNAHNVYIMTDKAKNGIKVNFKIRHNIEDGSVQLADHYQQNTPIGDGPVL | | |
| | LPDNHYLSTQSALSKDPNEKRDHMIYFGFVTAAAITHGMDELYK* | | |
| OT-001236 (hPDE5 | MKREVLCRWILSVKKNYRKNVAYHNWRHAFNTAQCMFAALKAGKIQNKLTDL | 190 | 208 |
| (Amino acid 590- | EILALLIAALSHDLDHRGVNNSYIQRSEHPLAQLYCHSIMEHHHFDQCLMILNSPG | | |
| 836 of WT, R7321); | NQILSGLSIEEYKTTLKIIKQAILATDLALYIKRIGEFFELRKNQFNLEDPHQKELFL | | |
| linker (SG); AcGFP | AMLMTACDLSAITKPWPIQQRIAELVATEFFDQGDRERKELNIEPTDLMNREKKN | | |
| (Amino acid 2-239 | KIPSMQVGFIDAICLQLYEALTHVSSGVSKGAELFTGIVPILIELNGDVNGHKFSVS | | |
| of WT); stop) | GEGEGDATYGKLTLKFICTTGKLPVPWPTLVTTLSYGVQCFSRYPDHMKQHDFFK | | |
| | SAMPEGYIQERTIFFEDDGNYKSRAEVKFEGDTLVNRIELTGTDEKEDGNILGNKM | | |
| | EYNYNAHNVYIMTDKAKNGIKVNFKIRHNIEDGSVQLADHYQQNTPIGDGPVLLP | | |
| | DNHYLSTQSALSKDPNEKRDHMIYFGFVTAAAITHGMDELYK* | | |
| OT-001237 (hPDE5 | MKREVECRWILSVKKNYRKNVAYHNWRHAFNTAQCMFAALKAGKIQNKLTDL | 191 | 209 |
| (Amino acid 590- | EILALLIAALSHDLDHRGVNNSYIQRSEHPLAQLYCHSIMEHHHFDQCLMILNSPG | | |
| 836 of WT, | NQILSGESIEEYKTTLKIIKQAILATDLALYIKRPGEFFELIKNQFNLEDPHQKELFL | | |
| R732P); linker | AMLMTACDLSAITKPWPIQQRIAELVATEFFDQGDRERKELNIEPTDLMNREKKN | | |
| (SG); AcGFP | KIPSMQVGFIDAICLQLYEALTHVSSGVSKGAELFTGIVPILIELNGDVNGHKESVS | | |
| (Amino acid 2-239 | GEGEGDATYGKLTLKFICTTGKLPVPWPTLVTTLSYGVQCFSRYPDHMKQHDFFK | | |
| of WT); stop) | SAMPEGYIQERTIFFEDDGNYKSRAEVKFEGDTLVNRIELTGTDFKEDGNILGNKM | | |
| | EYNYNAHNVYIMTDKAKNGIKVNFKIRHNIEDGSVQLADHYQQNTPIGDGPVLLP | | |
| | DNHYLSTQSALSKDPNEKRDHMIYFGFVTAAAITHGMDELYK* | | |
| OT-001238 (hPDE5 | MKREVLCRWILSVKKNYRKNVAYHNWRHAFNTAQCMFAALKAGKIQNKLTDE | 192 | 210 |
| (Amino acid 590- | EILALLIAALSHDLDHRGVNNSYIQRSEHPLAQLYCHSIMEHHHFDQCLMILNSPG | | |
| 836 of WT, | NQILSGESIEEYKTTLKIIKQAILATDLALYIKRFGEFFELIRKNQFNLEDPHQKELFL | | |
| R732F); linker | AMLMTACDLSAITKPWPIQQRIAELVATEFFDQGDRERKELNIEPTDLMNREKKN | | |
| (SG); AcGFP | KIPSMQVGFIDAICLQLYEALTHVSSGVSKGAELFTGIVPILIELNGDVNGHKESVS | | |
| (Amino acid 2-239 | GEGEGDATYGKLTLKFICTTGKLPVPWPTLVTTLSYGVQCFSRYPDHMKQHDFFK | | |
| of WT); stop) | SAMPEGYIQERTIFFEDDGNYKSRAEVKFEGDTLVNRIELTGTDFKEDGNILGNKM | | |
| | EYNYNAHNVYIMTDKAKNGIKVNFKIRHNIEDGSVQLADHYQQNTPIGDGPVLLP | | |
| | DNHYLSTQSALSKDPNEKRDHMIYFGFVTAAAITHGMDELYK* | | |
| OT-001239 (hPDE5 | MKHEVLCRWILSVKKNYRKNVAYHNWRHAFNTAQCMFAALKAGKIQNKLTDL | 193 | 211 |
| (Amino acid 590- | EILALLIAALSHDLDHRGVNNSYIQRSEHPLAQLYCHSIMEHHHFDQCLMILNSPG | | |
| 836 of WT, | NQILSGESIEEYKTTLKIIKQAILATDLALYIKRWGEFFELIRKNQFNLEDPHQKELF | | |
| R732W); linker | LAMLMTACDLSAITKPWPIQQRIAELVATEFFDQGDRERKELNIEPTDLMNREKK | | |
| (SG); AcGFP | NKIPSMQVGFIDAICLQLYEALTHVSSGVSKGAELFTGIVPILIELNGDVNGHKFSV | | |
| (Amino acid 2-239 | SGEGEGDATYGKLTLKFICTTGKLPVPWPTLVTTLSYGVQCFSRYPDHMKQHDFF | | |
| of WT); stop) | KSAMPEGYIQERTIFFEDDGNYKSRAEVKFEGDTLVNRIELTGTDFKEDGNILGNK | | |
| | MEYNYNAHNVYIMTDKAKNGIKVNFKIRHNIEDGSVQLADHYQQNTPIGDGPVL | | |
| | LPDNHYLSTQSALSKDPNEKRDHMIYEGFVTAAAITHGMDELYK* | | |
| OT-001240 (hPDE5 | MKREVECRWILSVKKNYRKNVAYHNWRHAFNTAQMFAALKAGKIQNKLTDL | 194 | 212 |
| (Amino acid 590- | EILALLIAALSHDLDHRGVNNSYIQRSEHPLAQLYCHSIMEHHHFDQCLMILNSPG | | |
| 836 of WT, | NQILSGESIEEYKTTLKIIKQAILATDLALYIKRYGEFFELIRKNQFNLEDPHQKELF | | |
| R732Y); linker | LAMLMTACDLSAITKPWPIQQRIAELVATEFFDQGDRERKELNIEPTDLMNREKK | | |
| (SG); AcGFP | NKIPSMQVGFIDAICLQLYEALTHVSSGVSKGAELFTGIVPILIELNGDVNGHKFSV | | |
| (Amino acid 2-239 | SGEGEGDATYGKLTLKFICTTGKLPVPWPTLVTTLSYGVQCFSRYPDHMKQHDFF | | |
| of WT); stop) | KSAMPEGYIQERTIFFEDDGNYKSRAEVKFEGDTLVNRIELTGTDFKEDGNILGNK | | |
| | MEYNYNAHNVYIMTDKAKNGIKVNFKIRHNIEDGSVQLADHYQQNTPIGDGPVL | | |
| | LPDNHYLSTQSALSKDPNEKRDHMIYFGFVTAAAITHGMDELYK* | | |
| OT-001241 (hPDE5 | MKHEVECRWILSVKKNYRKNVAYHNWRHAFNTAQCMFAALKAGKIQNKLTDL | 195 | 213 |
| (Amino acid 590- | EILALLIAALSHDLDHRGVNNSYIQRSEHPLAQLYCHSIMEHHHFDQCLMILNSPG | | |
| 836 of WT, | NQILSGESIEEYKTTLKIIKQAILATDLALYIKRHGEFFELIRKNQFNLEDPHQKELF | | |
| R732H); linker | LAMLMTACDLSAITKPWPIQQRIAELVATEFFDQGDRERKELNIEPTDLMNREKK | | |
| (SG); AcGFP | NKIPSMQVGFIDAICLQLYEALTHVSSGVSKGAELFTGIVPILIELNGDVNGHKESV | | |
| (Amino acid 2-239 | SGEGEGDATYGKLTLKFICTTGKLPVPWPTLVTTLSYGVQCFSRYPDHMKQHDFF | | |
| of WT); stop) | KSAMPEGYIQERTIFFEDDGNYKSRAEVKFEGDTLVNRIELTGTDFKEDGNILGNK | | |
| | MEYNYNAHNVYIMTDKAKNGIKVNFKIRHNIEDGSVQLADHYQQNTPIGDGPVL | | |
| | LPDNHYLSTQSALSKDPNEKRDHMIYFGFVTAAAITHGMDELYK* | | |
| OT-001242 (hPDE5 | MKHEVECRWILSVKKNYRKNVAYHNWRHAFNTAQCMFAALKAGKIQNKLTDL | 196 | 214 |
| (Amino acid 590- | EILALLIAALSHDLDHRGVNNSYIQRSEHPLAQLYCHSIMEHHHFDQCLMILNSPG | | |
| 836 of WT, | NQILSGESIEEYKTTLKIIKQAILATDLALYIKRSGEFFLIRKNQFNLEDPHQKELFL | | |
| R732S); linker | AMLMTACDLSAITKPWPIQQRIAELVATEFFDQGDRERKELNIEPTDLMNREKKN | | |
| (SG); AcGFP | KIPSMQVGFIDAICLQLYEALTHVSSGVSKGAELFTGIVPILIELNGDVNGHKESVS | | |
| (Amino acid 2-239 | GEGEGDATYGKLTLKFICTTGKLPVPWPTLVTTLSYGVQCFSRYPDHMKQHDFFK | | |
| of WT); stop) | SAMPEGYIQERTIFFEDDGNYKSRAEVKFEGDTLVNRIELTGTDFKEDGNILGNKM | | |
| | EYNYNAHNVYIMTDKAKNGIKVNFKIRHIEDGSVQLADHYQQNTPIGDGPVLLP | | |
| | DNHYLSTQSALSKDPNEKRDHMIYFGFVTAAAITHGMDELYK* | | |
| OT-001243 (hPDE5 | MKHEVLCRWILSVKKNYRKNVAYHNWRHAFNTAQCMFAALKAGKIQNKLTDL | 197 | 215 |
| (Amino acid 590- | EILALLIAALSHDLDHRGVNNSYIQRSEHPLAQLYCHSIMEHHHFDQCLMILNSPG | | |
| 836 of WT, | NQILSGLSIEEYKTTLKIIKQAILATDLALYIKRTGEFFELIRKNQFNLEDPHQKELF | | |
| R732T); linker | LAMLMTACDLSAITKPWPIQQRIAELVATEFFDQGDRERKELNIEPTDLMNREKK | | |
| (SG); AcGFP | NKIPSMQVGFIDAICLQLYEALTHVSSGVSKGAELFTGIVPILIELNGDVNGHKFSV | | |
| (Amino acid 2-239 | SGEGEGDATYGKLTLKFICTTGKLPVPWPTLVTTLSYGVQCFSRYPDHMKQHDFF | | |
| of WT); stop) | KSAMPEGYIQERTIFFEDDGNYKSRAEVKFEGDTLVNRIELTGTDFKEDGNILGNK | | |
| | MEYNYNAHNVYIMTDKAKNGIKVNFKIRHNIEDGSVQLADHYQQNTPIGDGPVL | | |
| | LPDNHYLSTQSALSKDPNEKRDHMIYFGFVTAAAITHGMDELYK* | | |
| OT-001244 (hPDE5 | MKHEVLCRWILSVKKNYRKNVAYHNWRHAFNTAQCMFAALKAGKIQNKLTDL | 198 | 216 |
| (Amino acid 590- | EILALLIAALSHDLDHRGVNNSYIQRSEHPLAQLYCHSIMEHHHFDQCLMILNSPG | | |
| 836 of WT, | NQILSGLSIEEYKTTLKIIKQAILATDLALYIKRDGEFFELIRKNQFNLEDPHQKELF | | |
| R732D); linker | LAMLMTACDLSAITKPWPIQQRIAELVATEFFDQGDRERKELNIEPTDLMNREKK | | |
| (SG); AcGFP | NKIPSMQVGFIDAICLQLYEALTHVSSGVSKGAELFTGIVPILIELNGDVNGHKESV | | |
| (Amino acid 2-239 | SGEGEGDATYGKLTLKFICTTGKLPVPWPTLVTTLSYGVQCFSRYPDHMKQHDFF | | |
| of WT); stop) | KSAMPEGYIQERTIFFEDDGNYKSRAEVKFEGDTLVNRIELTGTDFKEDGNILGNK | | |
| | MEYNYNAHNVYIMTDKAKNGIKVNFKIRHNIEDGSVQLADHYQQNTPIGDGPVL | | |
| | LPDNHYLSTQSALSKDPNEKRDHMIYFGFVTAAAITHGMDELYK* | | |
| OT-001245 (hPDE5 | MKHEVLCRWILSVKKNYRKNVAYHNWRHAFNTAQCMFAALKAGKIQNKLTDL | 199 | 217 |
| (Amino acid 590- | EILALLIAALSHDLDHRGVNNSYIQRSEHPLAQLYCHSIMEHHHFDQCLMILNSPG | | |
| 836 of WT, | NQILSGESIEEYKTTLKIIKQAILATDLALYIKREGEFFELIRKNQFNLEDPHQKELF | | |
| R732E); linker | LAMLMTACDLSAITKPWPIQQRIAELVATEFFDQGDRERKELNIEPTDLMNREKK | | |
| (SG); AcGFP | NKIPSMQVGFIDAICLQLYEALTHVSSGVSKGAELFTGIVPILIELNGDVNGHKFSV | | |
| (Amino acid 2-239 | SGEGEGDATYGKLTLKFICTTGKLPVPWPTLVTTLSYGVQCFSRYPDHMKQHDFF | | |
| of WT); stop) | KSAMPEGYIQERTIFFEDDGNYKSRAEVKFEGDTLVNRIELTGTDFKEDGNILGNK | | |
| | MEYNYNAHNVYIMTDKAKNGIKVNFKIRHNIEDGSVQLADHYQQNTPIGDGPVL | | |
| | LPDNHYLSTQSALSKDPNEKRDHMIYEGFVTAAAITHGMDELYK* | | |
| OT-001246 (hPDE5 | MKHEVECRWILSVKKNYRKNVAYHNWRHAFNTAQCMFAALKAGKIQNKLTDL | 200 | 218 |
| (Amino acid 590- | EILALLIAALSHDLDHRGVNNSYIQRSEHPLAQLYCHSIMEHHHFDQCLMILNSPG | | |
| 836 of WT, | NQILSGESIEEYKTTLKIIKQAILATDLALYIKRQGEFFELIRKNQFNLEDPHQKELF | | |
| R732Q); linker | LAMLMTACDLSAITKPWPIQQRIAELVATEFFDQGDRERKELNIEPTDLMNREKK | | |
| (SG); AcGFP | NKIPSMQVGFIDAICLQLYEALTHVSSGVSKGAELFTGIVPILIELNGDVNGHKFSV | | |
| (Amino acid 2-239 | SGEGEGDATYGKLTLKFICTTGKLPVPWPTLVTTLSYGVQCFSRYPDHMKQHDFF | | |
| of WT); stop) | KSAMPEGYIQERTIFFEDDGNYKSRAEVKFEGDTLVNRIELTGTDFKEDGNILGNK | | |
| | MEYNYNAHNVYIMTDKAKNGIKVNFKIRHNIEDGSVQLADHYQQNTPIGDGPVL | | |
| | LPDNHYLSTQSALSKDPNEKRDHMIYFGFVTAAAITHGMDELYK* | | |
| OT-001247 (hPDE5 | MKHEVLCRWILSVKKNYRKNVAYHNWRHAFNTAQCMFAALKAGKIQNKLTDL | 201 | 219 |
| (Amino acid 590- | EILALLIAALSHDLDHRGVNNSYIQRSEHPLAQLYCHSIMEHHHFDQCLMILNSPG | | |
| 836 of WT, | NQILSGESIEEYKTTLKIIKQAILATDLALYIKRNGEFFELIRKNQFNLEDPHQKELF | | |
| R732N); linker | LAMLMTACDLSAITKPWPIQQRIAELVATEFFDQGDRERKELNIEPTDLMNREKK | | |
| (SG); AcGFP | NKIPSMQVGFIDAICLQLYEALTHVSSGVSKGAELFTGIVPILIELNGDVNGHKFSV | | |
| (Amino acid 2-239 | SGEGEGDATYGKLTLKFICTTGKLPVPWPTLVTTLSYGVQCFSRYPDHMKQHDFF | | |
| of WT); stop) | KSAMPEGYIQERTIFFEDDGNYKSRAEVKFEGDTLVNRIELTGTDFKEDGNILGNK | | |
| | MEYNYNAHNVYIMTDKAKNGIKVNFKIRHNIEDGSVQLADHYQQNTPIGDGPVL | | |
| | LPDNHYLSTQSALSKDPNEKRDHMIYFGFVTAAAITHGMDELYK* | | |
| OT-001248 (hPDE5 | MKHEVLCRWILSVKKNYRKNVAYHNWRHAFNTAQCMFAALKAGKIQNKLTDL | 202 | 220 |
| (Amino acid 590- | EILALLIAALSHDLDHRGVNNSYIQRSEHPLAQLYCHSIMEHHHFDQCLMILNSPG | | |
| 836 of WT, | NQILSGESIEEYKTTLKIIKQAILATDLALYIKRMGEFFELIRKNQFNLEDPHQKELF | | |
| R732M); linker | LAMLMTACDLSAITKPWPIQQRIAELVATEFFDQGDRERKELNIEPTDLMNREKK | | |
| (SG); AcGFP | NKIPSMQVGFIDAICLQLYEALTHVSSGVSKGAELFTGIVPILIELNGDVNGHKFSV | | |
| (Amino acid 2-239 | SGEGEGDATYGKLTLKFICTTGKLPVPWPTLVTTLSYGVQCFSRYPDHMKQHDFF | | |
| of WT); stop) | KSAMPEGYIQERTIFFEDDGNYKSRAEVKFEGDTLVNRIELTGTDFKEDGNILGNK | | |
| | MEYNYNAHNVYIMTDKAKNGIKVNFKIRHNIEDGSVQLADHYQQNTPIGDGPVL | | |
| | LPDNHYLSTQSALSKDPNEKRDHMIYFGFVTAAAITHGMDELYK* | | |
| OT-001249 (hPDE5 | MKHEVLCRWILSVKKNYRKNVAYHNWRHAFNTAQCMFAALKAGKIQNKLTDL | 203 | 221 |
| (Amino acid 590- | EILALLIAALSHDLDHRGVNNSYIQRSEHPLAQLYCHSIMEHHHFDQCLMILNSPG | | |
| 836 of WT, | NQILSGLSIEEYKTTLKIIKQAILATDLALYIKRCGEFFELIRKNQFNLEDPHQKELF | | |
| R732C); linker | LAMLMTACDLSAITKPWPIQQRIAELVATEFFDQGDRERKELNIEPTDLMNREKK | | |
| (SG); AcGFP | NKIPSMQVGFIDAICLQLYEALTHVSSGVSKGAELFTGIVPILIELNGDVNGHKFSV | | |
| (Amino acid 2-239 | SGEGEGDATYGKLTLKFICTTGKLPVPWPTLVTTLSYGVQCFSRYPDHMKQHDFF | | |
| of WT); stop) | KSAMPEGYIQERTIFFEDDGNYKSRAEVKFEGDTLVNRIELTGTDFKEDGNILGNK | | |
| | MEYNYNAHNVYIMTDKAKNGIKVNFKIRHNIEDGSVQLADHYQQNTPIGDGPVL | | |
| | LPDNHYLSTQSALSKDPNEKRDHMIYFGFVTAAAITHGMDELYK* | | |
| OT-001250 (hPDE5 | MKHEVLCRWILSVKKNYRKNVAYHNWRHAFNTAQCMFAALKAGKIQNKLTDL | 204 | 222 |
| (Amino acid 590- | EILALLIAALSHDLDHRGVNNSYIQRSEHPLAQLYCHSIMEHHHEDQCLMILNSPG | | |
| 836 of WT, | NQILSGLSILEEKTTLKIIKQAILATDLALYIKRKGEFFELIRKNQFNLEDPHQKELF | | |
| R732K); linker | LAMLMTACDLSAITKPWPIQQRIAELVATEFFDQGDRERKELNIEPTDLMNREKK | | |
| (SG); AcGFP | NKIPSMQVGFIDAICLQLYEALTHVSSGVSKGAELFTGIVPILIELNGDVNGHKFSV | | |
| (Amino acid 2-239 | SGEGEGDATYGKLTLKFICTTGKLPVPWPTLVTTLSYGVQCFSRYPDHMKQHDFF | | |
| of WT); stop) | KSAMPEGYIQERTIFFEDDGNYKSRAEVKFEGDTLVNRIELTGTDFKEDGNILGNK | | |
| | MEYNYNAHNVYIMTDKAKNGIKVNFKIRHNIEDGSVQLADHYQQNTPIGDGPVL | | |
| | LPDNHYLSTQSALSKDPNEKRDHMIYEGFVTAAAITHGMDELYK* | | |
| OT-001186 | MEETRELQSLAAAVVPSAQTLKITDFSFSDFELSDLETALCTIRMFTDLNLVQNFQ | 430 | 467 |
| (Methionine; | MKHEVLCRWILSVKKNYRKNVAYHNWRHAFNTAQCMFAALKAGKIQNKLTDL | | |
| (hPDE5 (Amino | EILALLIAALSHDLDHRGVNNSYIQRSEHPLAQLYCHSIMEHHHFDQCLMILNSPG | | |
| acid 535-860 of | NQILSGLSIEEYKTTLKIIKQAILATDLALYIKRGGEFFELIRKNQFNLEDPHQKELF | | |
| WT, R732G); linker | LAMLMTACDLSAITKPWPIQQRIAELVATEFFDQGDRERKELNIEPTDLMNREKK | | |
| (SG); AcGFP | NKIPSMQVGFIDAICLQLYEALTHVSEDCFPLLDGCRKNRQKWQALAEQQSGVSK | | |
| (Amino acid 2-239 | GAELFTGIVPILIELNGDVNGHKFSVSGEGEGDATYGKLTLKFICTTGKLPVPWPT | | |
| of WT); stop) | LVTTLSYGVQCFSRYPDHMKQHDFFKSAMPEGYIQERTIFFEDDGNYKSRAEVKF | | |
| | EGDTLVNRIELTGTDFKEDGNILGNKMEYNYNAHNVYIMTDKAKNGIKVNFKIR | | |
| | HNIEDGSVQLADHYQQNTPIGDGPVLLPDNHYLSTQSALSKDPNEKRDHMIYFGF | | |
| | VTAAAITHGMDELYK* | | |
| OT-001187 | MEETRELQSLAAAVVPSAQTLKITDFSFSDFELSDLETALCTIRMFTDLNLVQNFQ | 431 | 468 |
| (Methionine; | MKHEVLCRWILSVKKNYRKNVAYHNWRHAFNTAQCMFAALKAGKIQNKLTDL | | |
| (hPDE5 (Amino | EILALLIAALSHDLDHRGVNNSYIQRSEHPLAQLYCHSIMEHHHFDQCLMILNSPG | | |
| acid 535-860 of | NQILSGLSIEEYKTTLKIIKQAILATDLALYIKRAGEFFELIRKNQFNLEDPHQKELF | | |
| WT, R732A); linker | LAMLMTACDLSAITKPWPIQQRIAELVATEFFDQGDRERKELNIEPTDLMNREKK | | |
| (SG); AcGFP | NKIPSMQVGFIDAICLQLYEALTHVSEDCFPLLDGCRKNRQKWQALAEQQSGVSK | | |
| (Amino acid 2-239 | GAELFTGIVPILIELNGDVNGHKFSVSGEGEGDATYGKLTLKFICTTGKLPVPWPT | | |
| of WT); stop) | LVTTLSYGVQCFSRYPDHMKQHDFFKSAMPEGYIQERTIFFEDDGNYKSRAEVKF | | |
| | EGDTLVNRIELTGTDFKEDGNILGNKMEYNYNAHNVYIMTDKAKNGIKVNFKIR | | |
| | HNIEDGSVQLADHYQQNTPIGDGPVLLPDNHYLSTQSALSKDPNEKRDHMIYFGF | | |
| | VTAAAITHGMDELYK* | | |
| OT-001188 | MEETRELQSLAAAVVPSAQTLKITDFSFSDFELSDLETALCTIRMFTDLNLVQNFQ | 432 | 469 |
| (Methionine; | MKHEVLCRWILSVKKNYRKNVAYHNWRHAFNTAQCMFAALKAGKIQNKLTDL | | |
| (hPDE5 (Amino | EILALLIAALSHDLDHRGVNNSYIQRSEHPLAQLYCHSIMEHHHFDQCLMILNSPG | | |
| acid 535-860 of | NQILSGLSIEEYKTTLKIIKQAILATDLALYIKRVGEFFELIRKNQFNLEDPHQKELF | | |
| WT, R732V); linker | LAMLMTACDLSAITKPWPIQQRIAELVATEFFDQGDRERKELNIEPTDLMNREKK | | |
| (SG); AcGFP | NKIPSMQVGFIDAICLQLYEALTHVSEDCFPLLDGCRKNRQKWQALAEQQSGVSK | | |
| (Amino acid 2-239 | GAELFTGIVPILIELNGDVNGHKFSVSGEGEGDATYGKLTLKFICTTGKLPVPWPT | | |
| of WT); stop) | LVTTLSYGVQCFSRYPDHMKQHDFFKSAMPEGYIQERTIFFEDDGNYKSRAEVKF | | |
| | EGDTLVNRIELTGTDFKEDGNILGNKMEYNYNAHNVYIMTDKAKNGIKVNFKIR | | |
| | HNIEDGSVQLADHYQQNTPIGDGPVLLPDNHYLSTQSALSKDPNEKRDHMIYFGF | | |
| | VTAAAITHGMDELYK* | | |
| OT-001189 | MEETRELQSLAAAVVPSAQTLKITDFSFSDFELSDLETALCTIRMFTDLNLVQNFQ | 433 | 470 |
| (Methionine; | MKHEVLCRWILSVKKNYRKNVAYHNWRHAFNTAQCMFAALKAGKIQNKLTDL | | |
| (hPDE5 (Amino | EILALLIAALSHDLDHRGVNNSYIQRSEHPLAQLYCHSIMEHHHFDQCLMILNSPG | | |
| acid 535-860 of | NQILSGLSIEEYKTTLKIIKQAILATDLALYIKRIGEFFELIRKNQFNLEDPHQKELFL | | |
| WT, R732I); linker | AMLMTACDLSAITKPWPIQQRIAELVATEFFDQGDRERKELNIEPTDLMNREKKN | | |
| (SG); AcGFP | KIPSMQVGFIDAICLQLYEALTHVSEDCFPLLDGCRKNRQKWQALAEQQSGVSKG | | |
| (Amino acid 2-239 | AELFTGIVPILIELNGDVNGHKFSVSGEGEGDATYGKLTLKFICTTGKLPVPWPTL | | |
| of WT); stop) | VTTLSYGVQCFSRYPDHMKQHDFFKSAMPEGYIQERTIFFEDDGNYKSRAEVKFE | | |
| | GDTLVNRIELTGTDFKEDGNILGNKMEYNYNAHNVYIMTDKAKNGIKVNFKIRH | | |
| | NIEDGSVQLADHYQQNTPIGDGPVLLPDNHYLSTQSALSKDPNEKRDHMIYFGFV | | |
| | TAAAITHGMDELYK* | | |
| OT-001190 | MEETRELQSLAAAVVPSAQTLKITDFSFSDFELSDLETALCTIRMFTDLNLVQNFQ | 434 | 471 |
| (Methionine; | MKHEVLCRWILSVKKNYRKNVAYHNWRHAFNTAQCMFAALKAGKIQNKLTDL | | |
| (hPDE5 (Amino | EILALLIAALSHDLDHRGVNNSYIQRSEHPLAQLYCHSIMEHHHFDQCLMILNSPG | | |
| acid 535-860 of | NQILSGLSIEEYKTTLKIIKQAILATDLALYIKRPGEFFELORKNQFNLEDPHQKELFL | | |
| WT, R732P); linker | AMLMTACDLSAITKPWPIQQRIAELVATEFFDQGDRERKELNIEPTDLMNREKKN | | |
| (SG); AcGFP | KIPSMQVGFIDAICLQLYEALTHVSEDCFPLLDGCRKNRQKWQALAEQQSGVSKG | | |
| (Amino acid 2-239 | AELFTGIVPILIELNGDVNGHKESVSGEGEGDATYGKLTLKFICTTGKLPVPWPTL | | |
| of WT); stop) | VTTLSYGVQCFSRYPDHMKQHDFFKSAMPEGYIQERTIFFEDDGNYKSRAEVKFE | | |
| | GDTLVNRIELTGTDEKEDGNILGNKMEYNYNAHNVYIMTDKAKNGIKVNFKIRH | | |
| | NIEDGSVQLADHYQQNTPIGDGPVLLPDNHYLSTQSALSKDPNEKRDHMIYFGFV | | |
| | TAAAITHGMDELYK* | | |
| OT-001191 | MEETRELQSLAAAVVPSAQTLKITDFSFSDFELSDLETALCTIRMFTDLNLVQNFQ | 435 | 472 |
| (Methionine; | MKHEVLCRWILSVKKNYRKNVAYHNWRHAFNTAQCMFAALKAGKIQNKLTDL | | |
| (hPDE5 (Amino | EILALLIAALSHDLDHRGVNNSYIQRSEHPLAQLYCHSIMEHHHFDQCLMILNSPG | | |
| acid 535-860 of | NQILSGLSIEEYKTTLKIIKQAILATDLALYIKRFGEFFELIRKNQFNLEDPHQKELFL | | |
| WT, R732F); linker | AMLMTACDLSAITKPWPIQQRIAELVATEFFDQGDRERKELNIEPTDLMNREKKN | | |
| (SG); AcGFP | KIPSMQVGFIDAICLQLYEALTHVSEDCFPLLDGCRKNRQKWQALAEQQSGVSKG | | |
| (Amino acid 2-239 | AELFTGIVPILIELNGDVNGHKFSVSGEGEGDATYGKLTLKFICTTGKLPVPWPTL | | |
| of WT); stop) | VTTLSYGVQCFSRYPDHMKQHDFFKSAMPEGYIQERTIFFEDDGNYKSRAEVKFE | | |
| | GDTLVNRIELTGTDFKEDGNILGNKMEYNYNAHNVYIMTDKAKNGIKVNFKIRH | | |
| | NIEDGSVQLADHYQQNTPIGDGPVLLPDNHYLSTQSALSKDPNEKRDHMIYFGFV | | |
| | TAAAITHGMDELYK* | | |
| OT-001192 | MEETRELQSLAAAVVPSAQTLKITDFSFSDFELSDLETALCTIRMFTDLNLVQNFQ | 436 | 473 |
| (Methionine; | MKHEVLCRWILSVKKNYRKNVAYHNWRHAFNTAQCMFAALKAGKIQNKLTDL | | |
| (hPDE5 (Amino | EILALLIAALSHDLDHRGVNNSYIQRSEHPLAQLYCHSIMEHHHFDQCLMILNSPG | | |
| acid 535-860 of | NQILSGLSIEEYKTTLKIIKQAILATDLALYIKRWGEFFELIRKNQFNLEDPHQKELF | | |
| WT, R732W); | LAMLMTACDLSAITKPWPIQQRIAELVATEFFDQGDRERKELNIEPTDLMNREKK | | |
| linker (SG); AcGFP | NKIPSMQVGFIDAICLQLYEALTHVSEDCFPLLDGCRKNRQKWQALAEQQSGVSK | | |
| (Amino acid 2-239 | GAELFTGIVPILIELNGDVNGHKFSVSGEGEGDATYGKLTLKFICTTGKLPVPWPT | | |
| of WT); stop) | LVTTLSYGVQCFSRYPDHMKQHDFFKSAMPEGYIQERTIFFEDDGNYKSRAEVKF | | |
| | EGDTLVNRIELTGTDFKEDGNILGNKMEYNYNAHNVYIMTDKAKNGIKVNFKIR | | |
| | HNIEDGSVQLADHYQQNTPIGDGPVLLPDNHYLSTQSALSKDPNEKRDHMIYFGF | | |
| | VTAAAITHGMDELYK* | | |
| OT-001193 | MEETRELQSLAAAVVPSAQTLKITDFSFSDFELSDLETALCTIRMFTDLNLVQNFQ | 437 | 474 |
| (Methionine; | MKHEVLCRWILSVKKNYRKNVAYHNWRHAFNTAQCMFAALKAGKIQNKLTDL | | |
| (hPDE5 (Amino | EILALLIAALSHDLDHRGVNNSYIQRSEHPLAQLYCHSIMEHHHFDQCLMILNSPG | | |
| acid 535-860 of | NQILSGLSIEEYKTTLKIIKQAILATDLALYIKRYGEFFELIRKNQFNLEDPHQKELF | | |
| WT, R732Y); linker | LAMLMTACDLSAITKPWPIQQRIAELVATEFFDQGDRERKELNIEPTDLMNREKK | | |
| (SG); AcGFP | NKIPSMQVGFIDAICLQLYEALTHVSEDCFPLLDGCRKNRQKWQALAEQQSGVSK | | |
| (Amino acid 2-239 | GAELFTGIVPILIELNGDVNGHKESVSGEGEGDATYGKLTLKFICTTGKLPVPWPT | | |
| of WT); stop) | LVTTLSYGVQCFSRYPDHMKQHDFFKSAMPEGYIQERTIFFEDDGNYKSRAEVKF | | |
| | EGDTLVNRIELTGTDFKEDGNILGNKMEYNYNAHNVYIMTDKAKNGIKVNFKIR | | |
| | HNIEDGSVQLADHYQQNTPIGDGPVLLPDNHYLSTQSALSKDPNEKRDHMIYFGF | | |
| | VTAAAITHGMDELYK* | | |
| OT-001195 | MEETRELQSLAAAVVPSAQTLKITDFSFSDFELSDLETALCTIRMFTDLNLVQNFQ | 438 | 475 |
| (Methionine; | MKHEVLCRWILSVKKNYRKNVAYHNWRHAFNTAQCMFAALKAGKIQNKLTDL | | |
| (hPDE5 (Amino | EILALLIAALSHDLDHRGVNNSYIQRSEHPLAQLYCHSIMEHHHFDQCLMILNSPG | | |
| acid 535-860 of | NQILSGLSIEEYKTTLKIIKQAILATDLALYIKRHGEFFELIRKNQFNLEDPHQKELF | | |
| WT, R732I4); linker | LAMLMTACDLSAITKPWPIQQRIAELVATEFFDQGDRERKELNIEPTDLMNREKK | | |
| (SG); AcGFP | NKIPSMQVGFIDAICLQLYEALTHVSEDCFPLLDGCRKNRQKWQALAEQQSGVSK | | |
| (Amino acid 2-239 | GAELFTGIVPILIELNGDVNGHKFSVSGEGEGDATYGKLTLKFICTTGKLPVPWPT | | |
| of WT); stop) | LVTTLSYGVQCFSRYPDHMKQHDFFKSAMPEGYIQERTIFFEDDGNYKSRAEVKF | | |
| | EGDTLVNRIELTGTDFKEDGNILGNKMEYNYNAHNVYIMTDKAKNGIKVNFKIR | | |
| | HNIEDGSVQLADHYQQNTPIGDGPVLLPDNHYLSTQSALSKDPNEKRDHMIYFGF | | |
| | VTAAAITHGMDELYK* | | |
| OT-001196 | MEETRELQSLAAAVVPSAQTLKITDFSFSDFELSDLETALCTIRMFTDLNLVQNFQ | 439 | 476 |
| (Methionine; | MKHEVLCRWILSVKKNYRKNVAYHNWRHAFNTAQCMFAALKAGKIQNKLTDL | | |
| (hPDE5 (Amino | EILALLIAALSHDLDHRGVNNSYIQRSEHPLAQLYCHSIMEHHHFDQCLMILNSPG | | |
| acid 535-860 of | NQILSGLSIEEYKTTLKIIKQAILATDLALYIKRSGEFFELIRKNQFNLEDPHQKELFL | | |
| WT, R732S); linker | AMLMTACDLSAITKPWPIQQRIAELVATEFFDQGDRERKELNIEPTDLMNREKKN | | |
| (SG); AcGFP | KIPSMQVGFIDAICLQLYEALTHVSEDCFPLLDGCRKNRQKWQALAEQQSGVSKG | | |
| (Amino acid 2-239 | AELFTGIVPILIELNGDVNGHKESVSGEGEGDATYGKLTLKFICTTGKLPVPWPTL | | |
| of WT); stop) | VTTLSYGVQCFSRYPDHMKQHDFFKSAMPEGYIQERTIFFEDDGNYKSRAEVKFE | | |
| | GDTLVNRIELTGTDFKEDGNILGNKMEYNYNAHNVYIMTDKAKNGIKVNFKIRH | | |
| | NIEDGSVQLADHYQQNTPIGDGPVLLPDNHYLSTQSALSKDPNEKRDHMIYFGFV | | |
| | TAAAITHGMDELYK* | | |
| OT-001197 | MEETRELQSLAAAVVPSAQTLKITDFSFSDFELSDLETALCTIRMFTDLNLVQNFQ | 440 | 477 |
| (Methionine; | MKHEVLCRWILSVKKNYRKNVAYHNWRHAFNTAQCMFAALKAGKIQNKLTDL | | |
| (hPDE5 (Amino | EILALLIAALSHDLDHRGVNNSYIQRSEHPLAQLYCHSIMEHHHFDQCLMILNSPG | | |
| acid 535-860 of | NQILSGLSIEEYKTTLKIIKQAILATDLALYIKRTGEFFELIRKNQFNLEDPHQKELF | | |
| WT, R732T); linker | LAMLMTACDLSAITKPWPIQQRIAELVATEFFDQGDRERKELNIEPTDLMNREKK | | |
| (SG); AcGEP | NKIPSMQVGFIDAICLQLYEALTHVSEDCFPLLDGCRKNRQKWQALAEQQSGVSK | | |
| (Amino acid 2-239 | GAELFTGIVPILIELNGDVNGHKFSVSGEGEGDATYGKLTLKFICTTGKLPVPWPT | | |
| of WT); stop) | LVTTLSYGVQCFSRYPDHMKQHDFFKSAMPEGYIQERTIFFEDDGNYKSRAEVKF | | |
| | EGDTLVNRIELTGTDFKEDGNILGNKMEYNYNAHNVYIMTDKAKNGIKVNFKIR | | |
| | HNIEDGSVQLADHYQQNTPIGDGPVLLPDNHYLSTQSALSKDPNEKRDHMIYFGF | | |
| | VTAAAITHGMDELYK* | | |
| OT-001198 | MEETRELQSLAAAVVPSAQTLKITDFSFSDFELSDLETALCTIRMFTDLNLVQNFQ | 441 | 478 |
| (Methionine; | MKHEVLCRWILSVKKNYRKNVAYHNWRHAFNTAQCMFAALKAGKIQNKLTDL | | |
| (hPDE5 (Amino | EILALLIAALSHDLDHRGVNNSYIQRSEHPLAQLYCHSIMEHHHFDQCLMILNSPG | | |
| acid 535-860 of | NQILSGLSIEEYKTTLKIIKQAILATDLALYIKRDGEFFELIRKNQFNLEDPHQKELF | | |
| WT, R732D); linker | LAMLMTACDLSAITKPWPIQQRIAELVATEFFDQGDRERKELNIEPTDLMNREKK | | |
| (SG); AcGEP | NKIPSMQVGFIDAICLQLYEALTHVSEDCFPLLDGCRKNRQKWQALAEQQSGVSK | | |
| (Amino acid 2-239 | GAELFTGIVPILIELNGDVNGHKFSVSGEGEGDATYGKLTLKFICTTGKLPVPWPT | | |
| of WT); stop) | LVTTLSYGVQCFSRYPDHMKQHDFFKSAMPEGYIQERTIFFEDDGNYKSRAEVKF | | |
| | EGDTLVNRIELTGTDEKEDGNILGNKMEYNYNAHNVYIMTDKAKNGIKVNFKIR | | |
| | HNIEDGSVQLADHYQQNTPIGDGPVLLPDNHYLSTQSALSKDPNEKRDHMIYFGF | | |
| | VTAAAITHGMDELYK* | | |
| OT-001199 | MEETRELQSLAAAVVPSAQTLKITDFSFSDFELSDLETALCTIRMFTDLNLVQNFQ | 442 | 479 |
| (Methionine; | MKHEVLCRWILSVKKNYRKNVAYHNWRHAFNTAQCMFAALKAGKIQNKLTDL | | |
| (hPDE5 (Amino | EILALLIAALSHDLDHRGVNNSYIQRSEHPLAQLYCHSIMEHHHFDQCLMILNSPG | | |
| acid 535-860 of | NQILSGLSIEEYKTTLKIIKQAILATDLALYIKREGEFFELIRKNQFNLEDPHQKELF | | |
| WT, R732E); linker | LAMLMTACDLSAITKPWPIQQRIAELVATEFFDQGDRERKELNIEPTDLMNREKK | | |
| (SG); AcGEP | NKIPSMQVGFIDAICLQLYEALTHVSEDCFPLLDGCRKNRQKWQALAEQQSGVSK | | |
| (Amino acid 2-239 | GAELFTGIVPILIELNGDVNGHKFSVSGEGEGDATYGKLTLKFICTTGKLPVPWPT | | |
| of WT); stop) | LVTTLSYGVQCFSRYPDHMKQHDFFKSAMPEGYIQERTIFFEDDGNYKSRAEVKF | | |
| | EGDTLVNRIELTGTDFKEDGNILGNKMEYNYNAHNVYIMTDKAKNGIKVNFKIR | | |
| | HNIEDGSVQLADHYQQNTPIGDGPVLLPDNHYLSTQSALSKDPNEKRDHMIYFGF | | |
| | VTAAAITHGMDELYK* | | |
| OT-001200 | MEETRELQSLAAAVVPSAQTLKITDFSFSDFELSDLETALCTIRMFTDLNLVQNFQ | 443 | 480 |
| (Methionine; | MKHEVLCRWILSVKKNYRKNVAYHNWRHAFNTAQCMFAALKAGKIQNKLTDL | | |
| (hPDE5 (Amino | EILALLIAALSHDLDHRGVNNSYIQRSEHPLAQLYCHSIMEHHHFDQCLMILNSPG | | |
| acid 535-860 of | NQILSGLSIEEYKTTLKIIKQAILATDLALYIKRQGEFFELIRKNQFNLEDPHQKELF | | |
| WT, R732Q); linker | LAMLMTACDLSAITKPWPIQQRIAELVATEFFDQGDRERKELNIEPTDLMNREKK | | |
| (SG); AcGEP | NKIPSMQVGFIDAICLQLYEALTHVSEDCFPLLDGCRKNRQKWQALAEQQSGVSK | | |
| (Amino acid 2-239 | GAELFTGIVPILIELNGDVNGHKFSVSGEGEGDATYGKLTLKFICTTGKLPVPWPT | | |
| of WT); stop) | LVTTLSYGVQCFSRYPDHMKQHDFFKSAMPEGYIQERTIFFEDDGNYKSRAEVKF | | |
| | EGDTLVNRIELTGTDFKEDGNILGNKMEYNYNAHNVYIMTDKAKNGIKVNFKIR | | |
| | HNIEDGSVQLADHYQQNTPIGDGPVLLPDNHYLSTQSALSKDPNEKRDHMIYFGF | | |
| | VTAAAITHGMDELYK* | | |
| OT-001201 | MEETRELQSLAAAVVPSAQTLKITDFSFSDFELSDLETALCTIRMFTDLNLVQNFQ | 444 | 481 |
| (Methionine; | MKHEVLCRWILSVKKNYRKNVAYHNWRHAFNTAQCMFAALKAGKIQNKLTDL | | |
| (hPDE5 (Amino | EILALLIAALSHDLDHRGVNNSYIQRSEHPLAQLYCHSIMEHHHFDQCLMILNSPG | | |
| acid 535-860 of | NQILSGLSIEEYKTTLKIIKQAILATDLALYIKRNGEFFELIRKNQFNLEDPHQKELF | | |
| WT, R732N); linker | LAMLMTACDLSAITKPWPIQQRIAELVATEFFDQGDRERKELNIEPTDLMNREKK | | |
| (SG); AcGFP | NKIPSMQVGFIDAICLQLYEALTHVSEDCFPLLDGCRKNRQKWQALAEQQSGVSK | | |
| (Amino acid 2-239 | GAELFTGIVPILIELNGDVNGHKFSVSGEGEGDATYGKLTLKFICTTGKLPVPWPT | | |
| of WT); stop) | LVTTLSYGVQCFSRYPDHMKQHDFFKSAMPEGYIQERTIFFEDDGNYKSRAEVKF | | |
| | EGDTLVNRIELTGTDFKEDGNILGNKMEYNYNAHNVYIMTDKAKNGIKVNFKIR | | |
| | HNIEDGSVQLADHYQQNTPIGDGPVLLPDNHYLSTQSALSKDPNEKRDHMIYFGF | | |
| | VTAAAITHGMDELYK* | | |
| OT-001202 | MEETRELQSLAAAVVPSAQTLKITDFSFSDFELSDLETALCTIRMFTDLNLVQNFQ | 445 | 482 |
| (Methionine; | MKHEVLCRWILSVKKNYRKNVAYHNWRHAFNTAQCMFAALKAGKIQNKLTDL | | |
| (hPDE5 (Amino | EILALLIAALSHDLDHRGVNNSYIQRSEHPLAQLYCHSIMEHHHFDQCLMILNSPG | | |
| acid 535-860 of | NQILSGLSIEEYKTTLKIIKQAILATDLALYIKRMGEFFELIRKNQFNLEDPHQKELF | | |
| WT, R732M); | LAMLMTACDLSAITKPWPIQQRIAELVATEFFDQGDRERKELNIEPTDLMNREKK | | |
| linker (SG); AcGFP | NKIPSMQVGFIDAICLQLYEALTHVSEDCFPLLDGCRKNRQKWQALAEQQSGVSK | | |
| (Amino acid 2-239 | GAELFTGIVPILIELNGDVNGHKFSVSGEGEGDATYGKLTLKFICTTGKLPVPWPT | | |
| of WT); stop) | LVTTLSYGVQCFSRYPDHMKQHDFFKSAMPEGYIQERTIFFEDDGNYKSRAEVKF | | |
| | EGDTLVNRIELTGTDEKEDGNILGNKMEYNYNAHNVYIMTDKAKNGIKVNFKIR | | |
| | HNIEDGSVQLADHYQQNTPIGDGPVLLPDNHYLSTQSALSKDPNEKRDHMIYFGF | | |
| | VTAAAITHGMDELYK* | | |
| OT-001203 | MEETRELQSLAAAVVPSAQTLKITDFSFSDFELSDLETALCTIRMFTDLNLVQNFQ | 446 | 483 |
| (Methionine; | MKHEVLCRWILSVKKNYRKNVAYHNWRHAFNTAQCMFAALKAGKIQNKLTDL | | |
| (hPDE5 (Amino | EILALLIAALSHDLDHRGVNNSYIQRSEHPLAQLYCHSIMEHHHFDQCLMILNSPG | | |
| acid 535-860 of | NQILSGLSIEEYKTTLKIIKQAILATDLALYIKRCGEFFELIRKNQFNLEDPHQKELF | | |
| WT, R732C); linker | LAMLMTACDLSAITKPWPIQQRIAELVATEFFDQGDRERKELNIEPTDLMNREKK | | |
| (SG); AcGFP | NKIPSMQVGFIDAICLQLYEALTHVSEDCFPLLDGCRKNRQKWQALAEQQSGVSK | | |
| (Amino acid 2-239 | GAELFTGIVPILIELNGDVNGHKESVSGEGEGDATYGKLTLKFICTTGKLPVPWPT | | |
| of WT); stop) | LVTTLSYGVQCFSRYPDHMKQHDFFKSAMPEGYIQERTIFFEDDGNYKSRAEVKF | | |
| | EGDTLVNRIELTGTDFKEDGNILGNKMEYNYNAHNVYIMTDKAKNGIKVNFKIR | | |
| | HNIEDGSVQLADHYQQNTPIGDGPVLLPDNHYLSTQSALSKDPNEKRDHMIYFGF | | |
| | VTAAAITHGMDELYK* | | |
| OT-001204 | MEETRELQSLAAAVVPSAQTLKITDFSFSDFELSDLETALCTIRMFTDLNLVQNFQ | 447 | 484 |
| (Methionine; | MKHEVLCRWILSVKKNYRKNVAYHNWRHAFNTAQCMFAALKAGKIQNKLTDL | | |
| (hPDE5 (Amino | EILALLIAALSHDLDHRGVNNSYIQRSEHPLAQLYCHSIMEHHHFDQCLMILNSPG | | |
| acid 535-860 of | NQILSGLSIEEYKTTLKIIKQAILATDLALYIKRKGEFFELIRKNQFNLEDPHQKELF | | |
| WT, R732K); linker | LAMLMTACDLSAITKPWPIQQRIAELVATEFFDQGDRERKELNIEPTDLMNREKK | | |
| (SG); AcGFP | NKIPSMQVGFIDAICLQLYEALTHVSEDCFPLLDGCRKNRQKWQALAEQQSGVSK | | |
| (Amino acid 2-239 | GAELFTGIVPILIELNGDVNGHKFSVSGEGEGDATYGKLTLKFICTTGKLPVPWPT | | |
| of WT); stop) | LVTTLSYGVQCFSRYPDHMKQHDFFKSAMPEGYIQERTIFFEDDGNYKSRAEVKF | | |
| | EGDTLVNRIELTGTDFKEDGNILGNKMEYNYNAHNVYIMTDKAKNGIKVNFKIR | | |
| | HNIEDGSVQLADHYQQNTPIGDGPVLLPDNHYLSTQSALSKDPNEKRDHMIYFGF | | |
| | VTAAAITHGMDELYK* | | |
| OT-001279 | MVSKGAELFTGIVPILIELNGDVNGHKFSVSGEGEGDATYGKLTLKFICTTGKLPV | 448 | 485 |
| (AcGFP (Amino | PWPTLVTTLSYGVQCFSRYPDHMKQHDFFKSAMPEGYIQERTIFFEDDGNYKSRA | | |
| acid 1-239 of WT); | EVKFEGDTLVNRIELTGTDFKEDGNILGNKMEYNYNAHNVYIMTDKAKNGIKVN | | |
| linker (GS); | FKIRHNIEDGSVQLADHYQQNTPIGDGPVLLPDNHYLSTQSALSKDPNEKRDHMI | | |
| (hPDE5 (Amino | YFGFVTAAAITHGMDELYKGSEETRELQSLAAAVVPSAQTLKITDFSFSDFELSDL | | |
| acid 535-860 of | ETALCTIRMFTDLNLVQNFQMKREVLCRWILSVKKNYRKNVAYHNWRHAFNTA | | |
| WT, R732G); Xba I | QCMFAALKAGKIQNKLTDLEILALLIAALSHDLDHRGVNNSYIQRSEHPLAQLYC | | |
| site (TCTAGA); | HSIMEHHHFDQCLMILNSPGNQILSGLSIEEYKTTLKIIKQAILATDLALYIKRGGEF | | |
| stop) | FELIRKNQFNLEDPHQKELFLAMLMTACDLSAITKPWPIQQRIAELVATEFFDQGD | | |
| | RERKELNIEPTDLMNREKKNKIPSMQVGFIDAICLQLYEALTHVSEDCFPLLDGCR | | |
| | KNRQKWQALAEQQSR* | | |
| OT-001280 | MVSKGAELFTGIVPILIELNGDVNGHKFSVSGEGEGDATYGKLTLKFICTTGKLPV | 449 | 486 |
| (AcGFP (Amino | PWPTLVTTLSYGVQCFSRYPDHMKQHDFFKSAMPEGYIQERTIFFEDDGNYKSRA | | |
| acid 1-239 of WT); | EVKFEGDTLVNRIELTGTDFKEDGNILGNKMEYNYNAHNVYIMTDKAKNGIKVN | | |
| linker (GS); | FKIRHNIEDGSVQLADHYQQNTPIGDGPVLLPDNHYLSTQSALSKDPNEKRDHMI | | |
| (hPDE5 (Amino | YFGFVTAAAITHGMDELYKGSEETRELQSLAAAVVPSAQTLKITDFSFSDFELSDL | | |
| acid 535-860 of | ETALCTIRMFTDLNLVQNFQMKREVLCRWILSVKKNYRKNVAYHNWRHAFNTA | | |
| WT, R732A); Xba I | QCMFAALKAGKIQNKLTDLEILALLIAALSHDLDHRGVNNSYIQRSEHPLAQLYC | | |
| site (TCTAGA); | HSIMEHHHFDQCLMILNSPGNQILSGLSIEEYKTTLKIIKQAILATDLALYIKRAGEF | | |
| stop) | FELIRKNQFNLEDPHQKELFLAMLMTACDLSAITKPWPIQQRIAELVATEFFDQGD | | |
| | RERKELNIEPTDLMNREKKNKIPSMQVGFIDAICLQLYEALTHVSEDCFPLLDGCR | | |
| | KNRQKWQALAEQQSR* | | |
| OT-001281 | MVSKGAELFTGIVPILIELNGDVNGHKFSVSGEGEGDATYGKLTLKFICTTGKLPV | 450 | 487 |
| (AcGFP (Amino | PWPTLVTTLSYGVQCFSRYPDHMKQHDFFKSAMPEGYIQERTIFFEDDGNYKSRA | | |
| acid 1-239 of WT); | EVKFEGDTLVNRIELTGTDFKEDGNILGNKMEYNYNAHNVYIMTDKAKNGIKVN | | |
| linker (GS); | FKIRHNIEDGSVQLADHYQQNTPIGDGPVLLPDNHYLSTQSALSKDPNEKRDHMI | | |
| (hPDE5 (Amino | YFGFVTAAAITHGMDELYKGSEETRELQSLAAAVVPSAQTLKITDFSFSDFELSDL | | |
| acid 535-860 of | ETALCTIRMFTDLNLVQNFQMKHEVLCRWILSVKKNYRKNVAYHNWRHAFNTA | | |
| WT, R732L); Xba I | QCMFAALKAGKIQNKLTDLEILALLIAALSHDLDHRGVNNSYIQRSEHPLAQLYC | | |
| site (TCTAGA); | HSIMEHHHFDQCLMILNSPGNQILSGLSIEEYKTTLKIIKQAILATDLALYIKRLGEF | | |
| stop) | FELIRKNQFNLEDPHQKELFLAMLMTACDLSAITKPWPIQQRIAELVATEFFDQGD | | |
| | RERKELNIEPTDLMNREKKNKIPSMQVGFIDAICLQLYEALTHVSEDCFPLLDGCR | | |
| | KNRQKWQALAEQQSR* | | |
| OT-001282 | MVSKGAELFTGIVPILIELNGDVNGHKESVSGEGEGDATYGKLTLKFICTTGKLPV | 451 | 488 |
| (AcGFP (Amino | PWPTLVTTLSYGVQCFSRYPDHMKQHDFFKSAMPEGYIQERTIFFEDDGNYKSRA | | |
| acid 1-239 of WT); | EVKFEGDTLVNRIELTGTDFKEDGNILGNKMEYNYNAHNVYIMTDKAKNGIKVN | | |
| linker (GS); | FKIRHNIEDGSVQLADHYQQNTPIGDGPVLLPDNHYLSTQSALSKDPNEKRDHMI | | |
| (hPDE5 (Amino | YFGFVTAAAITHGMDELYKGSEETRELQSLAAAVVPSAQTLKITDFSFSDFELSDL | | |
| acid 535-860 of | ETALCTIRMFTDLNLVQNFQMKHEVLCRWILSVKKNYRKNVAYHNWRHAFNTA | | |
| WT, R732M); Xba | QCMFAALKAGKIQNKLTDLEILALLIAALSHDLDHRGVNNSYIQRSEHPLAQLYC | | |
| I site (TCTAGA); | HSIMEHHHFDQCLMILNSPGNQILGLSIEEYKTTLKIIKQAILATDLALYIKRMGEF | | |
| stop) | FELIRKNQFNLEDPHQKELFLAMLMTACDLSAITKPWPIQQRIAELVATEFFDQGD | | |
| | RERKELNIEPTDLMNREKKNKIPSMQVGFIDAICLQLYEALTHVSEDCFPLLDGCR | | |
| | KNRQKWQALAEQQSR* | | |
| OT-001283 | MVSKGAELFTGIVPILIELNGDVNGHKFSVSGEGEGDATYGKLTLKFICTTGKLPV | 452 | 489 |
| (AcGFP (Amino | PWPTLVTTLSYGVQCFSRYPDHMKQHDFFKSAMPEGYIQERTIFFEDDGNYKSRA | | |
| acid 1-239 of WT); | EVKFEGDTLVNRIELTGTDFKEDGNILGNKMEYNYNAHNVYIMTDKAKNGIKVN | | |
| linker (GS); | FKIRHNIEDGSVQLADHYQQNTPIGDGPVLLPDNHYLSTQSALSKDPNEKRDHMI | | |
| (hPDE5 (Amino | YFGFVTAAAITHGMDELYKGSEETRELQSLAAAVVPSAQTLKITDFSFSDFELSDL | | |
| acid 535-860 of | ETALCTIRMFTDLNLVQNFQMKHEVLCRWILSVKKNYRKNVAYHNWRHAFNTA | | |
| WT, R732F); Xba I | QCMFAALKAGKIQNKLTDLEILALLIAALSHDLDHRGVNNSYIQRSEHPLAQLYC | | |
| site (TCTAGA); | HSIMEHHHFDQCLMILNSPGNQILSGLSIEEYKTTLKIIKQAILATDLALYIKRFGEF | | |
| stop) | FELIRKNQFNLEDPHQKELFLAMLMTACDLSAITKPWPIQQRIAELVATEFFDQGD | | |
| | RERKELNIEPTDLMNREKKNKIPSMQVGFIDAICLQLYEALTHVSEDCFPLLDGCR | | |
| | KNRQKWQALAEQQSR* | | |
| OT-001284 | MVSKGAELFTGIVPILIELNGDVNGHKFSVSGEGEGDATYGKLTLKFICTTGKLPV | 453 | 490 |
| (AcGFP (Amino | PWPTLVTTLSYGVQCFSRYPDHMKQHDFFKSAMPEGYIQERTIFFEDDGNYKSRA | | |
| acid 1-239 of WT); | EVKFEGDTLVNRIELTGTDFKEDGNILGNKMEYNYNAHNVYIMTDKAKNGIKVN | | |
| linker (GS); | FKIRHNIEDGSVQLADHYQQNTPIGDGPVLLPDNHYLSTQSALSKDPNEKRDHMI | | |
| (hPDE5 (Amino | YFGFVTAAAITHGMDELYKGSEETRELQSLAAAVVPSAQTLKITDFSFSDFELSDL | | |
| acid 535-860 of | ETALCTIRMFTDLNLVQNFQMKHEVLCRWILSVKKNYRKNVAYHNWRHAFNTA | | |
| WT, R732W); Xba | QCMFAALKAGKIQNKLTDLEILALLIAALSHDLDHRGVNNSYIQRSEHPLAQLYC | | |
| I site (TCTAGA); | HSIMEHHHFDQCLMILNSPGNQILSGLSIEEYKTTLKIIKQAILATDLALYIKRWGE | | |
| stop) | FFELIRKNQFNLEDPHQKELFLAMLMTACDLSAITKPWPIQQRIAELVATEFFDQG | | |
| | DRERKELNIEPTDLMNREKKNKIPSMQVGFIDAICLQLYEALTHVSEDCFPLLDGC | | |
| | RKNRQKWQALAEQQSR* | | |
| OT-001285 | MVSKGAELFTGIVPILIELNGDVNGHKFSVSGEGEGDATYGKLTLKFICTTGKLPV | 454 | 491 |
| (AcGFP (Amino | PWPTLVTTLSYGVQCFSRYPDHMKQHDFFKSAMPEGYIQERTIFFEDDGNYKSRA | | |
| acid 1-239 of WT); | EVKFEGDTLVNRIELTGTDFKEDGNILGNKMEYNYNAHNVYIMTDKAKNGIKVN | | |
| linker (GS); | FKIRHNIEDGSVQLADHYQQNTPIGDGPVLLPDNHYLSTQSALSKDPNEKRDHMI | | |
| (hPDE5 (Amino | YFGFVTAAAITHGMDELYKGSEETRELQSLAAAVVPSAQTLKITDFSFSDFELSDL | | |
| acid 535-860 of | ETALCTIRMFTDLNLVQNFQMKHEVLCRWILSVKKNYRKNVAYHNWRHAFNTA | | |
| WT, R732K); Xba I | QCMFAALKAGKIQNKLTDLEILALLIAALSHDLDHRGVNNSYIQRSEHPLAQLYC | | |
| site (TCTAGA); | HSIMEHHHFDQCLMILNSPGNQILSGLSIEEYKTTLKIIKQAILATDLALYIKRKGEF | | |
| stop) | FELIRKNQFNLEDPHQKELFLAMLMTACDLSAITKPWPIQQRIAELVATEFFDQGD | | |
| | RERKELNIEPTDLMNREKKNKIPSMQVGFIDAICLQLYEALTHVSEDCFPLLDGCR | | |
| | KNRQKWQALAEQQSR* | | |
| OT-001286 | MVSKGAELFTGIVPILIELNGDVNGHKFSVSGEGEGDATYGKLTLKFICTTGKLPV | 455 | 492 |
| (AcGFP (Amino | PWPTLVTTLSYGVQCFSRYPDHMKQHDFFKSAMPEGYIQERTIFFEDDGNYKSRA | | |
| acid 1-239 of WT); | EVKFEGDTLVNRIELTGTDFKEDGNILGNKMEYNYNAHNVYIMTDKAKNGIKVN | | |
| linker (GS); | FKIRHNIEDGSVQLADHYQQNTPIGDGPVLLPDNHYLSTQSALSKDPNEKRDHMI | | |
| (hPDE5 (Amino | YFGFVTAAAITHGMDELYKGSEETRELQSLAAAVVPSAQTLKITDFSFSDFELSDL | | |
| acid 535-860 of | ETALCTIRMFTDLNLVQNFQMKHEVLCRWILSVKKNYRKNVAYHNWRHAFNTA | | |
| WT, R732Q); Xba I | QCMFAALKAGKIQNKLTDLEILALLIAALSHDLDHRGVNNSYIQRSEHPLAQLYC | | |
| site (TCTAGA); | HSIMEHHHFDQCLMILNSPGNQILSGLSIEEYKTTLKIIKQAILATDLALYIKRQGEF | | |
| stop) | FELIRKNQFNLEDPHQKELFLAMLMTACDLSAITKPWPIQQRIAELVATEFFDQGD | | |
| | RERKELNIEPTDLMNREKKNKIPSMQVGFIDAICLQLYEALTHVSEDCFPLLDGCR | | |
| | KNRQKWQALAEQQSR* | | |
| OT-001287 | MVSKGAELFTGIVPILIELNGDVNGHKFSVSGEGEGDATYGKLTLKFICTTGKLPV | 456 | 493 |
| (AcGFP (Amino | PWPTLVTTLSYGVQCFSRYPDHMKQHDFFKSAMPEGYIQERTIFFEDDGNYKSRA | | |
| acid 1-239 of WT); | EVKFEGDTLVNRIELTGTDFKEDGNILGNKMEYNYNAHNVYIMTDKAKNGIKVN | | |
| linker (GS); | FKIRHNIEDGSVQLADHYQQNTPIGDGPVLLPDNHYLSTQSALSKDPNEKRDHMI | | |
| (hPDE5 (Amino | YFGFVTAAAITHGMDELYKGSEETRELQSLAAAVVPSAQTLKITDFSFSDFELSDL | | |
| acid 535-860 of | ETALCTIRMFTDLNLVQNFQMKHEVLCRWILSVKKNYRKNVAYHNWRHAFNTA | | |
| WT, R732E); Xba I | QCMFAALKAGKIQNKLTDLEILALLIAALSHDLDHRGVNNSYIQRSEHPLAQLYC | | |
| site (TCTAGA); | HSIMEHHHFDQCLMILNSPGNQILSGLSIEEYKTTLKIIKQAILATDLALYIKREGEF | | |
| stop) | FELIRKNQFNLEDPHQKELFLAMLMTACDLSAITKPWPIQQRIAELVATEFFDQGD | | |
| | RERKELNIEPTDLMNREKKNKIPSMQVGFIDAICLQLYEALTHVSEDCFPLLDGCR | | |
| | KNRQKWQALAEQQSR* | | |
| OT-001288 | MVSKGAELFTGIVPILIELNGDVNGHKFSVSGEGEGDATYGKLTLKFICTTGKLPV | 457 | 494 |
| (AcGFP (Amino | PWPTLVTTLSYGVQCFSRYPDHMKQHDFFKSAMPEGYIQERTIFFEDDGNYKSRA | | |
| acid 1-239 of WT); | EVKFEGDTLVNRIELTGTDEKEDGNILGNKMEYNYNAHNVYIMTDKAKNGIKVN | | |
| linker (GS); | FKIRHNIEDGSVQLADHYQQNTPIGDGPVLLPDNHYLSTQSALSKDPNEKRDHMI | | |
| (hPDE5 (Amino | YFGFVTAAAITHGMDELYKGSEETRELQSLAAAVVPSAQTLKITDFSFSDFELSDL | | |
| acid 535-860 of | ETALCTIRMFTDLNLVQNFQMKHEVLCRWILSVKKNYRKNVAYHNWRHAFNTA | | |
| WT, R732S); Xba I | QCMFAALKAGKIQNKLTDLEILALLIAALSHDLDHRGVNNSYIQRSEHPLAQLYC | | |
| site (TCTAGA); | HSIMEHHHFDQCLMILNSPGNQILSGLSIEEYKTTLKIIKQAILATDLALYIKRSGEF | | |
| stop) | FELIRKNQFNLEDPHQKELFLAMLMTACDLSAITKPWPIQQRIAELVATEFFDQGD | | |
| | RERKELNIEPTDLMNREKKNKIPSMQVGFIDAICLQLYEALTHVSEDCFPLLDGCR | | |
| | KNRQKWQALAEQQSR* | | |
| OT-001289 | MVSKGAELFTGIVPILIELNGDVNGHKFSVSGEGEGDATYGKLTLKFICTTGKLPV | 458 | 495 |
| (AcGFP (Amino | PWPTLVTTLSYGVQCFSRYPDHMKQHDFFKSAMPEGYIQERTIFFEDDGNYKSRA | | |
| acid 1-239 of WT); | EVKFEGDTLVNRIELTGTDEKEDGNILGNKMEYNYNAHNVYIMTDKAKNGIKVN | | |
| linker (GS); | FKIRHNIEDGSVQLADHYQQNTPIGDGPVLLPDNHYLSTQSALSKDPNEKRDHMI | | |
| (hPDE5 (Amino | YFGFVTAAAITHGMDELYKGSEETRELQSLAAAVVPSAQTLKITDFSFSDFELSDL | | |
| acid 535-860 of | ETALCTIRMFTDLNLVQNFQMKHEVLCRWILSVKKNYRKNVAYHNWRHAFNTA | | |
| WT, R732P); Xba I | QCMFAALKAGKIQNKLTDLEILALLIAALSHDLDHRGVNNSYIQRSEHPLAQLYC | | |
| site (TCTAGA); | HSIMEHHHFDQCLMILNSPGNQILSGLSIEEYKTTLKIIKQAILATDLALYIKRPGEF | | |
| stop) | FELIRKNQFNLEDPHQKELFLAMLMTACDLSAITKPWPIQQRIAELVATEFFDQGD | | |
| | RERKELNIEPTDLMNREKKNKIPSMQVGFIDAICLQLYEALTHVSEDCFPLLDGCR | | |
| | KNRQKWQALAEQQSR* | | |
| OT-001290 | MVSKGAELFTGIVPILIELNGDVNGHKFSVSGEGEGDATYGKLTLKFICTTGKLPV | 459 | 496 |
| (AcGFP (Amino | PWPTLVTTLSYGVQCFSRYPDHMKQHDFFKSAMPEGYIQERTIFFEDDGNYKSRA | | |
| acid 1-239 of WT); | EVKFEGDTLVNRIELTGTDFKEDGNILGNKMEYNYNAHNVYIMTDKAKNGIKVN | | |
| linker (GS); | FKIRHNIEDGSVQLADHYQQNTPIGDGPVLLPDNHYLSTQSALSKDPNEKRDHMI | | |
| (hPDE5 (Amino | YFGFVTAAAITHGMDELYKGSEETRELQSLAAAVVPSAQTLKITDFSFSDFELSDL | | |
| acid 535-860 of | ETALCTIRMFTDLNLVQNFQMKHEVLCRWILSVKKNYRKNVAYHNWRHAFNTA | | |
| WT, R732V); Xba I | QCMFAALKAGKIQNKLTDLEILALLIAALSHDLDHRGVNNSYIQRSEHPLAQLYC | | |
| site (TCTAGA); | HSIMEHHHFDQCLMILNSPGNQILSGLSIEEYKTTLKIIKQAILATDLALYIKRVGEF | | |
| stop) | FELIRKNQFNLEDPHQKELFLAMLMTACDLSAITKPWPIQQRIAELVATEFFDQGD | | |
| | RERKELNIEPTDLMNREKKNKIPSMQVGFIDAICLQLYEALTHVSEDCFPLLDGCR | | |
| | KNRQKWQALAEQQSR* | | |
| OT-001291 | MVSKGAELFTGIVPILIELNGDVNGHKFSVSGEGEGDATYGKLTLKFICTTGKLPV | 460 | 497 |
| (AcGFP (Amino | PWPTLVTTLSYGVQCFSRYPDHMKQHDFFKSAMPEGYIQERTIFFEDDGNYKSRA | | |
| acid 1-239 of WT); | EVKFEGDTLVNRIELTGTDFKEDGNILGNKMEYNYNAHNVYIMTDKAKNGIKVN | | |
| linker (GS); | FKIRHNIEDGSVQLADHYQQNTPIGDGPVLLPDNHYLSTQSALSKDPNEKRDHMI | | |
| (hPDE5 (Amino | YFGFVTAAAITHGMDELYKGSEETRELQSLAAAVVPSAQTLKITDFSFSDFELSDL | | |
| acid 535-860 of | ETALCTIRMFTDLNLVQNFQMKHEVLCRWILSVKKNYRKNVAYHNWRHAFNTA | | |
| WT, R732I); Xba I | QCMFAALKAGKIQNKLTDLEILALLIAALSHDLDHRGVNNSYIQRSEHPLAQLYC | | |
| site (TCTAGA); | HSIMEHHHFDQCLMILNSPGNQILSGLSIEEYKTTLKIIKQAILATDLALYIKRIGEFF | | |
| stop) | ELIRKNQFNLEDPHQKELFLAMLMTACDLSAITKPWPIQQRIAELVATEFFDQGDR | | |
| | ERKELNIEPTDLMNREKKNKIPSMQVGFIDAICLQLYEALTHVSEDCFPLLDGCRK | | |
| | NRQKWQALAEQQSR* | | |
| OT-001292 | MVSKGAELFTGIVPILIELNGDVNGHKESVSGEGEGDATYGKLTLKFICTTGKLPV | 461 | 498 |
| (AcGFP (Amino | PWPTLVTTLSYGVQCFSRYPDHMKQHDFFKSAMPEGYIQERTIFFEDDGNYKSRA | | |
| acid 1-239 of WT); | EVKFEGDTLVNRIELTGTDFKEDGNILGNKMEYNYNAHNVYIMTDKAKNGIKVN | | |
| linker (GS); | FKIRHNIEDGSVQLADHYQQNTPIGDGPVLLPDNHYLSTQSALSKDPNEKRDHMI | | |
| (hPDE5 (Amino | YFGFVTAAAITHGMDELYKGSEETRELQSLAAAVVPSAQTLKITDFSFSDFELSDL | | |
| acid 535-860 of | ETALCTIRMFTDLNLVQNFQMKHEVLCRWILSVKKNYRKNVAYHNWRHAFNTA | | |
| WT, R732C); Xba I | QCMFAALKAGKIQNKLTDLEILALLIAALSHDLDHRGVNNSYIQRSEHPLAQLYC | | |
| site (TCTAGA); | HSIMEHHHFDQCLMILNSPGNQILSGLSIEEYKTTLKIIKQAILATDLALYIKRCGEF | | |
| stop) | FELIRKNQFNLEDPHQKELFLAMLMTACDLSAITKPWPIQQRIAELVATEFFDQGD | | |
| | RERKELNIEPTDLMNREKKNKIPSMQVGFIDAICLQLYEALTHVSEDCFPLLDGCR | | |
| | KNRQKWQALAEQQSR* | | |
| OT-001293 | MVSKGAELFTGIVPILIELNGDVNGHKESVSGEGEGDATYGKLTLKFICTTGKLPV | 462 | 499 |
| (AcGFP (Amino | PWPTLVTTLSYGVQCFSRYPDHMKQHDFFKSAMPEGYIQERTIFFEDDGNYKSRA | | |
| acid 1-239 of WT); | EVKFEGDTLVNRIELTGTDFKEDGNILGNKMEYNYNAHNVYIMTDKAKNGIKVN | | |
| linker (GS); | FKIRHNIEDGSVQLADHYQQNTPIGDGPVLLPDNHYLSTQSALSKDPNEKRDHMI | | |
| (hPDE5 (Amino | YFGFVTAAAITHGMDELYKGSEETRELQSLAAAVVPSAQTLKITDFSFSDFELSDL | | |
| acid 535-860 of | ETALCTIRMFTDLNLVQNFQMKHEVLCRWILSVKKNYRKNVAYHNWRHAFNTA | | |
| WT, R732Y); Xba I | QCMFAALKAGKIQNKLTDLEILALLIAALSHDLDHRGVNNSYIQRSEHPLAQLYC | | |
| site (TCTAGA); | HSIMEHHHFDQCLMILNSPGNQILSGLSIEEYKTTLKIIKQAILATDLALYIKRYGEF | | |
| stop) | FELIRKNQFNLEDPHQKELFLAMLMTACDLSAITKPWPIQQRIAELVATEFFDQGD | | |
| | RERKELNIEPTDLMNREKKNKIPSMQVGFIDAICLQLYEALTHVSEDCFPLLDGCR | | |
| | KNRQKWQALAEQQSR* | | |
| OT-001294 | MVSKGAELFTGIVPILIELNGDVNGHKFSVSGEGEGDATYGKLTLKFICTTGKLPV | 463 | 500 |
| (AcGFP (Amino | PWPTLVTTLSYGVQCFSRYPDHMKQHDFFKSAMPEGYIQERTIFFEDDGNYKSRA | | |
| acid 1-239 of WT); | EVKFEGDTLVNRIELTGTDFKEDGNILGNKMEYNYNAHNVYIMTDKAKNGIKVN | | |
| linker (GS); | FKIRHNIEDGSVQLADHYQQNTPIGDGPVLLPDNHYLSTQSALSKDPNEKRDHMI | | |
| (hPDE5 (Amino | YFGFVTAAAITHGMDELYKGSEETRELQSLAAAVVPSAQTLKITDFSFSDFELSDL | | |
| acid 535-860 of | ETALCTIRMFTDLNLVQNFQMKHEVLCRWILSVKKNYRKNVAYHNWRHAFNTA | | |
| WT, R732I4); Xba I | QCMFAALKAGKIQNKLTDLEILALLIAALSHDLDHRGVNNSYIQRSEHPLAQLYC | | |
| site (TCTAGA); | HSIMEHHHFDQCLMILNSPGNQILSGLSIEEYKTTLKIIKQAILATDLALYIKRHGEF | | |
| stop) | FELIRKNQFNLEDPHQKELFLAMLMTACDLSAITKPWPIQQRIAELVATEFFDQGD | | |
| | RERKELNIEPTDLMNREKKNKIPSMQVGFIDAICLQLYEALTHVSEDCFPLLDGCR | | |
| | KNRQKWQALAEQQSR* | | |
| OT-001295 | MVSKGAELFTGIVPILIELNGDVNGHKFSVSGEGEGDATYGKLTLKFICTTGKLPV | 464 | 501 |
| (AcGFP (Amino | PWPTLVTTLSYGVQCFSRYPDHMKQHDFFKSAMPEGYIQERTIFFEDDGNYKSRA | | |
| acid 1-239 of WT); | EVKFEGDTLVNRIELTGTDFKEDGNILGNKMEYNYNAHNVYIMTDKAKNGIKVN | | |
| linker (GS); | FKIRHNIEDGSVQLADHYQQNTPIGDGPVLLPDNHYLSTQSALSKDPNEKRDHMI | | |
| (hPDE5 (Amino | YFGFVTAAAITHGMDELYKGSEETRELQSLAAAVVPSAQTLKITDFSFSDFELSDL | | |
| acid 535-860 of | ETALCTIRMFTDLNLVQNFQMKHEVLCRWILSVKKNYRKNVAYHNWRHAFNTA | | |
| WT, R732N); Xba I | QCMFAALKAGKIQNKLTDLEILALLIAALSHDLDHRGVNNSYIQRSEHPLAQLYC | | |
| site (TCTAGA); | HSIMEHHHFDQCLMILNSPGNQILSGLSIEEYKTTLKIIKQAILATDLALYIKRNGEF | | |
| stop) | FELIRKNQFNLEDPHQKELFLAMLMTACDLSAITKPWPIQQRIAELVATEFFDQGD | | |
| | RERKELNIEPTDLMNREKKNKIPSMQVGFIDAICLQLYEALTHVSEDCFPLLDGCR | | |
| | KNRQKWQALAEQQSR* | | |
| OT-001296 | MVSKGAELFTGIVPILIELNGDVNGHKFSVSGEGEGDATYGKLTLKFICTTGKLPV | 465 | 502 |
| (AcGFP (Amino | PWPTLVTTLSYGVQCFSRYPDHMKQHDFFKSAMPEGYIQERTIFFEDDGNYKSRA | | |
| acid 1-239 of WT); | EVKFEGDTLVNRIELTGTDFKEDGNILGNKMEYNYNAHNVYIMTDKAKNGIKVN | | |
| linker (GS); | FKIRHNIEDGSVQLADHYQQNTPIGDGPVLLPDNHYLSTQSALSKDPNEKRDHMI | | |
| (hPDE5 (Amino | YFGFVTAAAITHGMDELYKGSEETRELQSLAAAVVPSAQTLKITDFSFSDFELSDL | | |
| acid 535-860 of | ETALCTIRMFTDLNLVQNFQMKHEVLCRWILSVKKNYRKNVAYHNWRHAFNTA | | |
| WT, R732D); Xba I | QCMFAALKAGKIQNKLTDLEILALLIAALSHDLDHRGVNNSYIQRSEHPLAQLYC | | |
| site (TCTAGA); | HSIMEHHHFDQCLMILNSPGNQILSGLSIEEYKTTLKIIKQAILATDLALYIKRDGEF | | |
| stop) | FELIRKNQFNLEDPHQKELFLAMLMTACDLSAITKPWPIQQRIAELVATEFFDQGD | | |
| | RERKELNIEPTDLMNREKKNKIPSMQVGFIDAICLQLYEALTHVSEDCFPLLDGCR | | |
| | KNRQKWQALAEQQSR* | | |
| OT-001297 | MVSKGAELFTGIVPILIELNGDVNGHKFSVSGEGEGDATYGKLTLKFICTTGKLPV | 466 | 503 |
| (AcGFP (Amino | PWPTLVTTLSYGVQCFSRYPDHMKQHDFFKSAMPEGYIQERTIFFEDDGNYKSRA | | |
| acid 1-239 of WT); | EVKFEGDTLVNRIELTGTDFKEDGNILGNKMEYNYNAHNVYIMTDKAKNGIKVN | | |
| linker (GS); | FKIRHNIEDGSVQLADHYQQNTPIGDGPVLLPDNHYLSTQSALSKDPNEKRDHMI | | |
| (hPDE5 (Amino | YFGFVTAAAITHGMDELYKGSEETRELQSLAAAVVPSAQTLKITDFSFSDFELSDL | | |
| acid 535-860 of | ETALCTIRMFTDLNLVQNFQMKHEVLCRWILSVKKNYRKNVAYHNWRHAFNTA | | |
| WT, R732T); Xba I | QCMFAALKAGKIQNKLTDLEILALLIAALSHDLDHRGVNNSYIQRSEHPLAQLYC | | |
| site (TCTAGA); | HSIMEHHHFDQCLMILNSPGNQILSGLSIEEYKTTLKIIKQAILATDLALYIKRTGEF | | |
| stop) | FELIRKNQFNLEDPHQKELFLAMLMTACDLSAITKPWPIQQRIAELVATEFFDQGD | | |
| | RERKELNIEPTDLMNREKKNKIPSMQVGFIDAICLQLYEALTHVSEDCFPLLDGCR | | |
| | KNRQKWQALAEQQSR* | | |

[0159] In some embodiments, the phenylalanine at position 736 (also referred to as F736) of the hPDE5 (SEQ ID NO: 1), may be mutated to any of the known amino acids and are provided in Table 9. The mutations of the amino acid F736 may include, but are not limited to F736G, F736A, F736L, F736M, F736R, F736W, F736K, F736Q, F736E, F736S, F736P, F736V, F736I, F736C, F736Y, F736H, F736N, F736D, and F736T. The hPDE5 mutants fused either at the N terminus or the C terminus to a linker and GFP are provided in Table 9. Also provided in Table 9 are the components that may be combined with the hPDE5 F736 mutants to generate constructs. In Table 9, the “*” indicates the translation of the stop codon.

TABLE 9
hPDE5 F736 constructs

| Construct | | AA | NA |
|---|---|---|---|
| ID/Description | Amino acid sequence | SEQ ID | SEQ ID |
| AcGFP (Amino acid | MVSKGAELFTGIVPILIELNGDVNGHKFSVSGEGEGDATYGKLTLKFICTTGKLP | 365 | 373 |
| 1-239 of WT) | VPWPTLVTTLSYGVQCFSRYPDHMKQHDFFKSAMPEGYIQERTIFFEDDGNYKS | | |
| | RAEVKFEGDTLVNRIELTGTDFKEDGNILGNKMEYNYNAHNVYIMTDKAKNGI | | |
| | KVNFKIRHNIEDGSVQLADHYQQNTPIGDGPVLLPDNHYLSTQSALSKDPNEKR | | |
| | DHMIYFGFVTAAAITHGMDELYK | | |
| linker (GS) | GS | — | GGATC |
| | | | C |
| Xba I site | SR | — | TCTAG |
| | | | A |
| hPDE5 (Amino acid | EETRELQSLAAAVVPSAQTLKITDFSFSDFELSDLETALCTIRMFTDLNLVQNFQ | 8555 | 8592 |
| 535-860 of WT, | MKHEVLCRWILSVKKNYRKNVAYHNWRHAFNTAQCMFAALKAGKIQNKLTD | | |
| F736G) | LEILALLIAALSHDLDHRGVNNSYIQRSEHPLAQLYCHSIMEHHHFDQCLMILNS | | |
| | PGNQILSGLSIEEYKTTLKIIKQAILATDLALYIKRRGEFGELIRKNQFNLEDPHQK | | |
| | ELFLAMLMTACDLSAITKPWPIQQRIAELVATEFFDQGDRERKELNIEPTDLMNR | | |
| | EKKNKIPSMQVGFIDAICLQLYEALTHVSEDCFPLLDGCRKNRQKWQALAEQQ | | |
| hPDE5 (Amino acid | EETRELQSLAAAVVPSAQTLKITDFSFSDFELSDLETALCTIRMFTDLNLVQNFQ | 9 | 8593 |
| 535-860 of WT, | MKHEVLCRWILSVKKNYRKNVAYHNWRHAFNTAQCMFAALKAGKIQNKLTD | | |
| F736A) | LEILALLIAALSHDLDHRGVNNSYIQRSEHPLAQLYCHSIMEHHHFDQCLMILNS | | |
| | PGNQILSGLSIEEYKTTLKIIKQAILATDLALYIKRRGEFAELIRKNQFNLEDPHQK | | |
| | ELFLAMLMTACDLSAITKPWPIQQRIAELVATEFFDQGDRERKELNIEPTDLMNR | | |
| | EKKNKIPSMQVGFIDAICLQLYEALTHVSEDCFPLLDGCRKNRQKWQALAEQQ | | |
| hPDE5 (Amino acid | EETRELQSLAAAVVPSAQTLKITDFSFSDFELSDLETALCTIRMFTDLNLVQNFQ | 8556 | 8594 |
| 535-860 of WT, | MKHEVLCRWILSVKKNYRKNVAYHNWRHAFNTAQCMFAALKAGKIQNKLTD | | |
| F736L) | LEILALLIAALSHDLDHRGVNNSYIQRSEHPLAQLYCHSIMEHHHFDQCLMILNS | | |
| | PGNQILSGLSIEEYKTTLKIIKQAILATDLALYIKRRGEFLELIRKNQFNLEDPHQK | | |
| | ELFLAMLMTACDLSAITKPWPIQQRIAELVATEFFDQGDRERKELNIEPTDLMNR | | |
| | EKKNKIPSMQVGFIDAICLQLYEALTHVSEDCFPLLDGCRKNRQKWQALAEQQ | | |
| hPDE5 (Amino acid | EETRELQSLAAAVVPSAQTLKITDFSFSDFELSDLETALCTIRMFTDLNLVQNFQ | 8557 | 8595 |
| 535-860 of WT, | MKHEVLCRWILSVKKNYRKNVAYHNWRHAFNTAQCMFAALKAGKIQNKLTD | | |
| F736M) | LEILALLIAALSHDLDHRGVNNSYIQRSEHPLAQLYCHSIMEHHHFDQCLMILNS | | |
| | PGNQILSGLSIEEYKTTLKIIKQAILATDLALYIKRRGEFMELIRKNQFNLEDPHQK | | |
| | ELFLAMLMTACDLSAITKPWPIQQRIAELVATEFFDQGDRERKELNIEPTDLMNR | | |
| | EKKNKIPSMQVGFIDAICLQLYEALTHVSEDCFPLLDGCRKNRQKWQALAEQQ | | |
| hPDE5 (Amino acid | EETRELQSLAAAVVPSAQTLKITDFSFSDFELSDLETALCTIRMFTDLNLVQNFQ | 8558 | 8596 |
| 535-860 of WT, | MKHEVLCRWILSVKKNYRKNVAYHNWRHAFNTAQCMFAALKAGKIQNKLTD | | |
| F736R) | LEILALLIAALSHDLDHRGVNNSYIQRSEHPLAQLYCHSIMEHHHFDQCLMILNS | | |
| | PGNQILSGLSIEEYKTTLKIIKQAILATDLALYIKRRGEFRELIRKNQFNLEDPHQK | | |
| | ELFLAMLMTACDLSAITKPWPIQQRIAELVATEFFDQGDRERKELNIEPTDLMNR | | |
| | EKKNKIPSMQVGFIDAICLQLYEALTHVSEDCFPLLDGCRKNRQKWQALAEQQ | | |
| hPDE5 (Amino acid | EETRELQSLAAAVVPSAQTLKITDFSFSDFELSDLETALCTIRMFTDLNLVQNFQ | 8559 | 8597 |
| 535-860 of WT, | MKHEVLCRWILSVKKNYRKNVAYHNWRHAFNTAQCMFAALKAGKIQNKLTD | | |
| F736W) | LEILALLIAALSHDLDHRGVNNSYIQRSEHPLAQLYCHSIMEHHHFDQCLMILNS | | |
| | PGNQILSGLSIEEYKTTLKIIKQAILATDLALYIKRRGEFWELIRKNQFNLEDPHQK | | |
| | ELFLAMLMTACDLSAITKPWPIQQRIAELVATEFFDQGDRERKELNIEPTDLMNR | | |
| | EKKNKIPSMQVGFIDAICLQLYEALTHVSEDCFPLLDGCRKNRQKWQALAEQQ | | |
| hPDE5 (Amino acid | EETRELQSLAAAVVPSAQTLKITDFSFSDFELSDLETALCTIRMFTDLNLVQNFQ | 8560 | 8598 |
| 535-860 of WT, | MKHEVLCRWILSVKKNYRKNVAYHNWRHAFNTAQCMFAALKAGKIQNKLTD | | |
| F736K) | LEILALLIAALSHDLDHRGVNNSYIQRSEHPLAQLYCHSIMEHHHFDQCLMILNS | | |
| | PGNQILSGLSIEEYKTTLKIIKQAILATDLALYIKRRGEFKELIRKNQFNLEDPHQK | | |
| | ELFLAMLMTACDLSAITKPWPIQQRIAELVATEFFDQGDRERKELNIEPTDLMNR | | |
| | EKKNKIPSMQVGFIDAICLQLYEALTHVSEDCFPLLDGCRKNRQKWQALAEQQ | | |
| hPDE5 (Amino acid | EETRELQSLAAAVVPSAQTLKITDFSFSDFELSDLETALCTIRMFTDLNLVQNFQ | 8561 | 8599 |
| 535-860 of WT, | MKHEVLCRWILSVKKNYRKNVAYHNWRHAFNTAQCMFAALKAGKIQNKLTD | | |
| F736Q) | LEILALLIAALSHDLDHRGVNNSYIQRSEHPLAQLYCHSIMEHHHFDQCLMILNS | | |
| | PGNQILSGLSIEEYKTTLKIIKQAILATDLALYIKRRGEFQELIRKNQFNLEDPHQK | | |
| | ELFLAMLMTACDLSAITKPWPIQQRIAELVATEFFDQGDRERKELNIEPTDLMNR | | |
| | EKKNKIPSMQVGFIDAICLQLYEALTHVSEDCFPLLDGCRKNRQKWQALAEQQ | | |
| hPDE5 (Amino acid | EETRELQSLAAAVVPSAQTLKITDFSFSDFELSDLETALCTIRMFTDLNLVQNFQ | 8562 | 8600 |
| 535-860 of WT, | MKHEVLCRWILSVKKNYRKNVAYHNWRHAFNTAQCMFAALKAGKIQNKLTD | | |
| F736E) | LEILALLIAALSHDLDHRGVNNSYIQRSEHPLAQLYCHSIMEHHHFDQCLMILNS | | |
| | PGNQILSGLSIEEYKTTLKIIKQAILATDLALYIKRRGEFEELIRKNQFNLEDPHQK | | |
| | ELFLAMLMTACDLSAITKPWPIQQRIAELVATEFFDQGDRERKELNIEPTDLMNR | | |
| | EKKNKIPSMQVGFIDAICLQLYEALTHVSEDCFPLLDGCRKNRQKWQALAEQQ | | |
| hPDE5 (Amino acid | EETRELQSLAAAVVPSAQTLKITDFSFSDFELSDLETALCTIRMFTDLNLVQNFQ | 8563 | 8601 |
| 535-860 of WT, | MKHEVLCRWILSVKKNYRKNVAYHNWRHAFNTAQCMFAALKAGKIQNKLTD | | |
| F736S) | LEILALLIAALSHDLDHRGVNNSYIQRSEHPLAQLYCHSIMEHHHFDQCLMILNS | | |
| | PGNQILSGLSIEEYKTTLKIIKQAILATDLALYIKRRGEFSELIRKNQFNLEDPHQK | | |
| | ELFLAMLMTACDLSAITKPWPIQQRIAELVATEFFDQGDRERKELNIEPTDLMNR | | |
| | EKKNKIPSMQVGFIDAICLQLYEALTHVSEDCFPLLDGCRKNRQKWQALAEQQ | | |
| hPDE5 (Amino acid | EETRELQSLAAAVVPSAQTLKITDFSFSDFELSDLETALCTIRMFTDLNLVQNFQ | 8564 | 8602 |
| 535-860 of WT, | MKHEVLCRWILSVKKNYRKNVAYHNWRHAFNTAQCMFAALKAGKIQNKLTD | | |
| F736P) | LEILALLIAALSHDLDHRGVNNSYIQRSEHPLAQLYCHSIMEHHHFDQCLMILNS | | |
| | PGNQILSGLSIEEYKTTLKIIKQAILATDLALYIKRRGEFPELIRKNQFNLEDPHQK | | |
| | ELFLAMLMTACDLSAITKPWPIQQRIAELVATEFFDQGDRERKELNIEPTDLMNR | | |
| | EKKNKIPSMQVGFIDAICLQLYEALTHVSEDCFPLLDGCRKNRQKWQALAEQQ | | |
| hPDE5 (Amino acid | EETRELQSLAAAVVPSAQTLKITDFSFSDFELSDLETALCTIRMFTDLNLVQNFQ | 8565 | 8603 |
| 535-860 of WT, | MKHEVLCRWILSVKKNYRKNVAYHNWRHAFNTAQCMFAALKAGKIQNKLTD | | |
| F736V) | LEILALLIAALSHDLDHRGVNNSYIQRSEHPLAQLYCHSIMEHHHFDQCLMILNS | | |
| | PGNQILSGLSIEEYKTTLKIIKQAILATDLALYIKRRGEFVELIRKNQFNLEDPHQK | | |
| | ELFLAMLMTACDLSAITKPWPIQQRIAELVATEFFDQGDRERKELNIEPTDLMNR | | |
| | EKKNKIPSMQVGFIDAICLQLYEALTHVSEDCFPLLDGCRKNRQKWQALAEQQ | | |
| hPDE5 (Amino acid | EETRELQSLAAAVVPSAQTLKITDFSFSDFELSDLETALCTIRMFTDLNLVQNFQ | 8566 | 8604 |
| 535-860 of WT, | MKHEVLCRWILSVKKNYRKNVAYHNWRHAFNTAQCMFAALKAGKIQNKLTD | | |
| F7361) | LEILALLIAALSHDLDHRGVNNSYIQRSEHPLAQLYCHSIMEHHHFDQCLMILNS | | |
| | PGNQILSGLSIEEYKTTLKIIKQAILATDLALYIKRRGEFIELIRKNQFNLEDPHQKE | | |
| | LFLAMLMTACDLSAITKPWPIQQRIAELVATEFFDQGDRERKELNIEPTDLMNRE | | |
| | KKNKIPSMQVGFIDAICLQLYEALTHVSEDCFPLLDGCRKNRQKWQALAEQQ | | |
| hPDE5 (Amino acid | EETRELQSLAAAVVPSAQTLKITDFSFSDFELSDLETALCTIRMFTDLNLVQNFQ | 8567 | 8605 |
| 535-860 of WT, | MKHEVLCRWILSVKKNYRKNVAYHNWRHAFNTAQCMFAALKAGKIQNKLTD | | |
| F736C) | LEILALLIAALSHDLDHRGVNNSYIQRSEHPLAQLYCHSIMEHHHFDQCLMILNS | | |
| | PGNQILSGLSIEEYKTTLKIIKQAILATDLALYIKRRGEFCELIRKNQFNLEDPHQK | | |
| | ELFLAMLMTACDLSAITKPWPIQQRIAELVATEFFDQGDRERKELNIEPTDLMNR | | |
| | EKKNKIPSMQVGFIDAICLQLYEALTHVSEDCFPLLDGCRKNRQKWQALAEQQ | | |
| hPDE5 (Amino acid | EETRELQSLAAAVVPSAQTLKITDFSFSDFELSDLETALCTIRMFTDLNLVQNFQ | 8568 | 8606 |
| 535-860 of WT, | MKHEVLCRWILSVKKNYRKNVAYHNWRHAFNTAQCMFAALKAGKIQNKLTD | | |
| F736Y) | LEILALLIAALSHDLDHRGVNNSYIQRSEHPLAQLYCHSIMEHHHFDQCLMILNS | | |
| | PGNQILSGLSIEEYKTTLKIIKQAILATDLALYIKRRGEFYELIRKNQFNLEDPHQK | | |
| | ELFLAMLMTACDLSAITKPWPIQQRIAELVATEFFDQGDRERKELNIEPTDLMNR | | |
| | EKKNKIPSMQVGFIDAICLQLYEALTHVSEDCFPLLDGCRKNRQKWQALAEQQ | | |
| hPDE5 (Amino acid | EETRELQSLAAAVVPSAQTLKITDFSFSDFELSDLETALCTIRMFTDLNLVQNFQ | 8569 | 8607 |
| 535-860 of WT, | MKHEVLCRWILSVKKNYRKNVAYHNWRHAFNTAQCMFAALKAGKIQNKLTD | | |
| F73611) | LEILALLIAALSHDLDHRGVNNSYIQRSEHPLAQLYCHSIMEHHHFDQCLMILNS | | |
| | PGNQILSGLSIEEYKTTLKIIKQAILATDLALYIKRRGEFHELIRKNQFNLEDPHQK | | |
| | ELFLAMLMTACDLSAITKPWPIQQRIAELVATEFFDQGDRERKELNIEPTDLMNR | | |
| | EKKNKIPSMQVGFIDAICLQLYEALTHVSEDCFPLLDGCRKNRQKWQALAEQQ | | |
| hPDE5 (Amino acid | EETRELQSLAAAVVPSAQTLKITDFSFSDFELSDLETALCTIRMFTDLNLVQNFQ | 8570 | 8608 |
| 535-860 of WT, | MKHEVLCRWILSVKKNYRKNVAYHNWRHAFNTAQCMFAALKAGKIQNKLTD | | |
| F736N) | LEILALLIAALSHDLDHRGVNNSYIQRSEHPLAQLYCHSIMEHHHFDQCLMILNS | | |
| | PGNQILSGLSIEEYKTTLKIIKQAILATDLALYIKRRGEFNELIRKNQFNLEDPHQK | | |
| | ELFLAMLMTACDLSAITKPWPIQQRIAELVATEFFDQGDRERKELNIEPTDLMNR | | |
| | EKKNKIPSMQVGFIDAICLQLYEALTHVSEDCFPLLDGCRKNRQKWQALAEQQ | | |
| hPDE5 (Amino acid | EETRELQSLAAAVVPSAQTLKITDFSFSDFELSDLETALCTIRMFTDLNLVQNFQ | 8571 | 8609 |
| 535-860 of WT, | MKHEVLCRWILSVKKNYRKNVAYHNWRHAFNTAQCMFAALKAGKIQNKLTD | | |
| F736D) | LEILALLIAALSHDLDHRGVNNSYIQRSEHPLAQLYCHSIMEHHHFDQCLMILNS | | |
| | PGNQILSGLSIEEYKTTLKIIKQAILATDLALYIKRRGEFDELIRKNQFNLEDPHQK | | |
| | ELFLAMLMTACDLSAITKPWPIQQRIAELVATEFFDQGDRERKELNIEPTDLMNR | | |
| | EKKNKIPSMQVGFIDAICLQLYEALTHVSEDCFPLLDGCRKNRQKWQALAEQQ | | |
| hPDE5 (Amino acid | EETRELQSLAAAVVPSAQTLKITDFSFSDFELSDLETALCTIRMFTDLNLVQNFQ | 8572 | 8610 |
| 535-860 of WT, | MKHEVLCRWILSVKKNYRKNVAYHNWRHAFNTAQCMFAALKAGKIQNKLTD | | |
| F736T) | LEILALLIAALSHDLDHRGVNNSYIQRSEHPLAQLYCHSIMEHHHFDQCLMILNS | | |
| | PGNQILSGLSIEEYKTTLKIIKQAILATDLALYIKRRGEFTELIRKNQFNLEDPHQK | | |
| | ELFLAMLMTACDLSAITKPWPIQQRIAELVATEFFDQGDRERKELNIEPTDLMNR | | |
| | EKKNKIPSMQVGFIDAICLQLYEALTHVSEDCFPLLDGCRKNRQKWQALAEQQ | | |
| OT-001259 (AcGFP | MVSKGAELFTGIVPILIELNGDVNGHKFSVSGEGEGDATYGKLTLKFICTTGKLP | 8573 | 8611 |
| (1-239 of WT); | VPWPTLVTTLSYGVQCFSRYPDHMKQHDFFKSAMPEGYIQERTIFFEDDGNYKS | | |
| Linker (GS); hPDE5 | RAEVKFEGDTLVNRIELTGTDFKEDGNILGNKMEYNYNAHNVYIMTDKAKNGI | | |
| (Amino acid 535-860 | KVNFKIRHNIEDGSVQLADHYQQNTPIGDGPVLLPDNHYLSTQSALSKDPNEKR | | |
| of WT, F736G); Xba | DHMIYFGFVTAAAITHGMDELYKGSEETRELQSLAAAVVPSAQTLKITDFSFSDF | | |
| I site (TCTAGA); | ELSDLETALCTIRMFTDLNLVQNFQMKHEVLCRWILSVKKNYRKNVAYHNWR | | |
| stop) | HAFNTAQCMFAALKAGKIQNKLTDLEILALLIAALSHDLDHRGVNNSYIQRSEH | | |
| | PLAQLYCHSIMEHHHFDQCLMILNSPGNQILSGLSIEEYKTTLKIIKQAILATDLAL | | |
| | YIKRRGEFGELIRKNQFNLEDPHQKELFLAMLMTACDLSAITKPWPIQQRIAELV | | |
| | ATEFFDQGDRERKELNIEPTDLMNREKKNKIPSMQVGFIDAICLQLYEALTHVSE | | |
| | DCFPLLDGCRKNRQKWQALAEQQSR* | | |
| OT-001260 (AcGFP | MVSKGAELFTGIVPILIELNGDVNGHKFSVSGEGEGDATYGKLTLKFICTTGKLP | 8574 | 8612 |
| (1-239 of WT); | VPWPTLVTTLSYGVQCFSRYPDHMKQHDFFKSAMPEGYIQERTIFFEDDGNYKS | | |
| Linker (GS); hPDE5 | RAEVKFEGDTLVNRIELTGTDFKEDGNILGNKMEYNYNAHNVYIMTDKAKNGI | | |
| (Amino acid 535-860 | KVNFKIRHNIEDGSVQLADHYQQNTPIGDGPVLLPDNHYLSTQSALSKDPNEKR | | |
| of WT, F736A); Xba | DHMIYFGFVTAAAITHGMDELYKGSEETRELQSLAAAVVPSAQTLKITDFSFSDF | | |
| I site (TCTAGA); | ELSDLETALCTIRMFTDLNLVQNFQMKHEVLCRWILSVKKNYRKNVAYHNWR | | |
| stop) | HAFNTAQCMFAALKAGKIQNKLTDLEILALLIAALSHDLDHRGVNNSYIQRSEH | | |
| | PLAQLYCHSIMEHHHFDQCLMILNSPGNQILSGLSIEEYKTTLKIIKQAILATDLAL | | |
| | YIKRRGEFAELIRKNQFNLEDPHQKELFLAMLMTACDLSAITKPWPIQQRIAELV | | |
| | ATEFFDQGDRERKELNIEPTDLMNREKKNKIPSMQVGFIDAICLQLYEALTHVSE | | |
| | DCFPLLDGCRKNRQKWQALAEQQSR* | | |
| OT-001261 (AcGFP | MVSKGAELFTGIVPILIELNGDVNGHKFSVSGEGEGDATYGKLTLKFICTTGKLP | 8575 | 8613 |
| (1-239 of WT); | VPWPTLVTTLSYGVQCFSRYPDHMKQHDFFKSAMPEGYIQERTIFFEDDGNYKS | | |
| Linker (GS); hPDE5 | RAEVKFEGDTLVNRIELTGTDFKEDGNILGNKMEYNYNAHNVYIMTDKAKNGI | | |
| (Amino acid 535-860 | KVNFKIRHNIEDGSVQLADHYQQNTPIGDGPVLLPDNHYLSTQSALSKDPNEKR | | |
| of WT, F736L); Xba | DHMIYFGFVTAAAITHGMDELYKGSEETRELQSLAAAVVPSAQTLKITDFSFSDF | | |
| I site (TCTAGA); | ELSDLETALCTIRMFTDLNLVQNFQMKHEVLCRWILSVKKNYRKNVAYHNWR | | |
| stop) | HAFNTAQCMFAALKAGKIQNKLTDLEILALLIAALSHDLDHRGVNNSYIQRSEH | | |
| | PLAQLYCHSIMEHHHFDQCLMILNSPGNQILSGLSIEEYKTTLKIIKQAILATDLAL | | |
| | YIKRRGEFLELIRKNQFNLEDPHQKELFLAMLMTACDLSAITKPWPIQQRIAELV | | |
| | ATEFFDQGDRERKELNIEPTDLMNREKKNKIPSMQVGFIDAICLQLYEALTHVSE | | |
| | DCFPLLDGCRKNRQKWQALAEQQSR* | | |
| OT-001262 (AcGFP | MVSKGAELFTGIVPILIELNGDVNGHKFSVSGEGEGDATYGKLTLKFICTTGKLP | 8576 | 8614 |
| (1-239 of WT); | VPWPTLVTTLSYGVQCFSRYPDHMKQHDFFKSAMPEGYIQERTIFFEDDGNYKS | | |
| Linker (GS); hPDE5 | RAEVKFEGDTLVNRIELTGTDFKEDGNILGNKMEYNYNAHNVYIMTDKAKNGI | | |
| (Amino acid 535-860 | KVNFKIRHNIEDGSVQLADHYQQNTPIGDGPVLLPDNHYLSTQSALSKDPNEKR | | |
| of WT, F736M); Xba | DHMIYFGFVTAAAITHGMDELYKGSEETRELQSLAAAVVPSAQTLKITDFSFSDF | | |
| I site (TCTAGA); | ELSDLETALCTIRMFTDLNLVQNFQMKHEVLCRWILSVKKNYRKNVAYHNWR | | |
| stop) | HAFNTAQCMFAALKAGKIQNKLTDLEILALLIAALSHDLDHRGVNNSYIQRSEH | | |
| | PLAQLYCHSIMEHHHFDQCLMILNSPGNQILSGLSIEEYKTTLKIIKQAILATDLAL | | |
| | YIKRRGEFMELIRKNQFNLEDPHQKELFLAMLMTACDLSAITKPWPIQQRIAELV | | |
| | ATEFFDQGDRERKELNIEPTDLMNREKKNKIPSMQVGFIDAICLQLYEALTHVSE | | |
| | DCFPLLDGCRKNRQKWQALAEQQSR* | | |
| OT-001263 (AcGFP | MVSKGAELFTGIVPILIELNGDVNGHKFSVSGEGEGDATYGKLTLKFICTTGKLP | 8577 | 8615 |
| (1-239 of WT); | VPWPTLVTTLSYGVQCFSRYPDHMKQHDFFKSAMPEGYIQERTIFFEDDGNYKS | | |
| Linker (GS); hPDE5 | RAEVKFEGDTLVNRIELTGTDFKEDGNILGNKMEYNYNAHNVYIMTDKAKNGI | | |
| (Amino acid 535-860 | KVNFKIRHNIEDGSVQLADHYQQNTPIGDGPVLLPDNHYLSTQSALSKDPNEKR | | |
| of WT, F736R); Xba | DHMIYFGFVTAAAITHGMDELYKGSEETRELQSLAAAVVPSAQTLKITDFSFSDF | | |
| I site (TCTAGA); | ELSDLETALCTIRMFTDLNLVQNFQMKHEVLCRWILSVKKNYRKNVAYHNWR | | |
| stop) | HAFNTAQCMFAALKAGKIQNKLTDLEILALLIAALSHDLDHRGVNNSYIQRSEH | | |
| | PLAQLYCHSIMEHHHFDQCLMILNSPGNQILSGLSIEEYKTTLKIIKQAILATDLAL | | |
| | YIKRRGEFRELIRKNQFNLEDPHQKELFLAMLMTACDLSAITKPWPIQQRIAELV | | |
| | ATEFFDQGDRERKELNIEPTDLMNREKKNKIPSMQVGFIDAICLQLYEALTHVSE | | |
| | DCFPLLDGCRKNRQKWQALAEQQSR* | | |
| OT-001264 (AcGFP | MVSKGAELFTGIVPILIELNGDVNGHKFSVSGEGEGDATYGKLTLKFICTTGKLP | 8578 | 8616 |
| (1-239 of WT); | VPWPTLVTTLSYGVQCFSRYPDHMKQHDFFKSAMPEGYIQERTIFFEDDGNYKS | | |
| Linker (GS); hPDE5 | RAEVKFEGDTLVNRIELTGTDFKEDGNILGNKMEYNYNAHNVYIMTDKAKNGI | | |
| (Amino acid 535-860 | KVNFKIRHNIEDGSVQLADHYQQNTPIGDGPVLLPDNHYLSTQSALSKDPNEKR | | |
| of WT, F736W); Xba | DHMIYFGFVTAAAITHGMDELYKGSEETRELQSLAAAVVPSAQTLKITDFSFSDF | | |
| I site (TCTAGA); | ELSDLETALCTIRMFTDLNLVQNFQMKHEVLCRWILSVKKNYRKNVAYHNWR | | |
| stop) | HAFNTAQCMFAALKAGKIQNKLTDLEILALLIAALSHDLDHRGVNNSYIQRSEH | | |
| | PLAQLYCHSIMEHHHFDQCLMILNSPGNQILSGLSIEEYKTTLKIIKQAILATDLAL | | |
| | YIKRRGEFWELIRKNQFNLEDPHQKELFLAMLMTACDLSAITKPWPIQQRIAELV | | |
| | ATEFFDQGDRERKELNIEPTDLMNREKKNKIPSMQVGFIDAICLQLYEALTHVSE | | |
| | DCFPLLDGCRKNRQKWQALAEQQSR* | | |
| OT-001265 (AcGFP | MVSKGAELFTGIVPOLIELNGDVNGHKFSVSGEGEGDATYGKLTLKFICTTGKLP | 8579 | 8617 |
| (1-239 of WT); | VPWPTLVTTLSYGVQCFSRYPDHMKQHDFFKSAMPEGYIQERTIFFEDDGNYKS | | |
| Linker (GS); hPDE5 | RAEVKFEGDTLVNRIELTGTDFKEDGNILGNKMEYNYNAHNVYIMTDKAKNGI | | |
| (Amino acid 535-860 | KVNFKIRHNIEDGSVQLADHYQQNTPIGDGPVLLPDNHYLSTQSALSKDPNEKR | | |
| of WT, F736K); Xba | DHMIYFGFVTAAAITHGMDELYKGSEETRELQSLAAAVVPSAQTLKITDFSFSDF | | |
| I site (TCTAGA); | ELSDLETALCTIRMFTDLNLVQNFQMKHEVLCRWILSVKKNYRKNVAYHNWR | | |
| stop) | HAFNTAQCMFAALKAGKIQNKLTDLEILALLIAALSHDLDHRGVNNSYIQRSEH | | |
| | PLAQLYCHSIMEHHHFDQCLMILNSPGNQILSGLSIEEYKTTLKIIKQAILATDLAL | | |
| | YIKRRGEFKELIRKNQFNLEDPHQKELFLAMLMTACDLSAITKPWPIQQRIAELV | | |
| | ATEFFDQGDRERKELNIEPTDLMNREKKNKIPSMQVGFIDAICLQLYEALTHVSE | | |
| | DCFPLLDGCRKNRQKWQALAEQQSR* | | |
| OT-001266 (AcGFP | MVSKGAELFTGIVPILIELNGDVNGHKFSVSGEGEGDATYGKLTLKFICTTGKLP | 8580 | 8618 |
| (1-239 of WT); | VPWPTLVTTLSYGVQCFSRYPDHMKQHDFFKSAMPEGYIQERTIFFEDDGNYKS | | |
| Linker (GS); hPDE5 | RAEVKFEGDTLVNRIELTGTDFKEDGNILGNKMEYNYNAHNVYIMTDKAKNGI | | |
| (Amino acid 535-860 | KVNFKIRHNIEDGSVQLADHYQQNTPIGDGPVLLPDNHYLSTQSALSKDPNEKR | | |
| of WT, F736Q); Xba | DHMIYFGFVTAAAITHGMDELYKGSEETRELQSLAAAVVPSAQTLKITDFSFSDF | | |
| I site (TCTAGA); | ELSDLETALCTIRMFTDLNLVQNFQMKHEVLCRWOLSVKKNYRKNVAYHNWR | | |
| stop) | HAFNTAQCMFAALKAGKIQNKLTDLEILALLIAALSHDLDHRGVNNSYIQRSEH | | |
| | PLAQLYCHSIMEHHHFDQCLMILNSPGNQILSGLSIEEYKTTLKIIKQAILATDLAL | | |
| | YIKRRGEFQELIRKNQFNLEDPHQKELFLAMLMTACDLSAITKPWPIQQRIAELV | | |
| | ATEFFDQGDRERKELNIEPTDLMNREKKNKIPSMQVGFIDAICLQLYEALTHVSE | | |
| | DCFPLLDGCRKNRQKWQALAEQQSR* | | |
| OT-001267 (AcGFP | MVSKGAELFTGIVPILIELNGDVNGHKFSVSGEGEGDATYGKLTLKFICTTGKLP | 8581 | 8619 |
| (1-239 of WT); | VPWPTLVTTLSYGVQCFSRYPDHMKQHDFFKSAMPEGYIQERTIFFEDDGNYKS | | |
| Linker (GS); hPDE5 | RAEVKFEGDTLVNRIELTGTDFKEDGNILGNKMEYNYNAHNVYIMTDKAKNGI | | |
| (Amino acid 535-860 | KVNFKIRHNIEDGSVQLADHYQQNTPIGDGPVLLPDNHYLSTQSALSKDPNEKR | | |
| of WT, F736E); Xba | DHMIYFGFVTAAAITHGMDELYKGSEETRELQSLAAAVVPSAQTLKITDFSFSDF | | |
| I site (TCTAGA); | ELSDLETALCTIRMFTDLNLVQNFQMKHEVLCRWILSVKKNYRKNVAYHNWR | | |
| stop) | HAFNTAQCMFAALKAGKIQNKLTDLEILALLIAALSHDLDHRGVNNSYIQRSEH | | |
| | PLAQLYCHSIMEHHHFDQCLMILNSPGNQILSGLSIEEYKTTLKIIKQAILATDLAL | | |
| | YIKRRGEFEELIRKNQFNLEDPHQKELFLAMLMTACDLSAITKPWPIQQRIAELV | | |
| | ATEFFDQGDRERKELNIEPTDLMNREKKNKIPSMQVGFIDAICLQLYEALTHVSE | | |
| | DCFPLLDGCRKNRQKWQALAEQQSR* | | |
| OT-001268 (AcGFP | MVSKGAELFTGIVPILIELNGDVNGHKFSVSGEGEGDATYGKLTLKFICTTGKLP | 8582 | 8620 |
| (1-239 of WT); | VPWPTLVTTLSYGVQCFSRYPDHMKQHDFFKSAMPEGYIQERTIFFEDDGNYKS | | |
| Linker (GS); hPDE5 | RAEVKFEGDTLVNRIELTGTDFKEDGNILGNKMEYNYNAHNVYIMTDKAKNGI | | |
| (Amino acid 535-860 | KVNFKIRHNIEDGSVQLADHYQQNTPIGDGPVLLPDNHYLSTQSALSKDPNEKR | | |
| of WT, F736S); Xba | DHMIYFGFVTAAAITHGMDELYKGSEETRELQSLAAAVVPSAQTLKITDFSFSDF | | |
| I site (TCTAGA); | ELSDLETALCTIRMFTDLNLVQNFQMKHEVLCRWILSVKKNYRKNVAYHNWR | | |
| stop) | HAFNTAQCMFAALKAGKIQNKLTDLEILALLIAALSHDLDHRGVNNSYIQRSEH | | |
| | PLAQLYCHSIMEHHHFDQCLMILNSPGNQILSGLSIEEYKTTLKIIKQAILATDLAL | | |
| | YIKRRGEFSELIRKNQFNLEDPHQKELFLAMLMTACDLSAITKPWPIQQRIAELV | | |
| | ATEFFDQGDRERKELNIEPTDLMNREKKNKIPSMQVGFIDAICLQLYEALTHVSE | | |
| | DCFPLLDGCRKNRQKWQALAEQQSR* | | |
| OT-001269 (AcGFP | MVSKGAELFTGIVPILIELNGDVNGHKFSVSGEGEGDATYGKLTLKFICTTGKLP | 8583 | 8621 |
| (1-239 of WT); | VPWPTLVTTLSYGVQCFSRYPDHMKQHDFFKSAMPEGYIQERTIFFEDDGNYKS | | |
| Linker (GS); hPDE5 | RAEVKFEGDTLVNRIELTGTDFKEDGNILGNKMEYNYNAHNVYIMTDKAKNGI | | |
| (Amino acid 535-860 | KVNFKIRHNIEDGSVQLADHYQQNTPIGDGPVLLPDNHYLSTQSALSKDPNEKR | | |
| of WT, F736P); Xba | DHMIYFGFVTAAAITHGMDELYKGSEETRELQSLAAAVVPSAQTLKITDFSFSDF | | |
| I site (TCTAGA); | ELSDLETALCTIRMFTDLNLVQNFQMKHEVLCRWILSVKKNYRKNVAYHNWR | | |
| stop) | HAFNTAQCMFAALKAGKIQNKLTDLEILALLIAALSHDLDHRGVNNSYIQRSEH | | |
| | PLAQLYCHSIMEHHHFDQCLMILNSPGNQILSGLSIEEYKTTLKIIKQAILATDLAL | | |
| | YIKRRGEFPELIRKNQFNLEDPHQKELFLAMLMTACDLSAITKPWPIQQRIAELV | | |
| | ATEFFDQGDRERKELNIEPTDLMNREKKNKIPSMQVGFIDAICLQLYEALTHVSE | | |
| | DCFPLLDGCRKNRQKWQALAEQQSR* | | |
| OT-001270 (AcGFP | MVSKGAELFTGIVPILIELNGDVNGHKFSVSGEGEGDATYGKLTLKFICTTGKLP | 8584 | 8622 |
| (1-239 of WT); | VPWPTLVTTLSYGVQCFSRYPDHMKQHDFFKSAMPEGYIQERTIFFEDDGNYKS | | |
| Linker (GS); hPDE5 | RAEVKFEGDTLVNRIELTGTDFKEDGNILGNKMEYNYNAHNVYIMTDKAKNGI | | |
| (Amino acid 535-860 | KVNFKIRHNIEDGSVQLADHYQQNTPIGDGPVLLPDNHYLSTQSALSKDPNEKR | | |
| of WT, F736V); Xba | DHMIYFGFVTAAAITHGMDELYKGSEETRELQSLAAAVVPSAQTLKITDFSFSDF | | |
| I site (TCTAGA); | ELSDLETALCTIRMFTDLNLVQNFQMKHEVLCRWILSVKKNYRKNVAYHNWR | | |
| stop) | HAFNTAQCMFAALKAGKIQNKLTDLEILALLIAALSHDLDHRGVNNSYIQRSEH | | |
| | PLAQLYCHSIMEHHHFDQCLMILNSPGNQILSGLSIEEYKTTLKIIKQAILATDLAL | | |
| | YIKRRGEFVELIRKNQFNLEDPHQKELFLAMLMTACDLSAITKPWPIQQRIAELV | | |
| | ATEFFDQGDRERKELNIEPTDLMNREKKNKIPSMQVGFIDAICLQLYEALTHVSE | | |
| | DCFPLLDGCRKNRQKWQALAEQQSR* | | |
| OT-001271 (AcGFP | MVSKGAELFTGIVPILIELNGDVNGHKFSVSGEGEGDATYGKLTLKFICTTGKLP | 8585 | 8623 |
| (1-239 of WT); | VPWPTLVTTLSYGVQCFSRYPDHMKQHDFFKSAMPEGYIQERTIFFEDDGNYKS | | |
| Linker (GS); hPDE5 | RAEVKFEGDTLVNRIELTGTDFKEDGNILGNKMEYNYNAHNVYIMTDKAKNGI | | |
| (Amino acid 535-860 | KVNFKIRHNIEDGSVQLADHYQQNTPIGDGPVLLPDNHYLSTQSALSKDPNEKR | | |
| of WT, F736I); Xba I | DHMIYFGFVTAAAITHGMDELYKGSEETRELQSLAAAVVPSAQTLKITDFSFSDF | | |
| site (TCTAGA); | ELSDLETALCTIRMFTDLNLVQNFQMKHEVLCRWILSVKKNYRKNVAYHNWR | | |
| stop) | HAFNTAQCMFAALKAGKIQNKLTDLEILALLIAALSHDLDHRGVNNSYIQRSEH | | |
| | PLAQLYCHSIMEHHHFDQCLMILNSPGNQILSGLSIEEYKTTLKIIKQAILATDLAL | | |
| | YIKRRGEHELIRKNQFNLEDPHQKELFLAMLMTACDLSAITKPWPIQQRIAELVA | | |
| | TEFFDQGDRERKELNIEPTDLMNREKKNKIPSMQVGFIDAICLQLYEALTHVSED | | |
| | CFPLLDGCRKNRQKWQALAEQQSR* | | |
| OT-001272 (AcGFP | MVSKGAELFTGIVPILIELNGDVNGHKFSVSGEGEGDATYGKLTLKFICTTGKLP | 8586 | 8624 |
| (1-239 of WT); | VPWPTLVTTLSYGVQCFSRYPDHMKQHDFFKSAMPEGYIQERTIFFEDDGNYKS | | |
| Linker (GS); hPDE5 | RAEVKFEGDTLVNRIELTGTDFKEDGNILGNKMEYNYNAHNVYIMTDKAKNGI | | |
| (Amino acid 535-860 | KVNFKIRHNIEDGSVQLADHYQQNTPIGDGPVLLPDNHYLSTQSALSKDPNEKR | | |
| of WT, F736C); Xba | DHMIYFGFVTAAAITHGMDELYKGSEETRELQSLAAAVVPSAQTLKITDFSFSDF | | |
| I site (TCTAGA); | ELSDLETALCTIRMFTDLNLVQNFQMKHEVLCRWILSVKKNYRKNVAYHNWR | | |
| stop) | HAFNTAQCMFAALKAGKIQNKLTDLEILALLIAALSHDLDHRGVNNSYIQRSEH | | |
| | PLAQLYCHSIMEHHHFDQCLMILNSPGNQILSGLSIEEYKTTLKIIKQAILATDLAL | | |
| | YIKRRGEFCELIRKNQFNLEDPHQKELFLAMLMTACDLSAITKPWPIQQRIAELV | | |
| | ATEFFDQGDRERKELNIEPTDLMNREKKNKIPSMQVGFIDAICLQLYEALTHVSE | | |
| | DCFPLLDGCRKNRQKWQALAEQQSR* | | |
| OT-001273 (AcGFP | MVSKGAELFTGIVPILIELNGDVNGHKFSVSGEGEGDATYGKLTLKFICTTGKLP | 8587 | 8625 |
| (1-239 of WT); | VPWPTLVTTLSYGVQCFSRYPDHMKQHDFFKSAMPEGYIQERTIFFEDDGNYKS | | |
| Linker (GS); hPDE5 | RAEVKFEGDTLVNRIELTGTDFKEDGNILGNKMEYNYNAHNVYIMTDKAKNGI | | |
| (Amino acid 535-860 | KVNFKIRHNIEDGSVQLADHYQQNTPIGDGPVLLPDNHYLSTQSALSKDPNEKR | | |
| of WT, F736Y); Xba | DHMIYFGFVTAAAITHGMDELYKGSEETRELQSLAAAVVPSAQTLKITDFSFSDF | | |
| I site (TCTAGA); | ELSDLETALCTIRMFTDLNLVQNFQMKHEVLCRWILSVKKNYRKNVAYHNWR | | |
| stop) | HAFNTAQCMFAALKAGKIQNKLTDLEILALLIAALSHDLDHRGVNNSYIQRSEH | | |
| | PLAQLYCHSIMEHHHFDQCLMILNSPGNQILSGLSIEEYKTTLKIIKQAILATDLAL | | |
| | YIKRRGEFYELIHRKNQFNLEDPHQKELFLAMLMTACDLSAITKPWPIQQRIAELV | | |
| | ATEFFDQGDRERKELNIEPTDLMNREKKNKIPSMQVGFIDAICLQLYEALTHVSE | | |
| | DCFPLLDGCRKNRQKWQALAEQQSR* | | |
| OT-001274 (AcGFP | MVSKGAELFTGIVPILIELNGDVNGHKFSVSGEGEGDATYGKLTLKFICTTGKLP | 8588 | 8626 |
| (1-239 of WT); | VPWPTLVTTLSYGVQCFSRYPDHMKQHDFFKSAMPEGYIQERTIFFEDDGNYKS | | |
| Linker (GS); hPDE5 | RAEVKFEGDTLVNRIELTGTDFKEDGNILGNKMEYNYNAHNVYIMTDKAKNGI | | |
| (Amino acid 535-860 | KVNFKIRHNIEDGSVQLADHYQQNTPIGDGPVLLPDNHYLSTQSALSKDPNEKR | | |
| of WT, F736I4); Xba | DHMIYFGFVTAAAITHGMDELYKGSEETRELQSLAAAVVPSAQTLKITDFSFSDF | | |
| I site (TCTAGA); | ELSDLETALCTIRMFTDLNLVQNFQMKHEVLCRWILSVKKNYRKNVAYHNWR | | |
| stop) | HAFNTAQCMFAALKAGKIQNKLTDLEILALLIAALSHDLDHRGVNNSYIQRSEH | | |
| | PLAQLYCHSIMEHHHFDQCLMILNSPGNQILSGLSIEEYKTTLKIIKQAILATDLAL | | |
| | YIKRRGEFHELIHRKNQFNLEDPHQKELFLAMLMTACDLSAITKPWPIQQRIAELV | | |
| | ATEFFDQGDRERKELNIEPTDLMNREKKNKIPSMQVGFIDAICLQLYEALTHVSE | | |
| | DCFPLLDGCRKNRQKWQALAEQQSR* | | |
| OT-001275 (AcGFP | MVSKGAELFTGIVPILIELNGDVNGHKFSVSGEGEGDATYGKLTLKFICTTGKLP | 8589 | 8627 |
| (1-239 of WT); | VPWPTLVTTLSYGVQCFSRYPDHMKQHDFFKSAMPEGYIQERTIFFEDDGNYKS | | |
| Linker (GS); hPDE5 | RAEVKFEGDTLVNRIELTGTDFKEDGNILGNKMEYNYNAHNVYIMTDKAKNGI | | |
| (Amino acid 535-860 | KVNFKIRHNIEDGSVQLADHYQQNTPIGDGPVLLPDNHYLSTQSALSKDPNEKR | | |
| of WT, F736N); Xba | DHMIYFGFVTAAAITHGMDELYKGSEETRELQSLAAAVVPSAQTLKITDFSFSDF | | |
| I site (TCTAGA); | ELSDLETALCTIRMFTDLNLVQNFQMKHEVLCRWILSVKKNYRKNVAYHNWR | | |
| stop) | HAFNTAQCMFAALKAGKIQNKLTDLEILALLIAALSHDLDHRGVNNSYIQRSEH | | |
| | PLAQLYCHSIMEHHHFDQCLMILNSPGNQILSGLSIEEYKTTLKIIKQAILATDLAL | | |
| | YIKRRGEFNELIRKNQFNLEDPHQKELFLAMLMTACDLSAITKPWPIQQRIAELV | | |
| | ATEFFDQGDRERKELNIEPTDLMNREKKNKIPSMQVGFIDAICLQLYEALTHVSE | | |
| | DCFPLLDGCRKNRQKWQALAEQQSR* | | |
| OT-001276 (AcGFP | MVSKGAELFTGIVPILIELNGDVNGHKFSVSGEGEGDATYGKLTLKFICTTGKLP | 8590 | 8628 |
| (1-239 of WT); | VPWPTLVTTLSYGVQCFSRYPDHMKQHDFFKSAMPEGYIQERTIFFEDDGNYKS | | |
| Linker (GS); hPDE5 | RAEVKFEGDTLVNRIELTGTDFKEDGNILGNKMEYNYNAHNVYIMTDKAKNGI | | |
| (Amino acid 535-860 | KVNFKIRHNIEDGSVQLADHYQQNTPIGDGPVLLPDNHYLSTQSALSKDPNEKR | | |
| of WT, F736D); Xba | DHMIYFGFVTAAAITHGMDELYKGSEETRELQSLAAAVVPSAQTLKITDFSFSDF | | |
| I site (TCTAGA); | ELSDLETALCTIRMFTDLNLVQNFQMKHEVLCRWILSVKKNYRKNVAYHNWR | | |
| stop) | HAFNTAQCMFAALKAGKIQNKLTDLEILALLIAALSHDLDHRGVNNSYIQRSEH | | |
| | PLAQLYCHSIMEHHHFDQCLMILNSPGNQILSGLSIEEYKTTLKIIKQAILATDLAL | | |
| | YIKRRGEFDELIRKNQFNLEDPHQKELFLAMLMTACDLSAITKPWPIQQRIAELV | | |
| | ATEFFDQGDRERKELNIEPTDLMNREKKNKIPSMQVGFIDAICLQLYEALTHVSE | | |
| | DCFPLLDGCRKNRQKWQALAEQQSR* | | |
| OT-001277 (AcGFP | MVSKGAELFTGIVPILIELNGDVNGHKFSVSGEGEGDATYGKLTLKFICTTGKLP | 8591 | 8629 |
| (1-239 of WT); | VPWPTLVTTLSYGVQCFSRYPDHMKQHDFFKSAMPEGYIQERTIFFEDDGNYKS | | |
| Linker (GS); hPDE5 | RAEVKFEGDTLVNRIELTGTDFKEDGNILGNKMEYNYNAHNVYIMTDKAKNGI | | |
| (Amino acid 535-860 | KVNFKIRHNIEDGSVQLADHYQQNTPIGDGPVLLPDNHYLSTQSALSKDPNEKR | | |
| of WT, F736T); Xba | DHMIYFGFVTAAAITHGMDELYKGSEETRELQSLAAAVVPSAQTLKITDFSFSDF | | |
| I site (TCTAGA); | ELSDLETALCTIRMFTDLNLVQNFQMKHEVLCRWILSVKKNYRKNVAYHNWR | | |
| stop) | HAFNTAQCMFAALKAGKIQNKLTDLEILALLIAALSHDLDHRGVNNSYIQRSEH | | |
| | PLAQLYCHSIMEHHHFDQCLMILNSPGNQILSGLSIEEYKTTLKIIKQAILATDLAL | | |
| | YIKRRGEFTELIRKNQFNLEDPHQKELFLAMLMTACDLSAITKPWPIQQRIAELV | | |
| | ATEFFDQGDRERKELNIEPTDLMNREKKNKIPSMQVGFIDAICLQLYEALTHVSE | | |
| | DCFPLLDGCRKNRQKWQALAEQQSR* | | |

[0160] In some embodiments, any of the mutations taught in Table 1, Table 3, Table 6, Table 9 may be combined. In one embodiment, the combination mutations are provided in Table 10. Combination mutations may be linked to AcGFP (Amino acid 2-239 of WT) (SEQ ID NO: 79); encoded by the nucleotide sequence of SEQ ID NO: 372; AcGFP (Amino acid 1-239 of WT) (SEQ ID NO: 365); encoded by the nucleotide sequence of SEQ ID NO: 94; or firefly luciferase, Fluc (N50D, N119G, S548I, K549A, L550V) (SEQ ID NO: 223) encoded by the nucleotide sequence of SEQ ID NO: 224. In some embodiments, the portions of the construct may be linked through a linker e.g. SG linker, encoded by the nucleotide sequence (AGTGGT) or a GGSGGG linker (SEQ ID NO: 8630), encoded by (SEQ ID NO: 8631). In some embodiments, the constructs described in Table 10 may comprise an Xba I restriction site, SR, encoded by the nucleotide sequence, TCTAGA. Table 10 provides the constructs comprising the combination mutations. In Table 10, translation of the stop codon is indicated by asterisk.

TABLE 10
hPDE5 combination mutations

| | | Amino | Nucleic |
|---|---|---|---|
| | | acid | Acid |
| Construct ID/ | | SEQ | SEQ |
| Description | Amino Acid Sequence | ID NO: | ID NO: |
| hPDE5 (Amino | EETRELQSLAAAVVPSAQTLKITDFSFSDFELSDLETALCTIRMFTDLNLVQNFQM | 504 | 519 |
| acid 535-860 of | KHEVLCRWILSVKKNYRKNVAYHNWRHAFNTAQCMFAALKAGKIQNKLTDLEI | | |
| WT, F736A, | LALLIAALSHDLDHRGVNNSYIQRSEHPLAQLYCHSIMEHHHFDQCLMILNSPGN | | |
| D764N) | QILSGLSIEEYKTTLKIIKQAILATDLALYIKRRGEFAELIRKNQFNLEDPHQKELFL | | |
| | AMLMTACNLSAITKPWPIQQRIAELVATEFFDQGDRERKELNIEPTDLMNREKKN | | |
| | KIPSMQVGFIDAICLQLYEALTHVSEDCFPLLDGCRKNRQKWQALAEQQ | | |
| Methionine; | MEETRELQSLAAAVVPSAQTLKITDFSFSDFELSDLETALCTIRMFTDLNLVQNFQ | 225 | 231 |
| hPDE5 (Amino | MKHEVLCRWILSVKKNYRKNVAYHNWRHAFNTAQCMFAALKAGKIQNKLTDL | | |
| acid 535-860 of | EILALLIAALSHDLDHRGVNNSYIQRSEHPLAQLYCHSIMEHHHFDQCLMILNSPG | | |
| WT, F736A, | NQILSGLSIEEYKTTLKIIKQAILATDLALYIKRRGEFAELIRKNQFNLEDPHQKELF | | |
| D764N) | LAMLMTACNLSAITKPWPIQQRIAELVATEFFDQGDRERKELNIEPTDLMNREKK | | |
| | NKIPSMQVGFIDAICLQLYEALTHVSEDCFPLLDGCRKNRQKWQALAEQQ | | |
| hPDE5 (Amino | EETRELQSLAAAVVPSAQTLKITDFSFSDFELSDLETALCTIRMFTDLNLVQNFQM | 505 | 520 |
| acid 535-860 of | KHEVLCRWILSVKKNYRKNVAYHNWRHAFNTAQCMFAALKAGKIQNKLTDLEI | | |
| WT, R732L, | LALLIAALSHDLDHRGVNNSYIQRSEHPLAQLYCHSIMEHHHFDQCLMILNSPGN | | |
| D764N) | QILSGLSIEEYKTTLKIIKQAILATDLALYIKRLGEFFELIRKNQFNLEDPHQKELFL | | |
| | AMLMTACNLSAITKPWPIQQRIAELVATEFFDQGDRERKELNIEPTDLMNREKKN | | |
| | KIPSMQVGFIDAICLQLYEALTHVSEDCFPLLDGCRKNRQKWQALAEQQ | | |
| Methionine; | MEETRELQSLAAAVVPSAQTLKITDFSFSDFELSDLETALCTIRMFTDLNLVQNFQ | 226 | 232 |
| hPDE5 (Amino | MKHEVLCRWILSVKKNYRKNVAYHNWRHAFNTAQCMFAALKAGKIQNKLTDL | | |
| acid 535-860 of | EILALLIAALSHDLDHRGVNNSYIQRSEHPLAQLYCHSIMEHHHFDQCLMILNSPG | | |
| WT, R732L, | NQILSGLSIEEYKTTLKIIKQAILATDLALYIKRLGEFFELIRKNQFNLEDPHQKELF | | |
| D764N) | LAMLMTACNLSAITKPWPIQQRIAELVATEFFDQGDRERKELNIEPTDLMNREKK | | |
| | NKIPSMQVGFIDAICLQLYEALTHVSEDCFPLLDGCRKNRQKWQALAEQQ | | |
| hPDE5 (Amino | EETRELQSLAAAVVPSAQTLKITDFSFSDFELSDLETALCTIRMFTDLNLVQNFQM | 227 | 233 |
| acid 535-860 of | KHEVLCRWILSVKKNYRKNVAYHNWRHAFNTAQCMFAALKAGKIQNKLTDLEI | | |
| WT, R732L, | LALLIAALSHDLDHRGVNNSYIQRSEHPLAQLYCHSIMEHHHFDQCLMILNSPGN | | |
| F736A) | QILSGLSIEEYKTTLKIIKQAILATDLALYIKRLGEFAELIRKNQFNLEDPHQKELFL | | |
| | AMLMTACDLSAITKPWPIQQRIAELVATEFFDQGDRERKELNIEPTDLMNREKKN | | |
| | KIPSMQVGFIDAICLQLYEALTHVSEDCFPLLDGCRKNRQKWQALAEQQ | | |
| hPDE5 (Amino | EETRELQSLAAAVVPSAQTLKITDFSFSDFELSDLETALCTIRMFTDLNLVQNFQM | 506 | 521 |
| acid 535-860 of | KHEVLCRWILSVKKNYRKNVAFHNWRHAFNTAQCMFAALKAGKIQNKLTDLEI | | |
| WT, Y612F, | LALLIAALSHDLDHRGVNNSYIQRSEHPLAQLYCHSIMEHHHFDQCLMILNSPGN | | |
| R732L) | QILSGLSIEEYKTTLKIIKQAILATDLALYIKRLGEFFELIRKNQFNLEDPHQKELFL | | |
| | AMLMTACDLSAITKPWPIQQRIAELVATEFFDQGDRERKELNIEPTDLMNREKKN | | |
| | KIPSMQVGFIDAICLQLYEALTHVSEDCFPLLDGCRKNRQKWQALAEQQ | | |
| hPDE5 (Amino | EETRELQSLAAAVVPSAQTLKITDFSFSDFELSDLETALCTIRMFTDLNLVQNFQM | 507 | 522 |
| acid 535-860 of | KHEVLCRWILSVKKNYRKNVAWHNWRHAFNTAQCMFAALKAGKIQNKLTDLEI | | |
| WT, Y612W, | LALLIAALSHDLDHRGVNNSYIQRSEHPLAQLYCHSIMEHHHFDQCLMILNSPGN | | |
| R732L) | QILSGLSIEEYKTTLKIIKQAILATDLALYIKRLGEFFELIRKNQFNLEDPHQKELFL | | |
| | AMLMTACDLSAITKPWPIQQRIAELVATEFFDQGDRERKELNIEPTDLMNREKKN | | |
| | KIPSMQVGFIDAICLQLYEALTHVSEDCFPLLDGCRKNRQKWQALAEQQ | | |
| hPDE5 (Amino | EETRELQSLAAAVVPSAQTLKITDFSFSDFELSDLETALCTIRMFTDLNLVQNFQM | 508 | 523 |
| acid 535-860 of | KHEVLCRWILSVKKNYRKNVAAHNWRHAFNTAQCMFAALKAGKIQNKLTDLEI | | |
| WT, Y612A, | LALLIAALSHDLDHRGVNNSYIQRSEHPLAQLYCHSIMEHHHFDQCLMILNSPGN | | |
| R732L) | QILSGLSIEEYKTTLKIIKQAILATDLALYIKRLGEFFELIRKNQFNLEDPHQKELFL | | |
| | AMLMTACDLSAITKPWPIQQRIAELVATEFFDQGDRERKELNIEPTDLMNREKKN | | |
| | KIPSMQVGFIDAICLQLYEALTHVSEDCFPLLDGCRKNRQKWQALAEQQ | | |
| hPDE5 (Amino | EETRELQSLAAAVVPSAQTLKITDFSFSDFELSDLETALCTIRMFTDLNLVQNFQM | 509 | 524 |
| acid 535-860 of | KHEVLCRWILSVKKNYRKNVAYHNWRHAFNTAQCMFAALKAGKIQNKLTDLEI | | |
| WT, 11653A, | LALLIAALSADLDHRGVNNSYIQRSEHPLAQLYCHSIMEHHHFDQCLMILNSPGN | | |
| R732L) | QILSGLSIEEYKTTLKIIKQAILATDLALYIKRLGEFFELIRKNQFNLEDPHQKELFL | | |
| | AMLMTACDLSAITKPWPIQQRIAELVATEFFDQGDRERKELNIEPTDLMNREKKN | | |
| | KIPSMQVGFIDAICLQLYEALTHVSEDCFPLLDGCRKNRQKWQALAEQQ | | |
| hPDE5 (Amino | EETRELQSLAAAVVPSAQTLKITDFSFSDFELSDLETALCTIRMFTDLNLVQNFQM | 510 | 525 |
| acid 535-860 of | KHEVLCRWILSVKKNYRKNVAYHNWRHAFNTAQCMFAALKAGKIQNKLTDLEI | | |
| WT, R732L, | LALLIAALSHDLDHRGVNNSYIQRSEHPLAQLYCHSIMEHHHFDQCLMILNSPGN | | |
| D764A) | QILSGLSIEEYKTTLKIIKQAILATDLALYIKRLGEFFELIRKNQFNLEDPHQKELFL | | |
| | AMLMTACALSAITKPWPIQQRIAELVATEFFDQGDRERKELNIEPTDLMNREKKN | | |
| | KIPSMQVGFIDAICLQLYEALTHVSEDCFPLLDGCRKNRQKWQALAEQQ | | |
| hPDE5 (Amino | EETRELQSLAAAVVPSAQTLKITDFSFSDFELSDLETALCTIRMFTDLNLVQNFQM | 8632 | 8640 |
| acid 535-860 of | KHEVLCRWILSVKKNYRKNVAYHNWRHAFNTAQCMFAALKAGKIQNKLTDLEI | | |
| WT, D724G, | LALLIAALSHDLDHRGVNNSYIQRSEHPLAQLYCHSIMEHHHFDQCLMILNSPGN | | |
| D764G) | QILSGLSIEEYKTTLKIIKQAILATGLALYIKRRGEFFELIRKNQFNLEDPHQKELFL | | |
| | AMLMTACGLSAITKPWPIQQRIAELVATEFFDQGDRERKELNIEPTDLMNREKKN | | |
| | KIPSMQVGFIDAICLQLYEALTHVSEDCFPLLDGCRKNRQKWQALAEQQ | | |
| hPDE5 (Amino | EETRELQSLAAAVVPSAQTLKITDFSFSDFELSDLETALCTIRMFTDLNLVQNFQM | 8633 | 8641 |
| acid 535-860 of | KHEVLCRWILSVKKNYRKNVAYHNWRHAFNTAQCMFAALKAGKIQNKLTDLEI | | |
| WT, Y728L, | LALLIAALSHDLDHRGVNNSYIQRSEHPLAQLYCHSIMEHHHFDQCLMILNSPGN | | |
| D764N) | QILSGLSIEEYKTTLKIIKQAILATDLALLIKRRGEFFELIRKNQFNLEDPHQKELFLA | | |
| | MLMTACNLSAITKPWPIQQRIAELVATEFFDQGDRERKELNIEPTDLMNREKKNKI | | |
| | PSMQVGFIDAICLQLYEALTHVSEDCFPLLDGCRKNRQKWQALAEQQ | | |
| hPDE5 (Amino | EETRELQSLAAAVVPSAQTLKITDFSFSDFELSDLETALCTIRMFTDLNLVQNFQM | 8634 | 8642 |
| acid 535-860 of | KHEVLCRWILSVKKNYRKNVAYHNWRHAFNTAQCMFAALKAGKIQNKLTDLEI | | |
| WT, E682A, | LALLIAALSHDLDHRGVNNSYIQRSEHPLAQLYCHSIMAHHHFDQCLMILNSPGN | | |
| R732L) | QILSGLSIEEYKTTLKIIKQAILATDLALYIKRLGEFFELIRKNQFNLEDPHQKELFL | | |
| | AMLMTACDLSAITKPWPIQQRIAELVATEFFDQGDRERKELNIEPTDLMNREKKN | | |
| | KIPSMQVGFIDAICLQLYEALTHVSEDCFPLLDGCRKNRQKWQALAEQQ | | |
| hPDE5 (Amino | EETRELQSLAAAVVPSAQTLKITDFSFSDFELSDLETALCTIRMFTDLNLVQNFQM | 8635 | 8643 |
| acid 535-860 of | KHEVLCRWILSVKKNYRKNVAYHNWRHAFNTAQCMFAALKAGKIQNKLTDLEI | | |
| WT, D724A, | LALLIAALSHDLDHRGVNNSYIQRSEHPLAQLYCHSIMEHHHFDQCLMILNSPGN | | |
| R732L) | QILSGLSIEEYKTTLKIIKQAILATALALYIKRLGEFFELIRKNQFNLEDPHQKELFL | | |
| | AMLMTACDLSAITKPWPIQQRIAELVATEFFDQGDRERKELNIEPTDLMNREKKN | | |
| | KIPSMQVGFIDAICLQLYEALTHVSEDCFPLLDGCRKNRQKWQALAEQQ | | |
| OT-001222 | MEETRELQSLAAAVVPSAQTLKITDFSFSDFELSDLETALCTIRMFTDLNLVQNFQ | 228 | 234 |
| (Methionine; | MKHEVLCRWILSVKKNYRKNVAYHNWRHAFNTAQCMFAALKAGKIQNKLTDL | | |
| hPDE5 (Amino | EILALLIAALSHDLDHRGVNNSYIQRSEHPLAQLYCHSIMEHHHFDQCLMILNSPG | | |
| acid 535-860 of | NQILSGLSIEEYKTTLKIIKQAILATDLALYIKRRGEFAELIRKNQFNLEDPHQKELF | | |
| WT, F736A, | LAMLMTACNLSAITKPWPIQQRIAELVATEFFDQGDRERKELNIEPTDLMNREKK | | |
| D764N); linker | NKIPSMQVGFIDAICLQLYEALTHVSEDCFPLLDGCRKNRQKWQALAEQQSGVSK | | |
| (SG); AcGFP | GAELFTGIVPILIELNGDVNGHKFSVSGEGEGDATYGKLTLKFICTTGKLPVPWPT | | |
| (Amino acid 2-239 | LVTTLSYGVQCFSRYPDHMKQHDFFKSAMPEGYIQERTIFFEDDGNYKSRAEVKF | | |
| of WT); stop | EGDTLVNRIELTGTDFKEDGNILGNKMEYNYNAHNVYIMTDKAKNGIKVNEKIR | | |
| | HNIEDGSVQLADHYQQNTPIGDGPVLLPDNHYLSTQSALSKDPNEKRDHMIYEGF | | |
| | VTAAAITHGMDELYK* | | |
| OT-001223 | MEETRELQSLAAAVVPSAQTLKITDFSFSDFELSDLETALCTIRMFTDLNLVQNFQ | 229 | 235 |
| (Methionine; | MKHEVLCRWILSVKKNYRKNVAYHNWRHAFNTAQCMFAALKAGKIQNKLTDL | | |
| hPDE5 (Amino | EILALLIAALSHDLDHRGVNNSYIQRSEHPLAQLYCHSIMEHHHFDQCLMILNSPG | | |
| acid 535-860 of | NQILSGLSIEEYKTTLKIIKQAILATDLALYIKRLGEFFELIRKNQFNLEDPHQKELF | | |
| WT, R732L, | LAMLMTACNLSAITKPWPIQQRIAELVATEFFDQGDRERKELNIEPTDLMNREKK | | |
| D764N); linker | NKIPSMQVGFIDAICLQLYEALTHVSEDCFPLLDGCRKNRQKWQALAEQQSGVSK | | |
| (SG); AcGFP | GAELFTGIVPILIELNGDVNGHKESVSGEGEGDATYGKLTLKFICTTGKLPVPWPT | | |
| (Amino acid 2-239 | LVTTLSYGVQCFSRYPDHMKQHDFFKSAMPEGYIQERTIFFEDDGNYKSRAEVKF | | |
| of WT); stop) | EGDTLVNRIELTGTDFKEDGNILGNKMEYNYNAHNVYIMTDKAKNGIKVNFKIR | | |
| | HNIEDGSVQLADHYQQNTPIGDGPVLLPDNHYLSTQSALSKDPNEKRDHMIYFGF | | |
| | VTAAAITHGMDELYK* | | |
| OT-001231 (Fluc | MEDAKNIKKGPAPFYPLEDGTAGEQLHKAMKRYALVPGTIAFTDAHIEVDITYAE | 230 | 236 |
| (N50D, N119G, | YFEMSVRLAEAMKRYGLNTNHRIVVCSENSLQFFMPVLGALFIGVAVAPANDIYN | | |
| S548I, K549A, | ERELLNSMGISQPTVVFVSKKGLQKILNVQKKLPIIQKIIIMDSKTDYQGFQSMYTE | | |
| L550V); linker | VTSHIPPGFNEYDFVPESFDRDKTIALIMNSSGSTGLPKGVALPHRTACVRFSHAR | | |
| (SG); hPDE5 | DPIFGNQIIPDTAILSVVPFHHGFGMFTTLGYLICGFRVVLMYRFEEELFLRSLQDY | | |
| (Amino acid 535- | KIQSALLVPTLFSFFAKSTLIDKYDLSNLHEIASGGAPLSKEVGEAVAKRFHLPGIR | | |
| 860 of WT, | QGYGLTETTSAILITPEGDDKPGAVGKVVPFFEAKVVDLDTGKTLGVNQRGELCV | | |
| R732L; F736A); | RGPMIMSGYVNNPEATNALIDKDGWLHSGDIAYWDEDEHFFIVDRLKSLIKYKG | | |
| stop) | YQVAPAELESILLQHPNIFDAGVAGLPDDDAGELPAAVVVLEHGKTMTEKEIVDY | | |
| | VASQVTTAKKLRGGVVFVDEVPKGLTGKLDARKIREILIKAKKGGKIAVSGEETR | | |
| | ELQSLAAAVVPSAQTLKITDFSFSDFELSDLETALCTIRMFTDLNLVQNFQMKHEV | | |
| | LCRWILSVKKNYRKNVAYHNWRHAFNTAQCMFAALKAGKIQNKLTDLEILALLI | | |
| | AALSHDLDHRGVNNSYIQRSEHPLAQLYCHSIMEHHHFDQCLMILNSPGNQILSG | | |
| | LSIEEYKTTLKIIKQAILATDLALYIKRLGEFAELIRKNQFNLEDPHQKELFLAMLM | | |
| | TACDLSAITKPWPIQQRIAELVATEFFDQGDRERKELNIEPTDLMNREKKNKIPSM | | |
| | QVGFIDAICLQLYEALTHVSEDCFPLLDGCRKNRQKWQALAEQQ* | | |
| OT-001225 | MEETRELQSLAAAVVPSAQTLKITDFSFSDFELSDLETALCTIRMFTDLNLVQNFQ | 511 | 526 |
| (Methionine; | MKHEVLCRWILSVKKNYRKNVAYHNWRHAFNTAQCMFAALKAGKIQNKLTDL | | |
| hPDE5 (Amino | EILALLIAALSHDLDHRGVNNSYIQRSEHPLAQLYCHSIMEHHHFDQCLMILNSPG | | |
| acid 535-860 of | NQILSGLSIEEYKTTLKIIKQAILATDLALYIKRLGEFAELIRKNQFNLEDPHQKELF | | |
| WT, R732L, | LAMLMTACDLSAITKPWPIQQRIAELVATEFFDQGDRERKELNIEPTDLMNREKK | | |
| F736A); Linker | NKIPSMQVGFIDAICLQLYEALTHVSEDCFPLLDGCRKNRQKWQALAEQQSGVSK | | |
| (SG); AcGFP | GAELFTGIVPILIELNGDVNGHKFSVSGEGEGDATYGKLTLKFICTTGKLPVPWPT | | |
| (Amino acid 2-239 | LVTTLSYGVQCFSRYPDHMKQHDFFKSAMPEGYIQERTIFFEDDGNYKSRAEVKF | | |
| of WT); stop) | EGDTLVNRIELTGTDFKEDGNILGNKMEYNYNAHNVYIMTDKAKNGIKVNFKIR | | |
| | HNIEDGSVQLADHYQQNTPIGDGPVLLPDNHYLSTQSALSKDPNEKRDHMIYFGF | | |
| | VTAAAITHGMDELYK* | | |
| OT-001226 | MVSKGAELFTGIVPILIELNGDVNGHKFSVSGEGEGDATYGKLTLKFICTTGKLPV | 512 | 527 |
| (AeGFP (Amino | PWPTLVTTLSYGVQCFSRYPDHMKQHDFFKSAMPEGYIQERTIFFEDDGNYKSRA | | |
| acid 1-239 of | EVKFEGDTLVNRIELTGTDFKEDGNILGNKMEYNYNAHNVYIMTDKAKNGIKVN | | |
| WT); linker (SG); | FKIRHNIEDGSVQLADHYQQNTPIGDGPVLLPDNHYLSTQSALSKDPNEKRDHMI | | |
| PDE5 (Amino | YFGFVTAAAITHGMDELYKSGEETRELQSLAAAVVPSAQTLKITDFSFSDFELSDL | | |
| acid 535-860 of | ETALCTIRMFTDLNLVQNFQMKHEVLCRWILSVKKNYRKNVAYHNWRHAFNTA | | |
| WT, R732L, | QCMFAALKAGKIQNKLTDLEILALLIAALSHDLDHRGVNNSYIQRSEHPLAQLYC | | |
| F736A); stop) | HSIMEHHHFDQCLMILNSPGNQILSGLSIEEYKTTLKIIKQAILATDLALYIKRLGEF | | |
| | AELIRKNQFNLEDPHQKELFLAMLMTACDLSAITKPWPIQQRIAELVATEFFDQGD | | |
| | RERKELNIEPTDLMNREKKNKIPSMQVGFIDAICLQLYEALTHVSEDCFPLLDGCR | | |
| | KNRQKWQALAEQQ* | | |
| OT-001205 | MVSKGAELFTGIVPILIELNGDVNGHKFSVSGEGEGDATYGKLTLKFICTTGKLPV | 513 | 528 |
| (AeGFP (Amino | PWPTLVTTLSYGVQCFSRYPDHMKQHDFFKSAMPEGYIQERTIFFEDDGNYKSRA | | |
| acid 1-239 of | EVKFEGDTLVNRIELTGTDEKEDGNILGNKMEYNYNAHNVYIMTDKAKNGIKVN | | |
| WT); linker (SG); | FKIRHNIEDGSVQLADHYQQNTPIGDGPVLLPDNHYLSTQSALSKDPNEKRDHMI | | |
| hPDE5 (Amino | YFGFVTAAAITHGMDELYKSGEETRELQSLAAAVVPSAQTLKITDFSFSDFELSDL | | |
| acid 535-860 of | ETALCTIRMFTDLNLVQNFQMKHEVLCRWILSVKKNYRKNVAFHNWRHAFNTA | | |
| WT, Y612F, | QCMFAALKAGKIQNKLTDLEILALLIAALSHDLDHRGVNNSYIQRSEHPLAQLYC | | |
| R732L) stop) | HSIMEHHHFDQCLMILNSPGNQILSGLSIEEYKTTLKIIKQAILATDLALYIKRLGEF | | |
| | FELIRKNQFNLEDPHQKELFLAMLMTACDLSAITKPWPIQQRIAELVATEFFDQGD | | |
| | RERKELNIEPTDLMNREKKNKIPSMQVGFIDAICLQLYEALTHVSEDCFPLLDGCR | | |
| | KNRQKWQALAEQQ* | | |
| OT-001206 | MVSKGAELFTGIVPILIELNGDVNGHKFSVSGEGEGDATYGKLTLKFICTTGKLPV | 514 | 529 |
| (AeGFP (Amino | PWPTLVTTLSYGVQCFSRYPDHMKQHDFFKSAMPEGYIQERTIFFEDDGNYKSRA | | |
| acid 1-239 of | EVKFEGDTLVNRIELTGTDFKEDGNILGNKMEYNYNAHNVYIMTDKAKNGIKVN | | |
| WT); linker (SG); | FKIRHNIEDGSVQLADHYQQNTPIGDGPVLLPDNHYLSTQSALSKDPNEKRDHMI | | |
| hPDE5 (Amino | YFGFVTAAAITHGMDELYKSGEETRELQSLAAAVVPSAQTLKITDFSFSDFELSDL | | |
| acid 535-860 of | ETALCTIRMFTDLNLVQNFQMKHEVLCRWILSVKKNYRKNVAWHNWRHAFNTA | | |
| WT, Y612W, | QCMFAALKAGKIQNKLTDLEILALLIAALSHDLDHRGVNNSYIQRSEHPLAQLYC | | |
| R732L) stop) | HSIMEHHHFDQCLMILNSPGNQILSGLSIEEYKTTLKIIKQAILATDLALYIKRLGEF | | |
| | FELIRKNQFNLEDPHQKELFLAMLMTACDLSAITKPWPIQQRIAELVATEFFDQGD | | |
| | RERKELNIEPTDLMNREKKNKIPSMQVGFIDAICLQLYEALTHVSEDCFPLLDGCR | | |
| | KNRQKWQALAEQQ* | | |
| OT-001207 | MVSKGAELFTGIVPILIELNGDVNGHKESVSGEGEGDATYGKLTLKFICTTGKLPV | 515 | 530 |
| (AcGFP (Amino | PWPTLVTTLSYGVQCFSRYPDHMKQHDFFKSAMPEGYIQERTIFFEDDGNYKSRA | | |
| acid 1-239 of | EVKFEGDTLVNRIELTGTDFKEDGNILGNKMEYNYNAHNVYIMTDKAKNGIKVN | | |
| WT); linker (SG); | FKIRHNIEDGSVQLADHYQQNTPIGDGPVLLPDNHYLSTQSALSKDPNEKRDHMI | | |
| hPDE5 (Amino | YFGFVTAAAITHGMDELYKSGEETRELQSLAAAVVPSAQTLKITDFSFSDFELSDL | | |
| acid 535-860 of | ETALCTIRMFTDLNLVQNFQMKHEVLCRWILSVKKNYRKNVAAHNWRHAFNTA | | |
| WT, Y612A, | QCMFAALKAGKIQNKLTDLEILALLIAALSHDLDHRGVNNSYIQRSEHPLAQLYC | | |
| R732L) stop) | HSIMEHHHFDQCLMILNSPGNQILSGLSIEEYKTTLKIIKQAILATDLALYIKRLGEF | | |
| | FELIRKNQFNLEDPHQKELFLAMLMTACDLSAITKPWPIQQRIAELVATEFFDQGD | | |
| | RERKELNIEPTDLMNREKKNKIPSMQVGFIDAICLQLYEALTHVSEDCFPLLDGCR | | |
| | KNRQKWQALAEQQ* | | |
| OT-001212 | MVSKGAELFTGIVPILIELNGDVNGHKFSVSGEGEGDATYGKLTLKFICTTGKLPV | 516 | 531 |
| (AcGFP (Amino | PWPTLVTTLSYGVQCFSRYPDHMKQHDFFKSAMPEGYIQERTIFFEDDGNYKSRA | | |
| acid 1-239 of | EVKFEGDTLVNRIELTGTDFKEDGNILGNKMEYNYNAHNVYIMTDKAKNGIKVN | | |
| WT); linker (SG); | FKIRHNIEDGSVQLADHYQQNTPIGDGPVLLPDNHYLSTQSALSKDPNEKRDHMI | | |
| hPDE5 (Amino | YFGFVTAAAITHGMDELYKSGEETRELQSLAAAVVPSAQTLKITDFSFSDFELSDL | | |
| acid 535-860 of | ETALCTIRMFTDLNLVQNFQMKHEVLCRWILSVKKNYRKNVAYHNWRHAFNTA | | |
| WT, 11653A, | QCMFAALKAGKIQNKLTDLEILALLIAALSADLDHRGVNNSYIQRSEHPLAQLYC | | |
| R732L); stop) | HSIMEHHHFDQCLMILNSPGNQILSGLSIEEYKTTLKIIKQAILATDLALYIKRLGEF | | |
| | FELIRKNQFNLEDPHQKELFLAMLMTACDLSAITKPWPIQQRIAELVATEFFDQGD | | |
| | RERKELNIEPTDLMNREKKNKIPSMQVGFIDAICLQLYEALTHVSEDCFPLLDGCR | | |
| | KNRQKWQALAEQQ* | | |
| OT-001213 | MVSKGAELFTGIVPILIELNGDVNGHKFSVSGEGEGDATYGKLTLKFICTTGKLPV | 517 | 532 |
| (AcGFP (Amino | PWPTLVTTLSYGVQCFSRYPDHMKQHDFFKSAMPEGYIQERTIFFEDDGNYKSRA | | |
| acid 1-239 of | EVKFEGDTLVNRIELTGTDFKEDGNILGNKMEYNYNAHNVYIMTDKAKNGIKVN | | |
| WT); linker (SG); | FKIRHNIEDGSVQLADHYQQNTPIGDGPVLLPDNHYLSTQSALSKDPNEKRDHMI | | |
| hPDE5 (Amino | YFGFVTAAAITHGMDELYKSGEETRELQSLAAAVVPSAQTLKITDFSFSDFELSDL | | |
| acid 535-860 of | ETALCTIRMFTDLNLVQNFQMKHEVLCRWILSVKKNYRKNVAYHNWRHAFNTA | | |
| WT, R732L, | QCMFAALKAGKIQNKLTDLEILALLIAALSHDLDHRGVNNSYIQRSEHPLAQLYC | | |
| D764A); stop) | HSIMEHHHFDQCLMILNSPGNQILSGLSIEEYKTTLKIIKQAILATDLALYIKRLGEF | | |
| | FELIRKNQFNLEDPHQKELFLAMLMTACALSAITKPWPIQQRIAELVATEFFDQGD | | |
| | RERKELNIEPTDLMNREKKNKIPSMQVGFIDAICLQLYEALTHVSEDCFPLLDGCR | | |
| | KNRQKWQALAEQQ* | | |
| OT-001253 | MVSKGAELFTGIVPILIELNGDVNGHKFSVSGEGEGDATYGKLTLKFICTTGKLPV | 518 | 533 |
| (AcGFP (Amino | PWPTLVTTLSYGVQCFSRYPDHMKQHDFFKSAMPEGYIQERTIFFEDDGNYKSRA | | |
| acid 1-239 of | EVKFEGDTLVNRIELTGTDFKEDGNILGNKMEYNYNAHNVYIMTDKAKNGIKVN | | |
| WT); linker (SG); | FKIRHNIEDGSVQLADHYQQNTPIGDGPVLLPDNHYLSTQSALSKDPNEKRDHMI | | |
| hPDE5 (Amino | YFGFVTAAAITHGMDELYKSGEETRELQSLAAAVVPSAQTLKITDFSFSDFELSDL | | |
| acid 535-860 of | ETALCTIRMFTDLNLVQNFQMKHEVLCRWILSVKKNYRKNVAYHNWRHAFNTA | | |
| WT; R732L); Xba | QCMFAALKAGKIQNKLTDLEILALLIAALSHDLDHRGVNNSYIQRSEHPLAQLYC | | |
| I site (TCTAGA); | HSIMEHHHFDQCLMILNSPGNQILSGLSIEEYKTTLKIIKQAILATDLALYIKRLGEF | | |
| stop) | FELIRKNQFNLEDPHQKELFLAMLMTACDLSAITKPWPIQQRIAELVATEFFDQGD | | |
| | RERKELNIEPTDLMNREKKNKIPSMQVGFIDAICLQLYEALTHVSEDCFPLLDGCR | | |
| | KNRQKWQALAEQQSR* | | |
| OT-001073 | MVSKGAELFTGIVPILIELNGDVNGHKFSVSGEGEGDATYGKLTLKFICTTGKLPV | 8636 | 8644 |
| (AcGFP (Amino | PWPTLVTTLSYGVQCFSRYPDHMKQHDFFKSAMPEGYIQERTIFFEDDGNYKSRA | | |
| acid 1-239 of | EVKFEGDTLVNRIELTGTDFKEDGNILGNKMEYNYNAHNVYIMTDKAKNGIKVN | | |
| WT); linker | FKIRHNIEDGSVQLADHYQQNTPIGDGPVLLPDNHYLSTQSALSKDPNEKRDHMI | | |
| (GGSGGG (SEQ | YFGFVTAAAITHGMDELYKGGSGGGEETRELQSLAAAVVPSAQTLKITDFSFSDF | | |
| ID NO: 78)); | ELSDLETALCTIRMFTDLNLVQNFQMKHEVLCRWILSVKKNYRKNVAYHNWRH | | |
| hPDE5 (535-860 | AFNTAQCMFAALKAGKIQNKLTDLEILALLIAALSHDLDHRGVNNSYIQRSEHPL | | |
| of WT, D724G, | AQLYCHSIMEHHHFDQCLMILNSPGNQILSGLSIEEYKTTLKIIKQAILATGLALYIK | | |
| D764G); stop) | RRGEFFELIRKNQFNLEDPHQKELFLAMLMTACGLSAITKPWPIQQRIAELVATEF | | |
| | FDQGDRERKELNIEPTDLMNREKKNKIPSMQVGFIDAICLQLYEALTHVSEDCFPL | | |
| | LDGCRKNRQKWQALAEQQ* | | |
| OT-001251 | MEETRELQSLAAAVVPSAQTLKITDFSFSDFELSDLETALCTIRMFTDLNLVQNFQ | 8637 | 8645 |
| (Methionine; | MKHEVLCRWILSVKKNYRKNVAYHNWRHAFNTAQCMFAALKAGKIQNKLTDL | | |
| hPDE5 (Amino | EILALLIAALSHDLDHRGVNNSYIQRSEHPLAQLYCHSIMEHHHFDQCLMILNSPG | | |
| acid 535-860 of | NQILSGLSIEEYKTTLKIIKQAILATDLALLIKRRGEFFELIRKNQFNLEDPHQKELFL | | |
| WT, Y728L, | AMLMTACNLSAITKPWPIQQRIAELVATEFFDQGDRERKELNIEPTDLMNREKKN | | |
| D764N); linker | KIPSMQVGFIDAICLQLYEALTHVSEDCFPLLDGCRKNRQKWQALAEQQSGVSKG | | |
| (SG); AcGEP (2- | AELFTGIVPILIELNGDVNGHKFSVSGEGEGDATYGKLTLKEICTTGKLPVPWPTL | | |
| 239 of WT); stop) | VTTLSYGVQCFSRYPDBMKQHDFFKSAMPEGYIQERTIFFEDDGNYKSRAEVKFE | | |
| | GDTLVNRIELTGTDFKEDGNILGNKMEYNYNAHNVYIMTDKAKNGIKVNFKIRH | | |
| | NIEDGSVQLADHYQQNTPIGDGPVLLPDNHYLSTQSALSKDPNEKRDHMIYFGFV | | |
| | TAAAITHGMDELYK* | | |
| OT-001214 | MVSKGAELFTGIVPILIELNGDVNGHKFSVSGEGEGDATYGKLTLKFICTTGKLPV | 8638 | 8646 |
| (AcGEP (1-239 of | PWPTLVTTLSYGVQCFSRYPDHMKQHDFFKSAMPEGYIQERTIFFEDDGNYKSRA | | |
| WT); Linker (SG); | EVKFEGDTLVNRIELTGTDFKEDGNILGNKMEYNYNAHNVYIMTDKAKNGIKVN | | |
| hPDE5 (Amino | FKIRHNIEDGSVQLADHYQQNTPIGDGPVLLPDNHYLSTQSALSKDPNEKRDHMI | | |
| acid 535-860 of | YFGFVTAAAITHGMDELYKSGEETRELQSLAAAVVPSAQTLKITDFSFSDFELSDL | | |
| WT, E682A, | ETALCTIRMFTDLNLVQNFQMKHEVLCRWILSVKKNYRKNVAYHNWRHAFNTA | | |
| R732L); stop) | QCMFAALKAGKIQNKLTDLEILALLIAALSHDLDHRGVNNSYIQRSEHPLAQLYC | | |
| | HSIMAHHHFDQCLMILNSPGNQILSGLSIEEYKTTLKIIKQAILATDLALYIKRLGEF | | |
| | FELIRKNQFNLEDPHQKELFLAMLMTACDLSAITKPWPIQQRIAELVATEFFDQGD | | |
| | RERKELNIEPTDLMNREKKNKIPSMQVGFIDAICLQLYEALTHVSEDCFPLLDGCR | | |
| | KNRQKWQALAEQQ* | | |
| OT-001215 | MVSKGAELFTGIVPILIELNGDVNGHKFSVSGEGEGDATYGKLTLKFICTTGKLPV | 8639 | 8647 |
| (AcGEP (1-239 of | PWPTLVTTLSYGVQCFSRYPDHMKQHDFFKSAMPEGYIQERTIFFEDDGNYKSRA | | |
| WT); linker (SG); | EVKFEGDTLVNRIELTGTDFKEDGNILGNKMEYNYNAHNVYIMTDKAKNGIKVN | | |
| hPDE5 (Amino | FKIRHNIEDGSVQLADHYQQNTPIGDGPVLLPDNHYLSTQSALSKDPNEKRDHMI | | |
| acid 535-860 of | YFGFVTAAAITHGMDELYKSGEETRELQSLAAAVVPSAQTLKITDFSFSDFELSDL | | |
| WT, D724A, | ETALCTIRMFTDLNLVQNFQMKHEVLCRWILSVKKNYRKNVAYHNWRHAFNTA | | |
| R732L); stop) | QCMFAALKAGKIQNKLTDLEILALLIAALSHDLDHRGVNNSYIQRSEHPLAQLYC | | |
| | HSIMEHHHFDQCLMILNSPGNQILSGLSIEEYKTTLKIIKQAILATALALYIKRLGEF | | |
| | FELIRKNQFNLEDPHQKELFLAMLMTACDLSAITKPWPIQQRIAELVATEFFDQGD | | |
| | RERKELNIEPTDLMNREKKNKIPSMQVGFIDAICLQLYEALTHVSEDCFPLLDGCR | | |
| | KNRQKWQALAEQQ* | | |

[0161] In some embodiments, any of the mutations described herein may be tested in the context of the truncated hPDE5 domains As used herein truncated hPDE5 domains refers to regions and/or portions of hPDE5 of SEQ ID NO: 1, and are exemplified in Table 11. Also provided in Table 11 are the constructs utilizing the regions or portions of hPDE5, fused to AcGFP via linkers. In Table 11, translation of the stop codon is indicated by asterisk.

TABLE 11
hPDE5 truncation constructs and its components

| | | Amino | Nucleic |
|---|---|---|---|
| | | acid | Acid |
| Construct ID/ | | SEQ ID | SEQ ID |
| Description | Sequence | NO | NO |
| Methionine; | MEETRELQSLAAAVVPSAQTLKITDFSFSDFELSDLETALCDTIRMFTDLNLVQNFQMK | 237 | 4 |
| hPDE5 (Amino | HEVLCRWILSVKKNYRKNVAYHNWRHAFNTAQCMFAALKAGKIQNKLTDLEILAL | | |
| acid 535-860 of | LIAALSHDLDHRGVNNSYIQRSEHPLAQLYCHSIMEHHHFDQCLMILNSPGNQILSGL | | |
| WT) | SIEEYKTTLKIIKQAILATDLALYIKRRGEFFELIRKNQFNLEDPHQKELFLAMLMTAC | | |
| | DLSAITKPWPIQQRIAELVATEFFDQGDRERKELNIEPTDLMNREKKNKIPSMQVGFI | | |
| | DAICLQLYEALTHVSEDCFPLLDGCRKNRQKWQALAEQQ | | |
| Methionine; | MEETRELQSLAAAVVPSAQTLKITDFSFSDFELSDLETALCTIRMFTDLNLVQNFQMK | 238 | 250 |
| hPDE5 (Amino | HEVLCRWILSVKKNYRKNVAYHNWRHAFNTAQCMFAALKAGKIQNKLTDLEILAL | | |
| acid 535-860 of | LIAALSHDLDHRGVNNSYIQRSEHPLAQLYCHSIMEHHHFDQCLMILNSPGNQILSGL | | |
| WT, R732L) | SIEEYKTTLKIIKQAILATDLALYIKRLGEFFELIRKNQFNLEDPHQKELFLAMLMTAC | | |
| | DLSAITKPWPIQQRIAELVATEFFDQGDRERKELNIEPTDLMNREKKNKIPSMQVGFI | | |
| | DAICLQLYEALTHVSEDCFPLLDGCRKNRQKWQALAEQQ | | |
| Methionine; | MEETRELQSLAAAVVPSAQTLKITDFSFSDFELSDLETALCTIRMFTDLNLVQNFQMK | 239 | 251 |
| hPDE5 (Amino | HEVLCRWILSVKKNYRKNVAYHNWRHAFNTAQCMFAALKAGKIQNKLTDLEILAL | | |
| acid 535-836 of | LIAALSHDLDHRGVNNSYIQRSEHPLAQLYCHSIMEHHHFDQCLMILNSPGNQILSGL | | |
| WT, R732L) | SIEEYKTTLKIIKQAILATDLALYIKRLGEFFELIRKNQFNLEDPHQKELFLAMLMTAC | | |
| | DLSAITKPWPIQQRIAELVATEFFDQGDRERKELNIEPTDLMNREKKNKIPSMQVGFI | | |
| | DAICLQLYEALTHVS | | |
| Methionine; | MSDLETALCTIRMFTDLNLVQNFQMKHEVLCRWILSVKKNYRKNVAYHNWRHAFN | 240 | 252 |
| hPDE5 (Amino | TAQCMFAALKAGKIQNKLTDLEILALLIAALSHDLDHRGVNNSYIQRSEHPLAQLYC | | |
| acid 567-860 of | HSIMEHHHFDQCLMILNSPGNQILSGLSIEEYKTTLKIIKQAILATDLALYIKRLGEFFE | | |
| WT, R732L) | LIRKNQFNLEDPHQKELFLAMLMTACDLSAITKPWPIQQRIAELVATEFFDQGDRER | | |
| | KELNIEPTDLMNREKKNKIPSMQVGFIDAICLQLYEALTHVSEDCFPLLDGCRKNRQ | | |
| | KWQALAEQQ | | |
| hPDE5 (Amino | MKHEVLCRWILSVKKNYRKNVAYHNWRHAFNTAQCMFAALKAGKIQNKLTDLEIL | 241 | 253 |
| acid 590-860 of | ALLIAALSHDLDHRGVNNSYIQRSEHPLAQLYCHSIMEHHHFDQCLMILNSPGNQILS | | |
| WT, R732L) | GLSIEEYKTTLKIIKQAILATDLALYIKRLGEFFELIRKNQFNLEDPHQKELFLAMLMT | | |
| | ACDLSAITKPWPIQQRIAELVATEFFDQGDRERKELNIEPTDLMNREKKNKIPSMQVG | | |
| | FIDAICLQLYEALTHVSEDCFPLLDGCRKNRQKWQALAEQQ | | |
| hPDE5 (Amino | MKHEVLCRWILSVKKNYRKNVAYHNWRHAFNTAQCMFAALKAGKIQNKLTDLEIL | 242 | 254 |
| acid 590-836 of | ALLIAALSHDLDHRGVNNSYIQRSEHPLAQLYCHSIMEHHHFDQCLMILNSPGNQILS | | |
| WT, R732L) | GLSIEEYKTTLKIIKQAILATDLALYIKRLGEFFELIRKNQFNLEDPHQKELFLAMLMT | | |
| | ACDLSAITKPWPIQQRIAELVATEFFDQGDRERKELNIEPTDLMNREKKNKIPSMQVG | | |
| | FIDAICLQLYEALTHVS | | |
| hPDE5 (Amino | EETRELQSLAAAVVPSAQTLKITDFSFSDFELSDLETALCTIRMFTDLNLVQNFQMKH | 3 | 339 |
| acid 535-860 of | EVLCRWILSVKKNYRKNVAYHNWRHAFNTAQCMFAALKAGKIQNKLTDLEILALLI | | |
| WT) | AALSHDLDHRGVNNSYIQRSEHPLAQLYCHSIMEHHHFDQCLMILNSPGNQILSGLSI | | |
| | EEYKTTLKIIKQAILATDLALYIKRRGEFFELIRKNQFNLEDPHQKELFLAMLMTACD | | |
| | LSAITKPWPIQQRIAELVATEFFDQGDRERKELNIEPTDLMNREKKNKIPSMQVGFID | | |
| | AICLQLYEALTHVSEDCFPLLDGCRKNRQKWQALAEQQ | | |
| hPDE5 (Amino | EETRELQSLAAAVVPSAQTLKITDFSFSDFELSDLETALCTIRMFTDLNLVQNFQMKH | 12 | 536 |
| acid 535-860 of | EVLCRWILSVKKNYRKNVAYHNWRHAFNTAQCMFAALKAGKIQNKLTDLEILALLI | | |
| WT, R732L) | AALSHDLDHRGVNNSYIQRSEHPLAQLYCHSIMEHHHFDQCLMILNSPGNQILSGLSI | | |
| | EEYKTTLKIIKQAILATDLALYIKRLGEFFELIRKNQFNLEDPHQKELFLAMLMTACD | | |
| | LSAITKPWPIQQRIAELVATEFFDQGDRERKELNIEPTDLMNREKKNKIPSMQVGFID | | |
| | AICLQLYEALTHVSEDCFPLLDGCRKNRQKWQALAEQQ | | |
| hPDE5 (Amino | EETRELQSLAAAVVPSAQTLKITDFSFSDFELSDLETALCTIRMFTDLNLVQNFQMKH | 534 | 537 |
| acid 535-836 of | EVLCRWILSVKKNYRKNVAYHNWRHAFNTAQCMFAALKAGKIQNKLTDLEILALLI | | |
| WT, R732L) | AALSHDLDHRGVNNSYIQRSEHPLAQLYCHSIMEHHHFDQCLMILNSPGNQILSGLSI | | |
| | EEYKTTLKIIKQAILATDLALYIKRLGEFFELIRKNQFNLEDPHQKELFLAMLMTACD | | |
| | LSAITKPWPIQQRIAELVATEFFDQGDRERKELNIEPTDLMNREKKNKIPSMQVGFID | | |
| | AICLQLYEALTHVS | | |
| hPDE5 (Amino | SDLETALCTIRMFTDLNLVQNFQMKHEVLCRWILSVKKNYRKNVAYHNWRHAFNT | 535 | 538 |
| acid 567-860 of | AQCMFAALKAGKIQNKLTDLEILALLIAALSHDLDHRGVNNSYIQRSEHPLAQLYCH | | |
| WT, R732L) | SIMEHHHFDQCLMILNSPGNQILSGLSIEEYKTTLKIIKQAILATDLALYIKRLGEFFELI | | |
| | RKNQFNLEDPHQKELFLAMLMTACDLSAITKPWPIQQRIAELVATEFFDQGDRERKE | | |
| | LNIEPTDLMNREKKNKIPSMQVGFIDAICLQLYEALTHVSEDCFPLLDGCRKNRQKW | | |
| | QALAEQQ | | |
| Linker (SG) | SG | — | AGTGGT |
| AcGFP | VSKGAELFTGIVPILIELNGDVNGHKFSVSGEGEGDATYGKLTLKFICTTGKLPVPWP | 79 | 372 |
| | TLVTTLSYGVQCFSRYPDHMKQHDFFKSAMPEGYIQERTIFFEDDGNYKSRAEVKFE | | |
| | GDTLVNRIELTGTDFKEDGNILGNKMEYNYNAHNVYIMTDKAKNGIKVNFKIRHNIE | | |
| | DGSVQLADHYQQNTPIGDGPVLLPDNHYLSTQSALSKDPNEKRDHMIYFGFVTAAAI | | |
| | THGMDELYK | | |
| OT-001216 | MEETRELQSLAAAVVPSAQTLKITDFSFSDFELSDLETALCTIRMFTDLNLVQNFQMK | 243 | 255 |
| (Methionine; | HEVLCRWILSVKKNYRKNVAYHNWRHAFNTAQCMFAALKAGKIQNKLTDLEILAL | | |
| hPDE5 (Amino | LIAALSHDLDHRGVNNSYIQRSEHPLAQLYCHSIMEHHHFDQCLMILNSPGNQILSGL | | |
| acid 535-860 of | SILEYKTTLKIIKQAILATDLALYIKRRGEFFELIRKNQFNLEDPHQKELFLAMLMTAC | | |
| WT); linker | DLSAITKPWPIQQRIAELVATEFFDQGDRERKELNIEPTDLMNREKKNKIPSMQVGFI | | |
| (SG); AcGFP | DAICLQLYEALTHVSEDCFPLLDGCRKNRQKWQALAEQQSGVSKGAELFTGIVPILIE | | |
| (Amino acid 2- | LNGDVNGHKFSVSGEGEGDATYGKLTLKFICTTGKLPVPWPTLVTTLSYGVQCFSRY | | |
| 239 of WT); | PDHMKQHDFFKSAMPEGYIQERTIFFEDDGNYKSRAEVKFEGDTLVNRIELTGTDFK | | |
| stop) | EDGNILGNKMEYNYNAHNVYIMTDKAKNGIKVNFKIRHNIEDGSVQLADHYQQNTP | | |
| | IGDGPVLLPDNHYLSTQSALSKDPNEKRDHMIYFGFVTAAAITHGMDELYK* | | |
| OT-001217 | MEETRELQSLAAAVVPSAQTLKITDFSFSDFELSDLETALCTIRMFTDLNLVQNFQMK | 244 | 256 |
| (Methionine; | HEVLCRWILSVKKNYRKNVAYHNWRHAFNTAQCMFAALKAGKIQNKLTDLEILAL | | |
| hPDE5 (Amino | LIAALSHDLDHRGVNNSYIQRSEHPLAQLYCHSIMEHHHFDQCLMILNSPGNQILSGL | | |
| acid 535-860 of | SIEEYKTTLKIIKQAILATDLALYIKRLGEFFELIRKNQFNLEDPHQKELFLAMLMTAC | | |
| WT, R732L) | DLSAITKPWPIQQRIAELVATEFFDQGDRERKELNIEPTDLMNREKKNKIPSMQVGFI | | |
| linker (SG); | DAICLQLYEALTHVSEDCFPLLDGCRKNRQKWQALAEQQSGVSKGAELFTGIVPILIE | | |
| AcGFP; stop | LNGDVNGHKFSVSGEGEGDATYGKLTLKFICTTGKLPVPWPTLVTTLSYGVQCFSRY | | |
| (Amino acid 2- | PDHMKQHDFFKSAMPEGYIQERTIFFEDDGNYKSRAEVKFEGDTLVNRIELTGTDFK | | |
| 239 of WT); | EDGNILGNKMEYNYNAHNVYIMTDKAKNGIKVNFKIRHNIEDGSVQLADHYQQNTP | | |
| stop) | IGDGPVLLPDNHYLSTQSALSKDPNEKRDHMIYFGFVTAAAITHGMDELYK* | | |
| OT-001218 | MEETRELQSLAAAVVPSAQTLKITDFSFSDFELSDLETALCTIRMFTDLNLVQNFQMK | 245 | 257 |
| (Methionine; | HEVLCRWILSVKKNYRKNVAYHNWRHAFNTAQCMFAALKAGKIQNKLTDLEILAL | | |
| hPDE5 (Amino | LIAALSHDLDHRGVNNSYIQRSEHPLAQLYCHSIMEHHHFDQCLMILNSPGNQILSGL | | |
| acid 535-836 of | SIEEYKTTLKIIKQAILATDLALYIKRLGEFFELIRKNQFNLEDPHQKELFLAMLMTAC | | |
| WT, R732L); | DLSAITKPWPIQQRIAELVATEFFDQGDRERKELNIEPTDLMNREKKNKIPSMQVGFI | | |
| linker (SG); | DAICLQLYEALTHVSSGVSKGAELFTGIVPILIELNGDVNGHKFSVSGEGEGDATYGK | | |
| AcGFP (Amino | LTLKFICTTGKLPVPWPTLVTTLSYGVQCFSRYPDHMKQHDFFKSAMPEGYIQERTIF | | |
| acid 2-239 of | FEDDGNYKSRAEVKFEGDTLVNRIELTGTDFKEDGNILGNKMEYNYNAHNVYIMTD | | |
| WT); stop) | KAKNGIKVNFKIRHNIEDGSVQLADHYQQNTPIGDGPVLLPDNHYLSTQSALSKDPN | | |
| | EKRDHMIYFGFVTAAAITHGMDELYK* | | |
| OT-001219 | MSDLETALCTIRMFTDLNLVQNFQMKHEVLCRWILSVKKNYRKNVAYHNWRHAFN | 246 | 258 |
| (Methionine; | TAQCMFAALKAGKIQNKLTDLEILALLIAALSHDLDHRGVNNSYIQRSEHPLAQLYC | | |
| hPDE5 (Amino | HSIMEHHHFDQCLMILNSPGNQILSGLSIEEYKTTLKIIKQAILATDLALYIKRLGEFFE | | |
| acid 567-860 of | LIRKNQFNLEDPHQKELFLAMLMTACDLSAITKPWPIQQRIAELVATEFFDQGDRER | | |
| WT, R732L); | KELNIEPTDLMNREKKNKIPSMQVGFIDAICLQLYEALTHVSEDCFPLLDGCRKNRQ | | |
| linker (SG); | KWQALAEQQSGVSKGAELFTGIVPILIELNGDVNGHKFSVSGEGEGDATYGKLTLKF | | |
| AcGFP (Amino | ICTTGKLPVPWPTLVTTLSYGVQCFSRYPDHMKQHDFFKSAMPEGYIQERTIFFEDD | | |
| acid 2-239 of | GNYKSRAEVKFEGDTLVNRIELTGTDFKEDGNILGNKMEYNYNAHNVYIMTDKAK | | |
| WT); stop) | NGIKVNFKIRHNIEDGSVQLADHYQQNTPIGDGPVLLPDNHYLSTQSALSKDPNEKR | | |
| | DHMIYFGFVTAAAITHGMDELYK* | | |
| OT-001220 | MKHEVLCRWILSVKKNYRKNVAYHNWRHAFNTAQCMFAALKAGKIQNKLTDLEIL | 247 | 259 |
| (hPDE5 (Amino | ALLIAALSHDLDHRGVNNSYIQRSEHPLAQLYCHSIMEHHHFDQCLMILNSPGNQILS | | |
| acid 590-860 of | GLSIEEYKTTLKIIKQAILATDLALYIKRLGEFFELIRKNQFNLEDPHQKELFLAMLMT | | |
| WT, R732L); | ACDLSAITKPWPIQQRIAELVATEFFDQGDRERKELNIEPTDLMNREKKNKIPSMQVG | | |
| linker (SG); | FIDAICLQLYEALTHVSEDCFPLLDGCRKNRQKWQALAEQQSGVSKGAELFTGIVPIL | | |
| AcGFP (Amino | IELNGDVNGHKFSVSGEGEGDATYGKLTLKFICTTGKLPVPWPTLVTTLSYGVQCFS | | |
| acid 2-239 of | RYPDHMKQHDFFKSAMPEGYIQERTIFFEDDGNYKSRAEVKFEGDTLVNRIELTGTD | | |
| WT); stop) | FKEDGNILGNKMEYNYNAHNVYIMTDKAKNGIKVNFKIRHNIEDGSVQLADHYQQ | | |
| | NTPIGDGPVLLPDNHYLSTQSALSKDPNEKRDHMIYFGFVTAAAITHGMDELYK* | | |
| OT-001221 | MKHEVLCRWILSVKKNYRKNVAYHNWRHAFNTAQCMFAALKAGKIQNKLTDLEIL | 248 | 260 |
| (hPDE5 (Amino | ALLIAALSHDLDHRGVNNSYIQRSEHPLAQLYCHSIMEHHHFDQCLMILNSPGNQILS | | |
| acid 590-836 of | GLSIEEYKTTLKIIKQAILATDLALYIKRLGEFFELIRKNQFNLEDPHQKELFLAMLMT | | |
| WT, R732L); | ACDLSAITKPWPIQQRIAELVATEFFDQGDRERKELNIEPTDLMNREKKNKIPSMQVG | | |
| linker (SG); | FIDAICLQLYEALTHVSSGVSKGAELFTGIVPILIELNGDVNGHKFSVSGEGEGDATY | | |
| AcGFP (Amino | GKLTLKFICTTGKLPVPWPTLVTTLSYGVQCFSRYPDHMKQHDFFKSAMPEGYIQER | | |
| acid 2-239 of | TIFFEDDGNYKSRAEVKFEGDTLVNRIELTGTDFKEDGNILGNKMEYNYNAHNVYI | | |
| WT); stop) | MTDKAKNGIKVNFKIRHNIEDGSVQLADHYQQNTPIGDGPVLLPDNHYLSTQSALSK | | |
| | DPNEKRDHMIYFGFVTAAAITHGMDELYK* | | |

[0162] Mutant library wherein both the amino acid at the position 732 (R732) as well as at position 736 (F736) were mutated to any of the known amino acids, including, but not limited to, aspartic acid, glutamic acid, glutamine, asparagine, histidine, serine, threonine, tyrosine, cysteine, methionine, tryptophan, alanine, isoleucine, leucine, phenylalanine, valine, proline, and glycine were generated. Mutants were screened by appended DDs to payloads such as GFP and mcherry. Table 12 provides the R732, F736 mutants and related constructs. In Table 12, * indicates the translation of the stop codon.

TABLE 12
hPDE5(R732, F736) DDs, constructs and its components

| | | | |
|---|---|---|---|
| | | AA | NA |
| Construct ID/ | | SEQ | SEQ |
| Description | Sequence | ID NO | ID NO |

DDs

| | | | |
|---|---|---|---|
| hPDE5 (aa 535 | EETRELQSLAAAVVPSAQTLKITDFSFSDFELSDLETALCTIRMFTDLNLVQNFQMK | 8721 | 8763 |
| to 860 of WT, | HEVLCRWILSVKKNYRKNVAYHNWRHAFNTAQCMFAALKAGKIQNKLTDLEILA | | |
| R732D, F736S) | LLIAALSHDLDHRGVNNSYIQRSEHPLAQLYCHSIMEHHHFDQCLMILNSPGNQILS | | |
| | GLSIEEYKTTLKIIKQAILATDLALYIKRDGEFSELIRKNQFNLEDPHQKELFLAMLM | | |
| | TACDLSAITKPWPIQQRIAELVATEFFDQGDRERKELNIEPTDLMNREKKNKIPSMQ | | |
| | VGFIDAICLQLYEALTHVSEDCFPLLDGCRKNRQKWQALAEQQ | | |
| hPDE5 (aa 535 | EETRELQSLAAAVVPSAQTLKITDFSFSDFELSDLETALCTIRMFTDLNLVQNFQMK | 8722 | 8764 |
| to 860 of WT, | HEVLCRWILSVKKNYRKNVAYHNWRHAFNTAQCMFAALKAGKIQNKLTDLEILA | | |
| R732E, F736D) | LLIAALSHDLDHRGVNNSYIQRSEHPLAQLYCHSIMEHHHFDQCLMILNSPGNQILS | | |
| | GLSIEEYKTTLKIIKQAILATDLALYIKREGEFDELIRKNQFNLEDPHQKELFLAMLM | | |
| | TACDLSAITKPWPIQQRIAELVATEFFDQGDRERKELNIEPTDLMNREKKNKIPSMQ | | |
| | VGFIDAICLQLYEALTHVSEDCFPLLDGCRKNRQKWQALAEQQ | | |
| hPDE5 (aa 535 | EETRELQSLAAAVVPSAQTLKITDFSFSDFELSDLETALCTIRMFTDLNLVQNFQMK | 8723 | 8765 |
| to 860 of WT, | HEVLCRWILSVKKNYRKNVAYHNWRHAFNTAQCMFAALKAGKIQNKLTDLEILA | | |
| R732V, | LLIAALSHDLDHRGVNNSYIQRSEHPLAQLYCHSIMEHHHFDQCLMILNSPGNQILS | | |
| F736G) | GLSIEEYKTTLKIIKQAILATDLALYIKRVGEFGELIRKNQFNLEDPHQKELFLAMLM | | |
| | TACDLSAITKPWPIQQRIAELVATEFFDQGDRERKELNIEPTDLMNREKKNKIPSMQ | | |
| | VGFIDAICLQLYEALTHVSEDCFPLLDGCRKNRQKWQALAEQQ | | |
| hPDE5 (aa 535 | EETRELQSLAAAVVPSAQTLKITDFSFSDFELSDLETALCTIRMFTDLNLVQNFQMK | 8724 | 8766 |
| to 860 of WT, | HEVLCRWILSVKKNYRKNVAYHNWRHAFNTAQCMFAALKAGKIQNKLTDLEILA | | |
| R732W, | LLIAALSHDLDHRGVNNSYIQRSEHPLAQLYCHSIMEHHHFDQCLMILNSPGNQILS | | |
| F736G) | GLSIEEYKTTLKIIKQAILATDLALYIKRWGEFGELIRKNQFNLEDPHQKELFLAML | | |
| | MTACDLSAITKPWPIQQRIAELVATEFFDQGDRERKELNIEPTDLMNREKKNKIPSM | | |
| | QVGFIDAICLQLYEALTHVSEDCFPLLDGCRKNRQKWQALAEQQ | | |
| hPDE5 (aa 535 | EETRELQSLAAAVVPSAQTLKITDFSFSDFELSDLETALCTIRMFTDLNLVQNFQMK | 8725 | 8767 |
| to 860 of WT, | HEVLCRWILSVKKNYRKNVAYHNWRHAFNTAQCMFAALKAGKIQNKLTDLEILA | | |
| R732W, | LLIAALSHDLDHRGVNNSYIQRSEHPLAQLYCHSIMEHHHFDQCLMILNSPGNQILS | | |
| F736V) | GLSIEEYKTTLKIIKQAILATDLALYIKRWGEFVELIRKNQFNLEDPHQKELFLAML | | |
| | MTACDLSAITKPWPIQQRIAELVATEFFDQGDRERKELNIEPTDLMNREKKNKIPSM | | |
| | QVGFIDAICLQLYEALTHVSEDCFPLLDGCRKNRQKWQALAEQQ | | |
| hPDE5 (aa 535 | EETRELQSLAAAVVPSAQTLKITDFSFSDFELSDLETALCTIRMFTDLNLVQNFQMK | 8726 | 8768 |
| to 860 of WT, | HEVLCRWILSVKKNYRKNVAYHNWRHAFNTAQCMFAALKAGKIQNKLTDLEILA | | |
| R732L, | LLIAALSHDLDHRGVNNSYIQRSEHPLAQLYCHSIMEHHHFDQCLMILNSPGNQILS | | |
| F736W) | GLSIEEYKTTLKIIKQAILATDLALYIKRLGEFWELIRKNQFNLEDPHQKELFLAML | | |
| | MTACDLSAITKPWPIQQRIAELVATEFFDQGDRERKELNIEPTDLMNREKKNKIPSM | | |
| | QVGFIDAICLQLYEALTHVSEDCFPLLDGCRKNRQKWQALAEQQ | | |
| hPDE5 (aa 535 | EETRELQSLAAAVVPSAQTLKITDFSFSDFELSDLETALCTIRMFTDLNLVQNFQMK | 8727 | 8769 |
| to 860 of WT, | HEVLCRWILSVKKNYRKNVAYHNWRHAFNTAQCMFAALKAGKIQNKLTDLEILA | | |
| R732P, F736Q) | LLIAALSHDLDHRGVNNSYIQRSEHPLAQLYCHSIMEHHHFDQCLMILNSPGNQILS | | |
| | GLSIEEYKTTLKIIKQAILATDLALYIKRPGEFQELIRKNQFNLEDPHQKELFLAMLM | | |
| | TACDLSAITKPWPIQQRIAELVATEFFDQGDRERKELNIEPTDLMNREKKNKIPSMQ | | |
| | VGFIDAICLQLYEALTHVSEDCFPLLDGCRKNRQKWQALAEQQ | | |
| hPDE5 (aa 535 | EETRELQSLAAAVVPSAQTLKITDFSFSDFELSDLETALCTIRMFTDLNLVQNFQMK | 8728 | 8770 |
| to 860 of WT, | HEVLCRWILSVKKNYRKNVAYHNWRHAFNTAQCMFAALKAGKIQNKLTDLEILA | | |
| R732A, | LLIAALSHDLDHRGVNNSYIQRSEHPLAQLYCHSIMEHHHFDQCLMILNSPGNQILS | | |
| F736A) | GLSIEEYKTTLKIIKQAILATDLALYIKRAGEFAELIRKNQFNLEDPHQKELFLAMLM | | |
| | TACDLSAITKPWPIQQRIAELVATEFFDQGDRERKELNIEPTDLMNREKKNKIPSMQ | | |
| | VGFIDAICLQLYEALTHVSEDCFPLLDGCRKNRQKWQALAEQQ | | |
| hPDE5 (aa 535 | EETRELQSLAAAVVPSAQTLKITDFSFSDFELSDLETALCTIRMFTDLNLVQNFQMK | 8729 | 8771 |
| to 860 of WT, | HEVLCRWILSVKKNYRKNVAYHNWRHAFNTAQCMFAALKAGKIQNKLTDLEILA | | |
| R732S, F736G) | LLIAALSHDLDHRGVNNSYIQRSEHPLAQLYCHSIMEHHHFDQCLMILNSPGNQILS | | |
| | GLSIEEYKTTLKIIKQAILATDLALYIKRSGEFGELIRKNQFNLEDPHQKELFLAMLM | | |
| | TACDLSAITKPWPIQQRIAELVATEFFDQGDRERKELNIEPTDLMNREKKNKIPSMQ | | |
| | VGFIDAICLQLYEALTHVSEDCFPLLDGCRKNRQKWQALAEQQ | | |
| hPDE5 (aa 535 | EETRELQSLAAAVVPSAQTLKITDFSFSDFELSDLETALCTIRMFTDLNLVQNFQMK | 8730 | 8772 |
| to 860 of WT, | HEVLCRWILSVKKNYRKNVAYHNWRHAFNTAQCMFAALKAGKIQNKLTDLEILA | | |
| R732T, F736P) | LLIAALSHDLDHRGVNNSYIQRSEHPLAQLYCHSIMEHHHFDQCLMILNSPGNQILS | | |
| | GLSIEEYKTTLKIIKQAILATDLALYIKRTGEFPELIRKNQFNLEDPHQKELFLAMLM | | |
| | TACDLSAITKPWPIQQRIAELVATEFFDQGDRERKELNIEPTDLMNREKKNKIPSMQ | | |
| | VGFIDAICLQLYEALTHVSEDCFPLLDGCRKNRQKWQALAEQQ | | |
| hPDE5 (aa 535 | EETRELQSLAAAVVPSAQTLKITDFSFSDFELSDLETALCTIRMFTDLNLVQNFQMK | 8731 | 8773 |
| to 860 of WT, | HEVLCRWILSVKKNYRKNVAYHNWRHAFNTAQCMFAALKAGKIQNKLTDLEILA | | |
| R732M, | LLIAALSHDLDHRGVNNSYIQRSEHPLAQLYCHSIMEHHHFDQCLMILNSPGNQILS | | |
| F736H) | GLSIEEYKTTLKIIKQAILATDLALYIKRMGEFHELIRKNQFNLEDPHQKELFLAML | | |
| | MTACDLSAITKPWPIQQRIAELVATEFFDQGDRERKELNIEPTDLMNREKKNKIPSM | | |
| | QVGFIDAICLQLYEALTHVSEDCFPLLDGCRKNRQKWQALAEQQ | | |
| hPDE5 (aa 535 | EETRELQSLAAAVVPSAQTLKITDFSFSDFELSDLETALCTIRMFTDLNLVQNFQMK | 8732 | 8774 |
| to 860 of WT, | HEVLCRWILSVKKNYRKNVAYHNWRHAFNTAQCMFAALKAGKIQNKLTDLEILA | | |
| R732Y, | LLIAALSHDLDHRGVNNSYIQRSEHPLAQLYCHSIMEHHHFDQCLMILNSPGNQILS | | |
| F736M) | GLSIEEYKTTLKIIKQAILATDLALYIKRYGEFMELIRKNQFNLEDPHQKELFLAML | | |
| | MTACDLSAITKPWPIQQRIAELVATEFFDQGDRERKELNIEPTDLMNREKKNKIPSM | | |
| | QVGFIDAICLQLYEALTHVSEDCFPLLDGCRKNRQKWQALAEQQ | | |
| hPDE5 (aa 535 | EETRELQSLAAAVVPSAQTLKITDFSFSDFELSDLETALCTIRMFTDLNLVQNFQMK | 8733 | 8775 |
| to 860 of WT, | HEVLCRWILSVKKNYRKNVAYHNWRHAFNTAQCMFAALKAGKIQNKLTDLEILA | | |
| R732P, F736D) | LLIAALSHDLDHRGVNNSYIQRSEHPLAQLYCHSIMEHHHFDQCLMILNSPGNQILS | | |
| | GLSIEEYKTTLKIIKQAILATDLALYIKRPGEFDELIRKNQFNLEDPHQKELFLAMLM | | |
| | TACDLSAITKPWPIQQRIAELVATEFFDQGDRERKELNIEPTDLMNREKKNKIPSMQ | | |
| | VGFIDAICLQLYEALTHVSEDCFPLLDGCRKNRQKWQALAEQQ | | |
| hPDE5 (aa 535 | EETRELQSLAAAVVPSAQTLKITDFSFSDFELSDLETALCTIRMFTDLNLVQNFQMK | 8734 | 8776 |
| to 860 of WT, | HEVLCRWILSVKKNYRKNVAYHNWRHAFNTAQCMFAALKAGKIQNKLTDLEILA | | |
| R732P, F736G) | LLIAALSHDLDHRGVNNSYIQRSEHPLAQLYCHSIMEHHHFDQCLMILNSPGNQILS | | |
| | GLSIEEYKTTLKIIKQAILATDLALYIKRPGEFGELIRKNQFNLEDPHQKELFLAMLM | | |
| | TACDLSAITKPWPIQQRIAELVATEFFDQGDRERKELNIEPTDLMNREKKNKIPSMQ | | |
| | VGFIDAICLQLYEALTHVSEDCFPLLDGCRKNRQKWQALAEQQ | | |
| hPDE5 (aa 535 | EETRELQSLAAAVVPSAQTLKITDFSFSDFELSDLETALCTIRMFTDLNLVQNFQMK | 8735 | 8777 |
| to 860 of WT, | HEVLCRWILSVKKNYRKNVAYHNWRHAFNTAQCMFAALKAGKIQNKLTDLEILA | | |
| R732W, | LLIAALSHDLDHRGVNNSYIQRSEHPLAQLYCHSIMEHHHFDQCLMILNSPGNQILS | | |
| F736L) | GLSIEEYKTTLKIIKQAILATDLALYIKRWGEFLELIRKNQFNLEDPHQKELFLAML | | |
| | MTACDLSAITKPWPIQQRIAELVATEFFDQGDRERKELNIEPTDLMNREKKNKIPSM | | |
| | QVGFIDAICLQLYEALTHVSEDCFPLLDGCRKNRQKWQALAEQQ | | |
| hPDE5 (aa 535 | EETRELQSLAAAVVPSAQTLKITDFSFSDFELSDLETALCTIRMFTDLNLVQNFQMK | 8736 | 8778 |
| to 860 of WT, | HEVLCRWILSVKKNYRKNVAYHNWRHAFNTAQCMFAALKAGKIQNKLTDLEILA | | |
| R732L, F736S) | LLIAALSHDLDHRGVNNSYIQRSEHPLAQLYCHSIMEHHHFDQCLMILNSPGNQILS | | |
| | GLSIEEYKTTLKIIKQAILATDLALYIKRLGEFSELIRKNQFNLEDPHQKELFLAMLM | | |
| | TACDLSAITKPWPIQQRIAELVATEFFDQGDRERKELNIEPTDLMNREKKNKIPSMQ | | |
| | VGFIDAICLQLYEALTHVSEDCFPLLDGCRKNRQKWQALAEQQ | | |
| hPDE5 (aa 535 | EETRELQSLAAAVVPSAQTLKITDFSFSDFELSDLETALCTIRMFTDLNLVQNFQMK | 8737 | 8779 |
| to 860 of WT, | HEVLCRWILSVKKNYRKNVAYHNWRHAFNTAQCMFAALKAGKIQNKLTDLEILA | | |
| R732D, F736T) | LLIAALSHDLDHRGVNNSYIQRSEHPLAQLYCHSIMEHHHFDQCLMILNSPGNQILS | | |
| | GLSIEEYKTTLKIIKQAILATDLALYIKRDGEFTELIRKNQFNLEDPHQKELFLAMLM | | |
| | TACDLSAITKPWPIQQRIAELVATEFFDQGDRERKELNIEPTDLMNREKKNKIPSMQ | | |
| | VGFIDAICLQLYEALTHVSEDCFPLLDGCRKNRQKWQALAEQQ | | |
| hPDE5 (aa 535 | EETRELQSLAAAVVPSAQTLKITDFSFSDFELSDLETALCTIRMFTDLNLVQNFQMK | 8738 | 8780 |
| to 860 of WT, | HEVLCRWILSVKKNYRKNVAYHNWRHAFNTAQCMFAALKAGKIQNKLTDLEILA | | |
| R732L, F736V) | LLIAALSHDLDHRGVNNSYIQRSEHPLAQLYCHSIMEHHHFDQCLMILNSPGNQILS | | |
| | GLSIEEYKTTLKIIKQAILATDLALYIKRLGEFVELIRKNQFNLEDPHQKELFLAMLM | | |
| | TACDLSAITKPWPIQQRIAELVATEFFDQGDRERKELNIEPTDLMNREKKNKIPSMQ | | |
| | VGFIDAICLQLYEALTHVSEDCFPLLDGCRKNRQKWQALAEQQ | | |
| hPDE5 (aa 535 | EETRELQSLAAAVVPSAQTLKITDFSFSDFELSDLETALCTIRMFTDLNLVQNFQMK | 8739 | 8781 |
| to 860 of WT, | HEVLCRWILSVKKNYRKNVAYHNWRHAFNTAQCMFAALKAGKIQNKLTDLEILA | | |
| R732G, | LLIAALSHDLDHRGVNNSYIQRSEHPLAQLYCHSIMEHHHFDQCLMILNSPGNQILS | | |
| F736V) | GLSIEEYKTTLKIIKQAILATDLALYIKRGGEFVELIRKNQFNLEDPHQKELFLAMLM | | |
| | TACDLSAITKPWPIQQRIAELVATEFFDQGDRERKELNIEPTDLMNREKKNKIPSMQ | | |
| | VGFIDAICLQLYEALTHVSEDCFPLLDGCRKNRQKWQALAEQQ | | |
| hPDE5 (aa 535 | EETRELQSLAAAVVPSAQTLKITDFSFSDFELSDLETALCTIRMFTDLNLVQNFQMK | 8740 | 8782 |
| to 860 of WT, | HEVLCRWILSVKKNYRKNVAYHNWRHAFNTAQCMFAALKAGKIQNKLTDLEILA | | |
| R732W, | LLIAALSHDLDHRGVNNSYIQRSEHPLAQLYCHSIMEHHHFDQCLMILNSPGNQILS | | |
| F736A) | GLSIEEYKTTLKIIKQAILATDLALYIKRWGEFAELIRKNQFNLEDPHQKELFLAML | | |
| | MTACDLSAITKPWPIQQRIAELVATEFFDQGDRERKELNIEPTDLMNREKKNKIPSM | | |
| | QVGFIDAICLQLYEALTHVSEDCFPLLDGCRKNRQKWQALAEQQ | | |

Construct components

| | | | |
|---|---|---|---|
| AcGFP (1-239 | MVSKGAELFTGIVPILIELNGDVNGHKFSVSGEGEGDATYGKLTLKFICTTGKLPVP | 365 | 373 |
| of WT) | WPTLVTTLSYGVQCFSRYPDHMKQHDFFKSAMPEGYIQERTIFFEDDGNYKSRAE | | |
| | VKFEGDTLVNRIELTGTDFKEDGNILGNKMEYNYNAHNVYIMTDKAKNGIKVNFK | | |
| | IRHNIEDGSVQLADHYQQNTPIGDGPVLLPDNHYLSTQSALSKDPNEKRDHMIYFG | | |
| | FVTAAAITHGMDELYK | | |
| Linker (GS); | GS | | |
| BamH1 Site | | | |
| GSLDG Linker | GSLDG | 8741 | 8783 |
| mCherry | LSKGEEDNMAIIKEFMRFKVHMEGSVNGHEFFIEGEGEGRPYEGTQTAKLKVTKG | 8240 | 8269 |
| (M1L) | GPLPFAWDILSPQFMYGSKAYVKHPADIPDYLKLSFPEGFKWERVMNFEDGGVVT | | |
| | VTQDSSLQDGEFIYKVKLRGTNFPSDGPVMQKKTMGWEASSERMYPEDGALKGEI | | |
| | KQRLKLKDGGHYDAEVKTTYKAKKPVQLPGAYNVNIKLDITSHNEDYTIVEQYER | | |
| | AEGRHSTGGMDELYK | | |
| P2A cleavage | ATNFSLLKQAGDVEENPGP | 8742 | 8784 |
| site | | | |

Constructs

| | | | |
|---|---|---|---|
| OT- | MVSKGAELFTGIVPILIELNGDVNGHKFSVSGEGEGDATYGKLTLKFICTTGKLPVP | 8743 | 8785 |
| 001876(AcGFP | WPTLVTTLSYGVQCFSRYPDHMKQHDFFKSAMPEGYIQERTIFFEDDGNYKSRAE | | |
| (1-239 of WT); | VKFEGDTLVNRIELTGTDFKEDGNILGNKMEYNYNAHNVYIMTDKAKNGIKVNFK | | |
| Linker (GS); | IRHNIEDGSVQLADHYQQNTPIGDGPVLLPDNHYLSTQSALSKDPNEKRDHMIYFG | | |
| hPDE5 (aa 535 | FVTAAAITHGMDELYKGSEETRELQSLAAAVVPSAQTLKITDFSFSDFELSDLETAL | | |
| to 860 of WT, | CTIRMFTDLNLVQNFQMKHEVLCRWILSVKKNYRKNVAYHNWRHAFNTAQCMF | | |
| R732D, | AALKAGKIQNKLTDLEILALLIAALSHDLDHRGVNNSYIQRSEHPLAQLYCHSIMEH | | |
| F7365); stop) | HHFDQCLMILNSPGNQILSGLSIEEYKTTLKIIKQAILATDLALYIKRDGEFSELIRKN | | |
| | QFNLEDPHQKELFLAMLMTACDLSAITKPWPIQQRIAELVATEFFDQGDRERKELNI | | |
| | EPTDLMNREKKNKIPSMQVGFIDAICLQLYEALTHVSEDCFPLLDGCRKNRQKWQ | | |
| | ALAEQQ* | | |
| OT- | MVSKGAELFTGIVPILIELNGDVNGHKFSVSGEGEGDATYGKLTLKFICTTGKLPVP | 8744 | 8786 |
| 001875 (AcGFP | WPTLVTTLSYGVQCFSRYPDHMKQHDFFKSAMPEGYIQERTIFFEDDGNYKSRAE | | |
| (1-239 of WT); | VKFEGDTLVNRIELTGTDFKEDGNILGNKMEYNYNAHNVYIMTDKAKNGIKVNFK | | |
| Linker (GS); | IRHNIEDGSVQLADHYQQNTPIGDGPVLLPDNHYLSTQSALSKDPNEKRDHMIYFG | | |
| hPDE5 (aa 535 | FVTAAAITHGMDELYKGSEETRELQSLAAAVVPSAQTLKITDFSFSDFELSDLETAL | | |
| to 860 of WT, | CTIRMFTDLNLVQNFQMKHEVLCRWILSVKKNYRKNVAYHNWRHAFNTAQCMF | | |
| R732E, | AALKAGKIQNKLTDLEILALLIAALSHDLDHRGVNNSYIQRSEHPLAQLYCHSIMEH | | |
| F736D); stop) | HHFDQCLMILNSPGNQILSGLSIEEYKTTLKIIKQAILATDLALYIKREGEFDELIRKN | | |
| | QFNLEDPHQKELFLAMLMTACDLSAITKPWPIQQRIAELVATEFFDQGDRERKELNI | | |
| | EPTDLMNREKKNKIPSMQVGFIDAICLQLYEALTHVSEDCFPLLDGCRKNRQKWQ | | |
| | ALAEQQ* | | |
| OT- | MVSKGAELFTGIVPILIELNGDVNGHKFSVSGEGEGDATYGKLTLKFICTTGKLPVP | 8745 | 8787 |
| 001877(AcGFP | WPTLVTTLSYGVQCFSRYPDHMKQHDFFKSAMPEGYIQERTIFFEDDGNYKSRAE | | |
| (1-239 of WT); | VKFEGDTLVNRIELTGTDFKEDGNILGNKMEYNYNAHNVYIMTDKAKNGIKVNFK | | |
| Linker (GS); | IRHNIEDGSVQLADHYQQNTPIGDGPVLLPDNHYLSTQSALSKDPNEKRDHMIYFG | | |
| hPDE5 (aa 535 | FVTAAAITHGMDELYKGSEETRELQSLAAAVVPSAQTLKITDFSFSDFELSDLETAL | | |
| to 860 of WT, | CTIRMFTDLNLVQNFQMKHEVLCRWILSVKKNYRKNVAYHNWRHAFNTAQCMF | | |
| R732V, | AALKAGKIQNKLTDLEILALLIAALSHDLDHRGVNNSYIQRSEHPLAQLYCHSIMEH | | |
| F736G); | HHFDQCLMILNSPGNQILSGLSIEEYKTTLKIIKQAILATDLALYIKRVGEFGELIRKN | | |
| GSLDG Linker | QFNLEDPHQKELFLAMLMTACDLSAITKPWPIQQRIAELVATEFFDQGDRERKELNI | | |
| (SEQ ID NO: | EPTDLMNREKKNKIPSMQVGFIDAICLQLYEALTHVSEDCFPLLDGCRKNRQKWQ | | |
| 8741); P2A | ALAEQQGSLDGATNFSLLKQAGDVEENPGPLSKGEEDNMAIIKEFMRFKVHMEGS | | |
| cleavage site; | VNGHEFEIEGEGEGRPYEGTQTAKLKVTKGGPLPFAWDILSPQFMYGSKAYVKHP | | |
| mCherry | ADIPDYLKLSFPEGFKWERVMNFEDGGVVTVTQDSSLQDGEFIYKVKLRGTNFPSD | | |
| (M1L); stop) | GPVMQKKTMGWEASSERMYPEDGALKGEIKQRLKLKDGGHYDAEVKTTYKAKK | | |
| | PVQLPGAYNVNIKLDITSHNEDYTIVEQYERAEGRHSTGGMDELYK* | | |
| OT- | MVSKGAELFTGIVPILIELNGDVNGHKFSVSGEGEGDATYGKLTLKFICTTGKLPVP | 8746 | 8788 |
| 001879(AcGFP | WPTLVTTLSYGVQCFSRYPDHMKQHDFFKSAMPEGYIQERTIFFEDDGNYKSRAE | | |
| (1-239 of WT); | VKFEGDTLVNRIELTGTDFKEDGNILGNKMEYNYNAHNVYIMTDKAKNGIKVNFK | | |
| Linker (GS); | IRHNIEDGSVQLADHYQQNTPIGDGPVLLPDNHYLSTQSALSKDPNEKRDHMIYFG | | |
| hPDE5 (aa 535 | FVTAAAITHGMDELYKGSEETRELQSLAAAVVPSAQTLKITDFSFSDFELSDLETAL | | |
| to 860 of WT, | CTIRMFTDLNLVQNFQMKHEVLCRWILSVKKNYRKNVAYHNWRHAFNTAQCMF | | |
| R732W, | AALKAGKIQNKLTDLEILALLIAALSHDLDHRGVNNSYIQRSEHPLAQLYCHSIMEH | | |
| F736G); | HHFDQCLMILNSPGNQILSGLSIEEYKTTLKIIKQAILATDLALYIKRWGEFGELIRK | | |
| GSLDG Linker | NQFNLEDPHQKELFLAMLMTACDLSAITKPWPIQQRIAELVATEFFDQGDRERKEL | | |
| (SEQ ID NO: | NIEPTDLMNREKKNKIPSMQVGFIDAICLQLYEALTHVSEDCFPLLDGCRKNRQKW | | |
| 8741); P2A | QALAEQQGSLDGATNFSLLKQAGDVEENPGPLSKGEEDNMAIIKEFMRFKVHMEG | | |
| cleavage site; | SVNGHEFEIEGEGEGRPYEGTQTAKLKVTKGGPLPFAWDILSPQFMYGSKAYVKHP | | |
| mCherry | ADIPDYLKLSFPEGFKWERVMNFEDGGVVTVTQDSSLQDGEFIYKVKLRGTNFPSD | | |
| (M1L); stop) | GPVMQKKTMGWEASSERMYPEDGALKGEIKQRLKLKDGGHYDAEVKTTYKAKK | | |
| | PVQLPGAYNVNIKLDITSHNEDYTIVEQYERAEGRHSTGGMDELYK* | | |
| OT- | MVSKGAELFTGIVPILIELNGDVNGHKESVSGEGEGDATYGKLTLKFICTTGKLPVP | 8747 | 8789 |
| 001880(AcGFP | WPTLVTTLSYGVQCFSRYPDHMKQHDFFKSAMPEGYIQERTIFFEDDGNYKSRAE | | |
| (1-239 of WT); | VKFEGDTLVNRIELTGTDFKEDGNILGNKMEYNYNAHNVYIMTDKAKNGIKVNFK | | |
| Linker (GS); | IRHNIEDGSVQLADHYQQNTPIGDGPVLLPDNHYLSTQSALSKDPNEKRDHMIYFG | | |
| hPDE5 (aa 535 | FVTAAAITHGMDELYKGSEETRELQSLAAAVVPSAQTLKITDFSFSDFELSDLETAL | | |
| to 860 of WT, | CTIRMFTDLNLVQNFQMKHEVLCRWILSVKKNYRKNVAYHNWRHAFNTAQCMF | | |
| R732W, | AALKAGKIQNKLTDLEILALLIAALSHDLDHRGVNNSYIQRSEHPLAQLYCHSIMEH | | |
| F736V); | HHFDQCLMILNSPGNQILSGLSIEEYKTTLKIIKQAILATDLALYIKRWGEFVELIRK | | |
| GSLDG Linker | NQFNLEDPHQKELFLAMLMTACDLSAITKPWPIQQRIAELVATEFFDQGDRERKEL | | |
| (SEQ ID NO: | NIEPTDLMNREKKNKIPSMQVGFIDAICLQLYEALTHVSEDCFPLLDGCRKNRQKW | | |
| 8741); P2A | QALAEQQGSLDGATNFSLLKQAGDVEENPGPLSKGEEDNMAIIKEFMRFKVHMEG | | |
| cleavage site; | SVNGHEFEIEGEGEGRPYEGTQTAKLKVTKGGPLPFAWDILSPQFMYGSKAYVKHP | | |
| mCherry | ADIPDYLKLSFPEGFKWERVMNFEDGGVVTVTQDSSLQDGEFIYKVKLRGTNFPSD | | |
| (M1L); stop) | GPVMQKKTMGWEASSERMYPEDGALKGEIKQRLKLKDGGHYDAEVKTTYKAKK | | |
| | PVQLPGAYNVNIKLDITSHNEDYTIVEQYERAEGRHSTGGMDELYK* | | |
| OT- | MVSKGAELFTGIVPILIELNGDVNGHKFSVSGEGEGDATYGKLTLKFICTTGKLPVP | 8748 | 8790 |
| 001882(AcGFP | WPTLVTTLSYGVQCFSRYPDHMKQHDFFKSAMPEGYIQERTIFFEDDGNYKSRAE | | |
| (1-239 of WT); | VKFEGDTLVNRIELTGTDFKEDGNILGNKMEYNYNAHNVYIMTDKAKNGIKVNFK | | |
| Linker (GS); | IRHNIEDGSVQLADHYQQNTPIGDGPVLLPDNHYLSTQSALSKDPNEKRDHMIYFG | | |
| hPDE5 (aa 535 | FVTAAAITHGMDELYKGSEETRELQSLAAAVVPSAQTLKITDFSFSDFELSDLETAL | | |
| to 860 of WT,, | CTIRMFTDLNLVQNFQMKHEVLCRWILSVKKNYRKNVAYHNWRHAFNTAQCMF | | |
| R732L, | AALKAGKIQNKLTDLEILALLIAALSHDLDHRGVNNSYIQRSEHPLAQLYCHSIMEH | | |
| F736W) | HHFDQCLMILNSPGNQILSGLSIEEYKTTLKIIKQAILATDLALYIKRLGEFWELIRKN | | |
| GSLDG Linker | QFNLEDPHQKELFLAMLMTACDLSAITKPWPIQQRIAELVATEFFDQGDRERKELNI | | |
| (SEQ ID NO: | EPTDLMNREKKNKIPSMQVGFIDAICLQLYEALTHVSEDCFPLLDGCRKNRQKWQ | | |
| 8741); P2A | ALAEQQGSLDGATNFSLLKQAGDVEENPGPLSKGEEDNMAIIKEFMRFKVHMEGS | | |
| cleavage site; | VNGHEFEIEGEGEGRPYEGTQTAKLKVTKGGPLPFAWDILSPQFMYGSKAYVKHP | | |
| mCherry | ADIPDYLKLSFPEGFKWERVMNFEDGGVVTVTQDSSLQDGEFIYKVKLRGTNFPSD | | |
| (M1L); stop) | GPVMQKKTMGWEASSERMYPEDGALKGEIKQRLKLKDGGHYDAEVKTTYKAKK | | |
| | PVQLPGAYNVNIKLDITSHNEDYTIVEQYERAEGRHSTGGMDELYK* | | |
| OT- | MVSKGAELFTGIVPILIELNGDVNGHKFSVSGEGEGDATYGKLTLKFICTTGKLPVP | 8749 | 8791 |
| 001881(AcGFP | WPTLVTTLSYGVQCFSRYPDHMKQHDFFKSAMPEGYIQERTIFFEDDGNYKSRAE | | |
| (1-239 of WT); | VKFEGDTLVNRIELTGTDFKEDGNILGNKMEYNYNAHNVYIMTDKAKNGIKVNFK | | |
| Linker (GS); | IRHNIEDGSVQLADHYQQNTPIGDGPVLLPDNHYLSTQSALSKDPNEKRDHMIYFG | | |
| hPDE5 (aa 535 | FVTAAAITHGMDELYKGSEETRELQSLAAAVVPSAQTLKITDFSFSDFELSDLETAL | | |
| to 860 of WT, | CTIRMFTDLNLVQNFQMKHEVLCRWILSVKKNYRKNVAYHNWRHAFNTAQCMF | | |
| R732P, | AALKAGKIQNKLTDLEILALLIAALSHDLDHRGVNNSYIQRSEHPLAQLYCHSIMEH | | |
| F736Q); | HHFDQCLMILNSPGNQILSGLSIEEYKTTLKIIKQAILATDLALYIKRPGEFQELIRKN | | |
| GSLDG Linker | QFNLEDPHQKELFLAMLMTACDLSAITKPWPIQQRIAELVATEFFDQGDRERKELNI | | |
| (SEQ ID NO: | EPTDLMNREKKNKIPSMQVGFIDAICLQLYEALTHVSEDCFPLLDGCRKNRQKWQ | | |
| 8741); P2A | ALAEQQGSLDGATNFSLLKQAGDVEENPGPLSKGEEDNMAIIKEFMRFKVHMEGS | | |
| cleavage site; | VNGHEFEIEGEGEGRPYEGTQTAKLKVTKGGPLPFAWDILSPQFMYGSKAYVKHP | | |
| mCherry | ADIPDYLKLSFPEGFKWERVMNFEDGGVVTVTQDSSLQDGEFIYKVKLRGTNFPSD | | |
| (M1L); stop) | GPVMQKKTMGWEASSERMYPEDGALKGEIKQRLKLKDGGHYDAEVKTTYKAKK | | |
| | PVQLPGAYNVNIKLDITSHNEDYTIVEQYERAEGRHSTGGMDELYK* | | |
| OT- | MVSKGAELFTGIVPILIELNGDVNGHKFSVSGEGEGDATYGKLTLKFICTTGKLPVP | 8750 | 8792 |
| 001874(AcGFP | WPTLVTTLSYGVQCFSRYPDHMKQHDFFKSAMPEGYIQERTIFFEDDGNYKSRAE | | |
| (1-239 of WT); | VKFEGDTLVNRIELTGTDFKEDGNILGNKMEYNYNAHNVYIMTDKAKNGIKVNFK | | |
| Linker (GS); | IRHNIEDGSVQLADHYQQNTPIGDGPVLLPDNHYLSTQSALSKDPNEKRDHMIYFG | | |
| hPDE5 (aa 535 | FVTAAAITHGMDELYKGSEETRELQSLAAAVVPSAQTLKITDFSFSDFELSDLETAL | | |
| to 860 of WT, | CTIRMFTDLNLVQNFQMKHEVLCRWILSVKKNYRKNVAYHNWRHAFNTAQCMF | | |
| R732A, | AALKAGKIQNKLTDLEILALLIAALSHDLDHRGVNNSYIQRSEHPLAQLYCHSIMEH | | |
| F736A); stop) | HHFDQCLMILNSPGNQILSGLSIEEYKTTLKIIKQAILATDLALYIKRAGEFAELIRKN | | |
| | QFNLEDPHQKELFLAMLMTACDLSAITKPWPIQQRIAELVATEFFDQGDRERKELNI | | |
| | EPTDLMNREKKNKIPSMQVGFIDAICLQLYEALTHVSEDCFPLLDGCRKNRQKWQ | | |
| | ALAEQQ* | | |
| OT- | MVSKGAELFTGIVPILIELNGDVNGHKESVSGEGEGDATYGKLTLKFICTTGKLPVP | 8751 | 8793 |
| 001883(AcGFP | WPTLVTTLSYGVQCFSRYPDHMKQHDFFKSAMPEGYIQERTIFFEDDGNYKSRAE | | |
| (1-239 of WT); | VKFEGDTLVNRIELTGTDFKEDGNILGNKMEYNYNAHNVYIMTDKAKNGIKVNFK | | |
| Linker (GS); | IRHNIEDGSVQLADHYQQNTPIGDGPVLLPDNHYLSTQSALSKDPNEKRDHMIYFG | | |
| hPDE5 (aa 535 | FVTAAAITHGMDELYKGSEETRELQSLAAAVVPSAQTLKITDFSFSDFELSDLETAL | | |
| to 860 of WT, | CTIRMFTDLNLVQNFQMKHEVLCRWILSVKKNYRKNVAYHNWRHAFNTAQCMF | | |
| R732S, | AALKAGKIQNKLTDLEILALLIAALSHDLDHRGVNNSYIQRSEHPLAQLYCHSIMEH | | |
| F736G); | HHFDQCLMILNSPGNQILSGLSIEEYKTTLKIIKQAILATDLALYIKRSGEFGELIRKN | | |
| GSLDG Linker | QFNLEDPHQKELFLAMLMTACDLSAITKPWPIQQRIAELVATEFFDQGDRERKELNI | | |
| (SEQ ID NO: | EPTDLMNREKKNKIPSMQVGFIDAICLQLYEALTHVSEDCFPLLDGCRKNRQKWQ | | |
| 8741); P2A | ALAEQQGSLDGATNFSLLKQAGDVEENPGPLSKGEEDNMAIIKEFMRFKVHMEGS | | |
| cleavage site; | VNGHEFEIEGEGEGRPYEGTQTAKLKVTKGGPLPFAWDILSPQFMYGSKAYVKHP | | |
| mCherry | ADIPDYLKLSFPEGFKWERVMNFEDGGVVTVTQDSSLQDGEFIYKVKLRGTNFPSD | | |
| (M1L); stop) | GPVMQKKTMGWEASSERMYPEDGALKGEIKQRLKLKDGGHYDAEVKTTYKAKK | | |
| | PVQLPGAYNVNIKLDITSHNEDYTIVEQYERAEGRHSTGGMDELYK* | | |
| OT- | MVSKGAELFTGIVPILIELNGDVNGHKFSVSGEGEGDATYGKLTLKFICTTGKLPVP | 8752 | 8794 |
| 001884(AcGFP | WPTLVTTLSYGVQCFSRYPDHMKQHDFFKSAMPEGYIQERTIFFEDDGNYKSRAE | | |
| (1-239 of WT); | VKFEGDTLVNRIELTGTDFKEDGNILGNKMEYNYNAHNVYIMTDKAKNGIKVNFK | | |
| Linker (GS); | IRHNIEDGSVQLADHYQQNTPIGDGPVLLPDNHYLSTQSALSKDPNEKRDHMIYFG | | |
| hPDE5 (aa 535 | FVTAAAITHGMDELYKGSEETRELQSLAAAVVPSAQTLKITDFSFSDFELSDLETAL | | |
| to 860 of WT, | CTIRMFTDLNLVQNFQMKHEVLCRWILSVKKNYRKNVAYHNWRHAFNTAQCMF | | |
| R732T, | AALKAGKIQNKLTDLEILALLIAALSHDLDHRGVNNSYIQRSEHPLAQLYCHSIMEH | | |
| F736P); | HHFDQCLMILNSPGNQILSGLSIEEYKTTLKIIKQAILATDLALYIKRTGEFPELIRKN | | |
| GSLDG Linker | QFNLEDPHQKELFLAMLMTACDLSAITKPWPIQQRIAELVATEFFDQGDRERKELNI | | |
| (SEQ ID NO: | EPTDLMNREKKNKIPSMQVGFIDAICLQLYEALTHVSEDCFPLLDGCRKNRQKWQ | | |
| 8741); P2A | ALAEQQGSLDGATNFSLLKQAGDVEENPGPLSKGEEDNMAIIKEFMRFKVHMEGS | | |
| cleavage site; | VNGHEFEIEGEGEGRPYEGTQTAKLKVTKGGPLPFAWDILSPQFMYGSKAYVKHP | | |
| mCherry | ADIPDYLKLSFPEGFKWERVMNFEDGGVVTVTQDSSLQDGEFIYKVKLRGTNFPSD | | |
| (M1L); stop) | GPVMQKKTMGWEASSERMYPEDGALKGEIKQRLKLKDGGHYDAEVKTTYKAKK | | |
| | PVQLPGAYNVNIKLDITSHNEDYTIVEQYERAEGRHSTGGMDELYK* | | |
| OT- | MVSKGAELFTGIVPILIELNGDVNGHKFSVSGEGEGDATYGKLTLKFICTTGKLPVP | 8753 | 8795 |
| 001885 (AcGFP | WPTLVTTLSYGVQCFSRYPDHMKQHDFFKSAMPEGYIQERTIFFEDDGNYKSRAE | | |
| (1-239 of WT); | VKFEGDTLVNRIELTGTDFKEDGNILGNKMEYNYNAHNVYIMTDKAKNGIKVNFK | | |
| Linker (GS); | IRHNIEDGSVQLADHYQQNTPIGDGPVLLPDNHYLSTQSALSKDPNEKRDHMIYFG | | |
| hPDE5 (aa 535 | FVTAAAITHGMDELYKGSEETRELQSLAAAVVPSAQTLKITDFSFSDFELSDLETAL | | |
| to 860 of WT, | CTIRMFTDLNLVQNFQMKHEVLCRWILSVKKNYRKNVAYHNWRHAFNTAQCMF | | |
| R732M, | AALKAGKIQNKLTDLEILALLIAALSHDLDHRGVNNSYIQRSEHPLAQLYCHSIMEH | | |
| F736H); | HHFDQCLMILNSPGNQILSGLSIEEYKTTLKIIKQAILATDLALYIKRMGEFHELIRK | | |
| GSLDG Linker | NQFNLEDPHQKELFLAMLMTACDLSAITKPWPIQQRIAELVATEFFDQGDRERKEL | | |
| (SEQ ID NO: | NIEPTDLMNREKKNKIPSMQVGFIDAICLQLYEALTHVSEDCFPLLDGCRKNRQKW | | |
| 8741); P2A | QALAEQQGSLDGATNFSLLKQAGDVEENPGPLSKGEEDNMAIIKEFMRFKVHMEG | | |
| cleavage site; | SVNGHEFEIEGEGEGRPYEGTQTAKLKVTKGGPLPFAWDILSPQFMYGSKAYVKHP | | |
| mCherry | ADIPDYLKLSFPEGFKWERVMNFEDGGVVTVTQDSSLQDGEFIYKVKLRGTNFPSD | | |
| (M1L); stop) | GPVMQKKTMGWEASSERMYPEDGALKGEIKQRLKLKDGGHYDAEVKTTYKAKK | | |
| | PVQLPGAYNVNIKLDITSHNEDYTIVEQYERAEGRHSTGGMDELYK* | | |
| OT- | MVSKGAELFTGIVPILIELNGDVNGHKESVSGEGEGDATYGKLTLKFICTTGKLPVP | 8754 | 8796 |
| 001886(AcGFP | WPTLVTTLSYGVQCFSRYPDHMKQHDFFKSAMPEGYIQERTIFFEDDGNYKSRAE | | |
| (1-239 of WT); | VKFEGDTLVNRIELTGTDFKEDGNILGNKMEYNYNAHNVYIMTDKAKNGIKVNFK | | |
| Linker (GS); | IRHNIEDGSVQLADHYQQNTPIGDGPVLLPDNHYLSTQSALSKDPNEKRDHMIYFG | | |
| hPDE5 (aa 535 | FVTAAAITHGMDELYKGSEETRELQSLAAAVVPSAQTLKITDFSFSDFELSDLETAL | | |
| to 860 of WT, | CTIRMFTDLNLVQNFQMKHEVLCRWILSVKKNYRKNVAYHNWRHAFNTAQCMF | | |
| R732Y, | AALKAGKIQNKLTDLEILALLIAALSHDLDHRGVNNSYIQRSEHPLAQLYCHSIMEH | | |
| F736M); | HHFDQCLMILNSPGNQILSGLSIEEYKTTLKIIKQAILATDLALYIKRYGEFMELIRK | | |
| GSLDG Linker | NQFNLEDPHQKELFLAMLMTACDLSAITKPWPIQQRIAELVATEFFDQGDRERKEL | | |
| (SEQ ID NO: | NIEPTDLMNREKKNKIPSMQVGFIDAICLQLYEALTHVSEDCFPLLDGCRKNRQKW | | |
| 8741); P2A | QALAEQQGSLDGATNFSLLKQAGDVEENPGPLSKGEEDNMAIIKEFMRFKVHMEG | | |
| cleavage site; | SVNGHEFEIEGEGEGRPYEGTQTAKLKVTKGGPLPFAWDILSPQFMYGSKAYVKHP | | |
| mCherry | ADIPDYLKLSFPEGFKWERVMNFEDGGVVTVTQDSSLQDGEFIYKVKLRGTNFPSD | | |
| (M1L); stop) | GPVMQKKTMGWEASSERMYPEDGALKGEIKQRLKLKDGGHYDAEVKTTYKAKK | | |
| | PVQLPGAYNVNIKLDITSHNEDYTIVEQYERAEGRHSTGGMDELYK* | | |
| OT- | MVSKGAELFTGIVPILIELNGDVNGHKFSVSGEGEGDATYGKLTLKFICTTGKLPVP | 8755 | 8797 |
| 001887(AcGFP | WPTLVTTLSYGVQCFSRYPDHMKQHDFFKSAMPEGYIQERTIFFEDDGNYKSRAE | | |
| (1-239 of WT); | VKFEGDTLVNRIELTGTDFKEDGNILGNKMEYNYNAHNVYIMTDKAKNGIKVNFK | | |
| Linker (GS); | IRHNIEDGSVQLADHYQQNTPIGDGPVLLPDNHYLSTQSALSKDPNEKRDHMIYFG | | |
| hPDE5 (aa 535 | FVTAAAITHGMDELYKGSEETRELQSLAAAVVPSAQTLKITDFSFSDFELSDLETAL | | |
| to 860 of WT, | CTIRMFTDLNLVQNFQMKHEVLCRWILSVKKNYRKNVAYHNWRHAFNTAQCMF | | |
| R732P, | AALKAGKIQNKLTDLEILALLIAALSHDLDHRGVNNSYIQRSEHPLAQLYCHSIMEH | | |
| F736D); | HHFDQCLMILNSPGNQILSGLSIEEYKTTLKIIKQAILATDLALYIKRPGEFDELIRKN | | |
| GSLDG Linker | QFNLEDPHQKELFLAMLMTACDLSAITKPWPIQQRIAELVATEFFDQGDRERKELNI | | |
| (SEQ ID NO: | EPTDLMNREKKNKIPSMQVGFIDAICLQLYEALTHVSEDCFPLLDGCRKNRQKWQ | | |
| 8741); P2A | ALAEQQGSLDGATNFSLLKQAGDVEENPGPLSKGEEDNMAIIKEFMRFKVHMEGS | | |
| cleavage site; | VNGHEFEIEGEGEGRPYEGTQTAKLKVTKGGPLPFAWDILSPQFMYGSKAYVKHP | | |
| mCherry | ADIPDYLKLSFPEGFKWERVMNFEDGGVVTVTQDSSLQDGEFIYKVKLRGTNFPSD | | |
| (M1L); stop) | GPVMQKKTMGWEASSERMYPEDGALKGEIKQRLKLKDGGHYDAEVKTTYKAKK | | |
| | PVQLPGAYNVNIKLDITSHNEDYTIVEQYERAEGRHSTGGMDELYK* | | |
| OT- | MVSKGAELFTGIVPILIELNGDVNGHKFSVSGEGEGDATYGKLTLKFICTTGKLPVP | 8756 | 8798 |
| 001873(AcGFP | WPTLVTTLSYGVQCFSRYPDHMKQHDFFKSAMPEGYIQERTIFFEDDGNYKSRAE | | |
| (1-239 of WT); | VKFEGDTLVNRIELTGTDFKEDGNILGNKMEYNYNAHNVYIMTDKAKNGIKVNFK | | |
| Linker (GS); | IRHNIEDGSVQLADHYQQNTPIGDGPVLLPDNHYLSTQSALSKDPNEKRDHMIYFG | | |
| hPDE5 (aa 535 | FVTAAAITHGMDELYKGSEETRELQSLAAAVVPSAQTLKITDFSFSDFELSDLETAL | | |
| to 860 of WT, | CTIRMFTDLNLVQNFQMKHEVLCRWILSVKKNYRKNVAYHNWRHAFNTAQCMF | | |
| R732P, | AALKAGKIQNKLTDLEILALLIAALSHDLDHRGVNNSYIQRSEHPLAQLYCHSIMEH | | |
| F736G); stop) | HHFDQCLMILNSPGNQILSGLSIEEYKTTLKIIKQAILATDLALYIKRPGEFGELIRKN | | |
| | QFNLEDPHQKELFLAMLMTACDLSAITKPWPIQQRIAELVATEFFDQGDRERKELNI | | |
| | EPTDLMNREKKNKIPSMQVGFIDAICLQLYEALTHVSEDCFPLLDGCRKNRQKWQ | | |
| | ALAEQQ* | | |
| OT- | MVSKGAELFTGIVPILIELNGDVNGHKFSVSGEGEGDATYGKLTLKFICTTGKLPVP | 8757 | 8799 |
| 001878(AcGFP | WPTLVTTLSYGVQCFSRYPDHMKQHDFFKSAMPEGYIQERTIFFEDDGNYKSRAE | | |
| (1-239 of WT); | VKFEGDTLVNRIELTGTDFKEDGNILGNKMEYNYNAHNVYIMTDKAKNGIKVNFK | | |
| Linker (GS); | IRHNIEDGSVQLADHYQQNTPIGDGPVLLPDNHYLSTQSALSKDPNEKRDHMIYFG | | |
| hPDE5 (aa 535 | FVTAAAITHGMDELYKGSEETRELQSLAAAVVPSAQTLKITDFSFSDFELSDLETAL | | |
| to 860 of WT, | CTIRMFTDLNLVQNFQMKHEVLCRWILSVKKNYRKNVAYHNWRHAFNTAQCMF | | |
| R732W, | AALKAGKIQNKLTDLEILALLIAALSHDLDHRGVNNSYIQRSEHPLAQLYCHSIMEH | | |
| F736L); | HHFDQCLMILNSPGNQILSGLSIEEYKTTLKIIKQAILATDLALYIKRWGEFLELIRKN | | |
| GSLDG Linker | QFNLEDPHQKELFLAMLMTACDLSAITKPWPIQQRIAELVATEFFDQGDRERKELNI | | |
| (SEQ ID NO: | EPTDLMNREKKNKIPSMQVGFIDAICLQLYEALTHVSEDCFPLLDGCRKNRQKWQ | | |
| 8741); P2A | ALAEQQGSLDGATNFSLLKQAGDVEENPGPLSKGEEDNMAIIKEFMRFKVHMEGS | | |
| cleavage site; | VNGHEFEIEGEGEGRPYEGTQTAKLKVTKGGPLPFAWDILSPQFMYGSKAYVKHP | | |
| mCherry | ADIPDYLKLSFPEGFKWERVMNFEDGGVVTVTQDSSLQDGEFIYKVKLRGTNFPSD | | |
| (M1L); stop) | GPVMQKKTMGWEASSERMYPEDGALKGEIKQRLKLKDGGHYDAEVKTTYKAKK | | |
| | PVQLPGAYNVNIKLDITSHNEDYTIVEQYERAEGRHSTGGMDELYK* | | |
| OT- | MVSKGAELFTGIVPILIELNGDVNGHKFSVSGEGEGDATYGKLTLKFICTTGKLPVP | 8758 | 8800 |
| 001872(AcGFP | WPTLVTTLSYGVQCFSRYPDHMKQHDFFKSAMPEGYIQERTIFFEDDGNYKSRAE | | |
| (1-239 of WT); | VKFEGDTLVNRIELTGTDFKEDGNILGNKMEYNYNAHNVYIMTDKAKNGIKVNFK | | |
| Linker (GS); | IRHNIEDGSVQLADHYQQNTPIGDGPVLLPDNHYLSTQSALSKDPNEKRDHMIYFG | | |
| hPDE5 (aa 535 | FVTAAAITHGMDELYKGSEETRELQSLAAAVVPSAQTLKITDFSFSDFELSDLETAL | | |
| to 860 of WT, | CTIRMFTDLNLVQNFQMKHEVLCRWILSVKKNYRKNVAYHNWRHAFNTAQCMF | | |
| R732L, | AALKAGKIQNKLTDLEILALLIAALSHDLDHRGVNNSYIQRSEHPLAQLYCHSIMEH | | |
| F736S); stop) | HHFDQCLMILNSPGNQILSGLSIEEYKTTLKIIKQAILATDLALYIKRLGEFSELIRKN | | |
| | QFNLEDPHQKELFLAMLMTACDLSAITKPWPIQQRIAELVATEFFDQGDRERKELNI | | |
| | EPTDLMNREKKNKIPSMQVGFIDAICLQLYEALTHVSEDCFPLLDGCRKNRQKWQ | | |
| | ALAEQQ* | | |
| OT- | MVSKGAELFTGIVPILIELNGDVNGHKFSVSGEGEGDATYGKLTLKFICTTGKLPVP | 8759 | 8801 |
| 001889(AcGFP | WPTLVTTLSYGVQCFSRYPDHMKQHDFFKSAMPEGYIQERTIFFEDDGNYKSRAE | | |
| (1-239 of WT); | VKFEGDTLVNRIELTGTDFKEDGNILGNKMEYNYNAHNVYIMTDKAKNGIKVNFK | | |
| Linker (GS); | IRHNIEDGSVQLADHYQQNTPIGDGPVLLPDNHYLSTQSALSKDPNEKRDHMIYFG | | |
| hPDE5 (aa 535 | FVTAAAITHGMDELYKGSEETRELQSLAAAVVPSAQTLKITDFSFSDFELSDLETAL | | |
| to 860 of WT, | CTIRMFTDLNLVQNFQMKHEVLCRWILSVKKNYRKNVAYHNWRHAFNTAQCMF | | |
| R732D, | AALKAGKIQNKLTDLEILALLIAALSHDLDHRGVNNSYIQRSEHPLAQLYCHSIMEH | | |
| F736T); | HHFDQCLMILNSPGNQILSGLSIEEYKTTLKIIKQAILATDLALYIKRDGEFTELIRKN | | |
| GSLDG Linker | QFNLEDPHQKELFLAMLMTACDLSAITKPWPIQQRIAELVATEFFDQGDRERKELNI | | |
| (SEQ ID NO: | EPTDLMNREKKNKIPSMQVGFIDAICLQLYEALTHVSEDCFPLLDGCRKNRQKWQ | | |
| 8741); P2A | ALAEQQGSLDGATNFSLLKQAGDVEENPGPLSKGEEDNMAIIKEFMRFKVHMEGS | | |
| cleavage site; | VNGHEFEIEGEGEGRPYEGTQTAKLKVTKGGPLPFAWDILSPQFMYGSKAYVKHP | | |
| mCherry | ADIPDYLKLSFPEGFKWERVMNFEDGGVVTVTQDSSLQDGEFIYKVKLRGTNFPSD | | |
| (M1L); stop) | GPVMQKKTMGWEASSERMYPEDGALKGEIKQRLKLKDGGHYDAEVKTTYKAKK | | |
| | PVQLPGAYNVNIKLDITSHNEDYTIVEQYERAEGRHSTGGMDELYK* | | |
| OT- | MVSKGAELFTGIVPILIELNGDVNGHKFSVSGEGEGDATYGKLTLKFICTTGKLPVP | 8760 | 8802 |
| 001871(AcGFP | WPTLVTTLSYGVQCFSRYPDHMKQHDFFKSAMPEGYIQERTIFFEDDGNYKSRAE | | |
| (1-239 of WT); | VKFEGDTLVNRIELTGTDFKEDGNILGNKMEYNYNAHNVYIMTDKAKNGIKVNFK | | |
| Linker (GS); | IRHNIEDGSVQLADHYQQNTPIGDGPVLLPDNHYLSTQSALSKDPNEKRDHMIYFG | | |
| hPDE5 (aa 535 | FVTAAAITHGMDELYKGSEETRELQSLAAAVVPSAQTLKITDFSFSDFELSDLETAL | | |
| to 860 of WT, | CTIRMFTDLNLVQNFQMKHEVLCRWILSVKKNYRKNVAYHNWRHAFNTAQCMF | | |
| R732L, | AALKAGKIQNKLTDLEILALLIAALSHDLDHRGVNNSYIQRSEHPLAQLYCHSIMEH | | |
| F736V); stop) | HHFDQCLMILNSPGNQILSGLSIEEYKTTLKIIKQAILATDLALYIKRLGEFVELIRKN | | |
| | QFNLEDPHQKELFLAMLMTACDLSAITKPWPIQQRIAELVATEFFDQGDRERKELNI | | |
| | EPTDLMNREKKNKIPSMQVGFIDAICLQLYEALTHVSEDCFPLLDGCRKNRQKWQ | | |
| | ALAEQQ* | | |
| OT- | MVSKGAELFTGIVPILIELNGDVNGHKESVSGEGEGDATYGKLTLKFICTTGKLPVP | 8761 | 8803 |
| 001888(AcGFP | WPTLVTTLSYGVQCFSRYPDHMKQHDFFKSAMPEGYIQERTIFFEDDGNYKSRAE | | |
| (1-239 of WT); | VKFEGDTLVNRIELTGTDFKEDGNILGNKMEYNYNAHNVYIMTDKAKNGIKVNFK | | |
| Linker (GS); | IRHNIEDGSVQLADHYQQNTPIGDGPVLLPDNHYLSTQSALSKDPNEKRDHMIYFG | | |
| hPDE5 (aa 535 | FVTAAAITHGMDELYKGSEETRELQSLAAAVVPSAQTLKITDFSFSDFELSDLETAL | | |
| to 860 of WT, | CTIRMFTDLNLVQNFQMKHEVLCRWILSVKKNYRKNVAYHNWRHAFNTAQCMF | | |
| R732G, | AALKAGKIQNKLTDLEILALLIAALSHDLDHRGVNNSYIQRSEHPLAQLYCHSIMEH | | |
| F736V); | HHFDQCLMILNSPGNQILSGLSIREYKTTLKIIKQAILATDLALYIKRGGEFVELIRKN | | |
| GSLDG Linker | QFNLEDPHQKELFLAMLMTACDLSAITKPWPIQQRIAELVATEFFDQGDRERKELNI | | |
| (SEQ ID NO: | EPTDLMNREKKNKIPSMQVGFIDAICLQLYEALTHVSEDCFPLLDGCRKNRQKWQ | | |
| 8741); P2A | ALAEQQGSLDGATNFSLLKQAGDVEENPGPLSKGEEDNMAIIKEFMRFKVHMEGS | | |
| cleavage site; | VNGHEFEIEGEGEGRPYEGTQTAKLKVTKGGPLPFAWDILSPQFMYGSKAYVKHP | | |
| mCherry | ADIPDYLKLSFPEGFKWERVMNFEDGGVVTVTQDSSLQDGEFIYKVKLRGTNFPSD | | |
| (M1L); stop) | GPVMQKKTMGWEASSERMYPEDGALKGEIKQRLKLKDGGHYDAEVKTTYKAKK | | |
| | PVQLPGAYNVNIKLDITSHNEDYTIVEQYERAEGRHSTGGMDELYK* | | |
| OT- | MVSKGAELFTGIVPILIELNGDVNGHKFSVSGEGEGDATYGKLTLKFICTTGKLPVP | 8762 | 8804 |
| 001890(AcGFP | WPTLVTTLSYGVQCFSRYPDHMKQHDFFKSAMPEGYIQERTIFFEDDGNYKSRAE | | |
| (1-239 of WT); | VKFEGDTLVNRIELTGTDFKEDGNILGNKMEYNYNAHNVYIMTDKAKNGIKVNFK | | |
| Linker (GS); | IRHNIEDGSVQLADHYQQNTPIGDGPVLLPDNHYLSTQSALSKDPNEKRDHMIYFG | | |
| hPDE5 (aa 535 | FVTAAAITHGMDELYKGSEETRELQSLAAAVVPSAQTLKITDFSFSDFELSDLETAL | | |
| to 860 of WT, | CTIRMFTDLNLVQNFQMKHEVLCRWILSVKKNYRKNVAYHNWRHAFNTAQCMF | | |
| R732W, | AALKAGKIQNKLTDLEILALLIAALSHDLDHRGVNNSYIQRSEHPLAQLYCHSIMEH | | |
| F736A); | HHFDQCLMILNSPGNQILSGLSIEEYKTTLKIIKQAILATDLALYIKRWGEFAELIRK | | |
| GSLDG Linker | NQFNLEDPHQKELFLAMLMTACDLSAITKPWPIQQRIAELVATEFFDQGDRERKEL | | |
| (SEQ ID NO: | NIEPTDLMNREKKNKIPSMQVGFIDAICLQLYEALTHVSEDCFPLLDGCRKNRQKW | | |
| 8741); P2A | QALAEQQGSLDGATNFSLLKQAGDVEENPGPLSKGEEDNMAIIKEFMRFKVHMEG | | |
| cleavage site; | SVNGHEFEIEGEGEGRPYEGTQTAKLKVTKGGPLPFAWDILSPQFMYGSKAYVKHP | | |
| mCherry | ADIPDYLKLSFPEGFKWERVMNFEDGGVVTVTQDSSLQDGEFIYKVKLRGTNFPSD | | |
| (M1L); stop) | GPVMQKKTMGWEASSERMYPEDGALKGEIKQRLKLKDGGHYDAEVKTTYKAKK | | |
| | PVQLPGAYNVNIKLDITSHNEDYTIVEQYERAEGRHSTGGMDELYK* | | |

[0163] Saturation mutagenesis screens were performed using mutant library wherein every amino acid within position 535 to 860 of SEQ ID NO: 1 was mutated. Mutants were screened by appended DDs to payloads such as GFP and mcherry Table 13 provides hPDE5 mutants identified by this screen. In Table 13, * indicates the translation of the stop codon.

TABLE 13
hPDE5 saturation mutagenesis DD and constructs

| | | | |
|---|---|---|---|
| | | AA | NA |
| Construct ID/ | | SEQ | SEQ |
| Description | Sequence | ID NO | ID NO |

DDs

| | | | |
|---|---|---|---|
| hPDE5 (aa 535 | EETRELQSLAAAVVPSAQTLKITDFSFSDFELSDLETALNTIRMFTDLNLVQNFQ | 8805 | 8813 |
| to 860 of WT, | MKREVLCRWILSVKKNYRKNVAYHNWRHAFNTAQCMFAALKAGKIQNKLTD | | |
| C574N) | LEILALLIAALSHDLDHRGVNNSYIQRSEHPLAQLYCHSIMEHHHFDQCLMILNS | | |
| | PGNQILSGLSIEEYKTTLKIIKQAILATDLALYIKRRGEFFELIRKNQFNLEDPHQK | | |
| | ELFLAMLMTACDLSAITKPWPIQQRIAELVATEFFDQGDRERKELNIEPTDLMNR | | |
| | EKKNKIPSMQVGFIDAICLQLYEALTHVSEDCFPLLDGCRKNRQKWQALAEQQ | | |
| hPDE5 (aa 535 | EKTRELQSLAAAVVPSAQTLKITDFSFSDFELSDLETALCTIRMFTDLNLVQNFQ | 8806 | 8814 |
| to 860 of WT, | MKHEVLCRWILSVKKNYRKNVAYHNWRHAFNTAQCMFAALKAGKIQNKLTD | | |
| E536K, I739W) | LEILALLIAALSHDLDHRGVNNSYIQRSEHPLAQLYCHSIMEHHHFDQCLMILNS | | |
| | PGNQILSGLSIEEYKTTLKIIKQAILATDLALYIKRRGEFFELWRKNQFNLEDPHQ | | |
| | KELFLAMLMTACDLSAITKPWPIQQRIAELVATEFFDQGDRERKELNIEPTDLMN | | |
| | REKKNKIPSMQVGFIDAICLQLYEALTHVSEDCFPLLDGCRKNRQKWQALAEQQ | | |
| hPDE5 (aa 535 | EETRELQSLAAAVVPSAQTLKITDFSFSDFELSDLETALCTIRMFTDLNLVQNFQ | 8807 | 8815 |
| to 860 of WT, | MKREVLCRWILSVKKNYRKNVAYHNWRHAFNTAQCMFAALKAGKIQNKLTD | | |
| H678F, S702F) | LEILALLIAALSHDLDHRGVNNSYIQRSEHPLAQLYCFSIMEHHHFDQCLMILNSP | | |
| | GNQILFGLSIEEYKTTLKIIKQAILATDLALYIKRRGEFFELIRKNQFNLEDPHQKE | | |
| | LFLAMLMTACDLSAITKPWPIQQRIAELVATEFFDQGDRERKELNIEPTDLMNRE | | |
| | KKNKIPSMQVGFIDAICLQLYEALTHVSEDCFPLLDGCRKNRQKWQALAEQQ | | |

Construct components

| | | | |
|---|---|---|---|
| AcGFP (1-239 | MVSKGAELFTGIVPILIELNGDVNGHKESVSGEGEGDATYGKLTLKFICTTGKLP | 365 | 373 |
| of WT) | VPWPTLVTTLSYGVQCFSRYPDHMKQHDFFKSAMPEGYIQERTIFFEDDGNYKS | | |
| | RAEVKFEGDTLVNRIELTGTDFKEDGNILGNKMEYNYNAHNVYIMTDKAKNGI | | |
| | KVNFKIRHNIEDGSVQLADHYQQNTPIGDGPVLLPDNHYLSTQSALSKDPNEKR | | |
| | DHMIYFGFVTAAAITHGMDELYK | | |
| Linker (GS); | GS | | |
| BamH1 Site | | | |
| SLDG Linker | SLDG | 8808 | 8816 |
| mCherry | LSKGEEDNMAIIKEFMRFKVHMEGSVNGHEFEIEGEGEGRPYEGTQTAKLKVTK | 8240 | 8269 |
| (M1L) | GGPLPFAWDILSPQFMYGSKAYVKHPADIPDYLKLSFPEGFKWERVMNFEDGG | | |
| | VVTVTQDSSLQDGEFIYKVKLRGTNFPSDGPVMQKKTMGWEASSERMYPEDGA | | |
| | LKGEIKQRLKLKDGGHYDAEVKTTYKAKKPVQLPGAYNVNIKLDITSHNEDYTI | | |
| | VEQYERAEGRHSTGGMDELYK | | |
| P2A cleavage | ATNFSLLKQAGDVEENPGP | 8809 | 8817 |
| site | | | |

Constructs

| | | | |
|---|---|---|---|
| OT-001869 | MVSKGAELFTGIVPILIELNGDVNGHKFSVSGEGEGDATYGKLTLKFICTTGKLP | 8810 | 8818 |
| (AcGFP (1-239 | VPWPTLVTTLSYGVQCFSRYPDHMKQHDFFKSAMPEGYIQERTIFFEDDGNYKS | | |
| of WT); Linker | RAEVKFEGDTLVNRIELTGTDFKEDGNILGNKMEYNYNAHNVYIMTDKAKNGI | | |
| (GS); hPDE5 | KVNFKIRHNIEDGSVQLADHYQQNTPIGDGPVLLPDNHYLSTQSALSKDPNEKR | | |
| (aa 535 to 860 | DHMIYFGFVTAAAITHGMDELYKGSEETRELQSLAAAVVPSAQTLKITDFSFSDF | | |
| of WT, | ELSDLETALNTIRMFTDLNLVQNFQMKHEVLCRWILSVKKNYRKNVAYHNWR | | |
| C574N); SLDG | HAFNTAQCMFAALKAGKIQNKLTDLEILALLIAALSHDLDHRGVNNSYIQRSEH | | |
| Linker (SEQ ID | PLAQLYCHSIMEHHHFDQCLMILNSPGNQILSGLSIEEYKTTLKIIKQAILATDLAL | | |
| NO: 8808); | YIKRRGEFFELIRKNQFNLEDPHQKELFLAMLMTACDLSAITKPWPIQQRIAELV | | |
| P2A cleavage | ATEFFDQGDRERKELNIEPTDLMNREKKNKIPSMQVGFIDAICLQLYEALTHVSE | | |
| site; mCherry | DCFPLLDGCRKNRQKWQALAEQQSLDGATNFSLLKQAGDVEENPGPLSKGEED | | |
| (M1L); stop) | NMAIIKEFMRFKVHMEGSVNGHEFEIEGEGEGRPYEGTQTAKLKVTKGGPLPFA | | |
| | WDILSPQFMYGSKAYVKHPADIPDYLKLSFPEGFKWERVMNFEDGGVVTVTQD | | |
| | SSLQDGEFIYKVKLRGTNFPSDGPVMQKKTMGWEASSERMYPEDGALKGEIKQ | | |
| | RLKLKDGGHYDAEVKTTYKAKKPVQLPGAYNVNIKLDITSHNEDYTIVEQYER | | |
| | AEGRHSTGGMDELYK* | | |
| OT-001868 | MVSKGAELFTGIVPILIELNGDVNGHKFSVSGEGEGDATYGKLTLKFICTTGKLP | 8811 | 8819 |
| (AcGFP (1-239 | VPWPTLVTTLSYGVQCFSRYPDHMKQHDFFKSAMPEGYIQERTIFFEDDGNYKS | | |
| of WT); Linker | RAEVKFEGDTLVNRIELTGTDFKEDGNILGNKMEYNYNAHNVYIMTDKAKNGI | | |
| (GS); hPDE5 | KVNFKIRHNIEDGSVQLADHYQQNTPIGDGPVLLPDNHYLSTQSALSKDPNEKR | | |
| (aa 535 to 860 | DHMIYFGFVTAAAITHGMDELYKGSEKTRELQSLAAAVVPSAQTLKITDFSFSDF | | |
| of WT E536K, | ELSDLETALCTIRMFTDLNLVQNFQMKHEVLCRWILSVKKNYRKNVAYHNWR | | |
| I739W); SLDG | HAFNTAQCMFAALKAGKIQNKLTDLEILALLIAALSHDLDHRGVNNSYIQRSEH | | |
| Linker (SEQ ID | PLAQLYCHSIMEHHHFDQCLMILNSPGNQILSGLSIEEYKTTLKIIKQAILATDLAL | | |
| NO: 8808); | YIKRRGEFFELWRKNQFNLEDPHQKELFLAMLMTACDLSAITKPWPIQQRIAEL | | |
| P2A cleavage | VATEFFDQGDRERKELNIEPTDLMNREKKNKIPSMQVGFIDAICLQLYEALTHVS | | |
| site; mCherry | EDCFPLLDGCRKNRQKWQALAEQQSLDGATNFSLLKQAGDVEENPGPLSKGEE | | |
| (M1L); stop) | DNMAIIKEFMRFKVHMEGSVNGHEFEIEGEGEGRPYEGTQTAKLKVTKGGPLPF | | |
| | AWDILSPQFMYGSKAYVKHPADIPDYLKLSFPEGFKWERVMNFEDGGVVTVTQ | | |
| | DSSLQDGEFIYKVKLRGTNFPSDGPVMQKKTMGWEASSERMYPEDGALKGEIK | | |
| | QRLKLKDGGHYDAEVKTTYKAKKPVQLPGAYNVNIKLDITSHNEDYTIVEQYE | | |
| | RAEGRHSTGGMDELYK* | | |
| OT-001870 | MVSKGAELFTGIVPILIELNGDVNGHKFSVSGEGEGDATYGKLTLKFICTTGKLP | 8812 | 8820 |
| (AcGFP (1-239 | VPWPTLVTTLSYGVQCFSRYPDHMKQHDFFKSAMPEGYIQERTIFFEDDGNYKS | | |
| of WT); Linker | RAEVKFEGDTLVNRIELTGTDFKEDGNILGNKMEYNYNAHNVYIMTDKAKNGI | | |
| (GS); hPDE5 | KVNFKIRHNIEDGSVQLADHYQQNTPIGDGPVLLPDNHYLSTQSALSKDPNEKR | | |
| (aa 535 to 860 | DHMIYFGFVTAAAITHGMDELYKGSEETRELQSLAAAVVPSAQTLKITDFSFSDF | | |
| of WT, H678F, | ELSDLETALCTIRMFTDLNLVQNFQMKHEVLCRWILSVKKNYRKNVAYHNWR | | |
| S702F); SLDG | HAFNTAQCMFAALKAGKIQNKLTDLEILALLIAALSHDLDHRGVNNSYIQRSEH | | |
| Linker (SEQ ID | PLAQLYCFSIMEHHHFDQCLMILNSPGNQILFGLSIEEYKTTLKIIKQAILATDLAL | | |
| NO: 8808); | YIKRRGEFFELIRKNQFNLEDPHQKELFLAMLMTACDLSAITKPWPIQQRIAELV | | |
| P2A cleavage | ATEFFDQGDRERKELNIEPTDLMNREKKNKIPSMQVGFIDAICLQLYEALTHVSE | | |
| site; mCherry | DCFPLLDGCRKNRQKWQALAEQQSLDGATNFSLLKQAGDVEENPGPLSKGEED | | |
| (M1L); stop) | NMAIIKEFMRFKVHMEGSVNGHEFEIEGEGEGRPYEGTQTAKLKVTKGGPLPFA | | |
| | WDILSPQFMYGSKAYVKHPADIPDYLKLSFPEGFKWERVMNFEDGGVVTVTQD | | |
| | SSLQDGEFIYKVKLRGTNFPSDGPVMQKKTMGWEASSERMYPEDGALKGEIKQ | | |
| | RLKLKDGGHYDAEVKTTYKAKKPVQLPGAYNVNIKLDITSHNEDYTIVEQYER | | |
| | AEGRHSTGGMDELYK* | | |

[0164] The position of hPDE5 in a construct comprising hPDE5 fused to GFP may affect the resultant library of mutants generated by mutagenesis screening. The effect of positioning the DD at the c terminal construct on the identification of DD clones was tested. PDE5 library generated by random mutagenesis fused GFP to generate AcGFP-PDE5-IRES-Puro constructs. Mutants were screened by appended DDs to payloads such as GFP and mcherry Table 14 provides PDE5 DDs generated in C terminal screens and their related constructs. In Table 14, * indicates the translation of the stop codon.

TABLE 14
hPDE5 mutagenesis by C terminal positioning

| | | | |
|---|---|---|---|
| | | AA | NA |
| Construct ID/ | | SEQ | SEQ |
| Description | Sequence | ID NO | ID NO |

DDs

| | | | |
|---|---|---|---|
| hPDE5 (aa 535 | EETRELQSLAAAVVPSAQTLKITDFSFSDFELSDLETALCTIRMFTDLNLV | 8821 | 8841 |
| to 860 of WT, | QNFQMKHEVLCRWILSVKKNYRKNVAYHNWRHAFNTAQCMFAALKAG | | |
| E669G, I700T) | KIQNKLTDLEILALLIAALSHDLDHRGVNNSYIQRSGHPLAQLYCHSIMEH | | |
| | HHFDQCLMILNSPGNQTLSGLSIEEYKTTLKIIKQAILATDLALYIKRRGEF | | |
| | FELIRKNQFNLEDPHQKELFLAMLMTACDLSAITKPWPIQQRIAELVATEF | | |
| | FDQGDRERKELNIEPTDLMNREKKNKIPSMQVGFIDAICLQLYEALTHVS | | |
| | EDCFPLLDGCRKNRQKWQALAEQQ | | |
| hPDE5 (aa 535 | EETRELQSLAAAVVPSAQTLKITDFSFSDFELSDLETALCTIRMFTDLNLV | 8822 | 8842 |
| to 860 of WT, | QNFQMKHEVLCRWILSVKKNYRKNVAYHNWRHAFNTAQCMFAALKAS | | |
| hPDE5 (G632S, | KIQNKLTDLEILALLTAALSHDLDHRGVNNSYIQRSEHPLAQLYCHSIMEH | | |
| I648T) | HHFDQCLMILNSPGNQILSGLSIEEYKTTLKIIKQAILATDLALYIKRRGEFF | | |
| | ELIRKNQFNLEDPHQKELFLAMLMTACDLSAITKPWPIQQRIAELVATEFF | | |
| | DQGDRERKELNIEPTDLMNREKKNKIPSMQVGFIDAICLQLYEALTHVSE | | |
| | DCFPLLDGCRKNRQKWQALAEQQ | | |
| hPDE5 (aa 535 | EETRELQSLAAAVVPSAQTLKITDFSFSDFELSDLETALCTIRMFTDLNLV | 8823 | 8843 |
| to 774 of WT, | QNFQMKHEVLCRWILSVKKNYRKNVAYHNWRHAFNTAQCMFAALKAG | | |
| hPDE5 (L646S) | KIQNKLTDLEILASLIAALSHDLDHRGVNNSYIQRSEHPLAQLYCHSIMEH | | |
| | HHFDQCLMILNSPGNQILSGLSIEEYKTTLKIIKQAILATDLALYIKRRGEFF | | |
| | ELIRKNQFNLEDPHQKELFLAMLMTACDLSAITKPWPI | | |
| hPDE5 (aa 535 | EETRELQSLAAAVVPSAQTLKITDFSFSDFELSDLETALCTIRMFTDLNLV | 8824 | 8844 |
| to 860 of WT, | QNFQMKHEVLCRWILSVKKNYRKNVAYHNWRHAFNTAQCMFAALKAG | | |
| hPDE5 (A762V) | KIQNKLTDLEILALLIAALSHDLDHRGVNNSYIQRSEHPLAQLYCHSIMEH | | |
| | HHFDQCLMILNSPGNQILSGLSIEEYKTTLKIIKQAILATDLALYIKRRGEFF | | |
| | ELIRKNQFNLEDPHQKELFLAMLMTVCDLSAITKPWPIQQRIAELVATEFF | | |
| | DQGDRERKELNIEPTDLMNREKKNKIPSMQVGFIDAICLQLYEALTHVSE | | |
| | DCFPLLDGCRKNRQKWQALAEQQ | | |
| hPDE5 (aa 535 | EETRELQSLAAAVVPSAQTLKITDFSFSDFELSDLETALCTIRMFTDLNLV | 8825 | 8845 |
| to 860 of WT, | QNFQMKHEVLCRWILSVKKNYRKNVAYHNWRHAFNTAQCMFAALKAG | | |
| hPDE5 (D640N) | KIQNKLTNLEILALLIAALSHDLDHRGVNNSYIQRSEHPLAQLYCHSIMEH | | |
| | HHFDQCLMILNSPGNQILSGLSIEEYKTTLKIIKQAILATDLALYIKRRGEFF | | |
| | ELIRKNQFNLEDPHQKELFLAMLMTACDLSAITKPWPIQQRIAELVATEFF | | |
| | DQGDRERKELNIEPTDLMNREKKNKIPSMQVGFIDAICLQLYEALTHVSE | | |
| | DCFPLLDGCRKNRQKWQALAEQQ | | |
| hPDE5 (aa 535 | EETRELQSLAAAVVPSAQTLKITDFSFSDFELSDLETALCTIRMFTDLNLV | 8826 | 8846 |
| to 860 of WT, | QNFQMKHEVLCRWILSVKKNYRKNVAYHNWRHAFNTAQCMFAALKAG | | |
| hPDE5 (N636S) | KIQSKLTDLEILALLIAALSHDLDHRGVNNSYIQRSEHPLAQLYCHSIMEH | | |
| | HHFDQCLMILNSPGNQILSGLSIEEYKTTLKIIKQAILATDLALYIKRRGEFF | | |
| | ELIRKNQFNLEDPHQKELFLAMLMTACDLSAITKPWPIQQRIAELVATEFF | | |
| | DQGDRERKELNIEPTDLMNREKKNKIPSMQVGFIDAICLQLYEALTHVSE | | |
| | DCFPLLDGCRKNRQKWQALAEQQ | | |
| hPDE5 (aa 535 | EETRELQSLAAAVVPSAQTLKITDFSFSDFELSDLETALCTIRMFTDLNLV | 8827 | 8847 |
| to 860 of WT, | QNFQMKHEVLCRWILSVKKNYRKNVAYHNWRHAFNTARCMFAALKAG | | |
| hPDE5 (Q623R, | KIQNKLTDLEILALLIAALSHGLDHRGVNNSYIQRSEHPLAQLYCHSIMEH | | |
| D654G, K741N) | HHFDQCLMILNSPGNQILSGLSIEEYKTTLKIIKQAILATDLALYIKRRGEFF | | |
| | ELIRNXQFNLEDPHQKELFLAMLMTACDLSAITKPWPIQQRIAELVATEFF | | |
| | DQGDRERKELNIEPTDLMNREKKNKIPSMQVGFIDAICLQLYEALTHVSE | | |
| | DCFPLLDGCRKNRQKWQALAEQQ | | |
| hPDE5 (aa 535 | EETRELQSLAAAVVPSAQTLKITDFSFSDFELSDLETALCTIRMFTDLNLV | 8828 | 8848 |
| to 860 of WT, | QNFQMKHEVLCRWILSVKKNYRKNVAYHNWRHAFNTAQCMFAALKAG | | |
| hPDE5 (A673T, | KIQNKLTDLEILALLIAALSHDLDHRGVNNSYIQRSEHPLTQLYCHSIMEH | | |
| L756V, C846Y) | HHFDQCLMILNSPGNQILSGLSIEEYKTTLKIIKQAILATDLALYIKRRGEFF | | |
| | ELIRKNQFNLEDPHQKELFVAMLMTACDLSAITKPWPIQQRIAELVATEFF | | |
| | DQGDRERKELNIEPTDLMNREKKNKIPSMQVGFIDAICLQLYEALTHVSE | | |
| | DCFPLLDGYRKNRQKWQALAEQQ | | |
| hPDE5 (aa 535 | EETRELQSLAAAVVPSAQTLKITDFSFSDFELSDLETALCTIRMFTDLNLV | 8829 | 8849 |
| to 860 of WT, | QNFQMKHEVLCRWILSVKKNYRKNVAYHNWRHAFNTAQCMFAALKAG | | |
| hPDE5 (V660A, | KIQNKLTDLEILALLIAALSHDLDHRGANNSYIQRSEHPLAQLYCHSIMEH | | |
| L781F, R794G, | HHFDQCLMILNSPGNQILSGLSIEEYKTTLKIIKQAILATDLALYIKRRGEFF | | |
| C825R, E858G) | ELIRKNQFNLEDPHQKELFLAMLMTACDLSAITKPWPIQQRIAEFVATEFF | | |
| | DQGDREGKELNIEPTDLMNREKKNKIPSMQVGFIDAIRLQLYEALTHVSE | | |
| | DCFPLLDGCRKNRQKWQALAGQQ | | |
| hPDE5 (aa 535 | EETRELQSLAAAVVPSAQTLKITDFSFSDFELSDLETALCTIRMFTDLNLV | 8830 | 8850 |
| to 860 of WT, | QNFQMKHEVLCRWILSVKKNYRKNVAYHNWRHAFNTAQCMFAALKAG | | |
| hPDE5 (E642G, | KIQNKLTDLGILALLIAALSHDLDHRGVNNSYIQRSEHPLAQLYCHSIMEH | | |
| G697D, I813T) | HHFDQCLMILNSPDNQILSGLSIEEYKTTLKIIKQAILATDLALYIKRRGEFF | | |
| | ELIRKNQFNLEDPHQKELFLAMLMTACDLSAITKPWPIQQRIAELVATEFF | | |
| | DQGDRERKELNIEPTDLMNREKKNKTPSMQVGFIDAICLQLYEALTHVSE | | |
| | DCFPLLDGCRKNRQKWQALAEQQ | | |

Components

| | | | |
|---|---|---|---|
| AcGFP (1-239 | MVSKGAELFTGIVPILIELNGDVNGHKFSVSGEGEGDATYGKLTLKFICTT | 365 | 373 |
| of WT) | GKLPVPWPTLVTTLSYGVQCFSRYPDHMKQHDFFKSAMPEGYIQERTIFF | | |
| | EDDGNYKSRAEVKFEGDTLVNRIELTGTDFKEDGNILGNKMEYNYNAHN | | |
| | VYIMTDKAKNGIKVNFKIRHNIEDGSVQLADHYQQNTPIGDGPVLLPDNH | | |
| | YLSTQSALSKDPNEKRDHMIYFGFVTAAAITHGMDELYK | | |
| Linker (GS); | GS | — | GGAT |
| BamH1 Site | | | CC |
| Linker (SR) | SR | — | TCTA |
| | | | GA |

Constructs

| | | | |
|---|---|---|---|
| OT-001947 | MVSKGAELFTGIVPILIELNGDVNGHKFSVSGEGEGDATYGKLTLKFICTT | 8831 | 8851 |
| (AcGFP (1-239 | GKLPVPWPTLVTTLSYGVQCFSRYPDHMKQHDFFKSAMPEGYIQERTIFF | | |
| of WT); Linker | EDDGNYKSRAEVKFEGDTLVNRIELTGTDFKEDGNILGNKMEYNYNAHN | | |
| (GS); hPDE5 (aa | VYIMTDKAKNGIKVNFKIRHNIEDGSVQLADHYQQNTPIGDGPVLLPDNH | | |
| 535 to 860 of | YLSTQSALSKDPNEKRDHMIYFGFVTAAAITHGMDELYKGSEETRELQSL | | |
| WT, E669G, | AAAVVPSAQTLKITDFSFSDFELSDLETALCTIRMFTDLNLVQNFQMKHE | | |
| I700T); Linker | VLCRWILSVKKNYRKNVAYHNWRHAFNTAQCMFAALKAGKIQNKLTD | | |
| (SR); stop) | LEILALLIAALSHDLDHRGVNNSYIQRSGHPLAQLYCHSIMEHHHFDQCL | | |
| | MILNSPGNQTLSGLSIEEYKTTLKIIKQAILATDLALYIKRRGEFFELIRKNQ | | |
| | FNLEDPHQKELFLAMLMTACDLSAITKPWPIQQRIAELVATEFFDQGDRE | | |
| | RKELNIEPTDLMNREKKNKIPSMQVGFIDAICLQLYEALTHVSEDCFPLLD | | |
| | GCRKNRQKWQALAEQQSR* | | |
| OT-001948 | MVSKGAELFTGIVPILIELNGDVNGHKFSVSGEGEGDATYGKLTLKFICTT | 8832 | 8852 |
| (AcGFP (1-239 | GKLPVPWPTLVTTLSYGVQCFSRYPDHMKQHDFFKSAMPEGYIQERTIFF | | |
| of WT); Linker | EDDGNYKSRAEVKFEGDTLVNRIELTGTDFKEDGNILGNKMEYNYNAHN | | |
| (GS); hPDE5 (aa | VYIMTDKAKNGIKVNFKIRHNIEDGSVQLADHYQQNTPIGDGPVLLPDNH | | |
| 535 to 860 of | YLSTQSALSKDPNEKRDHMIYFGFVTAAAITHGMDELYKGSEETRELQSL | | |
| WT, hPDE5 | AAAVVPSAQTLKITDFSFSDFELSDLETALCTIRMFTDLNLVQNFQMKHE | | |
| (G6325, I648T); | VLCRWILSVKKNYRKNVAYHNWRHAFNTAQCMFAALKASKIQNKLTDL | | |
| Linker (SR); | EILALLTAALSHDLDHRGVNNSYIQRSEHPLAQLYCHSIMEHHHFDQCLM | | |
| stop) | ILNSPGNQILSGLSIEEYKTTLKIIKQAILATDLALYIKRRGEFFELIRKNQFN | | |
| | LEDPHQKELFLAMLMTACDLSAITKPWPIQQRIAELVATEFFDQGDRERK | | |
| | ELNIEPTDLMNREKKNKIPSMQVGFIDAICLQLYEALTHVSEDCFPLLDGC | | |
| | RKNRQKWQALAEQQSR* | | |
| OT-001945 | MVSKGAELFTGIVPILIELNGDVNGHKFSVSGEGEGDATYGKLTLKFICTT | 8833 | 8853 |
| (AcGFP (1-239 | GKLPVPWPTLVTTLSYGVQCFSRYPDHMKQHDFFKSAMPEGYIQERTIFF | | |
| of WT); Linker | EDDGNYKSRAEVKFEGDTLVNRIELTGTDFKEDGNILGNKMEYNYNAHN | | |
| (GS); hPDE5 (aa | VYIMTDKAKNGIKVNFKIRHNIEDGSVQLADHYQQNTPIGDGPVLLPDNH | | |
| 535 to 860 of | YLSTQSALSKDPNEKRDHMIYFGFVTAAAITHGMDELYKGSEETRELQSL | | |
| WT, hPDE5 | AAAVVPSAQTLKITDFSFSDFELSDLETALCTIRMFTDLNLVQNFQMKHE | | |
| (L646S); Linker | VLCRWILSVKKNYRKNVAYHNWRHAFNTAQCMFAALKAGKIQNKLTD | | |
| (SR); stop) | LEILASLIAALSHDLDHRGVNNSYIQRSEHPLAQLYCHSIMEHHHFDQCL | | |
| | MILNSPGNQILSGLSIEEYKTTLKIIKQAILATDLALYIKRRGEFFELIRKNQ | | |
| | FNLEDPHQKELFLAMLMTACDLSAITKPWPISR* | | |
| OT-001944 | MVSKGAELFTGIVPILIELNGDVNGHKFSVSGEGEGDATYGKLTLKFICTT | 8834 | 8854 |
| (AcGEP (1-239 | GKLPVPWPTLVTTLSYGVQCFSRYPDHMKQHDFFKSAMPEGYIQERTIFF | | |
| of WT); Linker | EDDGNYKSRAEVKFEGDTLVNRIELTGTDFKEDGNILGNKMEYNYNAHN | | |
| (GS); hPDE5 (aa | VYIMTDKAKNGIKVNFKIRHNIEDGSVQLADHYQQNTPIGDGPVLLPDNH | | |
| 535 to 860 of | YLSTQSALSKDPNEKRDHMIYFGFVTAAAITHGMDELYKGSEETRELQSL | | |
| WT, A762V); | AAAVVPSAQTLKITDFSFSDFELSDLETALCTIRMFTDLNLVQNFQMKHE | | |
| Linker (SR); | VLCRWILSVKKNYRKNVAYHNWRHAFNTAQCMFAALKAGKIQNKLTD | | |
| stop) | LEILALLIAALSHDLDHRGVNNSYIQRSEHPLAQLYCHSIMEHHHFDQCL | | |
| | MILNSPGNQILSGLSIEEYKTTLKIIKQAILATDLALYIKRRGEFFELIRKNQ | | |
| | FNLEDPHQKELFLAMLMTVCDLSAITKPWPIQQRIAELVATEFFDQGDRE | | |
| | RKELNIEPTDLMNREKKNKIPSMQVGFIDAICLQLYEALTHVSEDCFPLLD | | |
| | GCRKNRQKWQALAEQQSR* | | |
| OT-001943 | MVSKGAELFTGIVPILIELNGDVNGHKFSVSGEGEGDATYGKLTLKFICTT | 8835 | 8855 |
| (AcGEP (1239 | GKLPVPWPTLVTTLSYGVQCFSRYPDHMKQHDFFKSAMPEGYIQERTIFF | | |
| of WT); Linker | EDDGNYKSRAEVKFEGDTLVNRIELTGTDFKEDGNILGNKMEYNYNAHN | | |
| (GS); hPDE5 (aa | VYIMTDKAKNGIKVNFKIRHNIEDGSVQLADHYQQNTPIGDGPVLLPDNH | | |
| 535 to 860 of | YLSTQSALSKDPNEKRDHMIYFGFVTAAAITHGMDELYKGSEETRELQSL | | |
| WT, hPDE5 | AAAVVPSAQTLKITDFSFSDFELSDLETALCTIRMFTDLNLVQNFQMKHE | | |
| (D640N); Linker | VLCRWILSVKKNYRKNVAYHNWRHAFNTAQCMFAALKAGKIQNKLTN | | |
| (SR); stop) | LEILALLIAALSHDLDHRGVNNSYIQRSEHPLAQLYCHSIMEHHHFDQCL | | |
| | MILNSPGNQILSGLSIEEYKTTLKIIKQAILATDLALYIKRRGEFFELIRKNQ | | |
| | FNLEDPHQKELFLAMLMTACDLSAITKPWPIQQRIAELVATEFFDQGDRE | | |
| | RKELNIEPTDLMNREKKNKIPSMQVGFIDAICLQLYEALTHVSEDCFPLLD | | |
| | GCRKNRQKWQALAEQQSR* | | |
| OT-001941 | MVSKGAELFTGIVPILIELNGDVNGHKFSVSGEGEGDATYGKLTLKFICTT | 8836 | 8856 |
| (AcGEP (1-239 | GKLPVPWPTLVTTLSYGVQCFSRYPDHMKQHDFFKSAMPEGYIQERTIFF | | |
| of WT); Linker | EDDGNYKSRAEVKFEGDTLVNRIELTGTDFKEDGNILGNKMEYNYNAHN | | |
| (GS); hPDE5 (aa | VYIMTDKAKNGIKVNFKIRHNIEDGSVQLADHYQQNTPIGDGPVLLPDNH | | |
| 535 to 860 of | YLSTQSALSKDPNEKRDHMIYFGFVTAAAITHGMDELYKGSEETRELQSL | | |
| WT, N636S); | AAAVVPSAQTLKITDFSFSDFELSDLETALCTIRMFTDLNLVQNFQMKHE | | |
| Linker (SR); | VLCRWILSVKKNYRKNVAYHNWRHAFNTAQCMFAALKAGKIQSKLTDL | | |
| stop) | EILALLIAALSHDLDHRGVNNSYIQRSEHPLAQLYCHSIMEHHHFDQCLMI | | |
| | LNSPGNQILSGLSIEEYKTTLKIIKQAILATDLALYIKRRGEFFELIRKNQFN | | |
| | LEDPHQKELFLAMLMTACDLSAITKPWPIQQRIAELVATEFFDQGDRERK | | |
| | ELNIEPTDLMNREKKNKIPSMQVGFIDAICLQLYEALTHVSEDCFPLLDGC | | |
| | RKNRQKWQALAEQQSR* | | |
| OT-001942 | MVSKGAELFTGIVPILIELNGDVNGHKFSVSGEGEGDATYGKLTLKFICTT | 8837 | 8857 |
| (AcGEP (1-239 | GKLPVPWPTLVTTLSYGVQCFSRYPDHMKQHDFFKSAMPEGYIQERTIFF | | |
| of WT); Linker | EDDGNYKSRAEVKFEGDTLVNRIELTGTDFKEDGNILGNKMEYNYNAHN | | |
| (GS); hPDE5 (aa | VYIMTDKAKNGIKVNFKIRHNIEDGSVQLADHYQQNTPIGDGPVLLPDNH | | |
| 535 to 860 of | YLSTQSALSKDPNEKRDHMIYFGEVTAAAITHGMDELYKGSEETRELQSL | | |
| WT, Q623R, | AAAVVPSAQTLKITDFSFSDFELSDLETALCTIRMFTDLNLVQNFQMKHE | | |
| D654G, | VLCRWILSVKKNYRKNVAYHNWRHAFNTARCMFAALKAGKIQNKLTDL | | |
| K741N); Linker | EILALLIAALSHGLDHRGVNNSYIQRSEHPLAQLYCHSIMEHHHFDQCLMI | | |
| (SR); stop) | LNSPGNQILSGLSIEEYKTTLKIIKQAILATDLALYIKRRGEFFELIRNNQFN | | |
| | LEDPHQKELFLAMLMTACDLSAITKPWPIQQRIAELVATEFFDQGDRERK | | |
| | ELNIEPTDLMNREKKNKIPSMQVGFIDAICLQLYEALTHVSEDCFPLLDGC | | |
| | RKNRQKWQALAEQQSR* | | |
| OT-001940 | MVSKGAELFTGIVPILIELNGDVNGHKFSVSGEGEGDATYGKLTLKFICTT | 8838 | 8858 |
| (AcGEP (1-239 | GKLPVPWPTLVTTLSYGVQCFSRYPDHMKQHDFFKSAMPEGYIQERTIFF | | |
| of WT); Linker | EDDGNYKSRAEVKFEGDTLVNRIELTGTDFKEDGNILGNKMEYNYNAHN | | |
| (GS); hPDE5 (aa | VYIMTDKAKNGIKVNFKIRHNIEDGSVQLADHYQQNTPIGDGPVLLPDNH | | |
| 535 to 860 of | YLSTQSALSKDPNEKRDHMIYFGFVTAAAITHGMDELYKGSEETRELQSL | | |
| WT, A673T, | AAAVVPSAQTLKITDFSFSDFELSDLETALCTIRMFTDLNLVQNFQMKHE | | |
| L756V, C846Y); | VLCRWILSVKKNYRKNVAYHNWRHAFNTAQCMFAALKAGKIQNKLTD | | |
| Linker (SR); | LEILALLIAALSHDLDHRGVNNSYIQRSEHPLTQLYCHSIMEHHHFDQCL | | |
| stop) | MILNSPGNQILSGLSIEEYKTTLKIIKQAILATDLALYIKRRGEFFELIRKNQ | | |
| | FNLEDPHQKELFVAMLMTACDLSAITKPWPIQQRIAELVATEFFDQGDRE | | |
| | RKELNIEPTDLMNREKKNKIPSMQVGFIDAICLQLYEALTHVSEDCFPLLD | | |
| | GYRKNRQKWQALAEQQSR* | | |
| OT-001946 | MVSKGAELFTGIVPILIELNGDVNGHKFSVSGEGEGDATYGKLTLKFICTT | 8839 | 8859 |
| (AcGFP (1-239 | GKLPVPWPTLVTTLSYGVQCFSRYPDHMKQHDFFKSAMFEGYIQERTIFF | | |
| of WT); Linker | EDDGNYKSRAEVKFEGDTLVNRIELTGTDFKEDGNILGNKMEYNYNAHN | | |
| (GS); hPDE5 (aa | VYIMTDKAKNGIKVNFKIRHNIEDGSVQLADHYQQNTPIGDGPVLLPDNH | | |
| 535 to 860 of | YLSTQSALSKDPNEKRDHMIYFGFVTAAAITHGMDELYKGSEETRELQSL | | |
| WT, V660A, | AAAVVPSAQTLKITDFSFSDFELSDLETALCTIRMFTDLNLVQNFQMKHE | | |
| L781F, R794G, | VLCRWILSVKKNYRKNVAYHNWRHAFNTAQCMFAALKAGKIQNKLTD | | |
| C825R, E858G); | LEILALLIAALSHDLDHRGANNSYIQRSEHPLAQLYCHSIMEHHHFDQCL | | |
| Linker (SR); | MILNSPGNQILSGLSIEEYKTTLKIIKQAILATDLALYIKRRGEFFELIRKNQ | | |
| stop) | FNLEDPHQKELFLAMLMTACDLSAITKPWPIQQRIAEFVATEFFDQGDRE | | |
| | GKELNIEPTDLMNREKKNKIPSMQVGFIDAIRLQLYEALTHVSEDCFPLLD | | |
| | GCRKNRQKWQALAGQQSR* | | |
| OT-001939 | MVSKGAELFTGIVPILIELNGDVNGHKFSVSGEGEGDATYGKLTLKFICTT | 8840 | 8860 |
| (AcGFP (1-239 | GKLPVPWPTLVTTLSYGVQCFSRYPDHMKQHDFFKSAMFEGYIQERTIFF | | |
| of WT); Linker | EDDGNYKSRAEVKFEGDTLVNRIELTGTDFKEDGNILGNKMEYNYNAHN | | |
| (GS); hPDE5 (aa | VYIMTDKAKNGIKVNEKIRHNIEDGSVQLADHYQQNTPIGDGPVLLPDNH | | |
| 535 to 860 of | YLSTQSALSKDPNEKRDHMIYFGFVTAAAITHGMDELYKGSEETRELQSL | | |
| WT, hPDE5 | AAAVVPSAQTLKITDFSFSDFELSDLETALCTIRMFTDLNLVQNFQMKHE | | |
| (E642G, G697D, | VLCRWILSVKKNYRKNVAYHNWRHAFNTAQCMFAALKAGKIQNKLTD | | |
| I813T); Linker | LGILALLIAALSHDLDHRGVNNSYIQRSEHPLAQLYCHSIMEHHHFDQCL | | |
| (SR); stop) | MILNSPDNQILSGLSIEEYKTTLKIIKQAILATDLALYIKRRGEFFELIRKNQ | | |
| | FNLEDPHQKELFLAMLMTACDLSAITKPWPIQQRIAELVATEFFDQGDRE | | |
| | RKELNIEPTDLMNREKKNKTPSMQVGFIDAICLQLYEALTHVSEDCFPLL | | |
| | DGCRKNRQKWQALAEQQSR* | | |

[0165] Additional DDs generated by random mutagenesis are provided in Table 15.

TABLE 15
hPDE5 mutants

| | | AA | NA |
|---|---|---|---|
| Construct ID/ | | SEQ | SEQ |
| Description | Sequence | ID NO | ID NO |
| hPDE5 AA | EETRELQSLAAAVVPSAQTLKITDFSFSDFELSDLETALCTIRMFTDLNLVQNFQ | 8861 | 8891 |
| 535-860 of WT | MKHEVLCRWILSVKKNYRKNVAYHNWRHAFNTAQCMFAALKAGKIQNKLTD | | |
| (M758T) | LEILALLIAALSHDLDHRGVNNSYIQRSEHPLAQLYCHSIMEHHHFDQCLMILNS | | |
| | PGNQILSGLSIEEYKTTLKIIKQAILATDLALYIKRRGEFFELIRKNQFNLEDPHQK | | |
| | ELFLATLMTACDLSAITKPWPIQQRIAELVATEFFDQGDRERKELNIEPTDLMNR | | |
| | EKKNKIPSMQVGFIDAICLQLYEALTHVSEDCFPLLDGCRKNRQKWQALAEQQ | | |
| hPDE5 AA | EETRELQSLAAAVVPSAQTLKITDFSFSDFELSDLETALCTIRMFTDLNLVQNFQ | 8862 | 8892 |
| 535-860 of WT | MKREVLCRWILSVKKNYRKNVAYHNWRHAFNTAQCMFAALKAGKIQNKLTD | | |
| (K752E) | LEILALLIAALSHDLDHRGVNNSYIQRSEHPLAQLYCHSIMEHHHFDQCLMILNS | | |
| | PGNQILSGLSIEEYKTTLKIIKQAILATDLALYIKRRGEFFELIRKNQFNLEDPHQE | | |
| | ELFLAMLMTACDLSAITKPWPIQQRIAELVATEFFDQGDRERKELNIEPTDLMNR | | |
| | EKKNKIPSMQVGFIDAICLQLYEALTHVSEDCFPLLDGCRKNRQKWQALAEQQ | | |
| hPDE5 AA | EETRELQSLAAAVVPSAQTLKITDFSFSDFELSDLETALCTIRMFTDLNLVQNFQ | 8863 | 8893 |
| 535-860 of WT | MKHEVLCRWILSVKKNYRKNVAYHNWRHAFNTAQCMFAALKAGKIQNKLTD | | |
| (C677Y, | LEILALLIAALSHDLDHRGVNNSYIQRSEHPLAQLYYHSIMEHHRFDQCLMILNS | | |
| H685R, | PGNQILSGLSIEEYKTTLKIIKQAILVTDLALYIKRRGEFFELIRKNQFNLEDPHQK | | |
| A722V) | ELFLAMLMTACDLSAITKPWPIQQRIAELVATEFFDQGDRERKELNIEPTDLMNR | | |
| | EKKNKIPSMQVGFIDAICLQLYEALTHVSEDCFPLLDGCRKNRQKWQALAEQQ | | |
| hPDE5 AA | EETRELQSLAAAVVPSAQTLKITDFSFSDFELSDLETALCTIRMFTDLNLVQNFQ | 8864 | 8894 |
| 535-860 of WT | MKHEVLCRWILSVKKNYRKNVAYHNWRHAFNTAQCMFAALKAGKIQNKLSD | | |
| (T639S, | LEILALLIAALSHDLDHRGVNNSYIQRSEHPLAQLYCHSIMEHHHFDQCLMILNS | | |
| M816R) | PGNQILSGLSIEEYKTTLKIIKQAILATDLALYIKRRGEFFELIRKNQFNLEDPHQK | | |
| | ELFLAMLMTACDLSAITKPWPIQQRIAELVATEFFDQGDRERKELNIEPTDLMNR | | |
| | EKKNKIPSRQVGFIDAICLQLYEALTHVSEDCFPLLDGCRKNRQKWQALAEQQ | | |
| hPDE5 AA | EEARELQSLAAAVVPSAQTLKITGFSFSDFELSDLETALCTIRMFTDLNLVQNFQ | 8865 | 8895 |
| 535-860 of WT | MKHEVLCRWILSVKKNYRKNVAYHNWRHAFNTAQCMFAALKAGKIQNKLTD | | |
| (T537A, | LEILALLIAALSHDLDHRGVNNSYIQRSEHPLAQLYCHSIMEHHHEDQCLMILNS | | |
| D558G, 1706T, | PGNQILSGLSTEEYKTTLKIIKQAILATDLALYIKRRGEFFELIRKNQLNLEDPHQK | | |
| F744L, D764N) | ELFLAMLMTACNLSAITKPWPIQQRIAELVATEFFDQGDRERKELNIEPTDLMNR | | |
| | EKKNKIPSMQVGFIDAICLQLYEALTHVSEDCFPLLDGCRKNRQKWQALAEQQ | | |
| hPDE5 AA | EETRELQSLAAAVVPSAQTLKITDFSFSDFELSDLETALCTIRMFTDLNLVRNFQ | 8866 | 8896 |
| 535-860 of WT | MKHEVLCRWILSVKKNYRKNVAYHNWRHAFNTAQCMFAALKAGKIQNKLTD | | |
| (Q586R, | LEILALLIAALSHDLDHRGVNNSYIQRSEHPLAQLYCHSIMEHHHFDQCLMILNS | | |
| D724G) | PGNQILSGLSIEEYKTTLKIIKQAILATGLALYIKRRGEFFELIRKNQFNLEDPHQK | | |
| | ELFLAMLMTACDLSAITKPWPIQQRIAELVATEFFDQGDRERKELNIEPTDLMNR | | |
| | EKKNKIPSMQVGFIDAICLQLYEALTHVSEDCFPLLDGCRKNRQKWQALAEQQ | | |
| hPDE5 AA | EETRELQSLAAAVVPSAQTLKITDFSFSDFELSDLETALCTIRMFTDLNLVQNFQ | 8867 | 8897 |
| 535-860 of WT | MKHEVLCRWILSVKKNYRKNVAYHNWRHAFNTAQCMFAALKAGKIQNKLTD | | |
| (F686S) | LEILALLIAALSHDLDHRGVNNSYIQRSEHPLAQLYCHSIMEHHHSDQCLMILNS | | |
| | PGNQILSGLSIEEYKTTLKIIKQAILATDLALYIKRRGEFFELIRKNQFNLEDPHQK | | |
| | ELFLAMLMTACDLSAITKPWPIQQRIAELVATEFFDQGDRERKELNIEPTDLMNR | | |
| | EKKNKIPSMQVGFIDAICLQLYEALTHVSEDCFPLLDGCRKNRQKWQALAEQQ | | |
| hPDE5 AA | EETRGLQSLAAAVVPSAQTLKITDFSFSDFELSDLETALCTIRMFTDLNLVQNFQ | 8868 | 8898 |
| 535-860 of WT | MKHEVLCRWILSVKKNYRKNVAYHNWRHAFNTAQCMFAALKAGKIQNKLTD | | |
| (E539G, L738I) | LEILALLIAALSHDLDHRGVNNSYIQRSEHPLAQLYCHSIMEHHHFDQCLMILNS | | |
| | PGNQILSGLSIEEYKTTLKIIKQAILATDLALYIKRRGEFFEIIRKNQFNLEDPHQKE | | |
| | LFLAMLMTACDLSAITKPWPIQQRIAELVATEFFDQGDRERKELNIEPTDLMNRE | | |
| | KKNKIPSMQVGFIDAICLQLYEALTHVSEDCFPLLDGCRKNRQKWQALAEQQ | | |
| hPDE5 AA | EETRELQSLAAAVVPSAQTLKITDFSFSDFELSDLETALCTIRMFTDLNLVQNFQ | 8869 | 8899 |
| 535-860 of WT | MKHEVLCRWILSVKKNYRKNVAYHNWRHAFNTAQCMFAALKAGKIRNKLTD | | |
| (Q635R, | LEILALLIAALSHDLDHRGVNNSYIQRSEHPLAQLYCHSIMEHHHFDQCLMILNS | | |
| E753K, I813T) | PGNQILSGLSIEEYKTTLKIIKQAILATDLALYIKRRGEFFELIRKNQFNLEDPHQK | | |
| | KLFLAMLMTACDLSAITKPWPIQQRIAELVATEFFDQGDRERKELNIEPTDLMNR | | |
| | EKKNKTPSMQVGFIDAICLQLYEALTHVSEDCFPLLDGCRKNRQKWQALAEQQ | | |
| hPDE5 AA | EETRELQSLAAAVVPSAQTLKITDFSFSDFELSDLETALCTIRMFTDLNLVQNFQ | 8870 | 8900 |
| 535-860 of WT | MKHEVLCRWILSVKKNYRKNVAYHNWRHAFNTAQCMFAALKAGKIQNKLTD | | |
| (L672P, | LEILALLIAALSHDLDHRGVNNSYIQRSEHPPAQLYCHSIMEHHHFDQCLMILNS | | |
| S836L) | PGNQILSGLSIEEYKTTLKIIKQAILATDLALYIKRRGEFFELIRKNQFNLEDPHQK | | |
| | ELFLAMLMTACDLSAITKPWPIQQRIAELVATEFFDQGDRERKELNIEPTDLMNR | | |
| | EKKNKIPSMQVGFIDAICLQLYEALTHVLEDCFPLLDGCRKNRQKWQALAEQQ | | |
| hPDE5 AA | EETRELQSLAAAVVPSAQTLKITDFSFSDFELSDLETALCTIRMFTDLNLVQNFQ | 8871 | 8901 |
| 535-860 of WT | MKHEVLCRWILSVKKNYRKNVAYHNWRHAFNTAQCMFAALKAGKIQNKLTD | | |
| (M691T, | LEILALLIAALSHDLDHRGVNNSYIQRSEHPLAQLYCHSIMEHHHFDQCLTILNSP | | |
| D764N) | GNQILSGLSIEEYKTTLKIIKQAILATDLALYIKRRGEFFELIRKNQFNLEDPHQKE | | |
| | LFLAMLMTACNLSAITKPWPIQQRIAELVATEFFDQGDRERKELNIEPTDLMNRE | | |
| | KKNKIPSMQVGFIDAICLQLYEALTHVSEDCFPLLDGCRKNRQKWQALAEQQ | | |
| hPDE5 AA | EETRELQSLAAAVVPSAQTLKITDFSFSDFELSDLETALCTIRMFTDLNLVQNFQ | 8872 | 8902 |
| 535-860 of WT | MKHEVLCRWILSVKKNYRKNVAYHNWRHAFNTAQCMFAALKAGKIQNKLTD | | |
| (R807G) | LEILALLIAALSHDLDHRGVNNSYIQRSEHPLAQLYCHSIMEHHHFDQCLMILNS | | |
| | PGNQILSGLSIEEYKTTLKIIKQAILATDLALYIKRRGEFFELIRKNQFNLEDPHQK | | |
| | ELFLAMLMTACDLSAITKPWPIQQRIAELVATEFFDQGDRERKELNIEPTDLMNG | | |
| | EKKNKIPSMQVGFIDAICLQLYEALTHVSEDCFPLLDGCRKNRQKWQALAEQQ | | |
| hPDE5 AA | EETRELQSLAAAVVPSAQTLKITDFSFSDFELSDLETALCTIQMFTDLNLVQNFQ | 8873 | 8903 |
| 535-860 of WT | MKHEVLRRWILSVKKNYRKNVAYHNWRHAFNTAQCMFAALKAGKIQNKLTD | | |
| (R577Q, | LEILALLIAALSHDLDHRGANNSYIQRSEHPLAQLYCHSIMEHHHFDQCLMILNS | | |
| C596R, | PGNQILSGLSIEEYKTTLKVIKQAILATDLALYIKRRGEFFELIRKNQFNLEDPHQK | | |
| V660A, I715V, | ELFLAMLMTACDLSAITKPWPIQQRIAELVATKFFDQGDRERKELNIEPTDLMNR | | |
| E785K, L856P) | EKKNKIPSMQVGFIDAICLQLYEALTHVSEDCFPLLDGCRKNRQKWQAPAEQQ | | |
| hPDE5 AA | EETRELQSLAAAVVPSAQTLKITDFSFSDFELSDLETALCTIRMFTDLNLVQNFQ | 8874 | 8904 |
| 535-860 of WT | MKHEVLCRWILSVKKNYRKNVAYHNWRHAFNTAQCMFAALKAGKIQNKLTD | | |
| (I720V, F820S) | LEILALLIAALSHDLDHRGVNNSYIQRSEHPLAQLYCHSIMEHHHFDQCLMILNS | | |
| | PGNQILSGLSIEEYKTTLKIIKQAVLATDLALYIKRRGEFFELIRKNQFNLEDPHQK | | |
| | ELFLAMLMTACDLSAITKPWPIQQRIAELVATEFFDQGDRERKELNIEPTDLMNR | | |
| | EKKNKIPSMQVGSIDAICLQLYEALTHVSEDCFPLLDGCRKNRQKWQALAEQQ | | |
| hPDE5 AA | EETRELQSLAAAVVPSAQTLKITDFSFSDFELSDLETALCTIRMFTDLNLVQNFQ | 8875 | 8905 |
| 535-860 of WT | MKHEVLCRWILSVKKNYRKNVAYHNWRHAFNTAQCMFAALKAGKIQNKLTD | | |
| (S695G, | LEILALLIAALSHDLDHRGVNNSYIQRSEHPLAQLYCHSIMEHHHFDQCLMILNG | | |
| E707K, I739M, | PGNQILSGLSIKEYKTTLKIIKQAILATDLALYIKRRGEFFELMRKNQFNLEDPHQ | | |
| C763R) | KELFLAMLMTARDLSAITKPWPIQQRIAELVATEFFDQGDRERKELNIEPTDLMN | | |
| | REKKNKIPSMQVGFIDAICLQLYEALTHVSEDCFPLLDGCRKNRQKWQALAEQQ | | |
| hPDE5 AA | EETRELQSLAAAVVPSAQTLKITDFSFSDFELSDLETALCTIRMFTDLNLVQNFQ | 8876 | 8906 |
| 535-860 of WT | MKHEVLCRWILSVKKNYRKNVAYHNWRHAFNTAQCMFAALKAGKIQNKLTD | | |
| (Y709H, | LEILALLIAALSHDLDHRGVNNSYIQRSEHPLAQLYCHSIMEHHHFDQCLMILNS | | |
| K812R, L832P) | PGNQILSGLSIEELIKTTLKIIKQAILATDLALYIKRRGEFFELIRKNQFNLEDPHQK | | |
| | ELFLAMLMTACDLSAITKPWPIQQRIAELVATEFFDQGDRERKELNIEPTDLMNR | | |
| | EKKNRIPSMQVGFIDAICLQLYEAPTHVSEDCFPLLDGCRKNRQKWQALAEQQ | | |
| hPDE5 AA | EETRELQSLAAAVVPSAQTLKITDFSFSDFELSDLETALCTIRMFTDLSLVQNFQM | 8877 | 8907 |
| 535-860 of WT | KHEVLCRWISVKKNYRKNVAYHNWRHAFNTAQCMFAALKAGKIQNKLTDLE | | |
| (N583S, | ILALLIAALSHDLDHRGVNNSYIQRSEHPLAQLYCHSIMEHHHFDQCLMILNSPG | | |
| K752E, C846S) | NQILSGLSIEEYKTTLKIIKQAILATDLALYIKRRGEFFELIRKNQFNLEDPHQEELF | | |
| | LAMLMTACDLSAITKPWPIQQRIAELVATEFFDQGDRERKELNIEPTDLMNREK | | |
| | KNKIPSMQVGFIDAICLQLYEALTHVSEDCFPLLDGSRKNRQKWQALAEQQ | | |
| hPDE5 AA | EETRELQSLAAAVVPSAQTLKITDFSFSDFELSDLETALCTIRMFTDLNLVQNFQ | 8878 | 8908 |
| 535-860 of WT | MKHEVLCRWILSVKKNYRKNVAYHNWRHAFNTAQCMFAALKAGKIQNKLTD | | |
| (E682G, | LEILALLIAALSHDLDHRGVNNSYIQRSEHPLAQLYCHSIMGHHHFDQCLMILNS | | |
| D748N) | PGNQILSGLSIEEYKTTLKIIKQAILATDLALYIKRRGEFFELIRKNQFNLENPHQK | | |
| | ELFLAMLMTACDLSAITKPWPIQQRIAELVATEFFDQGDRERKELNIEPTDLMNR | | |
| | EKKNKIPSMQVGFIDAICLQLYEALTHVSEDCFPLLDGCRKNRQKWQALAEQQ | | |
| hPDE5 AA | EETRELQSLAAAVVPSAQTLKITDFSFSDFELSDLETALCTIRMFTDLNLVQNFQ | 8879 | 8909 |
| 535-860 of WT | MRHEVLCRWILSVKKNYRKNVAYHNWRHAFNTAQCMFAALKAGKIQNKLTD | | |
| (K591R, I643T, | LETLALLIAALSHDLDHRGVNNSYIQRSEHPLAQLYCHSIMEHHHFDQCLMILNS | | |
| L856P) | PGNQILSGLSIEEYKTTLKIIKQAILATDLALYIKRRGEFFELIRKNQFNLEDPHQK | | |
| | ELFLAMLMTACDLSAITKPWPIQQRIAELVATEFFDQGDRERKELNIEPTDLMNR | | |
| | EKKNKIPSMQVGFIDAICLQLYEALTHVSEDCFPLLDGCRKNRQKWQAPAEQQ | | |
| hPDE5 AA | EETRELQSLAAAVVPSAQTLKITDFSFSDFELSDLETALCTIRMFTDLNLVQNFQ | 8880 | 8910 |
| 535-860 of WT | MKHEVLCRWILSVKKNYRKNVAYHNWRHASNTAQCMFAALKAGKIQNKLTD | | |
| (F619S, | LEILALLIAALSHDLDHRGVNNSYIQRSEHPLAQLYCHSIMEHHHFDQCLMILNS | | |
| V818A, | PGNQILSGLSIEEYKTTLKIIKQAILATDLALYIKRRGEFFELIRKNQFNLEDPHQK | | |
| Y829C) | ELFLAMLMTACDLSAITKPWPIQQRIAELVATEFFDQGDRERKELNIEPTDLMNR | | |
| | EKKNKIPSMQAGFIDAICLQLCEALTHVSEDCFPLLDGCRKNRQKWQALAEQQ | | |
| hPDE5 AA | EETRELQSLAAAVEPSAQTLKITDFSFSDFELSDLETALCTIRMFTDLNLVQNFLM | 8881 | 8911 |
| 535-860 of WT | KHEVLCRWILSVKKNYRKNVAYHNWRHAFNTAQCMFAALKAGIIQNKLTDLEI | | |
| (V548E, | LALLIAALSHDLDHRGVNNSYIQRSEHPLAQLYCHSITEHHHFDQCLMILNSPGN | | |
| Q589L, K633I, | QILIGLSIEEYKTTLKIIKQAILATDLALYIKRRGEFFELIRKNQFNLEDPHQEELFL | | |
| M681T, S702I, | AMLMTACDLSAITKPWPIQQRIAEPVATEFFDQGDRERKELNIEPTDLMNREKK | | |
| K752E, L781P, | NKIPSMQVGFIDAICLQLYEALTHVSEDCFPLLDGCRKNRQKWQALTEQQ | | |
| A857T) | | | |
| hPDE5 AA | EETRELQSLAAAVVPSAQTLKITDFSFSDFELSDLETALCTIRMFTDLNLVQNFQ | 8882 | 8912 |
| 535-860 of WT | MKHEVLCRWILSVKKNYRKNVAYHNWRHAFNTAQCMFAALKAGKIQNKLTD | | |
| (S652G, | LEILALLIAALGHDLDHRGVNNSYIQRSEHPLAQLYCHSIMEHHHFDRCLMILNS | | |
| Q688R) | PGNQILSGLSIEEYKTTLKIIKQAILATDLALYIKRRGEFFELIRKNQFNLEDPHQK | | |
| | ELFLAMLMTACDLSAITKPWPIQQRIAELVATEFFDQGDRERKELNIEPTDLMNR | | |
| | EKKNKIPSMQVGFIDAICLQLYEALTHVSEDCFPLLDGCRKNRQKWQALAEQQ | | |
| hPDE5 AA | EETRELQSLAAAVVPSAQTLKITDFSFSDFGLSDLETALCTIRMFTDLNLVQNFQ | 8883 | 8913 |
| 535-860 of WT | MKHEVLCRWILSVKKNYRKNVAYHNWRHAFNTAQCMFAALKAGKIQNKLTD | | |
| (E565G) | LEILALLIAALSHDLDHRGVNNSYIQRSEHPLAQLYCHSIMEHHHFDQCLMILNS | | |
| | PGNQILSGLSIEEYKTTLKIIKQAILATDLALYIKRRGEFFELIRKNQFNLEDPHQK | | |
| | ELFLAMLMTACDLSAITKPWPIQQRIAELVATEFFDQGDRERKELNIEPTDLMNR | | |
| | EKKNKIPSMQVGFIDAICLQLYEALTHVSEDCFPLLDGCRKNRQKWQALAEQQ | | |
| hPDE5 AA | EETRELQSLAAAVVPSAQTLKITDFSFSDFELSDLETALCTIRMFTDLNLVQNFQ | 8884 | 8914 |
| 535-860 of WT | MKHEVLCRWILSVKKNYRKNVAYHNWRHAFNTAQCMFAALKAGKIQNKLTD | | |
| (I774V) | LEILALLIAALSHDLDHRGVNNSYIQRSEHPLAQLYCHSIMEHHHFDQCLMILNS | | |
| | PGNQILSGLSIEEYKTTLKIIKQAILATDLALYIKRRGEFFELIRKNQFNLEDPHQK | | |
| | ELFLAMLMTACDLSAITKPWPVQQRIAELVATEFFDQGDRERKELNIEPTDLMN | | |
| | REKKNKIPSMQVGFIDAICLQLYEALTHVSEDCFPLLDGCRKNRQKWQALAEQQ | | |
| hPDE5 AA | EETRELQSLAAAVVPSAQTLKITDFSFSDFELSDLETALCTIRMFTDLNLVQNFQ | 8885 | 8915 |
| 535-860 of WT | MRHEVECRWILSVKKNYRKNVAYHNWRHAFNTAQCMFAALKAGKIQNKLTD | | |
| (K591R) | LEILALLIAALSHDLDHRGVNNSYIQRSEHPLAQLYCHSIMEHHHFDQCLMILNS | | |
| | PGNQILSGLSIEEYKTTLKIIKQAILATDLALYIKRRGEFFELIRKNQFNLEDPHQK | | |
| | ELFLAMLMTACDLSAITKPWPIQQRIAELVATEFFDQGDRERKELNIEPTDLMNR | | |
| | EKKNKIPSMQVGFIDAICLQLYEALTHVSEDCFPLLDGCRKNRQKWQALAEQQ | | |
| hPDE5 AA | EETRELQSLAAAVVPSAQTLKITDSSFSDFELSDLETALCTIRMFTDLNLVQNFQ | 8886 | 8916 |
| 535-860 of WT | MKHEVECRWILSVKKNYRKNVAYHNWRHAFNTAQCMFAALKAGKIQNKLTD | | |
| (F559S, | LEILALLIAALSHDLDHRGVNNSYIQRSEHPLAQLYCHSIMEHHHFDQCLMILNS | | |
| Y709C, | PGNQILSGLSIEECKTTLKIIKQAILATDLALYIKRRGEFFELIRKNQFNLEDPHQK | | |
| M760T) | ELFLAMLTTACDLSAITKPWPIQQRIAELVATEFFDQGDRERKELNIEPTDLMNR | | |
| | EKKNKIPSMQVGFIDAICLQLYEALTHVSEDCFPLLDGCRKNRQKWQALAEQQ | | |
| hPDE5 AA | EETRELQSLAAAVVPSAQTLKITDFSFSDFELSDLETALCTIRMFTDLNLVQNFQ | 8887 | 8917 |
| 535-860 of WT | MKHEVLCRWILSVKKNYRKNVAYHNWRHAFNTAQCMFAALKAGKIQNKLTD | | |
| (A649V, | LEILALLIVTLSHDLDHRGVNNSYIQRSEHPLAQLYCHSIMEHHHFDQCLMILNSP | | |
| A650T, K730E, | GNQILSGLSIEEYKTTLKIIKQAILATDLALYIERRGEFFELIRKNQFNLEDPHQKE | | |
| E830K) | LFLAMLMTACDLSAITKPWPIQQRIAELVATEFFDQGDRERKELNIEPTDLMNRE | | |
| | KKNKIPSMQVGFIDAICLQLYKALTHVSEDCFPLLDGCRKNRQKWQALAEQQ | | |
| hPDE5 AA | EETRELQSLAAAVVPSAQTLKITDFSFSDFELSDLETALCTIRMFTDLNLVQNFQ | 8888 | 8918 |
| 535-860 of WT | MKHEVECRWILSVKKNYRKNVAYHNWRHAFNTAQCMFAALKAGKIQNKLTD | | |
| (Y728C, | LEILALLIAALSHDLDHRGVNNSYIQRSEHPLAQLYCHSIMEHHHFDQCLMILNS | | |
| Q817R) | PGNQILSGLSIEEYKTTLKIIKQAILATDLALCIKRRGEFFELIRKNQFNLEDPHQK | | |
| | ELFLAMLMTACDLSAITKPWPIQQRIAELVATEFFDQGDRERKELNIEPTDLMNR | | |
| | EKKNKIPSMRVGFIDAICLQLYEALTHVSEDCFPLLDGCRKNRQKWQALAEQQ | | |
| hPDE5 AA | EETRELQSLAAAVVPSAQTLKITDFSFSDFELSDLETALCTIRMFTDLNLVQNFQ | 8889 | 8919 |
| 535-860 of WT | MKHEVPCRWILSVKKNYRKNVAYHNWRHAFNTAQCMFAALKAGKIQNKLTD | | |
| (L595P, | LEILALLIAALSHDLDHRGVNNSYIQRSEHPLAQLYCHSIMEHHHFDQCLMILNS | | |
| K741R) | PGNQILSGLSIEEYKTTLKIIKQAILATDLALYIKRRGEFFELIRRNQFNLEDPHQK | | |
| | ELFLAMLMTACDLSAITKPWPIQQRIAELVATEFFDQGDRERKELNIEPTDLMNR | | |
| | EKKNKIPSMQVGFIDAICLQLYEALTHVSEDCFPLLDGCRKNRQKWQALAEQQ | | |
| hPDE5 AA | EETRELQSLAAAVVPSAQTLKITDFSFSDFELSDLETALCTIWMFTDLNLVQNFQ | 8890 | 8920 |
| 535-860 of WT | MKHEVLCRWILSVKKNYRKNVAYHNRRHAFNTAQCMFAALKAGKIQNKLTDL | | |
| (R577W, | EILALLIAALSHDLDHRGVNNSYIQRSEHPLAQLYCHSIMEHHHFDQCLMILNSP | | |
| W615R, | GNQILSGLSIEEYKTTLKIIKQAILATDLALYIKRRGEFFELIRKNQFNLEDPHQKE | | |
| M805T, I821V) | LFLAMLMTACDLSAITKPWPIQQRIAELVATEFFDQGDRERKELNIEPTDLTNRE | | |
| | KKNKIPSMQVGFVDAICLQLYEALTHVSEDCFPLLDGCRKNRQKWQALAEQQ | | |

### Stimulus

[0166] Biocircuits of the disclosure are triggered by one or more stimuli. Stimuli may be selected from a ligand, an externally added or endogenous metabolite, the presence or absence of a defined ligand, pH, temperature, light, ionic strength, radioactivity, cellular location, subject site, microenvironment, the presence or the concentration of one or more metal ions.

[0167] In some embodiments, the stimulus is a ligand. Ligands may be nucleic acid-based, protein-based, lipid based, organic, inorganic or any combination of the foregoing. In some embodiments, the ligand is selected from the group consisting of a protein, peptide, nucleic acid, lipid, lipid derivative, sterol, steroid, metabolite derivative and a small molecule. In some embodiments, the stimulus is a small molecule. In some embodiments, the small molecules are cell permeable. Ligands useful in the present disclosure include without limitation, any of those taught in Table 2 of co-owned U.S. Provisional Patent Application No. 62/320,864 filed Apr. 11, 2016, 62/466,596 filed Mar. 3, 2017 and the International Publication WO2017/180587 (the contents of each of which are herein incorporated by reference in their entirety). In some embodiments, the small molecules are FDA-approved, safe and orally administered.

[0168] In some embodiments, the ligand binds to phosphodiesterases. In some embodiments, the ligand binds to and inhibits phosphodiesterase function and is herein referred to as a phosphodiesterase inhibitor.

[0169] In some embodiments, the ligand is a small molecule that binds to phosphodiesterase 5. In one embodiment, the small molecule is a hPDE5 inhibitor. Examples of hPDE5 inhibitors include, but are not limited to, Sildenafil, Vardenafil, Tadalafil, Avanafil, Lodenafil, Mirodenafil, Udenafil, Benzamidenafil, Dasantafil, Beminafil, SLx-2101, LAS 34179, UK-343,664, UK-357903, UK-371800, and BMS-341400.

[0170] In some embodiments, ligands include sildenafil-derived ligands containing portions of the ligand known to mediate binding to hPDE5. Ligands may also be modified to reduce off-target binding to Phosphodiesterases and increase specific binding to hPDE5.

[0171] hPDE5 inhibitors cover a broad pharmacokinetic space with respect to the approved dose and their duration of action and is described in Table 16. In Table 16, PO stands for per os (i.e. by mouth); QD represents quaque die (i.e. every day); IV represents intravenous; HD represents ter un die (i.e. three times a day); and Cmax represents the peak serum concentration that a drug achieves after its administration.

TABLE 16
Pharmacokinetics of hPDE5 inhibitors

| | | | Duration of | |
|---|---|---|---|---|
| Drug | Approved Dose | Cmax | action | |
| Sildenafil | PO: 100 mg QD or | PO: 1 μM | 4-8 | hrs |
| | 20 mgTID | IV: 1 μM | | |
| | IV: 10 mgTID | | | |
| Vardenafil | PO: 20 mgQD | 0.1 μM | 2-8 | hrs |
| Tadalafil | PO: 40 QD | 1.5 μM | 24-36 | hrs |

[0172] In some embodiments, the ligand selection is determined by the magnitude and duration of expression of the effector modules of the disclosure using the PK parameters described in Table 16. In some embodiments, high levels of expression of the payload for a short duration of time may be desired. In such instances, vardenafil may be selected as the ligand. In some embodiments, high levels of expression of the payload may be desired for a long duration. In such instances, the ligand, Tadalafil may be selected. In some embodiments, low levels of expression of the payload may be desired for a long duration of time. In such instances, Sildenafil may be selected as the ligand.

[0173] In some embodiments, additional hPDE5 inhibitors may be developed to show selectivity towards a specific phosphodiesterase protein; to reduce or increase the duration of treatment with the ligand; and to improve the rate of onset of the ligand.

[0174] In one embodiment, the ligand may not be capable of suppressing the immune system i.e. the ligand may be non-immunosuppressive.

[0175] Ligands may also be selected from the analysis of the dependence of a known hPDE5 ligand's activity on its molecular/chemical structure, through Structure Activity Relationships (SAR) study. Any of the methods related to SAR, known in art may be utilized to identify stabilizing ligands of the disclosure. SAR may be utilized to improve properties of the ligand such as specificity, potency, pharmacokinetics, bioavailability, and safety. SAR analysis of known hPDE5 inhibitors may also be combined with high resolution X ray structures of hPDE5 complexed with ligands. The X ray structure of hPDE5 co-crystallized with Sildenafil, Tadalafil, and Vardenafil have been studied and the binding mode of the inhibitors has been identified (Zhang, K. Y. J. et al. (2004) Mol. Cell., 15, 279; Card, G. L. et al. (2004) Structure. 12, 2233; the contents of each of which are incorporated herein by reference in their entirety). There are several classes of hPDE5 inhibitors described. These include aryl, beryl, heteroaryl or heterobiaryl classes with different scaffold structures. The aryl class includes substituted nitroanilines and the biaryl class includes substituted naphthalenes. The heterobiaryl and heterotriaryl are further sub classified based on its fused system into pyrazolopyrimidinones, triazolopyrimidinones, imidazotriazines, purines, pyrrolopyrimidinones, triazolotrizinones, isoxazolopyrimidinones, β-carbolines, pyrroloquinolones, isoquinolines, quinazolines, imidazoquinazolinones, pyrazolopyridines, pyrazolopyridopyrimidinones. These widely different chemical structures are suggested to have different orientation in the binding site of hPDE5 enzyme. Sildenafil has three main chemical groups, the pyrazolopyrimidinone ring, the ethoxyphenyl ring and the methylpiperazine ring. The pyrazolopyrimidinone group is responsible for the binding of the drug to its active binding site of hPDE5.

[0176] Many hPDE inhibitors act by competing with the substrate, cGMP, for the catalytic site of the enzyme. Sildenafil and Vardenafil differ in the heterocyclic ring system used to mimic the purine ring of cGMP. They also differ in the substituent (ethyl/methyl) of a piperazine side chain. Although these are the only structural differences, Vardenafil is more potent than Sildenafil. In some embodiments, the structural differences between different know inhibitors of hPDE may be utilized to design better hPDE inhibitor based ligands. For example, Corbin et al. synthesized an analog of sildenafil that contained the sildenafil ring system but with the appended ethyl group found in vardenafil; and an analog of vardenafil (dimethyl-vardenafil) that contained the vardenafil ring system but with the appended methyl group found in sildenafil was also generated. These studies identified that the ring systems play a critical role in higher potency of vardenafil over sildenafil (Corbin J D et al. (2004) Neurochem Int; 45(6):859-63; the contents of which are incorporated herein by reference in their entirety). Based on the X ray crystal structure of hPDE complexed with sildenafil, the active site region was defined as a sphere within the 6.5 Angstrom from the reference ligand, sildenafil. Surface hydrophobicity (lipophilicity) potential physicochemical property map of the hPDE5 active site may be generated based on this information. The ethoxyphenyl group of sildenafil fits into the hydrophobic pocket formed by Phe 786, Ala783, Leu804, and Val782, and the pyrazolopyrimidinone ring also forms hydrophobic interaction with the side chains of Val782, Tyr612, and Phe820 in the binding pocket.

[0177] New hPDE5 inhibitors may also be developed using a series of analogs of known hPDE5 inhibitors. 3D-Quantitative Structure activity analysis (QSAR), CoMFA (comparative molecular field analysis) and CoMSIA (comparative molecular similarity indices analysis) may be implemented for this purpose. In one embodiment, the structure of hPDE5 inhibitor may preferentially incorporate an N ethyl group in the pyrrolopyrimidinone ring at N5 position; and a propoxyphenyl group, which bear a substituent; one methylene unit longer, respectively in comparison with the corresponding positions of sildenafil. Any of the modifications to Sildenafil structure taught by Koo J et al. may be useful in the present disclosure (Koo J et al. (2007) Bioorg. & Med. Chem Lett 17; 4271-4274; the contents of which are incorporated by reference in their entirety).

[0178] In some embodiments, the stimulus may be a ligand that binds to more than one phosphodiesterase. In one embodiment, the stimulus is a pan phosphodiesterase inhibitor that may bind to two or more hPDEs such as Aminophyline, Paraxanthine, Pentoxifylline, Theobromine, Dipyridamole, Theophyline, Zaprinast, Icariin, CDP-840, Etazolate and Glaucine.

[0179] In some embodiments, the ligand is a hPDE1 inhibitor. Exemplary hPDE1 inhibitor, Vinpocetine may in some instances be used as the ligand in the present disclosure. In some embodiments, the ligand is a hPDE2 inhibitor. Exemplary hPDE2 inhibitors include EHNA (erythro-9-(2-hydroxy-3-nonyl) adenine), Oxindole, PDP and BAY 60-7550. Inhibitors that selectively inhibit a hPDE2 isoform may also be used, for example, substituted pyrido (2,3-b) pyrazines having a hPDE2A selective inhibitory action (See, e.g., U.S. Pat. No. 9,527,841; the contents of which are incorporated by reference in its entirety). In some embodiments, the ligand is a hPDE3 inhibitor. hPDE3 inhibitors useful in the disclosure include, but are not limited to Amrinone, Cilostazol, Milrinone, Enoximone, and Pimobendan. In some embodiments, the ligand is a hPDE4 inhibitor. Exemplary hPDE4 inhibitors include FDA approved small molecules such as, but not limited to AN2728 (4-[(1-hydroxy-1,3-dihydro-2,1-benzoxaborol-5-yl) oxy] benzonitrile), Apremilast/CC10004 (N-{2-[(1S)-1-(3-Ethoxy-4-methoxyphenyl)-2-(methylsulfonyl) ethyl]-1,3-dioxo-2,3-dihydro-1H-isoindol-4-yl} acetamide), and Roflumilast. Other exemplary hPDE4 inhibitors include Other small molecules that inhibit hPDE4 also include E6005/RVT501, Cilomilast/SB-207,499, Ibudilast (AV-411 or MN-166), Mesembrenone, Piclamilast/RP 73401, Rolipram, Atizoram/CP-80633, Arofylline, CC-1088, Catramilast, CGH-2466, Cipamfylline, Drotaverine, Filaminast/WAY-PDA 641, HT-0712, DNS-001, ICI-63197, Indimilast, Irsogladine/MN 1695, Lirimilast/BAY 19-8004, Oglemilast, Revamilast, Ro 20-1724, Ronomilast, GSK256066, DC-TA-46, AWD 12-281 and YM-976. Any of the hPDE4 inhibitors described in International Patent Publication No. WO2014078220A1 and US Patent Publication No. US20170129887A1 may be useful in the present disclosure (the contents of each of which are incorporated by reference in their entirety). In some embodiments, the ligand is a hPDE6 inhibitor. In some embodiments, the ligand is a hPDE7 inhibitor. Exemplary hPDE7 inhibitors, include BRL-50481 (N, N,2-Trimethyl-5-nitrobenzenesulfonamide) and ASB16165 (1H-Thieno(2,3-C) pyrazole-5-carboxamide, 1-cyclohexyl-N-(6-(4-hydroxy-1-piperidinyl)-3-pyridinyl)-3-methyl). In some embodiments, the ligand is a hPDE8 inhibitor such as PF-04957325 (Pfizer). In some embodiments, the ligand is a hPDE9 inhibitor. Exemplary hPDE9 inhibitors include, but are not limited to BAY73-6691 (1-(2-chlorophenyl)-6-[(2R)-3,3,3-trifluoro-2-methylpropyl]-1,5-dihydro-4H-pyrazolo[3,4-d] pyrimidine-4-one), PF-04447943 (6-[(3S,4S)-4-methyl-1-(pyrimidin-2-ylmethyl) pyrrolidin-3-yl]-1-(oxan-4-yl)-2H-pyrazolo[3,4-d] pyrimidin-4-one) and WYQ-C28L. In some embodiments, the ligand is a hPDE10 inhibitor. Exemplary PDE10 inhibitors include, but are not limited to OMS 824, Papaverine and PF-2545920 (2-(4-(1-methyl-4-pyridin-4-yl-1H-pyrazol-3-yl) phenoxymethyl) quinolone), and GS-5759 (Gilead).

[0180] In one embodiment, the stimuli of the present disclosure may be FDA approved ligands capable of binding to the specific DDs or target regions within the DDs. In other embodiments, FDA approved ligands may be used to screen potential binders in the human protein. DDs may be designed based on the positive hits from the screen using the portion of the protein that binds to the ligand. In one embodiment, proteins that bind to FDA approved ligands as off target interactions may be used to design DDs of the present disclosure.

[0181] In some embodiments, ligands that do not affect the activity of the immune cell, and/or the chimeric antigen receptor, in the absence of the SREs may be preferably selected.

### Stabilizing Domains

[0182] In some embodiments, the stimulus response element may be stabilized in the absence of the stimulus but destabilized by the stimulus. In some embodiments, SREs may be derived from protein complexes that comprise at least one protein-protein interaction. In other aspects, the SRE may form a protein-protein interaction with a natural protein within the cell. Protein complexes reduce the exposure of the constituent proteins to the risk of undesired oligomerization by reducing the concentration of the free monomeric state. Payloads appended to such SREs may stabilized in the absence of the stimulus. In some aspects, the stimulus may be a small molecule that is capable of interrupting or disrupting the protein-protein interactions related to the SRE. In such instances, addition of the stimulus, results in the reduced expression and/or function of the payload. In some embodiments, stimuli that induce conformational change of the SRE may be utilized. In one aspect, the SRE may be stabilized by the conformational change. In another aspect, the SRE may be destabilized by the conformational change. The stimuli may also be small molecules that disrupt post translational modification of SREs which may result in the disruption of the protein-protein interaction related to the SRE. In some embodiments, SREs may be identified using protein interatomic techniques known in the art. Such methods may enable the identification of protein interactions that are therapeutically relevant. Any of the large-scale quantitative proteomics methods described in International Patent Publication NOs. WO2017210427A1, WO2016196994A9, and WO2014200987A3 may be useful in the present disclosure (the contents of each of which are incorporated by reference in their entirety).

### Molecular Switches in Biocircuits, Genetic Circuits

### Molecular Switches

[0183] In some embodiments, the DDs described herein can include aspects of molecular switches. Alternatively or additionally, molecular switches can be constructed using DDs as described. The term “molecular switch” as used herein refers to any molecule that can be reversibly shifted between two or more stable states in response to a stimulus (e.g., a ligand). Molecular switches can be employed in biocircuits or genetic circuits, i.e., engineered input-responsive biological circuits.

[0184] In some embodiments, molecular switches can be RNA-based switches. As a non-limiting example, a DD-regulated effector module can be provided in an RNA molecule that comprises a coding sequence for a destabilization domain fused to a translational repressor such as, for example, L7Ae, a kink-turn (K-turn) motif in the 5′ UTR of a payload mRNA, and the coding sequence for the payload (e.g., peptide or protein) (see, e.g., International Patent Publication NO: WO2016040395, the contents of which are incorporated herein by reference in their entirety). L7Ae is an archaeal protein that binds K-turn and K-loop motifs with high affinity. In the absence of a ligand that stabilizes the destabilization domain, fusion L7Ae protein is degraded and the payload peptide or protein is expressed (ON state), whereas in the presence of the ligand, the fusion L7Ae protein is not destabilized and binds to the K-turn motif and represses expression of the payload peptide or protein (OFF state). Other translational regulation systems can also be used, such as, but not limited to, MS2-tethered repressors, Tet repressors, and microRNAs. Other uses of tunable expression repressors are contemplated; for example, effector modules comprising DD-regulated repressor payloads can be used to control inducible expression of transgenes, including to block background or “leaky” expression of transgenes (see U.S. Pat. No. 9,388,425, the contents of which are incorporated herein by reference in their entirety).

[0185] DD-regulated effector modules as described herein can be utilized to establish tunable bistable genetic toggles, wherein ligand-mediated stabilization and/or destabilization of a SRE appended, for example, to a payload of interest stably shifts expression of a gene of interest between on and off states (see U.S. Pat. No. 6,841,376, the contents of which are incorporated herein by reference in their entirety). Trans-acting SREs can also be utilized to tunably transition cis-acting self-repressive expression cassettes (see U.S. Pat. No. 10,208,312, the contents of which are incorporated herein by reference in their entirety).

[0186] RNA-based molecular switches can be synthetic RNA. In some cases, such RNA molecules can comprise modified bases (modRNA) or self-replicating RNAs (replicons). RNA-based molecular switches can be responsive to small molecules, for example, small molecule-responsive RNA binding proteins (RBPs) (e.g., Wagner et al., Nat. Chem. Bio. 2018 14:1043-50). In this way, effector modules as described herein can be RBPs useful in regulating RNA circuits.

[0187] In some embodiments, molecular switches can be switched on/off via dimerization. For example, a first effector module can comprise a DD-regulated SRE which is a first member of a dimerization pair and optionally a first payload, and a second effector module can comprise a DD-regulated SRE which is second member of a dimerization pair and optionally a second payload, wherein the two members of the dimerization pair dimerize upon addition of a dimerization ligand. In some embodiments, dimerization can restore stability of the members of the dimerization pair and/or the attached payloads. Dimerization induces interaction, whether direct or indirect, of the two payloads to create a desired effect. In some embodiments, dimerization can induce degradation of the dimerization pair and/or the attached payloads. For example, bivalent small molecules can dimerize two molecules of an E3 ubiquitin ligase to induce self-degradation (see, e.g., Maniaci et al., Nat Commun. 2017 Oct. 10; 8(1):830, the contents of which are incorporated herein by reference in their entirety). A dimerization pair can comprise, or be derived from, for example, an antibody and its antigen, two fragments of an antibody, a ligand-binding domain and a cognate receptor (e.g., any of those described in International Patent Publication NO: WO2017120546, the contents of which are incorporated herein by reference in their entirety), and an E3 ubiquitin ligase and a substrate (e.g., as described in Maniaci et al.).

[0188] In some embodiments, molecular switches can be conditionally active in specific cell types or under specific cellular conditions. For example, the stimulus required to stimulate the DD-regulated SREs of the effector modules may only be present in a particular cell type or under a particular cellular condition. This allows various applications, such as cell-type specific delivery of a payload, or detection of a particular cellular target. Based on this property, biocircuits or effector modules described herein can be developed as biosensors. For example, a DD can be fused to a reporter protein (e.g., GFP). Such DD, in the context of an SRE, can contain mutations such that the SRE is conditionally stable only in the presence of a stabilizing ligand which is also the target to be detected. When the target is present in the cell, the fusion protein is stabilized and the reporter activity can be detected (see, e.g., International Patent Publication NOs: WO2009137136, WO2017048316, and WO2017156238; and U.S. Pat. Nos. 8,329,889, and 9,766,255, the contents of each of which are incorporated herein by reference in their entireties). In some embodiments, genetic circuits may include a conditional NF-kB (nuclear factor kappa-B) responsive promoter driving expression of the effector modules described herein. Such circuits are described in the International Patent Publication WO2018170390, the contents of which are incorporated by reference in their entirety.

[0189] In some embodiments, engineered cell circuits that enable multifactorial modulation within and/or near a tumor (a tumor microenvironment (TME)) may be utilized. Such circuits are described in the International Patent Publication WO2018191619, the contents of which are incorporated by reference in their entirety.

[0190] In some embodiments, the biocircuits described herein may include SynNotch switches that include a synthetic notch (SynNotch) receptors. SynNotch receptors contain the core regulatory domain of the juxtacrine signaling receptor Notch, linked to a chimeric extracellular recognition domain (such as but not limited to an scFv and a chimeric intracellular transcriptional domain. Upon interacting with the cognate ligand which may be present on a neighboring cell, the SynNotch receptor undergoes cleavage of the transmembrane region, releasing the intracellular transcriptional domain to enter the nucleus and drive the expression of user-specified target genes. SynNotch circuits may be generated by linking one or more transcriptional outputs to SynNotch receptors. Any of the SynNotch circuits described by Toda et al. may be used in the biocircuits described herein (Programming self-organizing multicellular structures with synthetic cell-cell signaling Science 13 Jul. 2018: Vol. 361, Issue 6398, pp. 156-162; the contents of which are herein incorporated by reference in their entirety).

[0191] In some embodiments, the biocircuits described herein may include a proteolytic switch. Such switches may include a set of split proteases with highly specific orthogonal cleavage motifs which may be combined with cleavage sites and orthogonal coiled coils dimerizing domains strategically positioned in payloads of interest. Proteolytic cleavage induces conformational rearrangements within and between the CC modules, thus leading to the reconstitution of downstream functional protein domains resulting in a cellular outcome. Split-protease-cleavable orthogonal-CC-based (SPOC) logic circuits described by Fink et al. may be utilized in the biocircuits described herein (Design of fast proteolysis based signaling and logic circuits in mammalian cells, Nat. Chem. Bio 15, 115-122 (2019); the contents of which are herein incorporated by reference in their entirety).

[0192] In one embodiment, the molecular switches may be based on chemically induced proximity (CIP) systems, wherein two proteins are colocalized upon addition of a bridging small molecule. In some aspects, the molecular switches may be based on chemically disrupted proximity (CDP) systems, which may include systems that allow the interaction of two basally colocalized proteins to be rapidly disrupted with a small. As non-limiting example, the interaction between the antiapoptotic protein BCL-xL and a BH3 peptide may be used as a chemically disrupted proximity system for intramolecularly controlling the activities of various enzymes. Intermolecular CDP systems that allow a basally localized activity to be chemically disrupted may be used as off switches. In one embodiment, the CDP system may be based on the hepatitis C virus protease (HCVp) NS3a and its interaction with a peptide inhibitor. Clinically approved protease inhibitors that efficiently disrupt the NS3a/peptide interaction may be utilized as bio-orthogonal inputs for this system.

[0193] In some embodiments, Zapalog, a small molecule dimerizer that undergoes photolysis when exposed to blue light. Zapalog dimerizes any two proteins tagged with the FKBP and DHFR domains until exposure to light causes its photolysis. Dimerization can be repeatedly restored with uncleaved Zapalog. In some embodiments, molecular switches described herein may be heterodimerization switches. Heterodimerization may include chemical induced dimerization domains (CIDs) with two orthogonal ligand moieties that exhibit high specificity and affinity for their binding domains and lack alternative endogenous binding partners in mammalian cells at useful concentrations. The CIDs may be membrane permeable. In some aspects, the linker may be long enough to allow both binding domains to be simultaneously engaged without steric interference. The linker may in some instances be a photocleavable linker. Linkers that respond to a wavelength that is neither cytotoxic nor interferes with imaging common fluorophores may be preferentially selected. In some embodiments, the heterodimerization switches may include FKBP and DHFR domains and Zapalog, a small molecule dimerizer that undergoes photolysis when exposed to blue light. Zapalog may dimerize any two proteins tagged with the FKBP and DHFR domains until exposure to light causes its photolysis. Dimerization may be restored with uncleaved Zapalog. In some embodiments, Zapalog may include the heterodimerizer trimethoprim-synthetic ligand of FK506-binding protein (TMP-SLF), wherein the SLF portion binds the FK506-binding protein (FKBP) domain of one chimeric partner; the TMP portion binds the Escherichia coli dihydrofolate reductase (DHFR) domain of another. To render dimerization reversible with light, the alkyl linker between TMP and SLF may be replaced with a dialkoxynitrobenzyl (DANB) moiety. Two payloads described herein are tagged with DHFR and FKBP domains Addition of Zapalog may induce dimerization of the tagged proteins. Exposure to 405 nm light may photocleave Zapalog, causing rapid dissociation of the dimer. Dimerization may be restored by the addition of uncleaved Zapalog which may outcompete the photolysed Zapalog moieties. Any of the ligands described herein may be utilized to build Zapalog-like ligands and any of the SREs described herein may be used to generate CIDs.

### Boolean Switches

[0194] DD-regulated effector modules described herein can also be incorporated into the design of cellular Boolean switches. As used herein, a Boolean switch refers to a circuit that is designed to perform a logical operation based on one or more inputs and which produces an output. Logical operations performed by Boolean switches include but are not limited to, AND, OR, NOR, NAND, NOT, IMPLY, NIMPLY, XOR, and XNOR. AND and OR gates represent the most fundament logical operations, where OR represents a scenario where any of the one or more inputs is required to produce an output, and AND represents a scenario where all of the inputs are required to generate an output. Compound Boolean switches that consist of multiple logical operations can also be generated using effector modules as described herein. In some embodiments, biocircuits and/or any of their components can represent one or more inputs in a Boolean switch. In other embodiments, DDs described herein can be combined with switches known in the art to generate Boolean switches. The output of a Boolean switch can depend on the payload of the effector module utilized. In one embodiment, the DDs and/or the biocircuits can be utilized in NOT gates. NOT gates are inverters whose function is to invert the input i.e. stimulus. In some embodiments, the NOT gates described herein can be used to convert an immunosuppressive stimulus into an immune potentiating output such as the expression and/or function of an immune potentiating (promoting) payload. In another non-limiting example, an AND based Boolean switch may be generated where a first input comprises a biocircuit with gene editing nuclease, Cas9, as the payload and a second input comprises a biocircuit with transcriptional activator, VPR, as the payload. In the presence of the target gene guide RNA, addition of the stimuli to both inputs is required for the transcriptional activation of the target gene (see Gao Y et al. (2016) Nat Methods. 13(12):1043-1049; the contents of which are incorporated herein by reference in their entirety).

### Safety Switches

[0195] In some embodiments, effector module payloads can comprise DD-regulated safety switches that can eliminate adoptively transferred cells in the case of severe toxicity, thereby mitigating the adverse effects of T cell therapy. Adoptively transferred T cells in immunotherapy can attack normal cells in response to normal tissue expression of TAA. Even on-tumor target activity of adoptively transferred T cells can result in toxicities such as tumor lysis syndrome, cytokine release syndrome and the related macrophage activation syndrome. Safety switches can be utilized to eliminate inappropriately activated adoptively transferred cells by induction of apoptosis or by immunosurveillance.

[0196] In some embodiments, DD-regulated payloads can comprise inducible killer/suicide genes that act as a safety switch. The killer/suicide gene when introduced into adoptively transferred immune cells, could control their alloreactivity. The killer/suicide gene can be an apoptotic gene (e.g., any Caspase gene) which allows conditional apoptosis of the transduced cells by administration of a non-therapeutic ligand of the SRE (e.g., DD).

[0197] In some embodiments, the payload can be Caspase 9. In some instances, Caspase 9 can be modified to have low basal expression and lacking the caspase recruitment domain (CARD) (SEQ ID NO. 26 and SEQ ID NO. 28 of U.S. Pat. No. 9,434,935B2; the contents of which are incorporated by reference in their entirety). In some embodiments, the safety switches may also be referred to as genetic erasers. In one aspect, the genetic eraser may include a selection marker such as those described in International Patent Publication, WO2018022747, the contents of which are incorporated by reference in their entirety.

[0198] In some embodiments, DDs, SREs and/or payloads of effector modules as described can include molecular safeguards for T-cell immunotherapies. Molecular safeguards can allow, in the event of side-effects, selective depletion of engineered T-cells (e.g., CAR T-cells). Molecular safeguards can respond to activating agents which trigger on-demand depletion of the engineered T-cells. Non-limiting examples of molecular safeguards to be used in combination with CAR expression include CD20, which respond to the antibody Rituximab; RQR8, which responds to the antibody Rituximab; huEGFRtr, which responds to the antibody Erbitux; HSV-TK, which responds to the small molecule Ganciclovir; ICasp9, which responds to the small molecule Rimudicid; and CubiCAR, which is a CAR architecture with built-in safeguard CD20 that responds to the antibody Rituximab (Valton et al., Scientific Reports volume 8, Article number: 8972 (2018), the contents of which are incorporated herein by reference in their entirety).

[0199] In one embodiment, the payload is a suicide gene system, iCasp9/Chemical induced dimerization (CID) system which consists of a polypeptide derived from the Caspase9 gene fused to a drug binding domain derived from the human FK506 protein. Administration of bioinert, small molecule AP1903 (rimiducid), induces cross linking of the drug binding domains and dimerization of the fusion protein and in turn the dimerization of Caspase 9. This results in the activation of downstream effector Caspase 3 and subsequent induction of cellular apoptosis (Straathof et al., Blood, 2005, 105: 4247-4254; incorporated herein by reference in its entirety). Preclinical trials using CART including an iCasp9 gene have shown effective elimination of CAR T cells in vivo in mouse models and demonstrate the potential efficacy of this approach. (Budde et al, Plos One, 2013, 8: e82742.10.1371; Hoyos et al., Leukemia, 2010; 24(6):1160-1170). In one embodiment, the payload can comprise Caspase 9. In one aspect, the effector module can be a DD-Caspase9 fusion polypeptide.

### Regulatory Switches

[0200] The utility of adoptive cell therapy (ACT) has been limited by the high incidence of graft versus host disease (GVHD). GVHD occurs when adoptively transferred T cells elicit an immune response resulting in host tissue damage. Recognition of host antigens by the graft cells triggers a proinflammatory cytokine storm cascade that signifies acute GVHD. GVHD is characterized as an imbalance between the effector and the regulatory arms of the immune system. In some embodiments, the payloads described herein can be used as regulatory switches. As used herein “regulatory switch” refers proteins, which when expressed in target cells increase tolerance to the graft by enhancing the regulatory arm of the immune system.

[0201] In one embodiment, regulatory switches can include DD-regulated payloads that preferentially promote the expansion of regulatory T (Treg cells). Tregs are a distinct population of cells that are positively selected on high affinity ligands in the thymus and play an important role in the tolerance to self-antigens. In addition, T regs have also been shown to play a role in peripheral tolerance to foreign antigens. Since Tregs promote immune tolerance, expansion of Tregs with compositions as described herein can be desirable to limit GVHD.

[0202] In some embodiments, the regulatory switch can include, but is not limited to T regs activation factors such NF-kappa B (NFKB or NFκB) FOXO, nuclear receptor Nr4a, Retinoic acid receptor alpha, NFAT, AP-1 and SMAD. Such factors can result in the expression of Fork headbox P3 (FOXP3) in T cells resulting in the activation of the regulatory T cell program and the expansion of T cells.

[0203] In some embodiments, the regulatory switch can be FOXP3, a transcriptional regulator in T cells. A function of FOXP3 is to suppress the function of NFAT, which leads to the suppression of expression of many genes including IL2 and effector T-cell cytokines. FOXP3 acts also as a transcription activator for genes such as CD2S, Cytotoxic T-Lymphocyte Antigen Cytotoxic T-Lymphocyte Antigen 4 (CTLA4), glucocorticoid-induced TNF receptor family gene (GITR) and folate receptor 4. FOXP3 also inhibits the differentiation of IL17 producing helper T-cells (Th17) by antagonizing RORC (RAR related orphan receptor C). Isoforms of FOXP3 lacking exon2 (FOXP3 delta 2) or exon 7 (FOXP3 delta 7) can also be used as regulatory switches. In one aspect, an effector module as described herein can be a DD-FOXP3 fusion polypeptide.

[0204] Regulatory switches can be designed using Boolean switches, e.g. NOT gates. For example, an immunosuppressive signal can be converted into an immune potentiating output such as expression and/or function of an immune potentiating (promoting) payload. The stimulus of a NOT gate can be, for example, phosphorylated SHP2, a signaling molecule produced by the activation of the immunosuppressive PD1 signaling pathway. Another non-limiting example for a NOT gate can be metabolite kynurenine, which is produced by the indoleamine 2,3-dioxygenase pathway.

### Epigenetic Switches

[0205] In some embodiments, the DDs described herein can include epigenetic switches. Alternatively or additionally, epigenetic switches can be constructed using DDs described herein. Epigenetic switches utilize chemical modification of nucleic acids, the propagation, and the actuation of the chemical modifications. In some embodiments, the epigenetic switches may be built by utilizing chemical modifications of nucleic acids that are naturally found in bacterial such as 6-methyl-adenosine (m6A). m6A switches are described in Park et al. 2019 (Engineering Epigenetic Regulation Using Synthetic Read-Write Modules. Cell. January 10; 176(1-2):227-238.; the contents of which are incorporated by reference in their entirety). The epigenetic circuits described herein may include a “writer” protein that adds m6A at specific DNA sequences. The writer module may be based on a methylase such as but not limited to dam methylase, which adds m6A to GATC sequences in Escherichia coli and is active when expressed in human cells. By fusing dam to a zinc finger proteins (ZF), allows targeting m6A methylation to specific loci. Specificity of the dam methylases to ZF targeted sequences may be achieved using by engineering mutations that reduce the catalytic activity of dam. In some embodiments, the epigenetic switch may include a “reader” protein that can recognize the m6A methylation marks In one aspect, the reader domain may be the binding domain of the restriction enzyme DpnI. This reader domain (RD) may be fused to DAM to propagate m6A marks at nearby and complemental), GATC sites in DNA, thereby spreading methylation across a locus and cell divisions. The RD may also be fused to proteins that activate or repress transcription (EDs), thus creating m6A-dependent transcriptional regulation.

### Payloads

[0206] In some embodiments, payloads can be any natural protein in an organism genome, a fusion polypeptide, an antibody, or variants, mutants and derivatives thereof. In some embodiments, the effector module of the present disclosure is a fusion construct comprising a DD of the disclosure operably linked to at least one payload. In one aspect, the payload may be any natural protein of interest (POI) or variants thereof, an antibody or fragments thereof, a therapeutic agent, or any artificial peptide or polypeptide.

[0207] In some embodiments, payloads of the present disclosure may be immunotherapeutic agents. As used herein, an immunotherapeutic agent is any agent that induces immune responses in an organism. An immunotherapeutic agent may be a natural protein in an organism or it may be an artificial protein such as a fusion protein or an antibody. The immunotherapeutic agent may be, but is not limited to, an antibody and fragments and variants thereof, a MHC molecule, an antigen and fragments thereof, a T cell receptor (TCR) such as a tumor specific TCR and variants thereof, a chimeric antigen receptor (CAR), a chimeric switch receptor, a co-stimulatory molecule, a co-inhibitory molecule, an inhibitor of a co-inhibitory receptor or ligand, an agonist of a co-stimulatory receptor and ligand, a cytokine, chemokine, a cytokine receptor, a chemokine receptor, a soluble growth factor, a metabolic factor, a homing receptor, a safety switch (e.g., a suicide gene), or any agent that induces an immune response. In one embodiment, the immunotherapeutic agent induces an anti-cancer immune response in a cell, or in a subject. In some aspects, the immunotherapeutic agent reduces the tumor burden in a subject.

[0208] The payload may be any immunotherapeutic agent used for cancer immunotherapy such as a T cell receptor (TCR), a chimeric agent receptor (CAR) such as CD19 CAR that targets any molecule of tumor cells, an antibody, an antigen binding domain or combination of antigen binding domains, a cytokine such as IL2, IL12, IL15 or IL15/IL15Ra fusion, an antagonist of an immune checkpoint, an agonist of co-stimulatory molecule, a chimeric switch receptor, a safety switch, a metabolic factor, a growth factor, a chemokine, a chemokine receptor, a homing receptor, or any agent that can induce an immune response. The SRE and payload may be operably linked through one or more linkers and the positions of components may vary within the effector module.

[0209] In some embodiments, the payload may be a fusion protein comprising any of the immunotherapeutic agents described and ubiquitin. Within the fusion protein, the ubiquitin may be positioned at the N terminus and the immunotherapeutic agent may be positioned at the C terminus. In one aspect, the immunotherapeutic agent may itself be a fusion protein and the ubiquitin may be located in between the proteins that are fused. The payloads may include a single ubiquitin protein or a chain of ubiquitin proteins. The ubiquitin protein may be linked to the immunotherapeutic agent through a single amino acid. The selection of the single amino acid may depend on the desired half-life of the fusion protein. In one embodiment, the immunotherapeutic agent may be IL12.

### 1. Protein of Interest

[0210] In some embodiments, payloads of the disclosure may be a natural protein in an organism genome, or variants, mutants, derivatives thereof. The natural protein may be from, for example, a mammalian organism, a bacterium, and a virus.

[0211] In one example, the payload may be a protein of interest, or a polypeptide from human genome.

### 2. Antibodies

[0212] In some embodiments, antibodies, fragments and variants thereof are payloads of the present disclosure. The antibody may be an intact antibody, an antibody light chain, antibody heavy chain, an antibody fragment, an antibody variant, or an antibody derivative.

[0213] In some embodiments, payloads of the disclosure may be an antibody or fragments thereof. Antibodies useful in this method include without limitation, any of those taught in co-owned U.S. Provisional Patent Application No. 62/320,864 filed Apr. 11, 2016, 62/466,596 filed Mar. 3, 2017 and the International Publication WO2017/180587 (the contents of each of which are herein incorporated by reference in their entirety).

### Antibody Fragments and Variants

[0214] In some embodiments, antibody fragments and variants may comprise antigen binding regions from intact antibodies. Examples of antibody fragments and variants may include, but are not limited to Fab, Fab′, F(ab′)2, and Fv fragments; diabodies; linear antibodies; single-chain antibody molecules such as single chain variable fragment (scFv); and multispecific antibodies formed from antibody fragments. Papain digestion of antibodies produces two identical antigen-binding fragments, called “Fab” fragments, each with a single antigen-binding site. Also produced is a residual “Fc” fragment, whose name reflects its ability to crystallize readily. Pepsin treatment yields an F(ab′)2 fragment that has two antigen-binding sites and is still capable of cross-linking with the antigen. Pharmaceutical compositions, biocircuits, biocircuit components, effector modules including their SREs or payloads of the present disclosure may comprise one or more of these fragments.

[0215] For the purposes herein, an “antibody” may comprise a heavy and light variable domain as well as an Fc region. As used herein, the term “native antibody” usually refers to a heterotetrametric glycoprotein of about 150,000 Daltons, composed of two identical light (L) chains and two identical heavy (H) chains. Genes encoding antibody heavy and light chains are known and segments making up each have been well characterized and described (Matsuda et al., The Journal of Experimental Medicine. 1998, 188(11): 2151-62 and Li et al., Blood, 2004, 103(12): 4602-4609; the content of each of which are herein incorporated by reference in their entirety). Each light chain is linked to a heavy chain by one covalent disulfide bond, while the number of disulfide linkages varies among the heavy chains of different immunoglobulin isotypes. Each heavy and light chain also has regularly spaced intrachain disulfide bridges. Each heavy chain has at one end a variable domain (VH) followed by a number of constant domains Each light chain has a variable domain at one end (VL) and a constant domain at its other end; the constant domain of the light chain is aligned with the first constant domain of the heavy chain, and the light chain variable domain is aligned with the variable domain of the heavy chain.

[0216] As used herein, the term “variable domain” refers to specific antibody domains found on both the antibody heavy and light chains that differ extensively in sequence among antibodies and are used in the binding and specificity of each particular antibody for its particular antigen. Variable domains comprise hypervariable regions. As used herein, the term “hypervariable region” refers to a region within a variable domain comprising amino acid residues responsible for antigen binding. The amino acids present within the hypervariable regions determine the structure of the complementarity determining regions (CDRs) that become part of the antigen-binding site of the antibody. As used herein, the term “CDR” refers to a region of an antibody comprising a structure that is complimentary to its target antigen or epitope. Other portions of the variable domain, not interacting with the antigen, are referred to as framework (FW) regions. The antigen-binding site (also known as the antigen combining site or paratope) comprises the amino acid residues necessary to interact with a particular antigen. The exact residues making up the antigen-binding site are typically elucidated by co-crystallography with bound antigen, however computational assessments based on comparisons with other antibodies can also be used (Strohl, W. R. Therapeutic Antibody Engineering. Woodhead Publishing, Philadelphia Pa. 2012. Ch. 3, p 47-54, the contents of which are herein incorporated by reference in their entirety). Determining residues that make up CDRs may include the use of numbering schemes including, but not limited to, those taught by Kabat (Wu et al., JEM, 1970, 132(2):211-250 and Johnson et al., Nucleic Acids Res. 2000, 28(1): 214-218, the contents of each of which are herein incorporated by reference in their entirety), Chothia (Chothia and Lesk, J. Mol. Biol. 1987, 196, 901, Chothia et al., Nature, 1989, 342, 877, and Al-Lazikani et al., J. Mol. Biol. 1997, 273(4): 927-948, the contents of each of which are herein incorporated by reference in their entirety), Lefranc (Lefranc et al., Immunome Res. 2005, 1:3) and Honegger (Honegger and Pluckthun, J. Mol. Biol. 2001, 309(3): 657-70, the contents of which are herein incorporated by reference in their entirety).

[0217] VH and VL domains have three CDRs each. VL CDRs are referred to herein as CDR-L1, CDR-L2 and CDR-L3, in order of occurrence when moving from N- to C-terminus along the variable domain polypeptide. VH CDRs are referred to herein as CDR-H1, CDR-H2 and CDR-H3, in order of occurrence when moving from N- to C-terminus along the variable domain polypeptide. Each of CDRs has favored canonical structures with the exception of the CDR-H3, which comprises amino acid sequences that may be highly variable in sequence and length between antibodies resulting in a variety of three-dimensional structures in antigen-binding domains (Nikoloudis, et al., PeerJ. 2014, 2: e456). In some cases, CDR-H3s may be analyzed among a panel of related antibodies to assess antibody diversity. Various methods of determining CDR sequences are known in the art and may be applied to known antibody sequences (Strohl, W. R. Therapeutic Antibody Engineering. Woodhead Publishing, Philadelphia Pa. 2012. Ch. 3, p47-54, the contents of which are herein incorporated by reference in their entirety).

[0218] As used herein, the term “Fv” refers to an antibody fragment comprising the minimum fragment on an antibody needed to form a complete antigen-binding site. These regions consist of a dimer of one heavy chain and one light chain variable domain in tight, non-covalent association. Fv fragments can be generated by proteolytic cleavage, but are largely unstable. Recombinant methods are known in the art for generating stable Fv fragments, typically through insertion of a flexible linker between the light chain variable domain and the heavy chain variable domain (to form a single chain Fv (scFv)) or through the introduction of a disulfide bridge between heavy and light chain variable domains (Strohl, W. R. Therapeutic Antibody Engineering. Woodhead Publishing, Philadelphia Pa. 2012. Ch. 3, p46-47, the contents of which are herein incorporated by reference in their entirety).

[0219] As used herein, the term “light chain” refers to a component of an antibody from any vertebrate species assigned to one of two clearly distinct types, called kappa and lambda based on amino acid sequences of constant domains Depending on the amino acid sequence of the constant domain of their heavy chains, antibodies can be assigned to different classes. There are five major classes of intact antibodies: IgA, IgD, IgE, IgG, and IgM, and several of these may be further divided into subclasses (isotypes), e.g., IgG1, IgG2, IgG3, IgG4, IgA, and IgA2.

[0220] As used herein, the term “single chain Fv” or “scFv” refers to a fusion protein of VH and VL antibody domains, wherein these domains are linked together into a single polypeptide chain by a flexible peptide linker. In some embodiments, the Fv polypeptide linker enables the scFv to form the desired structure for antigen binding. In some embodiments, scFvs are utilized in conjunction with phage display, yeast display or other display methods where they may be expressed in association with a surface member (e.g. phage coat protein) and used in the identification of high affinity peptides for a given antigen.

[0221] Using molecular genetics, two scFvs can be engineered in tandem into a single polypeptide, separated by a linker domain, called a “tandem scFv” (tascFv). Construction of a tascFv with genes for two different scFvs yields a “bispecific single-chain variable fragments” (bis-scFvs). Only two tascFvs have been developed clinically by commercial firms; both are bispecific agents in active early phase development by Micromet for oncologic indications, and are described as “Bispecific T-cell Engagers (BiTE).” Blinatumomab is an anti-CD19/anti-CD3 bispecific tascFv that potentiates T-cell responses to B-cell non-Hodgkin lymphoma in Phase 2. MT110 is an anti-EP-CAM/anti-CD3 bispecific tascFv that potentiates T-cell responses to solid tumors in Phase 1. Bispecific, tetravalent “TandAbs” are also being researched by Affimed (Nelson, A. L., MAbs., 2010, January-February; 2(1):77-83). Maxibodies (bivalent scFv fused to the amino terminus of the Fc (CH2-CH3 domains) of IgG may also be included.

[0222] As used herein, the term “bispecific antibody” refers to an antibody capable of binding two different antigens. Such antibodies typically comprise regions from at least two different antibodies. Bispecific antibodies may include any of those described in Riethmuller, G. Cancer Immunity. 2012, 12:12-18, Marvin et al., 2005. Acta Pharmacologica Sinica. 2005, 26(6): 649-658 and Schaefer et al., PNAS. 2011, 108(27):11187-11192, the contents of each of which are herein incorporated by reference in their entirety. In some aspects, bispecific antibodies may be trifunctional antibodies (3funct) and BiTE (bi-specific T cell engager).

[0223] As used herein, the term “diabody” refers to a small antibody fragment with two antigen-binding sites. Diabodies are functional bispecific single-chain antibodies (bscAb). Diabodies comprise a heavy chain variable domain VH connected to a light chain variable domain VL in the same polypeptide chain. By using a linker that is too short to allow pairing between the two domains on the same chain, the domains are forced to pair with the complementary domains of another chain and create two antigen-binding sites. Diabodies are described more fully in, for example, EP 404,097; WO 93/11161; and Hollinger et al. (Hollinger, P. et al., “Diabodies”: Small bivalent and bispecific antibody fragments. PNAS, 1993. 90: 6444-6448); the contents of each of which are incorporated herein by reference in their entirety.

[0224] The term “intrabody” refers to a form of antibody that is not secreted from a cell in which it is produced, but instead targets one or more intracellular proteins. Intrabodies may be used to affect a multitude of cellular processes including, but not limited to intracellular trafficking, transcription, translation, metabolic processes, proliferative signaling and cell division. In some embodiments, methods of the present disclosure may include intrabody-based therapies. In some such embodiments, variable domain sequences and/or CDR sequences disclosed herein may be incorporated into one or more constructs for intrabody-based therapy.

[0225] As used herein, the term “monoclonal antibody” refers to an antibody obtained from a population of substantially homogeneous cells (or clones), i.e., the individual antibodies comprising the population are identical and/or bind the same epitope, except for possible variants that may arise during production of the monoclonal antibodies, such variants generally being present in minor amounts. In contrast to polyclonal antibody preparations that typically include different antibodies directed against different determinants (epitopes), each monoclonal antibody is directed against a single determinant on the antigen.

[0226] The modifier “monoclonal” indicates the character of the antibody as being obtained from a substantially homogeneous population of antibodies, and is not to be construed as requiring production of the antibody by any particular method. The monoclonal antibodies herein include “chimeric” antibodies (immunoglobulins) in which a portion of the heavy and/or light chain is identical with or homologous to corresponding sequences in antibodies derived from a particular species or belonging to a particular antibody class or subclass, while the remainder of the chain(s) is identical with or homologous to corresponding sequences in antibodies derived from another species or belonging to another antibody class or subclass, as well as fragments of such antibodies.

[0227] As used herein, the term “humanized antibody” refers to a chimeric antibody comprising a minimal portion from one or more non-human (e.g., murine) antibody source(s) with the remainder derived from one or more human immunoglobulin sources. For the most part, humanized antibodies are human immunoglobulins (recipient antibody) in which residues from the hypervariable region from an antibody of the recipient are replaced by residues from the hypervariable region from an antibody of a non-human species (donor antibody) such as mouse, rat, rabbit or nonhuman primate having the desired specificity, affinity, and/or capacity. In one embodiment, the antibody may be a humanized full-length antibody. As a non-limiting example, the antibody may have been humanized using the methods taught in US Patent Publication NO. US20130303399, the contents of which are herein incorporated by reference in its entirety.

[0228] As used herein, the term “antibody variant” refers to a modified antibody (in relation to a native or starting antibody) or a biomolecule resembling a native or starting antibody in structure and/or function (e.g., an antibody mimetic). Antibody variants may be altered in their amino acid sequence, composition or structure as compared to a native antibody. Antibody variants may include, but are not limited to, antibodies with altered isotypes (e.g., IgA, IgD, IgE, IgG1, IgG2, IgG3, IgG4, or IgM), humanized variants, optimized variants, multispecific antibody variants (e.g., bispecific variants), and antibody fragments.

[0229] In some embodiments, pharmaceutical compositions, biocircuits, biocircuit components, effector modules including their SREs or payloads of the present disclosure may be antibody mimetics. As used herein, the term “antibody mimetic” refers to any molecule which mimics the function or effect of an antibody and which binds specifically and with high affinity to their molecular targets. In some embodiments, antibody mimetics may be monobodies, designed to incorporate the fibronectin type III domain (Fn3) as a protein scaffold (U.S. Pat. Nos. 6,673,901; 6,348,584). In some embodiments, antibody mimetics may be those known in the art including, but are not limited to affibody molecules, affilins, affitins, anticalins, avimers, Centyrins, DARPINS™, Fynomers and Kunitz and domain peptides. In other embodiments, antibody mimetics may include one or more non-peptide regions.

[0230] In one embodiment, the antibody may comprise a modified Fc region. As a non-limiting example, the modified Fc region may be made by the methods or may be any of the regions described in US Patent Publication NO. US20150065690, the contents of which are herein incorporated by reference in its entirety.

[0231] In some embodiments, payloads of the disclosure may encode multispecific antibodies that bind more than one epitope. As used herein, the terms “multibody” or “multispecific antibody” refer to an antibody wherein two or more variable regions bind to different epitopes. The epitopes may be on the same or different targets. In one embodiment, the multispecific antibody may be generated and optimized by the methods described in International Patent Publication NO. WO2011109726 and US Patent Publication NO. US20150252119, the contents of which each of which are herein incorporated by reference in their entirety. These antibodies are able to bind to multiple antigens with high specificity and high affinity.

[0232] In certain embodiments, a multi-specific antibody is a “bispecific antibody” which recognizes two different epitopes on the same or different antigens. In one aspect, bispecific antibodies are capable of binding two different antigens. Such antibodies typically comprise antigen-binding regions from at least two different antibodies. For example, a bispecific monoclonal antibody (BsMAb, BsAb) is an artificial protein composed of fragments of two different monoclonal antibodies, thus allowing the BsAb to bind to two different types of antigen. Bispecific antibody frameworks may include any of those described in Riethmuller, G., 2012. Cancer Immunity, 2012, 12:12-18; Marvin et al., Acta Pharmacologica Sinica. 2005, 26(6):649-658; and Schaefer et al., PNAS. 2011, 108(27): 11187-11192, the contents of each of which are herein incorporated by reference in their entirety. New generations of BsMAb, called “trifunctional bispecific” antibodies, have been developed. These consist of two heavy and two light chains, one each from two different antibodies, where the two Fab regions (the arms) are directed against two antigens, and the Fc region (the foot) comprises the two heavy chains and forms the third binding site.

[0233] In some embodiments, payloads may encode antibodies comprising a single antigen-binding domain These molecules are extremely small, with molecular weights approximately one-tenth of those observed for full-sized mAbs. Further antibodies may include “nanobodies” derived from the antigen-binding variable heavy chain regions (VHHs) of heavy chain antibodies found in camels and llamas, which lack light chains (Nelson, A. L., MAbs. 2010. January-February; 2(1):77-83).

[0234] In some embodiments, the antibody may be “miniaturized”. Among the best examples of mAb miniaturization are the small modular immunopharmaceuticals (SMIPs) from Trubion Pharmaceuticals. These molecules, which can be monovalent or bivalent, are recombinant single-chain molecules containing one VL, one VH antigen-binding domain, and one or two constant “effector” domains, all connected by linker domains Presumably, such a molecule might offer the advantages of increased tissue or tumor penetration claimed by fragments while retaining the immune effector functions conferred by constant domains Δt least three “miniaturized” SMIPs have entered clinical development. TRU-015, an anti-CD20 SMIP developed in collaboration with Wyeth, is the most advanced project, having progressed to Phase 2 for rheumatoid arthritis (RA). Earlier attempts in systemic lupus erythrematosus (SLE) and B cell lymphomas were ultimately discontinued. Trubion and Facet Biotechnology are collaborating in the development of TRU-016, an anti-CD37 SMIP, for the treatment of CLL and other lymphoid neoplasias, a project that has reached Phase 2. Wyeth has licensed the anti-CD20 SMIP SBI-087 for the treatment of autoimmune diseases, including RA, SLE and possibly multiple sclerosis, although these projects remain in the earliest stages of clinical testing. (Nelson, A. L., MAbs, 2010. January-February; 2(1):77-83).

[0235] On example of miniaturized antibodies is called “unibody” in which the hinge region has been removed from IgG4 molecules. While IgG4 molecules are unstable and can exchange light-heavy chain heterodimers with one another, deletion of the hinge region prevents heavy chain-heavy chain pairing entirely, leaving highly specific monovalent light/heavy heterodimers, while retaining the Fc region to ensure stability and half-life in vivo. This configuration may minimize the risk of immune activation or oncogenic growth, as IgG4 interacts poorly with FcRs and monovalent unibodies fail to promote intracellular signaling complex formation (see, e.g., Nelson, A. L., MAbs, 2010. January-February; 2(1):77-83).

[0236] In some embodiments, payloads of the disclosure may encode single-domain antibodies (sdAbs, or nanobodies) which are antibody fragment consisting of a single monomeric variable antibody domain Like a whole antibody, it is able to bind selectively to a specific antigen. In one aspect, a sdAb may be a “Camel Ig or “camelid VHH”. As used herein, the term “camel Ig” refers to the smallest known antigen-binding unit of a heavy chain antibody (Koch-No lte, et al, FASEB J., 2007, 21: 3490-3498). A “heavy chain antibody” or a “camelid antibody” refers to an antibody that contains two VH domains and no light chains (Riechmann L et al, J. Immunol. Methods, 1999, 231: 25-38; International patent publication NOs.: WO1994/04678 and WO1994/025591; and U.S. Pat. No. 6,005,079). In another aspect, a sdAb may be a “immunoglobulin new antigen receptor” (IgNAR). As used herein, the term “immunoglobulin new antigen receptor” refers to class of antibodies from the shark immune repertoire that consist of homodimers of one variable new antigen receptor (VNAR) domain and five constant new antigen receptor (CNAR) domains IgNARs represent some of the smallest known immunoglobulin-based protein scaffolds and are highly stable and possess efficient binding characteristics. The inherent stability can be attributed to both (i) the underlying Ig scaffold, which presents a considerable number of charged and hydrophilic surface exposed residues compared to the conventional antibody VH and VL domains found in murine antibodies; and (ii) stabilizing structural features in the complementary determining region (CDR) loops including inter-loop disulfide bridges, and patterns of intra-loop hydrogen bonds.

[0237] In some embodiments, payloads of the disclosure may encode intrabodies. Intrabodies are a form of antibody that is not secreted from a cell in which it is produced, but instead targets one or more intracellular proteins. Intrabodies are expressed and function intracellularly, and may be used to affect a multitude of cellular processes including, but not limited to intracellular trafficking, transcription, translation, metabolic processes, proliferative signaling and cell division. In some embodiments, methods described herein include intrabody-based therapies. In some such embodiments, variable domain sequences and/or CDR sequences disclosed herein are incorporated into one or more constructs for intrabody-based therapy. For example, intrabodies may target one or more glycated intracellular proteins or may modulate the interaction between one or more glycated intracellular proteins and an alternative protein.

[0238] The intracellular expression of intrabodies in different compartments of mammalian cells allows blocking or modulation of the function of endogenous molecules (Biocca, et al., EMBO J. 1990, 9: 101-108; Colby et al., Proc. Natl. Acad. Sci. U.S.A. 2004, 101: 17616-17621). Intrabodies can alter protein folding, protein-protein, protein-DNA, protein-RNA interactions and protein modification. They can induce a phenotypic knockout and work as neutralizing agents by direct binding to the target antigen, by diverting its intracellular trafficking or by inhibiting its association with binding partners. With high specificity and affinity to target antigens, intrabodies have advantages to block certain binding interactions of a particular target molecule, while sparing others.

[0239] Sequences from donor antibodies may be used to develop intrabodies. Intrabodies are often recombinantly expressed as single domain fragments such as isolated VH and VL domains or as a single chain variable fragment (scFv) antibody within the cell. For example, intrabodies are often expressed as a single polypeptide to form a single chain antibody comprising the variable domains of the heavy and light chains joined by a flexible linker polypeptide. Intrabodies typically lack disulfide bonds and are capable of modulating the expression or activity of target genes through their specific binding activity. Single chain intrabodies are often expressed from a recombinant nucleic acid molecule and engineered to be retained intracellularly (e.g., retained in the cytoplasm, endoplasmic reticulum, or periplasm). Intrabodies may be produced using methods known in the art, such as those disclosed and reviewed in: (Marasco et al., PNAS, 1993, 90: 7889-7893; Chen et al., Hum. Gene Ther. 1994, 5:595-601; Chen et al., 1994, PNAS, 91: 5932-5936; Maciejewski et al., 1995, Nature Med., 1: 667-673; Marasco, 1995, Immunotech, 1: 1-19; Mhashilkar, et al., 1995, EMBO J. 14: 1542-51; Chen et al., 1996, Hum. Gene Therap., 7: 1515-1525; Marasco, Gene Ther. 4:11-15, 1997; Rondon and Marasco, 1997, Annu. Rev. Microbiol. 51:257-283; Cohen, et al., 1998, Oncogene 17:2445-56; Proba et al., 1998, J. Mol. Biol. 275:245-253; Cohen et al., 1998, Oncogene 17:2445-2456; Hassanzadeh, et al., 1998, FEBS Lett. 437:81-6; Richardson et al., 1998, Gene Ther. 5:635-44; Ohage and Steipe, 1999, J. Mol. Biol. 291:1119-1128; Ohage et al., 1999, J. Mol. Biol. 291:1129-1134; Wirtz and Steipe, 1999, Protein Sci. 8:2245-2250; Zhu et al., 1999, J. Immunol. Methods 231:207-222; Arafat et al., 2000, Cancer Gene Ther. 7:1250-6; der Maur et al., 2002, J. Biol. Chem. 277:45075-85; Mhashilkar et al., 2002, Gene Ther. 9:307-19; and Wheeler et al., 2003, FASEB J. 17: 1733-5; and references cited therein).

[0240] In some embodiments, payloads of the disclosure may encode biosynthetic antibodies as described in U.S. Pat. No. 5,091,513, the contents of which are herein incorporated by reference in their entirety. Such antibody may include one or more sequences of amino acids constituting a region which behaves as a biosynthetic antibody binding site (BAB S). The sites comprise 1) non-covalently associated or disulfide bonded synthetic VH and VL dimers, 2) VH-VL or VL-VH single chains wherein the VH and VL are attached by a polypeptide linker, or 3) individuals VH or VL domains The binding domains comprise linked CDR and FR regions, which may be derived from separate immunoglobulins. The biosynthetic antibodies may also include other polypeptide sequences which function, e.g., as an enzyme, toxin, binding site, or site of attachment to an immobilization media or radioactive atom. Methods are disclosed for producing the biosynthetic antibodies, for designing BABS having any specificity that can be elicited by in vivo generation of antibody, and for producing analogs thereof.

[0241] In some embodiments, payloads may encode antibodies with antibody acceptor frameworks taught in U.S. Pat. No. 8,399,625. Such antibody acceptor frameworks may be particularly well suited accepting CDRs from an antibody of interest.

[0242] In one embodiment, the antibody may be a conditionally active biologic protein. An antibody may be used to generate a conditionally active biologic protein which are reversibly or irreversibly inactivated at the wild type normal physiological conditions as well as to such conditionally active biologic proteins and uses of such conditional active biologic proteins are provided. Such methods and conditionally active proteins are taught in, for example, International Publication No. WO2015175375 and WO2016036916 and US Patent Publication No. US20140378660, the contents of each of which are incorporated herein by reference in their entirety.

### Antibody Preparations

[0243] The preparation of antibodies, whether monoclonal or polyclonal, is known in the art. Techniques for the production of antibodies are well known in the art and described, e.g. in Harlow and Lane “Antibodies, A Laboratory Manual”, Cold Spring Harbor Laboratory Press, 1988; Harlow and Lane “Using Antibodies: A Laboratory Manual” Cold Spring Harbor Laboratory Press, 1999 and “Therapeutic Antibody Engineering: Current and Future Advances Driving the Strongest Growth Area in the Pharmaceutical Industry” Woodhead Publishing, 2012.

[0244] The antibodies and fragments and variants thereof as described herein can be produced using recombinant polynucleotides. In one embodiment, the polynucleotides have a modular design to encode at least one of the antibodies, fragments or variants thereof. As a non-limiting example, the polynucleotide construct may encode any of the following designs: (1) the heavy chain of an antibody, (2) the light chain of an antibody, (3) the heavy and light chain of the antibody, (4) the heavy chain and light chain separated by a linker, (5) the VH1, CH1, CH2, CH3 domains, a linker and the light chain or (6) the VH1, CH1, CH2, CH3 domains, VL region, and the light chain. Any of these designs may also comprise optional linkers between any domain and/or region. The polynucleotides of the present disclosure may be engineered to produce any standard class of immunoglobulins using an antibody described herein or any of its component parts as a starting molecule.

### Antibodies Used for Immunotherapy

[0245] In some embodiments, payloads of the present disclosure may be antibodies, fragments and variants thereof which are specific to tumor specific antigens (TSAs) and tumor associated antigens (TAAs). Antibodies circulate throughout the body until they find and attach to the TSA/TAA. Once attached, they recruit other parts of the immune system, increasing ADCC (antibody dependent cell-mediated cytotoxicity) and ADCP (antibody dependent cell-mediated phagocytosis) to destroy tumor cells. As used herein, the term “tumor specific antigen (TSA)” means an antigenic substance produced in tumor cells, which can trigger an anti-tumor immune response in a host organism. In one embodiment, a TSA may be a tumor neoantigen. The tumor antigen specific antibody mediates complement-dependent cytotoxic response against tumor cells expressing the same antigen.

[0246] Of particular interest is a TSA that is a breast cancer antigen, an ovarian cancer antigen, a prostate cancer antigen, a cervical cancer antigen, a pancreatic carcinoma antigen, a lung cancer antigen, a bladder cancer antigen, a colon cancer antigen, a testicular cancer antigen, a glioblastoma cancer antigen, an antigen associated with a B cell malignancy, an antigen associated with multiple myeloma, an antigen associated with non-Hodgkin's lymphoma, or an antigen associated with chronic lymphocytic leukemia.

[0247] Suitable antibodies which can immunoactively bind to a TSA may include, but are not limited to, those specific to 5T4, 707-AP, A33, AFP (α-fetoprotein), AKAP-4 (A kinase anchor protein 4), ALK, α5β1-integrin, androgen receptor, annexin II, alpha-actinin-4, ART-4, B1, B7H3, B7H4, BAGE (B melanoma antigen), BCMA, BCR-ABL fusion protein, beta-catenin, BKT-antigen, BTAA, CA-I (carbonic anhydrase I), CA50 (cancer antigen 50), CA125, CA15-3, CA195, CA242, calretinin, CAIX (carbonic anhydrase), CAMEL (cytotoxic T-lymphocyte recognized antigen on melanoma), CAM43, CAP-1, Caspase-8/m, CD4, CD5, CD7, CD19, CD20, CD22, CD23, CD25, CD27/m, CD28, CD30, CD33, CD34, CD36, CD38, CD40/CD154, CD41, CD44v6, CD44v7/8, CD45, CD49f, CD56, CD68\KP1, CD74, CD79a/CD79b, CD103, CD123, CD133, CD138, CD171, cdc27/m, CDK4 (cyclin dependent kinase 4), CDKN2A, CDS, CEA (carcinoembryonic antigen), CEACAM5, CEACAM6, chromogranin, c-Met, c-Myc, coa-1, CSAp, CT7, CT10, cyclophilin B, cyclin B1, cytoplasmic tyrosine kinases, cytokeratin, DAM-10, DAM-6, dek-can fusion protein, desmin, DEPDC1 (DEP domain containing 1), E2A-PRL, EBNA, EGF-R (epidermal growth factor receptor), EGP-1 (epithelial glycoprotein-1) (TROP-2), EGP-2, EGP-40, EGFR (epidermal growth factor receptor), EGFRvIII, EF-2, ELF2M, EMMPRIN, EpCAM (epithelial cell adhesion molecule), EphA2, Epstein Barr virus antigens, Erb (ErbB1; ErbB3; ErbB4), ETA (epithelial tumor antigen), ETV6-AML1 fusion protein, FAP (fibroblast activation protein), FBP (folate-binding protein), FGF-5, folate receptor α, FOS related antigen 1, fucosyl GM1, 0250, GAGE (GAGE-1; GAGE-2), galactin, GD2 (ganglioside), GD3, GFAP (glial fibrillary acidic protein), GM2 (oncofetal antigen-immunogenic-1; OFA-I-1), GnT-V, Gp100, H4-RET, HAGE (helicase antigen), HER-2/neu, HIFs (hypoxia inducible factors), HIF-la, HIF-2a, HLA-A2, HLA-A*0201-R170I, HLA-A11, HMWMAA, Hom/Mel-40, HSP70-2M (Heat shock protein 70), HST-2, HTgp-175, hTERT (or hTRT), human papillomavirus-E6/human papillomavirus-E7 and E6, iCE (immune-capture EIA), IGF-1R, IGH-IGK, IL2R, ILS, ILK (integrin-linked kinase), IMP3 (insulin-like growth factor II mRNA-binding protein 3), IRF4 (interferon regulatory factor 4), KDR (kinase insert domain receptor), KIAA0205, KRAB-zinc finger protein (KID)-3; KID31, KSA (17-1A), K-ras, LAGE, LCK, LDLR/FUT (LDLR-fucosyltransferaseAS fusion protein), LeY (Lewis Y), MAD-CT-1, MAGE (tyrosinase, melanoma-associated antigen) (MAGE-1; MAGE-3), melan-A tumor antigen (MART), MART-2/Ski, MC1R (melanocortin 1 receptor), MDM2, mesothelin, MPHOSPH1, MSA (muscle-specific actin), mTOR (mammalian targets of rapamycin), MUC-1, MUC-2, MUM-1 (melanoma associated antigen (mutated) 1), MUM-2, MUM-3, Myosin/m, MYL-RAR, NA88-A, N-acetylglucosaminyltransferase, neo-PAP, NF-KB (nuclear factor-kappa B), neurofilament, NSE (neuron-specific enolase), Notch receptors, NuMa, N-Ras, NY-BR-1, NY-CO-1, NY-ESO-1, Oncostatin M, OS-9, OY-TES1, p53 mutants, p190 minor bcr-abl, p15(58), p185erbB2, p180erbB-3, PAGE (prostate associated gene), PAP (prostatic acid phosphatase), PAX3, PAX5, PDGFR (platelet derived growth factor receptor), cytochrome P450 involved in piperidine and pyrrolidine utilization (PIPA), Pml-RAR alpha fusion protein, PR-3 (proteinase 3), PSA (prostate specific antigen), PSM, PSMA (Prostate stem cell antigen), PRAME (preferentially expressed antigen of melanoma), PTPRK, RAGE (renal tumor antigen), Raf (A-Raf, B-Raf and C-Raf), Ras, receptor tyrosine kinases, RCAS1, RGSS, ROR1 (receptor tyrosine kinase-like orphan receptor 1), RU1, RU2, SAGE, SART-1, SART-3, SCP-1, SDCCAG16, SP-17 (sperm protein 17), src-family, SSX (synovial sarcoma X breakpoint)-1, SSX-2 (HOM-MEL-40), SSX-3, SSX-4, SSX-5, STAT-3, STAT-5, STAT-6, STEAD, STn, survivin, syk-ZAP70, TA-90 (Mac-2 binding protein\cyclophilin C-associated protein), TAAL6, TACSTD1 (tumor associated calcium signal transducer 1), TACSTD2, TAG-72-4, TAGE, TARP (T cell receptor gamma alternate reading frame protein), TEL/AML1 fusion protein, TEM1, TEM8 (endosialin or CD248), TGFβ, TIE2, TLP, TMPRSS2 ETS fusion gene, TNF-receptor (TNF-α receptor, TNF-β receptor; or TNF-γ receptor), transferrin receptor, TPS, TRP-1 (tyrosine related protein 1), TRP-2, TRP-2/INT2, TSP-180, VEGF receptor, WNT, WT-1 (Wilm's tumor antigen) and XAGE.

[0248] In one embodiment, the payload of the present disclosure may be an anti-CD47 antibody. CD47 is a ubiquitously expressed immunoregulatory protein that prevents phagocytic removal of healthy cells by the immune system. CD47 is expressed on the surface of many types of cancer cells, thereby disrupting anti-cancer immune responses. CD47 is also involved in various other important cellular processes, such as angiogenesis, cancer cell death and regulation of T-cell immunity Anti-CD47 antibodies in several pre-clinical studies have shown therapeutic benefit in solid cancers and most notably B-cell malignancies.

[0249] In one embodiment, the payload of the present disclosure may be an anti-CD22 antibody. As a non-limiting example, the anti-CD22 antibody is any of the antibodies, fragments or variants thereof described in US Patent Publication No. US20150086562. The anti-CD22 antibody may comprise a heavy chain variable region having the amino acid sequences of SEQ ID NO: 49-64 in US20150086562, and/or a light chain variable region having the amino acid sequence of SEQ ID NO: 17-32 in US20150086562; the contents of which are incorporated herein by reference in their entirety.

[0250] In some embodiments, payloads of the present disclosure may be antibodies, fragments and variants thereof which can specifically block an immunoinhibitory signal. These blocking antibodies (also referred to as antagonists) bind to co-inhibitory receptors, therefore blocking their signal transduction. As non-limiting examples, the blocking antibodies may be specific to CTLA-4, PD-1, and PD-L1/L2. In one embodiment, the anti-CTLA-4 antibody is Ipilimumab. In another embodiment, the anti-PD-1 antibody is Nivolumab. Antibodies that bind to PD-L1 and enhance T cell immune response may include antibodies taught in US patent publication NO.: 2016/0108123; the contents of which are incorporated by reference herein in their entirety. Other inhibitory immunomodulatory targets may include B7-H3, which can increase cancer cell metabolism such as glucose uptakes and lactate production (Lim et al., Cancer Res., 2016, 76(8): 1-12). Antibodies that block B7-H3 are disclosed in U.S. Pat. No. 9,150,656; the contents of which are incorporated by reference herein in their entirety.

[0251] In one aspect, payloads of the present disclosure may be antagonistic antibodies specific to VSIG8 (v-set and immunoglobulin domain containing 8) comprising the amino acid sequences of SEQ ID NOs: 1, 2 and 3 in US patent publication NO.: US2016/0159927; the contents of which are incorporated by reference herein in their entirety. Antagonistic antibodies may also include a chimeric IL2 receptor (CD25) antibody (Basiliximab) (US Patent Publication NO.: 20080171017; the contents of which are incorporated herein by reference in their entirety), and antagonizing antibodies which bind to human TIM-3 (US patent publication NO.: US2015/0218274; the contents of which are incorporated herein by reference in their entirety), BTLA, VISTA and LAG-3 (See, e.g., US patent publication NO.: US2015/0259420; the contents of which are incorporated herein by reference in their entirety).

[0252] In one aspect, the payload of the present disclosure may be an anti-CSF-IR antibody, which is characterized in binding to the dimerization domains D4 to D5 of the extracellular domain of human CSF-IR. This antibody inhibitor can inhibit cell proliferation and survival in CSF-IR ligand-dependent and CSF-1 ligand-independent CSF-IR expressing tumor cells, monocytes and infiltrating macrophages (See, e.g., International Patent Publication NO.: WO2013/132044; the contents of which are incorporated herein by reference in their entirety).

[0253] In another aspect, the payload of the present disclosure may be an antagonistic antibody against CXCL12. The anti-CXCL12 antibody blocks the interaction of CXCL12 with its receptor CXCR4, thereby inhibiting CXCR4 signaling. The CXCR4 signaling inhibitor increases the proximity or the frequency of T-cells among cancer cells in the tumor tissue (See, International Patent Publication NO.: WO 2015/019284; the contents of which are incorporated by reference herein in their entirety).

[0254] In some embodiments, payloads of the present disclosure may be agonistic antibodies, fragments and variants thereof, which trigger immune responses, including antibodies specific to co-stimulatory molecules, including but not limited to 4-1BB (CD137), OX40 (CD134), CD40, GITR and CD27.

[0255] In one embodiment, the payload of the present disclosure may be an agonistic CD40 antibody. In another embodiment, the agonistic antibody specific to 4-1BB (CD137) may be Uremab, a fully human IgG4 monoclonal antibody which specifically binds to and activates 4-1BB (CD137) expressing immune cells, stimulating an immune response, in particular a cytotoxic T cell response, against tumor cells; or Utomilumab, a fully human IgG2 monoclonal antibody; or anti-CD137 antibody described in International Patent Publication NO.: WO2006/088447; the contents of which are incorporated herein by reference in their entirety.

[0256] In some embodiments, the payload of the present disclosure may be an antagonistic antibody against Amphiregulin. Amphiregulin (AREG) is an EGF-like growth factor which binds to the EGFR receptor and enhances T regulatory cell function. AREG is produced in a phenotypically and functionally distinct subtype of CD4⁺ regulatory T cells (Tregs) which have a distinct T cell receptor (TCR) repertoire and express the IL33R. AREG promotes immune suppression in the tumor environment. The anti-Amphiregulin antibody may comprise a heavy chain variable region having the amino acid sequences of SEQ ID NO:: 2, 4, and 12 in U.S. Pat. No. 7,223,393, and/or a light chain variable region having the amino acid sequence of SEQ ID NO:: 3, 5, and 14 in U.S. Pat. No. 7,223,393; the contents of which are incorporated herein by reference in their entirety.

[0257] In some embodiments, antibodies specific to co-inhibitory molecules and co-stimulatory molecules may be secreted scFv antibodies.

[0258] In some embodiments, antibody payloads of the present disclosure may be T-cell bispecific antibodies (e.g. T cell-engaging BiTE™ antibodies CDS-CD 19, CD3-EpCam, and CD3-EGFR). Other bispecific antibodies used for immunotherapy may also be included as payloads of the present disclosure, for example, bispecific anti-TNF-α and anti-IL6 antibody (EP3062818), bispecific antibodies to an immune cell antigen and TAG-72 (WO2016/089610), anti-ovarian and D3 bispecific antibodies in U.S. Pat. No. 7,262,276; bispecific antibodies against CD133 and CD3 in WO2014/128185; bispecific antibodies against CTLA-4 and PD-1 discussed in US2016/0145355, bispecific antibodies against CD3 and CD19 disclosed in WO2015/006749, and U.S. Pat. Nos. 7,635,472; 7,112,324; bispecific antibodies against Her2 and CD3 in US2014/0170149; bispecific antibodies against CD19 and CD16 in US2005/0089519; the contents of each of which are incorporated by reference herein in their entirety.

[0259] In some embodiments, antibodies with decreased affinity may be selected over antibodies with high affinity for the same antigen. Such low affinity antibodies are more effective in discriminating tumors which express high levels of the antigen and normal tissues that express the same antigen at lower levels, while maintaining similar antitumor response.

[0260] In some embodiments, the targeting moieties of the present disclosure may include variable heavy chain and variable light chain comprising the amino acid sequences selected from those in Table 10 of co-owned U.S. Provisional Patent Application No. 62/683,972, filed Jun. 12, 2018, and the International Patent Application No. PCT/US18/37005 filed on Jun. 12, 2018 (the contents of each of which are incorporated by reference in their entirety). Heavy chain amino acid sequences are provided as SEQ ID NO: 539 to SEQ ID NO: 3094; and light chain amino acid sequences are provided as SEQ ID NO: 3095 to SEQ ID NO: 5473.

### Intrabodies

[0261] In some embodiments, payloads of the present disclosure may be intrabodies against players in regulating immune cells. An intrabody is an antibody that is designed to be expressed intracellularly and can be directed to a specific target antigen present in various subcellular locations including the cytosol, nucleus, endoplasmic reticulum (ER), mitochondria, peroxisomes, plasma membrane and trans-Golgi network (TGN) through in frame fusion with intracellular trafficking/localization peptide sequences. The most commonly used format is a single chain antibody (scFv) created by joining the antigen-binding variable domains of heavy and light chain with a linker, most often the 15-amino acid linker (e.g., (GGGGS)₃ (SEQ ID NO: 307)) between the variable heavy (VH) and variable light (VL) chains. The intracellular intrabodies are being developed to bind to, neutralize, or modify the function or localization of cancer-related targets and thereby affect the malignant phenotype.

[0262] Players that modulate immune cells (e.g., T cells) may be any intracellular signaling checkpoint. Exemplary players may include a co-inhibitory ligand, Casitas B-linage lymphoma proto-oncogene-b (Cbl-b) (a E3 ligase), a protein tyrosine phosphatase (PTP) such as Src homology 2 domain-containing protein tyrosine phosphatase 1 (SHP-1), and Ras. For example, an intrabody may be an intrabody against oncogenic form of RAS disclosed in PCT patent publication NO.: WO2004/046186; the contents of which are incorporated by reference in their entirety.

### Therapeutic Antibodies

[0263] In some embodiments, antibody payloads of the present disclosure may be therapeutic antibodies. As non-limiting examples, antibodies and fragments and variants thereof may be specific to tumor associated antigens, or tumor specific antigens, or pathogen antigens. In some aspects, antibodies may be blocking antibodies (also referred to as antagonistic antibodies), for example, blocking antibodies against PD-1, PD-L1, PD-L2, CTLA-4 and other inhibitory molecules. In other aspects, antibodies may be agonist antibodies such as agonistic antibodies specific to stimulatory molecules, e g., 4-1BB (CD137), OX40 (CD134), CD40, GITR and CD27.

[0264] Other exemplary therapeutic antibodies may include, but are not limited to, Abagovomab, Abcxmab, Abituzumab, Abrilumab, Actoxumab, Adalimumab, Adecatumumab, Afasevikumab, Afelimomab, Afutuzumab, Alacizumab, Alemtuzumab, Alirocumab, Altumomab, Amatuximab, Anetumab, Anifrolumab, Apolizumab, Arcitumomab, Ascrinvacumab, Aselizumab, Atezolizumab, Atinumab, Atlizumab, Atorolimumab, Avelumab, Bapineuzumab, Basiliximab, Bavituximab, Bectumomab, Begelomab, Belimumab, Benralizumab, Bertilimumab, Besilesomab, Bevacizumab, Bezlotoxumab, Biciromab, Bimagrumab, Bimekizumab, Bivatuzumab, Bleselumab, Blinatumomab, Blinatumomab, Blosozumab, Bococizumab, Brentuximab, Briaknumab, Brodalumab, Brolucizumab, Brontictuzumab, Cabiralizumab, Canakinumab, Cantuzumab, Caplacizumab, Capromab, Carlumab, Carotuximab, Catumaxomab, cBR96-doxorubicin immunoconjugate, Cedelizumab, Cergutuzumab, Certolizumab pegol, Cetuximab, Citatuzumab, Cixutumumab, Clazakizumab, Clenoliximab, Clivatuzumab, Codrituzumab, Coltuximab, Contatumumab, Concizumab, Crenezumab, Crotedumab, CR6261, Dacetumab, Daclizumab, Dalotuzumab, Dapirolizumab pegol, Daratumumab, Dectrekumab, Demcizumab, Denintuzumab, Denosumab, Derlotuximab biotin, Detumomab, Dinutuximab, Diridavumab, Domagrozumab, Dorlimomab aritox, Drozitumab, Duligotumab, Dupilumab, Durvalumab, Dusigitumab, Ecromeximab, Eculizumab, Edobacomab, Edrecolomab, Efalizumab, Efungumab, Eldelumab, Elgemtumab, Elotuzumab, Elsilimomab, Emactuzumab, Emibetuzumab, Emicizumab, Enavatuzumab, Enfortumab vedotin, Enlimomab pegol, Enoblituzumab, Enokizumab, Enoticumab, Ensituximab, Epitumomab cituxetan, Epratuzumab, Erlizumab, Ertumaxomab, Etaracizumab, Etrolizumab, Evinacumab, Evolocumab, Exbivirumab, Fanolesomab, Faralimomab, Farletuzumab, Fasinumab, FBTA05, Felvizumab, Fezakinumab, Fibatuzumab, Ficlatuzumab, Figitumumab, Firivumab, Flanvotumab, Fletikumab, Fontolizumab, Foralumab, Foravirumab, Fresolimumab, Fulranumab, Futuximab, Galcanezumab, Galiximab, Ganitumab, Gantenerumab, Gavilimomab, Gemtuzumab ozogamicin, Gevokizumab, Girentuximab, Glembatumumab vedotin, Golimumab, Gomiliximab, Guselkumab, Ibalizumab, Ibritumomab tituxetan, icrucumab, Idarucizumab, Igovomab, IMAB362, Imalumab, Imciromab, Imgatuzumab, Inclacumab, Indatuximab, Indusatumab, Inebilizumab, Infliximab, Intetumumab, Inolimomab, Inotuzumab, Ipilimumab, Iratumumab, Isatuximab, Itolizumab, Ixekizumab, Keliximab, Labetuzumab, Lambrolizumab, Lampalizumab, Lanadelumab, Landogrozumab, Laprituximab, Lebrikizumab, Lemalesomab, Lendalizumab, Lenzilumab, Lerdelimumab, Lexatumumab, Libivirumab, Lifastuzumab, Ligelizumab, Lilotomab, Lintuzumab, Lirilumab, Lodelcizumab, Lokivetmab, Lorvotuzumab, Lucatumumab, Lulizumab pegol, Lumiliximab, Lumretuzumab, Mapatumumab, Margetuximab, Maslimomab, Mavrilimumab, Matuzumab, Mepolizumab, Metelimumab, Milatuzumab, Minretumomab, Mirvetuximab, Mitumomab, Mogamulizumab, Monalizumab, Morolimumab, Motavizumab, Moxetumomab pasudotox, Muromonab-CD3, nacolomab tafenatox, Namilumab, naptumomab, naratuximab, Narnatumab, Natalizumab, Navicixizumab, Navivumab, Nebacumab, Necitumumab, Nemolizumab, Nerelimomab, Nesvacumab, Nimotuzumab, Nivolumab, Nofetumomab, Obiltoxaximab, Obinutuzumab, Ocaratuzumab, Ocrelizumab, Odulimomab, Ofatumumab, Olaratumab, Olaratumab, Olokizumab, Omalizumab, Onartuzumab, Ontuxizumab, Opicinumab, Oportuzumab monatox, Oregovomab, Orticumab, Otelixizumab, Otlertuzumab, Oxelumab, Ozanezumab, Ozoralizumab, Pagibaximab, Palivizumab, Pamrevlumab, Panitumumab, Pankomab, Panobacumab, Parsatuzumab, Pascolizumab, Pasotuxizumab, Pateclizumab, Patritumab, Pembrolizumab, Pemtumomab, Perakizumab, Pertuzumab, Pexelizumab, Pidilizumab, Pinatuzumab, Pintumomab, Placulumab, Plozalizumab, Pogalizumab, Polatuzumab, Ponezumab, Prezalizumab, Priliximab, Pritoxaximab, Pritumumab, PRO 140, Quilizumab, Racotumomab, Radretumab, Rafivirumab, Ralpancizumab, Ramucirumab, Ranibizumab, Raxibacumab, Refanezumab, Regavirumab, Reslizumab, Rilotumumab, Rinucumab, Risankizumab, Rituximab, Rivabazumab pegol, Robatumumab, Roledumab, Romosozumab, Rontalizumab, Rovalpituzumab, Rovelizumab, Ruplizumab, Sacituzumab, Samalizumab, Sapelizumab, Sarilumab, Satumomab pendetide, Secukinumab, Seribantumab, Setoxaximab, Sevirumab, Sibrotuzumab, SGN-CD19A, SGN-CD33A, Sifalimumab, Siltuximab, Simtuzumab, Siplizumab, Sirukumab, Sofituzumab vedotin, Solanezumab, Solitomab, Sonepcizumab, Sontuzumab, Stamulumab, Sulesomab, Suvizumab, tabalumab, Tacatuzumab, Tadocizumab, Talizumab, Tamtuvetmab, Tanezumab, Taplitumomab, Tarextumab, Tefibazumab, Telimomab aritox, Tenatumomab, Teneliximab, Teplizumab, Teprotumumab, Tesidolumab, Tetulomab, Tezepelumab, TGN1412, Ticilimumab, Tildrakizumab, Tigatuzumab, Timolumab, Tisotumab vedotin, TNX-650, Tocilizumab, Toralizumab, Tosatoxumab, Tositumomab, Tovetumab, Tralokinumab, Trastuzumab, TRBS07, Tregalizumab, Tremelimumab, Trevogrumab, Tucotuzumab, Tuvirumab, Ublituximab, Ulcocuplumab, Urelumab, Urtoxazumab, Ustekinumab, Vadastuximab Whine, Vandortuzumab vedotin, Vantictumab, Vanucizumab, Vapaliximab, Varlilumab, Vatelizumab, Vedolizumab, Veltuzumab, Vepalimomab, Vesencumab, Visilizumab, Vobarilizumab, Volociximab, Vorsetuzumab, Votumumab, Xentuzumab, Zalutumumab, Zanolimumab, Zatuximab, Ziralimumab and Zolimomab aritox.

Bicistronic and/or Pseudo-Bicistronic Antibody Payloads

[0265] According to the present disclosure, a bicistronic payload is a polynucleotide encoding a two-protein chain antibody on a single polynucleotide strand. A pseudo bicistronic payload is a polynucleotide encoding a single chain antibody discontinuously on a single polynucleotide strand. For bicistronic payloads, the encoded two strands or two portions/regions and/or domains (as is the case with pseudo-bicistronic) are separated by at least one nucleotide not encoding the strands or domains More often the separation comprises a cleavage signal or site or a non-coding region of nucleotides. Such cleavage sites include, for example, furin cleavage sites encoded as an “RKR” site, or a modified furin cleavage site in the resultant polypeptide or any of those taught herein.

[0266] According to the present disclosure, a single domain payload comprises one or two polynucleotides encoding a single monomeric variable antibody domain Typically, single domain antibodies comprise one variable domain (VH) of a heavy-chain antibody.

[0267] According to the present disclosure, a single chain Fv payloads is a polynucleotide encoding at least two coding regions and a linker region. The scFv payload may encode a fusion protein of the variable regions of the heavy (VH) and light chains (VL) of immunoglobulins, connected with a short linker peptide of ten to about 25 amino acids. The linker is usually rich in glycine for flexibility, as well as serine or threonine for solubility, and can either connect the N-terminus of the VH with the C-terminus of the VL, or vice versa. Other linkers include those known in the art and disclosed herein.

[0268] According to the present disclosure, a bispecific payload is a polynucleotide encoding portions or regions of two different antibodies. Bispecific payloads encode polypeptides which may bind two different antigens. Polynucleotides of the present disclosure may also encode trispecific antibodies having an affinity for three antigens.

### 3. Tumor and Pathogen Specific Antigens

[0269] In some embodiments, payloads of the present disclosure may be tumor specific antigens (TSAs), tumor associated antigens (TAAs), pathogen associated antigens, or fragments thereof. The antigen can be expressed as a peptide or as an intact protein or portion thereof. The intact protein or a portion thereof can be native or mutagenized. Antigens associated with cancers or virus-induced cancers as described herein are well-known in the art. Such a TSA or TAA may be previously associated with a cancer or may be identified by any method known in the art.

[0270] A tumor specific antigen (TSA) may be a tumor neoantigen. A neoantigen is a mutated antigen that is only expressed by tumor cells because of genetic mutations or alterations in transcription which alter protein coding sequences, therefore creating novel, foreign antigens. The genetic changes result from genetic substitution, insertion, deletion or any other genetic changes of a native cognate protein (i.e. a molecule that is expressed in normal cells).

[0271] As non-limiting examples, neoantigens may include mutated new peptides derived from alpha-actinin-4, ARTC1, BCR-ABL fusion protein (b3a2), B-RAF, CASP-5, CASP-8, beta-catenin, Cdc27, CDK4, CDKN2A, CLPP, CML-66, COA-1, connexin 37, dek-can fusion protein, EFTUD2, Elongation factor 2, ETV6-AML1 fusion protein, fibronectin, FLT3-ITD, FN1, GPNM8, LDLR-fucosyltransferase AS fusion protein, HLA-A2, HLA-A11, Hsp-70-1B, MART-2, ME1, MUM-1, MUM-2, MUM-3, Myosin class I, NFYC, neo-PAP, OGT, OS-9, p53, pml-RARalpha fusion protein, PRDX5, PTPRK, K-Ras, N-Ras, RBAF600, sirtuin-2, SNRPD1, SYT-SSX1/SSX2 fusion protein, TGF-beta receptor II, etc. Additional neoantigen peptides may include SF3B1 peptides, MYD peptides, TP53 peptides, Abl peptides, FBXW7 peptides, MAPK peptides, and GNB1 peptides disclosed in US patent publication NO.: 20110293637; the contents of which are incorporated herein by reference in their entirety.

[0272] New neoantigens identified through large-scale sequencing and algorithm calculation may also be included. See, e.g., International Patent Publication NO.: WO2014/168874; Nishimura et al., Cancer Sci. 2015, 106(5): 505-511; and Linnemann et al., Nat. Med., 2015, 21(1): 81-85; the contents of each of which are incorporated herein by reference in their entirety.

[0273] A tumor associated antigen (TAA) may be an overexpressed or accumulated antigen that is expressed by both normal and neoplastic tissue, with the level of expression highly elevated in cancer tissues. Numerous proteins (e.g. oncogenes) are up-regulated in tumor tissues, including but not limited to adipophilin, AIM-2, ALDH1A1, BCLX(L), BING-4, CALCA, CD45, CD274, CPSF, cyclin D1, DKK1, ENAH, epCAM, ephA3, EZH2, FGF5, 0250, HER-2/neu, HLA-DOB, Hepsin, ID01, IGFB3, IL13Ralpha2, Intestinal carboxyl esterase, kallikrein 4, KIF20A, lengsin, M-CSF, MCSP, mdm-2, Meloe, Midkine, MMP-2, MMP-7, MUC-1, MUC5AC, p53, Pax5, PBF, PRAME, PSMA, RAGE-1, RGS5, RhoC, RNF43, RU2A5, SECERNIN 1, SOX10, STEAP1, survivin, Telomerase, TPBG, VEGF, and WT1.

[0274] A TAA may be an oncofetal antigen that is typically only expressed at different stages during the development of the fetus and in cancerous somatic cells. Many proteins are normally expressed during fetal development but are transcriptionally repressed after birth or at early stage of infancy, therefore are not present, or are expressed in significantly lower levels in the corresponding normal adult tissue. Some of these developmental proteins are re-expressed in certain tumor cells and become oncofetal antigens. Examples of oncofetal antigens may include, but are not limited to CEA (carcinoembryonic antigen) in colorectal carcinoma, iLRP/OFA (immature laminin receptor protein/oncofetal antigen) in renal cell carcinoma (RCC), TAG-72 (tumor associated glycoprotein-72) in prostate carcinoma, AFP (alpha-fetoprotein) in hepatocellular carcinoma (HCC), ROR1 (a receptor tyrosine kinase) in many malignant cells such as brain tumors, sperm protein 17, HMGA2 (high mobility group A2) in ovarian carcinoma, oncofetal H19, CR-1 (Cripto-1, a member of epidermal growth factor (EGF)-CFC family), trophoblast glycoprotein precursor and GPC-3 (Glypican-3, a member of heparan sulphate proteoglycans) in HCC.

[0275] A TAA may be a cancer-testis antigen that is expressed only by cancer cells and adult reproductive tissues such as testis and placenta, including, but limited to antigens from BAGE family, CAGE family, HAGE family, GAGE family, MAGE family (e.g., MAGE-A1, MAGE-A2, MAGE-A3, MAGE-A6 and MAGE-A13), SAGE family, XAGE family, MCAK, NA88-A (cancer/testis antigen 88), PSAD1, SSX-2, and SLLP-1.

[0276] A TAA may be a lineage restricted antigen that is expressed largely by a single cancer histotype, such as Melan-A/MART-1, Gp100/pmel17, Tyrosinase, TRP-1/-2, P. polypeptide, MC1R in melanoma; and prostate specific antigen (PSA) in prostate cancer.

[0277] A TAA may be an oncoviral antigen that is encoded by tumorigenic transforming viruses (also called oncogenic viruses). Oncogenic viruses, when they infect host cells, can insert their own DNA (or RNA) into that of the host cells. When the viral DNA or RNA affects the host cell's genes, it can push the cell toward becoming cancer. Oncogenic viruses include, but are not limited to, RNA viruses, and DNA viruses. Some examples of commonly known oncoviruses include human papilloma viruses (HPVs) which are main causes of cervical cancer, Epstein-Barr virus (EBV) which may cause nasopharyngeal cancer, certain types of fast-growing lymphomas (e.g., Burkitt lymphoma) and stomach cancer, hepatitis B, C and D viruses (HBV, HCV and HDV) in hepatocellular carcinoma (HCC), human immunodeficiency virus (HIV) which increases the risk of getting many types of cancer (e.g., liver cancer, anal cancer and Hodgkin cancer), Kaposi sarcoma herpes virus (KSHV; also known as human herpes virus 8 (HHV8)) which is linked to lymphoma, human T-lymphotropic virus (HTLV-1) and Merkle cell polyomavirus (MCV). A viral antigen can be any defined antigen of a virus that is associated with a cancer in a human. For example, antigens from EBV may include but are not limited to, Epstein-Barr nuclear antigen-1 (EBNA1), latent membrane protein 1 (LMP1), or latent membrane protein 2 (LMP2).

[0278] A TAA may be an idiotypic antigen that is generated from highly polymorphic genes where a tumor cell expresses a specific “clonotype”, i.e., as in B cell, T cell lymphoma/leukemia resulting from clonal aberrancies, such as Immunoglobulin and T cell receptors (TCRs). Idiotypic antigens are a class of non-pathogen-associated neoantigens. For example, the malignant B cells express rearranged and multiply mutated surface immunoglobulins (Ig). Tumor specific idiotypes (e.g., immunoglobulin idiotypes) are regarded as particularly attractive tumor-specific antigens that can be successfully targeted by immunotherapy (e.g., Alejandro et al., Front Oncol., 2012, 2: 159).

### 4. T Cell Receptors (TCRs)

[0279] In some embodiments, payloads of the present disclosure may be T cell receptors (TCRs). The TCR may be specific to a cancer antigen, having a specific α chain and β chain which together form a TCRαβ heterodimer, or having a specific γ chain and δ chain which together form a TCRγδ heterodimer. The TCR may be a recombinant antigen specific T cell receptor.

[0280] The variable regions of α chain and β chain determine T cell specificity to an antigenic peptide presented by the major histocompatibility complex (MHC) class I and II molecules. The TCR recognition of the tumor antigen on the surface of a tumor cell presented by MHC molecules by TCR triggers T cell activation. The use of TCR gene therapy can equip a subject's own T cells with desired specificities and generate sufficient numbers of T cells to eradicate tumor cells. In some embodiments, a biocircuit or an effector module comprising a tumor specific TCR may be transduced into T cells and TCR-engineered T cells will be infused into cancer patients who have lymphocytopenia or lymphopenia by chemotherapy or irradiation, allowing efficient engraftment but inhibiting immune suppression.

[0281] Sequences encoding tumor antigen recognizing TCR chains can be obtained from tumor-reactive T cells (e.g., tumor-infiltrating lymphocytes isolated from the tumor of a patient).

[0282] According to the present disclosure, a TCR specific to tumor cells can be produced by methods described in International Patent Publication NO.: WO2014/083173; the contents of which are incorporated herein by reference in their entirety. A host organism expressing a transgene of a human leucocyte antigen (HLA) type which is known or suspected to be able to present a mutated tumor specific antigen (TSA) is transduced to express the un-rearranged human TCR loci. Preferably these loci encode TCR α and β chains, and preferably comprise a plurality, ideally all, of human TCR V, D, J, and/or C genes. The host organism is immunized with a cancer specific TSA or a peptide epitope derived from the TSA and T cells expressing rearranged TCRs specifically against the TSA are isolated and cloned. The TCR from the cloned T cells are sequenced (International Patent Publication NO.: WO2014/083173; the contents of which are incorporated herein by reference in their entirety).

[0283] In some embodiments, payloads of the present disclosure may be TCRs that specifically recognize TSAs, TAAs, or epitopes thereof, complexed with MHC molecules.

[0284] Exemplary tumor antigens that can be recognized by a TCR may include at least the following: 5T4, 707-AP, A33, AFP (α-fetoprotein), AKAP-4 (A kinase anchor protein 4), ALK, α5β1-integrin, androgen receptor, annexin II, alpha-actinin-4, ART-4, B1, B7H3, B7H4, BAGE (B melanoma antigen), BCMA, BCR-ABL fusion protein, beta-catenin, BKT-antigen, BTAA, CA-I (carbonic anhydrase I), CA50 (cancer antigen 50), CA125, CA15-3, CA195, CA242, calretinin, CAIX (carbonic anhydrase), CAMEL (cytotoxic T-lymphocyte recognized antigen on melanoma), CAM43, CAP-1, Caspase-8/m, CD4, CD5, CD7, CD19, CD20, CD22, CD23, CD25, CD27/m, CD28, CD30, CD33, CD34, CD36, CD38, CD40/CD154, CD41, CD44v6, CD44v7/8, CD45, CD49f, CD56, CD68\KP1, CD74, CD79a/CD79b, CD103, CD123, CD133, CD138, CD171, cdc27/m, CDK4 (cyclin dependent kinase 4), CDKN2A, CDS, CEA (carcinoembryonic antigen), CEACAM5, CEACAM6, chromogranin, c-Met, c-Myc, coa-1, CSAp, CT7, CT10, cyclophilin B, cyclin B1, cytoplasmic tyrosine kinases, cytokeratin, DAM-10, DAM-6, dek-can fusion protein, desmin, DEPDC1 (DEP domain containing 1), E2A-PRL, EBNA, EGF-R (epidermal growth factor receptor), EGP-1 (epithelial glycoprotein-1) (TROP-2), EGP-2, EGP-40, EGFR (epidermal growth factor receptor), EGFRvIII, EF-2, ELF2M, EMMPRIN, EpCAM (epithelial cell adhesion molecule), EphA2, Epstein Barr virus antigens, Erb (ErbB1; ErbB3; ErbB4), ETA (epithelial tumor antigen), ETV6-AML1 fusion protein, FAP (fibroblast activation protein), FBP (folate-binding protein), FGF-5, folate receptor α, FOS related antigen 1, fucosyl GM1, G250, GAGE (GAGE-1; GAGE-2), galactin, GD2 (ganglioside), GD3, GFAP (glial fibrillary acidic protein), GM2 (oncofetal antigen-immunogenic-1; OFA-I-1), GnT-V, Gp100, H4-RET, HAGE (helicase antigen), HER-2/neu, HIFs (hypoxia inducible factors), HIF-1α, HIF-2α, HLA-A2, HLA-A*0201-R170I, HLA-A11, HMWMAA, Hom/Mel-40, HSP70-2M (Heat shock protein 70), HST-2, HTgp-175, hTERT (or hTRT), human papillomavirus-E6/human papillomavirus-E7 and E6, iCE (immune-capture EIA), IGF-1R, IGH-IGK, IL2R, IL5, ILK (integrin-linked kinase), IMP3 (insulin-like growth factor II mRNA-binding protein 3), IRF4 (interferon regulatory factor 4), KDR (kinase insert domain receptor), KIAA0205, KRAB-zinc finger protein (KID)-3; KID31, KSA (17-1A), K-ras, LAGE, LCK, LDLR/FUT (LDLR-fucosyltransferaseAS fusion protein), LeY (Lewis Y), MAD-CT-1, MAGE (tyrosinase, melanoma-associated antigen) (MAGE-1; MAGE-3), melan-A tumor antigen (MART), MART-2/Ski, MC1R (melanocortin 1 receptor), MDM2, mesothelin, MPHOSPH1, MSA (muscle-specific actin), mTOR (mammalian targets of rapamycin), MUC-1, MUC-2, MUM-1 (melanoma associated antigen (mutated) 1), MUM-2, MUM-3, Myosin/m, MYL-RAR, NA88-A, N-acetylglucosaminyltransferase, neo-PAP, NF-KB (nuclear factor-kappa B), neurofilament, NSE (neuron-specific enolase), Notch receptors, NuMa, N-Ras, NY-BR-1, NY-CO-1, NY-ESO-1, Oncostatin M, OS-9, OY-TES1, p53 mutants, p190 minor bcr-abl, p15(58), p185erbB2, p180erbB-3, PAGE (prostate associated gene), PAP (prostatic acid phosphatase), PAX3, PAX5, PDGFR (platelet derived growth factor receptor), cytochrome P450 involved in piperidine and pyrrolidine utilization (PIPA), Pml-RAR alpha fusion protein, PR-3 (proteinase 3), PSA (prostate specific antigen), PSM, PSMA (Prostate stem cell antigen), PRAMS (preferentially expressed antigen of melanoma), PTPRK, RAGE (renal tumor antigen), Raf (A-Raf, B-Raf and C-Raf), Ras, receptor tyrosine kinases, RCAS1, RGSS, ROR1 (receptor tyrosine kinase-like orphan receptor 1), RU1, RU2, SAGE, SART-1, SART-3, SCP-1, SDCCAG16, SP-17 (sperm protein 17), src-family, SSX (synovial sarcoma X breakpoint)-1, SSX-2 (HOM-MEL-40), SSX-3, SSX-4, SSX-5, STAT-3, STAT-5, STAT-6, STEAD, STn, survivin, syk-ZAP70, TA-90 (Mac-2 binding protein\cyclophilin C-associated protein), TAAL6, TACSTD1 (tumor associated calcium signal transducer 1), TACSTD2, TAG-72-4, TAGE, TARP (T cell receptor gamma alternate reading frame protein), TEL/AML1 fusion protein, TEM1, TEM8 (endosialin or CD248), TGFβ, TIE2, TLP, TMPRSS2 ETS fusion gene, TNF-receptor (TNF-α receptor, TNF-β receptor; or TNF-γ receptor), transferrin receptor, TPS, TRP-1 (tyrosine related protein 1), TRP-2, TRP-2/INT2, TSP-180, VEGF receptor, WNT, WT-1 (Wilm's tumor antigen) and XAGE.

[0285] In one aspect, the payload of the present disclosure may be a TCR specifically recognizing Her2/neu epitope which has nucleic acid sequences of α chain and β chain disclosed in U.S. Patent Publication NO.: US20110280894 and International Patent Publication NO. WO2016133779A1; the contents of each of which are incorporated herein by reference in their entirety. In another aspect, the payload of the present disclosure may be a TCR specific to TSA tyrosinase (See U.S. Pat. No. 8,697,854; the contents of which are incorporated herein by reference in their entirety).

[0286] In other aspects, payloads of the present disclosure may be TCRs having polypeptide sequences specific to synovial sarcoma X Breakpoint (SSX)-2 antigen (U.S. Pat. No. 9,345,748); human papillomavirus (HPV) 16 E6 antigen (International Patent Publication NO.: WO2015/009606); cytomegalovirus (CMV) phosphoprotein pp65 (U.S. Pat. No. 8,722,048); and WT-1 specific TCR comprising a TCR α-chain having an amino acid sequence as set forth in any one of SEQ ID NOs.: 5-8, and comprising a TCR β-chain having an amino acid sequence as set forth in SEQ ID NO:: 12 or 13, as disclosed in US patent publication NO.: US2016/0083449; the contents of each of which are incorporated herein by reference in their entirety.

[0287] In some embodiments, the TCR specific to a TSA may be modified to possess a sequence encoding an affinity weakening motif which imparts a reduction in non-specific binding to a TSA. In some embodiments, an affinity weakening motif having a modification to a TCR CDR1 or CDR2 region may be used to weaken the interaction between TCR and HLA proteins (see, International Patent Publication NO.: WO2016/014725; the contents of which are incorporated herein by reference in their entirety).

[0288] In some embodiments, the TCR specific to a TSA may be modified to possess an affinity enhancing motif which imparts an enhancement of binding specificity and affinity for a target antigen. In some embodiments, such high affinity TCRs may be generated by using TCR α-chain to select de novo generated TCR β-chains that pair with an antigen specific TCR α-chain during T cell development in vitro to form enhanced TCRs (see, International Patent Publication NO.: WO2013/166321; the contents of which are incorporated herein by reference in their entirety). In other embodiments, the modified TCR may also possess a sequence encoding an affinity enhancing modification CDR3 region which strengthens the interaction between the TCR and the TSA.

[0289] In one embodiment, the TCR specific to a TSA may be modified using zinc finger nucleases (ZFNs), TALENs or a CRISPR/Cas system. The TCR α chain and β chain may contain target sites of a nuclease. The nuclease can cleave the TCR sequence causing a certain degree of disruption of the TCR (see US Patent Publication NO.: US2014/0301990; the contents of which are incorporated herein by reference in their entirety).

[0290] In one embodiment, the TCR specific to a TSA may be a soluble single-chain TCR having the structure: Vα2-L-Vβ or Vβ-L-Vα2, wherein L is a linker peptide that links a TCR variable β region (Vβ) with a TCR variable a region of the family 2 (Vα2), as discussed in International Patent Publication NO.: WO2011/044186; the contents of which are incorporated herein by reference in their entirety.

[0291] In one embodiment, the TCR specific to a TSA may be maturated to increase its affinity to the TSA according to methods described in US Patent Publication NO.: US2014/0065111; the contents of which are incorporated here in by reference in their entirety.

[0292] In some embodiments, the TCRs may be specific to the Fc domain of an antibody (e.g. FcgRla) and utilized to enhance efficacy of antibody mediated therapy, as discussed in International Patent Publication NO.: WO2015/179833; the contents of which are incorporated herein by reference in their entirety.

[0293] In some embodiments, payloads of the present disclosure may be recombinant constructs which act as trifunctional T-cell signaling couplers (TriTACs) mimicking the naturally signaling through T cell receptors. The TriTACs enhance chimeric receptor activity while retaining MHC unrestricted targeting. In some aspects, the recombinant construct may comprise a target specific binding ligand such as a scFV specific to a TSA or a designed ankyrin repeat (DARPin), a ligand that binds a protein associated with the TCR complex and a TCR signaling domain polypeptide, e.g. as described in the International Patent Application NO.: WO2015/117229; the contents of which are incorporated herein by reference in their entirety. The TCR associated proteins may be selected from CD3, ZAP70 9zeta-chain associated protein kinase 70), TYN and CD247. In some aspects, the ligand of a TriTAC that binds the TCR associated protein may be an antibody or an antibody fragment (e.g., scFv). In other aspects, the TCR signaling domain polypeptide of a TriTAC may comprise the transmembrane and cytoplasmic domain of CD4.

[0294] According to the present disclosure, the α chain and β chain of the TCR of the present disclosure may be included in separate constructs, for example as payloads of two effector modules. In other embodiments, the α chain and β chain of the TCR of the present disclosure may be included in a single effector module as two payloads of the same effector module, for example as illustrated in FIGS. 3-6.

### 5. Chimeric Antigen Receptors (CARs)

[0295] In some embodiments, payloads of the present disclosure may be a chimeric antigen receptors (CARs) which when transduced into immune cells (e.g., T cells and NK cells), can re-direct the immune cells against the target (e.g., a tumor cell) which expresses a molecule recognized by the extracellular target moiety of the CAR.

[0296] As used herein, the term “chimeric antigen receptor (CAR)” refers to a synthetic receptor that mimics TCR on the surface of T cells. In general, a CAR is composed of an extracellular targeting domain, a transmembrane domain/region and an intracellular signaling/activation domain. In a standard CAR receptor, the components: the extracellular targeting domain, transmembrane domain and intracellular signaling/activation domain, are linearly constructed as a single fusion protein. The extracellular region comprises a targeting domain/moiety (e.g., a scFv) that recognizes a specific tumor antigen or other tumor cell-surface molecules. The intracellular region may contain a signaling domain of TCR complex (e.g., the signal region of CD3ζ) and/or one or more costimulatory signaling domains, such as those from CD28, 4-1BB (CD137) and OX-40 (CD134). For example, a “first-generation CAR” only has the CD3ζ signaling domain, whereas in an effort to augment T-cell persistence and proliferation, costimulatory intracellular domains are added, giving rise to second generation CARs having a CD3ζ signal domain plus one costimulatory signaling domain, and third generation CARs having CD3ζ signal domain plus two or more costimulatory signaling domains A CAR, when expressed by a T cell, endows the T cell with antigen specificity determined by the extracellular targeting moiety of the CAR. Recently, it is also desirable to add one or more elements such as homing and suicide genes to develop a more competent and safer architecture of CAR, so called the fourth-generation CAR.

[0297] Cells such as T cells engineered to express a CAR can be redirected to attack target cells that express a molecule which can be recognized by the targeting moiety of the CAR.

[0298] In some embodiments, the extracellular targeting domain is joined through the hinge (also called space domain or spacer) and transmembrane regions to an intracellular signaling domain. The hinge connects the extracellular targeting domain to the transmembrane domain which transverses the cell membrane and connects to the intracellular signaling domain. The hinge may need to be varied to optimize the potency of CAR transformed cells toward cancer cells due to the size of the target protein where the targeting moiety binds, and the size and affinity of the targeting domain itself. Upon recognition and binding of the targeting moiety to the target cell, the intracellular signaling domain leads to an activation signal to the CAR T cell, which is further amplified by the “second signal” from one or more intracellular costimulatory domains The CAR T cell, once activated, can destroy the target cell.

[0299] In some embodiments, the CAR of the present disclosure may be split into two parts, each part is linked a dimerizing domain, such that an input that triggers the dimerization promotes assembly of the intact functional receptor. Wu and Lim recently reported a split CAR in which the extracellular CD19 binding domain and the intracellular signaling element are separated and linked to the FKBP domain and the FRB* (T2089L mutant of FKBP-rapamycin binding) domain that heterodimerize in the presence of the rapamycin analog AP21967. The split receptor is assembled in the presence of AP21967 and together with the specific antigen binding, activates T cells (Wu et al., Science, 2015, 625(6258): aab4077).

[0300] In some embodiments, the CAR of the present disclosure may be designed as an inducible CAR.

[0301] Sakemura et al recently reported the incorporation of a Tet-On inducible system to the CD19 CAR construct. The CD19 CAR is activated only in the presence of doxycycline (Dox). Sakemura reported that Tet-CD19CAR T cells in the presence of Dox were equivalently cytotoxic against CD19⁺ cell lines and had equivalent cytokine production and proliferation upon CD19 stimulation, compared with conventional CD19CAR T cells (Sakemura et al., Cancer Immuno. Res., 2016, Jun. 21, Epub ahead of print). In one example, this Tet-CAR may be the payload of the effector module under the control of SREs (e.g., DDs) of the disclosure. The dual systems provide more flexibility to turn-on and off the CAR expression in transduced T cells.

[0302] According to the present disclosure, the payload of the present disclosure may be a first-generation CAR, or a second-generation CAR, or a third-generation CAR, or a fourth-generation CAR. Representative effector module embodiments comprising CAR constructs are illustrated in FIGS. 13-18. In some embodiments, the payload of the present disclosure may be a full CAR construct composed of the extracellular domain, the hinge and transmembrane domain and the intracellular signaling region. In other embodiments, the payload of the present disclosure may be a component of the full CAR construct including an extracellular targeting moiety, a hinge region, a transmembrane domain, an intracellular signaling domain, one or more co-stimulatory domain, and other additional elements that improve CAR architecture and functionality including but not limited to a leader sequence, a homing element and a safety switch, or the combination of such components.

[0303] CARs regulated by biocircuits and compositions of the present disclosure are tunable and thereby offer several advantages. The reversible on-off switch mechanism allows management of acute toxicity caused by excessive CAR-T cell expansion. Pulsatile CAR expression using SREs of the present disclosure may be achieved by cycling ligand level. The ligand conferred regulation of the CAR may be effective in offsetting tumor escape induced by antigen loss, avoiding functional exhaustion caused by tonic signaling due to chronic antigen exposure and improving the persistence of CAR expressing cells in vivo.

[0304] In some embodiments, biocircuits and compositions of the disclosure may be utilized to down regulate CAR expression to limit on target on tissue toxicity caused by tumor lysis syndrome. Down regulating the expression of the CARs of the present disclosure following anti-tumor efficacy may prevent (1) On target off tumor toxicity caused by antigen expression in normal tissue. (2) antigen independent activation in vivo.

[0305] In some embodiments, the payload may be a cytokine-based CAR, wherein the antigen binding domain of the CAR is substituted by a cytokine which may bind to its cognate receptor. In one embodiment, the payload is humanized interleukin-13 receptor α2 (IL-13Rα2) chimeric antigen receptors (CARs), Hu07BBz and Hu08BBz, that recognized human IL-13Rα2, but not IL-13Rα1. The efficacy of such CAR may further be improved by PD-1 and TIM-3 blockade. Any of the CARs described in Yin et al. Mol Ther Oncolytics. 2018 Aug. 28; 11:20-38. may be useful in the present disclosure (the contents of which are incorporated by reference in their entirety).

[0306] In some embodiments, the CD19 CAR tertiary structure may be modified to improve safety profile of CD19 CART cell therapy using tertiary-structure-prediction program (Phrye2) (Kelley et al. 2009. Nat. Protoc. 4, 363-371. CAR with improved safety profile may include but are not limited to those with reduced ability to produce cytokines. In some embodiments, the CARs with improved safety profile may include the CD19-BBz CAR variant contains an 86-amino-acid fragment from human CD8α, comprising a longer extracellular-domain fragment (55 amino acids versus 45 amino acids in the CD19-BBz (prototype) and a longer intracellular sequence (7 amino acids versus 3 amino acids in CD19-BBz (prototype/Kyrmirah™)) as described by Ying et al. 2019 Nat Med. doi: 10.1038/s41591-019-0421-7 (the contents of which are herein incorporated by reference in their entirety). In another aspect, the payloads of the present disclosure may be the CD19-BBz (86) variant CAR co-expressed with truncated, nonfunctional epidermal growth factor receptor (tEGFR) as described by Ying et al. 2019.

### Extracellular Targeting Domain/Moiety

[0307] In accordance with the disclosure, the extracellular target moiety of a CAR may be any agent that recognizes and binds to a given target molecule, for example, a neoantigen on tumor cells, with high specificity and affinity. The target moiety may be an antibody and variants thereof that specifically binds to a target molecule on tumor cells, or a peptide aptamer selected from a random sequence pool based on its ability to bind to the target molecule on tumor cells, or a variant or fragment thereof that can bind to the target molecule on tumor cells, or an antigen recognition domain from native T-cell receptor (TCR) (e.g. CD4 extracellular domain to recognize HIV infected cells), or exotic recognition components such as a linked cytokine that leads to recognition of target cells bearing the cytokine receptor, or a natural ligand of a receptor.

[0308] In some embodiments, the targeting domain of a CAR may be a Ig NAR, a Fab fragment, a Fab′ fragment, a F(ab)′2 fragment, a F(ab)′3 fragment, Fv, a single chain variable fragment (scFv), a bis-scFv, a (scFv)2, a minibody, a diabody, a tribody, a tetrabody, a disulfide stabilized Fv protein (dsFv), a unibody, a nanobody, or an antigen binding region derived from an antibody that specifically recognizes a target molecule, for example a tumor specific antigen (TSA). In one embodiment, the targeting moiety is a scFv antibody. The scFv domain, when it is expressed on the surface of a CAR T cell and subsequently binds to a target protein on a cancer cell, is able to maintain the CAR T cell in proximity to the cancer cell and to trigger the activation of the T cell. A scFv can be generated using routine recombinant DNA technology techniques and is discussed in the present disclosure.

[0309] In one embodiment, the targeting moiety of a CAR construct may be an aptamer such as a peptide aptamer that specifically binds to a target molecule of interest. The peptide aptamer may be selected from a random sequence pool based on its ability to bind to the target molecule of interest.

[0310] In some embodiments, the targeting moiety of a CAR construct may be a natural ligand of the target molecule, or a variant and/or fragment thereof capable of binding the target molecule. In some aspects, the targeting moiety of a CAR may be a receptor of the target molecule, for example, a full-length human CD27, as a CD70 receptor, may be fused in frame to the signaling domain of CD3 ζ, forming a CD27 chimeric receptor as an immunotherapeutic agent for CD70-positive malignancies (See, e.g., US patent publication NO.: US20130323214; the contents of which are incorporated by reference herein in their entirety).

[0311] In some embodiments, the targeting moiety of a CAR may recognize a tumor specific antigen (TSA), for example a cancer neoantigen which is restrictedly expressed on tumor cells.

[0312] As non-limiting examples, the CAR of the present disclosure may comprise the extracellular targeting domain capable of binding to a tumor specific antigen selected from 5T4, 707-AP, A33, AFP (α-fetoprotein), AKAP-4 (A kinase anchor protein 4), ALK, α5β1-integrin, androgen receptor, annexin II, alpha-actinin-4, ART-4, B1, B7H3, B7H4, BAGE (B melanoma antigen), BCMA, BCR-ABL fusion protein, beta-catenin, BKT-antigen, BTAA, CA-I (carbonic anhydrase I), CA50 (cancer antigen 50), CA125, CA15-3, CA195, CA242, calretinin, CAIX (carbonic anhydrase), CAMEL (cytotoxic T-lymphocyte recognized antigen on melanoma), CAM43, CAP-1, Caspase-8/m, CD4, CD5, CD7, CD19, CD20, CD22, CD23, CD25, CD27/m, CD28, CD30, CD33, CD34, CD36, CD38, CD40/CD154, CD41, CD44v6, CD44v7/8, CD45, CD49f, CD56, CD68\KP1, CD74, CD79a/CD79b, CD103, CD123, CD133, CD138, CD171, cdc27/m, CDK4 (cyclin dependent kinase 4), CDKN2A, CDS, CEA (carcinoembryonic antigen), CEACAM5, CEACAM6, chromogranin, c-Met, c-Myc, coa-1, CSAp, CT7, CT10, cyclophilin B, cyclin B1, cytoplasmic tyrosine kinases, cytokeratin, DAM-10, DAM-6, dek-can fusion protein, desmin, DEPDC1 (DEP domain containing 1), E2A-PRL, EBNA, EGF-R (epidermal growth factor receptor), EGP-1 (epithelial glycoprotein-1) (TROP-2), EGP-2, EGP-40, EGFR (epidermal growth factor receptor), EGFRvIII, EF-2, ELF2M, EMMPRIN, EpCAM (epithelial cell adhesion molecule), EphA2, Epstein Barr virus antigens, Erb (ErbB1; ErbB3; ErbB4), ETA (epithelial tumor antigen), ETV6-AML1 fusion protein, FAP (fibroblast activation protein), FBP (folate-binding protein), FGF-5, folate receptor α, FOS related antigen 1, fucosyl GM1, 0250, GAGE (GAGE-1; GAGE-2), galactin, GD2 (ganglioside), GD3, GFAP (glial fibrillary acidic protein), GM2 (oncofetal antigen-immunogenic-1; OFA-I-1), GnT-V, Gp100, H4-RET, HAGE (helicase antigen), HER-2/neu, HIFs (hypoxia inducible factors), HIF-1α, HIF-2α, HLA-A2, HLA-A*0201-R170I, HLA-A11, HMWMAA, Hom/Mel-40, HSP70-2M (Heat shock protein 70), HST-2, HTgp-175, hTERT (or hTRT), human papillomavirus-E6/human papillomavirus-E7 and E6, iCE (immune-capture EIA), IGF-1R, IGH-IGK, IL2R, ILS, ILK (integrin-linked kinase), IMP3 (insulin-like growth factor II mRNA-binding protein 3), IRF4 (interferon regulatory factor 4), KDR (kinase insert domain receptor), KIAA0205, KRAB-zinc finger protein (KID)-3; KID31, KSA (17-1A), K-ras, LAGE, LCK, LDLR/FUT (LDLR-fucosyltransferaseAS fusion protein), LeY (Lewis Y), MAD-CT-1, MAGE (tyrosinase, melanoma-associated antigen) (MAGE-1; MAGE-3), melan-A tumor antigen (MART), MART-2/Ski, MC1R (melanocortin 1 receptor), MDM2, mesothelin, MPHOSPH1, MSA (muscle-specific actin), mTOR (mammalian targets of rapamycin), MUC-1, MUC-2, MUM-1 (melanoma associated antigen (mutated) 1), MUM-2, MUM-3, Myosin/m, MYL-RAR, NA88-A, N-acetylglucosaminyltransferase, neo-PAP, NF-KB (nuclear factor-kappa B), neurofilament, NSE (neuron-specific enolase), Notch receptors, NuMa, N-Ras, NY-BR-1, NY-CO-1, NY-ESO-1, Oncostatin M, OS-9, OY-TES1, p53 mutants, p190 minor bcr-abl, p15(58), p185erbB2, p180erbB-3, PAGE (prostate associated gene), PAP (prostatic acid phosphatase), PAX3, PAX5, PDGFR (platelet derived growth factor receptor), cytochrome P450 involved in piperidine and pyrrolidine utilization (PIPA), Pml-RAR alpha fusion protein, PR-3 (proteinase 3), PSA (prostate specific antigen), PSM, PSMA (Prostate stem cell antigen), PRAME (preferentially expressed antigen of melanoma), PTPRK, RAGE (renal tumor antigen), Raf (A-Raf, B-Raf and C-Raf), Ras, receptor tyrosine kinases, RCAS1, RGSS, ROR1 (receptor tyrosine kinase-like orphan receptor 1), RU1, RU2, SAGE, SART-1, SART-3, SCP-1, SDCCAG16, SP-17 (sperm protein 17), src-family, SSX (synovial sarcoma X breakpoint)-1, SSX-2 (HOM-MEL-40), SSX-3, SSX-4, SSX-5, STAT-3, STAT-5, STAT-6, STEAD, STn, survivin, syk-ZAP70, TA-90 (Mac-2 binding protein\cyclophilin C-associated protein), TAAL6, TACSTD1 (tumor associated calcium signal transducer 1), TACSTD2, TAG-72-4, TAGE, TARP (T cell receptor gamma alternate reading frame protein), TEL/AML1 fusion protein, TEM1, TEM8 (endosialin or CD248), TGFβ, TIE2, TLP, TMPRSS2 ETS fusion gene, TNF-receptor (TNF-α receptor, TNF-β receptor; or TNF-γ receptor), transferrin receptor, TPS, TRP-1 (tyrosine related protein 1), TRP-2, TRP-2/INT2, TSP-180, VEGF receptor, WNT, WT-1 (Wilm's tumor antigen) and XAGE.

[0313] In some embodiments, the CAR of the present disclosure may comprise a universal immune receptor which has a targeting moiety capable of binding to a labelled antigen. Methods of generating universal immune receptor CAR are discussed in International Patent Publication NO.: WO2013044225A1; the contents of which are incorporated herein by reference in their entirety.

[0314] In some embodiments, the CAR of the present disclosure may comprise the targeting moiety capable of binding to a pathogen antigen.

[0315] In some embodiments, the CAR of the present disclosure may comprise the targeting moiety capable of binding to non-protein molecules such as tumor-associated glycolipids and carbohydrates. TSAs may also be lipid molecules, polysaccharides, saccharides, nucleic acids, haptens, carbohydrate, or the combinations thereof.

[0316] In some embodiments, the CAR of the present disclosure may comprise the targeting moiety capable of binding to a component within the tumor microenvironment including proteins expressed in various tumor stroma cells including tumor associated macrophages (TAMs), immature monocytes, immature dendritic cells, immunosuppressive CD4⁺CD25⁺ regulatory T cells (Treg) and MDSCs. A recent study using an animal model, demonstrated that after systemic transplantation, T cells expressing VEGFR-2 CAR and IL12 infiltrated the tumors, expanded and persisted within tumor mass leading to tumor regression. The anti-tumor effect was dependent on targeting of IL12-responsive host cells via activation of VEGFR-2 CAR-T cells and release of IL12 (Chinnasamy et al., Clinical Cancer Research, 2012, 18: 1672-1683).

[0317] In some embodiments, the CAR of the present disclosure may comprise the targeting moiety capable of binding to a cell surface adhesion molecule, a surface molecule of an inflammatory cell that appears in an autoimmune disease, or a TCR causing autoimmunity.

[0318] As non-limiting examples, the targeting moiety of the present disclosure may be a scFv antibody that recognizes a tumor specific antigen (TSA), for example scFvs of antibodies SS, SS1 and HN1 that specifically recognize and bind to human mesothelin (U.S. Pat. No. 9,359,447), scFv of antibody of GD2 (U.S. Pat. No. 9,315,585), a CD19 antigen binding domain (U.S. Pat. No. 9,328,156); a NKG2D ligand binding domain (U.S. Pat. No. 9,273,283; US patent publication NO.: US20160311906A1); human anti-mesothelin scFvs comprising the amino acid sequences of SEQ ID Nos.: 11 and 12 of U.S. Pat. No. 9,272,002 an anti-CS1 binding agent (US patent publication NO.: US20160075784); an anti-BCMA binding domain (International Patent Publication NO.: WO2016/014565); anti-CD19 scFv antibody of SEQ ID NO:: 20 in U.S. Pat. No. 9,102,761; GFR alpha 4 antigen binding fragments having the amino acid sequences of SEQ ID NOs: 59 and 79 of International patent publication NO.: 2016/025880; anti-CLL-1 (C-type lectin-like molecule 1) binding domains having the amino acid sequences of SEQ ID NO.:47, 44, 48, 49, 50, 39, 40, 41, 42, 43, 45, 46, 51, 73, 70, 74, 75, 76, 65, 66, 67, 68, 69, 71, 72, 77, 195, 86, 83, 87, 88, 89, 78, 79, 80, 81, 82, 84, 85, 90 and 196 of International Patent Publication NO.: WO2016014535); CD33 binding domains having the amino acid sequences of SEQ ID NOs: 39-46 of International patent publication NO.: WO2016014576; a GPC3 (glypican-3) binding domain (SEQ ID NO:: 2 and SEQ ID NO:: 4 of International patent publication NO.: WO2016036973); a GFR alpha4 (Glycosyl-phosphatidylinositol (GPI)-linked GDNF family α-receptor 4 cell-surface receptor) binding domain (International Patent Publication NO.: WO2016025880); CD123 binding domains having the amino acid sequences of SEQ ID NOs: 480, 483, 485, 478, 158, 159, 160, 157, 217, 218, 219, 216, 276, 277, 278, and 275 of International patent publication NO.: WO20160258896; an anti-ROR1 antibody or fragments thereof (International patent publication NO.: WO2016016344); scFvs specific to GPC-3 (SEQ ID NOs: 1 and 24 of International patent publication NO.: WO2016049459); scFv for CSPG4 (SEQ ID NO:: 2 of International patent publication NO.: WO2015080981; scFv for folate receptor alpha (US Patent Publication NO.: US20170002072A1); the contents of each of which are incorporated herein by reference in their entirety.

[0319] In some embodiments, natural ligands may be used as the targeting moieties of the CARs of the present disclosure. Such natural ligands may be capable of binding to the antigens with affinity in the range of the scFvs and can redirect T cells specificity and effector functions to target cells expressing the complementary receptor. In some embodiments, the targeting moiety of the CAR may be neuregulin-1 (NRG1) which is a natural ligand for HER3 and HER4; VEGF which is a natural ligand of VEGFR; IL13 wildtype protein or IL13 mutein e.g., E13Y which binds to IL13Ra2; NKG2D ligand, which is a natural ligand of NKG2D receptor; CD70 which is ligand of CD27; and a proliferation-inducing ligand (APRIL) which is a natural high affinity ligand for BCMA8 and transmembrane activator and CAML interactor (TACI). Any of the ligand based BCMA CARs taught in the US Patent Publication No. US20160362467A1, the contents of which are incorporated by reference in their entirety.

[0320] In some embodiments, the targeting moieties of the present disclosure may be scFv comprising the amino acid sequences in Table 11 of co-owned U.S. Provisional Patent Application No. 62/683,972, filed Jun. 12, 2018, and the International Patent Application No. PCT/US18/37005 filed on Jun. 12, 2018 (the contents of each of which are incorporated by reference in their entirety). SEQ ID NO: 5474 to SEQ ID NO: 6571 describe scFv that may be utilized in the payloads described herein.

[0321] In one embodiment, the targeting moiety of the CAR may recognize CD19. CD19 is a well-known B cell surface molecule, which upon B cell receptor activation enhances B-cell antigen receptor induced signaling and expansion of B cell populations. CD19 is broadly expressed in both normal and neoplastic B cells. Malignancies derived from B cells such as chronic lymphocytic leukemia, acute lymphocytic leukemia and many non-Hodgkin lymphomas frequently retain CD19 expression. This near universal expression and specificity for a single cell lineage has made CD19 an attractive target for immunotherapies. Human CD19 has 14 exons wherein exon 1-4 encode the extracellular portion of the CD19, exon 5 encodes the transmembrane portion of CD19 and exons 6-14 encode the cytoplasmic tail. In one embodiment, the targeting moiety may comprise scFvs derived from the variable regions of the FMC63 antibody. FMC63 is an IgG2a mouse monoclonal antibody clone specific to the CD19 antigen that reacts with CD19 antigen on cells of the B lineage. The epitope of CD19 recognized by the FMC63 antibody is in exon 2 (Sotillo et al (2015) Cancer Discov; 5(12):1282-95; the contents of which are incorporated by reference in their entirety). In some embodiments, the targeting moiety of the CAR may be derived from the variable regions of other CD19 monoclonal antibody clones including but not limited to 467, SJ25C1, CVID3/429, CVID3/155, HIB19, and J3-119.

[0322] In some embodiments, the targeting moiety of a CAR may recognize a tumor specific antigen (TSA), for example a cancer neoantigen that is only expressed by tumor cells because of genetic mutations or alterations in transcription which alter protein coding sequences, therefore creating novel, foreign antigens. The genetic changes result from genetic substitution, insertion, deletion or any other genetic changes of a native cognate protein (i.e. a molecule that is expressed in normal cells). In the context of CD19, TSAs may include a transcript variant of human CD lacking exon 2 or lacking exon 5-6 or both (see International patent publication No. WO2016061368; the contents of which are incorporated herein by reference in their entirety). Since FMC63 binding epitope is in exon 2, CD19 lacking exon 2 is not recognized by FMC63 antibody. Thus, in some embodiments, the targeting moiety of the CAR may be an FMC63-distinct scFV. As used herein “FMC63-distinct” refers, to an antibody, scFv or a fragment thereof that is immunologically specific and binds to an epitope of the CD19 antigen that is different or unlike the epitope of CD19 antigen that is bound by FMC63. In some instances, targeting moiety may recognize a CD19 antigen lacking exon2. In one embodiment, the targeting moiety recognizes a fragment of CD19 encoded by exon 1, 3 and/or 4. In one example, the targeting moiety recognizes the epitope that bridges the portion of CD19 encoded by exon 1 and the portion of CD19 encoded by exon 3.

### Intracellular Signaling Domains

[0323] The intracellular domain of a CAR fusion polypeptide, after binding to its target molecule, transmits a signal to the immune effector cell, activating at least one of the normal effector functions of immune effector cells, including cytolytic activity (e.g., cytokine secretion) or helper activity. Therefore, the intracellular domain comprises an “intracellular signaling domain” of a T cell receptor (TCR).

[0324] In some aspects, the entire intracellular signaling domain can be employed. In other aspects, a truncated portion of the intracellular signaling domain may be used in place of the intact chain as long as it transduces the effector function signal.

[0325] In some embodiments, the intracellular signaling domain of the present disclosure may contain signaling motifs which are known as immunoreceptor tyrosine based activation motifs (ITAMs). Examples of ITAM containing cytoplasmic signaling sequences include those derived from TCR CD3zeta, FcR gamma, FcR beta, CD3 gamma, CD3 delta, CD3 epsilon, CD5, CD22, CD79a, CD79b, and CD66d. In one example, the intracellular signaling domain is a CD3 zeta (CD3ζ) signaling domain.

[0326] In some embodiments, the intracellular region of the present disclosure further comprises one or more costimulatory signaling domains which provide additional signals to the immune effector cells. These costimulatory signaling domains, in combination with the signaling domain can further improve expansion, activation, memory, persistence, and tumor-eradicating efficiency of CAR engineered immune cells (e.g., CAR T cells). In some cases, the costimulatory signaling region contains 1, 2, 3, or 4 cytoplasmic domains of one or more intracellular signaling and/or costimulatory molecules. The costimulatory signaling domain may be the intracellular/cytoplasmic domain of a costimulatory molecule, including but not limited to CD2, CD7, CD27, CD28, 4-1BB (CD137), OX40 (CD134), CD30, CD40, ICOS (CD278), GITR (glucocorticoid-induced tumor necrosis factor receptor), LFA-1 (lymphocyte function-associated antigen-1), LIGHT, NKG2C, B7-H3. In one example, the costimulatory signaling domain is derived from the cytoplasmic domain of CD28. In another example, the costimulatory signaling domain is derived from the cytoplasmic domain of 4-1BB (CD137). In another example, the co-stimulatory signaling domain may be an intracellular domain of GITR as taught in U.S. Pat. No. 9,175,308; the contents of which are incorporated herein by reference in its entirety.

[0327] In some embodiments, the intracellular region of the present disclosure may comprise a functional signaling domain from a protein selected from the group consisting of an MHC class I molecule, a TNF receptor protein, an immunoglobulin-like protein, a cytokine receptor, an integrin, a signaling lymphocytic activation protein (SLAM) such as CD48, CD229, 2B4, CD84, NTB-A, CRACC, BLAME, CD2F-10, SLAMF6, SLAMF7, an activating NK cell receptor, BTLA, a Toll ligand receptor, OX40, CD2, CD7, CD27, CD28, CD30, CD40, CDS, ICAM-1, LFA-1 (CD11a/CD18), 4-1BB (CD137), B7-H3, CDS, ICAM-1, ICOS (CD278), GITR, BAFFR, LIGHT, HVEM (LIGHTR), SLAMF7, NKp80 (KLRF1), NKp44, NKp30, NKp46, CD19, CD4, CD8alpha, CD8beta, IL2R beta, IL2R gamma, IL7R alpha, IL15Ra, ITGA4, VLA1, CD49a, ITGA4, IA4, CD49D, ITGA6, VLA-6, CD49f, ITGAD, CD11d, ITGAE, CD103, ITGAL, CD11a, LFA-1, ITGAM, CD11b, ITGAX, CD11c, ITGB1, CD29, ITGB2, CD18, LFA-1, ITGB7, NKG2D, NKG2C, NKD2C SLP76, TNFR2, TRANCE/RANKL, DNAM1 (CD226), SLAMF4 (CD244, 2B4), CD84, CD96 (Tactile), CEACAM1, CRTAM, Ly9 (CD229), CD160 (BY55), PSGL1, CD100 (SEMA4D), CD69, SLAMF6 (NTB-A, Ly108), SLAM (SLAMF1, CD150, IPO-3), BLAME (SLAMF8), SELPLG (CD162), LTBR, LAT, CD270 (HVEM), GADS, SLP-76, PAG/Cbp, CD19a, a ligand that specifically binds with CD83, DAP 10, TRIM, ZAP70, Killer immunoglobulin receptors (KIRs) such as KIR2DL1, KIR2DL2/L3, KIR2DL4, KIR2DL5A, KIR2DL5B, KIR2DS1, KIR2DS2, KIR2D S3, KIR2DS4, KIR2D S5, KIR3DL1/S1, KIR3DL2, KIR3DL3, and KIR2DP1; lectin related NK cell receptors such as Ly49, Ly49A, and Ly49C.

[0328] In some embodiments, the intracellular signaling domain of the present disclosure may contain signaling domains derived from JAK-STAT. In other embodiments, the intracellular signaling domain of the present disclosure may contain signaling domains derived from DAP-12 (Death associated protein 12) (Topfer et al., Immunol., 2015, 194: 3201-3212; and Wang et al., Cancer Immunol., 2015, 3: 815-826). DAP-12 is a key signal transduction receptor in NK cells. The activating signals mediated by DAP-12 play important roles in triggering NK cell cytotoxicity responses toward certain tumor cells and virally infected cells. The cytoplasmic domain of DAP12 contains an Immunoreceptor Tyrosine-based Activation Motif (ITAM). Accordingly, a CAR containing a DAP12-derived signaling domain may be used for adoptive transfer of NK cells.

[0329] In some embodiments, T cells engineered with two or more CARs incorporating distinct co-stimulatory domains and regulated by distinct DD may be used to provide kinetic control of downstream signaling

[0330] In some embodiments, the payload of the disclosure may be any of the co-stimulatory molecules and/or intracellular domains described herein. In some embodiments, one or more co-stimulatory molecules, each under the control of different SRE may be used in the present disclosure. SRE regulated co-stimulatory molecules may also be expressed in conjunction with a first-generation CAR, a second-generation CAR, a third-generation CAR, a fourth-generation, or any other CAR design described herein.

[0331] In some embodiments, the intracellular domain of the present disclosure may comprise amino acid sequences of Table 12 of co-owned U.S. Provisional Patent Application No. 62/683,972, filed Jun. 12, 2018, and the International Patent Application No. PCT/US18/37005 filed on Jun. 12, 2018 (the contents of each of which are incorporated by reference in their entirety). Exemplary intracellular signaling domains and costimulatory domains are described as SEQ ID NO: 6572 to SEQ ID NO: 6678.

### Transmembrane Domains

[0332] In some embodiments, the CAR of the present disclosure may comprise a transmembrane domain. As used herein, the term “Transmembrane domain (TM)” refers broadly to an amino acid sequence of about 15 residues in length which spans the plasma membrane. More preferably, a transmembrane domain includes at least 20, 21, 22, 23, 24, 25, 26, 27, 28, 29, 30, 31, 32, 33, 34, 35, 36, 37, 38, 39, 40, 41, 42, 43, 44, or 45 amino acid residues and spans the plasma membrane. In some embodiments, the transmembrane domain of the present disclosure may be derived either from a natural or from a synthetic source. The transmembrane domain of a CAR may be derived from any naturally membrane-bound or transmembrane protein. For example, the transmembrane region may be derived from (i.e. comprise at least the transmembrane region(s) of) the alpha, beta or zeta chain of the T-cell receptor, CD3 epsilon, CD4, CD5, CD8, CD8a, CD9, CD16, CD22, CD33, CD28, CD37, CD45, CD64, CD80, CD86, CD134, CD137, CD152, or CD154.

[0333] Alternatively, the transmembrane domain of the present disclosure may be synthetic. In some aspects, the synthetic sequence may comprise predominantly hydrophobic residues such as leucine and valine.

[0334] In some embodiments, the transmembrane domain of the present disclosure may be selected from the group consisting of a CD8a transmembrane domain, a CD4 transmembrane domain, a CD 28 transmembrane domain, a CTLA-4 transmembrane domain, a PD-1 transmembrane domain, and a human IgG4 Fc region. As non-limiting examples, the transmembrane domain may be a CTLA-4 transmembrane domain comprising the amino acid sequences of SEQ ID NOs.: 1-5 of International Patent Publication NO.: WO2014/100385; and a PD-1 transmembrane domain comprising the amino acid sequences of SEQ ID NOs.: 6-8 of International Patent Publication NO.: WO2014100385; the contents of each of which are incorporated herein by reference in their entirety.

[0335] In some embodiments, the CAR of the present disclosure may comprise an optional hinge region (also called spacer). A hinge sequence is a short sequence of amino acids that facilitates flexibility of the extracellular targeting domain that moves the target binding domain away from the effector cell surface to enable proper cell/cell contact, target binding and effector cell activation (Patel et al., Gene Therapy, 1999; 6: 412-419). The hinge sequence may be positioned between the targeting moiety and the transmembrane domain The hinge sequence can be any suitable sequence derived or obtained from any suitable molecule. The hinge sequence may be derived from all or part of an immunoglobulin (e.g., IgG1, IgG2, IgG3, IgG4) hinge region, i.e., the sequence that falls between the CHI and CH2 domains of an immunoglobulin, e.g., an IgG4 Fc hinge, the extracellular regions of type 1 membrane proteins such as CD8a CD4, CD28 and CD7, which may be a wild type sequence or a derivative. Some hinge regions include an immunoglobulin CH3 domain or both a CH3 domain and a CH2 domain. In certain embodiments, the hinge region may be modified from an IgG1, IgG2, IgG3, or IgG4 that includes one or more amino acid residues, for example, 1, 2, 3, 4 or 5 residues, substituted with an amino acid residue different from that present in an unmodified hinge. Table 13 of co-owned U.S. Provisional Patent Application No. 62/683,972 filed Jun. 12, 2018, and the International Patent Application No. PCT/US18/37005 filed on Jun. 12, 2018 (the contents of each of which are incorporated by reference in their entirety). and SEQ ID NO: 6679 to SEQ ID NO: 6811 provide various transmembrane regions that can be used in the CARs described herein.

[0336] Hinge region sequences useful in the present disclosure are provided in Table 14 of co-owned U.S. Provisional Patent Application No. 62/683,972, filed Jun. 12, 2018, and the International Patent Application No. PCT/US18/37005 filed on Jun. 12, 2018 (the contents of each of which are incorporated by reference in their entirety) and SEQ ID NO: 6730 to SEQ ID NO: 6806.

[0337] In some embodiments, hinge domains may be present at the N terminus of the transmembrane domain, at C terminus of the transmembrane domain or within the transmembrane domain. Hinge and transmembrane region sequences which may be useful in the present disclosure are provided in Table 15 of co-owned U.S. Provisional Patent Application No. 62/683,972, filed Jun. 12, 2018, and the International Patent Application No. PCT/US18/37005 filed on Jun. 12, 2018 (the contents of each of which are incorporated by reference in their entirety) and as SEQ ID NO: 6807 to SEQ ID NO:6811.

[0338] In some embodiments, the CAR of the present disclosure may comprise one or more linkers between any of the domains of the CAR. The linker may be between 1-30 amino acids long. In this regard, the linker may be 1, 2, 3, 4, 5, 6, 7, 8, 9, 10, 11, 12, 13, 14, 15, 16, 17, 18, 19, 20, 21, 22, 23, 24, 25, 26, 27, 28, 29 or 30 amino acids in length. In other embodiments, the linker may be flexible.

[0339] In some embodiments, the components including the targeting moiety, transmembrane domain and intracellular signaling domains of the present disclosure may be constructed in a single fusion polypeptide. The fusion polypeptide may be the payload of an effector module of the disclosure. In some embodiments, more than one CAR fusion polypeptides may be included in an effector module, for example, two, three or more CARs may be included in the effector module under the control of a single SRE (e.g., a DD). Representative effector modules comprising the CAR payload are illustrated in FIGS. 2-6.

[0340] In some embodiments, payloads of the present disclosure may comprise the CAR constructs including the extracellular targeting domain, transmembrane domain and intracellular signaling domains that are taught in the art, for example, a CAR targeting mesothelin (U.S. Pat. Nos. 9,272,002 and 9,359,447); EGFRvIII specific CARs in U.S. Pat. No. 9,266,960; anti-TAG CARs in U.S. Pat. No. 9,233,125; CD19 CARs in US Patent publication NO.: 2016014533; CD19 CAR having the amino acid sequence of SEQ ID NO:: 24 of U.S. Pat. No. 9,328,156; CD19 CARs in U.S. Pat. Nos. 8,911,993; 8,975,071; 9,101,584; 9,102,760; and 9,102,761; BCMA (CD269) specific CARs disclosed in International patent publication NOs: WO2016/014565 (SEQ ID Nos.: 109-113 and 213 to 233) and WO2016/014789; CLL-1 (C-type lectin-like molecule 1) CARs comprising the amino acid sequences of SEQ ID NOs: 99, 96, 100, 101, 102, 91, 92, 93, 94, 95, 97, 98, 103, and 197 disclosed in International patent publication NO.: WO2016014535; CD33 specific CARs comprising the amino acid sequences of SEQ ID NOs: 48-56 in International patent publication NO.: WO2016014576; CD33 specific CARs comprising the amino acid sequences of SEQ ID NOs: 19-22, 27-30 and 35-38 in International patent publication NO.: WO2015150526; CD37 specific CARs encoded by the nucleic acids of SEQ ID NOs: 1-5 in US patent publication NO.: US20150329640; GPC3 CAR (International patent publication NO.: WO2016036973), GFR alpha 4 CARs having the amino acid sequences of SEQ ID NOs: 85, 86, 90, 92, 94, 96, 98, 100, 102, and 104 in International patent publication NO.: WO2016025880; CD123 CARs comprising the amino acid sequences of SEQ ID NO: 98, 99, 100 and 101 in International patent publication NOs: WO2016028896; CD123 specific multi-chain CARs in International patent publication NO: WO2015193406; CD123 CARS comprising the amino acid sequences of SEQ ID NO:: 160, 171, 188-197 in International patent publication NO: WO2016/120220; ROR-1 specific CARs comprising the amino acid sequences of SEQ ID NOs: 93, 95 and 117 in International patent publication NO.: WO2016/016344; ROR-1 specific multi-chain CARs in International patent publication NO.: WO2016/016343; trophoblast glycoprotein (5T4, TPBG) specific CARs comprising the amino acid sequences of SEQ ID NOs: 21, 27, 33, 39, 23, 29, 34, 41, 19, 25, 31, 37, 20, 26, 32, 38, 22, 28, 34, 40, 24, 30, 36 and 42 in International patent publication NO.: WO2016034666; EGFRvIII specific CARs comprising the amino acid sequences of SEQ ID NOs: 15, 17, 24, 25, 26 and 27 in International patent publication NO.: WO2016016341; a TEM 8 CAR comprising the amino acid sequence of SEQ ID NO: 1 in International patent publication NO.: WO2014164544, a TEM1 CAR comprising the amino acid sequence of SEQ ID NO:2 in International patent publication NO: WO2014164544; GPC-3 CAR having the amino acid sequences of SEQ ID NOs: 3 and 26 in International patent publication NO.: WO2016/049459, a chondroitin sulfate proteoglycan-4 (CSPG4) CAR in International patent publication NO.: WO2015/080981; Kappa/lambda CARs in International patent publication NO.: WO2015/164739; GD2 CAR in International patent publication NO.: WO2016/134284; CLL1 CARs in International patent publication NO.: WO2016120218; CLL1 multi-subunit CARs in International patent publication NO.: WO2016120219; Hsp70 CARs in International patent publication NO.: WO2016120217; mAb-driven CARs in International patent publication NO.: WO2016120216; the contents of each of which are incorporated herein by reference in their entirety.

[0341] In some embodiments, the CAR constructs of the present disclosure may include CAIX (carboxy-anhydrase-IX (CAIX) specific CAR (Lamers et al., Biochem Soc Trans, 2016, 44(3): 951-959), HIV-1 specific CAR (Ali et al., J Virol., 2016, May 25, pii: JVI.00805-16), CD20 specific CAR (Rufener et al., Cancer Immunol. Res., 2016, 4(6): 509-519), a CD20/CD19 bispecific CAR (Zah et al., Cancer Immunol Res., 2016, 4(6): 498-508), a CD22/CD19 CAR (International Publication No: WO2016/149578), a CD138/BCMA bi-specific CAR (International Publication No: WO2016/130598) an EGFR specific CARs and anti EGFR viii specific CAR; the contents of each of which are incorporated herein by reference in their entirety.

[0342] In some embodiments, the chimeric antigen receptors described herein may include CD3 zeta domains altered to tune CAR activity. The CD3 zeta domains may include one or more mutations in the immunoreceptor tyrosine based activation motifs (ITAMs). In one aspect, the tyrosine residues within the ITAMs may be mutated resulting in reduced phosphorylation and limited downstream signaling. In some embodiments, one or more of the ITAMs may be deleted from the CD3 zeta domain. In one aspect, the CD3 zeta may include one ITAM. Any of the CARs and CD3 zeta domains described by Feucht et al. 2019 may be used herein (Calibration of CAR activation potential directs alternative T cell fates and therapeutic potency. Nature Medicine 25, 82-88 (2019); the contents of which are herein incorporated by reference in their entirety).

[0343] In some embodiments, the CAR sequences may be selected from Table 16 of co-owned U.S. Provisional Patent Application No. 62/683,972, filed Jun. 12, 2018, and the International Patent Application No. PCT/US18/37005 filed on Jun. 12, 2018 (the contents of each of which are incorporated by reference in their entirety) or from SEQ ID NO:6812 to SEQ ID NO: 8232.

[0344] In one embodiment of the present disclosure, the payload of the disclosure is a CD19 specific CAR targeting different B cell malignancies and HER2-specific CAR targeting sarcoma, glioblastoma, and advanced Her2-positive lung malignancy.

[0345] In some embodiments, the CAR is a CD19 CAR. The amino acid sequences of CD19 CAR components and CD19 CAR constructs are presented in Table 17 and Table 18.

TABLE 17
CD19 CAR construct components

| | | AA SEQ | NA SEQ |
|---|---|---|---|
| Description | Amino Acid Sequence | ID NO | ID NO |
| CD19 scFv | DIQMTQTTSSLSASLGDRVTISCRASQDISKYLNWYQQKPDGTVKLLIYHTSRL | 8233 | 8241-8246 |
| | HSGVPSRFSGSGSGTDYSLTISNLEQEDIATYFCQQGNTLPYTFGGGTKLEITGG | | |
| | GGSGGGGSGGGGSEVKLQESGPGLVAPSQSLSVTCTVSGVSLPDYGVSWIRQP | | |
| | PRKGLEWLGVIWGSETTYYNSALKSRLTIIKDNSKSQVFLKMNSLQTDDTAIYY | | |
| | CAKHYYYGGSYAMDYWGQGTSVTVSS | | |
| CD8α hinge | TTTPAPRPPTPAPTIASQPLSLRPEACRPAAGGAVHTRGLDFACD | 8234 | 8247-8251 |
| CD8α hinge-TM | TTTPAPRPPTPAPTIASQPLSLRPEACRPAAGGAVHTRGLDFACDIYIWAPLAGT | 8235 | 8252-8254 |
| (hinge and | CGVLLLSLVITLYC | | |
| transmembrane) | | | |
| CD3 zeta | RVKFSRSADAPAYKQGQNQLYNELNLGRREEYDVLDKRRGRDPEMGGKPRR | 8236 | 8255-8261 |
| signaling domain | KNPQEGLYNELQKDKMAEAYSEIGMKGERRRGKGHDGLYQGLSTATKDTYD | | |
| | ALHMQALPPR | | |
| 4-1BB | KRGRKKLLYIFKQPFMRPVQTTQEEDGCSCRFPEEEEGGCEL | 8237 | 8262-8267 |
| intracellular | | | |
| signaling domain; | | | |
| CD28 co- | | | |
| stimulatory | | | |
| domain; | | | |
| CD8α leader | MALPVTALLLPLALLLHAARP | 278 | 279-283 |
| hPDE5 (Amino | EETRELQSLAAAVVPSAQTLKITDFSFSDFELSDLETALCTIRMFTDLNLVQNFQ | 3 | 339 |
| acid 535-860 of | MKHEVLCRWILSVKKNYRKNVAYHNWRHAFNTAQCMFAALKAGKIQNKLT | | |
| WT) | DLEILALLIAALSHDLDHRGVNNSYIQRSEHPLAQLYCHSIMEHHHFDQCLMIL | | |
| | NSPGNQILSGLSIEEYKTTLKIIKQAILATDLALYIKRRGEFFELIRKNQFNLEDPH | | |
| | QKELFLAMLMTACDLSAITKPWPIQQRIAELVATEFFDQGDRERKELNIEPTDL | | |
| | MNREKKNKIPSMQVGFIDAICLQLYEALTHVSEDCFPLLDGCRKNRQKWQALA | | |
| | EQQ | | |
| hPDE5 (Amino | EETRELQSLAAAVVPSAQTLKITDFSFSDFELSDLETALCTIRMFTDLNLVQNFQ | 12 | 359 |
| acid 535-860 of | MKHEVLCRWILSVKKNYRKNVAYHNWRHAFNTAQCMFAALKAGKIQNKLT | | |
| WT, R732L) | DLEILALLIAALSHDLDHRGVNNSYIQRSEHPLAQLYCHSIMEHHHFDQCLMIL | | |
| | NSPGNQILSGLSIEEYKTTLKIIKQAILATDLALYIKRLGEFFELIRKNQFNLEDPH | | |
| | QKELFLAMLMTACDLSAITKPWPIQQRIAELVATEFFDQGDRERKELNIEPTDL | | |
| | MNREKKNKIPSMQVGFIDAICLQLYEALTHVSEDCFPLLDGCRKNRQKWQALA | | |
| | EQQ | | |
| hPDE5 (Amino | EETRELQSLAAAVVPSAQTLKITDFSFSDFELSDLETALCTIRMFTDLNLVQNFQ | 505 | 520 |
| acid 535-860 of | MKHEVLCRWILSVKKNYRKNVAYHNWRHAFNTAQCMFAALKAGKIQNKLT | | |
| WT, R732L, | DLEILALLIAALSHDLDHRGVNNSYIQRSEHPLAQLYCHSIMEHHHFDQCLMIL | | |
| D764N) | NSPGNQILSGLSIEEYKTTLKIIKQAILATDLALYIKRLGEFFELIRKNQFNLEDPH | | |
| | QKELFLAMLMTACNLSAITKPWPIQQRIAELVATEFFDQGDRERKELNIEPTDL | | |
| | MNREKKNKIPSMQVGFIDAICLQLYEALTHVSEDCFPLLDGCRKNRQKWQALA | | |
| | EQQ | | |
| hPDE5 (Amino | EETRELQSLAAAVVPSAQTLKITDFSFSDFELSDLETALCTIRMFTDLNLVQNFQ | 227 | 233 |
| acid 535-860 of | MKHEVLCRWILSVKKNYRKNVAYHNWRHAFNTAQCMFAALKAGKIQNKLT | | |
| WT, R732L, | DLEILALLIAALSHDLDHRGVNNSYIQRSEHPLAQLYCHSIMEHHHFDQCLMIL | | |
| F736A) | NSPGNQILSGLSIEEYKTTLKIIKQAILATDLALYIKRLGEFAELIRKNQFNLEDP | | |
| | HQKELFLAMLMTACDLSAITKPWPIQQRIAELVATEFFDQGDRERKELNIEPTD | | |
| | LMNREKKNKIPSMQVGFIDAICLQLYEALTHVSEDCFPLLDGCRKNRQKWQAL | | |
| | AEQQ | | |
| hPDE5 (Amino | EETRELQSLAAAVVPSAQTLKITDFSFSDFELSDLETALCTIRMFTDLNLVQNFQ | 348 | 361 |
| acid 535-860 of | MKHEVLCRWILSVKKNYRKNVAYHNWRHAFNTAQCMFAALKAGKIQNKLT | | |
| WT, H653A) | DLEILALLIAALSADLDHRGVNNSYIQRSEHPLAQLYCHSIMEHHHFDQCLMIL | | |
| | NSPGNQILSGLSIEEYKTTLKIIKQAILATDLALYIKRRGEFFELIRKNQFNLEDPH | | |
| | QKELFLAMLMTACDLSAITKPWPIQQRIAELVATEFFDQGDRERKELNIEPTDL | | |
| | MNREKKNKIPSMQVGFIDAICLQLYEALTHVSEDCFPLLDGCRKNRQKWQALA | | |
| | EQQ | | |
| hPDE5 (Amino | EETRELQSLAAAVVPSAQTLKITDFSFSDFELSDLETALCTIRMFTDLNLVQNFQ | 509 | 524 |
| acid 535-860 of | MKHEVLCRWILSVKKNYRKNVAYHNWRHAFNTAQCMFAALKAGKIQNKLT | | |
| WT, R732L, | DLEILALLIAALSADLDHRGVNNSYIQRSEHPLAQLYCHSIMEHHHFDQCLMIL | | |
| H653A) | NSPGNQILSGLSIEEYKTTLKIIKQAILATDLALYIKRLGEFFELIRKNQFNLEDPH | | |
| | QKELFLAMLMTACDLSAITKPWPIQQRIAELVATEFFDQGDRERKELNIEPTDL | | |
| | MNREKKNKIPSMQVGFIDAICLQLYEALTHVSEDCFPLLDGCRKNRQKWQALA | | |
| | EQQ | | |
| hPDE5 (Amino | EETRELQSLAAAVVPSAQTLKITDFSFSDFELSDLETALCTIRMFTDLNLVQNFQ | 510 | 525 |
| acid 535-860 of | MKHEVLCRWILSVKKNYRKNVAYHNWRHAFNTAQCMFAALKAGKIQNKLT | | |
| WT, R732L, | DLEILALLIAALSHDLDHRGVNNSYIQRSEHPLAQLYCHSIMEHHHFDQCLMIL | | |
| D764A) | NSPGNQILSGLSIEEYKTTLKIIKQAILATDLALYIKRLGEFFELIRKNQFNLEDPH | | |
| | QKELFLAMLMTACALSAITKPWPIQQRIAELVATEFFDQGDRERKELNIEPTDL | | |
| | MNREKKNKIPSMQVGFIDAICLQLYEALTHVSEDCFPLLDGCRKNRQKWQALA | | |
| | EQQ | | |
| HA Tag | YPYDVPDYA | 8238 | 8268 |
| P2A Cleavable | GATNFSLLKQAGDVEENPGP | 8239 | 8270 |
| peptide | | | |
| Modified Furin | ESRRVRRNKRSK | 288 | 291 |
| Cleavage Site | | | |
| P2A Cleavage Site | ATNFSLLKQAGDVEENPGP | 8742 | 8817 |
| eGFP (A206K) | MVSKGEELFTGVVPILVELDGDVNGHKFSVSGEGEGDATYGKLTLKFICTTGK | 8921 | 8923 |
| | LPVPWPTLVTTLTYGVQCFSRYPDHMKQHDFFKSAMPEGYVQERTIFFKDDGN | | |
| | YKTRAEVKFEGDTLVNRIELKGIDFKEDGNILGHKLEYNYNSHNVYIMADKQK | | |
| | NGIKVNfKIRHNIEDGSVQLADHYQQNTPIGDGPVLLPDNHYLSTQSKLSKDPN | | |
| | EKRDHMVLLEFVTAAGITLGMDELYK | | |
| eGFP (M1del) | VSKGEELFTGVVPILVELDGDVNGHKFSVSGEGEGDATYGKLTLKFICTTGKLP | 8922 | 8924 |
| | VPWPTLVTTLTYGVQCFSRYPDHMKQHDFFKSAMPEGYVQERTIFFKDDGNY | | |
| | KTRAEVKFEGDTLVNRIELKGIDFKEDGNILGHKLEYNYNSHNVYIMADKQKN | | |
| | GIKVNFKIRHNIEDGSVQLADHYQQNTPIGDGPVLLPDNHYLSTQSALSKDPNE | | |
| | KRDHMVLLEFVTAAGITLGMDELYK | | |
| Firefly Luciferase | MEDAKNIKKGPAPFYPLEDGTAGEQLHKAMKRYALVPGTIAFTDAHIEVDITY | 223 | 224 |
| (N50D, N119G, | AEYFEMSVRLAEAMKRYGLNTNHRIVVCSENSLQFFMPVLGALFIGVAVAPAN | | |
| S548I, K549A, | DIYNERELLNSMGISQPTVVFVSKKGLQKILNVQKKLPIIQKIIIMDSKTDYQGF | | |
| L550V) | QSMYTFVTSHLPPGFNEYDFVPESFDRDKTIALIMNSSGSTGLPKGVALPHRTA | | |
| | CVRFSHARDPIFGNQIIPDTAILSVVPFHHGFGMFTTLGYLICGFRVVLMYRFEE | | |
| | ELFLRSLQDYKIQSALLVPTLFSFFAKSTLIDKYDLSNLHEIASGGAPLSKEVGE | | |
| | AVAKRFHLPGIRQGYGLTETTSAILITPEGDDKPGAVGKVVPFFEAKVVDLDTG | | |
| | KTLGVNQRGELCVRGPMIMSGYVNNPEATNALIDKDGWLHSGDIAYWDEDEH | | |
| | FFIVDRLKSLIKYKGYQVAPAELESILLQHPNIFDAGVAGLPDDDAGELPAAVV | | |
| | VLEHGKTMTEKEIVDYVASQVTTAKKLRGGVVFVDEVPKGLTGKLDARKIREI | | |
| | LIKAKKGGKIAV | | |
| mCherry (M1L) | LSKGEEDNMAIIKEFMRFKVHMEGSVNGHEFEIEGEGEGRPYEGTQTAKLKVT | 8240 | 8269 |
| | KGGPLPFAWDILSPQFMYGSKAYVKHPADIPDYLKLSFPEGFKWERVMNFEDG | | |
| | GVVTVTQDSSLQDGEFIYKVKLRGTNFPSDGPVMQKKTMGWEASSERMYPED | | |
| | GALKGEIKQRLKLKDGGHYDAEVKTTYKAKKPVQLPGAYNVNIKLDITSHNE | | |
| | DYTIVEQYERAEGRHSTGGMDELYK | | |
| SG LINKER | SG | — | AGTGGT |
| Linker (GSG) | GSG | — | GGATCC |
| (BamH1-Gly) | | | GGA |
| Flexible G/S rich | GS | — | GGATCC |
| linker; BamH1 | | | |
| Site | | | |
| Lys-Asp Acid | LD | — | CTAGAT |
| Linker | | | |

TABLE 18
CD19 CARs constructs

| | | Amino | Nucleic |
|---|---|---|---|
| | | Acid | Acid |
| | | SEQ | SEQ |
| Description | Amino Acid Sequence | ID NO | ID NO |
| OT-001407 (CD8a leader; | MALPVTALLLPLALLLHAARPDIQMTQTTSSLSASLGDRVTISCRAS | 8271 | 8285 |
| CD19 scFv; CD8a Hinge and | QDISKYLNWYQQKPDGTVKLLIYHTSRLHSGVPSRFSGSGSGTDYS | | |
| Transmembrane Domain; 4- | LTISNLEQEDIATYFCQQGNTLPYTFGGGTKLEITGGGGSGGGGSG | | |
| 1BB intracellular domain; | GGGSEVKLQESGPGLVAPSQSLSVTCTVSGVSLPDYGVSWIRQPPR | | |
| CD3 zeta signaling domain; | KGLEWLGVIWGSETTYYNSALKSRLTIIKDNSKSQVFLKMNSLQTD | | |
| stop) | DTAIYYCAKHYYYGGSYAMDYWGQGTSVTVSSTTTPAPRPPTPAP | | |
| | TIASQPLSLRPEACRPAAGGAVHTRGLDFACDIYIWAPLAGTCGVL | | |
| | LLSLVITLYCKRGRKKLLYIFKQPFMRPVQTTQEEDGCSCRFPEEEE | | |
| | GGCELRVKFSRSADAPAYKQGQNQLYNELNLGRREEYDVLDKRR | | |
| | GRDPEMGGKPRRKNPQEGLYNELQKDKMAEAYSEIGMKGERRRG | | |
| | KGHDGLYQGLSTATKDTYDALHMQALPPR* | | |
| OT-001258 (CD8a leader; | MALPVTALLLPLALLLHAARPDIQMTQTTSSLSASLGDRVTISCRAS | 8272 | 8286 |
| CD19 scFV; CD8a-Tm; (4- | QDISKYLNWYQQKPDGTVKLLIYHTSRLHSGVPSRFSGSGSGTDYS | | |
| 1BB intracellular domain); | LTISNLEQEDIATYFCQQGNTLPYTFGGGTKLEITGGGGSGGGGSG | | |
| CD3zeta signaling domain; | GGGSEVKLQESGPGLVAPSQSLSVTCTVSGVSLPDYGVSWIRQPPR | | |
| Linker (GSG), hPDE5 | KGLEWLGVIWGSETTYYNSALKSRLTIIKDNSKSQVFLKMNSLQTD | | |
| (Amino acid 535-860 of WT, | DTAIYYCAKHYYYGGSYAMDYWGQGTSVTVSSTTTPAPRPPTPAP | | |
| R732L, D764N), stop) | TIASQPLSLRPEACRPAAGGAVHTRGLDFACDIYIWAPLAGTCGVL | | |
| | LLSLVITLYCKRGRKKLLYIFKQPFMRPVQTTQEEDGCSCRFPEEEE | | |
| | GGCELRVKFSRSADAPAYKQGQNQLYNELNLGRREEYDVLDKRR | | |
| | GRDPEMGGKPRRKNPQEGLYNELQKDKMAEAYSEIGMKGERRRG | | |
| | KGHDGLYQGLSTATKDTYDALHMQALPPRGSGEETRELQSLAAA | | |
| | VVPSAQTLKITDFSFSDFELSDLETALCTIRMFTDLNLVQNFQMKHE | | |
| | VLCRWISVKKNYRKNVAYHNWRHAFNTAQCMFAALKAGKIQN | | |
| | KLTDLEILALLIAALSHDLDHRGVNNSYIQRSEHPLAQLYCHSIMEH | | |
| | HHFDQCLMILNSPGNQILSGLSIEEYKTTLKIIKQAILATDLALYIKR | | |
| | LGEFFELIRKNQFNLEDPHQKELFLAMLMTACNLSAITKPWPIQQRI | | |
| | AELVATEFFDQGDRERKELNIEPTDLMNREKKNKIPSMQVGFIDAI | | |
| | CLQLYEALTHVSEDCFPLLDGCRKNRQKWQALAEQQ* | | |
| OT-001298 (CD8a leader; | MALPVTALLLPLALLLHAARPDIQMTQTTSSLSASLGDRVTISCRAS | 8273 | 8287 |
| CD19 scFV; CD8a-Tm; (4- | QDISKYLNWYQQKPDGTVKLLIYHTSRLHSGVPSRFSGSGSGTDYS | | |
| 1BB intracellular domain); | LTISNLEQEDIATYFCQQGNTLPYTFGGGTKLEITGGGGSGGGGSG | | |
| CD3zeta signaling domain; | GGGSEVKLQESGPGLVAPSQSLSVTCTVSGVSLPDYGVSWIRQPPR | | |
| Linker (GSG); hPDE5 | KGLEWLGVIWGSETTYYNSALKSRLTIIKDNSKSQVFLKMNSLQTD | | |
| (Amino acid 535-860 of WT, | DTAIYYCAKHYYYGGSYAMDYWGQGTSVTVSSTTTPAPRPPTPAP | | |
| R732L, F736A); stop) | TIASQPLSLRPEACRPAAGGAVHTRGLDFACDIYIWAPLAGTCGVL | | |
| | LLSLVITLYCKRGRKKLLYIFKQPFMRPVQTTQEEDGCSCRFPEEEE | | |
| | GGCELRVKFSRSADAPAYKQGQNQLYNELNLGRREEYDVLDKRR | | |
| | GRDPEMGGKPRRKNPQEGLYNELQKDKMAEAYSEIGMKGERRRG | | |
| | KGHDGLYQGLSTATKDTYDALHMQALPPRGSGEETRELQSLAAA | | |
| | VVPSAQTLKITDFSFSDFELSDLETALCTIRMFTDLNLVQNFQMKHE | | |
| | VLCRWILSVKKNYRKNVAYHNWRHAFNTAQCMFAALKAGKIQN | | |
| | KLTDLEILALLIAALSHDLDHRGVNNSYIQRSEHPLAQLYCHSIMEH | | |
| | HHFDQCLMILNSPGNQILSGLSIEEYKTTLKIIKQAILATDLALYIKR | | |
| | LGEFAELIRKNQFNLEDPHQKELFLAMLMTACDLSAITKPWPIQQRI | | |
| | AELVATEFDQGDRERKELNIEPTDLMNREKKNKIPSMQVGFIDAI | | |
| | CLQLYEALTHVSEDCFPLLDGCRKNRQKWQALAEQQ* | | |
| OT-001299 (CD8a leader; | MALPVTALLLPLALLLHAARPDIQMTQTTSSLSASLGDRVTISCRAS | 8274 | 8288 |
| CD19 scEV; CD8a-Tm; (4- | QDISKYLNWYQQKPDGTVKLLIYHTSRLHSGVPSRFSGSGSGTDYS | | |
| 1BB intracellular domain); | LTISNLEQEDIATYFCQQGNTLPYTFGGGTKLEITGGGGSGGGGSG | | |
| CD3zeta signaling domain; | GGGSEVKLQESGPGLVAPSQSLSVTCTVSGVSLPDYGVSWIRQPPR | | |
| Linker (GSG); hPDE5 (Amino | KGLEWLGVIWGSETTYYNSALKSRLTIIKDNSKSQVFLKMNSLQTD | | |
| acid 535-860 of WT); stop) | DTAIYYCAKHYYYGGSYAMDYWGQGTSVTVSSTTTPAPRPPTPAP | | |
| | TIASQPLSLRPEACRPAAGGAVHTRGLDFACDIYIWAPLAGTCGVL | | |
| | LLSLVITLYCKRGRKKLLYIFKQPFMRPVQTTQEEDGCSCRFPEEEE | | |
| | GGCELRVKFSRSADAPAYKQGQNQLYNELNLGRREEYDVLDKRR | | |
| | GRDPEMGGKPRRKNPQEGLYNELQKDKMAEAYSEIGMKGERRRG | | |
| | KGHDGLYQGLSTATKDTYDALHMQALPPRGSGEETRELQSLAAA | | |
| | VVPSAQTLKITDFSFSDFELSDLETALCTIRMFTDLNLVQNFQMIKHE | | |
| | VLCRWILSVKKNYRKNVAYHNWRHAFNTAQCMFAALKAGKIQN | | |
| | KLTDLEILALLIAALSHDLDHRGVNNSYIQRSEHPLAQLYCHSIMEH | | |
| | HHFDQCLMILNSPGNQILSGLSIEEYKTTLKIIKQAILATDLALYIKR | | |
| | RGEFFELIRKNQFNLEDPHQKELFLAMLMTACDLSAITKPWPIQQRI | | |
| | AELVATEFFDQGDRERKELNIEPTDLMNREKKNKPSMQVGFIDAI | | |
| | CLQLYEALTHVSEDCFPLLDGCRKNRQKWQALAEQQ* | | |
| OT-001300 (CD8a leader; | MALPVTALLLPLALLLHAARPYPYDVPDYADIQMTQTTSSLSASLG | 8275 | 8289 |
| HA Tag; CD19 scFV; CD8a- | DRVTISCRASQDISKYLNWYQQKPDGTVKLLIYHTSRLHSGVPSRF | | |
| Tm; (4-1BB intracellular | SGSGSGTDYSLTISNLEQEDIATYFCQQGNTLPYTFGGGTKLEITGG | | |
| domain); CD3zeta signaling | GGSGGGGSGGGGSEVKLQESGPGLVAPSQSLSVTCTVSGVSLPDY | | |
| domain; Linker (SG); hPDE5 | GVSWIRQPPRKGLEWLGVIWGSETTYYNSALKSRLTIIKDNSKSQV | | |
| (Amino acid 535-860 of WT); | FLKMNSLQTDDTAIYYCAKHYYYGGSYAMDYWGQGTSVTVSSTT | | |
| stop) | TPAPRPPTPAPTIASQPLSLRPEACRPAAGGAVHTRGLDFACDIYIW | | |
| | APLAGTCGVLLLSLVITLYCKRGRKKLLYIFKQPFMRPVQTTQEED | | |
| | GCSCRFPEEEEGGCELRVKFSRSADAPAYKQGQNQLYNELNLGRR | | |
| | EEYDVLDKRRGRDPEMGGKPRRKNPQEGLYNELQKDKMAEAYSE | | |
| | IGMKGERRRGKGHDGLYQGLSTATKDTYDALHMQALPPRSGEET | | |
| | RELQSLAAAVVPSAQTLKITDFSFSDFELSDLETALCTIRMFTDLNL | | |
| | VQNFQMKHEVLCRWILSVKKNYRKNVAYHNWRHAFNTAQCMFA | | |
| | ALKAGKIQNKLTDLEILALLIAALSHDLDHRGVNNSYIQRSEHPLA | | |
| | QLYCHSIMEHHHFDQCLMILNSPGNQILSGLSIEEYKTTLKIIKQAIL | | |
| | ATDLALYIKRRGEFFELIRKNQFNLEDPHQKELFLAMLMTACDLSA | | |
| | ITKPWPIQQRIAELVATEFFDQGDRERKELNIEPTDLMNREKKNKIP | | |
| | SMQVGFIDAICLQLYEALTHVSEDCFPLLDGCRKNRQKWQALAEQ | | |
| | Q* | | |
| OT-001301 (CD8a leader; | MALPVTALLLPLALLLHAARPYPYDVPDYADIQMTQTTSSLSASLG | 8276 | 8290 |
| HA Tag; CD19 scEV; CD8a- | DRVTISCRASQDISKYLNWYQQKPDGTVKLLIYHTSRLHSGVPSRF | | |
| Tm; (4-1BB intracellular | SGSGSGTDYSLTISNLEQEDIATYFCQQGNTLPYTFGGGTKLEITGG | | |
| domain); CD3zeta signaling | GGSGGGGSGGGGSEVKLQESGPGLVAPSQSLSVTCTVSGVSLPDY | | |
| domain; linker (SG); hPDE5 | GVSWIRQPPRKGLEWLGVIWGSETTYYNSALKSRLTIIKDNSKSQV | | |
| (Amino acid 535-860 of WT, | FLKMNSLQTDDTAIYYCAKHYYYGGSYAMDYWGQGTSVTVSSTT | | |
| R732L); stop) | TPAPRPPTPAPTIASQPLSLRPEACRPAAGGAVHTRGLDFACDIYIW | | |
| | APLAGTCGVLLLSLVITLYCKRGRKKLLYIFKQPFMRPVQTTQEED | | |
| | GCSCRFPEEEEGGCELRVKFSRSADAPAYKQGQNQLYNELNLGRR | | |
| | EEYDVLDKRRGRDPEMGGKPRRKNPQEGLYNELQKDKMAEAYSE | | |
| | IGMKGERRRGKGHDGLYQGLSTATKDTYDALHMQALPPRSGEET | | |
| | RELQSLAAAVVPSAQTLKITDFSFSDFELSDLETALCTIRMFTDLNL | | |
| | VQNFQMKHEVLCRWILSVKKNYRKNVAYHNWRHAFNTAQCMFA | | |
| | ALKAGKIQNKLTDLEILALLIAALSHDLDHRGVNNSYIQRSEHPLA | | |
| | QLYCHSIMEHHHFDQCLMILNSPGNQILSGLSIEEYKTTLKIIKQAIL | | |
| | ATDLALYIKRLGEFFELIRKNQFNLEDPHQKELFLAMLMTACDLSA | | |
| | ITKPWPIQQRIAELVATEFFDQGDRERKELNIEPTDLMNREKKNKIP | | |
| | SMQVGFIDAICLQLYEALTHVSEDCFPLLDGCRKNRQKWQALAEQ | | |
| | Q* | | |
| OT-001302 (CD8a leader; | MALPVTALLLPLALLLHAARPDIQMTQTTSSLSASLGDRVTISCRAS | 8277 | 8291 |
| CD19 scEV; CD8a-Tm; (4- | QDISKYLNWYQQKPDGTVKLLIYHTSRLHSGVPSRFSGSGSGTDYS | | |
| 1BB intracellular domain); | LTISNLEQEDIATYFCQQGNTLPYTFGGGTKLEITGGGGSGGGGSG | | |
| CD3zeta signaling domain; | GGGSEVKLQESGPGLVAPSQSLSVTCTVSGVSLPDYGVSWIRQPPR | | |
| linker (GS); hPDE5 (Amino | KGLEWLGVIWGSETTYYNSALKSRLTIIKDNSKSQVFLKMNSLQTD | | |
| acid 535-860 of WT, R732L, | DTAIYYCAKHYYYGGSYAMDYWGQGTSVTVSSTTTPAPRPPTPAP | | |
| F736A); linker (GS); mcherry | TIASQPLSLRPEACRPAAGGAVHTRGLDFACDIYIWAPLAGTCGVL | | |
| (M1L); stop) | LLSLVITLYCKRGRKKLLYIFKQPFMRPVQTTQEEDGCSCRFPEEEE | | |
| | GGCELRVKFSRSADAPAYKQGQNQLYNELNLGRREEYDVLDKRR | | |
| | GRDPEMGGKPRRKNPQEGLYNELQKDKMAEAYSEIGMKGERRRG | | |
| | KGHDGLYQGLSTATKDTYDALHMQALPPRGSEETRELQSLAAAV | | |
| | VPSAQTLKITDFSFSDFELSDLETALCTIRMFTDLNLVQNFQMKHEV | | |
| | LCRWILSVKKNYRKNVAYHNWRHAFNTAQCMFAALKAGKIQNK | | |
| | LTDLEILALLIAALSHDLDHRGVNNSYIQRSEHPLAQLYCHSIMEHH | | |
| | HFDQCLMILNSPGNQILSGLSIEEYKTTLKIIKQAILATDLALYIKRL | | |
| | GEFAELIRKNQFNLEDPHQKELFLAMLMTACDLSAITKPWPIQQRI | | |
| | AELVATEFFDQGDRERKELNIEPTDLMNREKKNKIPSMQVGFIDAI | | |
| | CLQLYEALTHVSEDCFPLLDGCRKNRQKWQALAEQQGSLSKGEED | | |
| | NMAIIKEFMRFKVHMEGSVNGHEFEIEGEGEGRPYEGTQTAKLKV | | |
| | TKGGPLPFAWDILSPQFMYGSKAYVKHPADIPDYLKLSFPEGFKWE | | |
| | RVMNFEDGGVVTVTQDSSLQDGEFIYKVKLRGTNFPSDGPVMQK | | |
| | KTMGWEASSERMYPEDGALKGEIKQRLKLKDGGHYDAEVKTTYK | | |
| | AKKPVQLPGAYNVNIKLDITSHNEDYTIVEQYERAEGRHSTGGMD | | |
| | ELYK* | | |
| OT-001303 (CD8a leader; | MALPVTALLLPLALLLHAARPDIQMTQTTSSLSASLGDRVTISCRAS | 8278 | 8292 |
| CD19 scEV; CD8a-Tm; (4- | QDISKYLNWYQQKPDGTVKLLIYHTSRLHSGVPSRFSGSGSGTDYS | | |
| 1BB intracellular domain); | LTISNLEQEDIATYFCQQGNTLPYTFGGGTKLEITGGGGSGGGGSG | | |
| CD3zeta signaling domain; | GGGSEVKLQESGPGLVAPSQSLSVTCTVSGVSLPDYGVSWIRQPPR | | |
| linker (GS); hPDE5 (Amino | KGLEWLGVIWGSETTYYNSALKSRLTIIKDNSKSQVFLKMNSLQTD | | |
| acid 535-860 of WT, R732L, | DTAIYYCAKHYYYGGSYAMDYWGQGTSVTVSSTTTPAPRPPTPAP | | |
| F736A); linker (GSG); P2A | TIASQPLSLRPEACRPAAGGAVHTRGLDFACDIYIWAPLAGTCGVL | | |
| linker; mcherry (M1L); stop) | LLSLVITLYCKRGRKKLLYIFKQPFMRPVQTTQEEDGCSCRFPEEEE | | |
| | GGCELRVKFSRSADAPAYKQGQNQLYNELNLGRREEYDVLDKRR | | |
| | GRDPEMGGKPRRKNPQEGLYNELQKDKMAEAYSEIGMKGERRRG | | |
| | KGHDGLYQGLSTATKDTYDALHMQALPPRGSEETRELQSLAAAV | | |
| | VPSAQTLKITDFSFSDFELSDLETALCTIRMFTDLNLVQNFQMKHEV | | |
| | LCRWILSVKKNYRKNVAYHNWRHAFNTAQCMFAALKAGKIQNK | | |
| | LTDLEILALLIAALSHDLDHRGVNNSYIQRSEHPLAQLYCHSIMEHH | | |
| | HFDQCLMILNSPGNQILSGLSIEEYKTTLKIIKQAILATDLALYIKRL | | |
| | GEFAELIRKNQFNLEDPHQKELFLAMLMTACDLSAITKPWPIQQRI | | |
| | AELVATEFFDQGDRERKELNIEPTDLMNREKKNKIPSMQVGFIDAI | | |
| | CLQLYEALTHVSEDCFPLLDGCRKNRQKWQALAEQQGSGGATNF | | |
| | SLLKQAGDVEENPGPLSKGEEDNMAIIKEFMRFKVHMEGSVNGHE | | |
| | FEIEGEGEGRPYEGTQTAKLKVTKGGPLPFAWDILSPQFMYGSKAY | | |
| | VKHPADIPDYLKLSFPEGFKWERVMNFEDGGVVTVTQDSSLQDGE | | |
| | FIYKVKLRGTNFPSDGPVMQKKTMGWEASSERMYPEDGALKGEIK | | |
| | QRLKLKDGGHYDAEVKTTYKAKKPVQLPGAYNVNIKLDITSHNED | | |
| | YTIVEQYERAEGRHSTGGMDELYK* | | |
| OT-001304 (CD8a leader; | MALPVTALLLPLALLLHAARPYPYDVPDYADIQMTQTTSSLSASLG | 8279 | 8293 |
| HA Tag; CDI9 scEV; CD8a- | DRVTISCRASQDISKYLNWYQQKPDGTVKLLIYHTSRLHSGVPSRF | | |
| Tm, (4-1BB intracellular | SGSGSGTDYSLTISNLEQEDIATYFCQQGNTLPYTFGGGTKLEITGG | | |
| domain); CD3zeta signaling | GGSGGGGSGGGGSEVKLQESGPGLVAPSQSLSVTCTVSGVSLPDY | | |
| domain; linker (GS); | GVSWIRQPPRKGLEWLGVIWGSETTYYNSALKSRLTIIKDNSKSQV | | |
| hPDE5(Amino acid 535-860 | FLKMNSLQTDDTAIYYCAKHYYYGGSYAMDYWGQGTSVTVSSTT | | |
| of WT); linker (GS), Spacer | TPAPRPPTPAPTIASQPLSLRPEACRPAAGGAVHTRGLDFACDIYIW | | |
| (LD); P2A linker; mcherry | APLAGTCGVLLLSLVITLYCKRGRKKLLYIFKQPFMRPVQTTQEED | | |
| (M1L); stop) | GCSCRFPEEEEGGCELRVKFSRSADAPAYKQGQNQLYNELNLGRR | | |
| | EEYDVLDKRRGRDPEMGGKPRRKNPQEGLYNELQKDKMAEAYSE | | |
| | IGMKGERRRGKGHDGLYQGLSTATKDTYDALHMQALPPRGSEET | | |
| | RELQSLAAAVVPSAQTLKITDFSFSDFELSDLETALCTIRMFTDLNL | | |
| | VQNFQMKHEVLCRWILSVKKNYRKNVAYHNWRHAFNTAQCMFA | | |
| | ALKAGKIQNKLTDLEILALLIAALSHDLDHRGVNNSYIQRSEHPLA | | |
| | QLYCHSIMEHHHFDQCLMILNSPGNQILGLSIEEYKTTLKIIKQAIL | | |
| | ATDLALYIKRRGEFFELIRKNQFNLEDPHQKELFLAMLMTACDLSA | | |
| | ITKPWPIQQRIAELVATEFFDQGDRERKELNIEPTDLMNREKKNKIP | | |
| | SMQVGFIDAICLQLYEALTHVSEDCFPLLDGCRKNRQKWQALAEQ | | |
| | QGSLDGATNFSLLKQAGDVEENPGPLSKGEEDNMAIIKEFMRFKV | | |
| | HMEGSVNGHEFEIEGEGEGRPYEGTQTAKLKVTKGGPLPFAWDILS | | |
| | PQFMYGSKAYVKHPADIPDYLKLSFPEGFKWERVMNFEDGGVVT | | |
| | VTQDSSLQDGEFIYKVKLRGTNFPSDGPVMQKKTMGWEASSERM | | |
| | YPEDGALKGEIKQRLKLKDGGHYDAEVKTTYKAKKPVQLPGAYN | | |
| | VNIKLDITSHNEDYTIVEQYERAEGRHSTGGMDELYK* | | |
| OT-001305 (CD8a leader; | MALPVTALLLPLALLLHAARPYPYDVPDYADIQMTQTTSSLSASLG | 8280 | 8294 |
| HA Tag, CD19 scEV; CD8a- | DRVTISCRASQDISKYLNWYQQKPDGTVKLLIYHTSRLHSGVPSRF | | |
| Tm; (4-1BB intracellular | SGSGSGTDYSLTISNLEQEDIATYFCQQGNTLPYTFGGGTKLEITGG | | |
| domain); CD3zeta signaling | GGSGGGGSGGGGSEVKLQESGPGLVAPSQSLSVTCTVSGVSLPDY | | |
| domain; Linker (GS); | GVSWIRQPPRKGLEWLGVIWGSETTYYNSALKSRLTIIKDNSKSQV | | |
| hPDE5(Amino acid 535-860 | FLKMNSLQTDDTAIYYCAKHYYYGGSYAMDYWGQGTSVTVSSTT | | |
| of WT, R732L); Linker (GS), | TPAPRPPTPAPTIASQPLSLRPEACRPAAGGAVHTRGLDFACDIYIW | | |
| Spacer (LD); P2A linker; | APLAGTCGVLLLSLVITLYCKRGRKKLLYIFKQPFMRPVQTTQEED | | |
| mcherry (M1L); stop) | GCSCRFPEEEEGGCELRVKFSRSADAPAYKQGQNQLYNELNLGRR | | |
| | EEYDVLDKRRGRDPEMGGKPRRKNPQEGLYNELQKDKMAEAYSE | | |
| | IGMKGERRRGKGHDGLYQGLSTATKDTYDALHMQALPPRGSEET | | |
| | RELQSLAAAVVPSAQTLKITDFSFSDFELSDLETALCTIRMFTDLNL | | |
| | VQNFQMKHEVLCRWILSVKKNYRKNVAYHNWRHAFNTAQCMFA | | |
| | ALKAGKIQNKLTDLEILALLIAALSHDLDHRGVNNSYIQRSEHPLA | | |
| | QLYCHSIMEHHHFDQCLMILNSPGNQILSGLSIEEYKTTLKIIKQAIL | | |
| | ATDLALYIKRLGEFFELIRKNQFNLEDPHQKELFLAMLMTACDLSA | | |
| | ITKPWPIQQRIAELVATEFFDQGDRERKELNIEPTDLMNREKKNKIP | | |
| | SMQVGFIDAICLQLYEALTHVSEDCFPLLDGCRKNRQKWQALAEQ | | |
| | QGSLDGATNFSLLKQAGDVEENPGPLSKGEEDNMAIIKEFMRFKV | | |
| | HMEGSVNGHEFEIEGEGEGRPYEGTQTAKLKVTKGGPLPFAWDILS | | |
| | PQFMYGSKAYVKHPADIPDYLKLSFPEGFKWERVMNFEDGGVVT | | |
| | VTQDSSLQDGEFIYKVKLRGTNFPSDGPVMQKKTMGWEASSERM | | |
| | YPEDGALKGEIKQRLKLKDGGHYDAEVKTTYKAKKPVQLPGAYN | | |
| | VNIKLDITSHNEDYTIVEQYERAEGRHSTGGMDELYK* | | |
| OT-001454 (CD8a leader; | MALPVTALLLPLALLLHAARPDIQMTQTTSSLSASLGDRVTISCRAS | 8281 | 8295 |
| CD19 scEV; CD8a-Tm; (4- | QDISKYLNWYQQKPDGTVKLLIYHTSRLHSGVPSRFSGSGSGTDYS | | |
| 1BB intracellular domain); | LTISNLEQEDIATYFCQQGNTLPYTFGGGTKLEITGGGGSGGGGSG | | |
| CD3zeta signaling domain; | GGGSEVKLQESGPGLVAPSQSLSVTCTVSGVSLPDYGVSWIRQPPR | | |
| Linker (GS); hPDE5(Amino | KGLEWLGVIWGSETTYYNSALKSRLTIIKDNSKSQVFLKMNSLQTD | | |
| acid 535-860 of WT, R732L); | DTAIYYCAKHYYYGGSYAMDYWGQGTSVTVSSTTTPAPRPPTPAP | | |
| stop) | TIASQPLSLRPEACRPAAGGAVHTRGLDFACDIYIWAPLAGTCGVL | | |
| | LLSLVITLYCKRGRKKLLYIFKQPFMRPVQTTQEEDGCSCRFPEEEE | | |
| | GGCELRVKFSRSADAPAYKQGQNQLYNELNLGRREEYDVLDKRR | | |
| | GRDPEMGGKPRRKNPQEGLYNELQKDKMAEAYSEIGMKGERRRG | | |
| | KGHDGLYQGLSTATKDTYDALHMQALPPRGSEETRELQSLAAAV | | |
| | VPSAQTLKITDFSFSDFELSDLETALCTIRMFTDLNLVQNFQMKHEV | | |
| | LCRWILSVKKNYRKNVAYHNWRHAFNTAQCMFAALKAGKIQNK | | |
| | LTDLEILALLIAALSHDLDHRGVNNSYIQRSEHPLAQLYCHSIMEHH | | |
| | HFDQCLMILNSPGNQILSGLSIEEYKTTLKIIKQAILATDLALYIKRL | | |
| | GEFFELIRKNQFNLEDPHQKELFLAMLMTACDLSAITKPWPIQQRIA | | |
| | ELVATEFFDQGDRERKELNIEPTDLMNREKKNKIPSMQVGFIDAICL | | |
| | QLYEALTHVSEDCFPLLDGCRKNRQKWQALAEQQ* | | |
| OT-001455 (CD8a leader; | MALPVTALLLPLALLLHAARPDIQMTQTTSSLSASLGDRVTISCRAS | 8282 | 8296 |
| CD19 scFV; CD8a-Tm; (4- | QDISKYLNWYQQKPDGTVKLLIYHTSRLHSGVPSRFSGSGSGTDYS | | |
| 1BB intracellular domain); | LTISNLEQEDIATYFCQQGNTLPYTFGGGTKLEITGGGGSGGGGSG | | |
| CD3zeta signaling domain; | GGGSEVKLQESGPGLVAPSQSLSVTCTVSGVSLPDYGVSWIRQPPR | | |
| Linker (GS); hPDE5(Amino | KGLEWLGVIWGSETTYYNSALKSRLTIIKDNSKSQVFLKMNSLQTD | | |
| acid 535-860 of WT, | DTAIYYCAKHYYYGGSYAMDYWGQGTSVTVSSTTTPAPRPPTPAP | | |
| H653A); stop) | TIASQPLSLRPEACRPAAGGAVHTRGLDFACDIYIWAPLAGTCGVL | | |
| | LLSLVITLYCKRGRKKLLYIFKQPFMRPVQTTQEEDGCSCRFPEEEE | | |
| | GGCELRVKFSRSADAPAYKQGQNQLYNELNLGRREEYDVLDKRR | | |
| | GRDPEMGGKPRRKNPQEGLYNELQKDKMAEAYSEIGMKGERRRG | | |
| | KGHDGLYQGLSTATKDTYDALHMQALPPRGSEETRELQSLAAAV | | |
| | VPSAQTLKITDFSFSDFELSDLETALCTIRMFTDLNLVQNFQMKHEV | | |
| | LCRWILSVKKNYRKNVAYHNWRHAFNTAQCMFAALKAGKIQNK | | |
| | LTDLEMALLIAALSADLDHRGVNNSYIQRSEHPLAQLYCHSIMEHH | | |
| | HFDQCLMILNSPGNQILGLSIEEYKTTLKIIKQAILATDLALYIKRR | | |
| | GEFFELIRKNQFNLEDPHQKELFLAMLMTACDLSAITKPWPIQQRIA | | |
| | ELVATEFFDQGDRERKELNIEPTDLMNREKKNKIPSMQVGFIDAICL | | |
| | QLYEALTHVSEDCFPLLDGCRKNRQKWQALAEQQ* | | |
| OT-001456 (CD8a leader; | MALPVTALLLPLALLLHAARPDIQMTQTTSSLSASLGDRVTISCRAS | 8283 | 8297 |
| CD19 scFV; CD8a-Tm; (4- | QDISKYLNWYQQKPDGTVKLLIYHTSRLHSGVPSRFSGSGSGTDYS | | |
| 1BB intracellular domain); | LTISNLEQEDIATYFCQQGNTLPYTFGGGTKLEITGGGGSGGGGSG | | |
| CD3zeta signaling domain; | GGGSEVKLQESGPGLVAPSQSLSVTCTVSGVSLPDYGVSWIRQPPR | | |
| Linker (GS); hPDE5(Amino | KGLEWLGVIWGSETTYYNSALKSRLTIIKDNSKSQVFLKMNSLQTD | | |
| acid 535-860 of WT, H653A, | DTAIYYCAKHYYYGGSYAMDYWGQGTSVTVSSTTTPAPRPPTPAP | | |
| R732L); stop) | TIASQPLSLRPEACRPAAGGAVHTRGLDFACDIYIWAPLAGTCGVL | | |
| | LLSLVITLYCKRGRKKLLYIFKQPFMRPVQTTQEEDGCSCRFPEEEE | | |
| | GGCELRVKFSRSADAPAYKQGQNQLYNELNLGRREEYDVLDKRR | | |
| | GRDPEMGGKPRRKNPQEGLYNELQKDKMAEAYSEIGMKGERRRG | | |
| | KGHDGLYQGLSTATKDTYDALHMQALPPRGSEETRELQSLAAAV | | |
| | VPSAQTLKITDFSFSDFELSDLETALCTIRMFTDLNLVQNFQMKHEV | | |
| | LCRWILSVKKNYRKNVAYHNWRHAFNTAQCMFAALKAGKIQNK | | |
| | LTDLEIALLIAALSADLDHRGVNNSYIQRSEHPLAQLYCHSIMEHH | | |
| | HFDQCLMILNSPGNQILSGLSIEEYKTTLKIIKQAILATDLALYIKRL | | |
| | GEFFELIRKNQFNLEDPHQKELFLAMLMTACDLSAITKPWPIQQRIA | | |
| | ELVATEFFDQGDRERKELNIEPTDLMNREKKNKIPSMQVGFIDAICL | | |
| | QLYEALTHVSEDCFPLLDGCRKNRQKWQALAEQQ* | | |
| OT-001457 (CD8a leader; | MALPVTALLLPLALLLHAARPDIQMTQTTSSLSASLGDRVTISCRAS | 8284 | 8298 |
| CD19 scFV; CD8a-Tm; (4- | QDISKYLNWYQQKPDGTVKLLIYHTSRLHSGVPSRFSGSGSGTDYS | | |
| 1BB intracellular domain); | LTISNLEQEDIATYFCQQGNTLPYTFGGGTKLEITGGGGSGGGGSG | | |
| CD3zeta signaling domain; | GGGSEVKLQESGPGLVAPSQSLSVTCTVSGVSLPDYGVSWIRQPPR | | |
| Linker (GS); hPDE5(Amino | KGLEWLGVIWGSETTYYNSALKSRLTIIKDNSKSQVFLKMNSLQTD | | |
| acid 535-860 of WT, R732L, | DTAIYYCAKHYYYGGSYAMDYWGQGTSVTVSSTTTPAPRPPTPAP | | |
| D764A); stop) | TIASQPLSLRPEACRPAAGGAVHTRGLDFACDIYIWAPLAGTCGVL | | |
| | LLSLVITLYCKRGRKKLLYIFKQPFMRPVQTTQEEDGCSCRFPEEEE | | |
| | GGCELRVKFSRSADAPAYKQGQNQLYNELNLGRREEYDVLDKRR | | |
| | GRDPEMGGKPRRKNPQEGLYNELQKDKMAEAYSEIGMKGERRRG | | |
| | KGHDGLYQGLSTATKDTYDALHMQALPPRGSEETRELQSLAAAV | | |
| | VPSAQTLKITDFSFSDFELSDLETALCTIRMFTDLNLVQNFQMKHEV | | |
| | LCRWILSVKKNYRKNVAYHNWRHAFNTAQCMFAALKAGKIQNK | | |
| | LTDLEILALLIAALSHDLDHRGVNNSYIQRSEHPLAQLYCHSIMEHH | | |
| | HFDQCLMILNSPGNQILSGLSIEEYKTTLKIIKQAILATDLALYIKRL | | |
| | GEFFELIRKNQFNLEDPHQKELFLAMLMTACALSAITKPWPIQQRIA | | |
| | ELVATEFFDQGDRERKELNIEPTDLMNREKKNKIPSMQVGFIDAICL | | |
| | QLYEALTHVSEDCFPLLDGCRKNRQKWQALAEQQ* | | |
| OT-001897 (CD8a leader; | MALPVTALLLPLALLLHAARPDIQMTQTTSSLSASLGDRVTISCRAS | 8925 | 8976 |
| CD19 scFv; CD8a Hinge and | QDISKYLNWYQQKPDGTVKLLIYHTSRLHSGVPSRFSGSGSGTDYS | | |
| Transmembrane Domain; 4- | LTISNLEQEDIATYFCQQGNTLPYTFGGGTKLEITGGGGSGGGGSG | | |
| 1BB intracellular domain | GGGSEVKLQESGPGLVAPSQSLSVTCTVSGVSLPDYGVSWIRQPPR | | |
| (CD28 co-stimulatory | KGLEWLGVIWGSETTYYNSALKSRLTIIKDNSKSQVFLKMNSLQTD | | |
| domain); CD3 zeta | DTAIYYCAKHYYYGGSYAMDYWGQGTSVTVSSTTTPAPRPPTPAP | | |
| intracellular domain; Linker | TIASQPLSLRPEACRPAAGGAVHTRGLDFACDIYIWAPLAGTCGVL | | |
| (GS); stop) | LLSLVITLYCKRGRKKLLYIFKQPFMRPVQTTQEEDGCSCRFPEEEE | | |
| | GGCELRVKFSRSADAPAYKQGQNQLYNELNLGRREEYDVLDKRR | | |
| | GRDPEMGGKPRRKNPQEGLYNELQKDKMAEAYSEIGMKGERRRG | | |
| | KGHDGLYQGLSTATKDTYDALHMQALPPRGS* | | |
| OT-001896 (CD8a leader; | MALPVTALLLPLALLLHAARPDIQMTQTTSSLSASLGDRVTISCRAS | 8926 | 8977 |
| CD19 scFv; CD8a Hinge and | QDISKYLNWYQQKPDGTVKLLIYHTSRLHSGVPSRFSGSGSGTDYS | | |
| Transmembrane Domain; 4- | LTISNLEQEDIATYFCQQGNTLPYTFGGGTKLEITGGGGSGGGGSG | | |
| 1BB intracellular domain | GGGSEVKLQESGPGLVAPSQSLSVTCTVSGVSLPDYGVSWIRQPPR | | |
| (CD28 co-stimulatory | KGLEWLGVIWGSETTYYNSALKSRLTIIKDNSKSQVFLKMNSLQTD | | |
| domain); CD3 zeta | DTAIYYCAKHYYYGGSYAMDYWGQGTSVTVSSTTTPAPRPPTPAP | | |
| intracellular domain; Linker | TIASQPLSLRPEACRPAAGGAVHTRGLDFACDIYIWAPLAGTCGVL | | |
| (GS); hPDE5 AA 535-860 of | LLSLVITLYCKRGRKKLLYIFKQPFMRPVQTTQEEDGCSCRFPEEEE | | |
| WT (H653A, R732L); stop) | GGCELRVKFSRSADAPAYKQGQNQLYNELNLGRREEYDVLDKRR | | |
| | GRDPEMGGKPRRKNPQEGLYNELQKDKMAEAYSEIGMKGERRRG | | |
| | KGHDGLYQGLSTATKDTYDALHMQALPPRGSEETRELQSLAAAV | | |
| | VPSAQTLKITDFSFSDFELSDLETALCTIRMFTDLNLVQNFQMKHEV | | |
| | LCRWILSVKKNYRKNVAYHNWRHAFNTAQCMFAALKAGKIQNK | | |
| | LTDLEILALLIAALSADLDHRGVNNSYIQRSEHPLAQLYCHSIMEHH | | |
| | HFDQCLMILNSPGNQILSGLSIEEYKTTLKIIKQAILATDLALYIKRL | | |
| | GEFFELIRKNQFNLEDPHQKELFLAMLMTACDLSAITKPWPIQQRIA | | |
| | ELVATEFFDQGDRERKELNIEPTDLMNREKKNKIPSMQVGFIDAICL | | |
| | QLYEALTHVSEDCFPLLDGCRKNRQKWQALAEQQ* | | |
| OT-001907 (CD8a leader; | MALPVTALLLPLALLLHAARPYPYDVPDYADIQMTQTTSSLSASLG | 8927 | 8978 |
| HA Tag; CD19 scFv; CD8a | DRVTISCRASQDISKYLNWYQQKPDGTVKLLIYHTSRLHSGVPSRF | | |
| Hinge and Transmembrane | SGSGSGTDYSLTISNLEQEDIATYFCQQGNTLPYTFGGGTKLEITGG | | |
| Domain; 4-1BB intracellular | GGSGGGGSGGGGSEVKLQESGPGLVAPSQSLSVTCTVSGVSLPDY | | |
| domain (CD28 co-stimulatory | GVSWIRQPPRKGLEWLGVIWGSETTYYNSALKSRLTIIKDNSKSQV | | |
| domain); CD3 zeta | FLKMNSLQTDDTAIYYCAKHYYYGGSYAMDYWGQGTSVTVSSTT | | |
| intracellular domain; Linker | TPAPRPPTPAPTIASQPLSLRPEACRPAAGGAVHTRGLDFACDIYIW | | |
| (GS); hPDE5 AA 535-860 of | APLAGTCGVLLLSLVITLYCKRGRKKLLYIFKQPFMRPVQTTQEED | | |
| WT (R732L, F736A); stop) | GCSCRFPEEEEGGCELRVKFSRSADAPAYKQGQNQLYNELNLGRR | | |
| | EEYDVLDKRRGRDPEMGGKPRRKNPQEGLYNELQKDKMAEAYSE | | |
| | IGMKGERRRGKGHDGLYQGLSTATKDTYDALHMQALPPRGSEET | | |
| | RELQSLAAAVVPSAQTLKITDFSFSDFELSDLETALCTIRMFTDLNL | | |
| | VQNFQMKHEVLCRWILSVKKNYRKNVAYHNWRHAFNTAQCMFA | | |
| | ALKAGKIQNKLTDLEILALLIAALSHDLDHRGVNNSYIQRSEHPLA | | |
| | QLYCHSIMEHHHFDQCLMILNSPGNQILSGLSIEEYKTTLKIIKQAIL | | |
| | ATDLALYIKRLGEFAELIRKNQFNLEDPHQKELFLAMLMTACDLSA | | |
| | ITKPWPIQQRIAELVATEFFDQGDRERKELNIEPTDLMNREKKNKIP | | |
| | SMQVGFIDAICLQLYEALTHVSEDCFPLLDGCRKNRQKWQALAEQ | | |
| | Q* | | |
| OT-001903 (CD8a leader; | MALPVTALLLPLALLLHAARPYPYDVPDYADIQMTQTTSSLSASLG | 8928 | 8979 |
| HA Tag; CD19 scFv; CD8a | DRVTISCRASQDISKYLNWYQQKPDGTVKLLIYHTSRLHSGVPSRF | | |
| Hinge and Transmembrane | SGSGSGTDYSLTISNLEQEDIATYFCQQGNTLPYTFGGGTKLEITGG | | |
| Domain; 4-1BB intracellular | GGSGGGGSGGGGSEVKLQESGPGLVAPSQSLSVTCTVSGVSLPDY | | |
| domain (CD28 co-stimulatory | GVSWIRQPPRKGLEWLGVIWGSETTYYNSALKSRLTIIKDNSKSQV | | |
| domain); CD3 zeta | FLKMNSLQTDDTAIYYCAKHYYYGGSYAMDYWGQGTSVTVSSTT | | |
| intracellular domain; Linker | TPAPRPPTPAPTIASQPLSLRPEACRPAAGGAVHTRGLDFACDIYIW | | |
| (GS); hPDE5 AA 535-860 of | APLAGTCGVLLLSLVITLYCKRGRKKLLYIFKQPFMRPVQTTQEED | | |
| WT (H653A, R732L); stop) | GCSCRFPEEEEGGCELRVKFSRSADAPAYKQGQNQLYNELNLGRR | | |
| | EEYDVLDKRRGRDPEMGGKPRRKNPQEGLYNELQKDKMAEAYSE | | |
| | IGMKGERRRGKGHDGLYQGLSTATKDTYDALHMQALPPRGSEET | | |
| | RELQSLAAAVVPSAQTLKITDFSFSDFELSDLETALCTIRMFTDLNL | | |
| | VQNFQMKHEVLCRWILSVKKNYRKNVAYHNWRHAFNTAQCMFA | | |
| | ALKAGKIQNKLTDLEILALLIAALSADLDHRGVNNSYIQRSEHPLA | | |
| | QLYCHSIMEHHHFDQCLMILNSPGNQILSGLSIEEYKTTLKIIKQAIL | | |
| | ATDLALYIKRLGEFFELIRKNQFNLEDPHQKELFLAMLMTACDLSA | | |
| | ITKPWPIQQRIAELVATEFFDQGDRERKELNIEPTDLMNREKKNKIP | | |
| | SMQVGFIDAICLQLYEALTHVSEDCFPLLDGCRKNRQKWQALAEQ | | |
| | Q* | | |
| OT-001906 (CD8a leader; | MALPVTALLLPLALLLHAARPYPYDVPDYADIQMTQTTSSLSASLG | 8929 | 8980 |
| HA Tag; CD19 scFv; CD8a | DRVTISCRASQDISKYLNWYQQKPDGTVKLLIYHTSRLHSGVPSRF | | |
| Hinge and Transmembrane | SGSGSGTDYSLTISNLEQEDIATYECQQGNTLPYTEGGGTKLEITGG | | |
| Domain; 4-1BB intracellular | GGSGGGGSGGGGSEVKLQESGPGLVAPSQSLSVTCTVSGVSLPDY | | |
| domain (CD28 co-stimulatory | GVSWIRQPPRKGLEWLGVIWGSETTYYNSALKSRLTIIKDNSKSQV | | |
| domain); CD3 zeta | FLKMNSLQTDDTAIYYCAKHYYYGGSYAMDYWGQGTSVTVSSTT | | |
| intracellular domain; Linker | TPAPRPPTPAPTIASQPLSLRPEACRPAAGGAVHTRGLDFACDIYIW | | |
| (GS); stop) | APLAGTCGVLLLSLVITLYCKRGRKKLLYIFKQPFMRPVQTTQEED | | |
| | GCSCRFPEEEEGGCELRVKFSRSADAPAYKQGQNQLYNELNLGRR | | |
| | EEYDVLDKRRGRDPEMGGKPRRKNPQEGLYNELQKDKMAEAYSE | | |
| | IGMKGERRRGKGHDGLYQGLSTATKDTYDALHMQALPPRGS* | | |
| OT-001905 (CD8a leader; | MALPVTALLLPLALLLHAARPDIQMTQTTSSLSASLGDRVTISCRAS | 8930 | 8981 |
| CD19 scFv; CD8a Hinge and | QDISKYLNWYQQKPDGTVKLLIYHTSRLHSGVPSRFSGSGSGTDYS | | |
| Transmembrane Domain; 4- | LTISNLEQEDIATYFCQQGNTLPYTFGGGTKLEITGGGGSGGGGSG | | |
| 1BB intracellular domain | GGGSEVKLQESGPGLVAPSQSLSVTCTVSGVSLPDYGVSWIRQPPR | | |
| (CD28 co-stimulatory | KGLEWLGVIWGSETTYYNSALKSRLTIIKDNSKSQVFLKMNSLQTD | | |
| domain); CD3 zeta | DTAIYYCAKHYYYGGSYAMDYWGQGTSVTVSSTTTPAPRPPTPAP | | |
| intracellular domain; Linker | TIASQPLSLRPEACRPAAGGAVHTRGLDFACDIYIWAPLAGTCGVL | | |
| (GS); enhanced Green | LLSLVITLYCKRGRKKLLYIFKQPFMRPVQTTQEEDGCSCRFPEEEE | | |
| Fluorescent Protein (A206K); | GGCELRVKFSRSADAPAYKQGQNQLYNELNLGRREEYDVLDKRR | | |
| Linker (GS); stop) | GRDPEMGGKPRRKNPQEGLYNELQKDKMAEAYSEIGMKGERRRG | | |
| | KGHDGLYQGLSTATKDTYDALHMQALPPRGSMVSKGEELFTGVV | | |
| | PILVELDGDVNGHKFSVSGEGEGDATYGKLTLKFICTTGKLPVPWP | | |
| | TLVTTLTYGVQCFSRYPDEMKQHDFFKSAMPEGYVQERTIFFKDD | | |
| | GNYKTRAEVKFEGDTLVNRIELKGIDFKEDGNILGHKLEYNYNSH | | |
| | NVYIMADKQKNGIKVNFKIRHNIEDGSVQLADHYQQNTPIGDGPV | | |
| | LLPDNHYLSTQSKLSKDPNEKRDHMVLLEFVTAAGITLGMDELYK | | |
| | GS* | | |
| OT-001904 (CD8a leader; | MALPVTALLLPLALLLHAARPDIQMTQTTSSLSASLGDRVTISCRAS | 8931 | 8982 |
| CD19 scFv; CD8a Hinge and | QDISKYLNWYQQKPDGTVKLLIYHTSRLHSGVPSRFSGSGSGTDYS | | |
| Transmembrane Domain; 4- | LTISNLEQEDIATYFCQQGNTLPYTFGGGTKLEITGGGGSGGGGSG | | |
| 1BB intracellular domain | GGGSEVKLQESGPGLVAPSQSLSVTCTVSGVSLPDYGVSWIRQPPR | | |
| (CD28 co-stimulatory | KGLEWLGVIWGSETTYYNSALKSRLTIIKDNSKSQVFLKMNSLQTD | | |
| domain); CD3 zeta | DTAIYYCAKHYYYGGSYAMDYWGQGTSVTVSSTTTPAPRPPTPAP | | |
| intracellular domain; Linker | TIASQPLSLRPEACRPAAGGAVHTRGLDFACDIYIWAPLAGTCGVL | | |
| (GS); enhanced Green | LLSLVITLYCKRGRKKLLYIFKQPFMRPVQTTQEEDGCSCRFPEEEE | | |
| Fluorescent Protein (A206K); | GGCELRVKFSRSADAPAYKQGQNQLYNELNLGRREEYDVLDKRR | | |
| Linker (GS); hPDE5 AA 535- | GRDPEMGGKPRRKNPQEGLYNELQKDKMAEAYSEIGMKGERRRG | | |
| 860 of WT (H653A, R732L); | KGHDGLYQGLSTATKDTYDALHMQALPPRGSMVSKGEELFTGVV | | |
| stop) | PILVELDGDVNGHKESVSGEGEGDATYGKLTLKFICTTGKLPVPWP | | |
| | TLVTTLTYGVQCFSRYPDEMKQHDFFKSAMPEGYVQERTIFFKDD | | |
| | GNYKTRAEVKFEGDTLVNRIELKGIDFKEDGNILGHKLEYNYNSH | | |
| | NVYIMADKQKNGIKVNFKIRHNIEDGSVQLADHYQQNTPIGDGPV | | |
| | LLPDNHYLSTQSKLSKDPNEKRDHMVLLEFVTAAGITLGMDELYK | | |
| | GSEETRELQSLAAAVVPSAQTLKITDFSFSDFELSDLETALCTIRMFT | | |
| | DLNLVQNFQMKHEVLCRWILSVKKNYRKNVAYHNWRHAFNTAQ | | |
| | CMFAALKAGKIQNKLTDLEILALLIAALSADLDHRGVNNSYIQRSE | | |
| | HPLAQLYCHSIMEHHHFDQCLMILNSPGNQILSGLSIEEYKTTLKIIK | | |
| | QAILATDLALYIKRLGEFFELIRKNQFNLEDPHQKELFLAMLMTAC | | |
| | DLSAITKPWPIQQRIAELVATEFFDQGDRERKELNIEPTDLMNREKK | | |
| | NKIPSMQVGFIDAICLQLYEALTHVSEDCFPLLDGCRKNRQKWQAL | | |
| | AEQQ* | | |
| OT-001902 (CD8a leader; | MALPVTALLLPLALLLHAARPDIQMTQTTSSLSASLGDRVTISCRAS | 8932 | 8983 |
| CD19 scFv; CD8a Hinge and | QDISKYLNWYQQKPDGTVKLLIYHTSRLHSGVPSRFSGSGSGTDYS | | |
| Transmembrane Domain; 4- | LTISNLEQEDIATYFCQQGNTLPYTFGGGTKLEITGGGGSGGGGSG | | |
| 1BB intracellular domain | GGGSEVKLQESGPGLVAPSQSLSVTCTVSGVSLPDYGVSWIRQPPR | | |
| (CD28 co-stimulatory | KGLEWLGVIWGSETTYYNSALKSRLTIIKDNSKSQVFLKMNSLQTD | | |
| domain); CD3 zeta | DTAIYYCAKHYYYGGSYAMDYWGQGTSVTVSSTTTPAPRPPTPAP | | |
| intracellular domain; Linker | TIASQPLSLRPEACRPAAGGAVHTRGLDFACDIYIWAPLAGTCGVL | | |
| (GS); hPDE5 AA 535-860 of | LLSLVITLYCKRGRKKLLYIFKQPFMRPVQTTQEEDGCSCRFPEEEE | | |
| WT (H653A, R732L); Linker | GGCELRVKFSRSADAPAYKQGQNQLYNELNLGRREEYDVLDKRR | | |
| (GSG); P2A Cleavage | GRDPEMGGKPRRKNPQEGLYNELQKDKMAEAYSEIGMKGERRRG | | |
| peptide; Firefly Luciferase | KGHDGLYQGLSTATKDTYDALHMQALPPRGSEETRELQSLAAAV | | |
| (N50D, N119G, S548I, | VPSAQTLKITDFSFSDFELSDLETALCTIRMFTDLNLVQNFQMKHEV | | |
| K549A, L550V); stop) | LCRWILSVKKNYRKNVAYHNWRHAFNTAQCMFAALKAGKIQNK | | |
| | LTDLEILALLIAALSADLDHRGVNNSYIQRSEHPLAQLYCHSIMEHH | | |
| | HFDQCLMILNSPGNQILSGLSIEEYKTTLKIIKQAILATDLALYIKRL | | |
| | GEFFELIRKNQFNLEDPHQKELFLAMLMTACDLSAITKPWPIQQRIA | | |
| | ELVATEFFDQGDRERKELNIEPTDLMNREKKNKIPSMQVGFIDAICL | | |
| | QLYEALTHVSEDCFPLLDGCRKNRQKWQALAEQQGSGATNFSLLK | | |
| | QAGDVEENPGPMEDAKNIKKGPAPFYPLEDGTAGEQLHKAMKRY | | |
| | ALVPGTIAFTDAHIEVDITYAEYFEMSVRLAEAMKRYGLNTNHRIV | | |
| | VCSENSLQFFMPVLGALFIGVAVAPANDIYNERELLNSMGISQPTV | | |
| | VFVSKKGLQKILNVQKKLPIIQKIIIMDSKTDYQGFQSMYTFVTSHL | | |
| | PPGFNEYDFVPESFDRDKTIALIMNSSGSTGLPKGVALPHRTACVRF | | |
| | SHARDPIFGNQIIPDTAILSVVPFHHGFGMFTTLGYLICGFRVVLMY | | |
| | RFEEELFLRSLQDYKIQSALLVPTLFSFFAKSTLIDKYDLSNLHEIAS | | |
| | GGAPLSKEVGEAVAKRFHLPGIRQGYGLTETTSAILITPEGDDKPGA | | |
| | VGKVVPFFEAKVVDLDTGKTLGVNQRGELCVRGPMIMSGYVNNP | | |
| | EATNALIDKDGWLHSGDIAYWDEDERFFIVDRLKSLIKYKGYQVA | | |
| | PAELESILLQHPNIFDAGVAGLPDDDAGELPAAVVVLEHGKTMTEK | | |
| | EIVDYVASQVTTAKKLRGGVVFVDEVPKGLTGKLDARKIREILIKA | | |
| | KKGGKIAV* | | |
| OT-001901 (CD8a leader; | MALPVTALLLPLALLLHAARPDIQMTQTTSSLSASLGDRVTISCRAS | 8933 | 8984 |
| CD19 scFv; CD8a Hinge and | QDISKYLNWYQQKPDGTVKLLIYHTSRLHSGVPSRFSGSGSGTDYS | | |
| Transmembrane Domain; 4- | LTISNLEQEDIATYFCQQGNTLPYTFGGGTKLEITGGGGSGGGGSG | | |
| 1BB intracellular domain | GGGSEVKLQESGPGLVAPSQSLSVTCTVSGVSLPDYGVSWIRQPPR | | |
| (CD28 co-stimulatory | KGLEWLGVIWGSETTYYNSALKSRLTIIKDNSKSQVFLKMNSLQTD | | |
| domain); CD3 zeta | DTAIYYCAKHYYYGGSYAMDYWGQGTSVTVSSTTTPAPRPPTPAP | | |
| intracellular domain; Linker | TIASQPLSLRPEACRPAAGGAVHTRGLDFACDIYIWAPLAGTCGVL | | |
| (GS); hPDE5 (535-860 of | LLSLVITLYCKRGRKKLLYIFKQPFMRPVQTTQEEDGCSCRFPEEEE | | |
| WT); Linker (GSG); P2A | GGCELRVKFSRSADAPAYKQGQNQLYNELNLGRREEYDVLDKRR | | |
| Cleavage Site; Firefly | GRDPEMGGKPRRKNPQEGLYNELQKDKMAEAYSEIGMKGERRRG | | |
| Luciferase (N50D, N119G, | KGHDGLYQGLSTATKDTYDALHMQALPPRGSEETRELQSLAAAV | | |
| S548I, K549A, L550V); stop) | VPSAQTLKITDFSFSDFELSDLETALCTIRMFTDLNLVQNFQMKHEV | | |
| | LCRWILSVKKNYRKNVAYHNWRHAFNTAQCMFAALKAGKIQNK | | |
| | LTDLEILALLIAALSHDLDHRGVNNSYIQRSEHPLAQLYCHSIMEHH | | |
| | HFDQCLMILNSPGNQILSGLSIEEYKTTLKIIKQAILATDLALYIKRR | | |
| | GEFFELIRKNQFNLEDPHQKELFLAMLMTACDLSAITKPWPIQQRIA | | |
| | ELVATEFFDQGDRERKELNIEPTDLMNREKKNKIPSMQVGFIDAICL | | |
| | QLYEALTHVSEDCFPLLDGCRKNRQKWQALAEQQGSGATNFSLLK | | |
| | QAGDVEENPGPMEDAKNIKKGPAPFYPLEDGTAGEQLHKAMKRY | | |
| | ALVPGTIAFTDAHIEVDITYAEYFEMSVRLAEAMKRYGLNTNHRIV | | |
| | VCSENSLQFFMPVLGALFIGVAVAPANDIYNERELLNSMGISQPTV | | |
| | VFVSKKGLQKILNVQKKLPIIQKIIIMDSKTDYQGFQSMYTFVTSHL | | |
| | PPGFNEYDFVPESFDRDKTIALIMNSSGSTGLPKGVALPHRTACVRF | | |
| | SHARDPIFGNQIIPDTAILSVVPFHHGFGMFTTLGYLICGFRVVLMY | | |
| | RFEEELFLRSLQDYKIQSALLVPTLFSFFAKSTLIDKYDLSNLHEIAS | | |
| | GGAPLSKEVGEAVAKRFHLPGIRQGYGLTETTSAILITPEGDDKPGA | | |
| | VGKVVPFFEAKVVDLDTGKTLGVNQRGELCVRGPMIMSGYVNNP | | |
| | EATNALIDKDGWLHSGDIAYWDEDEHFFIVDRLKSLIKYKGYQVA | | |
| | PAELESILLQHPNIFDAGVAGLPDDDAGELPAAVVVLEHGKTMTEK | | |
| | EIVDYVASQVTTAKKLRGGVVFVDEVPKGLTGKLDARKIREILIKA | | |
| | KKGGKIAV* | | |
| OT-001900 (CD8a leader; | MALPVTALLLPLALLLHAARPDIQMTQTTSSLSASLGDRVTISCRAS | 8934 | 8985 |
| CD19 scFv; CD8a Hinge and | QDISKYLNWYQQKPDGTVKLLIYHTSRLHSGVPSRFSGSGSGTDYS | | |
| Transmembrane Domain; 4- | LTISNLEQEDIATYFCQQGNTLPYTFGGGTKLEITGGGGSGGGGSG | | |
| 1BB intracellular domain | GGGSEVKLQESGPGLVAPSQSLSVTCTVSGVSLPDYGVSWIRQPPR | | |
| (CD28 co-stimulatory | KGLEWLGVIWGSETTYYNSALKSRLTIIKDNSKSQVFLKMNSLQTD | | |
| domain); CD3 zeta | DTAIYYCAKHYYYGGSYAMDYWGQGTSVTVSSTTTPAPRPPTPAP | | |
| intracellular domain; Linker | TIASQPLSLRPEACRPAAGGAVHTRGLDFACDIYIWAPLAGTCGVL | | |
| (GS); hPDE5 AA 535-860 of | LLSLVITLYCKRGRKKLLYIFKQPFMRPVQTTQEEDGCSCRFPEEEE | | |
| WT (H653A, R732L); Linker | GGCELRVKFSRSADAPAYKQGQNQLYNELNLGRREEYDVLDKRR | | |
| (GSG); P2A Cleavage Site; | GRDPEMGGKPRRKNPQEGLYNELQKDKMAEAYSEIGMKGERRRG | | |
| enhanced Green Fluorescent | KGHDGLYQGLSTATKDTYDALHMQALPPRGSEETRELQSLAAAV | | |
| Protein (M1del); stop) | VPSAQTLKITDFSFSDFELSDLETALCTIRMFTDLNLVQNFQMKHEV | | |
| | LCRWILSVKKNYRKNVAYHNWRHAFNTAQCMFAALKAGKIQNK | | |
| | LTDLEILALLIAALSADLDHRGVNNSYIQRSEHPLAQLYCHSIMEHH | | |
| | HFDQCLMILNSPGNQILSGLSIEEYKTTLKIIKQAILATDLALYIKRL | | |
| | GEFFELIRKNQFNLEDPHQKELFLAMLMTACDLSAITKPWPIQQRIA | | |
| | ELVATEFFDQGDRERKELNIEPTDLMNREKKNKIPSMQVGFIDAICL | | |
| | QLYEALTHVSEDCFPLLDGCRKNRQKWQALAEQQGSGATNFSLLK | | |
| | QAGDVEENPGPVSKGEELFTGVVPILVELDGDVNGHKFSVSGEGE | | |
| | GDATYGKLTLKFICTTGKLPVPWPTLVTTLTYGVQCFSRYPDHMK | | |
| | QHDFFKSAMPEGYVQERTIFFKDDGNYKTRAEVKFEGDTLVNRIEL | | |
| | KGIDFKEDGNILGHKLEYNYNSHNVYIMADKQKNGIKVNFKIRHNI | | |
| | EDGSVQLADHYQQNTPIGDGPVLLPDNHYLSTQSALSKDPNEKRD | | |
| | HMVLLEFVTAAGITLGMDELYK* | | |
| OT-001899 (CD8a leader; | MALPVTALLLPLALLLHAARPDIQMTQTTSSLSASLGDRVTISCRAS | 8935 | 8986 |
| CD19 scFv; CD8a Hinge and | QDISKYLNWYQQKPDGTVKLLIYHTSRLHSGVPSRFSGSGSGTDYS | | |
| Transmembrane Domain; 4- | LTISNLEQEDIATYFCQQGNTLPYTFGGGTKLEITGGGGSGGGGSG | | |
| 1BB intracellular domain | GGGSEVKLQESGPGLVAPSQSLSVTCTVSGVSLPDYGVSWIRQPPR | | |
| (CD28 co-stimulatory | KGLEWLGVIWGSETTYYNSALKSRLTIIKDNSKSQVFLKMNSLQTD | | |
| domain); CD3 zeta | DTAIYYCAKHYYYGGSYAMDYWGQGTSVTVSSTTTPAPRPPTPAP | | |
| intracellular domain; Linker | TIASQPLSLRPEACRPAAGGAVHTRGLDFACDIYIWAPLAGTCGVL | | |
| (GS); hPDE5 (535-860 of | LLSLVITLYCKRGRKKLLYIFKQPFMRPVQTTQEEDGCSCRFPEEEE | | |
| WT); Linker (GSG); P2A | GGCELRVKFSRSADAPAYKQGQNQLYNELNLGRREEYDVLDKRR | | |
| Cleavage Site; enhanced | GRDPEMGGKPRRKNPQEGLYNELQKDKMAEAYSEIGMKGERRRG | | |
| Green Fluorescent Protein | KGHDGLYQGLSTATKDTYDALHMQALPPRGSEETRELQSLAAAV | | |
| (M1del); stop) | VPSAQTLKITDFSFSDFELSDLETALCTIRMFTDLNLVQNFQMKHEV | | |
| | LCRWILSVKKNYRKNVAYHNWRHAFNTAQCMFAALKAGKIQNK | | |
| | LTDLEILALLIAALSHDLDHRGVNNSYIQRSEHPLAQLYCHSIMEHH | | |
| | HFDQCLMILNSPGNQILSGLSIEEYKTTLKIIKQAILATDLALYIKRR | | |
| | GEFFELIRKNQFNLEDPHQKELFLAMLMTACDLSAITKPWPIQQRIA | | |
| | ELVATEFFDQGDRERKELNIEPTDLMNREKKNKIPSMQVGFIDAICL | | |
| | QLYEALTHVSEDCFPLLDGCRKNRQKWQALAEQQGSGATNFSLLK | | |
| | QAGDVEENPGPVSKGEELFTGVVPILVELDGDVNGHKFSVSGEGE | | |
| | GDATYGKLTLKFICTTGKLPVPWPTLVTTLTYGVQCFSRYPDHMK | | |
| | QHDFFKSAMPEGYVQERTIFFKDDGNYKTRAEVKFEGDTLVNRIEL | | |
| | KGIDFKEDGNILGHKLEYNYNSHNVYIMADKQKNGIKVNFKIRHNI | | |
| | EDGSVQLADHYQQNTPIGDGPVLLPDNHYLSTQSALSKDPNEKRD | | |
| | HMVLLEFVTAAGITLGMDELYK* | | |
| OT-001898 (CD8a leader; | MALPVTALLLPLALLLHAARPGSEETRELQSLAAAVVPSAQTLKIT | 8936 | 8987 |
| Linker (GS); hPDE5 AA 535- | DFSFSDFELSDLETALCTIRMFTDLNLVQNFQMKHEVLCRWILSVK | | |
| 860 of WT (H653A, R732L); | KNYRKNVAYHNWRHAFNTAQCMFAALKAGKIQNKLTDLEILALL | | |
| Linker (GS); CD19 scFv; | IAALSADLDHRGVNNSYIQRSEHPLAQLYCHSIMEHHHFDQCLMIL | | |
| CD8a Hinge and | NSPGNQILSGLSIEEYKTTLKIIKQAILATDLALYIKRLGEFFELIRKN | | |
| Transmembrane Domain; 4- | QFNLEDPHQKELFLAMLMTACDLSAITKPWPIQQRIAELVATEFFD | | |
| 1BB intracellular domain | QGDRERKELNIEPTDLMNREKKNKIPSMQVGFIDAICLQLYEALTH | | |
| (CD28 co-stimulatory | VSEDCFPLLDGCRKNRQKWQALAEQQGSDIQMTQTTSSLSASLGD | | |
| domain); CD3 zeta | RVTISCRASQDISKYLNWYQQKPDGTVKLLIYHTSRLHSGVPSRFS | | |
| intracellular domain; stop) | GSGSGTDYSLTISNLEQEDIATYFCQQGNTLPYTFGGGTKLEITGGG | | |
| | GSGGGGSGGGGSEVKLQESGPGLVAPSQSLSVTCTVSGVSLPDYG | | |
| | VSWIRQPPRKGLEWLGVIWGSETTYYNSALKSRLTIIKDNSKSQVF | | |
| | LKMNSLQTDDTAIYYCAKHYYYGGSYAMDYWGQGTSVTVSSTTT | | |
| | PAPRPPTPAPTIASQPLSLRPEACRPAAGGAVHTRGLDFACDIYIWA | | |
| | PLAGTCGVLLLSLVITLYCKRGRKKLLYIFKQPFMRPVQTTQEEDG | | |
| | CSCRFPEEEEGGCELRVKFSRSADAPAYKQGQNQLYNELNLGRRE | | |
| | EYDVLDKRRGRDPEMGGKPRRKNPQEGLYNELQKDKMAEAYSEI | | |
| | GMKGERRRGKGHDGLYQGLSTATKDTYDALHMQALPPR* | | |
| OT-001908 (CD8a leader; | MALPVTALLLPLALLLHAARPGSEETRELQSLAAAVVPSAQTLKIT | 8937 | 8988 |
| Linker (GS); hPDE5 AA 535- | DFSFSDFELSDLETALCTIRMFTDLNLVQNFQMKHEVLCRWILSVK | | |
| 860 of WT (H653A, R732L); | KNYRKNVAYHNWRHAFNTAQCMFAALKAGKIQNKLTDLEILALL | | |
| Linker (GS); Modified Furin | IAALSADLDHRGVNNSYIQRSEHPLAQLYCHSIMEHHHFDQCLMIL | | |
| Cleavage Site; CD19 scFv; | NSPGNQILSGLSIEEYKTTLKIIKQAILATDLALYIKRLGEFFELIRKN | | |
| CD8a Hinge and | QFNLEDPHQKELFLAMLMTACDLSAITKPWPIQQRIAELVATEFFD | | |
| Transmembrane Domain; 4- | QGDRERKELNIEPTDLMNREKKNKIPSMQVGFIDAICLQLYEALTH | | |
| 1BB intracellular domain | VSEDCFPLLDGCRKNRQKWQALAEQQGSESRRVRRNKRSKDIQM | | |
| (CD28 co-stimulatory | TQTTSSLSASLGDRVTISCRASQDISKYLNWYQQKPDGTVKLLIYH | | |
| domain); CD3 zeta | TSRLHSGVPSRFSGSGSGTDYSLTISNLEQEDIATYFCQQGNTLPYT | | |
| intracellular domain; stop) | FGGGTKLEITGGGGSGGGGSGGGGSEVKLQESGPGLVAPSQSLSVT | | |
| | CTVSGVSLPDYGVSWIRQPPRKGLEWLGVIWGSETTYYNSALKSR | | |
| | LTIIKDNSKSQVFLKMNSLQTDDTAIYYCAKHYYYGGSYAMDYW | | |
| | GQGTSVTVSSTTTPAPRPPTPAPTIASQPLSLRPEACRPAAGGAVHT | | |
| | RGLDFACDIYIWAPLAGTCGVLLLSLVITLYCKRGRKKLLYIFKQPF | | |
| | MRPVQTTQEEDGCSCRFPEEEEGGCELRVKFSRSADAPAYKQGQN | | |
| | QLYNELNLGRREEYDVLDKRRGRDPEMGGKPRRKNPQEGLYNEL | | |
| | QKDKMAEAYSEIGMKGERRRGKGHDGLYQGLSTATKDTYDALH | | |
| | MQALPPR* | | |
| OT-001508 (CD8a leader; | MALPVTALLLPLALLLHAARPDIQMTQTTSSLSASLGDRVTISCRAS | 8938 | 8989 |
| CD19 scFv; Linker (ASFE); | QDISKYLNWYQQKPDGTVKLLIYHTSRLHSGVPSRFSGSGSGTDYS | | |
| CD28 transmembrane and | LTISNLEQEDIATYFCQQGNTLPYTFGGGTKLEITGGGGSGGGGSG | | |
| signaling domain; CD3 zeta | GGGSEVKLQESGPGLVAPSQSLSVTCTVSGVSLPDYGVSWIRQPPR | | |
| intracellular domain; Linker | KGLEWLGVIWGSETTYYNSALKSRLTIIKDNSKSQVFLKMNSLQTD | | |
| (GS); hPDE5 AA 535-860 of | DTAIYYCAKHYYYGGSYAMDYWGQGTSVTVSSASFEIEVMYPPPY | | |
| WT (H653A, R732L); stop) | LDNEKSNGTIIHVKGKHLCPSPLFPGPSKPFWVLVVVGGVLACYSL | | |
| | LVTVAFIIFWVRSKRSRLLHSDYMNMTPRRPGPTRKHYQPYAPPRD | | |
| | FAAYRSRVKFSRSADAPAYKQGQNQLYNELNLGRREEYDVLDKR | | |
| | RGRDPEMGGKPRRKNPQEGLYNELQKDKMAEAYSEIGMKGERRR | | |
| | GKGHDGLYQGLSTATKDTYDALHMQALPPRGSEETRELQSLAAA | | |
| | VVPSAQTLKITDFSFSDFELSDLETALCTIRMFTDLNLVQNFQMKHE | | |
| | VLCRWILSVKKNYRKNVAYHNWRHAFNTAQCMFAALKAGKIQN | | |
| | KLTDLEILALLIAALSADLDHRGVNNSYIQRSEHPLAQLYCHSIMEH | | |
| | HHFDQCLMILNSPGNQILSGLSIEEYKTTLKIIKQAILATDLALYIKR | | |
| | LGEFFELIRKNQFNLEDPHQKELFLAMLMTACDLSAITKPWPIQQRI | | |
| | AELVATEFFDQGDRERKELNIEPTDLMNREKKNKIPSMQVGFIDAI | | |
| | CLQLYEALTHVSEDCFPLLDGCRKNRQKWQALAEQQ* | | |
| OT-001511 (CD8a leader; | MALPVTALLLPLALLLHAARPDIQMTQTTSSLSASLGDRVTISCRAS | 8939 | 8990 |
| CD19 scFv; CD8a Hinge and | QDISKYLNWYQQKPDGTVKLLIYHTSRLHSGVPSRFSGSGSGTDYS | | |
| Transmembrane Domain; 4- | LTISNLEQEDIATYFCQQGNTLPYTFGGGTKLEITGGGGSGGGGSG | | |
| 1BB intracellular domain | GGGSEVKLQESGPGLVAPSQSLSVTCTVSGVSLPDYGVSWIRQPPR | | |
| (CD28 co-stimulatory | KGLEWLGVIWGSETTYYNSALKSRLTIIKDNSKSQVFLKMNSLQTD | | |
| domain); Linker (GS); hPDE5 | DTAIYYCAKHYYYGGSYAMDYWGQGTSVTVSSTTTPAPRPPTPAP | | |
| AA 535-860 of WT (H653A, | TIASQPLSLRPEACRPAAGGAVHTRGLDFACDIYIWAPLAGTCGVL | | |
| R732L); Linker (GS); CD3 | LLSLVITLYCKRGRKKLLYIFKQPFMRPVQTTQEEDGCSCRFPEEEE | | |
| zeta intracellular domain; | GGCELGSEETRELQSLAAAVVPSAQTLKITDFSFSDFELSDLETALC | | |
| stop) | TIRMFTDLNLVQNFQMKHEVLCRWILSVKKNYRKNVAYHNWRH | | |
| | AFNTAQCMFAALKAGKIQNKLTDLEILALLIAALSADLDHRGVNN | | |
| | SYIQRSEHPLAQLYCHSIMEHHHFDQCLMILNSPGNQILSGLSIEEY | | |
| | KTTLKIIKQAILATDLALYIKRLGEFFELIRKNQFNLEDPHQKELFLA | | |
| | MLMTACDLSAITKPWPIQQRIAELVATEFFDQGDRERKELNIEPTDL | | |
| | MNREKKNKIPSMQVGFIDAICLQLYEALTHVSEDCFPLLDGCRKNR | | |
| | QKWQALAEQQGSRVKFSRSADAPAYKQGQNQLYNELNLGRREEY | | |
| | DVLDKRRGRDPEMGGKPRRKNPQEGLYNELQKDKMAEAYSEIGM | | |
| | KGERRRGKGHDGLYQGLSTATKDTYDALHMQALPPR* | | |
| OT-001510 (CD8a leader; | MALPVTALLLPLALLLHAARPDIQMTQTTSSLSASLGDRVTISCRAS | 8940 | 8991 |
| CD19 scFv; CD8a Hinge and | QDISKYLNWYQQKPDGTVKLLIYHTSRLHSGVPSRFSGSGSGTDYS | | |
| Transmembrane Domain; 4- | LTISNLEQEDIATYFCQQGNTLPYTFGGGTKLEITGGGGSGGGGSG | | |
| 1BB intracellular domain | GGGSEVKLQESGPGLVAPSQSLSVTCTVSGVSLPDYGVSWIRQPPR | | |
| (CD28 co-stimulatory | KGLEWLGVIWGSETTYYNSALKSRLTIIKDNSKSQVFLKMNSLQTD | | |
| domain); Linker (GS); hPDE5 | DTAIYYCAKHYYYGGSYAMDYWGQGTSVTVSSTTTPAPRPPTPAP | | |
| (535-860 of WT); Linker | TIASQPLSLRPEACRPAAGGAVHTRGLDFACDIYIWAPLAGTCGVL | | |
| (GS); CD3 zeta intracellular | LLSLVITLYCKRGRKKLLYIFKQPFMRPVQTTQEEDGCSCREPEEEE | | |
| domain; stop) | GGCELGSEETRELQSLAAAVVPSAQTLKITDFSFSDFELSDLETALC | | |
| | TIRMFTDLNLVQNFQMKHEVLCRWILSVKKNYRKNVAYHNWRH | | |
| | AFNTAQCMFAALKAGKIQNKLTDLEILALLIAALSHDLDHRGVNN | | |
| | SYIQRSEHPLAQLYCHSIMEHHHFDQCLMILNSPGNQILSGLSIEEY | | |
| | KTTLKIIKQAILATDLALYIKRRGEFFELIRKNQFNLEDPHQKELFLA | | |
| | MLMTACDLSAITKPWPIQQRIAELVATEFFDQGDRERKELNIEPTDL | | |
| | MNREKKNKIPSMQVGFIDAICLQLYEALTHVSEDCFPLLDGCRKNR | | |
| | QKWQALAEQQGSRVKFSRSADAPAYKQGQNQLYNELNLGRREEY | | |
| | DVLDKRRGRDPEMGGKPRRKNPQEGLYNELQKDKMAEAYSEIGM | | |
| | KGERRRGKGHDGLYQGLSTATKDTYDALHMQALPPR* | | |
| OT-001512 (CD8a leader; | MALPVTALLLPLALLLHAARPDIQMTQTTSSLSASLGDRVTISCRAS | 8941 | 8992 |
| CD19 scFv; CD8a Hinge and | QDISKYLNWYQQKPDGTVKLLIYHTSRLHSGVPSRFSGSGSGTDYS | | |
| Transmembrane Domain; 4- | LTISNLEQEDIATYFCQQGNTLPYTFGGGTKLEITGGGGSGGGGSG | | |
| 1BB intracellular domain | GGGSEVKLQESGPGLVAPSQSLSVTCTVSGVSLPDYGVSWIRQPPR | | |
| (CD28 co-stimulatory | KGLEWLGVIWGSETTYYNSALKSRLTIIKDNSKSQVFLKMNSLQTD | | |
| domain); CD3 zeta | DTAIYYCAKHYYYGGSYAMDYWGQGTSVTVSSTTTPAPRPPTPAP | | |
| intracellular domain; Linker | TIASQPLSLRPEACRPAAGGAVHTRGLDFACDIYIWAPLAGTCGVL | | |
| (GS); hPDE5 (535-860 of | LLSLVITLYCKRGRKKLLYIFKQPFMRPVQTTQEEDGCSCRFPEEEE | | |
| WT); stop) | GGCELRVKFSRSADAPAYKQGQNQLYNELNLGRREEYDVLDKRR | | |
| | GRDPEMGGKPRRKNPQEGLYNELQKDKMAEAYSEIGMKGERRRG | | |
| | KGHDGLYQGLSTATKDTYDALHMQALPPRGSEETRELQSLAAAV | | |
| | VPSAQTLKITDFSFSDFELSDLETALCTIRMFTDLNLVQNFQMKHEV | | |
| | LCRWILSVKKNYRKNVAYHNWRHAFNTAQCMFAALKAGKIQNK | | |
| | LTDLEILALLIAALSHDLDHRGVNNSYIQRSEHPLAQLYCHSIMEHH | | |
| | HFDQCLMILNSPGNQILSGLSIEEYKTTLKIIKQAILATDLALYIKRR | | |
| | GEFFELIRKNQFNLEDPHQKELFLAMLMTACDLSAITKPWPIQQRIA | | |
| | ELVATEFFDQGDRERKELNIEPTDLMNREKKNKIPSMQVGFIDAICL | | |
| | QLYEALTHVSEDCFPLLDGCRKNRQKWQALAEQQ* | | |
| OT-001501 (CD8a leader; | MALPVTALLLPLALLLHAARPDIQMTQTTSSLSASLGDRVTISCRAS | 8942 | 8993 |
| CD19 scFv; CD8a Hinge and | QDISKYLNWYQQKPDGTVKLLIYHTSRLHSGVPSRFSGSGSGTDYS | | |
| Transmembrane Domain; 4- | LTISNLEQEDIATYFCQQGNTLPYTFGGGTKLEITGGGGSGGGGSG | | |
| 1BB intracellular domain | GGGSEVKLQESGPGLVAPSQSLSVTCTVSGVSLPDYGVSWIRQPPR | | |
| (CD28 co-stimulatory | KGLEWLGVIWGSETTYYNSALKSRLTIIKDNSKSQVFLKMNSLQTD | | |
| domain); CD3 zeta | DTAIYYCAKHYYYGGSYAMDYWGQGTSVTVSSTTTPAPRPPTPAP | | |
| intracellular domain; Linker | TIASQPLSLRPEACRPAAGGAVHTRGLDFACDIYIWAPLAGTCGVL | | |
| (GS); hPDE5 AA 535-860 of | LLSLVITLYCKRGRKKLLYIFKQPFMRPVQTTQEEDGCSCRFPEEEE | | |
| WT (R732L, F736A); stop) | GGCELRVKFSRSADAPAYKQGQNQLYNELNLGRREEYDVLDKRR | | |
| | GRDPEMGGKPRRKNPQEGLYNELQKDKMAEAYSEIGMKGERRRG | | |
| | KGHDGLYQGLSTATKDTYDALHMQALPPRGSEETRELQSLAAAV | | |
| | VPSAQTLKITDFSFSDFELSDLETALCTIRMFTDLNLVQNFQMKHEV | | |
| | LCRWILSVKKNYRKNVAYHNWRHAFNTAQCMFAALKAGKIQNK | | |
| | LTDLEILALLIAALSHDLDHRGVNNSYIQRSEHPLAQLYCHSIMEHH | | |
| | HFDQCLMILNSPGNQILSGLSIEEYKTTLKIIKQAILATDLALYIKRL | | |
| | GEFAELIRKNQFNLEDPHQKELFLAMLMTACDLSAITKPWPIQQRI | | |
| | AELVATEFFDQGDRERKELNIEPTDLMNREKKNKIPSMQVGFIDAI | | |
| | CLQLYEALTHVSEDCFPLLDGCRKNRQKWQALAEQQ* | | |
| OT-001509 (CD8a leader; | MALPVTALLLPLALLLHAARPDIQMTQTTSSLSASLGDRVTISCRAS | 8943 | 8994 |
| CD19 scFv; CD8a Hinge and | QDISKYLNWYQQKPDGTVKLLIYHTSRLHSGVPSRFSGSGSGTDYS | | |
| Transmembrane Domain; 4- | LTISNLEQEDIATYFCQQGNTLPYTFGGGTKLEITGGGGSGGGGSG | | |
| 1BB intracellular domain | GGGSEVKLQESGPGLVAPSQSLSVTCTVSGVSLPDYGVSWIRQPPR | | |
| (CD28 co-stimulatory | KGLEWLGVIWGSETTYYNSALKSRLTIIKDNSKSQVFLKMNSLQTD | | |
| domain); Linker (GS); hPDE5 | DTAIYYCAKHYYYGGSYAMDYWGQGTSVTVSSTTTPAPRPPTPAP | | |
| AA 535-860 of WT (R732L, | TIASQPLSLRPEACRPAAGGAVHTRGLDFACDIYIWAPLAGTCGVL | | |
| F736A); Linker (GS); CD3 | LLSLVITLYCKRGRKKLLYIFKQPFMRPVQTTQEEDGCSCRFPEEEE | | |
| zeta intracellular domain; | GGCELGSEETRELQSLAAAVVPSAQTLKITDFSFSDFELSDLETALC | | |
| stop) | TIRMFTDLNLVQNFQMKHEVLCRWILSVKKNYRKNVAYHNWRH | | |
| | AFNTAQCMFAALKAGKIQNKLTDLEILALLIAALSHDLDHRGVNN | | |
| | SYIQRSEHPLAQLYCHSIMEHHHFDQCLMILNSPGNQILSGLSIEEY | | |
| | KTTLKIIKQAILATDLALYIKRLGEFAELIRKNQFNLEDPHQKELFLA | | |
| | MLMTACDLSAITKPWPIQQRIAELVATEFFDQGDRERKELNIEPTDL | | |
| | MNREKKNKIPSMQVGFIDAICLQLYEALTHVSEDCFPLLDGCRKNR | | |
| | QKWQALAEQQGSRVKFSRSADAPAYKQGQNQLYNELNLGRREEY | | |
| | DVLDKRRGRDPEMGGKPRRKNPQEGLYNELQKDKMAEAYSEIGM | | |
| | KGERRRGKGHDGLYQGLSTATKDTYDALHMQALPPR* | | |
| OT-001602 (CD8a leader; | MALPVTALLLPLALLLHAARPDIQMTQTTSSLSASLGDRVTISCRAS | 8944 | 8995 |
| CD19 scFv; CD8a Hinge and | QDISKYLNWYQQKPDGTVKLLIYHTSRLHSGVPSRFSGSGSGTDYS | | |
| Transmembrane Domain; 4- | LTISNLEQEDIATYFCQQGNTLPYTFGGGTKLEITGGGGSGGGGSG | | |
| 1BB intracellular domain | GGGSEVKLQESGPGLVAPSQSLSVTCTVSGVSLPDYGVSWIRQPPR | | |
| (CD28 co-stimulatory | KGLEWLGVIWGSETTYYNSALKSRLTIIKDNSKSQVFLKMNSLQTD | | |
| domain); CD3 zeta | DTAIYYCAKHYYYGGSYAMDYWGQGTSVTVSSTTTPAPRPPTPAP | | |
| intracellular domain; Linker | TIASQPLSLRPEACRPAAGGAVHTRGLDFACDIYIWAPLAGTCGVL | | |
| (GSG); P2A Cleavage Site; | LLSLVITLYCKRGRKKLLYIFKQPFMRPVQTTQEEDGCSCRFPEEEE | | |
| Linker (GSG); enhanced | GGCELRVKFSRSADAPAYKQGQNQLYNELNLGRREEYDVLDKRR | | |
| Green Fluorescent Protein | GRDPEMGGKPRRKNPQEGLYNELQKDKMAEAYSEIGMKGERRRG | | |
| (M1del); stop) | KGHDGLYQGLSTATKDTYDALHMQALPPRGSGATNFSLLKQAGD | | |
| | VEENPGPGSGVSKGEELFTGVVPILVELDGDVNGHKFSVSGEGEGD | | |
| | ATYGKLTLKFICTTGKLPVPWPTLVTTLTYGVQCFSRYPDHMKQH | | |
| | DFFKSAMPEGYVQERTIFFKDDGNYKTRAEVKFEGDTLVNRIELKG | | |
| | IDFKEDGNILGHKLEYNYNSHNVYIMADKQKNGIKVNFKIRHNIED | | |
| | GSVQLADHYQQNTPIGDGPVLLPDNHYLSTQSALSKDPNEKRDHM | | |
| | VLLEFVTAAGITLGMDELYK* | | |
| OT-001598 (CD8a leader; | MALPVTALLLPLALLLHAARPDIQMTQTTSSLSASLGDRVTISCRAS | 8945 | 8996 |
| CD19 scFv; CD8a Hinge and | QDISKYLNWYQQKPDGTVKLLIYHTSRLHSGVPSRFSGSGSGTDYS | | |
| Transmembrane Domain; 4- | LTISNLEQEDIATYFCQQGNTLPYTFGGGTKLEITGGGGSGGGGSG | | |
| 1BB intracellular domain | GGGSEVKLQESGPGLVAPSQSLSVTCTVSGVSLPDYGVSWIRQPPR | | |
| (CD28 co-stimulatory | KGLEWLGVIWGSETTYYNSALKSRLTIIKDNSKSQVFLKMNSLQTD | | |
| domain); CD3 zeta | DTAIYYCAKHYYYGGSYAMDYWGQGTSVTVSSTTTPAPRPPTPAP | | |
| intracellular domain; Linker | TIASQPLSLRPEACRPAAGGAVHTRGLDFACDIYIWAPLAGTCGVL | | |
| (GSG); P2A Cleavage Site; | LLSLVITLYCKRGRKKLLYIFKQPFMRPVQTTQEEDGCSCRFPEEEE | | |
| Firefly Luciferase (N50D, | GGCELRVKFSRSADAPAYKQGQNQLYNELNLGRREEYDVLDKRR | | |
| N119G, S548I, K549A, | GRDPEMGGKPRRKNPQEGLYNELQKDKMAEAYSEIGMKGERRRG | | |
| L550V); stop) | KGHDGLYQGLSTATKDTYDALHMQALPPRGSGATNFSLLKQAGD | | |
| | VEENPGPMEDAKNIKKGPAPFYPLEDGTAGEQLHKAMKRYALVP | | |
| | GTIAFTDAHIEVDITYAEYFEMSVRLAEAMKRYGLNTNHRIVVCSE | | |
| | NSLQFFMPVLGALFIGVAVAPANDIYNERELLNSMGISQPTVVFVS | | |
| | KKGLQKILNVQKKLPIIQKIIIMDSKTDYQGFQSMYTFVTSHLPPGF | | |
| | NEYDFVPESFDRDKTIALIMNSSGSTGLPKGVALPHRTACVRFSHA | | |
| | RDPIFGNQHPDTAILSVVPFHHGFGMFTTLGYLICGFRVVLMYRFEE | | |
| | ELFLRSLQDYKIQSALLVPTLFSFFAKSTLIDKYDLSNLHEIASGGAP | | |
| | LSKEVGEAVAKRFHLPGIRQGYGLTETTSAILITPEGDDKPGAVGK | | |
| | VVPFFEAKVVDLDTGKTLGVNQRGELCVRGPMIMSGYVNNPEAT | | |
| | NALIDKDGWLHSGDIAYWDEDEHFFIVDRLKSLIKYKGYQVAPAE | | |
| | LESILLQHPNIFDAGVAGLPDDDAGELPAAVVVLEHGKTMTEKEIV | | |
| | DYVASQVTTAKKLRGGVVFVDEVPKGLTGKLDARKIREILIKAKK | | |
| | GGKIAV* | | |
| OT-001912 (CD8a leader; | MALPVTALLLPLALLLHAARPYPYDVPDYADIQMTQTTSSLSASLG | 8946 | 8997 |
| HA Tag; CD19 scFv; CD8a | DRVTISCRASQDISKYLNWYQQKPDGTVKLLIYHTSRLHSGVPSRF | | |
| Hinge and Transmembrane | SGSGSGTDYSLTISNLEQEDIATYFCQQGNTLPYTFGGGTKLEITGG | | |
| Domain; 4-1BB intracellular | GGSGGGGSGGGGSEVKLQESGPGLVAPSQSLSVTCTVSGVSLPDY | | |
| domain (CD28 co-stimulatory | GVSWIRQPPRKGLEWLGVIWGSETTYYNSALKSRLTIIKDNSKSQV | | |
| domain); CD3 zeta | FLKMNSLQTDDTAIYYCAKHYYYGGSYAMDYWGQGTSVTVSSTT | | |
| intracellular domain; Linker | TPAPRPPTPAPTIASQPLSLRPEACRPAAGGAVHTRGLDFACDIYIW | | |
| (SG); hPDE5 AA 535-860 of | APLAGTCGVLLLSLVITLYCKRGRKKLLYIFKQPFMRPVQTTQEED | | |
| WT (M758T); stop) | GCSCRFPEEEEGGCELRVKFSRSADAPAYKQGQNQLYNELNLGRR | | |
| | EEYDVLDKRRGRDPEMGGKPRRKNPQEGLYNELQKDKMAEAYSE | | |
| | IGMKGERRRGKGHDGLYQGLSTATKDTYDALHMQALPPRSGEET | | |
| | RELQSLAAAVVPSAQTLKITDFSFSDFELSDLETALCTIRMFTDLNL | | |
| | VQNFQMKHEVLCRWILSVKKNYRKNVAYHNWRHAFNTAQCMFA | | |
| | ALKAGKIQNKLTDLEILALLIAALSHDLDHRGVNNSYIQRSEHPLA | | |
| | QLYCHSIMEHHHFDQCLMILNSPGNQILSGLSIEEYKTTLKIIKQAIL | | |
| | ATDLALYIKRRGEFFELIRKNQFNLEDPHQKELFLATLMTACDLSAI | | |
| | TKPWPIQQRIAELVATEFFDQGDRERKELNIEPTDLMNREKKNKIPS | | |
| | MQVGFIDAICLQLYEALTHVSEDCFPLLDGCRKNRQKWQALAEQQ* | | |
| OT-001911 (CD8a leader; | MALPVTALLLPLALLLHAARPYPYDVPDYADIQMTQTTSSLSASLG | 8947 | 8998 |
| HA Tag; CD19 scFv; CD8a | DRVTISCRASQDISKYLNWYQQKPDGTVKLLIYHTSRLHSGVPSRF | | |
| Hinge and Transmembrane | SGSGSGTDYSLTISNLEQEDIATYFCQQGNTLPYTEGGGTKLEITGG | | |
| Domain; 4-1BB intracellular | GGSGGGGSGGGGSEVKLQESGPGLVAPSQSLSVTCTVSGVSLPDY | | |
| domain (CD28 co-stimulatory | GVSWIRQPPRKGLEWLGVIWGSETTYYNSALKSRLTIIKDNSKSQV | | |
| domain); CD3 zeta | FLKMNSLQTDDTAIYYCAKHYYYGGSYAMDYWGQGTSVTVSSTT | | |
| intracellular domain; Linker | TPAPRPPTPAPTIASQPLSLRPEACRPAAGGAVHTRGLDFACDIYIW | | |
| (SG); hPDE5 AA 535-860 of | APLAGTCGVLLLSLVITLYCKRGRIKKLLYIFKQPFMRPVQTTQEED | | |
| WT (K752E); stop) | GCSCRFPEEEEGGCELRVIKESRSADAPAYKQGQNQLYNELNLGRR | | |
| | EEYDVLDKRRGRDPEMGGKPRRKNPQEGLYNELQKDKMAEAYSE | | |
| | IGMKGERRRGKGHDGLYQGLSTATKDTYDALHMQALPPRSGEET | | |
| | RELQSLAAAVVPSAQTLKITDFSFSDFELSDLETALCTIRMFTDLNL | | |
| | VQNFQMKHEVLCRWILSVKKNYRKNVAYHNWRHAFNTAQCMFA | | |
| | ALKAGKIQNKLTDLEILALLIAALSHDLDHRGVNNSYIQRSEHPLA | | |
| | QLYCHSIMEHHHFDQCLMILNSPGNQUGLSIEEYKTTLKIIKQAIL | | |
| | ATDLALYIKRRGEFFELIRKNQFNLEDPHQEELFLAMLMTACDLSA | | |
| | ITKPWPIQQRIAELVATEFFDQGDRERKELNIEPTDLMNREKKNKIP | | |
| | SMQVGFIDAICLQLYEALTHVSEDCFPLLDGCRKNRQKWQALAEQ | | |
| | Q* | | |
| OT-001918 (CD8a leader; | MALPVTALLLPLALLLHAARPYPYDVPDYADIQMTQTTSSLSASLG | 8948 | 8999 |
| HA Tag; CD19 scFv; CD8a | DRVTISCRASQDISKYLNWYQQKPDGTVKLLIYHTSRLHSGVPSRF | | |
| Hinge and Transmembrane | SGSGSGTDYSLTISNLEQEDIATYFCQQGNTLPYTEGGGTKLEITGG | | |
| Domain; 4-1BB intracellular | GGSGGGGSGGGGSEVKLQESGPGLVAPSQSLSVTCTVSGVSLPDY | | |
| domain (CD28 co-stimulatory | GVSWIRQPPRKGLEWLGVIWGSETTYYNSALKSRLTIIKDNSKSQV | | |
| domain); CD3 zeta | FLKMNSLQTDDTAIYYCAKHYYYGGSYAMDYWGQGTSVTVSSTT | | |
| intracellular domain; Linker | TPAPRPPTPAPTIASQPLSLRPEACRPAAGGAVHTRGLDFACDIYIW | | |
| (SG); hPDE5 AA 535-860 of | APLAGTCGVLLLSLVITLYCKRGRIKKLLYIFKQPFMRPVQTTQEED | | |
| WT (C677Y, H685R, | GCSCRFPEEEEGGCELRVIKESRSADAPAYKQGQNQLYNELNLGRR | | |
| A722V); stop) | EEYDVLDKRRGRDPEMGGKPRRKNPQEGLYNELQKDKMAEAYSE | | |
| | IGMKGERRRGKGHDGLYQGLSTATKDTYDALHMQALPPRSGEET | | |
| | RELQSLAAAVVPSAQTLKITDFSFSDFELSDLETALCTIRMFTDLNL | | |
| | VQNFQMKHEVLCRWILSVKKNYRKNVAYHNWRHAFNTAQCMFA | | |
| | ALKAGKIQNKLTDLEILALLIAALSHDLDHRGVNNSYIQRSEHPLA | | |
| | QLYYHSIMEHHRFDQCLMILNSPGNQILSGLSIEEYKTTLKIIKQAIL | | |
| | VTDLALYIKRRGEFFELIRKNQFNLEDPHQKELFLAMLMTACDLSA | | |
| | ITKPWPIQQRIAELVATEFFDQGDRERKELNIEPTDLMNREKKNKIP | | |
| | SMQVGFIDAICLQLYEALTHVSEDCFPLLDGCRKNRQKWQALAEQ | | |
| | Q* | | |
| OT-001920 (CD8a leader; | MALPVTALLLPLALLLHAARPYPYDVPDYADIQMTQTTSSLSASLG | 8949 | 9000 |
| HA Tag; CD19 scFv; CD8a | DRVTISCRASQDISKYLNWYQQKPDGTVKLLIYHTSRLHSGVPSRF | | |
| Hinge and Transmembrane | SGSGSGTDYSLTISNLEQEDIATYFCQQGNTLPYTEGGGTKLEITGG | | |
| Domain; 4-1BB intracellular | GGSGGGGSGGGGSEVKLQESGPGLVAPSQSLSVTCTVSGVSLPDY | | |
| domain (CD28 co-stimulatory | GVSWIRQPPRKGLEWLGVIWGSETTYYNSALKSRLTIIKDNSKSQV | | |
| domain); CD3 zeta | FLKMNSLQTDDTAIYYCAKHYYYGGSYAMDYWGQGTSVTVSSTT | | |
| intracellular domain; Linker | TPAPRPPTPAPTIASQPLSLRPEACRPAAGGAVHTRGLDFACDIYIW | | |
| (SG); hPDE5 AA 535-860 of | APLAGTCGVLLLSLVITLYCKRGRIKKLLYIFKQPFMRPVQTTQEED | | |
| WT (T639S, M816R); stop) | GCSCRFPEEEEGGCELRVKFSRSADAPAYKQGQNQLYNELNLGRR | | |
| | EEYDVLDKRRGRDPEMGGKPRRKNPQEGLYNELQKDKMAEAYSE | | |
| | IGMKGERRRGKGHDGLYQGLSTATKDTYDALHMQALPPRSGEET | | |
| | RELQSLAAAVVPSAQTLKITDFSFSDFELSDLETALCTIRMFTDLNL | | |
| | VQNFQMKHEVLCRWILSVKKNYRKNVAYHNWRHAFNTAQCMFA | | |
| | ALKAGKIQNKLSDLEILALLIAALSHDLDHRGVNNSYIQRSEHPLA | | |
| | QLYCHSIMEHHHFDQCLMILNSPGNQILSGLSIEEYKTTLKIIKQAIL | | |
| | ATDLALYIKRRGEFFELIRKNQFNLEDPHQKELFLAMLMTACDLSA | | |
| | ITKPWPIQQRIAELVATEFFDQGDRERKELNIEPTDLMNREKKNKIP | | |
| | SRQVGFIDAICLQLYEALTHVSEDCFPLLDGCRKNRQKWQALAEQ | | |
| | Q* | | |
| OT-001910 (CD8a leader; | MALPVTALLLPLALLLHAARPYPYDVPDYADIQMTQTTSSLSASLG | 8950 | 9001 |
| HA Tag; CD19 scFv; CD8a | DRVTISCRASQDISKYLNWYQQKPDGTVKLLIYHTSRLHSGVPSRF | | |
| Hinge and Transmembrane | SGSGSGTDYSLTISNLEQEDIATYFCQQGNTLPYTEGGGTKLEITGG | | |
| Domain; 4-1BB intracellular | GGSGGGGSGGGGSEVKLQESGPGLVAPSQSLSVTCTVSGVSLPDY | | |
| domain (CD28 co-stimulatory | GVSWIRQPPRKGLEWLGVIWGSETTYYNSALKSRLTIIKDNSKSQV | | |
| domain); CD3 zeta | FLKMNSLQTDDTAIYYCAKHYYYGGSYAMDYWGQGTSVTVSSTT | | |
| intracellular domain; Linker | TPAPRPPTPAPTIASQPLSLRPEACRPAAGGAVHTRGLDFACDIYIW | | |
| (SG); hPDE5 AA 535-860 of | APLAGTCGVLLLSLVITLYCKRGRKKLLYIFKQPFMRPVQTTQEED | | |
| WT (T537A, D558G, I706T, | GCSCRFPEEEEGGCELRVKFSRSADAPAYKQGQNQLYNELNLGRR | | |
| F744L, D764N); stop) | EEYDVLDKRRGRDPEMGGKPRRKNPQEGLYNELQKDKMAEAYSE | | |
| | IGMKGERRRGKGHDGLYQGLSTATKDTYDALHMQALPPRSGEEA | | |
| | RELQSLAAAVVPSAQTLKITGFSFSDFELSDLETALCTIRMFTDLNL | | |
| | VQNFQMKHEVLCRWILSVKKNYRKNVAYHNWRHAFNTAQCMFA | | |
| | ALKAGKIQNKLTDLEILALLIAALSHDLDHRGVNNSYIQRSEHPLA | | |
| | QLYCHSIMEHHHFDQCLMILNSPGNQUGLSTEEYKTTLKIIKQAIL | | |
| | ATDLALYIKRRGEFFELIRKNQLNLEDPHQKELFLAMLMTACNLSA | | |
| | ITKPWPIQQRIAELVATEFFDQGDRERKELNIEPTDLMNREKKNKIP | | |
| | SMQVGFIDAICLQLYEALTHVSEDCFPLLDGCRKNRQKWQALAEQ | | |
| | Q* | | |
| OT-001913 (CD8a leader; | MALPVTALLLPLALLLHAARPYPYDVPDYADIQMTQTTSSLSASLG | 8951 | 9002 |
| HA Tag; CD19 scFv; CD8a | DRVTISCRASQDISKYLNWYQQKPDGTVKLLIYHTSRLHSGVPSRF | | |
| Hinge and Transmembrane | SGSGSGTDYSLTISNLEQEDIATYFCQQGNTLPYTEGGGTKLEITGG | | |
| Domain; 4-1BB intracellular | GGSGGGGSGGGGSEVKLQESGPGLVAPSQSLSVTCTVSGVSLPDY | | |
| domain (CD28 co-stimulatory | GVSWIRQPPRKGLEWLGVIWGSETTYYNSALKSRLTIIKDNSKSQV | | |
| domain); CD3 zeta | FLKMNSLQTDDTAIYYCAKHYYYGGSYAMDYWGQGTSVTVSSTT | | |
| intracellular domain; Linker | TPAPRPPTPAPTIASQPLSLRPEACRPAAGGAVHTRGLDFACDIYIW | | |
| (SG); hPDE5 AA 535-860 of | APLAGTCGVLLLSLVITLYCKRGRKKLLYIFKQPFMRPVQTTQEED | | |
| WT (Q586R, D724G); stop) | GCSCRFPEEEEGGCELRVKESRSADAPAYKQGQNQLYNELNLGRR | | |
| | EEYDVLDKRRGRDPEMGGKPRRKNPQEGLYNELQKDKMAEAYSE | | |
| | IGMKGERRRGKGHDGLYQGLSTATKDTYDALHMQALPPRSGEET | | |
| | RELQSLAAAVVPSAQTLKITDFSFSDFELSDLETALCTIRMFTDLNL | | |
| | VRNFQMKHEVLCRWILSVKKNYRIKNVAYHNWRHAFNTAQCMFA | | |
| | ALKAGKIQNKLTDLEILALLIAALSHDLDHRGVNNSYIQRSEHPLA | | |
| | QLYCHSIMEHHHFDQCLMILNSPGNQILSGLSIEEYKTTLKIIKQAIL | | |
| | ATGLALYIKRRGEFFELIRKNQFNLEDPHQKELFLAMLMTACDLSA | | |
| | ITKPWPIQQRIAELVATEFFDQGDRERKELNIEPTDLMNREKKNKIP | | |
| | SMQVGFIDAICLQLYEALTHVSEDCFPLLDGCRKNRQKWQALAEQ | | |
| | Q* | | |
| OT-001919 (CD8a leader; | MALPVTALLLPLALLLHAARPYPYDVPDYADIQMTQTTSSLSASLG | 8952 | 9003 |
| HA Tag; CD19 scFv; CD8a | DRVTISCRASQDISKYLNWYQQKPDGTVKLLIYHTSRLHSGVPSRF | | |
| Hinge and Transmembrane | SGSGSGTDYSLTISNLEQEDIATYFCQQGNTLPYTEGGGTKLEITGG | | |
| Domain; 4-1BB intracellular | GGSGGGGSGGGGSEVKLQESGPGLVAPSQSLSVTCTVSGVSLPDY | | |
| domain (CD28 co-stimulatory | GVSWIRQPPRKGLEWLGVIWGSETTYYNSALKSRLTIIKDNSKSQV | | |
| domain); CD3 zeta | FLKMNSLQTDDTAIYYCAKHYYYGGSYAMDYWGQGTSVTVSSTT | | |
| intracellular domain; Linker | TPAPRPPTPAPTIASQPLSLRPEACRPAAGGAVHTRGLDFACDIYIW | | |
| (SG); hPDE5 AA 535-860 of | APLAGTCGVLLLSLVITLYCKRGRKKLLYIFKQPFMRPVQTTQEED | | |
| WT (F686S); stop) | GCSCREPEEEEGGCELRVIKESRSADAPAYKQGQNQLYNELNLGRR | | |
| | EEYDVLDKRRGRDPEMGGKPRRKNPQEGLYNELQKDKMAEAYSE | | |
| | IGMKGERRRGKGHDGLYQGLSTATKDTYDALHMQALPPRSGEET | | |
| | RELQSLAAAVVPSAQTLKITDFSFSDFELSDLETALCTIRMFTDLNL | | |
| | VQNFQMKHEVLCRWILSVKKNYRKNVAYHNWRHAFNTAQCMFA | | |
| | ALKAGKIQNKLTDLEILALLIAALSHDLDHRGVNNSYIQRSEHPLA | | |
| | QLYCHSIMEHHHSDQCLMILNSPGNQILSGLSIEEYKTTLKIIKQAIL | | |
| | ATDLALYIKRRGEFFELIRKNQFNLEDPHQKELFLAMLMTACDLSA | | |
| | ITKPWPIQQRIAELVATEFFDQGDRERKELNIEPTDLMNREKKNKIP | | |
| | SMQVGFIDAICLQLYEALTHVSEDCFPLLDGCRKNRQKWQALAEQ | | |
| | Q* | | |
| OT-001914 (CD8a leader; | MALPVTALLLPLALLLHAARPYPYDVPDYADIQMTQTTSSLSASLG | 8953 | 9004 |
| HA Tag; CD19 scFv; CD8a | DRVTISCRASQDISKYLNWYQQKPDGTVKLLIYHTSRLHSGVPSRF | | |
| Hinge and Transmembrane | SGSGSGTDYSLTISNLEQEDIATYFCQQGNTLPYTFGGGTKLEITGG | | |
| Domain; 4-1BB intracellular | GGSGGGGSGGGGSEVKLQESGPGLVAPSQSLSVTCTVSGVSLPDY | | |
| domain (CD28 co-stimulatory | GVSWIRQPPRKGLEWLGVIWGSETTYYNSALKSRLTIIKDNSKSQV | | |
| domain); CD3 zeta | FLKMNSLQTDDTAIYYCAKHYYYGGSYAMDYWGQGTSVTVSSTT | | |
| intracellular domain; Linker | TPAPRPPTPAPTIASQPLSLRPEACRPAAGGAVHTRGLDFACDIYIW | | |
| (SG); hPDE5 AA 535-860 of | APLAGTCGVLLLSLVITLYCKRGRKKLLYIFKQPFMRPVQTTQEED | | |
| WT (E539G, L738I); stop) | GCSCRFPEEEEGGCELRVKFSRSADAPAYKQGQNQLYNELNLGRR | | |
| | EEYDVLDKRRGRDPEMGGKPRRKNPQEGLYNELQKDKMAEAYSE | | |
| | IGMKGERRRGKGHDGLYQGLSTATKDTYDALHMQALPPRSGEET | | |
| | RGLQSLAAAVVPSAQTLKITDFSFSDFELSDLETALCTIRMFTDLNL | | |
| | VQNFQMKHEVLCRWILSVKKNYRKNVAYHNWRHAFNTAQCMFA | | |
| | ALKAGKIQNKLTDLEILALLIAALSHDLDHRGVNNSYIQRSEHPLA | | |
| | QLYCHSIMEHHHFDQCLMILNSPGNQILSGLSIEEYKTTLKIIKQAIL | | |
| | ATDLALYIKRRGEFFEIIRKNQFNLEDPHQKELFLAMLMTACDLSAI | | |
| | TKPWPIQQRIAELVATEFFDQGDRERKELNIEPTDLMNREKKNKIPS | | |
| | MQVGFIDAICLQLYEALTHVSEDCFPLLDGCRKNRQKWQALAEQQ* | | |
| OT-001916 (CD8a leader; | MALPVTALLLPLALLLHAARPYPYDVPDYADIQMTQTTSSLSASLG | 8954 | 9005 |
| HA Tag; CD19 scFv; CD8a | DRVTISCRASQDISKYLNWYQQKPDGTVKLLIYHTSRLHSGVPSRF | | |
| Hinge and Transmembrane | SGSGSGTDYSLTISNLEQEDIATYFCQQGNTLPYTFGGGTKLEITGG | | |
| Domain; 4-1BB intracellular | GGSGGGGSGGGGSEVKLQESGPGLVAPSQSLSVTCTVSGVSLPDY | | |
| domain (CD28 co-stimulatory | GVSWIRQPPRKGLEWLGVIWGSETTYYNSALKSRLTIIKDNSKSQV | | |
| domain); CD3 zeta | FLKMNSLQTDDTAIYYCAKHYYYGGSYAMDYWGQGTSVTVSSTT | | |
| intracellular domain; Linker | TPAPRPPTPAPTIASQPLSLRPEACRPAAGGAVHTRGLDFACDIYIW | | |
| (SG); hPDE5 AA 535-860 of | APLAGTCGVLLLSLVITLYCKRGRKKLLYIFKQPFMRPVQTTQEED | | |
| WT (Q635R, E753K, I813T); | GCSCRFPEEEEGGCELRVKFSRSADAPAYKQGQNQLYNELNLGRR | | |
| stop) | EEYDVLDKRRGRDPEMGGKPRRKNPQEGLYNELQKDKMAEAYSE | | |
| | IGMKGERRRGKGIIDGLYQGLSTATKDTYDALHMQALPPRSGEET | | |
| | RELQSLAAAVVPSAQTLKITDFSFSDFELSDLETALCDRMFTDLNL | | |
| | VQNFQMKHEVLCRWILSVKKNYRKNVAYHNWRHAFNTAQCMFA | | |
| | ALKAGKIRNKLTDLEILALLIAALSHDLDHRGVNNSYIQRSEHPLA | | |
| | QLYCHSIMEHHHFDQCLMILNSPGNQILSGLSIEEYKTTLKIIKQAIL | | |
| | ATDLALYIKRRGEFFELIRKNQFNLEDPHQKKLFLAMLMTACDLSA | | |
| | ITKPWPIQQRIAELVATEFFDQGDRERKELNIEPTDLMNREKKNKTP | | |
| | SMQVGFIDAICLQLYEALTHVSEDCFPLLDGCRKNRQKWQALAEQ | | |
| | Q* | | |
| OT-001915 (CD8a leader; | MALPVTALLLPLALLLHAARPYPYDVPDYADIQMTQTTSSLSASLG | 8955 | 9006 |
| HA Tag; CD19 scFv; CD8a | DRVTISCRASQDISKYLNWYQQKPDGTVKLLIYHTSRLHSGVPSRF | | |
| Hinge and Transmembrane | SGSGSGTDYSLTISNLEQEDIATYFCQQGNTLPYTFGGGTKLEITGG | | |
| Domain; 4-1BB intracellular | GGSGGGGSGGGGSEVKLQESGPGLVAPSQSLSVTCTVSGVSLPDY | | |
| domain (CD28 co-stimulatory | GVSWIRQPPRKGLEWLGVIWGSETTYYNSALKSRLTIIKDNSKSQV | | |
| domain); CD3 zeta | FLKMNSLQTDDTAIYYCAKHYYYGGSYAMDYWGQGTSVTVSSTT | | |
| intracellular domain; Linker | TPAPRPPTPAPTIASQPLSLRPEACRPAAGGAVHTRGLDFACDIYIW | | |
| (SG); hPDE5 AA 535-860 of | APLAGTCGVLLLSLVITLYCKRGRKKLLYIFKQPFMRPVQTTQEED | | |
| WT (L672P, S836L); stop) | GCSCRFPEEEEGGCELRVKFSRSADAPAYKQGQNQLYNELNLGRR | | |
| | EEYDVLDKRRGRDPEMGGKPRRKNPQEGLYNELQKDKMAEAYSE | | |
| | IGMKGERRRGKGIIDGLYQGLSTATKDTYDALHMQALPPRSGEET | | |
| | RELQSLAAAVVPSAQTLKITDFSFSDFELSDLETALCDRMFTDLNL | | |
| | VQNFQMKHEVLCRWILSVKKNYRKNVAYHNWRHAFNTAQCMFA | | |
| | ALKAGKIQNKLTDLEILALLIAALSHDLDHRGVNNSYIQRSEHPPA | | |
| | QLYCHSIMEHHHFDQCLMILNSPGNQUGLSIEEYKTTLKIIKQAIL | | |
| | ATDLALYIKRRGEFFELIRKNQFNLEDPHQKELFLAMLMTACDLSA | | |
| | ITKPWPIQQRIAELVATEFFDQGDRERKELNIEPTDLMNREKKNKIP | | |
| | SMQVGFIDAICLQLYEALTHVLEDCFPLLDGCRKNRQKWQALAEQ | | |
| | Q* | | |
| OT-001917 (CD8a leader; | MALPVTALLLPLALLLHAARPYPYDVPDYADIQMTQTTSSLSASLG | 8956 | 9007 |
| HA Tag; CD19 scFv; CD8a | DRVTISCRASQDISKYLNWYQQKPDGTVKLLIYHTSRLHSGVPSRF | | |
| Hinge and Transmembrane | SGSGSGTDYSLTISNLEQEDIATYFCQQGNTLPYTEGGGTKLEITGG | | |
| Domain; 4-1BB intracellular | GGSGGGGSGGGGSEVKLQESGPGLVAPSQSLSVTCTVSGVSLPDY | | |
| domain (CD28 co-stimulatory | GVSWIRQPPRKGLEWLGVIWGSETTYYNSALKSRLTIIKDNSKSQV | | |
| domain); CD3 zeta | FLKMNSLQTDDTAIYYCAKHYYYGGSYAMDYWGQGTSVTVSSTT | | |
| intracellular domain; hPDE5 | TPAPRPPTPAPTIASQPLSLRPEACRPAAGGAVHTRGLDFACDIYIW | | |
| AA 535-860 of WT (M691T, | APLAGTCGVLLLSLVITLYCKRGRIKKLLYIFKQPFMRPVQTTQEED | | |
| D764N); stop) | GCSCREPEEEEGGCELRVIKESRSADAPAYKQGQNQLYNELNLGRR | | |
| | EEYDVLDKRRGRDPEMGGKPRRKNPQEGLYNELQKDKMAEAYSE | | |
| | IGMKGERRRGKGHDGLYQGLSTATKDTYDALHMQALPPRSGEET | | |
| | RELQSLAAAVVPSAQTLKITDFSFSDFELSDLETALCTIRMFTDLNL | | |
| | VQNFQMKHEVLCRWILSVKKNYRKNVAYHNWRHAFNTAQCMFA | | |
| | ALKAGKIQNKLTDLEILALLIAALSHDLDHRGVNNSYIQRSEHPLA | | |
| | QLYCHSIMEHHHEDQCLTILNSPGNQUGLSIEEYKTTLKIIKQAIL | | |
| | ATDLALYIKRRGEFFELIRKNQFNLEDPHQKELFLAMLMTACNLSA | | |
| | ITKPWPIQQRIAELVATEFFDQGDRERKELNIEPTDLMNREKKNKIP | | |
| | SMQVGFIDAICLQLYEALTHVSEDCFPLLDGCRKNRQKWQALAEQ | | |
| | Q* | | |
| OT-001923 (CD8a leader; | MALPVTALLLPLALLLHAARPYPYDVPDYADIQMTQTTSSLSASLG | 8957 | 9008 |
| HA Tag; CD19 scFv; CD8a | DRVTISCRASQDISKYLNWYQQKPDGTVKLLIYHTSRLHSGVPSRF | | |
| Hinge and Transmembrane | SGSGSGTDYSLTISNLEQEDIATYFCQQGNTLPYTEGGGTKLEITGG | | |
| Domain; 4-1BB intracellular | GGSGGGGSGGGGSEVKLQESGPGLVAPSQSLSVTCTVSGVSLPDY | | |
| domain (CD28 co-stimulatory | GVSWIRQPPRKGLEWLGVIWGSETTYYNSALKSRLTIIKDNSKSQV | | |
| domain); CD3 zeta | FLKMNSLQTDDTAIYYCAKHYYYGGSYAMDYWGQGTSVTVSSTT | | |
| intracellular domain; Linker | TPAPRPPTPAPTIASQPLSLRPEACRPAAGGAVHTRGLDFACDIYIW | | |
| (SG); hPDE5 AA 535-860 of | APLAGTCGVLLLSLVITLYCKRGRIKKLLYIFKQPFMRPVQTTQEED | | |
| WT (R807G); stop) | GCSCREPEEEEGGCELRVIKESRSADAPAYKQGQNQLYNELNLGRR | | |
| | EEYDVLDKRRGRDPEMGGKPRRKNPQEGLYNELQKDKMAEAYSE | | |
| | IGMKGERRRGKGHDGLYQGLSTATKDTYDALHMQALPPRSGEET | | |
| | RELQSLAAAVVPSAQTLKITDFSFSDFELSDLETALCTIRMFTDLNL | | |
| | VQNFQMKHEVLCRWILSVKKNYRKNVAYHNWRHAFNTAQCMFA | | |
| | ALKAGKIQNKLTDLEILALLIAALSHDLDHRGVNNSYIQRSEHPLA | | |
| | QLYCHSIMEHHHEDQCLMILNSPGNQILSGLSIEEYKTTLKIIKQAIL | | |
| | ATDLALYIKRRGEFFELIRKNQFNLEDPHQKELFLAMLMTACDLSA | | |
| | ITKPWPIQQRIAELVATEFFDQGDRERKELNIEPTDLMNREKKNKIP | | |
| | SMQVGFIDAICLQLYEALTHVSEDCFPLLDGCRKNRQKWQALAEQ | | |
| | Q* | | |
| OT-001922 (CD8a leader; | MALPVTALLLPLALLLHAARPYPYDVPDYADIQMTQTTSSLSASLG | 8958 | 9009 |
| HA Tag; CD19 scFv; CD8a | DRVTISCRASQDISKYLNWYQQKPDGTVKLLIYHTSRLHSGVPSRF | | |
| Hinge and Transmembrane | SGSGSGTDYSLTISNLEQEDIATYFCQQGNTLPYTEGGGTKLEITGG | | |
| Domain; 4-1BB intracellular | GGSGGGGSGGGGSEVKLQESGPGLVAPSQSLSVTCTVSGVSLPDY | | |
| domain (CD28 co-stimulatory | GVSWIRQPPRKGLEWLGVIWGSETTYYNSALKSRLTIIKDNSKSQV | | |
| domain); CD3 zeta | FLKMNSLQTDDTAIYYCAKHYYYGGSYAMDYWGQGTSVTVSSTT | | |
| intracellular domain; Linker | TPAPRPPTPAPTIASQPLSLRPEACRPAAGGAVHTRGLDFACDIYIW | | |
| (SG); hPDE5 AA 535-860 of | APLAGTCGVLLLSLVITLYCKRGRIKKLLYIFKQPFMRPVQTTQEED | | |
| WT (R577Q, C596R, V660A, | GCSCREPEEEEGGCELRVIKESRSADAPAYKQGQNQLYNELNLGRR | | |
| I715V, E785K, L856P); stop) | EEYDVLDKRRGRDPEMGGKPRRKNPQEGLYNELQKDKMAEAYSE | | |
| | IGMKGERRRGKGHDGLYQGLSTATKDTYDALHMQALPPRSGEET | | |
| | RELQSLAAAVVPSAQTLKITDFSFSDFELSDLETALCTIQMFTDLNL | | |
| | VQNFQMKHEVLRRWILSVKKNYRKNVAYHNWRHAFNTAQCMFA | | |
| | ALKAGKIQNKLTDLEILALLIAALSHDLDHRGANNSYIQRSEHPLA | | |
| | QLYCHSIMEHHHFDQCLMILNSPGNQILSGLSIEEYKTTLKVIKQAI | | |
| | LATDLALYIKRRGEFFELIRKNQFNLEDPHQKELFLAMLMTACDLS | | |
| | AITKPWPIQQRIAELVATKFFDQGDRERKELNIEPTDLMNREKKNKI | | |
| | PSMQVGFIDAICLQLYEALTHVSEDCFPLLDGCRKNRQKWQAPAE | | |
| | QQ* | | |
| OT-001921 (CD8a leader; | MALPVTALLLPLALLLHAARPYPYDVPDYADIQMTQTTSSLSASLG | 8959 | 9010 |
| HA Tag; CD19 scFv; CD8a | DRVTISCRASQDISKYLNWYQQKPDGTVKLLIYHTSRLHSGVPSRF | | |
| Hinge and Transmembrane | SGSGSGTDYSLTISNLEQEDIATYFCQQGNTLPYTEGGGTKLEITGG | | |
| Domain; 4-1BB intracellular | GGSGGGGSGGGGSEVKLQESGPGLVAPSQSLSVTCTVSGVSLPDY | | |
| domain (CD28 co-stimulatory | GVSWIRQPPRKGLEWLGVIWGSETTYYNSALKSRLTIIKDNSKSQV | | |
| domain); CD3 zeta | FLKMNSLQTDDTAIYYCAKHYYYGGSYAMDYWGQGTSVTVSSTT | | |
| intracellular domain; Linker | TPAPRPPTPAPTIASQPLSLRPEACRPAAGGAVHTRGLDFACDIYIW | | |
| (SG); hPDE5 AA 535-860 of | APLAGTCGVLLLSLVITLYCKRGRIKKLLYIFKQPFMRPVQTTQEED | | |
| WT (I720V, F820S); stop) | GCSCRFPEEEEGGCELRVIKFSRSADAPAYKQGQNQLYNELNLGRR | | |
| | EEYDVLDKRRGRDPEMGGKPRRKNPQEGLYNELQKDKMAEAYSE | | |
| | IGMKGERRRGKGHDGLYQGLSTATKDTYDALHMQALPPRSGEET | | |
| | RELQSLAAAVVPSAQTLKITDFSFSDFELSDLETALCTIRMFTDLNL | | |
| | VQNFQMKHEVLCRWILSVKKNYRKNVAYHNWRHAFNTAQCMFA | | |
| | ALKAGKIQNKLTDLEILALLIAALSHDLDHRGVNNSYIQRSEHPLA | | |
| | QLYCHSIMEHHHFDQCLMILNSPGNQILSGLSIEEYKTTLKIIKQAV | | |
| | LATDLALYIKRRGEFFELIRKNQFNLEDPHQKELFLAMLMTACDLS | | |
| | AITKPWPIQQRIAELVATEFFDQGDRERKELNIEPTDLMNREKKNKI | | |
| | PSMQVGSIDAICLQLYEALTHVSEDCFPLLDGCRKNRQKWQALAE | | |
| | QQ* | | |
| OT-001926 (CD8a leader; | MALPVTALLLPLALLLHAARPYPYDVPDYADIQMTQTTSSLSASLG | 8960 | 9011 |
| HA Tag; CD19 scFv; CD8a | DRVTISCRASQDISKYLNWYQQKPDGTVKLLIYHTSRLHSGVPSRF | | |
| Hinge and Transmembrane | SGSGSGTDYSLTISNLEQEDIATYFCQQGNTLPYTFGGGTKLEITGG | | |
| Domain; 4-1BB intracellular | GGSGGGGSGGGGSEVKLQESGPGLVAPSQSLSVTCTVSGVSLPDY | | |
| domain (CD28 co-stimulatory | GVSWIRQPPRKGLEWLGVIWGSETTYYNSALKSRLTIIKDNSKSQV | | |
| domain); CD3 zeta | FLKMNSLQTDDTAIYYCAKHYYYGGSYAMDYWGQGTSVTVSSTT | | |
| intracellular domain; Linker | TPAPRPPTPAPTIASQPLSLRPEACRPAAGGAVHTRGLDFACDIYIW | | |
| (SG); hPDE5 AA 535-860 of | APLAGTCGVLLLSLVITLYCKRGRKKLLYIFKQPFMRPVQTTQEED | | |
| WT (S695G, E707K,I739M, | GCSCRFPEEEEGGCELRVKFSRSADAPAYKQGQNQLYNELNLGRR | | |
| C763R); stop) | EEYDVLDKRRGRDPEMGGKPRRKNPQEGLYNELQKDKMAEAYSE | | |
| | IGMKGERRRGKGHDGLYQGLSTATKDTYDALHMQALPPRSGEET | | |
| | RELQSLAAAVVPSAQTLKITDFSFSDFELSDLETALCTIRMFTDLNL | | |
| | VQNFQMKHEVLCRWILSVKKNYRKNVAYHNWRHAFNTAQCMFA | | |
| | ALKAGKIQNKLTDLEILALLIAALSHDLDHRGVNNSYIQRSEHPLA | | |
| | QLYCHSIMEHHHFDQCLMILNGPGNQUGLSIKEYKTTLKIIKQAIL | | |
| | ATDLALYIKRRGEFFELMRKNQFNLEDPHQKELFLAMLMTARDLS | | |
| | AITKPWPIQQRIAELVATEFFDQGDRERKELNIEPTDLMNREKKNKI | | |
| | PSMQVGFIDAICLQLYEALTHVSEDCFPLLDGCRKNRQKWQALAE | | |
| | QQ* | | |
| OT-001924 (CD8a leader; | MALPVTALLLPLALLLHAARPYPYDVPDYADIQMTQTTSSLSASLG | 8961 | 9012 |
| HA Tag; CD19 scFv; CD8a | DRVTISCRASQDISKYLNWYQQKPDGTVKLLIYHTSRLHSGVPSRF | | |
| Hinge and Transmembrane | SGSGSGTDYSLTISNLEQEDIATYFCQQGNTLPYTFGGGTKLEITGG | | |
| Domain; 4-1BB intracellular | GGSGGGGSGGGGSEVKLQESGPGLVAPSQSLSVTCTVSGVSLPDY | | |
| domain (CD28 co-stimulatory | GVSWIRQPPRKGLEWLGVIWGSETTYYNSALKSRLTIIKDNSKSQV | | |
| domain); CD3 zeta | FLKMNSLQTDDTAIYYCAKHYYYGGSYAMDYWGQGTSVTVSSTT | | |
| intracellular domain; Linker | TPAPRPPTPAPTIASQPLSLRPEACRPAAGGAVHTRGLDFACDIYIW | | |
| (SG); hPDE5 AA 535-860 of | APLAGTCGVLLLSLVITLYCKRGRIKKLLYIFKQPFMRPVQTTQEED | | |
| WT (Y709H, K812R, | GCSCRFPEEEEGGCELRVKFSRSADAPAYKQGQNQLYNELNLGRR | | |
| L832P); stop) | EEYDVLDKRRGRDPEMGGKPRRKNPQEGLYNELQKDKMAEAYSE | | |
| | IGMKGERRRGKGHDGLYQGLSTATKDTYDALHMQALPPRSGEET | | |
| | RELQSLAAAVVPSAQTLKITDFSFSDFELSDLETALCTIRMFTDLNL | | |
| | VQNFQMKHEVLCRWILSVKKNYRKNVAYHNWRHAFNTAQCMFA | | |
| | ALKAGKIQNKLTDLEILALLIAALSHDLDHRGVNNSYIQRSEHPLA | | |
| | QLYCHSIMEHHHFDQCLMILNSPGNQILSGLSIEERKTTLKIIKQAIL | | |
| | ATDLALYIKRRGEFFELIRKNQFNLEDPHQKELFLAMLMTACDLSA | | |
| | ITKPWPIQQRIAELVATEFFDQGDRERKELNIEPTDLMNREKKNRIP | | |
| | SMQVGFIDAICLQLYEAPTHVSEDCFPLLDGCRKNRQKWQALAEQ | | |
| | Q* | | |
| OT-001925 (CD8a leader; | MALPVTALLLPLALLLHAARPYPYDVPDYADIQMTQTTSSLSASLG | 8962 | 9013 |
| HA Tag; CD19 scFv; CD8a | DRVTISCRASQDISKYLNWYQQKPDGTVKLLIYHTSRLHSGVPSRF | | |
| Hinge and Transmembrane | SGSGSGTDYSLTISNLEQEDIATYFCQQGNTLPYTFGGGTKLEITGG | | |
| Domain; 4-1BB intracellular | GGSGGGGSGGGGSEVKLQESGPGLVAPSQSLSVTCTVSGVSLPDY | | |
| domain (CD28 co-stimulatory | GVSWIRQPPRKGLEWLGVIWGSETTYYNSALKSRLTIIKDNSKSQV | | |
| domain); CD3 zeta | FLKMNSLQTDDTAIYYCAKHYYYGGSYAMDYWGQGTSVTVSSTT | | |
| intracellular domain; Linker | TPAPRPPTPAPTIASQPLSLRPEACRPAAGGAVHTRGLDFACDIYIW | | |
| (SG); hPDE5 AA 535-860 of | APLAGTCGVLLLSLVITLYCKRGRKKLLYIFKQPFMRPVQTTQEED | | |
| WT (N583S, K752E, C846S); | GCSCRFPEEEEGGCELRVKFSRSADAPAYKQGQNQLYNELNLGRR | | |
| stop) | EEYDVLDKRRGRDPEMGGKPRRKNPQEGLYNELQKDKMAEAYSE | | |
| | IGMKGERRRGKGHDGLYQGLSTATKDTYDALHMQALPPRSGEET | | |
| | RELQSLAAAVVPSAQTLKITDFSFSDFELSDLETALCDRMFTDLSL | | |
| | VQNFQMKHEVLCRWILSVKKNYRKNVAYHNWRHAFNTAQCMFA | | |
| | ALKAGKIQNKLTDLEILALLIAALSHDLDHRGVNNSYIQRSEHPLA | | |
| | QLYCHSIMEHHHFDQCLMILNSPGNMSGLSIEEYKTTLKIIKQAIL | | |
| | ATDLALYIKRRGEFFELIRKNQFNLEDPHQEELFLAMLMTACDLSA | | |
| | ITKPWPIQQRIAELVATEFFDQGDRERKELNIEPTDLMNREKKNKIP | | |
| | SMQVGFIDAICLQLYEALTHVSEDCFPLLDGSRKNRQKWQALAEQ | | |
| | Q* | | |
| OT-001929 (CD8a leader; | MALPVTALLLPLALLLHAARPYPYDVPDYADIQMTQTTSSLSASLG | 8963 | 9014 |
| HA Tag; CD19 scFv; CD8a | DRVTISCRASQDISKYLNWYQQKPDGTVKLLIYHTSRLHSGVPSRF | | |
| Hinge and Transmembrane | SGSGSGTDYSLTISNLEQEDIATYFCQQGNTLPYTEGGGTKLEITGG | | |
| Domain; 4-1BB intracellular | GGSGGGGSGGGGSEVKLQESGPGLVAPSQSLSVTCTVSGVSLPDY | | |
| domain (CD28 co-stimulatory | GVSWIRQPPRKGLEWLGVIWGSETTYYNSALKSRLTIIKDNSKSQV | | |
| domain); CD3 zeta | FLKMNSLQTDDTAIYYCAKHYYYGGSYAMDYWGQGTSVTVSSTT | | |
| intracellular domain; Linker | TPAPRPPTPAPTIASQPLSLRPEACRPAAGGAVHTRGLDFACDIYIW | | |
| (SG); hPDE5 AA 535-860 of | APLAGTCGVLLLSLVITLYCKRGRKKLLYIFKQPFMRPVQTTQEED | | |
| WT (E682G, D748N); stop) | GCSCRFPEEEEGGCELRVKFSRSADAPAYKQGQNQLYNELNLGRR | | |
| | EEYDVLDKRRGRDPEMGGKPRRKNPQEGLYNELQKDKMAEAYSE | | |
| | IGMKGERRRGKGHDGLYQGLSTATKDTYDALHMQALPPRSGEET | | |
| | RELQSLAAAVVPSAQTLKITDFSFSDFELSDLETALCTIRMFTDLNL | | |
| | VQNFQMKHEVLCRWILSVKKNYRKNVAYHNWRHAFNTAQCMFA | | |
| | ALKAGKIQNKLTDLEILALLIAALSHDLDHRGVNNSYIQRSEHPLA | | |
| | QLYCHSIMGHHHFDQCLMILNSPGNQILSGLSIEEYKTTLKIIKQAIL | | |
| | ATDLALYIKRRGEFFELIRKNQFNLENPHQKELFLAMLMTACDLSA | | |
| | ITKPWPIQQRIAELVATEFFDQGDRERKELNIEPTDLMNREKKNKIP | | |
| | SMQVGFIDAICLQLYEALTHVSEDCFPLLDGCRKNRQKWQALAEQ | | |
| | Q* | | |
| OT-001928 (CD8a leader; | MALPVTALLLPLALLLHAARPYPYDVPDYADIQMTQTTSSLSASLG | 8964 | 9015 |
| HA Tag; CD19 scFv; CD8a | DRVTISCRASQDISKYLNWYQQKPDGTVKLLIYHTSRLHSGVPSRF | | |
| Hinge and Transmembrane | SGSGSGTDYSLTISNLEQEDIATYFCQQGNTLPYTFGGGTKLEITGG | | |
| Domain; 4-1BB intracellular | GGSGGGGSGGGGSEVKLQESGPGLVAPSQSLSVTCTVSGVSLPDY | | |
| domain (CD28 co-stimulatory | GVSWIRQPPRKGLEWLGVIWGSETTYYNSALKSRLTIIKDNSKSQV | | |
| domain); CD3 zeta | FLKMNSLQTDDTAIYYCAKHYYYGGSYAMDYWGQGTSVTVSSTT | | |
| intracellular domain; Linker | TPAPRPPTPAPTIASQPLSLRPEACRPAAGGAVHTRGLDFACDIYIW | | |
| (SG); hPDE5 AA 535-860 of | APLAGTCGVLLLSLVITLYCKRGRKKLLYIFKQPFMRPVQTTQEED | | |
| WT (K591R, I643T, L856P); | GCSCRFPEEEEGGCELRVKFSRSADAPAYKQGQNQLYNELNLGRR | | |
| stop) | EEYDVLDKRRGRDPEMGGKPRRKNPQEGLYNELQKDKMAEAYSE | | |
| | IGMKGERRRGKGHDGLYQGLSTATKDTYDALHMQALPPRSGEET | | |
| | RELQSLAAAVVPSAQTLKITDFSFSDFELSDLETALCTIRMFTDLNL | | |
| | VQNFQMRHEVLCRWILSVKKNYRKNVAYHNWRHAFNTAQCMFA | | |
| | ALKAGKIQNKLTDLETLALLIAALSHDLDHRGVNNSYIQRSEHPLA | | |
| | QLYCHSIMEHHHFDQCLMILNSPGNMSGLSIEEYKTTLKIIKQAIL | | |
| | ATDLALYIKRRGEFFELIRKNQFNLEDPHQKELFLAMLMTACDLSA | | |
| | ITKPWPIQQRIAELVATEFFDQGDRERKELNIEPTDLMNREKKNKIP | | |
| | SMQVGFIDAICLQLYEALTHVSEDCFPLLDGCRKNRQKWQAPAEQ | | |
| | Q* | | |
| OT-001930 (CD8a leader; | MALPVTALLLPLALLLHAARPYPYDVPDYADIQMTQTTSSLSASLG | 8965 | 9016 |
| HA Tag; CD19 scFv; CD8a | DRVTISCRASQDISKYLNWYQQKPDGTVKLLIYHTSRLHSGVPSRF | | |
| Hinge and Transmembrane | SGSGSGTDYSLTISNLEQEDIATYFCQQGNTLPYTEGGGTKLEITGG | | |
| Domain; 4-1BB intracellular | GGSGGGGSGGGGSEVKLQESGPGLVAPSQSLSVTCTVSGVSLPDY | | |
| domain (CD28 co-stimulatory | GVSWIRQPPRKGLEWLGVIWGSETTYYNSALKSRLTIIKDNSKSQV | | |
| domain); CD3 zeta | FLKMNSLQTDDTAIYYCAKHYYYGGSYAMDYWGQGTSVTVSSTT | | |
| intracellular domain; Linker | TPAPRPPTPAPTIASQPLSLRPEACRPAAGGAVHTRGLDFACDIYIW | | |
| (SG); hPDE5 AA 535-860 of | APLAGTCGVLLLSLVITLYCKRGRKKLLYIFKQPFMRPVQTTQEED | | |
| WT (F619S, V818A, | GCSCRFPEEEEGGCELRVKFSRSADAPAYKQGQNQLYNELNLGRR | | |
| Y829C); stop) | EEYDVLDKRRGRDPEMGGKPRRKNPQEGLYNELQKDKMAEAYSE | | |
| | IGMKGERRRGKGHDGLYQGLSTATKDTYDALHMQALPPRSGEET | | |
| | RELQSLAAAVVPSAQTLKITDFSFSDFELSDLETALCTIRMFTDLNL | | |
| | VQNFQMKHEVLCRWILSVKKNYRKNVAYHNWRHASNTAQCMFA | | |
| | ALKAGKIQNKLTDLEMALLIAALSHDLDHRGVNNSYIQRSEHPLA | | |
| | QLYCHSIMEHHHEDQCLMILNSPGNMSGLSIEEYKTTLKIIKQAIL | | |
| | ATDLALYIKRRGEFFELIRKNQFNLEDPHQKELFLAMLMTACDLSA | | |
| | ITKPWPIQQRIAELVATEFEDQGDRERKELNIEPTDLMNREKKNKIP | | |
| | SMQAGFIDAICLQLCEALTHVSEDCFPLLDGCRKNRQKWQALAEQ | | |
| | Q* | | |
| OT-001927 (CD8a leader; | MALPVTALLLPLALLLHAARPYPYDVPDYADIQMTQTTSSLSASLG | 8966 | 9017 |
| HA Tag; CD19 scFv; CD8a | DRVTISCRASQDISKYLNWYQQKPDGTVKLLIYHTSRLHSGVPSRF | | |
| Hinge and Transmembrane | SGSGSGTDYSLTISNLEQEDIATYECQQGNTLPYTEGGGTKLEITGG | | |
| Domain; 4-1BB intracellular | GGSGGGGSGGGGSEVKLQESGPGLVAPSQSLSVTCTVSGVSLPDY | | |
| domain (CD28 co-stimulatory | GVSWIRQPPRKGLEWLGVIWGSETTYYNSALKSRLTIIKDNSKSQV | | |
| domain); CD3 zeta | FLKMNSLQTDDTAIYYCAKHYYYGGSYAMDYWGQGTSVTVSSTT | | |
| intracellular domain; Linker | TPAPRPPTPAPTIASQPLSLRPEACRPAAGGAVHTRGLDFACDIYIW | | |
| (SG); hPDE5 AA 535-860 of | APLAGTCGVLLLSLVITLYCKRGRKKLLYIFKQPFMRPVQTTQEED | | |
| WT (V548E, Q589L, K633I, | GCSCREPEEEEGGCELRVKESRSADAPAYKQGQNQLYNELNLGRR | | |
| M681T, S702I, K752E, | EEYDVLDKRRGRDPEMGGKPRRKNPQEGLYNELQKDKMAEAYSE | | |
| L781P, A857T); stop) | IGMKGERRRGKGHDGLYQGLSTATKDTYDALHMQALPPRSGEET | | |
| | RELQSLAAAVEPSAQTLKITDESESDFELSDLETALCTIRMFTDLNL | | |
| | VQNFLMKHEVLCRWILSVKKNYRKNVAYHNWRHAENTAQCMFA | | |
| | ALKAGIIQNKLTDLEILALLIAALSHDLDHRGVNNSYIQRSEHPLAQ | | |
| | LYCHSITEHHHFDQCLMILNSPGNQILIGLSIEEYKTTLKIIKQAILAT | | |
| | DLALYIKRRGEFFELIRKNQFNLEDPHQEELFLAMLMTACDLSAIT | | |
| | KPWPIQQRIAEPVATEFEDQGDRERKELNIEPTDLMNREKKNKIPS | | |
| | MQVGFIDAICLQLYEALTHVSEDCFPLLDGCRKNRQKWQALTEQQ* | | |
| OT-001933 (CD8a leader; | MALPVTALLLPLALLLHAARPYPYDVPDYADIQMTQTTSSLSASLG | 8967 | 9018 |
| HA Tag; CD19 scFv; CD8a | DRVTISCRASQDISKYLNWYQQKPDGTVKLLIYHTSRLHSGVPSRF | | |
| Hinge and Transmembrane | SGSGSGTDYSLTISNLEQEDIATYFCQQGNTLPYTFGGGTKLEITGG | | |
| Domain; 4-1BB intracellular | GGSGGGGSGGGGSEVKLQESGPGLVAPSQSLSVTCTVSGVSLPDY | | |
| domain (CD28 co-stimulatory | GVSWIRQPPRKGLEWLGVIWGSETTYYNSALKSRLTIIKDNSKSQV | | |
| domain); CD3 zeta | FLKMNSLQTDDTAIYYCAKHYYYGGSYAMDYWGQGTSVTVSSTT | | |
| intracellular domain; Linker | TPAPRPPTPAPTIASQPLSLRPEACRPAAGGAVHTRGLDFACDIYIW | | |
| (SG); hPDE5 AA 535-860 of | APLAGTCGVLLLSLVITLYCKRGRKKLLYIFKQPFMRPVQTTQEED | | |
| WT (S652G, Q688R); stop) | GCSCRFPEEEEGGCELRVKESRSADAPAYKQGQNQLYNELNLGRR | | |
| | EEYDVLDKRRGRDPEMGGKPRRKNPQEGLYNELQKDKMAEAYSE | | |
| | IGMKGERRRGKGHDGLYQGLSTATKDTYDALHMQALPPRSGEET | | |
| | RELQSLAAAVVPSAQTLKITDFSFSDFELSDLETALCTIRMFTDLNL | | |
| | VQNFQMKHEVLCRWILSVKKNYRKNVAYHNWRHAFNTAQCMFA | | |
| | ALKAGKIQNKLTDLEMALLIAALGHDLDHRGVNNSYIQRSEHPLA | | |
| | QLYCHSIMEHHHFDRCLMILNSPGNQISGLSIEEYKTTLKIIKQAIL | | |
| | ATDLALYIKRRGEFFELIRKNQFNLEDPHQKELFLAMLMTACDLSA | | |
| | ITKPWPIQQRIAELVATEFEDQGDRERKELNIEPTDLMNREKKNKIP | | |
| | SMQVGFIDAICLQLYEALTHVSEDCFPLLDGCRKNRQKWQALAEQ | | |
| | Q* | | |
| OT-001931 (CD8a leader; | MALPVTALLLPLALLLHAARPYPYDVPDYADIQMTQTTSSLSASLG | 8968 | 9019 |
| HA Tag; CD19 scFv; CD8a | DRVTISCRASQDISKYLNWYQQKPDGTVKLLIYHTSRLHSGVPSRF | | |
| Hinge and Transmembrane | SGSGSGTDYSLTISNLEQEDIATYECQQGNTLPYTEGGGTKLEITGG | | |
| Domain; 4-1BB intracellular | GGSGGGGSGGGGSEVKLQESGPGLVAPSQSLSVTCTVSGVSLPDY | | |
| domain (CD28 co-stimulatory | GVSWIRQPPRKGLEWLGVIWGSETTYYNSALKSRLTIIKDNSKSQV | | |
| domain); CD3 zeta | FLKMNSLQTDDTAIYYCAKHYYYGGSYAMDYWGQGTSVTVSSTT | | |
| intracellular domain; Linker | TPAPRPPTPAPTIASQPLSLRPEACRPAAGGAVHTRGLDFACDIYIW | | |
| (SG); hPDE5 AA 535-860 of | APLAGTCGVLLLSLVITLYCKRGRKKLLYIFKQPFMRPVQTTQEED | | |
| WT (E565G); stop) | GCSCREPEEEEGGCELRVKESRSADAPAYKQGQNQLYNELNLGRR | | |
| | EEYDVLDKRRGRDPEMGGKPRRKNPQEGLYNELQKDKMAEAYSE | | |
| | IGMKGERRRGKGHDGLYQGLSTATKDTYDALHMQALPPRSGEET | | |
| | RELQSLAAAVVPSAQTLKITDFSFSDFGLSDLETALCTIRMFTDLNL | | |
| | VQNFQMKHEVLCRWILSVKKNYRKNVAYHNWRHAFNTAQCMFA | | |
| | ALKAGKIQNKLTDLEILALLIAALSHDLDHRGVNNSYIQRSEHPLA | | |
| | QLYCHSIMEHHHFDQCLMILNSPGNQILSGLSIEEYKTTLKIIKQAIL | | |
| | ATDLALYIKRRGEFFELIRKNQFNLEDPHQKELFLAMLMTACDLSA | | |
| | ITKPWPIQQRIAELVATEFEDQGDRERKELNIEPTDLMNREKKNKIP | | |
| | SMQVGFIDAICLQLYEALTHVSEDCFPLLDGCRKNRQKWQALAEQ | | |
| | Q* | | |
| OT-001932 (CD8a leader; | MALPVTALLLPLALLLHAARPYPYDVPDYADIQMTQTTSSLSASLG | 8969 | 9020 |
| HA Tag; CD19 scFv; CD8a | DRVTISCRASQDISKYLNWYQQKPDGTVKLLIYHTSRLHSGVPSRF | | |
| Hinge and Transmembrane | SGSGSGTDYSLTISNLEQEDIATYFCQQGNTLPYTFGGGTKLEITGG | | |
| Domain; 4-1BB intracellular | GGSGGGGSGGGGSEVKLQESGPGLVAPSQSLSVTCTVSGVSLPDY | | |
| domain (CD28 co-stimulatory | GVSWIRQPPRKGLEWLGVIWGSETTYYNSALKSRLTIIKDNSKSQV | | |
| domain); CD3 zeta | FLKMNSLQTDDTAIYYCAKHYYYGGSYAMDYWGQGTSVTVSSTT | | |
| intracellular domain; Linker | TPAPRPPTPAPTIASQPLSLRPEACRPAAGGAVHTRGLDFACDIYIW | | |
| (SG); hPDE5 AA 535-860 of | APLAGTCGVLLLSLVITLYCKRGRKKLLYIFKQPFMRPVQTTQEED | | |
| WT (I774V); stop) | GCSCRFPEEEEGGCELRVKESRSADAPAYKQGQNQLYNELNLGRR | | |
| | EEYDVLDKRRGRDPEMGGKPRRKNPQEGLYNELQKDKMAEAYSE | | |
| | IGMKGERRRGKGHDGLYQGLSTATKDTYDALHMQALPPRSGEET | | |
| | RELQSLAAAVVPSAQTLKITDFSFSDFELSDLETALCTIRMFTDLNL | | |
| | VQNFQMKHEVLCRWILSVKKNYRKNVAYHNWRHAFNTAQCMFA | | |
| | ALKAGKIQNKLTDLEILALLIAALSHDLDHRGVNNSYIQRSEHPLA | | |
| | QLYCHSIMEHHHFDQCLMILNSPGNQILSGLSIEEYKTTLKIIKQAIL | | |
| | ATDLALYIKRRGEFFELIRKNQFNLEDPHQKELFLAMLMTACDLSA | | |
| | ITKPWPVQQRIAELVATEFFDQGDRERKELNIEPTDLMNREKKNKI | | |
| | PSMQVGFIDAICLQLYEALTHVSEDCFPLLDGCRKNRQKWQALAE | | |
| | QQ* | | |
| OT-001935 (CD8a leader; | MALPVTALLLPLALLLHAARPYPYDVPDYADIQMTQTTSSLSASLG | 8970 | 9021 |
| HA Tag; CD19 scFv; CD8a | DRVTISCRASQDISKYLNWYQQKPDGTVKLLIYHTSRLHSGVPSRF | | |
| Hinge and Transmembrane | SGSGSGTDYSLTISNLEQEDIATYECQQGNTLPYTEGGGTKLEITGG | | |
| Domain; 4-1BB intracellular | GGSGGGGSGGGGSEVKLQESGPGLVAPSQSLSVTCTVSGVSLPDY | | |
| domain (CD28 co-stimulatory | GVSWIRQPPRKGLEWLGVIWGSETTYYNSALKSRLTIIKDNSKSQV | | |
| domain); CD3 zeta | FLKMNSLQTDDTAIYYCAKHYYYGGSYAMDYWGQGTSVTVSSTT | | |
| intracellular domain; Linker | TPAPRPPTPAPTIASQPLSLRPEACRPAAGGAVHTRGLDFACDIYIW | | |
| (SG); hPDE5 AA 535-860 of | APLAGTCGVLLLSLVITLYCKRGRKKLLYIFKQPFMRPVQTTQEED | | |
| WT (K591R); stop) | GCSCRFPEEEEGGCELRVKESRSADAPAYKQGQNQLYNELNLGRR | | |
| | EEYDVLDKRRGRDPEMGGKPRRKNPQEGLYNELQKDKMAEAYSE | | |
| | IGMKGERRRGKGHDGLYQGLSTATKDTYDALHMQALPPRSGEET | | |
| | RELQSLAAAVVPSAQTLKITDFSFSDFELSDLETALCTIRMFTDLNL | | |
| | VQNFQMRHEVLCRWILSVKKNYRKNVAYHNWRHAFNTAQCMFA | | |
| | ALKAGKIQNKLTDLEILALLIAALSHDLDHRGVNNSYIQRSEHPLA | | |
| | QLYCHSIMEHHHFDQCLMILNSPGNQILSGLSIEEYKTTLKIIKQAIL | | |
| | ATDLALYIKRRGEFFELIRKNQFNLEDPHQKELFLAMLMTACDLSA | | |
| | ITKPWPIQQRIAELVATEFFDQGDRERKELNIEPTDLMNREKKNKIP | | |
| | SMQVGFIDAICLQLYEALTHVSEDCFPLLDGCRKNRQKWQALAEQ | | |
| | Q* | | |
| OT-001934 (CD8a leader; | MALPVTALLLPLALLLHAARPYPYDVPDYADIQMTQTTSSLSASLG | 8971 | 9022 |
| HA Tag; CD19 scFv; CD8a | DRVTISCRASQDISKYLNWYQQKPDGTVKLLIYHTSRLHSGVPSRF | | |
| Hinge and Transmembrane | SGSGSGTDYSLTISNLEQEDIATYFCQQGNTLPYTEGGGTKLEITGG | | |
| Domain; 4-1BB intracellular | GGSGGGGSGGGGSEVKLQESGPGLVAPSQSLSVTCTVSGVSLPDY | | |
| domain (CD28 co-stimulatory | GVSWIRQPPRKGLEWLGVIWGSETTYYNSALKSRLTIIKDNSKSQV | | |
| domain); CD3 zeta | FLKMNSLQTDDTAIYYCAKHYYYGGSYAMDYWGQGTSVTVSSTT | | |
| intracellular domain; Linker | TPAPRPPTPAPTIASQPLSLRPEACRPAAGGAVHTRGLDFACDIYIW | | |
| (SG); hPDE5 AA 535-860 of | APLAGTCGVLLLSLVITLYCKRGRKKLLYIFKQPFMRPVQTTQEED | | |
| WT (F559S, Y709C, | GCSCRFPEEEEGGCELRVKESRSADAPAYKQGQNQLYNELNLGRR | | |
| M760T); stop) | EEYDVLDKRRGRDPEMGGKPRRKNPQEGLYNELQKDKMAEAYSE | | |
| | IGMKGERRRGKGHDGLYQGLSTATKDTYDALHMQALPPRSGEET | | |
| | RELQSLAAAVVPSAQTLKITDSSFSDFELSDLETALCTIRMFTDLNL | | |
| | VQNFQMKHEVLCRWILSVKKNYRKNVAYHNWRHAFNTAQCMFA | | |
| | ALKAGKIQNKLTDLEILALLIAALSHDLDHRGVNNSYIQRSEHPLA | | |
| | QLYCHSIMEHHHFDQCLMILNSPGNQILSGLSIEECKTTLKIIKQAIL | | |
| | ATDLALYIKRRGEFFELIRKNQFNLEDPHQKELFLAMLTTACDLSAI | | |
| | TKPWPIQQRIAELVATEFFDQGDRERIKELNIEPTDLMNREKKNKIPS | | |
| | MQVGFIDAICLQLYEALTHVSEDCFPLLDGCRKNRQKWQALAEQQ* | | |
| OT-001937 (CD8a leader; | MALPVTALLLPLALLLHAARPYPYDVPDYADIQMTQTTSSLSASLG | 8972 | 9023 |
| HA Tag; CD19 scFv; CD8a | DRVTISCRASQDISKYLNWYQQKPDGTVKLLIYHTSRLHSGVPSRF | | |
| Hinge and Transmembrane | SGSGSGTDYSLTISNLEQEDIATYFCQQGNTLPYTFGGGTKLEITGG | | |
| Domain; 4-1BB intracellular | GGSGGGGSGGGGSEVKLQESGPGLVAPSQSLSVTCTVSGVSLPDY | | |
| domain (CD28 co-stimulatory | GVSWIRQPPRKGLEWLGVIWGSETTYYNSALKSRLTIIKDNSKSQV | | |
| domain); CD3 zeta | FLKMNSLQTDDTAIYYCAKHYYYGGSYAMDYWGQGTSVTVSSTT | | |
| intracellular domain; Linker | TPAPRPPTPAPTIASQPLSLRPEACRPAAGGAVHTRGLDFACDIYIW | | |
| (SG); hPDE5 AA 535-860 of | APLAGTCGVLLLSLVITLYCKRGRIKKLLYIFKQPFMRPVQTTQEED | | |
| WT (A649V, A650T, K730E, | GCSCRFPEEEEGGCELRVKFSRSADAPAYKQGQNQLYNELNLGRR | | |
| E830K); stop) | EEYDVLDKRRGRDPEMGGKPRRKNPQEGLYNELQKDKMAEAYSE | | |
| | IGMKGERRRGKGHDGLYQGLSTATKDTYDALHMQALPPRSGEET | | |
| | RELQSLAAAVVPSAQTLKITDFSFSDFELSDLETALCTIRMFTDLNL | | |
| | VQNFQMKHEVLCRWILSVKKNYRKNVAYHNWRHAFNTAQCMFA | | |
| | ALKAGKIQNKLTDLEILALLIVTLSHDLDHRGVNNSYIQRSEHPLAQ | | |
| | LYCHSIMEHHHFDQCLMILNSPGNQILSGLSIEEYKTTLKIIKQAILA | | |
| | TDLALYIERRGEFFELIRKNQFNLEDPHQKELFLAMLMTACDLSAIT | | |
| | KPWPIQQRIAELVATEFFDQGDRERKELNIEPTDLMNREKKNKIPS | | |
| | MQVGFIDAICLQLYKALTHVSEDCFPLLDGCRKNRQKWQALAEQQ* | | |
| OT-001936 (CD8a leader; | MALPVTALLLPLALLLHAARPYPYDVPDYADIQMTQTTSSLSASLG | 8973 | 9024 |
| HA Tag; CD19 scFv; CD8a | DRVTISCRASQDISKYLNWYQQKPDGTVKLLIYHTSRLHSGVPSRF | | |
| Hinge and Transmembrane | SGSGSGTDYSLTISNLEQEDIATYFCQQGNTLPYTEGGGTKLEITGG | | |
| Domain; 4-1BB intracellular | GGSGGGGSGGGGSEVKLQESGPGLVAPSQSLSVTCTVSGVSLPDY | | |
| domain (CD28 co-stimulatory | GVSWIRQPPRKGLEWLGVIWGSETTYYNSALKSRLTIIKDNSKSQV | | |
| domain); CD3 zeta | FLKMNSLQTDDTAIYYCAKHYYYGGSYAMDYWGQGTSVTVSSTT | | |
| intracellular domain; Linker | TPAPRPPTPAPTIASQPLSLRPEACRPAAGGAVHTRGLDFACDIYIW | | |
| (SG); hPDE5 AA 535-860 of | APLAGTCGVLLLSLVITLYCKRGRKKLLYIFKQPFMRPVQTTQEED | | |
| WT (Y728C, Q817R); stop) | GCSCREPEEEEGGCELRVKESRSADAPAYKQGQNQLYNELNLGRR | | |
| | EEYDVLDKRRGRDPEMGGKPRRKNPQEGLYNELQKDKMAEAYSE | | |
| | IGMKGERRRGKGHDGLYQGLSTATKDTYDALHMQALPPRSGEET | | |
| | RELQSLAAAVVPSAQTLKITDFSFSDFELSDLETALCTIRMFTDLNL | | |
| | VQNFQMKHEVLCRWILSVKKNYRKNVAYHNWRHAFNTAQCMFA | | |
| | ALKAGKIQNKLTDLEILALLIAALSHDLDHRGVNNSYIQRSEHPLA | | |
| | QLYCHSIMEHHHFDQCLMILNSPGNQILSGLSIEEYKTTLKIIKQAIL | | |
| | ATDLALCIKRRGEFFELIRKNQFNLEDPHQKELFLAMLMTACDLSA | | |
| | ITKPWPIQQRIAELVATEFFDQGDRERKELNIEPTDLMNREKKNKIP | | |
| | SMRVGFIDAICLQLYEALTHVSEDCFPLLDGCRKNRQKWQALAEQ | | |
| | Q* | | |
| OT-001938 (CD8a leader; | MALPVTALLLPLALLLHAARPYPYDVPDYADIQMTQTTSSLSASLG | 8974 | 9025 |
| HA Tag; CD19 scFv; CD8a | DRVTISCRASQDISKYLNWYQQKPDGTVKLLIYHTSRLHSGVPSRF | | |
| Hinge and Transmembrane | SGSGSGTDYSLTISNLEQEDIATYFCQQGNTLPYTEGGGTKLEITGG | | |
| Domain; 4-1BB intracellular | GGSGGGGSGGGGSEVKLQESGPGLVAPSQSLSVTCTVSGVSLPDY | | |
| domain (CD28 co-stimulatory | GVSWIRQPPRKGLEWLGVIWGSETTYYNSALKSRLTIIKDNSKSQV | | |
| domain); CD3 zeta | FLKMNSLQTDDTAIYYCAKHYYYGGSYAMDYWGQGTSVTVSSTT | | |
| intracellular domain; Linker | TPAPRPPTPAPTIASQPLSLRPEACRPAAGGAVHTRGLDFACDIYIW | | |
| (SG); hPDE5 AA 535-860 of | APLAGTCGVLLLSLVITLYCKRGRIKKLLYIFKQPFMRPVQTTQEED | | |
| WT (L595P, K741R); stop) | GCSCRFPEEEEGGCELRVKESRSADAPAYKQGQNQLYNELNLGRR | | |
| | EEYDVLDKRRGRDPEMGGKPRRKNPQEGLYNELQKDKMAEAYSE | | |
| | IGMKGERRRGKGHDGLYQGLSTATKDTYDALHMQALPPRSGEET | | |
| | RELQSLAAAVVPSAQTLKITDFSFSDFELSDLETALCTIRMFTDLNL | | |
| | VQNFQMKHEVPCRWILSVKKNYRKNVAYHNWRHAFNTAQCMFA | | |
| | ALKAGKIQNKLTDLEILALLIAALSHDLDHRGVNNSYIQRSEHPLA | | |
| | QLYCHSIMEHHHFDQCLMILNSPGNQILSGLSIEEYKTTLKIIKQAIL | | |
| | ATDLALYIKRRGEFFELIRRNQFNLEDPHQKELFLAMLMTACDLSA | | |
| | ITKPWPIQQRIAELVATEFFDQGDRERKELNIEPTDLMNREKKNKIP | | |
| | SMQVGFIDAICLQLYEALTHVSEDCFPLLDGCRKNRQKWQALAEQ | | |
| | Q* | | |
| OT-001909 (CD8a leader; | MALPVTALLLPLALLLHAARPYPYDVPDYADIQMTQTTSSLSASLG | 8975 | 9026 |
| HA Tag; CD19 scFv; CD8a | DRVTISCRASQDISKYLNWYQQKPDGTVKLLIYHTSRLHSGVPSRF | | |
| Hinge and Transmembrane | SGSGSGTDYSLTISNLEQEDIATYFCQQGNTLPYTFGGGTKLEITGG | | |
| Domain; 4-1BB intracellular | GGSGGGGSGGGGSEVKLQESGPGLVAPSQSLSVTCTVSGVSLPDY | | |
| domain (CD28 co-stimulatory | GVSWIRQPPRKGLEWLGVIWGSETTYYNSALKSRLTIIKDNSKSQV | | |
| domain); CD3 zeta | FLKMNSLQTDDTAIYYCAKHYYYGGSYAMDYWGQGTSVTVSSTT | | |
| intracellular domain; Linker | TPAPRPPTPAPTIASQPLSLRPEACRPAAGGAVHTRGLDFACDIYIW | | |
| (SG); hPDE5 AA 535-860 of | APLAGTCGVLLLSLVITLYCKRGRKKLLYIFKQPFMRPVQTTQEED | | |
| WT (R577W, W615R, | GCSCRFPEEEEGGCELRVKFSRSADAPAYKQGQNQLYNELNLGRR | | |
| M805T, I821V); stop) | EEYDVLDKRRGRDPEMGGKPRRKNPQEGLYNELQKDKMAEAYSE | | |
| | IGMKGERRRGKGHDGLYQGLSTATKDTYDALHMQALPPRSGEET | | |
| | RELQSLAAAVVPSAQTLKITDFSFSDFELSDLETALCTIWMFTDLNL | | |
| | VQNFQMKHEVLCRWILSVKKNYRKNVAYHNRRHAFNTAQCMFA | | |
| | ALKAGKIQNKLTDLEILALLIAALSHDLDHRGVNNSYIQRSEHPLA | | |
| | QLYCHSIMEHHHFDQCLMILNSPGNQILSGLSIEEYKTTLKIIKQAIL | | |
| | ATDLALYIKRRGEFFELIRKNQFNLEDPHQKELFLAMLMTACDLSA | | |
| | ITKPWPIQQRIAELVATEFFDQGDRERKELNIEPTDLTNREKKNKIPS | | |
| | MQVGFVDAICLQLYEALTHVSEDCFPLLDGCRKNRQKWQALAEQ | | |
| | Q* | | |

### Tandem CAR (TanCAR)

[0346] In some embodiments, the CAR of the present disclosure may be a tandem chimeric antigen receptor (TanCAR) which is able to target two, three, four, or more tumor specific antigens. In some aspects, the CAR is a bispecific TanCAR including two targeting domains which recognize two different TSAs on tumor cells. The bispecific CAR may be further defined as comprising an extracellular region comprising a targeting domain (e.g., an antigen recognition domain) specific for a first tumor antigen and a targeting domain (e.g., an antigen recognition domain) specific for a second tumor antigen. In other aspects, the CAR is a multispecific TanCAR that includes three or more targeting domains configured in a tandem arrangement. The space between the targeting domains in the TanCAR may be between about 5 and about 30 amino acids in length, for example, 6, 7, 8, 9, 10, 11, 12, 13, 14, 15, 16, 17, 18, 19, 20, 21, 22, 23, 24, 25, 26, 27, 28, 29 and 30 amino acids.

### Split CAR

[0347] In some embodiments, the components including the targeting moiety, transmembrane domain and intracellular signaling domains of the present disclosure may be split into two or more parts such that it is dependent on multiple inputs that promote assembly of the intact functional receptor. In one embodiment, the split synthetic CAR system can be constructed in which the assembly of an activated CAR receptor is dependent on the binding of a ligand to the SRE (e.g. a small molecule) and a specific antigen to the targeting moiety. As a non-limiting example, the split CAR consists of two parts that assemble in a small molecule-dependent manner; one part of the receptor features an extracellular antigen binding domain (e.g. scFv) and the other part has the intracellular signaling domains, such as the CD3ζ intracellular domain.

[0348] In other aspects, the split parts of the CAR system can be further modified to increase signal. In one example, the second part of cytoplasmic fragment may be anchored to the plasma membrane by incorporating a transmembrane domain (e.g., CD8a transmembrane domain) to the construct. An additional extracellular domain may also be added to the second part of the CAR system, for instance an extracellular domain that mediates homo-dimerization. These modifications may increase receptor output activity, i.e., T cell activation.

[0349] In some aspects, the two parts of the split CAR system contain heterodimerization domains that conditionally interact upon binding of a heterodimerizing small molecule. As such, the receptor components are assembled in the presence of the small molecule, to form an intact system which can then be activated by antigen engagement. Any known heterodimerizing components can be incorporated into a split CAR system. Other small molecule dependent heterodimerization domains may also be used, including, but not limited to, gibberellin-induced dimerization system (GID1-GAI), trimethoprim-SLF induced ecDHFR and FKBP dimerization (Czlapinski et al., J Am Chem Soc., 2008, 130(40): 13186-13187) and ABA (abscisic acid) induced dimerization of PP2C and PYL domains (Cutler et al., Annu Rev Plant Biol. 2010, 61: 651-679). The dual regulation using inducible assembly (e.g., ligand dependent dimerization) and degradation (e.g., destabilizing domain induced CAR degradation) of the split CAR system may provide more flexibility to control the activity of the CAR modified T cells.

### Switchable CAR

[0350] In some embodiments, the CAR of the disclosure may be a switchable CAR. Juilerat et al (Juilerat et al., Sci. Rep., 2016, 6: 18950; the contents of which are incorporated herein by reference in their entirety) recently reported controllable CARs that can be transiently switched on in response to a stimulus (e.g. a small molecule). In this CAR design, a system is directly integrated in the hinge domain that separate the scFv domain from the cell membrane domain in the CAR. Such system is possible to split or combine different key functions of a CAR such as activation and co-stimulation within different chains of a receptor complex, mimicking the complexity of the TCR native architecture. This integrated system can switch the scFv and antigen interaction between on/off states controlled by the absence/presence of the stimulus.

### Reversible CAR

[0351] In other embodiments, the CAR of the disclosure may be a reversible CAR system. In this CAR architecture, a LID domain (ligand-induced degradation) is incorporated into the CAR system. The CAR can be temporarily down-regulated by adding a ligand of the LID domain. The combination of LID and DD mediated regulation provides tunable control of continuingly activated CAR T cells, thereby reducing CAR mediated tissue toxicity.

Inhibitory CAR (iCAR)

[0352] In some embodiments, payloads of the present disclosure may be inhibitory CARs. Inhibitory CAR (iCAR) refers to a bispecific CAR design wherein a negative signal is used to enhance the tumor specificity and limit normal tissue toxicity. This design incorporates a second CAR having a surface antigen recognition domain combined with an inhibitory signal domain to limit T cell responsiveness even with concurrent engagement of an activating receptor. This antigen recognition domain is directed towards a normal tissue specific antigen such that the T cell can be activated in the presence of first target protein, but if the second protein that binds to the iCAR is present, the T cell activation is inhibited.

[0353] As a non-limiting example, iCARs against Prostate specific membrane antigen (PMSA) based on CTLA4 and PD1 inhibitory domains demonstrated the ability to selectively limit cytokine secretion, cytotoxicity and proliferation induced by T cell activation (Fedorov V. D, et al., 2013, Sci Transl Med, 11; 5(215):215ra172; the contents of which are incorporated herein in their entirety).

### Chimeric Switch Receptor

[0354] In some embodiments, payloads of the disclosure may be chimeric switch receptors which can switch a negative signal to a positive signal. As used herein, the term “chimeric switch receptor” refers to a fusion protein comprising a first extracellular domain and a second transmembrane and intracellular domain, wherein the first domain includes a negative signal region and the second domain includes a positive intracellular signaling region. In some aspects, the fusion protein is a chimeric switch receptor that contains the extracellular domain of an inhibitory receptor on T cell fused to the transmembrane and cytoplasmic domain of a co-stimulatory receptor. This chimeric switch receptor may convert a T cell inhibitory signal into a T cell stimulatory signal.

[0355] As a non-limiting example, the chimeric switch receptor may comprise the extracellular domain of PD-1 fused to the transmembrane and cytoplasmic domain of CD28 as taught by Liu et al. (Liu et al., Cancer Res., 2016, 76(6): 1578-1590; the contents of which are incorporated by reference in their entirety). In some aspects, extracellular domains of other inhibitory receptors such as CTLA-4, LAG-3, TIM-3, KIRs and BTLA may also be fused to the transmembrane and cytoplasmic domain derived from costimulatory receptors such as CD28, 4-1BB, CD27, OX40, CD40, GTIR and ICOS. In the context of the present disclosure, the SRE domain (e.g., DD) may be inserted at the N- or C-terminus of the chimeric switch receptor.

[0356] In some embodiments, chimeric switch receptors of the present disclosure may include recombinant receptors comprising the extracellular cytokine-binding domain of an inhibitory cytokine receptor (e.g., IL13 receptor α (IL13Rα1), IL10R, and IL4Rα) fused to an intracellular signaling domain of a stimulatory cytokine receptor such as IL2R (IL2Rα, IL2Rβ and IL2Rgamma) and IL7Rα. One example of such chimeric cytokine receptor is a recombinant receptor containing the cytokine-binding extracellular domain of IL4Rα linked to the intracellular signaling domain of IL7Rα (see, US patent publication NO: 2014/0050709; the contents of which are incorporated herein by reference in their entirety).

[0357] In one embodiment, the chimeric switch receptor of the present disclosure may be a chimeric TGFβ receptor. The chimeric TGFβ receptor may comprise an extracellular domain derived from a TGFβ receptor such as TGFβ receptor 1, TGFβ receptor 2, TGFβ receptor 3, or any other TGFβ receptor or variant thereof; and a non-TGFβ receptor intracellular domain. The non-TGFβ receptor intracellular domain may be the intracellular domain or fragment thereof derived from TLR1, TLR2, TLR3, TLR4, TLR5, TLR6, TLR7, TLR8, TLR9, TLR10, CD28, 4-1BB (CD137), OX40 (CD134), CD3zeta, CD40, CD27, or a combination thereof. One example of such chimeric TGFβ receptor is discussed in US patent publication NO.: US2016/0075755; the contents of which are incorporated herein by reference in their entirety.

[0358] In some embodiments, payloads of the present disclosure may be bipartite fusion receptors. In one aspect, the bipartite fusion receptor may comprise an antigen-binding domain that binds to a tumor antigen and an activation domain that binds to one or more cell surface molecules. In some aspects, the antigen binding domain of a bipartite receptor is a scFv antibody. In other aspects, the activation domain that binds to a T cell surface stimulatory molecule may be selected from CD3, CD27, CD 28, CD40, OX40(CD134) and 4-1BB(CD137), or a NK cell surface stimulatory molecule selected from CD16, NKG2D and NKp30. The activation domain may also be a scFv specific to a stimulatory molecule on the surface of immune cells (e.g., T cells and NK cells). Immune cells can be genetically modified to express a bipartite molecule comprising at least one antigen binding domain and an activation domain. The antigen binding domain binds to one or more molecules present on target cells such as cancer cells. Immune cells that express the molecule recognized by the activation domain will be activated and attack the recognized cancer cells. As a non-limiting example, a bipartite molecule may be an engager molecule comprising an antigen recognition scFv specific to CD19 or EphA2, as described in US patent publication NO: US2016/0015749; the contents of which are incorporated by reference herein in their entirety.

### Activation-Conditional CAR

[0359] In some embodiments, payloads of the disclosure may be an activation-conditional chimeric antigen receptor, which is only expressed in an activated immune cell. The expression of the CAR may be coupled to activation conditional control region which refers to one or more nucleic acid sequences that induce the transcription and/or expression of a sequence e.g. a CAR under its control. Such activation conditional control regions may be promoters of genes that are upregulated during the activation of the immune effector cell e.g. IL2 promoter or NFAT binding sites. In some embodiments, activation of the immune cell may be achieved by a constitutively expressed CAR (International Publication No: WO 2016126608; the contents of which are incorporated herein by reference in their entirety).

CAR Targeting to Tumor Cells with Specific Proteoglycan Markers

[0360] In some embodiments, payloads of the present disclosure may be a CAR that targets specific types of cancer cells. Human cancer cells and metastasis may express unique and otherwise abnormal proteoglycans, such as polysaccharide chains (e.g., chondroitin sulfate (CS), dermatan sulfate (DS or CSB), heparan sulfate (HS) and heparin). Accordingly, the CAR may be fused with a binding moiety that recognizes cancer associated proteoglycans. In one example, a CAR may be fused with VAR2CSA polypeptide (VAR2-CAR) that binds with high affinity to a specific type of chondroitin sulfate A (CSA) attached to proteoglycans. The extracellular ScFv portion of the CAR may be substituted with VAR2CSA variants comprising at least the minimal CSA binding domain, generating CARs specific to chondroitin sulfate A (CSA) modifications. Alternatively, the CAR may be fused with a split-protein binding system to generate a spy-CAR, in which the scFv portion of the CAR is substituted with one portion of a split-protein binding system such as SpyTag and Spy-catcher and the cancer-recognition molecules (e.g. scFv and or VAR2-CSA) are attached to the CAR through the split-protein binding system (See, e.g., PCT publication No.: WO2016/135291; the contents of which are incorporated by reference in their entirety).

### Supra Car

[0361] In some embodiments, the payload of the present disclosure may be a Split Universal Programmable (SUPRA) CAR. A SUPRA CAR may be a two-component receptor system comprising of a universal receptor (zip CAR) expressed on T cells and a tumor-targeting scFv adaptor. The zip CAR universal receptor may be generated by the fusion of intracellular signaling domains and a leucine zipper as the extracellular domain The tumor-targeting scFv adaptor molecule or zipFv, may be generated by the fusion of a cognate leucine zipper and an scFv. The scFv of the zipFv may bind to a tumor antigen, and the leucine zipper may bind and activate the zip CAR on the T cells. Unlike the conventional fixed CAR design, the SUPRA CAR modular design allows targeting of multiple antigens without further genetic manipulations of the immune cells. Any of the CAR designs disclosed by Cho et al., 2018, Cell 173, 1-13, may be useful in the present disclosure (the contents of which are incorporated by reference in their entirety).

### 6. Cytokines, Chemokines and Other Soluble Factors

[0362] In accordance with the present disclosure, payloads of the present disclosure may be cytokines, chemokines, growth factors, and soluble proteins produced by immune cells, cancer cells and other cell types, which act as chemical communicators between cells and tissues within the body. These proteins mediate a wide range of physiological functions, from effects on cell growth, differentiation, migration and survival, to a number of effector activities. For example, activated T cells produce a variety of cytokines for cytotoxic function to eliminate tumor cells.

[0363] In some embodiments, payloads of the present disclosure may be cytokines, and fragments, variants, analogs and derivatives thereof, including but not limited to interleukins, tumor necrosis factors (TNFs), interferons (IFNs), TGF beta and chemokines. In some embodiments, payloads of the present disclosure may be cytokines that stimulate immune responses. In other embodiments, payloads of the disclosure may be antagonists of cytokines that negatively impact anti-cancer immune responses.

[0364] In some embodiments, payloads of the present disclosure may be cytokine receptors, recombinant receptors, variants, analogs and derivatives thereof; or signal components of cytokines.

[0365] In some embodiments, cytokines of the present disclosure may be utilized to improve expansion, survival, persistence, and potency of immune cells such as CD8+T_{EM}, natural killer cells and tumor infiltrating lymphocytes (TIL) cells used for immunotherapy. In other embodiments, T cells engineered with two or more DD regulated cytokines are utilized to provide kinetic control of T cell activation and tumor microenvironment remodeling. In one aspect, the present disclosure provides biocircuits and compositions to minimize toxicity related to cytokine therapy. Despite its success in mitigating tumor burden, systemic cytokine therapy often results in the development of severe dose limiting side effects. Two factors contribute to the observed toxicity (a) Pleiotropism, wherein cytokines affect different cells types and sometimes produce opposing effects on the same cells depending on the context (b) Cytokines have short serum half-life and thus need to be administered at high doses to achieve therapeutic effects, which exacerbates the pleiotropic effects. In one aspect, cytokines of the present disclosure may be utilized to modulate cytokine expression in the event of adverse effects. In some embodiments, cytokines of the present disclosure may be designed to have prolonged life span or enhanced specificity to minimize toxicity.

[0366] In some embodiments, the payload of the present disclosure may be an interleukin (IL) cytokine. Interleukins (ILs) are a class of glycoproteins produced by leukocytes for regulating immune responses. As used herein, the term “interleukin (IL)” refers to an interleukin polypeptide from any species or source and includes the full-length protein as well as fragments or portions of the protein. In some aspects, the interleukin payload is selected from IL1, IL1alpha (also called hematopoietin-1), IL1beta (catabolic), IL1 delta, IL1epsilon, IL1eta, IL1 zeta, interleukin-1 family member 1 to 11 (IL1F1 to IL1F11), interleukin-1 homolog 1 to 4 (IL1H1 to IL1H4), IL1 related protein 1 to 3 (IL1RP1 to IL1RP3), IL2, IL3, IL4, IL5, IL6, IL7, IL8, IL9, IL10, IL10C, IL10D, IL11, IL11a, IL11b, IL12, IL13, IL14, IL15, IL16, IL17, IL17A, 1117B, IL17C, IL17E, IL17F, IL18, IL19, IL20, IL20 like (IL20L), 1121, IL22, IL23, IL23A, IL23-p19, IL23-p40, IL24, 1125, IL26, IL27, IL28A, IL28B, IL29, IL30, IL31, IL32, IL33, IL34, IL35, IL36 alpha, IL36 beta, IL36 gamma, IL36RN, IL37, IL37a, IL37b, IL37c, IL37d, IL37e and IL38. In other aspects, the payload of the present disclosure may be an interleukin receptor selected from CD121a, CDw121b, IL2Rα/CD25, IL2Rβ/CD122, IL2Rγ/CD132, CDw131, CD124, CD131, CDw125, CD126, CD130, CD127, CDw210, IL8RA, IL11Rα, CD212, CD213α1, CD213α2, IL14R, IL15Rα, CDw217, IL18Rα, IL18Rβ, IL20Rα, and IL20Rβ.

[0367] In certain embodiments, a cytokine may be a type I interferons (IFN) including IFN alpha subtypes (IFN α1, IFN α1b, IFN α1c), IFN beta, IFN delta subtypes (IFN delta 1, IFN delta 2, IFN delta 8), IFN gamma, IFN kappa, and IFN epsilon, IFN lambda, IFN omega, IFN tau and IFN zeta. In certain embodiments, a cytokine may be a member of tumor necrosis factor (TNF) superfamily, including TNF-alpha, TNF-beta (also known as lymphotoxin-alpha (LT-α)), lymphotoxin-beta (LT-β), CD40L(CD154), CD27L (CD70), CD30L(CD153), FASL(CD178), 4-1BBL (CD137L), OX40L, TRAIL (TNF-related apoptosis inducing ligand), APRIL (a proliferation-inducing ligand), TWEAK, TRANCE, TALL-1, GITRL, LIGHT and TNFSF1 to TNFSF20 (TNF ligand superfamily member 1 to 20).

[0368] In one embodiment, the payload of the disclosure may comprise IL2 (SEQ ID NO: 8299, encoded by SEQ ID NO: 8300 and 8301. In one aspect, the effector module of the disclosure may be a DD-IL2 fusion polypeptide.

[0369] In some aspects of the disclosure, an IL2 mutein may be used as a payload. As used herein, the term “mutein” is a construct, molecule or sequence of a mutation, change or alteration in a protein and hence is also known as a mutant, e.g., a protein mutant, mutein. Consequently, an “IL2 mutein” is an IL2 mutant. In some embodiments an IL2 mutein is a variant of wild type IL2 protein, where the wildtype IL2 consists of the amino acid sequence of SEQ ID NO: 8299. In some respects, it refers to an IL2 variant which binds to and activates only cells expressing IL2Rαβγ, but does not significantly bind to or activate cell expressing only IL2Rβγ. In some examples, an IL2 mutein may be an IL2 protein in which residues of IL2 responsible for binding to either IL2Rβ or IL2Rγ are substituted and abolish their interaction. In other examples, an IL2 mutein may be an IL2 protein comprising mutations conferring high affinity for IL2Rα. An IL2 mutein may be an IL2 selective agonist (IL2_{SA}) which can preferentially activate the high affinity IL2 receptor (i.e., IL2Rαβγ) which is necessary to selectively activate T cells with respect to NK cells. In some embodiments, the IL2 mutein may be IL2 protein which preferentially binds to the lower affinity IL2Rβγ but with reduced affinity to CD25.

[0370] In some embodiments, IL2 muteins may be used to preferentially expand or stimulate Treg cells. As used herein “preferentially expand or stimulate Treg cells” means the IL2 muteins promote the proliferation, survival, activation and/or function of T regulatory cells.

[0371] Exemplary IL2 muteins may include, but are not limited to, N88R substitution (Shanafelt et al., Nature Biotech., 2000, 18:1197-1202), an IL2 with a V91K substitution (e.g., US Patent publication NO. US20140286898); V91K substitution, C125A substitution, an IL2 with three mutations: V69A, N71R, Q74P; an IL2 mutein with high affinity for IL2Rα (N29S, Y31H, K35R, T37A, K48E, V69A, N71R, Q74P); an IL2 mutein with high affinity for IL2Rα and reduced signaling activity (N29S, Y31H, K35R, T37A, K48E, V69A, N71R, Q74P, N88D), and D20H, D20I, N88G, N88I, N88R, and Q126L substitutions as described in PCT application NO. 1999060128; the contents of each of which are incorporated herein by reference in their entirety. In other aspects, IL2 muteins may include those described in U.S. Pat. Nos. 4,518,584; 5,116,943; 5,206,344; 6,955,807; 7,105,653; 7,371,371; 7,803,361; 8,124, 066; 8,349,311; 8,759,486; and 9,206,243; PCT patent publication NOs: WO2005086751 and WO2012088446; EP Pat. NOs: EP0234599 and EP0200280 and Sim, G. C. et al. (2016) Cancer Immunol Res; 4(11):983-994; the contents of each of which are incorporated herein by reference in their entirety.

[0372] In some aspects, the IL2 mutein may be fused to a polypeptide that extends the serum half-life of the IL2 mutein, such as an IgG Fc fragment. Preferred Fc regions are derived from human IgG, which includes IgG1, IgG2, IgG3, and IgG4. In other aspects, the payload of the disclosure may be an IL2 fusion protein comparing a second functional polypeptide. In a non-limiting example, an IL2 fusion protein may comprise an IL2 or IL2 mutein polypeptide fused with a pro-apoptotic Bcl-2 family polypeptide (such as Bad, Bik/Nbk, Bid, Bim/Bod, Hrk, Bak or Bax); such fusion protein may be capable of inhibiting cell survival, inhibiting cell proliferation, or enhancing cell death or apoptosis of a target cell expressing an IL2 receptor. Alternatively, an IL2 or IL2 mutein polypeptide may be fused with an anti-apoptotic Bcl-2 family polypeptide (such as Bcl-x_{L}, Bcl-w or Bcl-2). The fusion protein may be capable of enhancing cell survival, enhancing cell proliferation, or inhibiting cell death or apoptosis of a target cell expressing an IL2 receptor. See, e.g., US patent publication NO.: US2016/0229901.

[0373] In addition, the IL2 fusion protein may be a IL2-GMCSF fusion protein which can promote cell-cell interaction; therefore, enhances anti-cancer immune responses (Wen et al., J. Translational Med., 2016, 14: 41).

[0374] In one embodiment, the payload of the disclosure may comprise IL12. IL12 is a heterodimeric protein of two subunits (p35, p40) that is secreted by antigen presenting cells, such as macrophages and dendritic cells. IL12 is type 1 cytokine that acts on natural killer (NK) cells, macrophages, CD8⁺ Cytotoxic T cells, and CD4⁺ T helper cells through STAT4 pathway to induce IFN γ production in these effector immune cells (reviewed by Trinchieri G, Nat Rev Immunol. 2003; 3(2): 133-146). IL12 can promote the cytotoxic activity of NK cells and CD8⁺ T cells, therefore has anti-tumor function. Intravenous injection of recombinant IL12 exhibited modest clinical efficacy in a handful of patients with advanced melanoma and renal cell carcinoma (Gollob et al., Clin. Cancer Res. 2000; 6(5):1678-1692). IL12 has been used as an adjuvant to enhance cytotoxic immunity using a melanoma antigen vaccine, or using peptide pulsed peripheral blood mononuclear cells; and to promote NK cell activity in breast cancer with trastuzumab treatment. Local delivery of IL12 to the tumor microenvironment promotes tumor regression in several tumor models. These studies all indicate that locally increased IL12 level can promote anti-tumor immunity. One major obstacle of systemic or local administration of recombinant IL12 protein, or through oncolytic viral vectors is the severe side effects when IL12 is presented at high level. Developing a system that tightly controls IL12 level may provide a safe use of IL12 in cancer treatment.

[0375] In one aspect, the effector module of the disclosure may be a DD-IL12 fusion polypeptide. This regulatable DD-IL12 fusion polypeptide may be directly used as an immunotherapeutic agent or be transduced into an immune effector cell (T cells and TIL cells) to generate modified T cells with greater in vivo expansion and survival capabilities for adoptive cell transfer. The need for harsh preconditioning regimens in current adoptive cell therapies may be minimized using regulated IL12. DD-IL12 may be utilized to modify tumor microenvironment and increase persistence in solid tumors that are currently refractory to tumor antigen targeted therapy. In some embodiments, CAR expressing T cells may be armored with DD regulated IL12 to relieve immunosuppression without systemic toxicity.

[0376] In some embodiments, the IL12 may be a Flexi IL12, wherein both p35 and p40 subunits, are encoded by a single cDNA that produces a single chain polypeptide. In one embodiment, the IL12 may comprise p40 subunit, which includes amino acids 23-328 of wildtype IL12B and comprise the amino acid sequence of SEQ ID NO: 8302 (encoded by SEQ ID NO: 8303-8312) and a p35 subunit, which includes amino acids 57-253 of wildtype IL12A and comprise the amino acid sequence of SEQ ID NO: 8313 (encoded by SEQ ID NO: 8314-8323). Any portion of IL12 that retains one or more functions of full length or mature IL12 may be useful in the present disclosure.

[0377] In some embodiments, DD regulated IL12 compositions of the disclosure may be utilized to minimize the cytotoxicity associated with systemic IL12 administration. Treatment with IL12 has been associated with systemic flu-like symptoms (fever, chills, fatigue, erythromelalgia, headache), toxic effects on the bone marrow, and liver. Hematologic toxicity observed most commonly included neutropenia and thrombocytopenia; hepatic dysfunction manifested in transient (dose dependent) increase in transaminases, hyperbilirubinemia and hypoalbuminemia. In some instances, toxicity is also associated with inflammation of the mucus membranes (oral mucositis, stomatitis or colitis). These toxic effects of IL12 were related to the secondary production of IFNγ, TNF alpha, and chemokines such as IP10, and MIG. In certain aspects of the disclosure, DD regulated IL12 may be utilized to prevent the toxic effects associated with elevated production of secondary messengers. In some embodiments, DD regulated Flexi-IL12 constructs may be used to improve the efficacy of the CARs, especially in solid tumor settings, by providing a controlled local signal for tumor microenvironment remodeling and epitope spreading. DD regulation also provides rapid, dose dependent, and local production of Flexi IL12.

[0378] The format of the IL12 constructs utilized as payload of the present disclosure may be optimized. In one embodiment, the payload of the disclosure may be a bicistronic IL12 containing p40 and p35 subunits separated by an internal ribosome entry site or a cleavage site such as P2A or Furin to allow independent expression of both subunits from a single vector. This results in a configuration of secreted IL12 that is more akin to the naturally occurring IL12 than the flexi IL12 construct, the payload of the disclosure may be the p40 subunit of the IL12. DD regulated p40 may be co-expressed with constitutive p35 construct to generate “regulatable IL12” expression. Alternatively, the DD regulated p40 may heterodimerize with the endogenous p35. p40 has been shown to stabilize p35 expression and stimulate the export of p35 (Jalah R, et al. (2013). Journal of Biol. Chem. 288, 6763-6776 (the contents of which are incorporated by reference in its entirety).

[0379] In some embodiments, modified forms of IL12 may be utilized as the payload. These modified forms of IL12 may be engineered to have shortened half-life in vivo compared to the non-modified form of especially when used in combination with tunable systems described herein.

[0380] Human flexi IL12 has a reported half-life of 5-19 hours which, when administered as a therapeutic compound, can result in systemic cytotoxicity (Car et al. (1999) The Toxicology of Interleukin-12: A Review” Toxicologic Path. 27 A, 58-63; Robertson et al. (1999) “Immunological Effects of Interleukin 12 Administered by Bolus Intravenous Injection to Patients with Cancer” Clin. Cancer Res. 5:9-16; Atkins et al. (1997)“Phase I Evaluation of Intravenous Recombinant Human Interleukin 12 in Patients with Advance Malignancies” Clin. Cancer Res. 3:409-417). The ligand inducible control of IL12 can regulate production in a dose dependent fashion, the time from cessation of ligand dosing to cessation of protein synthesis and IL12 clearance may be insufficient to prevent toxic accumulation of IL12 in plasma.

[0381] In one embodiment, the modified form of IL12 utilized as the payload may be a Topo-sc IL12 which have the configuration as follows from N to C terminus (i) a first IL12 p40 domain (p40N), (ii) an optional first peptide linker, (iii) an IL12 p35 domain, (iv) an optional second peptide linker, and (v) a second IL12 p40 domain (p40C). In one embodiment, modified topo-sc IL12 polypeptides exhibit increased susceptibility to proteolysis. Topo-sc IL12 is described in International Patent Publication No. WO2016048903; the contents of which are incorporated herein by reference in its entirety.

[0382] IL12 polypeptide may also be modified (e.g. genetically, synthetically, or recombinantly engineered) to increase susceptibility to proteinases to reduce the biologically active half-life of the IL12 complex, compared to a corresponding IL12 lacking proteinases susceptibility. Proteinase susceptible forms of IL12 are described in International Patent Publication No. WO2017062953; the contents of which are incorporated by reference in its entirety.

[0383] IL12 systemic toxicity may also be limited or tightly controlled via mechanisms involving tethering IL12 to the cell surface to limit its therapeutic efficacy to the tumor site. Membrane tethered IL12 forms have been described previously using Glycosyl phosphatidylinositol (GPI) signal peptide or using CD80 transmembrane domain (Nagarajan S, et al. (2011) J Biomed Mater Res A. 99(3):410-7; Bozeman E N, et al. (2013) Vaccine. 7; 31(20):2449-56; Wen-Yu Pan et al. (2012), Mol. Ther. 20:5, 927-937; the contents of each of which are incorporated by reference in their entirety). In some embodiments, transmembrane domains may be selected from any of those described in Table 13, Table 14, and Table 15 of co-owned U.S. Provisional Patent Application No. 62/683,972, filed Jun. 12, 2018, and the International Patent Application No. PCT/US18/37005 filed on Jun. 12, 2018 (the contents of each of which are incorporated by reference in their entirety).

[0384] In some embodiments, the IL12 levels secreted by the immune cells of the disclosure may approximately be comparable to the IL12 levels secreted by human myeloid dendritic cells (mDC1), when activated with TLR agonists. In one embodiment, the TLR agonist may be the combination of lipopolysaccharide administered with R848.

[0385] In some embodiments, the IFN gamma secreted by IL12 induced activation of the immune cells is at least 5-fold greater in the presence of ligand, compared to the levels in the absence of ligand.

[0386] In some embodiments, regulation of IL12 provides the necessary safety switch. In some embodiments, IL-12 secretion recruit and/or activates effector cells in the tumor microenvironment. In some embodiments, the IL12 regulation provides a benefit to CAR T function without causing toxicity.

[0387] In one embodiment, the payload of the disclosure may comprise IL15. Interleukin 15 is a potent immune stimulatory cytokine and an essential survival factor for T cells, and Natural Killer cells. Preclinical studies comparing IL2 and IL15, have shown than IL15 is associated with less toxicity than IL2. In some embodiments, the effector module of the disclosure may be a DD-IL15 fusion polypeptide. IL15 polypeptide may also be modified to increase its binding affinity for the IL15 receptor. For example, the asparagine may be replaced by aspartic acid at position 72 of IL15 (SEQ ID NO: 2 of US patent publication US20140134128A1; the contents of which are incorporated by reference in their entirety). In some aspects, the IL15 comprises amino acid sequence of SEQ ID NO: 8234 (encoded by SEQ ID NO: 8236), which include amino acids 49-162 of wildtype IL15. In some embodiments the IL15 sequence may include a stop codon and may be encoded by the nucleotide sequence of SEQ ID NO: 8235, 8237-8238.

[0388] A unique feature of IL15 mediated activation is the mechanism of trans-presentation in which IL15 is presented as a complex with the alpha subunit of IL15 receptor (IL15Ra) that binds to and activates membrane bound IL15 beta/gamma receptor, either on the same cell or a different cell. The IL15/IL15Ra complex is more effective in activating IL15 signaling, than IL15 by itself. Thus, in some embodiments, the effector module of the disclosure may include a DD-IL15/IL15Ra fusion polypeptide. In one embodiment, the payload may be IL15/IL15Ra fusion polypeptide described in US Patent Publication NO.: US20160158285A1 (the contents of which are incorporated herein by reference in their entirety). The IL15 receptor alpha comprises an extracellular domain called the sushi domain which contains most of the structural elements necessary for binding to IL15. Thus, in some embodiments, payload may be the IL15/IL15Ra sushi domain fusion polypeptide described in US Patent Publication NO.: US20090238791A1 (the contents of which are incorporated herein by reference in their entirety).

[0389] Regulated IL15/IL15Ra may be used to promote expansion, survival and potency of CD8TEM cell populations without impacting regulatory T cells, NK cells and TIL cells. In one embodiment, DD-IL15/IL15Ra may be utilized to enhance CD19 directed T cell therapies in B cell leukemia and lymphomas. In one aspect, IL15/IL15Ra may be used as payload of the disclosure to reduce the need for pre-conditioning regimens in current CAR-T treatment paradigms.

[0390] The effector modules containing DD-IL15, DD-IL15/IL15Ra and/or DD-IL15/IL15Ra sushi domain may be designed to be secreted (using e.g. IL2 signal sequence) or membrane bound (using e.g. IgE or CD8a signal sequence).

[0391] In some embodiments, the IFN gamma secreted by IL15 induced activation of the immune cells is at least 10-fold greater in the presence of ligand, compared to the levels in the absence of ligand.

[0392] In some embodiments, regulation of IL15-IL15Ra fusion proteins provides a safety switch as compared to constitutively expressed IL15-IL15Ra. In some embodiments, IL-15-IL15Ra leads to better expansion, and/or persistence of CAR T cells.

[0393] In one embodiment, regulated cytokines may enable CAR-T in solid tumors to overcome stromal barriers by improving tumor homing, reducing immunosuppression, and reducing tumor promoting conditions. In one embodiment, regulated cytokines may enable CAR-T in solid tumors to overcome Antigen negative escape by promoting epitope spreading, antigen presenting cell trafficking, activation and licensing. In one embodiment, regulated cytokines may enable CAR-T in solid tumors to overcome Antigen positive escape by improving expansion, increasing persistence, reducing exhaustion of T cells. In one embodiment, regulated cytokines enable local, on demand production of cytokines can safely improve efficacy. In one embodiment, regulated cytokines enable pulsatile production that can reduce feedback inhibition of cytokine signaling In one embodiment, regulated cytokines can reduce senescence or exhaustion. In one embodiment, regulated cytokines enable on demand expression in patient which may reduce any effect of cytokine on cell phenotype during product manufacturing.

[0394] In some embodiments, the payloads may proteins that induce the expression of IL15 such as proteins in the STING pathway and/or Type I interferons. In one aspect, the payload may be STING agonist. In one aspect, such expressing IL15 directly as a payload or using payloads that induce IL15 expression may use to regulate the tumor-infiltrating lymphocyte numbers in the tumor microenvironment. Any of the payloads described by Carrero et al. to induce IL15 expression may be used herein (Carrero et al. 2019 PNAS January 2019, 116 (2) 599-608; DOI: 10.1073/pnas.1814642116; the contents of which are incorporated herein by reference in their entirety).

[0395] In some aspects, the DD-IL115/IL15Ra comprises the amino acid sequences provided in Table 19. In some embodiments, the linker utilized in Table 19 or Table 20 may be SG linker. In Table 19, asterisk indicates the translation of the stop codon. In some embodiments, the DDs described in Table 19 may contain an additional stop codon. As used herein the wildtype (WT) of IL15 refers to Uniprot ID: P40933 and wildtype (WT) of IL15Ra refers to UniProt ID: Q13261.

TABLE 19
IL15/IL15Ra and IL15 constructs

| Description/ | | AA SEQ | NA SEQ |
|---|---|---|---|
| Construct ID | Amino Acid Sequence | ID NO | ID NO |
| IL15 (49-162 of WT | NWVNVISDLKKIEDLIQSMHIDATLYTESDVHPSCKVTAMKCFLLELQVISLE | 8324 | 8326; |
| | SGDASIHDTVENLIILANNSLSSNGNVTESGCKECEELEEKNIKEFLQSFVHIV | | 8344 |
| | QMFINTS | | |
| IL15Ra (31-267 of | ITCPPPMSVEHADIWVKSYSLYSRERYICNSGFKRKAGTSSLTECVLNKATN | 8329 | 8345; |
| WT) | VAHWTTPSLKCIRDPALVHQRPAPPSTVTTAGVTPQPESLSPSGKEPAASSPS | | 8346 |
| | SNNTAATTAAIVPGSQLMPSKSPSTGTTEISSHESSHGTPSQTTAKNWELTAS | | |
| | ASHQPPGVYPQGHSDTTVAISTSTVLLCGLSAVSLLACYLKSRQTPPLASVE | | |
| | MEAMEALPVTWGTSSRDEDLENCSHHL | | |
| IgE leader | MDWTWILFLVAAATRVHS | 276 | 277 |
| linker (GS) | GS | - | GGATCC; |
| | | | GGTTCC |
| Linker (GSG) | GSG | — | GGATCCG |
| (BamH1-Gly) | | | GT |
| SG3-(SG4)3-SG3- | SGGGSGGGGSGGGGSGGGGSGGGSLQ | 323 | 324; |
| SLQ linker | | | 8665 |
| SG Linker | SG | — | AGTGGT |
| GSGSGS linker | GSGSGS | 8330 | 8347 |
| GSGSGSGS linker | GSGSGSGS | 8331 | 8348 |
| GSGSGGGSGS linker | GSGSGGGSGS | 8332 | 8349 |
| hPDE5 (Amino acid | EETRELQSLAAAVVPSAQTLKITDFSFSDFELSDLETALCTIRMFTDLNLVQN | 3 | 339 |
| 535-860 of WT) | FQMKHEVLCRWILSVKKNYRKNVAYHNWRHAFNTAQCMFAALKAGKIQN | | |
| | KLTDLEILALLIAALSHDLDHRGVNNSYIQRSEHPLAQLYCHSIMEHHHFDQ | | |
| | CLMILNSPGNQILSGLSIEEYKTTLKIIKQAILATDLALYIKRRGEFFELIRKNQ | | |
| | FNLEDPHQKELFLAMLMTACDLSAITKPWPIQQRIAELVATEFFDQGDRERK | | |
| | ELNIEPTDLMNREKKNKIPSMQVGFIDAICLQLYEALTHVSEDCFPLLDGCRK | | |
| | NRQKWQALAEQQ | | |
| hPDE5 (Amino acid | EETRELQSLAAAVVPSAQTLKITDFSFSDFELSDLETALCTIRMFTDLNLVQN | 12 | 359 |
| 535-860 of WT, | FQMKHEVLCRWILSVKKNYRKNVAYHNWRHAFNTAQCMFAALKAGKIQN | | |
| R732L) | KLTDLEILALLIAALSHDLDHRGVNNSYIQRSEHPLAQLYCHSIMEHHHEDQ | | |
| | CLMILNSPGNQILSGLSIEEYKTTLKIIKQAILATDLALYIKRLGEFFELIRKNQ | | |
| | FNLEDPHQKELFLAMLMTACDLSAITKPWPIQQRIAELVATEFFDQGDRERK | | |
| | ELNIEPTDLMNREKKNKIPSMQVGFIDAICLQLYEALTHVSEDCFPLLDGCRK | | |
| | NRQKWQALAEQQ | | |
| hPDE5 (Amino acid | EETRELQSLAAAVVPSAQTLKITDFSFSDFELSDLETALCTIRMFTDLNLVQN | 227 | 233 |
| 535-860 of WT, | FQMKHEVLCRWILSVKKNYRKNVAYHNWRHAFNTAQCMFAALKAGKIQN | | |
| R732L, F736A) | KLTDLEILALLIAALSHDLDHRGVNNSYIQRSEHPLAQLYCHSIMEHHHFDQ | | |
| | CLMILNSPGNQILSGLSIEEYKTTLKIIKQAILATDLALYIKRLGEFAELIRKNQ | | |
| | FNLEDPHQKELFLAMLMTACDLSAITKPWPIQQRIAELVATEFFDQGDRERK | | |
| | ELNIEPTDLMNREKKNKIPSMQVGFIDAICLQLYEALTHVSEDCFPLLDGCRK | | |
| | NRQKWQALAEQQ | | |
| hPDE5 (Amino acid | EETRELQSLAAAVVPSAQTLKITDFSFSDFELSDLETALCTIRMFTDLNLVQN | 227 | 233 |
| 535-860 of WT, | FQMKHEVLCRWILSVKKNYRKNVAYHNWRHAFNTAQCMFAALKAGKIQN | | |
| R732L, F736A) | KLTDLEILALLIAALSHDLDHRGVNNSYIQRSEHPLAQLYCHSIMEHHHFDQ | | |
| | CLMILNSPGNQILSGLSIEEYKTTLKIIKQAILATDLALYIKRLGEFAELIRKNQ | | |
| | FNLEDPHQKELFLAMLMTACDLSAITKPWPIQQRIAELVATEFFDQGDRERK | | |
| | ELNIEPTDLMNREKKNKIPSMQVGFIDAICLQLYEALTHVSEDCFPLLDGCRK | | |
| | NRQKWQALAEQQ | | |
| hPDE5 (Amino acid | EETRELQSLAAAVVPSAQTLKITDFSFSDFELSDLETALCTIRMFTDLNLVQN | 9 | 355 |
| 535-860 of WT, | FQMKHEVLCRWILSVKKNYRKNVAYHNWRHAFNTAQCMFAALKAGKIQN | | |
| F736A) | KLTDLEILALLIAALSHDLDHRGVNNSYIQRSEHPLAQLYCHSIMEHHHFDQ | | |
| | CLMILNSPGNQILSGLSIEEYKTTLKIIKQAILATDLALYIKRRGEFAELIRKNQ | | |
| | FNLEDPHQKELFLAMLMTACDLSAITKPWPIQQRIAELVATEFFDQGDRERK | | |
| | ELNIEPTDLMNREKKNKIPSMQVGFIDAICLQLYEALTHVSEDCFPLLDGCRK | | |
| | NRQKWQALAEQQ | | |
| hPDE5 (Amino acid | EETRELQSLAAAVVPSAQTLKITDFSFSDFELSDLETALCTIRMFTDLNLVQN | 386 | 8551 |
| 535-860 of WT, | FQMKHEVLCRWILSVKKNYRKNVAYHNWRHAFNTAQCMFAALKAGKIQN | | |
| R732I) | KLTDLEILALLIAALSHDLDHRGVNNSYIQRSEHPLAQLYCHSIMEHHHFDQ | | |
| | CLMILNSPGNQILSGLSIEEYKTTLKIIKQAILATDLALYIKRIGEFFELIRKNQF | | |
| | NLEDPHQKELFLAMLMTACDLSAITKPWPIQQRIAELVATEFFDQGDRERKE | | |
| | LNIEPTDLMNREKKNKIPSMQVGFIDAICLQLYEALTHVSEDCFPLLDGCRK | | |
| | NRQKWQALAEQQ | | |
| hPDE5 (Amino acid | EETRELQSLAAAVVPSAQTLKITDFSFSDFELSDLETALCTIRMFTDLNLVQN | 383 | 402 |
| 535-860 of WT, | FQMKHEVLCRWILSVKKNYRKNVAYHNWRHAFNTAQCMFAALKAGKIQN | | |
| R732G) | KLTDLEILALLIAALSHDLDHRGVNNSYIQRSEHPLAQLYCHSIMEHHHFDQ | | |
| | CLMILNSPGNQILSGLSIEEYKTTLKIIKQAILATDLALYIKRGGEFFELIRKNQ | | |
| | FNLEDPHQKELFLAMLMTACDLSAITKPWPIQQRIAELVATEFFDQGDRERK | | |
| | ELNIEPTDLMNREKKNKIPSMQVGFIDAICLQLYEALTHVSEDCFPLLDGCRK | | |
| | NRQKWQALAEQQ | | |
| AcGFP (Amino acid | VSKGAELFTGIVPILIELNGDVNGHKFSVSGEGEGDATYGKLTLKFICTTGKL | 79 | 372 |
| 2-239 of WT) | PVPWPTLVTTLSYGVQCFSRYPDHMKQHDFFKSAMPEGYIQERTIFFEDDGN | | |
| | YKSRAEVKFEGDTLVNRIELTGTDFKEDGNILGNKMEYNYNAHNVYIMTDK | | |
| | AKNGIKVNFKIRHNIEDGSVQLADHYQQNTPIGDGPVLLPDNHYLSTQSALS | | |
| | KDPNEKRDHMIYFGFVTAAAITHGMDELYK | | |
| mCherry | MSKGEEDNMAIIKEFMRFKVHMEGSVNGHEFEIEGEGEGRPYEGTQTAKLK | 8648 | 8666 |
| | VTKGGPLPFAWDILSPQEMYGSKAYVKHPADIPDYLKLSFPEGFKWERVMN | | |
| | FEDGGVVTVTQDSSLQDGEFIYKVKLRGTNFPSDGPVMQKKTMGWEASSER | | |
| | MYPEDGALKGEIKQRLKLKDGGHYDAEVKTTYKAKKPVQLPGAYNVNIKL | | |
| | DITSHNEDYTIVEQYERAEGRHSTGGMDELYK | | |
| mCherry (M1L) | LSKGEEDNMAIIKEFMRFKVHMEGSVNGHEFEIEGEGEGRPYEGTQTAKLK | 8240 | 8269 |
| | VTKGGPLPFAWDILSPQFMYGSKAYVKHPADIPDYLKLSFPEGFKWERVMN | | |
| | FEDGGVVTVTQDSSLQDGEFIYKVKLRGTNFPSDGPVMQKKTMGWEASSER | | |
| | MYPEDGALKGEIKQRLKLKDGGHYDAEVKTTYKAKKPVQLPGAYNVNIKL | | |
| | DITSHNEDYTIVEQYERAEGRHSTGGMDELYK | | |
| FLAG-tag | DYKDDDDK | 8333 | 8350 |
| HA Tag | YPYDVPDYA | 8238 | 8351 |
| Modified Furin | ESRRVRRNKRSK | 288 | 291 |
| P2A Cleavable | GATNFSLLKQAGDVEENPGP | 8239 | 8270 |
| peptide | | | |
| IRES | — | — | 8667 |
| Spacer | — | — | 8668 |
| Spacer | — | — | 8669 |
| OT-001254 (IgE | MDWTWILFLVAAATRVHSNWVNVISDLKKIEDLIQSMHIDATLYTESDVHP | 8334 | 8352 |
| signal sequence; | SCKVTAMKCFLLELQVISLESGDASIHDTVENLIILANNSLSSNGNVTESGCK | | |
| IL15(Amino acid 49- | ECEELEEKNIKEFLQSFVHIVQMFINTSSGGGSGGGGSGGGGSGGGGSGGGS | | |
| 162 of WT); linker | LQITCPPPMSVEHADIWVKSYSLYSRERYICNSGFKRKAGTSSLTECVLNKAT | | |
| (SG3-(SG4)3-SG3-SLQ | NVAHWTTPSLKCIRDPALVHQRPAPPSTVTTAGVTPQPESLSPSGKEPAASSP | | |
| (SEQ ID NO: 323)); | SSNNTAATTAAIVPGSQLMPSKSPSTGTTEISSHESSHGTPSQTTAKNWELTA | | |
| IL15Ra (Amino acid | SASHQPPGVYPQGHSDTTVAISTSTVLLCGLSAVSLLACYLKSRQTPPLASVE | | |
| 31-267 of WT); linker | MEAMEALPVTWGTSSRDEDLENCSHHLSGEETRELQSLAAAVVPSAQTLKI | | |
| (SG); hPDE5 (Amino | TDFSFSDFELSDLETALCTIRMFTDLNLVQNFQMKHEVLCRWILSVKKNYRK | | |
| acid 535-860 of WT, | NVAYHNWRHAFNTAQCMFAALKAGKIQNKLTDLEILALLIAALSHDLDHR | | |
| R732L, F736A); stop) | GVNNSYIQRSEHPLAQLYCHSIMEHHHFDQCLMILNSPGNQILSGLSIEEYKT | | |
| | TLKIIKQAILATDLALYIKRLGEFAELIRKNQFNLEDPHQKELFLAMLMTACD | | |
| | LSAITKPWPIQQRIAELVATEFFDQGDRERKELNIEPTDLMNREKKNKIPSMQ | | |
| | VGFIDAICLQLYEALTHVSEDCFPLLDGCRKNRQKWQALAEQQ* | | |
| OT-001469 (IgE | MDWTWILFLVAAATRVHSNWVNVISDLKKIEDLIQSMHIDATLYTESDVHP | 8335 | 8353 |
| signal sequence; | SCKVTAMKCFLLELQVISLESGDASIHDTVENLIILANNSLSSNGNVTESGCK | | |
| IL15 (Amino acid 49- | ECEELEEKNIKEFLQSFVHIVQMFINTSSGGGSGGGGSGGGGSGGGGSGGGS | | |
| 162 of WT); linker | LQITCPPPMSVEHADIWVKSYSLYSRERYICNSGFKRKAGTSSLTECVLNKAT | | |
| (SG3-(SG4)3-SG3-SLQ | NVAHWTTPSLKCIRDPALVHQRPAPPSTVTTAGVTPQPESLSPSGKEPAASSP | | |
| (SEQ ID NO: 323)); | SSNNTAATTAAIVPGSQLMPSKSPSTGTTEISSHESSHGTPSQTTAKNWELTA | | |
| IL15Ra (Amino acid | SASHQPPGVYPQGHSDTTVAISTSTVLLCGLSAVSLLACYLKSRQTPPLASVE | | |
| 31-267 of WT); linker | MEAMEALPVTWGTSSRDEDLENCSHHLSGVSKGAELFTGIVPILIELNGDVN | | |
| (SG); AcGFP (Amino | GHKFSVSGEGEGDATYGKLTLKFICTTGKLPVPWPTLVTTLSYGVQCFSRYP | | |
| acid 2-239 of WT); | DHMKQHDFFKSAMPEGYIQERTIFFEDDGNYKSRAEVKFEGDTLVNRIELTG | | |
| linker (SG); hPDE5 | TDFKEDGNILGNKMEYNYNAHNVYIMTDKAKNGIKVNFKIRHNIEDGSVQL | | |
| (Amino acid 535-860 | ADHYQQNTPIGDGPVLLPDNHYLSTQSALSKDPNEKRDHMIYFGFVTAAAIT | | |
| of WT, R732L, | HGMDELYKSGEETRELQSLAAAVVPSAQTLKITDFSFSDFELSDLETALCTIR | | |
| F736A); stop) | MFTDLNLVQNFQMKHEVLCRWILSVKKNYRKNVAYHNWRHAFNTAQCMF | | |
| | AALKAGKIQNKLTDLEILALLIAALSHDLDHRGVNNSYIQRSEHPLAQLYCH | | |
| | SIMEHHHFDQCLMILNSPGNQILSGLSIEEYKTTLKIIKQAILATDLALYIKRL | | |
| | GEFAELIRKNQFNLEDPHQKELFLAMLMTACDLSAITKPWPIQQRIAELVAT | | |
| | EFFDQGDRERKELNIEPTDLMNREKKNKIPSMQVGFIDAICLQLYEALTHVSE | | |
| | DCFPLLDGCRKNRQKWQALAEQQ* | | |
| OT-001470 (IgE | MDWTWILFLVAAATRVHSNWVNVISDLKKIEDLIQSMHIDATLYTESDVHP | 8336 | 8354 |
| signal sequence; | SCKVTAMKCFLLELQVISLESGDASIHDTVENLIILANNSLSSNGNVTESGCK | | |
| IL15 (Amino acid 49- | ECEELEEKNIKEFLQSFVHIVQMFINTSSGGGSGGGGSGGGGSGGGGSGGGS | | |
| 162 of WT); linker | LQITCPPPMSVEHADIWVKSYSLYSRERYICNSGFKRKAGTSSLTECVLNKAT | | |
| (SG3-(SG4)3-SG3-SLQ | NVAHWTTPSLKCIRDPALVHQRPAPPSTVTTAGVTPQPESLSPSGKEPAASSP | | |
| (SEQ ID NO: 323)); | SSNNTAATTAAIVPGSQLMPSKSPSTGTTEISSHESSHGTPSQTTAKNWELTA | | |
| IL15Ra (Amino acid | SASHQPPGVYPQGHSDTTVAISTSTVLLCGLSAVSLLACYLKSRQTPPLASVE | | |
| 31-267 of WT); linker | MEAMEALPVTWGTSSRDEDLENCSHHLSGEETRELQSLAAAVVPSAQTLKI | | |
| (SG); hPDE5 (Amino | TDFSFSDFELSDLETALCTIRMFTDLNLVQNFQMKHEVLCRWILSVKKNYRK | | |
| acid 535-860 of WT, | NVAYHNWRHAFNTAQCMFAALKAGKIQNKLTDLEILALLIAALSHDLDHR | | |
| R732L, F736A); linker | GVNNSYIQRSEHPLAQLYCHSIMEHHHFDQCLMILNSPGNQILSGLSIEEYKT | | |
| (SG); AcGFP (Amino | TLKIIKQAILATDLALYIKRLGEFAELIRKNQFNLEDPHQKELFLAMLMTACD | | |
| acid 2-239 of WT); | LSAITKPWPIQQRIAELVATEFFDQGDRERKELNIEPTDLMNREKKNKIPSMQ | | |
| stop) | VGFIDAICLQLYEALTHVSEDCFPLLDGCRKNRQKWQALAEQQSGVSKGAE | | |
| | LFTGIVPILIELNGDVNGHKFSVSGEGEGDATYGKLTLKFICTTGKLPVPWPT | | |
| | LVTTLSYGVQCFSRYPDHMKQHDFFKSAMPEGYIQERTIFFEDDGNYKSRAE | | |
| | VKFEGDTLVNRIELTGTDFKEDGNILGNKMEYNYNAHNVYIMTDKAKNGIK | | |
| | VNFKIRHNIEDGSVQLADHYQQNTPIGDGPVLLPDNHYLSTQSALSKDPNEK | | |
| | RDHMIYFGFVTAAAITHGMDELYK* | | |
| OT-001315 (IgE | MDWTWILFLVAAATRVHSNWVNVISDLKKIEDLIQSMHIDATLYTESDVHP | 8337 | 8355 |
| signal sequence; | SCKVTAMKCFLLELQVISLESGDASIHDTVENLIILANNSLSSNGNVTESGCK | | |
| IL15 (Amino acid 49- | ECEELEEKNIKEFLQSFVHIVQMFINTSSGGGSGGGGSGGGGSGGGGSGGGS | | |
| 162 of WT); Linker | LQITCPPPMSVEHADIWVKSYSLYSRERYICNSGFKRKAGTSSLTECVLNKAT | | |
| (SG3-(SG4)3-SG3-SLQ | NVAHWTTPSLKCIRDPALVHQRPAPPSTVTTAGVTPQPESLSPSGKEPAASSP | | |
| (SEQ ID NO: 323)); | SSNNTAATTAAIVPGSQLMPSKSPSTGTTEISSHESSHGTPSQTTAKNWELTA | | |
| IL15Ra (Amino acid | SASHQPPGVYPQGHSDTTVAISTSTVLLCGLSAVSLLACYLKSRQTPPLASVE | | |
| 31-267 of WT); Linker | MEAMEALPVTWGTSSRDEDLENCSHHLSGESRRVRRNKRSKEETRELQSLA | | |
| (SG); Furin cleavage | AAVVPSAQTLKITDFSFSDFELSDLETALCTIRMFTDLNLVQNFQMKHEVLC | | |
| site | RWILSVKKNYRKNVAYHNWRHAFNTAQCMFAALKAGKIQNKLTDLEILAL | | |
| (ESRRVRRNKRSK); | LIAALSHDLDHRGVNNSYIQRSEHPLAQLYCHSIMEHHHFDQCLMILNSPGN | | |
| hPDE5 (Amino acid | QILSGLSIEEYKTTLKIIKQAILATDLALYIKRLGEFFELIRKNQFNLEDPHQKE | | |
| 535-860 of WT, | LFLAMLMTACDLSAITKPWPIQQRIAELVATEFFDQGDRERKELNIEPTDLM | | |
| R732L); stop) | NREKKNKIPSMQVGFIDAICLQLYEALTHVSEDCFPLLDGCRKNRQKWQAL | | |
| | AEQQ* | | |
| OT-001316 (IgE | MDWTWILFLVAAATRVHSNWVNVISDLKKIEDLIQSMHIDATLYTESDVHP | 8338 | 8356 |
| signal sequence; IL15 | SCKVTAMKCFLLELQVISLESGDASIHDTVENLIILANNSLSSNGNVTESGCK | | |
| (Amino acid 49-162 of | ECEELEEKNIKEFLQSFVHIVQMFINTSSGGGSGGGGSGGGGSGGGGSGGGS | | |
| WT); Linker (SG3- | LQITCPPPMSVEHADIWVKSYSLYSRERYICNSGFKRKAGTSSLTECVLNKAT | | |
| (SG4)3-SG3-SLQ | NVAHWTTPSLKCIRDPALVHQRPAPPSTVTTAGVTPQPESLSPSGKEPAASSP | | |
| (SEQ ID NO: 323)); | SSNNTAATTAAIVPGSQLMPSKSPSTGTTEISSHESSHGTPSQTTAKNWELTA | | |
| IL15Ra (Amino acid | SASHQPPGVYPQGHSDTTVAISTSTVLLCGLSAVSLLACYLKSRQTPPLASVE | | |
| 31-267 of WT); Linker | MEAMEALPVTWGTSSRDEDLENCSHHLSGEETRELQSLAAAVVPSAQTLKI | | |
| (SG); hPDE5 (Amino | TDFSFSDFELSDLETALCTIRMFTDLNLVQNFQMKHEVLCRWILSVKKNYRK | | |
| acid 535-860 of WT, | NVAYHNWRHAFNTAQCMFAALKAGKIQNKLTDLEILALLIAALSHDLDHR | | |
| R732L); stop) | GVNNSYIQRSEHPLAQLYCHSIMEHHHFDQCLMILNSPGNQILSGLSIEEYKT | | |
| | TLKIIKQAILATDLALYIKRLGEFFELIRKNQFNLEDPHQKELFLAMLMTACD | | |
| | LSAITKPWPIQQRIAELVATEFFDQGDRERKELNIEPTDLMNREKKNKIPSMQ | | |
| | VGFIDAICLQLYEALTHVSEDCFPLLDGCRKNRQKWQALAEQQ* | | |
| OT-001317 (IgE | MDWTWILFLVAAATRVHSNWVNVISDLKKIEDLIQSMHIDATLYTESDVHP | 8339 | 8357 |
| signal sequence; IL15 | SCKVTAMKCFLLELQVISLESGDASIHDTVENLIILANNSLSSNGNVTESGCK | | |
| (Amino acid 49-162 of | ECEELEEKNIKEFLQSFVHIVQMFINTSSGGGSGGGGSGGGGSGGGGSGGGS | | |
| WT); Linker (SG3- | LQITCPPPMSVEHADIWVKSYSLYSRERYICNSGFKRKAGTSSLTECVLNKAT | | |
| (SG4)3-SG3-SLQ | NVAHWTTPSLKCIRDPALVHQRPAPPSTVTTAGVTPQPESLSPSGKEPAASSP | | |
| (SEQ ID NO: 323)); | SSNNTAATTAAIVPGSQLMPSKSPSTGTTEISSHESSHGTPSQTTAKNWELTA | | |
| IL15Ra (Amino acid | SASHQPPGVYPQGHSDTTVAISTSTVLLCGLSAVSLLACYLKSRQTPPLASVE | | |
| 31-267 of WT); linker | MEAMEALPVTWGTSSRDEDLENCSHHLSGEETRELQSLAAAVVPSAQTLKI | | |
| (SG); hPDE5 (Amino | TDFSFSDFELSDLETALCTIRMFTDLNLVQNFQMKHEVLCRWILSVKKNYRK | | |
| acid 535-860 of WT); | NVAYHNWRHAFNTAQCMFAALKAGKIQNKLTDLEILALLIAALSHDLDHR | | |
| stop) | GVNNSYIQRSEHPLAQLYCHSIMEHHHFDQCLMILNSPGNQILSGLSIEEYKT | | |
| | TLKIIKQAILATDLALYIKRRGEFFELIRKNQFNLEDPHQKELFLAMLMTACD | | |
| | LSAITKPWPIQQRIAELVATEFFDQGDRERKELNIEPTDLMNREKKNKIPSMQ | | |
| | VGFIDAICLQLYEALTHVSEDCFPLLDGCRKNRQKWQALAEQQ* | | |
| OT-001499 (IgE | MDWTWILFLVAAATRVHSNWVNVISDLKKIEDLIQSMHIDATLYTESDVHP | 8340 | 8358 |
| signal sequence; IL15 | SCKVTAMKCFLLELQVISLESGDASIHDTVENLIILANNSLSSNGNVTESGCK | | |
| (Amino acid 49-162 of | ECEELEEKNIKEFLQSFVHIVQMFINTSSGGGSGGGGSGGGGSGGGGSGGGS | | |
| WT); Linker (SG3- | LQITCPPPMSVEHADIWVKSYSLYSRERYICNSGFKRKAGTSSLTECVLNKAT | | |
| (SG4)3-SG3-SLQ | NVAHWTTPSLKCIRDPALVHQRPAPPSTVTTAGVTPQPESLSPSGKEPAASSP | | |
| (SEQ ID NO: 323)); | SSNNTAATTAAIVPGSQLMPSKSPSTGTTEISSHESSHGTPSQTTAKNWELTA | | |
| IL15Ra (Amino acid | SASHQPPGVYPQGHSDTTVAISTSTVLLCGLSAVSLLACYLKSRQTPPLASVE | | |
| 31-267 of WT); linker | MEAMEALPVTWGTSSRDEDLENCSHHLSGEETRELQSLAAAVVPSAQTLKI | | |
| (SG); hPDE5 (Amino | TDFSFSDFELSDLETALCTIRMFTDLNLVQNFQMKHEVLCRWILSVKKNYRK | | |
| acid 535-860 of WT); | NVAYHNWRHAFNTAQCMFAALKAGKIQNKLTDLEILALLIAALSHDLDHR | | |
| stop) | GVNNSYIQRSERPLAQLYCHSIMEHHHFDQCLMILNSPGNQILSGLSIEEYKT | | |
| | TLKIIKQAILATDLALYIKRRGEFFELIRKNQFNLEDPHQKELFLAMLMTACD | | |
| | LSAITKPWPIQQRIAELVATEFFDQGDRERKELNIEPTDLMNREKKNKIPSMQ | | |
| | VGFIDAICLQLYEALTHVSEDCFPLLDGCRKNRQKWQALAEQQ* | | |
| OT-001344 (IgE | MDWTWILFLVAAATRVHSDYKDDDDKNWVNVISDLIWEDLIQSMHIDAT | 8341 | 8359 |
| signal sequence; Flag | LYTESDVHPSCKVTAMKCFLLELQVISLESGDASIHDTVENLIILANNSLSSN | | |
| tag; IL15 (Amino acid | GNVTESGCKECEELEEKNIKEFLQSFVHIVQMFINTSSGGGSGGGGSGGGGS | | |
| 49-162 of WT); Linker | GGGGSGGGSLQYPYDVPDYAITCPPPMSVEHADIWVKSYSLYSRERYICNSG | | |
| (SG3-(SG4)3-SG3- | FKRKAGTSSLTECVLNKATNVAHWTTPSLKCIRDPALVHQRPAPPSTVTTAG | | |
| SLQ (SEQ ID NO: | VTPQPESLSPSGKEPAASSPSSNNTAATTAAIVPGSQLMPSKSPSTGTTEISSH | | |
| 323)); HA tag; IL15Ra | ESSHGTPSQTTAKNWELTASASHQPPGVYPQGHSDTTVAISTSTVLLCGLSA | | |
| (Amino acid 31-267 of | VSLLACYLKSRQTPPLASVEMEAMEALPVTWGTSSRDEDLENCSHHLGSGS | | |
| WT); linker (GSGSGS | GSEETRELQSLAAAVVPSAQTLKITDFSFSDFELSDLETALCTIRMFTDLNLV | | |
| (SEQ ID NO: 8330)); | QNFQMKHEVLCRWILSVKKNYRKNVAYHNWRHAFNTAQCMFAALKAGKI | | |
| hPDE5 (Amino acid | QNKLTDLEILALLIAALSHDLDHRGVNNSYIQRSEHPLAQLYCHSIMEHHHF | | |
| 535-860 of WT, | DQCLMILNSPGNQILSGLSIEEYKTTLKIIKQAILATDLALYIKRLGEFFELIRK | | |
| R732L); stop) | NQFNLEDPHQKELFLAMLMTACDLSAITKPWPIQQRIAELVATEFFDQGDRE | | |
| | RKELNIEPTDLMNREKKNKIPSMQVGFIDAICLQLYEALTHVSEDCFPLLDGC | | |
| | RKNRQKWQALAEQQ* | | |
| OT-001345 (IgE | MDWTWILFLVAAATRVHSDYKDDDDKNWVNVISDLKKIEDLIQSMHIDAT | 8342 | 8360 |
| signal sequence; Flag | LYTESDVHPSCKVTAMKCFLLELQVISLESGDASIHDTVENLIILANNSLSSN | | |
| tag; IL15 (Amino acid | GNVTESGCKECEELEEKNIKEFLQSFVHIVQMFINTSSGGGSGGGGSGGGGS | | |
| 49-162 of WT); Linker | GGGGSGGGSLQYPYDVPDYAITCPPPMSVEHADIWVKSYSLYSRERYICNSG | | |
| (SG3-(SG4)3-SG3- | FKRKAGTSSLTECVLNKATNVAHWTTPSLKCIRDPALVHQRPAPPSTVTTAG | | |
| SLQ (SEQ ID NO: | VTPQPESLSPSGKEPAASSPSSNNTAATTAAIVPGSQLMPSKSPSTGTTEISSH | | |
| 323)); HA tag; IL15Ra | ESSHGTPSQTTAKNWELTASASHQPPGVYPQGHSDTTVAISTSTVLLCGLSA | | |
| (Amino acid 31-267 of | VSLLACYLKSRQTPPLASVEMEAMEALPVTWGTSSRDEDLENCSHHLGSGS | | |
| WT); linker | GSGSEETRELQSLAAAVVPSAQTLKITDFSFSDFELSDLETALCTIRMFTDLNL | | |
| (GSGSGSGS (SEQ ID | VQNFQMKHEVLCRWILSVKKNYRKNVAYHNWRHAFNTAQCMFAALKAG | | |
| NO: 8331)); hPDE5 | KIQNKLTDLEILALLIAALSHDLDHRGVNNSYIQRSEHPLAQLYCHSIMEHHH | | |
| (Amino acid 535-860 | FDQCLMILNSPGNQILSGLSIEEYKTTLKIIKQAILATDLALYIKRLGEFFELIR | | |
| of WT, R732L); stop) | KNQFNLEDPHQKELFLAMLMTACDLSAITKPWPIQQRIAELVATEFFDQGDR | | |
| | ERKELNIEPTDLMNREKKNKIPSMQVGFIDAICLQLYEALTHVSEDCFPLLDG | | |
| | CRKNRQKWQALAEQQ* | | |
| OT-001346 (IgE | MDWTWILFLVAAATRVHSDYKDDDDKNWVNVISDLKKIEDLIQSMHIDAT | 8343 | 8361 |
| signal sequence; Flag | LYTESDVHPSCKVTAMKCFLLELQVISLESGDASIHDTVENLIILANNSLSSN | | |
| tag; IL15 (Amino acid | GNVTESGCKECEELEEKNIKEFLQSFVHIVQMFINTSSGGGSGGGGSGGGGS | | |
| 49-162 of WT); Linker | GGGGSGGGSLQYPYDVPDYAITCPPPMSVEHADIWVKSYSLYSRERYICNSG | | |
| (SG3-(SG4)3-SG3- | FKRKAGTSSLTECVLNKATNVAHWTTPSLKCIRDPALVHQRPAPPSTVTTAG | | |
| SLQ (SEQ ID NO: | VTPQPESLSPSGKEPAASSPSSNNTAATTAAIVPGSQLMPSKSPSTGTTEISSH | | |
| 323)); HA tag; IL15Ra | ESSHGTPSQTTAKNWELTASASHQPPGVYPQGHSDTTVAISTSTVLLCGLSA | | |
| (Amino acid 31-267 of | VSLLACYLKSRQTPPLASVEMEAMEALPVTWGTSSRDEDLENCSHHLGSGS | | |
| WT); linker | GGGSGSEETRELQSLAAAVVPSAQTLKITDFSFSDFELSDLETALCTIRMFTD | | |
| (GSGSGGGSGS | LNLVQNFQMKHEVLCRWILSVKKNYRKNVAYHNWRHAFNTAQCMFAALK | | |
| (SEQ ID NO: 8332)); | AGKIQNKLTDLEILALLIAALSHDLDHRGVNNSYIQRSEHPLAQLYCHSIMEH | | |
| hPDE5 (Amino acid | HHFDQCLMILNSPGNQILSGLSIEEYKTTLKIIKQAILATDLALYIKRLGEFFEL | | |
| 535-860 of WT, | IRKNQFNLEDPHQKELFLAMLMTACDLSAITKPWPIQQRIAELVATEFFDQG | | |
| R732L); stop) | DRERKELNIEPTDLMNREKKNKIPSMQVGFIDAICLQLYEALTHVSEDCFPLL | | |
| | DGCRKNRQKWQALAEQQ* | | |
| OT-001318 (IgE | MDWTWILFLVAAATRVHSYPYDVPDYANWVNVISDLKKIEDLIQSMHIDAT | 8649 | 8670 |
| signal sequence; HA | LYTESDVHPSCKVTAMKCFLLELQVISLESGDASIHDTVENLIILANNSLSSN | | |
| Tag; IL15 (Amino acid | GNVTESGCKECEELEEKNIKEFLQSFVHIVQMFINTSSGGGSGGGGSGGGGS | | |
| 49-162 of WT); Linker | GGGGSGGGSLQITCPPPMSVEHADIWVKSYSLYSRERYICNSGFKRKAGTSS | | |
| (SG3-(SG4)3-SG3- | LTECVLNKATNVAHWTTPSLKCIRDPALVHQRPAPPSTVTTAGVTPQPESLS | | |
| SLQ (SEQ ID NO: | PSGKEPAASSPSSNNTAATTAAIVPGSQLMPSKSPSTGTTEISSHESSHGTPSQ | | |
| 323)); IL15Ra (Amino | TTAKNWELTASASHQPPGVYPQGHSDTTVAISTSTVLLCGLSAVSLLACYLK | | |
| acid 31-267 of WT); | SRQTPPLASVEMEAMEALPVTWGTSSRDEDLENCSHHLSGEETRELQSLAA | | |
| Linker (SG); hPDE5 | AVVPSAQTLKITDFSFSDFELSDLETALCTIRMFTDLNLVQNFQMKHEVLCR | | |
| (Amino acid 535-860 | WILSVKKNYRKNVAYHNWRHAFNTAQCMFAALKAGKIQNKLTDLEILALLI | | |
| of WT); stop) | AALSHDLDHRGVNNSYIQRSEHPLAQLYCHSIMEHHHFDQCLMILNSPGNQI | | |
| | LSGLSIEEYKTTLKIIKQAILATDLALYIKRRGEFFELIRKNQFNLEDPHQKELF | | |
| | LAMLMTACDLSAITKPWPIQQRIAELVATEFFDQGDRERKELNIEPTDLMNR | | |
| | EKKNKIPSMQVGFIDAICLQLYEALTHVSEDCFPLLDGCRKNRQKWQALAE | | |
| | QQ* | | |
| OT-001314 (IgE | MDWTWILFLVAAATRVHSNWVNVISDLKKIEDLIQSMHIDATLYTESDVHP | 8650 | 8671 |
| signal sequence; IL15 | SCKVTAMKCFLLELQVISLESGDASIHDTVENLIILANNSLSSNGNVTESGCK | | |
| (Amino acid 49-162 of | ECEELEEKNIKEFLQSFVHIVQMFINTSSGGGSGGGGSGGGGSGGGGSGGGS | | |
| WT); Linker (SG3- | LQITCPPPMSVEHADIWVKSYSLYSRERYICNSGFKRKAGTSSLTECVLNKAT | | |
| (SG4)3-SG3-SLQ | NVAHWTTPSLKCIRDPALVHQRPAPPSTVTTAGVTPQPESLSPSGKEPAASSP | | |
| (SEQ ID NO: 323)); | SSNNTAATTAAIVPGSQLMPSKSPSTGTTEISSHESSHGTPSQTTAKNWELTA | | |
| IL15Ra (Amino acid | SASHQPPGVYPQGHSDTTVAISTSTVLLCGLSAVSLLACYLKSRQTPPLASVE | | |
| 31-267 of WT); Linker | MEAMEALPVTWGTSSRDEDLENCSHHLGSGEETRELQSLAAAVVPSAQTLK | | |
| (GSG), hPDE5 | ITDFSFSDFELSDLETALCTIRMFTDLNLVQNFQMKHEVLCRWILSVKKNYR | | |
| (Amino acid 535-860 | KNVAYHNWRHAFNTAQCMFAALKAGKIQNKLTDLEILALLIAALSHDLDH | | |
| of WT, F736A), stop) | RGVNNSYIQRSEHPLAQLYCHSIMEHHHFDQCLMILNSPGNQILSGLSIEEYK | | |
| | TTLKIIKQAILATDLALYIKRRGEFAELIRKNQFNLEDPHQKELFLAMLMTAC | | |
| | DLSAITKPWPIQQRIAELVATEFFDQGDRERKELNIEPTDLMNREKKNKIPSM | | |
| | QVGFIDAICLQLYEALTHVSEDCFPLLDGCRKNRQKWQALAEQQ* | | |
| OT-001319 (IgE | MDWTWILFLVAAATRVHSNWVNVISDLKKIEDLIQSMHIDATLYTESDVHP | 8651 | 8672 |
| signal sequence; IL15 | SCKVTAMKCFLLELQVISLESGDASIHDTVENLIILANNSLSSNGNVTESGCK | | |
| (Amino acid 49-162 of | ECEELEEKNIKEFLQSFVHIVQMFINTSSGGGSGGGGSGGGGSGGGGSGGGS | | |
| WT); Linker (SG3- | LQITCPPPMSVEHADIWVKSYSLYSRERYICNSGFKRKAGTSSLTECVLNKAT | | |
| (SG4)3-SG3-SLQ | NVAHWTTPSLKCIRDPALVHQRPAPPSTVTTAGVTPQPESLSPSGKEPAASSP | | |
| (SEQ ID NO: 323)); | SSNNTAATTAAIVPGSQLMPSKSPSTGTTEISSHESSHGTPSQTTAKNWELTA | | |
| IL15Ra (Amino acid | SASHQPPGVYPQGHSDTTVAISTSTVLLCGLSAVSLLACYLKSRQTPPLASVE | | |
| 31-267 of WT); Linker | MEAMEALPVTWGTSSRDEDLENCSHHLGSGEETRELQSLAAAVVPSAQTLK | | |
| (GSG); hPDE5 | ITDFSFSDFELSDLETALCTIRMFTDLNLVQNFQMKHEVLCRWILSVKKNYR | | |
| (Amino acid 535-860 | KNVAYHNWRHAFNTAQCMFAALKAGKIQNKLTDLEILALLIAALSHDLDH | | |
| of WT, R732L, | RGVNNSYIQRSEHPLAQLYCHSIMEHHHFDQCLMILNSPGNQILSGLSIEEYK | | |
| F736A); stop) | TTLKIIKQAILATDLALYIKRLGEFAELIRKNQFNLEDPHQKELFLAMLMTAC | | |
| | DLSAITKPWPIQQRIAELVATEFFDQGDRERKELNIEPTDLMNREKKNKIPSM | | |
| | QVGFIDAICLQLYEALTHVSEDCFPLLDGCRKNRQKWQALAEQQ* | | |
| OT-001320 (IgE | MDWTWILFLVAAATRVHSNWVNVISDLKKIEDLIQSMHIDATLYTESDVHP | 8652 | 8673 |
| signal sequence; IL15 | SCKVTAMKCFLLELQVISLESGDASIHDTVENLIILANNSLSSNGNVTESGCK | | |
| (Amino acid 49-162 of | ECEELEEKNIKEFLQSFVHIVQMFINTSSGGGSGGGGSGGGGSGGGGSGGGS | | |
| WT); Linker (SG3- | LQITCPPPMSVEHADIWVKSYSLYSRERYICNSGFKRKAGTSSLTECVLNKAT | | |
| (SG4)3-SG3-SLQ | NVAHWTTPSLKCIRDPALVHQRPAPPSTVTTAGVTPQPESLSPSGKEPAASSP | | |
| (SEQ ID NO: 323)); | SSNNTAATTAAIVPGSQLMPSKSPSTGTTEISSHESSHGTPSQTTAKNWELTA | | |
| IL15Ra (Amino acid | SASHQPPGVYPQGHSDTTVAISTSTVLLCGLSAVSLLACYLKSRQTPPLASVE | | |
| 31-267 of WT); Linker | MEAMEALPVTWGTSSRDEDLENCSHHLGSGEETRELQSLAAAVVPSAQTLK | | |
| (GSG); hPDE5 | ITDFSFSDFELSDLETALCTIRMFTDLNLVQNFQMKHEVLCRWILSVKKNYR | | |
| (Amino acid 535-860 | KNVAYHNWRHAFNTAQCMFAALKAGKIQNKLTDLEILALLIAALSHDLDH | | |
| of WT); stop) | RGVNNSYIQRSEHPLAQLYCHSIMEHHHFDQCLMILNSPGNQILSGLSIEEYK | | |
| | TTLKIIKQAILATDLALYIKRRGEFFELIRKNQFNLEDPHQKELFLAMLMTAC | | |
| | DLSAITKPWPIQQRIAELVATEFFDQGDRERKELNIEPTDLMNREKKNKIPSM | | |
| | QVGFIDAICLQLYEALTHVSEDCFPLLDGCRKNRQKWQALAEQQ* | | |
| OT-001388 (IgE | MDWTWILFLVAAATRVHSDYKDDDDKNWVNVISDLKKIEDLIQSMHIDAT | 8653 | 8674 |
| signal sequence; IL15 | LYTESDVHPSCKVTAMKCFLLELQVISLESGDASIHDTVENLIILANNSLSSN | | |
| (Amino acid 49-162 of | GNVTESGCKECEELEEKNIKEFLQSFVHIVQMFINTSSGGGSGGGGSGGGGS | | |
| WT); Linker (SG3- | GGGGSGGGSLQYPYDVPDYAITCPPPMSVEHADIWVKSYSLYSRERYICNSG | | |
| (SG4)3-SG3-SLQ | FKRKAGTSSLTECVLNKATNVAHWTTPSLKCIRDPALVHQRPAPPSTVTTAG | | |
| (SEQ ID NO: 323)); | VTPQPESLSPSGKEPAASSPSSNNTAATTAAIVPGSQLMPSKSPSTGTTEISSH | | |
| IL15Ra (Amino acid | ESSHGTPSQTTAKNWELTASASHQPPGVYPQGHSDTTVAISTSTVLLCGLSA | | |
| 31-267 of WT); Linker | VSLLACYLKSRQTPPLASVEMEAMEALPVTWGTSSRDEDLENCSHHLGS* | | |
| (GS); stop) | | | |
| OT-001321 (IgE | MDWTWILFLVAAATRVHSDYKDDDDKNWVNVISDLKKIEDLIQSMHIDAT | 8654 | 8675 |
| signal sequence; Flag | LYTESDVHPSCKVTAMKCFLLELQVISLESGDASIHDTVENLIILANNSLSSN | | |
| tag, IL15 (Amino acid | GNVTESGCKECEELEEKNIKEFLQSFVHIVQMFINTSSGGGSGGGGSGGGGS | | |
| 49-162 of WT); Linker | GGGGSGGGSLQYPYDVPDYAITCPPPMSVEHADIWVKSYSLYSRERYICNSG | | |
| (SG3-(SG4)3-SG3- | FKRKAGTSSLTECVLNKATNVAHWTTPSLKCIRDPALVHQRPAPPSTVTTAG | | |
| SLQ (SEQ ID NO: | VTPQPESLSPSGKEPAASSPSSNNTAATTAAIVPGSQLMPSKSPSTGTTEISSH | | |
| 323)); HA tag; IL15Ra | ESSHGTPSQTTAKNWELTASASHQPPGVYPQGHSDTTVAISTSTVLLCGLSA | | |
| (Amino acid 31-267 of | VSLLACYLKSRQTPPLASVEMEAMEALPVTWGTSSRDEDLENCSHHLGSGE | | |
| WT); Linker (GSG); | ETRELQSLAAAVVPSAQTLKITDFSFSDFELSDLETALCTIRMFTDLNLVQNF | | |
| hPDE5 (Amino acid | QMKHEVLCRWILSVKKNYRKNVAYHNWRHAFNTAQCMFAALKAGKIQNK | | |
| 535-860 of WT); stop) | LTDLEILALLIAALSHDLDHRGVNNSYIQRSEHPLAQLYCHSIMEHHHFDQCL | | |
| | MILNSPGNQILSGLSIEEYKTTLKIIKQAILATDLALYIKRRGEFFELIRKNQFN | | |
| | LEDPHQKELFLAMLMTACDLSAITKPWPIQQRIAELVATEFFDQGDRERKEL | | |
| | NIEPTDLMNREKKNKIPSMQVGFIDAICLQLYEALTHVSEDCFPLLDGCRKN | | |
| | RQKWQALAEQQ* | | |
| OT-001323 (IgE | MDWTWILFLVAAATRVHSDYKDDDDKNWVNVISDLKKIEDLIQSMHIDAT | 8655 | 8676 |
| signal sequence; Flag | LYTESDVHPSCKVTAMKCFLLELQVISLESGDASIHDTVENLIILANNSLSSN | | |
| tag; IL15 (Amino acid | GNVTESGCKECEELEEKNIKEFLQSFVHIVQMFINTSSGGGSGGGGSGGGGS | | |
| 49-162 of WT); Linker | GGGGSGGGSLQYPYDVPDYAITCPPPMSVEHADIWVKSYSLYSRERYICNSG | | |
| (SG3-(SG4)3-SG3- | FKRKAGTSSLTECVLNKATNVAHWTTPSLKCIRDPALVHQRPAPPSTVTTAG | | |
| SLQ (SEQ ID NO: | VTPQPESLSPSGKEPAASSPSSNNTAATTAAIVPGSQLMPSKSPSTGTTEISSH | | |
| 323)); HA tag; IL15Ra | ESSHGTPSQTTAKNWELTASASHQPPGVYPQGHSDTTVAISTSTVLLCGLSA | | |
| (Amino acid 31-267 of | VSLLACYLKSRQTPPLASVEMEAMEALPVTWGTSSRDEDLENCSHHLGSGE | | |
| WT); Linker (GSG); | ETRELQSLAAAVVPSAQTLKITDFSFSDFELSDLETALCTIRMFTDLNLVQNF | | |
| hPDE5 (Amino acid | QMKHEVLCRWILSVKKNYRKNVAYHNWRHAFNTAQCMFAALKAGKIQNK | | |
| 535-860 of WT, | LTDLEILALLIAALSHDLDHRGVNNSYIQRSEHPLAQLYCHSIMEHHHFDQCL | | |
| F736A); stop) | MILNSPGNQILSGLSIEEYKTTLKIIKQAILATDLALYIKRRGEFAELIRKNQFN | | |
| | LEDPHQKELFLAMLMTACDLSAITKPWPIQQRIAELVATEFFDQGDRERKEL | | |
| | NIEPTDLMNREKKNKIPSMQVGFIDAICLQLYEALTHVSEDCFPLLDGCRKN | | |
| | RQKWQALAEQQ* | | |
| OT-001324 (IgE | MDWTWILFLVAAATRVHSDYKDDDDKNWVNVISDLKKIEDLIQSMHIDAT | 8656 | 8677 |
| signal sequence; Flag | LYTESDVHPSCKVTAMKCFLLELQVISLESGDASIHDTVENLIILANNSLSSN | | |
| tag; IL15 (Amino acid | GNVTESGCKECEELEEKNIKEFLQSFVHIVQMFINTSSGGGSGGGGSGGGGS | | |
| 49-162 of WT); Linker | GGGGSGGGSLQYPYDVPDYAITCPPPMSVEHADIWVKSYSLYSRERYICNSG | | |
| (SG3-(SG4)3-SG3- | FKRKAGTSSLTECVLNKATNVAHWTTPSLKCIRDPALVHQRPAPPSTVTTAG | | |
| SLQ (SEQ ID NO: | VTPQPESLSPSGKEPAASSPSSNNTAATTAAIVPGSQLMPSKSPSTGTTEISSH | | |
| 323)); HA tag; IL15Ra | ESSHGTPSQTTAKNWELTASASHQPPGVYPQGHSDTTVAISTSTVLLCGLSA | | |
| (Amino acid 31-267 of | VSLLACYLKSRQTPPLASVEMEAMEALPVTWGTSSRDEDLENCSHHLGSGE | | |
| WT); Linker (GSG); | ETRELQSLAAAVVPSAQTLKITDFSFSDFELSDLETALCTIRMFTDLNLVQNF | | |
| hPDE5 (Amino acid | QMKHEVLCRWILSVKKNYRKNVAYHNWRHAFNTAQCMFAALKAGKIQNK | | |
| 535-860 of WT, | LTDLEILALLIAALSHDLDHRGVNNSYIQRSEHPLAQLYCHSIMEHHHFDQCL | | |
| R732L), stop) | MILNSPGNQILSGLSIEEYKTTLKIIKQAILATDLALYIKRLGEFFELIRKNQFN | | |
| | LEDPHQKELFLAMLMTACDLSAITKPWPIQQRIAELVATEFFDQGDRERKEL | | |
| | NIEPTDLMNREKKNKIPSMQVGFIDAICLQLYEALTHVSEDCFPLLDGCRKN | | |
| | RQKWQALAEQQ* | | |
| OT-001325 (IgE | MDWTWILFLVAAATRVHSDYKDDDDKNWVNVISDLKKIEDLIQSMHIDAT | 8657 | 8678 |
| signal sequence; Flag | LYTESDVHPSCKVTAMKCFLLELQVISLESGDASIHDTVENLIILANNSLSSN | | |
| tag; IL15 (Amino acid | GNVTESGCKECEELEEKNIKEFLQSFVHIVQMFINTSSGGGSGGGGSGGGGS | | |
| 49-162 of WT); Linker | GGGGSGGGSLQYPYDVPDYAITCPPPMSVEHADIWVKSYSLYSRERYICNSG | | |
| (SG3-(SG4)3-SG3- | FKRKAGTSSLTECVLNKATNVAHWTTPSLKCIRDPALVHQRPAPPSTVTTAG | | |
| SLQ (SEQ ID NO: | VTPQPESLSPSGKEPAASSPSSNNTAATTAAIVPGSQLMPSKSPSTGTTEISSH | | |
| 323)); HA tag; IL15Ra | ESSHGTPSQTTAKNWELTASASHQPPGVYPQGHSDTTVAISTSTVLLCGLSA | | |
| (Amino acid 31-267 of | VSLLACYLKSRQTPPLASVEMEAMEALPVTWGTSSRDEDLENCSHHLGSGE | | |
| WT); Linker (GSG); | ETRELQSLAAAVVPSAQTLKITDFSFSDFELSDLETALCTIRMFTDLNLVQNF | | |
| hPDE5 (Amino acid | QMKHEVLCRWILSVKKNYRKNVAYHNWRHAFNTAQCMFAALKAGKIQNK | | |
| 535-860 of WT, | LTDLEILALLIAALSHDLDHRGVNNSYIQRSEHPLAQLYCHSIMEHHHFDQCL | | |
| R732L, F736A); stop) | MILNSPGNQILSGLSIEEYKTTLKIIKQAILATDLALYIKRLGEFAELIRKNQFN | | |
| | LEDPHQKELFLAMLMTACDLSAITKPWPIQQRIAELVATEFFDQGDRERKEL | | |
| | NIEPTDLMNREKKNKIPSMQVGFIDAICLQLYEALTHVSEDCFPLLDGCRKN | | |
| | RQKWQALAEQQ* | | |
| OT-001349 (IgE | MDWTWILFLVAAATRVHSDYKDDDDKNWVNVISDLKKIEDLIQSMHIDAT | 8658 | 8679 |
| signal sequence; Flag | LYTESDVHPSCKVTAMKCFLLELQVISLESGDASIHDTVENLIILANNSLSSN | | |
| tag; IL15 (Amino acid | GNVTESGCKECEELEEKNIKEFLQSFVHIVQMFINTSSGGGSGGGGSGGGGS | | |
| 49-162 of WT); Linker | GGGGSGGGSLQYPYDVPDYAITCPPPMSVEHADIWVKSYSLYSRERYICNSG | | |
| (SG3-(SG4)3-SG3- | FKRKAGTSSLTECVLNKATNVAHWTTPSLKCIRDPALVHQRPAPPSTVTTAG | | |
| SLQ (SEQ ID NO: | VTPQPESLSPSGKEPAASSPSSNNTAATTAAIVPGSQLMPSKSPSTGTTEISSH | | |
| 323)); HA tag; IL15Ra | ESSHGTPSQTTAKNWELTASASHQPPGVYPQGHSDTTVAISTSTVLLCGLSA | | |
| (Amino acid 31-267 of | VSLLACYLKSRQTPPLASVEMEAMEALPVTWGTSSRDEDLENCSHHLGSGE | | |
| WT); Linker (GSG); | ETRELQSLAAAVVPSAQTLKITDFSFSDFELSDLETALCTIRMFTDLNLVQNF | | |
| hPDE5 (Amino acid | QMKHEVLCRWILSVKKNYRKNVAYHNWRHAFNTAQCMFAALKAGKIQNK | | |
| 535-860 of WT, | LTDLEILALLIAALSHDLDIIRGVNNSYIQRSEHPLAQLYCHSIMEHHHFDQCL | | |
| R732L); V5 epitope; | MILNSPGNQILSGLSIEEYKTTLKIIKQAILATDLALYIKRLGEFFELIRKNQFN | | |
| stop) | LEDPHQKELFLAMLMTACDLSAITKPWPIQQRIAELVATEFFDQGDRERKEL | | |
| | NIEPTDLMNREKKNKIPSMQVGFIDAICLQLYEALTHVSEDCFPLLDGCRKN | | |
| | RQKWQALAEQQGKPIPNPLLGLDST* | | |
| OT-001350 (IgE | MDWTWILFLVAAATRVHSNWVNVISDLKKIEDLIQSMHIDATLYTESDVHP | 8659 | 8680 |
| signal sequence; IL15 | SCKVTAMKCFLLELQVISLESGDASIHDTVENLIILANNSLSSNGNVTESGCK | | |
| (Amino acid 49-162 of | ECEELEEKNIKEFLQSFVHIVQMFINTSSGGGSGGGGSGGGGSGGGGSGGGS | | |
| WT); Linker (SG3- | LQITCPPPMSVEHADIWVKSYSLYSRERYICNSGFKRKAGTSSLTECVLNKAT | | |
| (SG4)3-SG3-SLQ | NVAHWTTPSLKCIRDPALVHQRPAPPSTVTTAGVTPQPESLSPSGKEPAASSP | | |
| (SEQ ID NO: 323)); | SSNNTAATTAAIVPGSQLMPSKSPSTGTTEISSHESSHGTPSQTTAKNWELTA | | |
| IL15Ra (Amino acid | SASHQPPGVYPQGHSDTTVAISTSTVLLCGLSAVSLLACYLKSRQTPPLASVE | | |
| 31-267 of WT); Linker | MEAMEALPVTWGTSSRDEDLENCSHHLGSGEETRELQSLAAAVVPSAQTLK | | |
| (GSG); hPDE5 | ITDFSFSDFELSDLETALCTIRMFTDLNLVQNFQMKHEVLCRWILSVKKNYR | | |
| (Amino acid 535-860 | KNVAYHNWRHAFNTAQCMFAALKAGKIQNKLTDLEILALLIAALSHDLDH | | |
| of WT, R732L); | RGVNNSYIQRSEHPLAQLYCHSIMEHHHFDQCLMILNSPGNQILSGLSIEEYK | | |
| Linker (GS), stop) | TTLKIIKQAILATDLALYIKRLGEFFELIRKNQFNLEDPHQKELFLAMLMTAC | | |
| | DLSAITKPWPIQQRIAELVATEFFDQGDRERKELNIEPTDLMNREKKNKIPSM | | |
| | QVGFIDAICLQLYEALTHVSEDCFPLLDGCRKNRQKWQALAEQQGS* | | |
| OT-001351 (IgE | MDWTWILFLVAAATRVHSNWVNVISDLKKIEDLIQSMHIDATLYTESDVHP | 8660 | 8681 |
| signal sequence; IL15 | SCKVTAMKCFLLELQVISLESGDASIHDTVENLIILANNSLSSNGNVTESGCK | | |
| (Amino acid 49-162 of | ECEELEEKNIKEFLQSFVHIVQMFINTSSGGGSGGGGSGGGGSGGGGSGGGS | | |
| WT); Linker (SG3- | LQITCPPPMSVEHADIWVKSYSLYSRERYICNSGFKRKAGTSSLTECVLNKAT | | |
| (SG4)3-SG3-SLQ | NVAHWTTPSLKCIRDPALVHQRPAPPSTVTTAGVTPQPESLSPSGKEPAASSP | | |
| (SEQ ID NO: 323)); | SSNNTAATTAAIVPGSQLMPSKSPSTGTTEISSHESSHGTPSQTTAKNWELTA | | |
| IL15Ra (Amino acid | SASHQPPGVYPQGHSDTTVAISTSTVLLCGLSAVSLLACYLKSRQTPPLASVE | | |
| 31-267 of WT); Linker | MEAMEALPVTWGTSSRDEDLENCSHHLGSGEETRELQSLAAAVVPSAQTLK | | |
| (GSG); hPDE5 | ITDFSFSDFELSDLETALCTIRMFTDLNLVQNFQMKHEVLCRWILSVKKNYR | | |
| (Amino acid 535-860 | KNVAYHNWRHAFNTAQCMFAALKAGKIQNKLTDLEILALLIAALSHDLDH | | |
| of WT, R732I); Linker | RGVNNSYIQRSEHPLAQLYCHSIMEHHHFDQCLMILNSPGNQILSGLSIEEYK | | |
| (GS); stop) | TTLKIIKQAILATDLALYIKRIGEFFELIRKNQFNLEDPHQKELFLAMLMTACD | | |
| | LSAITKPWPIQQRIAELVATEFFDQGDRERKELNIEPTDLMNREKKNKIPSMQ | | |
| | VGFIDAICLQLYEALTHVSEDCFPLLDGCRKNRQKWQALAEQQGS* | | |
| OT-001352 (IgE | MDWTWILFLVAAATRVHSNWVNVISDLKKIEDLIQSMHIDATLYTESDVHP | 8661 | 8682 |
| signal sequence; IL15 | SCKVTAMKCFLLELQVISLESGDASIHDTVENLIILANNSLSSNGNVTESGCK | | |
| (Amino acid 49-162 of | ECEELEEKNIKEFLQSFVHIVQMFINTSSGGGSGGGGSGGGGSGGGGSGGGS | | |
| WT); Linker (SG3- | LQITCPPPMSVEHADIWVKSYSLYSRERYICNSGFKRKAGTSSLTECVLNKAT | | |
| (SG4)3-SG3-SLQ | NVAHWTTPSLKCIRDPALVHQRPAPPSTVTTAGVTPQPESLSPSGKEPAASSP | | |
| (SEQ ID NO: 323)); | SSNNTAATTAAIVPGSQLMPSKSPSTGTTEISSHESSHGTPSQTTAKNWELTA | | |
| IL15Ra (Amino acid | SASHQPPGVYPQGHSDTTVAISTSTVLLCGLSAVSLLACYLKSRQTPPLASVE | | |
| 31-267 of WT); Linker | MEAMEALPVTWGTSSRDEDLENCSHHLGSGEETRELQSLAAAVVPSAQTLK | | |
| (GSG); hPDE5 | ITDFSFSDFELSDLETALCTIRMFTDLNLVQNFQMKHEVLCRWILSVKKNYR | | |
| (Amino acid 535-860 | KNVAYHNWRHAFNTAQCMFAALKAGKIQNKLTDLEILALLIAALSHDLDH | | |
| of WT, R732G); | RGVNNSYIQRSEHPLAQLYCHSIMEHHHEDQCLMILNSPGNQILSGLSIEEYK | | |
| Linker (GS); stop) | TTLKIIKQAILATDLALYIKRGGEFFELIRKNQFNLEDPHQKELFLAMLMTAC | | |
| | DLSAITKPWPIQQRIAELVATEFFDQGDRERKELNIEPTDLMNREKKNKIPSM | | |
| | QVGFIDAICLQLYEALTHVSEDCFPLLDGCRKNRQKWQALAEQQGS* | | |
| OT-001347 (IgE | ORF1: | 8662 | 8683 |
| signal sequence; IL15 | MDWTWILFLVAAATRVHSNWVNVISDLKKIEDLIQSMHIDATLYTESDVHP | | |
| (Amino acid 49-162 of | SCKVTAMKCFLLELQVISLESGDASIHDTVENLIILANNSLSSNGNVTESGCK | | |
| WT); Linker (GS); | ECEELEEKNIKEFLQSFVHIVQMFINTSGSEETRELQSLAAAVVPSAQTLKITD | | |
| hPDE5 (Amino acid | FSFSDFELSDLETALCTIRMFTDLNLVQNFQMKHEVLCRWILSVKKNYRKNV | | |
| 535-860 of WT, | AYHNWRHAFNTAQCMFAALKAGKIQNKLTDLEILALLIAALSHDLDHRGV | | |
| R732L, F736A); stop; | NNSYIQRSEHPLAQLYCHSIMEHHHFDQCLMILNSPGNQILSGLSIEEYKTTL | | |
| spacer; IRES; Spacer; | KIIKQAILATDLALYIKRLGEFAELIRKNQFNLEDPHQKELFLAMLMTACDLS | | |
| mcherry; stop) | AITKPWPIQQRIAELVATEFFDQGDRERKELNIEPTDLMNREKKNKIPSMQV | | |
| | GFIDAICLQLYEALTHVSEDCFPLLDGCRKNRQKWQALAEQQ* | | |
| | ORF2: | 8663 | |
| | MSKGEEDNMAIIKEFMRFKVHMEGSVNGHEFEIEGEGEGRPYEGTQTAKLK | | |
| | VTKGGPLPFAWDILSPQFMYGSKAYVKHPADIPDYLKLSFPEGFKWERVMN | | |
| | FEDGGVVTVTQDSSLQDGEFIYKVKLRGTNFPSDGPVMQKKTMGWEASSER | | |
| | MYPEDGALKGEIKQRLKLKDGGHYDAEVKTTYKAKKPVQLPGAYNVNIKL | | |
| | DITSHNEDYTIVEQYERAEGRHSTGGMDELYK* | | |
| OT-001348 (IgE | MDWTWILFLVAAATRVHSNWVNVISDLKKIEDLIQSMHIDATLYTESDVHP | 8664 | 8684 |
| signal sequence; IL15 | SCKVTAMKCFLLELQVISLESGDASIHDTVENLIILANNSLSSNGNVTESGCK | | |
| (Amino acid 49-162 of | ECEELEEKNIKEFLQSFVHIVQMFINTSGSEETRELQSLAAAVVPSAQTLKITD | | |
| WT); Linker (GS); | FSFSDFELSDLETALCTIRMFTDLNLVQNFQMKHEVLCRWILSVKKNYRKNV | | |
| hPDE5 (Amino acid | AYHNWRHAFNTAQCMFAALKAGKIQNKLTDLEILALLIAALSHDLDHRGV | | |
| 535-860 of WT, | NNSYIQRSEHPLAQLYCHSIMEHHHFDQCLMILNSPGNQILSGLSIEEYKTTL | | |
| R732L, F736A); | KIIKQAILATDLALYIKRLGEFAELIRKNQFNLEDPHQKELFLAMLMTACDLS | | |
| Linker (GS); P2A | AITKPWPIQQRIAELVATEFFDQGDRERKELNIEPTDLMNREKKNKIPSMQV | | |
| peptide; mcherry; | GFIDAICLQLYEALTHVSEDCFPLLDGCRKNRQKWQALAEQQGSGATNFSLL | | |
| stop) | KQAGDVEENPGPLSKGEEDNMAIIKEFMRFKVHMEGSVNGHEFEIEGEGEG | | |
| | RPYEGTQTAKLKVTKGGPLPFAWDILSPQFMYGSKAYVKHPADIPDYLKLSF | | |
| | PEGFKWERVMNFEDGGVVTVTQDSSLQDGEFIYKVKLRGTNFPSDGPVMQ | | |
| | KKTMGWEASSERMYPEDGALKGEIKQRLKLKDGGHYDAEVKTTYKAKKP | | |
| | VQLPGAYNVNIKLDITSHNEDYTIVEQYERAEGRHSTGGMDELYK* | | |

[0396] In some embodiments, any of the hPDE5 R732 mutants described in Table 6 may be appended to immunotherapeutic payloads such as IL15, IL15Ra or cytokine-cytokine receptor fusion polypeptides such IL15 fused to IL15Ra. Any of the linkers, cleavage peptides, and tags described in Table 19 may be used to build the generate described in Table 20.

TABLE 20
IL15/IL15Ra-hPDE5 R732 constructs

| | | AA | NA |
|---|---|---|---|
| | | SEQ | SEQ |
| Construct ID (Description) | Amino Acid Sequence | ID NO | ID NO |
| OT-001327 (IgE signal | MDWTWILFLVAAATRVHSDYKDDDDKNWVNVISDLKKIEDLIQSM | 8685 | 8702 |
| sequence; Flag tag; | HIDATLYTESDVIIPSCKVTAMKCFLLELQVISLESGDASIHDTVENLI | | |
| IL15 (Amino acid 49- | ILANNSLSSNGNVTESGCKECEELEEKNIKEFLQSFVHIVQMFINTSS | | |
| 162 of WT); Linker (SG3- | GGGSGGGGSGGGGSGGGGSGGGSLQYPYDVPDYAITCPPPMSVEH | | |
| (SG4)3-SG3-SLQ (SEQ ID NO: | ADIWVKSYSLYSRERYICNSGFKRKAGTSSLTECVLNKATNVAHWT | | |
| 323)); HA tag; IL15Ra (Amino | TPSLKCIRDPALVHQRPAPPSTVTTAGVTPQPESLSPSGKEPAASSPSS | | |
| acid 31-267 of WT); Linker | NNTAATTAAIVPGSQLMPSKSPSTGTTEISSHESSHGTPSQTTAKNWE | | |
| (GSG); hPDE5 (Amino acid 535- | LTASASHQPPGVYPQGHSDTTVAISTSTVLLCGLSAVSLLACYLKSR | | |
| 860 of WT, R732I); stop) | QTPPLASVEMEAMEALPVTWGTSSRDEDLENCSHHLGSGEETRELQ | | |
| | SLAAAVVPSAQTLKITDFSFSDFELSDLETALCTIRMFTDLNLVQNFQ | | |
| | MKREVLCRWILSVKKNYRKNVAYHNWRHAFNTAQCMFAALKAG | | |
| | KIQNKLTDLEILALLIAALSHDLDHRGVNNSYIQRSEHPLAQLYCHSI | | |
| | MEHHHFDQCLMILNSPGNQILSGLSIEEYKTTLKIIKQAILATDLALYI | | |
| | KRIGEFFELIRKNQFNLEDPHQKELFLAMLMTACDLSAITKPWPIQQ | | |
| | RIAELVATEFFDQGDRERKELNIEPTDLMNREKKNKIPSMQVGFIDAI | | |
| | CLQLYEALTHVSEDCFPLLDGCRKNRQKWQALAEQQ* | | |
| OT-001328 (IgE signal | MDWTWILFLVAAATRVHSDYKDDDDKNWVNVISDLKKIEDLIQSM | 8686 | 8703 |
| sequence; Flag tag; IL15 | HIDATLYTESDVHPSCKVTAMKCFLLELQVISLESGDASIHDTVENLI | | |
| (Amino acid 49- | ILANNSLSSNGNVTESGCKECEELEEKNIKEFLQSFVHIVQMFINTSS | | |
| 162 of WT); Linker (SG3- | GGGSGGGGSGGGGSGGGGSGGGSLQYPYDVPDYAITCPPPMSVEH | | |
| (SG4)3-SG3-SLQ (SEQ ID NO: | ADIWVKSYSLYSRERYICNSGFKRKAGTSSLTECVLNKATNVAHWT | | |
| 323)); HA tag; IL15Ra (Amino | TPSLKCIRDPALVHQRPAPPSTVTTAGVTPQPESLSPSGKEPAASSPSS | | |
| acid 31-267 of WT); Linker | NNTAATTAAIVPGSQLMPSKSPSTGTTEISSHESSHGTPSQTTAKNWE | | |
| (GSG); hPDE5 (Amino acid 535- | LTASASHQPPGVYPQGHSDTTVAISTSTVLLCGLSAVSLLACYLKSR | | |
| 860 of WT, R732M); stop) | QTPPLASVEMEAMEALPVTWGTSSRDEDLENCSHHLGSGEETRELQ | | |
| | SLAAAVVPSAQTLKITDFSFSDFELSDLETALCTIRMFTDLNLVQNFQ | | |
| | MKHEVLCRWILSVKKNYRKNVAYHNWRHAFNTAQCMFAALKAG | | |
| | KIQNKLTDLEILALLIAALSHDLDHRGVNNSYIQRSEHPLAQLYCHSI | | |
| | MEHHHFDQCLMILNSPGNQILSGLSIEEYKTTLKIIKQAILATDLALYI | | |
| | KRMGEFFELIRKNQFNLEDPHQKELFLAMLMTACDLSAITKPWPIQQ | | |
| | RIAELVATEFFDQGDRERKELNIEPTDLMNREKKNKIPSMQVGFIDAI | | |
| | CLQLYEALTHVSEDCFPLLDGCRKNRQKWQALAEQQ* | | |
| OT-001329 (IgE signal sequence; | MDWTWILFLVAAATRVHSDYKDDDDKNWVNVISDLKKIEDLIQSM | 8687 | 8704 |
| Flag tag; IL15 (Amino acid 49- | HIDATLYTESDVHPSCKVTAMKCFLLELQVISLESGDASIHDTVENLI | | |
| 162 of WT); Linker (SG3- | ILANNSLSSNGNVTESGCKECEELEEKNIKEFLQSFVHIVQMFINTSS | | |
| (SG4)3-SG3-SLQ (SEQ ID NO: | GGGSGGGGSGGGGSGGGGSGGGSLQYPYDVPDYAITCPPPMSVEH | | |
| 323)); HA tag; IL15Ra (Amino | ADIWVKSYSLYSRERVICNSGFKRKAGTSSLTECVLNKATNVAHWT | | |
| acid 31-267 of WT); Linker | TPSLKCIRDPALVHQRPAPPSTVTTAGVTPQPESLSPSGKEPAASSPSS | | |
| (GSG); hPDE5 (Amino acid 535- | NNTAATTAAIVPGSQLMPSKSPSTGTTEISSHESSHGTPSQTTAKNWE | | |
| 860 of WT, R732V); stop) | LTASASHQPPGVYPQGHSDTTVAISTSTVLLCGLSAVSLLACYLKSR | | |
| | QTPPLASVEMEAMEALPVTWGTSSRDEDLENCSHHLGSGEETRELQ | | |
| | SLAAAVVPSAQTLKITDFSFSDFELSDLETALCTIRMFTDLNLVQNFQ | | |
| | MKHEVLCRWILSVKKNYRKNVAYHNWRHAFNTAQCMFAALKAG | | |
| | KIQNKLTDLEILALLIAALSHDLDHRGVNNSYIQRSEHPLAQLYCHSI | | |
| | MEHHHFDQCLMILNSPGNQILSGLSIEEYKTTLKIIKQAILATDLALYI | | |
| | KRVGEFFELIRKNQFNLEDPHQKELFLAMLMTACDLSAITKPWPIQQ | | |
| | RIAELVATEFFDQGDRERKELNIEPTDLMNREKKNKIPSMQVGFIDAI | | |
| | CLQLYEALTHVSEDCFPLLDGCRKNRQKWQALAEQQ* | | |
| OT-001330 (IgE signal sequence; | MDWTWILFLVAAATRVHSDYKDDDDKNWVNVISDLKKIEDLIQSM | 8688 | 8705 |
| Flag tag; IL15 (Amino acid 49- | HIDATLYTESDVHPSCKVTAMKCFLLELQVISLESGDASIHDTVENLI | | |
| 162 of WT); Linker (SG3- | ILANNSLSSNGNVTESGCKECEELEEKNIKEFLQSFVHIVQMFINTSS | | |
| (SG4)3-SG3-SLQ (SEQ ID NO: | GGGSGGGGSGGGGSGGGGSGGGSLQYPYDVPDYAITCPPPMSVEH | | |
| 323)); HA tag; IL15Ra (Amino | ADIWVKSYSLYSRERYICNSGFKRKAGTSSLTECVLNKATNVAHWT | | |
| acid 31-267 of WT); Linker | TPSLKCIRDPALVHQRPAPPSTVTTAGVTPQPESLSPSGKEPAASSPSS | | |
| (GSG); hPDE5 (Amino acid 535- | NNTAATTAAIVPGSQLMPSKSPSTGTTEISSHESSHGTPSQTTAKNWE | | |
| 860 of WT, R732S); stop) | LTASASHQPPGVYPQGHSDTTVAISTSTVLLCGLSAVSLLACYLKSR | | |
| | QTPPLASVEMEAMEALPVTWGTSSRDEDLENCSHHLGSGEETRELQ | | |
| | SLAAAVVPSAQTLKITDFSFSDFELSDLETALCTIRMFTDLNLVQNFQ | | |
| | MKHEVLCRWILSVKKNYRKNVAYHNWRHAFNTAQCMFAALKAG | | |
| | KIQNKLTDLEILALLIAALSHDLDHRGVNNSYIQRSEHPLAQLYCHSI | | |
| | MEHHHFDQCLMILNSPGNQILSGLSIEEYKTTLKIIKQAILATDLALYI | | |
| | KRSGEFFELIRKNQFNLEDPHQKELFLAMLMTACDLSAITKPWPIQQ | | |
| | RIAELVATEFFDQGDRERKELNIEPTDLMNREKKNKIPSMQVGFIDAI | | |
| | CLQLYEALTHVSEDCFPLLDGCRKNRQKWQALAEQQ* | | |
| OT-001331 (IgE signal sequence; | MDWTWILFLVAAATRVHSDYKDDDDKNWVNVISDLKKIEDLIQSM | 8689 | 8706 |
| Flag tag; IL15 (Amino acid 49- | HIDATLYTESDVHPSCKVTAMKCFLLELQVISLESGDASIHDTVENLI | | |
| 162 of WT); Linker (SG3- | ILANNSLSSNGNVTESGCKECEELEEKNIKEFLQSFVHIVQMFINTSS | | |
| (SG4)3-SG3-SLQ (SEQ ID NO: | GGGSGGGGSGGGGSGGGGSGGGSLQYPYDVPDYAITCPPPMSVEH | | |
| 323)); HA tag; IL15Ra (Amino | ADIWVKSYSLYSRERYICNSGFKRKAGTSSLTECVLNKATNVAHWT | | |
| acid 31-267 of WT); Linker | TPSLKCIRDPALVHQRPAPPSTVTTAGVTPQPESLSPSGKEPAASSPSS | | |
| (GSG); hPDE5 (Amino acid 535- | NNTAATTAAIVPGSQLMPSKSPSTGTTEISSHESSHGTPSQTTAKNWE | | |
| 860 of WT, R732P); stop) | LTASASHQPPGVYPQGHSDTTVAISTSTVLLCGLSAVSLLACYLKSR | | |
| | QTPPLASVEMEAMEALPVTWGTSSRDEDLENCSHHLGSGEETRELQ | | |
| | SLAAAVVPSAQTLKITDFSFSDFELSDLETALCTIRMFTDLNLVQNFQ | | |
| | MKHEVLCRWILSVKKNYRKNVAYHNWRHAFNTAQCMFAALKAG | | |
| | KIQNKLTDLEILALLIAALSHDLDHRGVNNSYIQRSEHPLAQLYCHSI | | |
| | MEHHHFDQCLMILNSPGNQILSGLSIEEYKTTLKIIKQAILATDLALYI | | |
| | KRPGEFFELIRKNQFNLEDPHQKELFLAMLMTACDLSAITKPWPIQQ | | |
| | RIAELVATEFFDQGDRERKELNIEPTDLMNREKKNKIPSMQVGFIDAI | | |
| | CLQLYEALTHVSEDCFPLLDGCRKNRQKWQALAEQQ* | | |
| OT-001332 (IgE signal sequence; | MDWTWILFLVAAATRVHSDYKDDDDKNWVNVISDLKKIEDLIQSM | 8690 | 8707 |
| Flag tag; IL15 (Amino acid 49- | HIDATLYTESDVHPSCKVTAMKCFLLELQVISLESGDASIHDTVENLI | | |
| 162 of WT); Linker (SG3- | ILANNSLSSNGNVTESGCKECEELEEKNIKEFLQSFVHIVQMFINTSS | | |
| (SG4)3-SG3-SLQ (SEQ ID NO: | GGGSGGGGSGGGGSGGGGSGGGSLQYPYDVPDYAITCPPPMSVEH | | |
| 323)); HA tag; IL15Ra (Amino | ADIWVKSYSLYSRERYICNSGFKRKAGTSSLTECVLNKATNVAHWT | | |
| acid 31-267 of WT); Linker | TPSLKCIRDPALVHQRPAPPSTVTTAGVTPQPESLSPSGKEPAASSPSS | | |
| (GSG); hPDE5 (Amino acid 535- | NNTAATTAAIVPGSQLMPSKSPSTGTTEISSHESSHGTPSQTTAKNWE | | |
| 860 of WT, R732A); stop) | LTASASHQPPGVYPQGHSDTTVAISTSTVLLCGLSAVSLLACYLKSR | | |
| | QTPPLASVEMEAMEALPVTWGTSSRDEDLENCSHHLGSGEETRELQ | | |
| | SLAAAVVPSAQTLKITDFSFSDFELSDLETALCTIRMFTDLNLVQNFQ | | |
| | MKHEVLCRWILSVKKNYRKNVAYHNWRHAFNTAQCMFAALKAG | | |
| | KIQNKLTDLEILALLIAALSHDLDHRGVNNSYIQRSEHPLAQLYCHSI | | |
| | MEHHHFDQCLMILNSPGNQILSGLSIEEYKTTLKIIKQAILATDLALYI | | |
| | KRAGEFFEURKNQFNLEDPHQKELFLAMLMTACDLSAITKPWPIQQ | | |
| | RIAELVATEFFDQGDRERKELNIEPTDLMNREKKNKIPSMQVGFIDAI | | |
| | CLQLYEALTHVSEDCFPLLDGCRKNRQKWQALAEQQ* | | |
| OT-001333 (IgE signal sequence; | MDWTWILFLVAAATRVHSDYKDDDDKNWVNVISDLKKIEDLIQSM | 8691 | 8708 |
| Flag tag; IL15 (Amino acid 49- | HIDATLYTESDVHPSCKVTAMKCFLLELQVISLESGDASIHDTVENLI | | |
| 162 of WT); Linker (SG3- | ILANNSLSSNGNVTESGCKECEELEEKNIKEFLQSFVHIVQMFINTSS | | |
| (SG4)3-SG3-SLQ (SEQ ID NO: | GGGSGGGGSGGGGSGGGGSGGGSLQYPYDVPDYAITCPPPMSVEH | | |
| 323)); HA tag; IL15Ra (Amino | ADIWVKSYSLYSRERYICNSGFKRKAGTSSLTECVLNKATNVAHWT | | |
| acid 31-267 of WT); Linker | TPSLKCIRDPALVHQRPAPPSTVTTAGVTPQPESLSPSGKEPAASSPSS | | |
| (GSG); hPDE5 (Amino acid 535- | NNTAATTAAIVPGSQLMPSKSPSTGTTEISSHESSHGTPSQTTAKNWE | | |
| 860 of WT, R732Y); stop) | LTASASHQPPGVYPQGHSDTTVAISTSTVLLCGLSAVSLLACYLKSR | | |
| | QTPPLASVEMEAMEALPVTWGTSSRDEDLENCSHHLGSGEETRELQ | | |
| | SLAAAVVPSAQTLKITDFSFSDFELSDLETALCTIRMFTDLNLVQNFQ | | |
| | MKHEVLCRWILSVKKNYRKNVAYHNWRHAFNTAQCMFAALKAG | | |
| | KIQNKLTDLEILALLIAALSHDLDHRGVNNSYIQRSEHPLAQLYCHSI | | |
| | MEHHHFDQCLMILNSPGNQILSGLSIEEYKTTLKIIKQAILATDLALYI | | |
| | KRYGEFFELIRKNQFNLEDPHQKELFLAMLMTACDLSAITKPWPIQQ | | |
| | RIAELVATEFFDQGDRERKELNIEPTDLMNREKKNKIPSMQVGFIDAI | | |
| | CLQLYEALTHVSEDCFPLLDGCRKNRQKWQALAEQQ* | | |
| OT-001334 (IgE signal sequence; | MDWTWILFLVAAATRVHSDYKDDDDKNWVNVISDLKKIEDLIQSM | 8692 | 8709 |
| Flag tag; IL15 (Amino acid 49- | HIDATLYTESDVHPSCKVTAMKCFLLELQVISLESGDASIHDTVENLI | | |
| 162 of WT); Linker (SG3- | ILANNSLSSNGNVTESGCKECEELEEKNIKEFLQSFVHIVQMFINTSS | | |
| (SG4)3-SG3-SLQ (SEQ ID NO: | GGGSGGGGSGGGGSGGGGSGGGSLQYPYDVPDYAITCPPPMSVEH | | |
| 323)); HA tag; IL15Ra (Amino | ADIWVKSYSLYSRERYICNSGFKRKAGTSSLTECVLNKATNVAHWT | | |
| acid 31-267 of WT); Linker | TPSLKCIRDPALVHQRPAPPSTVTTAGVTPQPESLSPSGKEPAASSPSS | | |
| (GSG); hPDE5 (Amino acid 535- | NNTAATTAAIVPGSQLMPSKSPSTGTTEISSHESSHGTPSQTTAKNWE | | |
| 860 of WT, R732H); stop) | LTASASHQPPGVYPQGHSDTTVAISTSTVLLCGLSAVSLLACYLKSR | | |
| | QTPPLASVEMEAMEALPVTWGTSSRDEDLENCSHHLGSGEETRELQ | | |
| | SLAAAVVPSAQTLKITDFSFSDFELSDLETALCTIRMFTDLNLVQNFQ | | |
| | MKHEVLCRWILSVKKNYRKNVAYHNWRHAFNTAQCMFAALKAG | | |
| | KIQNKLTDLEILALLIAALSHDLDHRGVNNSYIQRSEHPLAQLYCHSI | | |
| | MEHHHFDQCLMILNSPGNQILSGLSIEEYKTTLKIIKQAILATDLALYI | | |
| | KRHGEFFELIRKNQFNLEDPHQKELFLAMLMTACDLSAITKPWPIQQ | | |
| | RIAELVATEFFDQGDRERKELNIEPTDLMNREKKNKIPSMQVGFIDAI | | |
| | CLQLYEALTHVSEDCFPLLDGCRKNRQKWQALAEQQ* | | |
| OT-001335 (IgE signal sequence; | MDWTWILFLVAAATRVHSDYKDDDDKNWVNVISDLKKIEDLIQSM | 8693 | 8710 |
| Flag tag; IL15 (Amino acid 49- | HIDATLYTESDVHPSCKVTAMKCFLLELQVISLESGDASIHDTVENLI | | |
| 162 of WT); Linker (SG3- | ILANNSLSSNGNVTESGCKECEELEEKNIKEFLQSFVHIVQMFINTSS | | |
| (SG4)3-SG3-SLQ (SEQ ID NO: | GGGSGGGGSGGGGSGGGGSGGGSLQYPYDVPDYAITCPPPMSVEH | | |
| 323)); HA tag; IL15Ra (Amino | ADIWVKSYSLYSRERYICNSGFKRKAGTSSLTECVLNKATNVAHWT | | |
| acid 31-267 of WT); Linker | TPSLKCIRDPALVHQRPAPPSTVTTAGVTPQPESLSPSGKEPAASSPSS | | |
| (GSG); hPDE5 (Amino acid 535- | NNTAATTAAIVPGSQLMPSKSPSTGTTEISSHESSHGTPSQTTAKNWE | | |
| 860 of WT, R732Q); stop) | LTASASHQPPGVYPQGHSDTTVAISTSTVLLCGLSAVSLLACYLKSR | | |
| | QTPPLASVEMEAMEALPVTWGTSSRDEDLENCSHHLGSGEETRELQ | | |
| | SLAAAVVPSAQTLKITDFSFSDFELSDLETALCTIRMFTDLNLVQNFQ | | |
| | MKHEVLCRWILSVKKNYRKNVAYHNWRHAFNTAQCMFAALKAG | | |
| | KIQNKLTDLEILALLIAALSHDLDHRGVNNSYIQRSEHPLAQLYCHSI | | |
| | MEHHHFDQCLMILNSPGNQILSGLSIEEYKTTLKIIKQAILATDLALYI | | |
| | KRQGEFFELIRKNQFNLEDPHQKELFLAMLMTACDLSAITKPWPIQQ | | |
| | RIAELVATEFFDQGDRERKELNIEPTDLMNREKKNKIPSMQVGFIDAI | | |
| | CLQLYEALTHVSEDCFPLLDGCRKNRQKWQALAEQQ* | | |
| OT-001336 (IgE signal sequence; | MDWTWILFLVAAATRVHSDYKDDDDKNWVNVISDLKKIEDLIQSM | 8694 | 8711 |
| Flag tag; IL15 (Amino acid 49- | HIDATLYTESDVHPSCKVTAMKCFLLELQVISLESGDASIHDTVENLI | | |
| 162 of WT); Linker (SG3- | ILANNSLSSNGNVTESGCKECEELEEKNIKEFLQSFVHIVQMFINTSS | | |
| (SG4)3-SG3-SLQ (SEQ ID NO: | GGGSGGGGSGGGGSGGGGSGGGSLQYPYDVPDYAITCPPPMSVEH | | |
| 323)); HA tag; IL15Ra (Amino | ADIWVKSYSLYSRERYICNSGFKRKAGTSSLTECVLNKATNVAHWT | | |
| acid 31-267 of WT); Linker | TPSLKCIRDPALVHQRPAPPSTVTTAGVTPQPESLSPSGKEPAASSPSS | | |
| (GSG); hPDE5 (Amino acid 535- | NNTAATTAAIVPGSQLMPSKSPSTGTTEISSHESSHGTPSQTTAKNWE | | |
| 860 of WT, R732N); stop) | LTASASHQPPGVYPQGHSDTTVAISTSTVLLCGLSAVSLLACYLKSR | | |
| | QTPPLASVEMEAMEALPVTWGTSSRDEDLENCSHHLGSGEETRELQ | | |
| | SLAAAVVPSAQTLKITDFSFSDFELSDLETALCTIRMFTDLNLVQNFQ | | |
| | MKHEVLCRWILSVKKNYRKNVAYHNWRHAFNTAQCMFAALKAG | | |
| | KIQNKLTDLEILALLIAALSHDLDHRGVNNSYIQRSEHPLAQLYCHSI | | |
| | MEHHHFDQCLMILNSPGNQILSGLSIEEYKTTLKIIKQAILATDLALYI | | |
| | KRNGEFFELIRKNQFNLEDPHQKELFLAMLMTACDLSAITKPWPIQQ | | |
| | RIAELVATEFFDQGDRERKELNIEPTDLMNREKKNKIPSMQVGFIDAI | | |
| | CLQLYEALTHVSEDCFPLLDGCRKNRQKWQALAEQQ* | | |
| OT-001337 (IgE signal sequence; | MDWTWILFLVAAATRVHSDYKDDDDKNWVNVISDLKKIEDLIQSM | 8695 | 8712 |
| Flag tag; IL15 (Amino acid 49- | HIDATLYTESDVHPSCKVTAMKCFLLELQVISLESGDASIHDTVENLI | | |
| 162 of WT); Linker (SG3- | ILANNSLSSNGNVTESGCKECEELEEKNIKEFLQSFVHIVQMFINTSS | | |
| (SG4)3-SG3-SLQ (SEQ ID NO: | GGGSGGGGSGGGGSGGGGSGGGSLQYPYDVPDYAITCPPPMSVEH | | |
| 323)); HA tag; IL15Ra (Amino | ADIWVKSYSLYSRERYICNSGFKRKAGTSSLTECVLNKATNVAHWT | | |
| acid 31-267 of WT); Linker | TPSLKCIRDPALVHQRPAPPSTVTTAGVTPQPESLSPSGKEPAASSPSS | | |
| (GSG); hPDE5 (Amino acid 535- | NNTAATTAAIVPGSQLMPSKSPSTGTTEISSHESSHGTPSQTTAKNWE | | |
| 860 of WT, R732K); stop) | LTASASHQPPGVYPQGHSDTTVAISTSTVLLCGLSAVSLLACYLKSR | | |
| | QTPPLASVEMEAMEALPVTWGTSSRDEDLENCSHHLGSGEETRELQ | | |
| | SLAAAVVPSAQTLKITDFSFSDFELSDLETALCTIRMFTDLNLVQNFQ | | |
| | MKHEVLCRWILSVKKNYRKNVAYHNWRHAFNTAQCMFAALKAG | | |
| | KIQNKLTDLEILALLIAALSHDLDHRGVNNSYIQRSEHPLAQLYCHSI | | |
| | MEHHHFDQCLMILNSPGNQILSGLSIEEYKTTLKIIKQAILATDLALYI | | |
| | KRKGEFFELIRKNQFNLEDPHQKELFLAMLMTACDLSAITKPWPIQQ | | |
| | RIAELVATEFFDQGDRERKELNIEPTDLMNREKKNKIPSMQVGFIDAI | | |
| | CLQLYEALTHVSEDCFPLLDGCRKNRQKWQALAEQQ* | | |
| OT-001338 (IgE signal sequence; | MDWTWILFLVAAATRVHSDYKDDDDKNWVNVISDLKKIEDLIQSM | 8696 | 8713 |
| Flag tag; IL15 (Amino acid 49- | HIDATLYTESDVHPSCKVTAMKCFLLELQVISLESGDASIHDTVENLI | | |
| 162 of WT); Linker (SG3- | ILANNSLSSNGNVTESGCKECEELEEKNIKEFLQSFVHIVQMFINTSS | | |
| (SG4)3-SG3-SLQ (SEQ ID NO: | GGGSGGGGSGGGGSGGGGSGGGSLQYPYDVPDYAITCPPPMSVEH | | |
| 323)); HA tag; IL15Ra (Amino | ADIWVKSYSLYSRERYICNSGFKRKAGTSSLTECVLNKATNVAHWT | | |
| acid 31-267 of WT); Linker | TPSLKCIRDPALVHQRPAPPSTVTTAGVTPQPESLSPSGKEPAASSPSS | | |
| (GSG); hPDE5 (Amino acid 535- | NNTAATTAAIVPGSQLMPSKSPSTGTTEISSHESSHGTPSQTTAKNWE | | |
| 860 of WT, R732D); stop) | LTASASHQPPGVYPQGHSDTTVAISTSTVLLCGLSAVSLLACYLKSR | | |
| | QTPPLASVEMEAMEALPVTWGTSSRDEDLENCSHHLGSGEETRELQ | | |
| | SLAAAVVPSAQTLKITDFSFSDFELSDLETALCTIRMFTDLNLVQNFQ | | |
| | MKHEVLCRWILSVKKNYRKNVAYHNWRHAFNTAQCMFAALKAG | | |
| | KIQNKLTDLEILALLIAALSHDLDHRGVNNSYIQRSEHPLAQLYCHSI | | |
| | MEHHHFDQCLMILNSPGNQILSGLSIEEYKTTLKIIKQAILATDLALYI | | |
| | KRDGEFFELIRKNQFNLEDPHQKELFLAMLMTACDLSAITKPWPIQQ | | |
| | RIAELVATEFFDQGDRERKELNIEPTDLMNREKKNKIPSMQVGFIDAI | | |
| | CLQLYEALTHVSEDCFPLLDGCRKNRQKWQALAEQQ* | | |
| OT-001339 (IgE signal sequence; | MDWTWILFLVAAATRVHSDYKDDDDKNWVNVISDLKKIEDLIQSM | 8697 | 8714 |
| Flag tag; IL15 (Amino acid 49- | HIDATLYTESDVHPSCKVTAMKCFLLELQVISLESGDASIHDTVENLI | | |
| 162 of WT); Linker (SG3- | ILANNSLSSNGNVTESGCKECEELEEKNIKEFLQSFVHIVQMFINTSS | | |
| (SG4)3-SG3-SLQ (SEQ ID NO: | GGGSGGGGSGGGGSGGGGSGGGSLQYPYDVPDYAITCPPPMSVEH | | |
| 323)); HA tag; IL15Ra (Amino | ADIWVKSYSLYSRERYICNSGFKRKAGTSSLTECVLNKATNVAHWT | | |
| acid 31-267 of WT); Linker | TPSLKCIRDPALVHQRPAPPSTVTTAGVTPQPESLSPSGKEPAASSPSS | | |
| (GSG); hPDE5 (Amino acid 535- | NNTAATTAAIVPGSQLMPSKSPSTGTTEISSHESSHGTPSQTTAKNWE | | |
| 860 of WT, R732E); stop) | LTASASHQPPGVYPQGHSDTTVAISTSTVLLCGLSAVSLLACYLKSR | | |
| | QTPPLASVEMEAMEALPVTWGTSSRDEDLENCSHHLGSGEETRELQ | | |
| | SLAAAVVPSAQTLKITDFSFSDFELSDLETALCTIRMFTDLNLVQNFQ | | |
| | MKHEVLCRWILSVKKNYRKNVAYHNWRHAFNTAQCMFAALKAG | | |
| | KIQNKLTDLEILALLIAALSHDLDHRGVNNSYIQRSEHPLAQLYCHSI | | |
| | MEHHHFDQCLMILNSPGNQILSGLSIEEYKTTLKIIKQAILATDLALYI | | |
| | KREGEFFELIRKNQFNLEDPHQKELFLAMLMTACDLSAITKPWPIQQ | | |
| | RIAELVATEFFDQGDRERKELNIEPTDLMNREKKNKIPSMQVGFIDAI | | |
| | CLQLYEALTHVSEDCFPLLDGCRKNRQKWQALAEQQ* | | |
| OT-001340 (IgE signal sequence; | MDWTWILFLVAAATRVHSDYKDDDDKNWVNVISDLKKIEDLIQSM | 8698 | 8715 |
| Flag tag; IL15 (Amino acid 49- | HIDATLYTESDVHPSCKVTAMKCFLLELQVISLESGDASIHDTVENLI | | |
| 162 of WT); Linker (SG3- | ILANNSLSSNGNVTESGCKECEELEEKNIKEFLQSFVHIVQMFINTSS | | |
| (SG4)3-SG3-SLQ (SEQ ID NO: | GGGSGGGGSGGGGSGGGGSGGGSLQYPYDVPDYAITCPPPMSVEH | | |
| 323)); HA tag; IL15Ra (Amino | ADIWVKSYSLYSRERYICNSGFKRKAGTSSLTECVLNKATNVAHWT | | |
| acid 31-267 of WT); Linker | TPSLKCIRDPALVHQRPAPPSTVTTAGVTPQPESLSPSGKEPAASSPSS | | |
| (GSG); hPDE5 (Amino acid 535- | NNTAATTAAIVPGSQLMPSKSPSTGTTEISSHESSHGTPSQTTAKNWE | | |
| 860 of WT, R732C); stop) | LTASASHQPPGVYPQGHSDTTVAISTSTVLLCGLSAVSLLACYLKSR | | |
| | QTPPLASVEMEAMEALPVTWGTSSRDEDLENCSHHLGSGEETRELQ | | |
| | SLAAAVVPSAQTLKITDFSFSDFELSDLETALCTIRMFTDLNLVQNFQ | | |
| | MKHEVLCRWILSVKKNYRKNVAYHNWRHAFNTAQCMFAALKAG | | |
| | KIQNKLTDLEILALLIAALSHDLDHRGVNNSYIQRSEHPLAQLYCHSI | | |
| | MEHHHFDQCLMILNSPGNQILSGLSIEEYKTTLKIIKQAILATDLALYI | | |
| | KRCGEFFELIRKNQFNLEDPHQKELFLAMLMTACDLSAITKPWPIQQ | | |
| | RIAELVATEFFDQGDRERKELNIEPTDLMNREKKNKIPSMQVGFIDAI | | |
| | CLQLYEALTHVSEDCFPLLDGCRKNRQKWQALAEQQ* | | |
| OT-001341 (IgE signal sequence; | MDWTWILFLVAAATRVHSDYKDDDDKNWVNVISDLKKIEDLIQSM | 8699 | 8716 |
| Flag tag; IL15 (Amino acid 49- | HIDATLYTESDVHPSCKVTAMKCFLLELQVISLESGDASIHDTVENLI | | |
| 162 of WT); Linker (SG3- | ILANNSLSSNGNVTESGCKECEELEEKNIKEFLQSFVHIVQMFINTSS | | |
| (SG4)3-SG3-SLQ (SEQ ID NO: | GGGSGGGGSGGGGSGGGGSGGGSLQYPYDVPDYAITCPPPMSVEH | | |
| 323)); HA tag; IL15Ra (Amino | ADIWVKSYSLYSRERYICNSGFKRKAGTSSLTECVLNKATNVAHWT | | |
| acid 31-267 of WT); Linker | TPSLKCIRDPALVHQRPAPPSTVTTAGVTPQPESLSPSGKEPAASSPSS | | |
| (GSG); hPDE5 (Amino acid 535- | NNTAATTAAIVPGSQLMPSKSPSTGTTEISSHESSHGTPSQTTAKNWE | | |
| 860 of WT, R732G); stop) | LTASASHQPPGVYPQGHSDTTVAISTSTVLLCGLSAVSLLACYLKSR | | |
| | QTPPLASVEMEAMEALPVTWGTSSRDEDLENCSHHLGSGEETRELQ | | |
| | SLAAAVVPSAQTLKITDFSFSDFELSDLETALCTIRMFTDLNLVQNFQ | | |
| | MKHEVLCRWILSVKKNYRKNVAYHNWRHAFNTAQCMFAALKAG | | |
| | KIQNKLTDLEILALLIAALSHDLDHRGVNNSYIQRSEHPLAQLYCHSI | | |
| | MEHHHFDQCLMILNSPGNQILSGLSIEEYKTTLKIIKQAILATDLALYI | | |
| | KRGGEFFELIRKNQFNLEDPHQKELFLAMLMTACDLSAITKPWPIQQ | | |
| | RIAELVATEFFDQGDRERKELNIEPTDLMNREKKNKIPSMQVGFIDAI | | |
| | CLQLYEALTHVSEDCFPLLDGCRKNRQKWQALAEQQ* | | |
| OT-001342 (IgE signal sequence; | MDWTWILFLVAAATRVHSDYKDDDDKNWVNVISDLKKIEDLIQSM | 8700 | 8717 |
| Flag tag; IL15 (Amino acid 49- | HIDATLYTESDVHPSCKVTAMKCFLLELQVISLESGDASIHDTVENLI | | |
| 162 of WT); Linker (SG3- | ILANNSLSSNGNVTESGCKECEELEEKNIKEFLQSFVHIVQMFINTSS | | |
| (SG4)3-SG3-SLQ (SEQ ID NO: | GGGSGGGGSGGGGSGGGGSGGGSLQYPYDVPDYAITCPPPMSVEH | | |
| 323)); HA tag; IL15Ra (Amino | ADIWVKSYSLYSRERYICNSGFKRKAGTSSLTECVLNKATNVAHWT | | |
| acid 31-267 of WT); Linker | TPSLKCIRDPALVHQRPAPPSTVTTAGVTPQPESLSPSGKEPAASSPSS | | |
| (GSG); hPDE5 (Amino acid 535- | NNTAATTAAIVPGSQLMPSKSPSTGTTEISSHESSHGTPSQTTAKNWE | | |
| 860 of WT, R732W); stop) | LTASASHQPPGVYPQGHSDTTVAISTSTVLLCGLSAVSLLACYLKSR | | |
| | QTPPLASVEMEAMEALPVTWGTSSRDEDLENCSHHLGSGEETRELQ | | |
| | SLAAAVVPSAQTLKITDFSFSDFELSDLETALCTIRMFTDLNLVQNFQ | | |
| | MKHEVLCRWILSVKKNYRKNVAYHNWRHAFNTAQCMFAALKAG | | |
| | KIQNKLTDLEILALLIAALSHDLDHRGVNNSYIQRSEHPLAQLYCHSI | | |
| | MEHHHFDQCLMILNSPGNQILSGLSIEEYKTTLKIIKQAILATDLALYI | | |
| | KRWGEFFELIRKNQFNLEDPHQKELFLAMLMTACDLSAITKPWPIQQ | | |
| | RIAELVATEFFDQGDRERKELNIEPTDLMNREKKNKIPSMQVGFIDAI | | |
| | CLQLYEALTHVSEDCFPLLDGCRKNRQKWQALAEQQ* | | |
| OT-001343 (IgE signal sequence; | MDWTWILFLVAAATRVHSDYKDDDDKNWVNVISDLKKIEDLIQSM | 8701 | 8718 |
| Flag tag; IL15 (Amino acid 49- | HIDATLYTESDVHPSCKVTAMKCFLLELQVISLESGDASIHDTVENLI | | |
| 162 of WT); Linker (SG3- | ILANNSLSSNGNVTESGCKECEELEEKNIKEFLQSFVHIVQMFINTSS | | |
| (SG4)3-SG3-SLQ (SEQ ID NO: | GGGSGGGGSGGGGSGGGGSGGGSLQYPYDVPDYAITCPPPMSVEH | | |
| 323)); HA tag; IL15Ra (Amino | ADIWVKSYSLYSRERYICNSGFKRKAGTSSLTECVLNKATNVAHWT | | |
| acid 31-267 of WT); Linker | TPSLKCIRDPALVHQRPAPPSTVTTAGVTPQPESLSPSGKEPAASSPSS | | |
| (GSG); hPDE5 (Amino acid 535- | NNTAATTAAIVPGSQLMPSKSPSTGTTEISSHESSHGTPSQTTAKNWE | | |
| 860 of WT, R732T); stop) | LTASASHQPPGVYPQGHSDTTVAISTSTVLLCGLSAVSLLACYLKSR | | |
| | QTPPLASVEMEAMEALPVTWGTSSRDEDLENCSHHLGSGEETRELQ | | |
| | SLAAAVVPSAQTLKITDFSFSDFELSDLETALCTIRMFTDLNLVQNFQ | | |
| | MKHEVLCRWILSVKKNYRKNVAYHNWRHAFNTAQCMFAALKAG | | |
| | KIQNKLTDLEILALLIAALSHDLDHRGVNNSYIQRSEHPLAQLYCHSI | | |
| | MEHHHFDQCLMILNSPGNQILSGLSIEEYKTTLKIIKQAILATDLALYI | | |
| | KRTGEFFELIRKNQFNLEDPHQKELFLAMLMTACDLSAITKPWPIQQ | | |
| | RIAELVATEFFDQGDRERKELNIEPTDLMNREKKNKIPSMQVGFIDAI | | |
| | CLQLYEALTHVSEDCFPLLDGCRKNRQKWQALAEQQ* | | |

[0397] In some embodiments, the sequences described in Table 19, may contain an additional stop codon. For example, the construct “hPDE5 (Amino acid 535-860 of WT, R732L); stop” may be encoded by the nucleotide sequence of SEQ ID NO: 8362, and the construct “hPDE5 (Amino acid 535-860 of WT, R732L, F736A); stop” may be encoded by the nucleotide sequence of SEQ ID NO: 8363.

[0398] In one embodiment, the payload of the present disclosure may comprise IL18. IL18 is a proinflammatory and immune regulatory cytokine that promotes IFN γ production by T and NK cells. IL18 belongs to the IL1 family. Secreted IL18 binds to a heterodimer receptor complex, consisting of IL18Rα and β-chains and initiates signal transduction. IL18 acts in concert with other cytokines to modulate immune system functions, including induction of IFN γ production, Th1 responses, and NK cell activation in response to pathogen products. IL18 showed anti-cancer effects in several tumors. Administration of recombinant IL18 protein or IL18 transgene induces melanoma or sarcoma regression through the activation of CD4⁺ T and/or NK cell-mediated responses (reviewed by Srivastava et al., Curr. Med. Chem., 2010, 17: 3353-3357). The combination of IL18 with other cytokines, such as IL12 or co-stimulatory molecules (e.g., CD80) increases IL18 anti-tumor effects. For example, IL18 and IL12A/B or CD80 genes have been integrated successfully in the genome of oncolytic viruses, with the aim to trigger synergistically T cell-mediated anti-tumor immune responses (Choi et al., Gene Ther., 2011, 18: 898-909). IL2/IL18 fusion proteins also display enhanced anti-tumor properties relative to either cytokine alone and low toxicity in preclinical models (Acres et al., Cancer Res., 2005, 65:9536-9546).

[0399] IL18 alone, or in combination of IL12 and IL15, activates NK cells. Preclinical studies have demonstrated that adoptively transferred IL12, IL15 and IL18 pre-activated NK cells display enhanced effector function against established tumors in vivo (Ni et al., J Exp Med. 2012, 209: 2351-2365; and Romee et al., Blood. 2012, 120:4751-4760). Human IL12/IL15/IL18 activated NK cells also display memory-like features and secrete more IFN yin response to cytokines (e.g., low concentration of IL2). In one embodiment, the effector module of the present disclosure may be a DD-IL18 fusion polypeptide.

[0400] In one embodiment, the payload of the present disclosure may comprise IL21. IL21 is another pleiotropic type I cytokine that is produced mainly by T cells and natural killer T (NKT) cells. IL21 has diverse effects on a variety of cell types including but not limited to CD4⁺ and CD8⁺ T cells, B cells, macrophages, monocytes, and dendritic cells (DCs). The functional receptor for IL21 is composed of IL21 receptor (IL21R) and the common cytokine receptor gamma chain, which is also a subunit of the receptors for IL2, IL4, IL7, IL9 and IL15. Studies provide compelling evidence that IL21 is a promising immunotherapeutic agent for cancer immunotherapy. IL21 promotes maturation, enhances cytotoxicity, and induces production of IFN γ and perforin by NK cells. These effector functions inhibit the growth of B16 melanoma (Kasaian et al., Immunity. 2002, 16(4):559-569; and Brady et al., J Immunol. 2004, 172(4):2048-2058). IL21 together with IL15 expands antigen-specific CD8⁺ T-cell numbers and their effector function, resulting in tumor regression (Zeng et al., J Exp Med. 2005, 201(1):139-148). IL21 may also be used to rejuvenate multiple immune effector cells in the tumor microenvironment. IL21 may also directly induce apoptosis in certain types of lymphoma such as diffuse large B-cell lymphoma, mantle cell lymphoma, and chronic lymphocytic leukemia cells, via activation of STAT3 or STAT1 signal pathway. IL21, alone or in combination with anti-CD20 mAb (rituximab) can activate NK cell-dependent cytotoxic effects. Interestingly, discovery of the immunosuppressive actions of IL21 suggests that this cytokine is a “double-edged sword”-IL21 stimulation may lead to either the induction or suppression of immune responses. Both stimulatory and suppressive effects of IL21 must be considered when using IL21-related immunotherapeutic agents. The level of IL21 needs to be tightly controlled by regulatory elements. In one aspect, the effector module of the present disclosure may be a DD-IL21 fusion polypeptide.

[0401] In some embodiments, payloads of the present disclosure may comprise type I interferons. Type I interferons (IFNs-I) are soluble proteins important for fighting viral infection in humans IFNs-I include IFN alpha subtypes (IFN α1, IFN α1b, IFN α1c), IFN beta, IFN delta subtypes (IFN delta 1, IFN delta 2, IFN delta 8), IFN gamma, IFN kappa, and IFN epsilon, IFN lambda, IFN omega, IFN tau and IFN zeta. IFN α and IFN β are the main IFN I subtypes in immune responses. All subtypes of IFN I signal through a unique heterodimeric receptor, interferon alpha receptor (IFNAR), composed of 2 subunits, IFNAR1 and IFNAR2. IFNR activation regulates the host response to viral infections and in adaptive immunity Several signaling cascades can be activated by IFNR, including the Janus activated kinase-signal transducer and activation of transcription (JAK-STAT) pathway, the mitogen activated protein kinase (MAPK) pathway, the phosphoinositide 3-kinase (PI3K) pathway, the v-crk sarcoma virus CT10 oncogene homolog (avian)-like (CRKL) pathway, and NF-κB cascade. It has long been established that type I IFNs directly inhibit the proliferation of tumor cells and virus-infected cells, and increase MHC class I expression, enhancing antigen recognition. IFNs-I have also proven to be involved in immune system regulation. IFNs can either directly, through interferon receptor (IFNR), or indirectly by the induction of chemokines and cytokines, regulate the immune system. Type I IFNs enhance NK cell functions and promote survival of NK cells. Type I IFNs also affect monocytes, supporting the differentiation of monocytes into DC with high capacity for antigen presentation, and stimulate macrophage function and differentiation. Several studies also demonstrate that IFNs-I promote CD8⁺ T cell survival and functions. In some instances, it may be desirable to tune the expression of Type I IFNs using biocircuits of the present disclosure to avoid immunosuppression caused by long-term treatment with IFNs.

[0402] New anticancer immunotherapies are being developed that use recombinant type I IFN proteins, type I IFN transgene, type I IFN encoding vectors and type I IFN expressing cells. For example, IFN α has received approval for treatment of several neoplastic diseases, such as melanoma, RCC and multiple myeloma. Though type I IFNs are powerful tools to directly and indirectly modulate the functions of the immune system, side effects of systemic long-term treatments and lack of sufficiently high efficacy have dampened the interest of IFN α for clinical use in oncology. It is believed that if IFN levels are tightly regulated at the malignant tissues, type I IFNs are likely more efficacious. Approaches for intermittent delivery are proposed according to the observation that intermittency at an optimized pace may help to avoid signaling desensitizing mechanisms (negative feedback mechanisms) induced by IFNs-I (i.e., because of SOCS1 induction) in the responding immune cells. In accordance with the present disclosure, the effector module may comprise a DD-IFN fusion polypeptide. The DD and its ligand control the expression of IFN to induce an antiviral and antitumor immune responses and in the meantime, to minimize the side effects caused by long-term exposure of IFN.

[0403] In some embodiments, payloads of the present disclosure may comprise members of tumor necrosis factor (TNF) superfamily. The term “TNF superfamily” as used herein refers to a group of cytokines that can induce apoptosis. Members of TNF family include TNF-alpha, TNF-beta (also known as lymphotoxin-alpha (LT-α)), lymphotoxin-beta (LT-β), CD40L(CD154), CD27L (CD70), CD30L(CD153), FASL(CD178), 4-1BBL (CD137L), OX40L, TRAIL (TNF-related apoptosis inducing ligand), APRIL (a proliferation-inducing ligand), TWEAK, TRANCE, TALL-1, GITRL, LIGHT and TNFSF1 to TNFSF20 (TNF ligand superfamily member 1 to 20). In one embodiment, the payload of the disclosure may be TNF-alpha. TNF-alpha can cause cytolysis of tumor cells, and induce cell proliferation differentiation as well. In one aspect, the effector module of the present disclosure may comprise a DD-TNF alpha fusion polypeptide.

[0404] In one embodiment, the payloads of the present disclosure may be cytokines fused to TNF alpha ectodomain. Such payloads are produced as membrane associated cytokines fused to the TNF ectodomain. In one embodiment, the cytokine may be shed from the cell surface by the action of membrane associated proteases, and/or proteases in the extracellular space e.g. MMP9. Any of the cytokines described herein may be useful in the present disclosure. Such cytokine-TNF scaffold constructs may be used to preserve the native sequence of the processed cytokine while preserving regulation.

[0405] In some embodiments, payloads of the present disclosure may comprise inhibitory molecules that block inhibitory cytokines. The inhibitors may be blocking antibodies specific to an inhibitory cytokine, and antagonists against an inhibitory cytokine, or the like.

[0406] In some aspects, payloads of the present disclosure may comprise an inhibitor of a secondary cytokine IL35. IL35 belongs to the interleukin-12 (IL12) cytokine family, and is a heterodimer composed of the IL27 β chain Ebi3 and the IL12 α chain p35. Secretion of bioactive IL35 has been described only in forkhead box protein 3 (Foxp3)⁺ regulatory T cells (Tregs) (resting and activated Tregs). Unlike other membranes in the family, IL35 appears to function solely in an anti-inflammatory fashion by inhibiting effector T cell proliferation and perhaps other parameters (Collison et al., Nature, 2007, 450(7169): 566-569).

[0407] In some embodiments, payloads of the present disclosure may comprise inhibitors that block the transforming growth factor beta (TGF-β) subtypes (TGF-β1, TGF-β2 and TGF-β3). TGF-β is secreted by many cell types, including macrophages and is often complexed with two proteins LTBP and LAP. Serum proteinases such as plasmin catalyze the release of active TGF-β from the complex from the activated macrophages. It has been shown that an increase in expression of TGF-β correlates with the malignancy of many cancers. The immunosuppressive activity of TGF-β in the tumor microenvironment contributes to oncogenesis.

[0408] In some embodiments, payloads of the present disclosure may comprise inhibitors of IDO enzyme. In some embodiments, payloads fused to the DDs of the disclosure may be an inhibitor of an immunosuppressive molecule such as TGF-beta and IDO.

[0409] In some embodiments, payloads of the present disclosure may comprise chemokines and chemokine receptors. Chemokines are a family of secreted small cytokines, or signaling proteins that can induce directed chemotaxis in nearby responsive cells. The chemokine may be a SCY (small cytokine) selected from the group consisting of SCYA1-28 (CCL1-28), SCYB1-16 (CXCL1-16), SCYC1-2 (XCL1-2), SCYD-1 and SCYE-1; or a C chemokine selected from XCL1 and XCL2; or a CC chemokine selected from CCL1, CCL2, CCL3, CCL4, CCLS, CCL6, CCL7, CCL8, CCL9, CCL10, CCL11, CCL12, CCL13, CCL14, CCL15, CCL16, CCL17, CCL18, CCL19, CCL20, CCL21, CCL22, CCL23, CCL24, CCL25, CCL26, CCL27 and CCL28; or a CXC chemokine selected from CXCL1, CXCL2, CXCL3, CXCL4, CXCL5, CXCL6, CXCL7, CXCL8, CXCL9, CXCL10, CXCL11, CXCL12, CXCL13, CXCL14, CXCL15, CXCL16 and CXCL17; or a CX3C chemokine CX3CL1. In some aspects, the chemokine receptor may be a receptor for the C chemokines including XCR1; or a receptor for the CC chemokines including CCR1, CCR2, CCR3, CCR4, CCR5, CCR6, CCR7, CCR8, CCR9 and CCR10; or a receptor for the CXC chemokines including CXCR1, CXCR2, CXCR3, CXCR4 and CXCR5; or a CX3C chemokine receptor CX3CR1.

[0410] In some embodiments, payloads of the present disclosure may comprise other immunomodulators that play a critical role in immunotherapy, such as GM-CSF (Granulocyte-macrophage colony stimulating factor), erythropoietin (EPO), MIP3a, monocyte chemotactic protein (MCP)-1, intracellular adhesion molecule (ICAM), macrophage colony stimulating factor (M-CSF), Interleukin-1 receptor activating kinase (iRAK-1), lactotransferrin, and granulocyte colony stimulating factor (G-CSF).

[0411] In some embodiments, the payload of the present disclosure may comprise Amphiregulin. Amphiregulin (AREG) is an EGF-like growth factor which binds to the EGFR receptor and enhances CD4+ regulatory T cells (Tregs) function. AREG promotes immune suppression in the tumor environment. Thus, in some embodiment, the payloads of the present disclosure may comprise Amphiregulin to dampen immune response during immunotherapy.

[0412] In some embodiments, payloads of the present disclosure may comprise fusion proteins wherein a cytokine, chemokine and/or other soluble factor may be fused to other biological molecules such as antibodies and or ligands for a receptor. Such fusion molecules may increase the half-life of the cytokines, reduce systemic toxicity, and increase local concentration of the cytokines at the tumor site. Fusion proteins containing two or more cytokines, chemokines and or other soluble factors may be utilized to obtain synergistic therapeutic benefits. In one embodiment, payload may be a GM-CSF/IL2 fusion protein.

[0413] In some embodiments, any of the hinge and transmembrane domains described herein may be used as a scaffold for soluble cytokine presentation. The cytokine may be operably linked to the CD8 hinge and transmembrane domain by a protease cleavage site. Cleavage at the cleavage site releases the cytokine from the cell surface membrane. In some aspects, the cytokine may be in a precursor form. Generation of the active form of the cytokine from the precursor form occurs via cleavage at the cleavage site. Any of the cytokines described herein may be engineered using the any of the hinge and transmembrane domains described herein as a scaffold.

### 7. Immune Regulators

[0414] In some embodiments, payloads of the present disclosure may comprise inhibitors (antagonists) of co-inhibitory molecules (e.g., immune checkpoint), including without limitation, PD-1, PD-L1, PD-L2, CTLA-4, TIM-3, VISTA, BTLA, TIGIT, LAIRA, CD160, 2B4 and TGFR. In some aspects, the inhibitor may be a blocking/antagonistic antibody or fragment thereof, as discussed previously, or a ligand of the co-inhibitory receptor.

[0415] In some embodiments, payloads of the present disclosure may comprise agonists of co-stimulatory molecules, including without limitation, CD27, CD28, CD30, CD40, OX40 (CD134), 4-1BB (CD137), CDS, ICAM-1, LFA-1 (CD11a/CD18), ICOS (CD278), GITR, BAFFR, HVEM, CD7, LIGHT, NKG2C, SLAMF7, NKp80, CD160, B7-H3 and CD83. As a non-limiting example, agonists of co-stimulatory molecule ICOS (CD278) may be an ICOS binding protein comprising an amino acid sequence of SEQ ID NOs: 1, 2, 3, 4, 5 and 6 disclosed in International Patent Publication NO: WO2016120789; the contents of which are incorporated by reference herein in their entirety.

[0416] In some aspects, the agonist of a co-stimulatory molecule may be an agonistic antibody or fragment thereof, as discussed previously; or a ligand of the co-stimulatory receptor; or any binding molecules that can enhance the biological activity of its target. For example, an agonistic ligand of OX40 may be OX40L (CD252). The OX40 ligand as used herein, includes the intact OX40 ligand, soluble OX40 ligand, fusion proteins including a functionally active portion of OX40 ligand covalently linked to a second moiety, e.g., a protein domain, and variants may be which vary in amino acid sequence from naturally occurring OX4L but which retain the ability to specifically bind to the OX40 receptor or even enhance the biological activity of OX40L.

[0417] In general, an agonist of a co-stimulatory molecule substantially enhances the biological activity of its target molecule, such as T cell activation. Desirably, the biological activity is enhanced by 10, 20, 30, 50, 70, 80, 90, 95, or even 100.

[0418] In some embodiments, payloads of the present disclosure may comprise immunomodulators including stress proteins and heat shock proteins (HSPs) that can integrate both innate and adaptive immune responses. They may also be other chaperones and adaptors that stimulate immune responses. As a non-limiting example, the payload of the present disclosure may be a fusion protein comprising an NF-KB-activating domain of Flagellin fused with an ATP-binding domain truncated glucose regulated protein 170 (Grp170) (See. US patent publication NO.: US2015/0315255; the contents of which are incorporated herein by reference in their entirety). The fusion construct forms a secretable Grp170-Flagellin hybrid chaperone (Flagrp170) which can be used to stimulate anti-cancer immune responses.

[0419] In other embodiments, the payload of the present disclosure may comprise a STING (stimulator of interferon gene) protein, an adaptor molecule in the cytoplasm which, as a component of the host cytosolic surveillance pathway, activates the TANK binding kinase (TBK1)-IRF3 signaling axis, resulting in the induction of IFN β and other IRF-3 dependent gene products that strongly activate innate immunity, leading to the development of an adaptive immune response consisting of both antigen-specific CD4⁺ and CD8⁺ T cells as well as pathogen-specific antibodies.

[0420] Demaria et al. reported that enforced activation of a STING protein by intratumoral injection of cyclic dinucleotide GMP-AMP (cGAMP), an agonist of STING, can enhance antitumor CD8⁺ T cell responses leading to growth control of injected and contralateral tumors in mouse models of melanoma and colon cancer. The STING-dependent antitumor immunity was dependent on type I IFNs produced by endothelial cells in the tumor microenvironment (Demaria et al., Proc. Natl. Acad. Sci. USA, 2015, 112(5): 15408-15413). These studies demonstrate that STING contributes to anti-tumor immune responses via enhancement of type I IFN signaling in the tumor microenvironment. Biocircuits, effector modules comprising STING may be applied to the tumor microenvironment to enhance anti-tumor responses either alone or in combination with other immunotherapeutic agents of the disclosure.

[0421] In addition to STING proteins, payloads of the present disclosure may comprise PRRs (pattern recognition receptors) that are involved in sensing the infection of cells by viruses and microorganisms to activate innate immune inflammatory responses. Such PRRs include Toll like receptors (TLRs), RIG-I-like receptors (RLRs), NOD-like receptors (NLRs), and C-type lectin receptors (CLRs). The RLR family is a RNA sensing system that is comprised of retinoic acid inducible gene-like-I (RIG-1), melanoma differentiation-associated gene 5 (MDAS), and laboratory of genetics and physiology 2 (LGP2). RIG-1 recognizes relatively short dsRNA (up to 1 kb) whereas MDAS detects long dsRNA (more than 2 kb) to activate synthesis of type I IFNs, including IFN α and IFN β (Wilkins et al., Curr Opin Immunol., 2010, 22: 41-47). RLRs activate downstream signaling proteins evoking type I IFN production. TLRs recognize distinct structures in microbes; often referred to as “PAMPs” (pathogen associated molecular patterns). Ligand binding to TLRs invokes a cascade of intra-cellular signaling pathways that induce the production of factors involved in inflammation and immunity such as pro-inflammatory cytokines, and chemokines, as well as CD4⁺ and CD8⁺ T cell activation. Among ten TLRs identified in human, TLRs-1, 2, 4, 5 and 6 are expressed in the cell surface, while TLR-3, -7/8, and -9 are expressed with the ER compartment. In some embodiments, payloads of the disclosure may be one of the PRRs, or agonists of PRRs.

### 8. Metabolic Factors/Metabolic Checkpoint

[0422] In some embodiments, immune cells such as T cells used for immunotherapy may be metabolically reprogrammed to enhance anti-tumor T cell responses. Metabolic activities are necessary to support immune cells, specifically T cells growth, expansion, differentiation and effector functions, upon activation through T cell receptor or CAR and co-stimulatory signals. Metabolic competition between cancer cells and infiltrating immune effector cells leads to T cell energy and dysfunction.

[0423] In some embodiments, payloads of the present disclosure may be modulators of glycolysis. The Warburg effect in cancer cells leads to the massive generation of lactic acid that can suppress T cell cytotoxic and effector functions. As a non-limiting example, immune cells for adoptive transfer may be modified to overexpress phosphoenolpyruvate carboxykinase 1 (PCK1), which increases PEP production in T cells. Increased production of the glycolytic metabolite phosphoenolpyruvate (PEP) can repress sarco/ER Ca (2+)-ATPase (SERCA) activity, therefore sustaining T cell receptor-mediated Ca (2+)-NFAT signaling and effector functions (Ho et al, Cell, 2015, 162(6): 1217-1228).

[0424] In some embodiments, the payloads of the present disclosure may comprise of proteins involved in the OXPHOS pathway. For example, LEM (lymphocyte expansion molecule), a protein that can promote cytotoxic CD8⁺ T cell proliferation and effector function, and memory T cell generation in response to infection with lymphocyte choriomeningitis (CMV). LEM is part of a complex of CRIF1 (CR6 interacting factor 1) that mediates the translation and insertion of OXPHOS (Oxidative phosphorylation) proteins into mitochondrial inner membrane, thereby regulates OXPHOS activity. Thus, LEM is a positive modulator of T cell metabolism (mitochondria respiratory levels) and expansion (Okoye et al., Science, 2015, 348(6238): 995-1001).

[0425] In some embodiments, the payloads of the present disclosure may be inhibitors of metabolic enzymes involved in amino acid regulation. Metabolic competition for between immune cells and tumor cells can lead to establishing and maintaining an immunosuppressive tumor microenvironment due to T cell energy. Non-limiting examples include inhibitors of nitric oxide synthase and arginase I that can degrade extracellular arginine, or Indoleamine 2,3-dioxygenase (IDO) that degrades tryptophan. Abrogation of these enzymes secreted by tumor cells and immune suppressive cells can promote antitumor immunity.

[0426] In other embodiments, payloads of the present disclosure may comprise proteins critical for de novo fatty acid and cholesterol biosynthesis. This may include proteins such as SREBP1 (also known as SREBF1), SREBP2 (SREBF2), HMGCR, HMGC5, FASN, ACACA and SQLE, and transport pathways, such as LDLR.

[0427] Modulating cholesterol metabolism of cytotoxic CD8⁺ T cells may potentiate their anti-tumor effector function and proliferation. Cholesterol is a key component of membrane lipids, and has been shown that the increase in the plasma membrane cholesterol level of CD8⁺ T cells, enhances T-cell receptor clustering and signaling as well as more efficient formation of the immunological synapse (Molnar et al., J Biol Chem. 2012, 287:42664-42674). T cells used for adoptive transfer (e.g., anti-tumor CART cells) may be further engineered to express a protein that enhances cholesterol biosynthesis and/or transportation.

### 9. Safety Switch

[0428] In some embodiments, payloads of the present disclosure may comprise SRE regulated safety switches that can eliminate adoptively transferred cells in the case of severe toxicity, thereby mitigating the adverse effects of T cell therapy. Adoptively transferred T cells in immunotherapy may attack normal cells in response to normal tissue expression of TAA. Even on-tumor target activity of adoptively transferred T cells can result in toxicities such as tumor lysis syndrome, cytokine release syndrome and the related macrophage activation syndrome.

[0429] In one embodiment, the payloads of the present disclosure may eliminate the inappropriately activated cells by induction of apoptosis or by immunosurveillance have been developed in the art.

[0430] In some embodiments, payloads of the present disclosure may comprise inducible killer/suicide genes that acts as a safety switch. The killer/suicide gene when introduced into adoptively transferred immune cells, could control their alloreactivity. The killer/suicide gene may be an apoptotic gene (e.g., a caspase) which allows conditional apoptosis of the transduced cells by administration of a non-therapeutic ligand of the SRE (e.g., DD).

[0431] In some embodiments, the payload of the present disclosure may include Caspase 9. In some instances, Caspase 9 may be modified to have low basal expression and lacking the caspase recruitment domain (CARD) (SEQ ID NO:: 26 and SEQ ID NO:: 28 of U.S. Pat. No. 9,434,935B2; the contents of which are incorporated by reference in their entirety).

[0432] In one embodiment, the payload of the present disclosure is a suicide gene system, iCasp9/Chemical induced dimerization (CID) system which consists of a polypeptide derived from the Caspase9 gene fused to a drug binding domain derived from the human FK506 protein. Administration of bioinert, small molecule AP1903 (rimiducid), induces cross linking of the drug binding domains and dimerization of the fusion protein and in turn the dimerization of Caspase 9. This results in the activation of downstream effector Caspase 3 and subsequent induction of cellular apoptosis (Straathof et al., Blood, 2005, 105: 4247-4254; incorporated herein by reference in its entirety). Preclinical trials using CART including an iCasp9 gene have shown effective elimination of CAR T cells in vivo in mouse models and demonstrate the potential efficacy of this approach. (Budde et al, Plos One, 2013, 8: e82742.10.1371; Hoyos et al., Leukemia, 2010; 24(6):1160-1170). In one embodiment, the payload of the disclosure may comprise Caspase9. In one aspect, the effector module of the disclosure may be a DD-Caspase9 fusion polypeptide. In some embodiments, the payload of the disclosure may be full length Caspase 9 (SEQ ID NO: 8364, encoded by SEQ ID No. 8365, 8366) or caspase 9 delta CD (SEQ ID NO: 8367), encoded by SEQ ID No. 8368. The Caspases 9 sequences described herein may optionally include a stop codon at the C terminal of the sequence.

[0433] In some instances, the iCasp9/CID system has been shown to have a basal rate of dimerization even in the absence of rimiducid, resulting in unintended cell death. Regulating the expression levels of iCasp9/CID is critical for maximizing the efficacy of iCasp9/CID system. Biocircuits of the present disclosure and/or any of their components may be utilized in regulating or tuning the iCasp9/CID system in order to optimize its utility. Other examples of proteins used in dimerization-induced apoptosis paradigm may include, but are not limited to Fas receptor, the death effector domain of Fas-associated protein, FADD, Caspase 1, Caspase 3, Caspase 7 and Caspase 8. (Belshaw P. J. et al, Chem Biol., 996, 3:731-738; MacCorkle R. A. et al, Proc Natl Acad Sci, 1998, 95:3655-3660; Spencer, D. M. et al., Curr Biol. 1996; 6:839-847; the contents of each of which are incorporated herein by reference in their entirety).

[0434] In some embodiments, the safety switch of the present disclosure may comprise a metabolic enzyme, such as herpes simplex virus thymidine kinase (HSV-TK) and cytosine deaminase (CD). HSV-TK phosphorylates nucleoside analogs, including acyclovir and ganciclovir (GCV) to generate triphosphate form of nucleosides. When incorporated into DNA, it leads to chain termination and cell death. Unlike the mammalian thymidine kinase, HSV-TK is characterized by 1000-fold higher affinity to nucleoside analogs such as GCV, making it suitable for use as a suicide gene in mammalian cells. Cytosine deaminase (CD) can converts 5-fluorocytosine (5-FC) into the cytotoxic 5-fluorouracil (5-FU) (Tiraby et al., FEMS Lett., 1998, 167: 41-49).

[0435] In some embodiments, the safety switch of the present disclosure may comprise a CYP4B1 mutant (as suicide gene), which may be co-expressed in a CAR engineered T cells (Roellecker et al., Gen Ther., 2016, May 19, doi: 10.1038/gt.2016.38.).

[0436] In some embodiments, the payload of the present disclosure may comprise a fusion construct that can induce cell death, for example, a polypeptide with the formula of St-R1-S1-Q-S2-R2, wherein the St is a stalk sequence, R1/2 and Q are different epitopes; and S1/2 are optional spacer sequences (See, International patent publication NO.: WO2013/153391; the content of which are incorporated herein by reference in their entirety).

[0437] In some embodiments, safety switch may be mediated by therapeutic antibodies which specifically bind to an antigen that is expressed in the plasma membrane of adoptively transferred cells. The antigen-antibody interaction allows cell removal after administration of a specific monoclonal antibody against the antigen. As non-limiting examples, payloads of the present disclosure may comprise the antigen and antibody pair used to mediate safety switch such as CD20 and anti-CD20 antibody (Griffioen et al., Haematologica, 2009, 94:1316-1320), a protein tag and anti-tag antibody (Kieback et al., Natl. Acad. Sci. U.S.A., 2008, 105: 623-628), a compact suicide gene (RQR8) combining epitopes from CD34 (as a marker moiety) and CD20 (as a suicide moiety) which enables CD34 selection, cell tracking, as well as cell deletion after anti-CD20 monoclonal antibody administration (Philip et al., Blood, 2014, 124: 1277-1287); truncated human EGFR polypeptide and anti-EGFR monoclonal antibody (Wang et al., Blood, 2011, 118:1255-1263); and a compact polypeptide safety switch having a structural formula as discussed in U.S Patent Application Publication NO: 2015/0093401; the contents of each of which are incorporated herein by reference in their entirety.

### 10. Regulatory Switch

[0438] The utility of adoptive cell therapy (ACT) has been limited by the high incidence of graft versus host disease (GVHD). GVHD occurs when adoptively transferred T cells elicit an immune response resulting in host tissue damage. Recognition of host antigens by the graft cells triggers a proinflammatory cytokine storm cascade that signifies acute GVHD. GVHD is characterized as an imbalance between the effector and the regulatory arms of the immune system. In some embodiments, the payloads of the present disclosure may be used as regulatory switches. As used herein “regulatory switch” refers proteins, which when expressed in target cells increase tolerance to the graft by enhancing the regulatory arm of the immune system.

[0439] In one embodiment, regulatory switches may include payloads that preferentially promote the expansion of regulatory T (Treg cells). Tregs are a distinct population of cells that are positively selected on high affinity ligands in the thymus and play an important role in the tolerance to self-antigens. In addition, T regs have also been shown to play a role in peripheral tolerance to foreign antigens. Since Tregs promote immune tolerance, expansion of Tregs with the compositions of the disclosure may be desirable to limit GVHD.

[0440] In some embodiments, the regulatory switch may include, but is not limited to T regs activation factors such NFκB, FOXO, nuclear receptor Nr4a, Retinoic acid receptor alpha, NFAT, AP-1 and SMAD. Such factors can result in the expression of Fork headbox P3 (FOXP3) in T cells resulting in the activation of the regulatory T cell program and the expansion of T cells.

[0441] In one embodiment, the regulatory switch may be FOXP3, a transcriptional regulator in T cells. A function of FOXP3 is to suppress the function of NFAT, which leads to the suppression of expression of many genes including IL2 and effector T-cell cytokines. FOXP3 acts also as a transcription activator for genes such as CD2S, Cytotoxic T-Lymphocyte Antigen Cytotoxic T-Lymphocyte Antigen 4 (CTLA4), glucocorticoid-induced TNF receptor family gene (GITR) and folate receptor 4. FOXP3 also inhibits the differentiation of IL17 producing helper T-cells (Th17) by antagonizing RORC (RAR related orphan receptor C). Isoforms of FOXP3 lacking exon2 (FOXP3 delta 2), or exon 7 (FOXP3 delta 7) may also be used as regulatory switches. In one aspect, the effector module of the disclosure may be a DD-FOXP3 fusion polypeptide. FOXP3 may be a full length FOXP3 (SEQ ID NO: 8369, encoded by SEQ ID NO: 8370); or FOXP3 (amino acid 2-431 of WT) (SEQ ID NO: 8371, encoded by SEQ ID NO: 8372), a delta 2 FOXP3 (SEQ ID NO: 8373, encoded by SEQ ID NO:8374); or FOXP3 delta (amino acid 2-396 of WT) (SEQ ID NO: 8375, encoded by SEQ ID NO:8376).

### 11. Homing Receptors

[0442] In some embodiments, payloads of the present disclosure may comprise homing receptors that guide immunotherapeutic cells to different anatomical compartments, such as designated tumor sites. For example, T cells expressing a chimeric antigen receptor may be further modified to express a homing receptor that is not normally expressed by the T cell. As used herein, the term “homing receptor” is a receptor that guides a cell expressing the receptor to a designated organ, a particular tissue, or a particular type of cell. Such trafficking receptors favor T cell accumulation in certain target organs. In some embodiments, the homing receptors of the present disclosure may be adhesion molecules. In other embodiments, the homing receptors of the disclosure may be chemokine receptors which mediate chemotaxis to chemokines. As non-limiting examples, a homing receptor may be a B cell zone homing receptor such as CXCR5; T cell zone homing receptor such as CXCR7; a gastrointestinal homing receptor such as CCR9 and integrin α4β7 (also known as lymphocyte Peyer patch adhesion molecule); a skin homing receptor such as CLA (cutaneous lymphocyte-associated antigen receptor), CCR4, CCR8 and CCR10 (See, e.g., International Patent Publication NO.: WO2016025454; the contents of which are incorporated herein by reference in their entirety). Other homing receptors include, without limitation, CXCR2 and CXCR1 which redirect chemokine receptor modified tumor-infiltrating lymphocytes to melanoma tumor (Idorn et al., Methods Mol. Biol., 2016, 1428: 261-276; and Sapoznik et al., Cancer Immunol Immunother., 2012, 61(10): 1833-1847); CCR2 which, when expressed by CD8⁺ T cells, can home modified CD8⁺ T cells to the site of prostate cancer in which the CCL2 (a CCR2 ligand) expression is increased (Garetto et al., Oncotarget, 2016, May 10. doi: 10.18632/oncotarget.9280); and CD103 as an intestinal homing receptor.

### 12. Immune Signaling

[0443] Treatment with immunotherapeutic agents may induce immune cell signaling, leading to the activation of cell-type specific immune activities, ultimately resulting in an immune response. In some embodiments, payloads of the present disclosure may be immune signaling biomolecules used to achieve exogenous control of signaling pathways. Exemplary immune signaling biomolecules include transcription factors such as Nuclear factor of activated T-cells (NFAT) (e.g., NFAT, NFAT2, NFAT3 and NFAT 4), Nuclear Factor Kappa B (NFκB), Signal transducer and activator of transcription (STAT), Activator protein-1 (AP-1), Rel, Fos, and Jun; kinases such as Janus Kinase (JAK), Extracellular signal-regulated kinases (ERK), Mitogen-Activated Protein Kinases (MAPK), Mammalian target of rapamycin (mTOR), Phsophoinositide-dependent kinase (PDK), Protein kinase B (PKB), IkB kinase (IKK), Calcium/Calmodulin dependent kinase(CaMK); and other signaling molecules such as Ras, Cbl, Calmodulin (CaM), Calpain, and IkkB kinase.

[0444] In one embodiment, the payloads of the present disclosure may be administered in conjunction with inhibitors of SHP-1 and/or SHP-2. The tyrosine-protein phosphatase SHP1 (also known as PTPN6) and SHP2 (also known as PTPN11) are involved in the Programmed Cell Death (PD1) inhibitory signaling pathway. The intracellular domain of PD1 contains an immunoreceptor tyrosine based inhibitory motif (ITIM) and an immunoreceptor tyrosine-based switch motif (ITSM). ITSM has been shown to recruit SHP-1 and 2. This generates negative costimulatory micro clusters that induce the dephosphorylation of the proximal TCR signaling molecules, thereby resulting in suppression of T cell activation, which can lead to T cell exhaustion. In one embodiment, inhibitors of SHP-1 and 2 may include expressing dominant negative versions of the proteins in T cells, TILs or other cell types to relieve exhaustion. Such mutants can bind to the endogenous, catalytically active proteins, and inhibit their function. In one embodiment, the dominant negative mutant of SHP-1 and/or SHP-2 lack the phosphatase domain required for catalytic activity. In some embodiments, any of the dominant negative SHP-1 mutants taught Bergeron S et al. (2011). Endocrinology. 2011 December; 152(12):4581-8.; Dustin J B et al. (1999) J Immunol. March 1; 162(5):2717-24.; Berchtold S (1998) Mol Endocrinol. April; 12(4):556-67 and Schram et al. (2012) Am J Physiol Heart Circ Physiol. 1; 302(1):H231-43.; may be useful in the disclosure (the contents of each of which are incorporated by reference in their entirety).

### 13. Oncolytic Viruses

[0445] In some embodiments, payloads of the present disclosure may comprise oncolytic viruses or any components of oncolytic viruses. In some embodiments, the payload may be oncolytic viruses or components that have been genetically modified oncolytic viruses for use in oncolytic virotherapy. As used herein, the term “virotherapy” refers to a therapeutic use of oncolytic viruses (replication competent viruses) to attack and destroy cancer cells. Oncolytic viruses refer to those viruses that are able to eliminate malignancies by direct targeting and killing of cancer cells within the tumor, without causing harm to normal tissues. Exemplary oncolytic viruses and genetically engineered oncolytic viruses with cancer specific tropism may include Arvoviruses, Adenoviruses, Coxsackie viruses, Herpes Simplex Viruses (HSVs), Measles, Mumps viruses, Moloney leukemia viruses, Myxovirus, Newcastle Disease Viruses, Reoviruses, Rhabdovirus, Vesticular Stomatic Viruses, and Vaccinia Viruses (VV). It may also be chimeric viruses with increased oncolytic potential such as an adeno-parvovirus chimera in U.S. Pat. No. 9,441,246. The oncolytic viruses may be modified to be less susceptible to immune suppression while more specifically targeting particular classes of cancer cells, or be modified to insert and express cancer-suppressing transgenes. Modifications to the oncolytic virus may also be made to improve replicative potential of the virus, increase viral titers, and/or enhance the range cancer cells that can be infected by the virus. Examples of modified oncolytic viruses that may be used as payload include US Patent NO.: US8282917B2, International Patent Publication NO.: WO2011070440, WO2004078206A1, WO2016144564, WO2016119052, WO2009111892; the contents of each of which are incorporated herein by reference in their entirety.

[0446] In some embodiments, payloads of the present disclosure may be one or more coat proteins of the viruses, inserted transgenes, other factors that can increase intratumoral virus replication and the combinations.

[0447] In some instance, two or more oncolytic viruses may also be used as payload within the same SRE or in two or more SREs to achieve synergistic killing of target cancer cells as described in International Patent Publication NO.: WO2010020056 (the contents of which are incorporated herein by reference in their entirety).

### 14. Genomic Editing Systems

[0448] In some embodiments, payloads of the present disclosure may be components of gene editing systems including a CRISPR (Clustered Regularly Interspaced Short Palindromic Repeats), CRISPR enzyme (Cas9), CRISPR-Cas9 or CRISPR system and CRISPR-CAS9 complex. It may also be other genomic editing systems, such as Zinc finger nucleases, TALEN (Transcription activator-like effector-based nucleases) and meganucleases.

### Additional Features

[0449] The effector module of the present disclosure may further comprise a signal sequence which regulates the distribution of the payload, a cleavage and/or processing feature which facilitate cleavage of the payload from the effector module construct, a targeting and/or penetrating signal which can regulate the cellular localization of the effector module, and/or one or more linker sequences which link different components (e.g. a DD and a payload) of the effector module. In some embodiments, the effector module may further comprise of one or more additional features such as linker sequences (with specific sequences and lengths), cleavage sites, regulatory elements (that regulate expression of the protein of interest such as microRNA targeting sites), signal sequences that lead the effector module to a specific cellular or subcellular location, penetrating sequences, or tags and biomarkers for tracking the effector module.

### 1. Signal Sequences

[0450] In addition to the SRE (e.g., DD) and payload region, effector modules of the disclosure may further comprise one or more signal sequences. Signal sequences (sometimes referred to as signal peptides, targeting signals, target peptides, localization sequences, transit peptides, leader sequences or leader peptides) direct proteins (e.g., the effector module of the present disclosure) to their designated cellular and/or extracellular locations. Protein signal sequences play a central role in the targeting and translocation of nearly all secreted proteins and many integral membrane proteins.

[0451] A signal sequence is a short (5-30 amino acids long) peptide present at the N-terminus of the majority of newly synthesized proteins that are destined towards a particular location. Signal sequences can be recognized by signal recognition particles (SRPs) and cleaved using type I and type II signal peptide peptidases. Signal sequences derived from human proteins can be incorporated as a regulatory module of the effector module to direct the effector module to a particular cellular and/or extracellular location. These signal sequences are experimentally verified and can be cleaved (Zhang et al., Protein Sci. 2004, 13:2819-2824).

[0452] In some embodiments, a signal sequence may be, although not necessarily, located at the N-terminus or C-terminus of the effector module, and may be, although not necessarily, cleaved off the desired effector module to yield a “mature” payload, i.e., an immunotherapeutic agent as discussed herein.

[0453] In some examples, a signal sequence may be a secreted signal sequence derived from a naturally secreted protein, and its variant thereof. In some instances, the secreted signal sequences may be cytokine signal sequences such as, but not limited to, IL2 signal sequence comprising amino acid of SEQ ID NO: 261 (encoded by the nucleotide sequence of SEQ ID NO: 262-265), and/or p40 signal sequence comprising the amino acid sequence of SEQ ID NO: 266, (encoded by the nucleotide sequence of SEQ ID NO: 267-275).

[0454] In some instances, signal sequences directing the payload to the surface membrane of the target cell may be used. Expression of the payload on the surface of the target cell may be useful to limit the diffusion of the payload to non-target in vivo environments, thereby potentially improving the safety profile of the payloads. Additionally, the membrane presentation of the payload may allow for physiologically and qualitative signaling as well as stabilization and recycling of the payload for a longer half-life. Membrane sequences may be the endogenous signal sequence of the N terminal component of the payload. Optionally, it may be desirable to exchange this sequence for a different signal sequence. Signal sequences may be selected based on their compatibility with the secretory pathway of the cell type of interest so that the payload is presented on the surface of the T cell. In some embodiments, the signal sequence may be IgE signal sequence comprising amino acid of SEQ ID NO: 276 (encoded by the nucleotide sequence of SEQ ID NO: 277) or CD8a signal sequence comprising amino acid SEQ ID NO: 278 (encoded by the nucleotide sequence of SEQ ID NO: 279-283).

[0455] Other examples of signal sequences include, a variant may be a modified signal sequence discussed in U.S. Pat. Nos. 8,148,494, 8,258,102, 9,133,265, 9,279,007, and U.S. patent application publication NO. 2007/0141666; and International patent application publication NO. WO1993/018181; the contents of each of which are incorporated herein by reference in their entirety. In other examples, a signal sequence may be a heterogeneous signal sequence from other organisms such as virus, yeast and bacteria, which can direct an effector module to a particular cellular site, such as a nucleus (e.g., EP 1209450). Other examples may include Aspartic Protease (NSP24) signal sequences from Trichoderma that can increase secretion of fused protein such as enzymes (e.g., U.S. Pat. No. 8,093,016 to Cervin and Kim), bacterial lipoprotein signal sequences (e.g., PCT application publication NO. 1991/09952 to Lau and Rioux), E. coli enterotoxin II signal peptides (e.g., U.S. Pat. No. 6,605,697 to Kwon et al.), E. coli secretion signal sequence (e.g., U.S. patent publication NO. 2016/090404 to Malley et al.), a lipase signal sequence from a methylotrophic yeast (e.g., U.S. Pat. No. 8,975,041), and signal peptides for DNases derived from Coryneform bacteria (e.g., U.S. Pat. No. 4,965,197); the contents of each of which are incorporated herein by reference in their entirety.

[0456] Signal sequences may also include nuclear localization signals (NLSs), nuclear export signals (NESs), polarized cell tubulo-vesicular structure localization signals (See, e.g., U.S. Pat. No. 8,993,742; Cour et al., Nucleic Acids Res. 2003, 31(1): 393-396; the contents of each of which are incorporated herein by reference in their entirety), extracellular localization signals, signals to subcellular locations (e.g. lysosome, endoplasmic reticulum, golgi, mitochondria, plasma membrane and peroxisomes, etc.) (See, e.g., U.S. Pat. No. 7,396,811; and Negi et al., Database, 2015, 1-7; the contents of each of which are incorporated herein by reference in their entirety).

### 2. Cleavage Sites

[0457] In some embodiments, the effector module comprises a cleavage and/or processing feature. The effector module of the present disclosure may include at least one protein cleavage signal/site. The protein cleavage signal/site may be located at the N-terminus, the C-terminus, at any space between the N- and the C-termini such as, but not limited to, half-way between the N- and C-termini, between the N-terminus and the half-way point, between the half-way point and the C-terminus, and combinations thereof.

[0458] The effector module may include one or more cleavage signal(s)/site(s) of any proteinases. The proteinases may be a serine proteinase, a cysteine proteinase, an endopeptidase, a dipeptidase, a metalloproteinase, a glutamic proteinase, a threonine proteinase and an aspartic proteinase. In some aspects, the cleavage site may be a signal sequence of furin, actinidain, calpain-1, carboxypeptidase A, carboxypeptidase P, carboxypeptidase Y, caspase-1, caspase-2, caspase-3, caspase-4, caspase-5, caspase-6, caspase-7, caspase-8, caspase-9, caspase-10, cathepsin B, cathepsin C, cathepsin 0, cathepsin H, cathepsin K, cathepsin L, cathepsin S, cathepsin V, clostripain, chymase, chymotrypsin, elastase, endoproteinase, enterokinase, factor Xa, formic acid, granzyme B, Matrix metallopeptidase-2, Matrix metallopeptidase-3, pepsin, proteinase K, SUMO protease, subtilisin, TEV protease, thermolysin, thrombin, trypsin and TAGZyme.

[0459] In one embodiment, the cleavage site is a furin cleavage site comprising the amino acid sequence SARNRQKRS (SEQ ID NO: 284, encoded by the nucleotide sequence of SEQ ID NO: 285), or a revised furin cleavage site comprising the amino acid sequence ARNRQKRS (SEQ ID NO: 286, encoded by the nucleotide sequence of SEQ ID NO: 287), or a modified furin site comprising the amino acid sequence ESRRVRRNKRSK (SEQ ID NO: 288, encoded by the nucleotide sequence of SEQ ID NO: 289-291).

### 3. Protein Tags

[0460] In some embodiments, the effector module of the disclosure may comprise a protein tag. The protein tag may be used for detecting and monitoring the process of the effector module. The effector module may include one or more tags such as an epitope tag (e.g., a FLAG or hemagglutinin (HA) tag). A large number of protein tags may be used for the present effector modules. They include, but are not limited to, self-labeling polypeptide tags (e.g., haloalkane dehalogenase (halotag2 or halotag7), ACP tag, clip tag, MCP tag, snap tag), epitope tags (e.g., FLAG, HA, His, and Myc), fluorescent tags (e.g., green fluorescent protein (GFP), red fluorescent protein (RFP), yellow fluorescent protein (YFP), and its variants), bioluminescent tags (e.g. luciferase and its variants), affinity tags (e.g., maltose binding protein (MBP) tag, glutathione-S-transferase (GST) tag), immunogenic affinity tags (e.g., protein A/G, IRS, AU1, AUS, glu-glu, KT3, S-tag, HSV, VSV-G, Xpress and V5), and other tags (e.g., biotin (small molecule), StrepTag (StrepII), SBP, biotin carboxyl carrier protein (BCCP), eXact, CBP, CYD, HPC, CBD intein-chitin binding domain, Trx, NorpA, and NusA.

[0461] In other embodiments, a tag may also be selected from those disclosed in U.S. Pat. Nos. 8,999,897; 8,357,511; 7,094,568; 5,011,912; 4,851,341; and 4,703,004; U.S patent application publication NOs.: 2013/115635 and 2013/012687; and International application publication NO.: WO2013/091661; the contents of each of which are incorporated herein by reference in their entirety.

[0462] In some aspects, a multiplicity of protein tags, either the same or different tags, may be used; each of the tags may be located at the same N- or C-terminus, whereas in other cases these tags may be located at each terminus.

### 4. Targeting Peptides

[0463] In some embodiments, the effector module of the disclosure may further comprise a targeting and/or penetrating peptide. Small targeting and/or penetrating peptides that selectively recognize cell surface markers (e.g. receptors, trans-membrane proteins, and extra-cellular matrix molecules) can be employed to target the effector module to the desired organs, tissues or cells. Short peptides (5-50 amino acid residues) synthesized in vitro and naturally occurring peptides, or analogs, variants, derivatives thereof, may be incorporated into the effector module for homing the effector module to the desired organs, tissues and cells, and/or subcellular locations inside the cells.

[0464] In some embodiments, a targeting sequence and/or penetrating peptide may be included in the effector module to drive the effector module to a target organ, or a tissue, or a cell (e.g., a cancer cell). In other embodiments, a targeting and/or penetrating peptide may direct the effector module to a specific subcellular location inside a cell.

[0465] A targeting peptide has any number of amino acids from about 6 to about 30 inclusive. The peptide may have 6, 7, 8, 9, 10, 11, 12, 13, 14, 15, 16, 17, 18, 19, 20, 21, 22, 23, 24, 25, 26, 27, 28, 29 or 30 amino acids. Generally, a targeting peptide may have 25 or fewer amino acids, for example, 20 or fewer, for example 15 or fewer.

[0466] Exemplary targeting peptides may include, but are not limited to, those disclosed in the art, e.g., U.S. Pat. Nos. 9,206,231, 9,110,059, 8,706,219; and 8,772,449, and U.S. application publication NOs. 2016/089447, 2016/060296, 2016/060314, 2016/060312, 2016/060311, 2016/009772, 2016/002613, 2015/314011 and 2015/166621. and International application publication NOs. WO2015/179691 and WO2015/183044; the contents of each of which are incorporated herein by reference in their entirety.

### 5. Linkers

[0467] In some embodiments, the effector module of the disclosure may further comprise a linker sequence. The linker region serves primarily as a spacer between two or more polypeptides within the effector module. A “linker” or “spacer”, as used herein, refers to a molecule or group of molecules that connects two molecules, or two parts of a molecule such as two domains of a recombinant protein.

[0468] In some embodiments, “Linker” (L) or “linker domain” or “linker region” or “linker module” or “peptide linker” as used herein refers to an oligo- or polypeptide region of from about 1 to 100 amino acids in length, which links together any of the domains/regions of the effector module (also called peptide linker). The peptide linker may be 1-40 amino acids in length, or 2-30 amino acids in length, or 20-80 amino acids in length, or 50-100 amino acids in length. Linker length may also be optimized depending on the type of payload utilized and based on the crystal structure of the payload. In some instances, a shorter linker length may be preferably selected. In some aspects, the peptide linker is made up of amino acids linked together by peptide bonds, preferably from 1 to 20 amino acids linked by peptide bonds, wherein the amino acids are selected from the 20 naturally occurring amino acids: Glycine (0), Alanine (A), Valine (V), Leucine (L), Isoleucine (I), Serine (S), Cysteine (C), Threonine (T), Methionine (M), Proline (P), Phenylalanine (F), Tyrosine (Y), Tryptophan (W), Histidine (H), Lysine (K), Arginine (R), Aspartate (D), Glutamic acid (E), Asparagine (N), and Glutamine (Q). One or more of these amino acids may be glycosylated, as is understood by those in the art. In some aspects, amino acids of a peptide linker may be selected from Alanine (A), Glycine (G), Proline (P), Asparagine (R), Serine (S), Glutamine (Q) and Lysine (K).

[0469] In one example, an artificially designed peptide linker may preferably be composed of a polymer of flexible residues like Glycine (G) and Serine (S) so that the adjacent protein domains are free to move relative to one another. Longer linkers may be used when it is desirable to ensure that two adjacent domains do not interfere with one another. The choice of a particular linker sequence may concern if it affects biological activity, stability, folding, targeting and/or pharmacokinetic features of the fusion construct. Examples of peptide linkers include, but are not limited to: SG, MH, GGSG (SEQ ID NO: 292, encoded by the nucleotide sequence of SEQ ID NO: 293; GGSGG (SEQ ID NO: 294), encoded by the nucleotide sequence of SEQ ID NOs. 295-299; GGSGGG (SEQ ID NO: 78), encoded by the nucleotide sequence of SEQ ID NO: 93 and 300; SGGGS (SEQ ID NO: 301), encoded by the nucleotide sequence of SEQ ID NO: 302-303; GGSGGGSGG (SEQ ID NO: 77), encoded by the nucleotide sequence of SEQ ID NO: 92; GGGGG (SEQ ID NO: 304), 0000S (SEQ ID NO: 305) or (GGGGS)n (n=2 (SEQ ID NO: 306), 3 (SEQ ID NO: 307; encoded by SEQ ID NO: 308-313), 4 (SEQ ID NO: 314), 5 (SEQ ID NO: 315), or 6 (SEQ ID NO: 316)), SSSSG (SEQ ID NO: 317) or (SSSSG)n (n=2 (SEQ ID NO: 318), 3 (SEQ ID NO: 319), 4 (SEQ ID NO: 320), 5 (SEQ ID NO: 321), or 6 (SEQ ID NO: 322)), SGGGSGGGGSGGGGSGGGGSGGGSLQ (SEQ ID NO: 323), encoded by the nucleotide sequence of SEQ ID NO: 324 or SEQ ID NO: 8665; EFSTEF (SEQ ID NO: 325), encoded by the nucleotide sequence of SEQ ID NOs. 326-327; GKSSGSGSESKS (SEQ ID NO: 328), GGSTSGSGKSSEGKG (SEQ ID NO: 329), GSTSGSGKSSSEGSGSTKG (SEQ ID NO: 330), GSTSGSGKPGSGEGSTKG (SEQ ID NO: 331), VDYPYDVPDYALD (SEQ ID NO: 332), encoded by the nucleotide sequence of SEQ ID NO: 333; or EGKSSGSGSESKEF (SEQ ID NO: 334); or GSGSGS (SEQ ID NO: 8330), encoded by the nucleotide sequence of SEQ ID NO: 8347; or GSGSGSGS (SEQ ID NO: 8331), encoded by the nucleotide sequence of SEQ ID NO: 8348; or GSGSGGGSGS (SEQ ID NO: 8332), encoded by the nucleotide sequence of SEQ ID NO: 8349; SGSGSGS linker (SEQ ID NO: 8382), or SG linker, encoded by AGTGGT; or an LD Linker comprising Lysine Aspartic acid, encoded by CTAGAT; GGSGGG (SEQ ID NO: 8630), encoded by the nucleotide sequence of SEQ ID NO: 8631. Linkers may also be DNA restriction enzyme recognition sites or modifications thereof such as flexible GS or G/S rich linker; BamH1 Site encoded by GGATCC; flexible G/S rich linker or BamH1 Site; SR/Xba I site, encoded by TCTAGA; or a GSG linker (BamH1-Gly) linker, encoded by GGATCCGGA.

[0470] In other examples, a peptide linker may be made up of a majority of amino acids that are sterically unhindered, such as Glycine (0) and Alanine (A). Exemplary linkers are polyglycines (such as (G)₄ (SEQ ID NO: 8378), (G)₅ (SEQ ID NO: 8379), (G)₈ (SEQ ID NO: 8380)), poly(GA), and polyalanines. The linkers described herein are exemplary, and linkers that are much longer and which include other residues are contemplated by the present disclosure.

[0471] In some embodiments, the linker may be a spacer comprising the nucleotide sequence of SEQ ID NO: 8668-8669. In one embodiment, the spacer is a nucleotide sequence that is not translated into an amino acid sequence.

[0472] A linker sequence may be a natural linker derived from a multi-domain protein. A natural linker is a short peptide sequence that separates two different domains or motifs within a protein.

[0473] In some aspects, linkers may be flexible or rigid. In other aspects, linkers may be cleavable or non-cleavable. As used herein, the terms “cleavable linker domain or region” or “cleavable peptide linker” are used interchangeably. In some embodiments, the linker sequence may be cleaved enzymatically and/or chemically. Examples of enzymes (e.g., proteinase/peptidase) useful for cleaving the peptide linker include, but are not limited, to Arg-C proteinase, Asp-N endopeptidase, chymotrypsin, clostripain, enterokinase, Factor Xa, glutamyl endopeptidase, Granzyme B, Achromobacter proteinase I, pepsin, proline endopeptidase, proteinase K, Staphylococcal peptidase I, thermolysin, thrombin, trypsin, and members of the Caspase family of proteolytic enzymes (e.g. Caspases 1-10). Chemical sensitive cleavage sites may also be included in a linker sequence. Examples of chemical cleavage reagents include, but are not limited to, cyanogen bromide, which cleaves methionine residues; N-chloro succinimide, iodobenzoic acid or BNPS-skatole [2-(2-nitrophenylsulfenyl)-3-methylindole], which cleaves tryptophan residues; dilute acids, which cleave at aspartyl-prolyl bonds; and e aspartic acid-proline acid cleavable recognition sites (i.e., a cleavable peptide linker comprising one or more D-P dipeptide moieties). The fusion module may include multiple regions encoding peptides of interest separated by one or more cleavable peptide linkers.

[0474] In other embodiments, a cleavable linker may be a “self-cleaving” linker peptide, such as 2A linkers (for example T2A), 2A-like linkers or functional equivalents thereof and combinations thereof. In some embodiments, the linkers include the picornaviral 2A-like linker, CHYSEL sequences of porcine teschovirus (P2A), Thosea asigna virus (T2A) or combinations, variants and functional equivalents thereof. In some embodiments, the biocircuits of the present disclosure may include 2A peptides. The 2A peptide is a sequence of about 20 amino acid residues from a virus that is recognized by a protease (2A peptidases) endogenous to the cell. The 2A peptide was identified among picornaviruses, a typical example of which is the Foot- and Mouth disease virus (Robertson B H, et. al., J Virol 1985, 54:651-660). 2A-like sequences have also been found in Picornaviridae like equine rhinitis A virus, as well as unrelated viruses such as porcine teschovirus-1 and the insect Thosea asigna virus (TaV). In such viruses, multiple proteins are derived from a large polyprotein encoded by an open reading frame. The 2A peptide mediates the co-translational cleavage of this polyprotein at a single site that forms the junction between the virus capsid and replication polyprotein domains The 2A sequences contain the consensus motif D-V/I-E-X-N-P-G-P (SEQ ID NO: 8381). These sequences are thought to act co-translationally, preventing the formation of a normal peptide bond between the glycine and last proline, resulting in the ribosome skipping of the next codon (Donnelly M L et al. (2001). J Gen Virol, 82:1013-1025). After cleavage, the short peptide remains fused to the C-terminus of the protein upstream of the cleavage site, while the proline is added to the N-terminus of the protein downstream of the cleavage site. Of the 2A peptides identified, four have been widely used namely FMDV 2A (abbreviated herein as F2A); equine rhinitis A virus (ERAV) 2A (E2A); porcine teschovirus-1 2A (P2A) and Thoseaasigna virus 2A (T2A). In some embodiments, the 2A peptide sequences useful in the present disclosure are selected from SEQ ID NO: 8-11 of International Patent Publication WO2010042490, the contents of which are incorporated by reference in its entirety. In some embodiments, the cleavage site may be a P2A cleavable peptide (SEQ ID NO: 8239), encoded by the nucleotide sequence of SEQ ID NO: 8269.

[0475] Other linkers will be apparent to those skilled in the art and may be used in connection with alternate embodiments of the disclosure.

[0476] The linkers of the present disclosure may also be non-peptide linkers. For example, alkyl linkers such as —NH—(CH₂) a-C(O)—, wherein a=2-20 can be used. These alkyl linkers may further be substituted by any non-sterically hindering group such as lower alkyl (e.g., C₁-C₆) lower acyl, halogen (e.g., Cl, Br), CN, NH₂, phenyl, etc.

[0477] In some aspects, the linker may be an artificial linker from U.S. Pat. Nos. 4,946,778, 5,525,491, 5,856,456, and International patent publication NO. WO2012/083424; the contents of each of which are incorporated herein by reference in their entirety.

### 6. Embedded Stimulus, Signals and Other Regulatory Features

[0478] microRNAs (or miRNA) are 19-25 nucleotide long noncoding RNAs that bind to the 3′UTR of nucleic acid molecules and down-regulate gene expression either by reducing nucleic acid molecule stability or by inhibiting translation. The polynucleotides of the disclosure may comprise one or more microRNA target sequences, microRNA sequences, or microRNA seeds. Such sequences may correspond to any known microRNA such as those taught in US Publication No. US2005/0261218 and US Publication No. US2005/0059005, the contents of which are incorporated herein by reference in their entirety. As a non-limiting embodiment, known microRNAs, their sequences and their binding site sequences in the human genome are listed Table 14 of the co-owned U.S. Provisional Patent Application No. 62/320,864 filed Apr. 11, 2016, 62/466,596 filed Mar. 3, 2017 and the International Publication WO2017/180587 (the contents of each of which are herein incorporated by reference in their entirety).

[0479] A microRNA sequence comprises a “seed” region, i.e., a sequence in the region of positions 2-8 of the mature microRNA, which sequence has perfect Watson-Crick complementarity to the miRNA target sequence. A microRNA seed may comprise positions 2-8 or 2-7 of the mature microRNA. In some embodiments, a microRNA seed may comprise 7 nucleotides (e.g., nucleotides 2-8 of the mature microRNA), wherein the seed-complemental), site in the corresponding miRNA target is flanked by an adenine (A) opposed to microRNA position 1. In some embodiments, a microRNA seed may comprise 6 nucleotides (e.g., nucleotides 2-7 of the mature microRNA), wherein the seed-complementary site in the corresponding miRNA target is flanked by an adenine (A) opposed to microRNA position 1. See for example, Crimson A, Farh K K, Johnston W K, Garrett-Engele P, Lim L P, Bartel D P; Mol Cell. 2007 Jul. 6; 27(1):91-105. The bases of the microRNA seed have complete complementarity with the target sequence. By engineering microRNA target sequences into the polynucleotides encoding the biocircuit components, effector modules, SREs or payloads of the disclosure one can target the molecule for degradation or reduced translation, provided the microRNA in question is available. This process will reduce the hazard of off target effects upon nucleic acid molecule delivery.

[0480] Identification of microRNA, microRNA target regions, and their expression patterns and role in biology have been reported (Bonauer et al., Curr Drug Targets 2010 11:943-949; Anand and Cheresh Curr Opin Hematol 2011 18:171-176; Contreras and Rao Leukemia 2012 26:404-413 (2011 Dec. 20. doi: 10.1038/leu.2011.356); Bartel Cell 2009 136:215-233; Landgraf et al, Cell, 2007 129:1401-1414; Gentner and Naldini, Tissue Antigens. 2012 80:393-403 and all references therein; each of which is herein incorporated by reference in its entirety).

[0481] For example, if the polynucleotide is not intended to be delivered to the liver but ends up there, then miR-122, a microRNA abundant in liver, can inhibit the expression of the polynucleotide if one or multiple target sites of miR-122 are engineered into the polynucleotide. Introduction of one or multiple binding sites for different microRNA can be engineered to further decrease the longevity, stability, and protein translation of a polynucleotide hence providing an additional layer of tenability beyond the stimulus selection, SRE design and payload variation.

[0482] As used herein, the term “microRNA site” refers to a microRNA target site or a microRNA recognition site, or any nucleotide sequence to which a microRNA binds or associates. It should be understood that “binding” may follow traditional Watson-Crick hybridization rules or may reflect any stable association of the microRNA with the target sequence at or adjacent to the microRNA site.

[0483] Conversely, for the purposes of the polynucleotides of the present disclosure, microRNA binding sites can be engineered out of (i.e. removed from) sequences in which they naturally occur in order to increase protein expression in specific tissues. For example, miR-122 binding sites may be removed to improve protein expression in the liver.

[0484] Regulation of expression in multiple tissues can be accomplished through introduction or removal or one or several microRNA binding sites.

[0485] Specifically, microRNAs are known to be differentially expressed in immune cells (also called hematopoietic cells), such as antigen presenting cells (APCs) (e.g. dendritic cells and macrophages), macrophages, monocytes, B lymphocytes, T lymphocytes, granulocytes, natural killer cells, etc. Immune cell specific microRNAs are involved in immunogenicity, autoimmunity, the immune-response to infection, inflammation, as well as unwanted immune response after gene therapy and tissue/organ transplantation. Immune cells specific microRNAs also regulate many aspects of development, proliferation, differentiation and apoptosis of hematopoietic cells (immune cells). For example, miR-142 and miR-146 are exclusively expressed in the immune cells, particularly abundant in myeloid dendritic cells. Introducing the miR-142 binding site into the 3′-UTR of a polypeptide of the present disclosure can selectively suppress the gene expression in the antigen presenting cells through miR-142 mediated mRNA degradation, limiting antigen presentation in professional APCs (e.g. dendritic cells) and thereby preventing antigen-mediated immune response after gene delivery (see, Annoni A et al., blood, 2009, 114, 5152-5161, the content of which is herein incorporated by reference in its entirety.)

[0486] In one embodiment, microRNAs binding sites that are known to be expressed in immune cells, in particular, the antigen presenting cells, can be engineered into the polynucleotides to suppress the expression of the polynucleotide in APCs through microRNA mediated RNA degradation, subduing the antigen-mediated immune response, while the expression of the polynucleotide is maintained in non-immune cells where the immune cell specific microRNAs are not expressed.

[0487] Many microRNA expression studies have been conducted, and are described in the art, to profile the differential expression of microRNAs in various cancer cells/tissues and other diseases. Some microRNAs are abnormally over-expressed in certain cancer cells and others are under-expressed. For example, microRNAs are differentially expressed in cancer cells (WO2008/154098, US2013/0059015, US2013/0042333, WO2011/157294); cancer stem cells (US2012/0053224); pancreatic cancers and diseases (US2009/0131348, US2011/0171646, US2010/0286232, US8389210); asthma and inflammation (US8415096); prostate cancer (US2013/0053264); hepatocellular carcinoma (WO2012/151212, US2012/0329672, WO2008/054828, US8252538); lung cancer cells (WO2011/076143, WO2013/033640, WO2009/070653, US2010/0323357); cutaneous T cell lymphoma (WO2013/011378); colorectal cancer cells (WO2011/0281756, WO2011/076142); cancer positive lymph nodes (WO2009/100430, US2009/0263803); nasopharyngeal carcinoma (EP2112235); chronic obstructive pulmonary disease (US2012/0264626, US2013/0053263); thyroid cancer (WO2013/066678); ovarian cancer cells US2012/0309645, WO2011/095623); breast cancer cells (WO2008/154098, WO2007/081740, US2012/0214699), leukemia and lymphoma (WO2008/073915, US2009/0092974, US2012/0316081, US2012/0283310, WO2010/018563, the content of each of which is incorporated herein by reference in their entirety).

[0488] In one embodiment, microRNA may be used as described herein in support of the creation of tunable biocircuits.

[0489] In some embodiments, effector modules may be designed to encode (as a DNA or RNA or mRNA) one or more payloads, SREs and/or regulatory sequence such as a microRNA or microRNA binding site. In some embodiments, any of the encoded payloads or SREs may be stabilized or de-stabilized by mutation and then combined with one or more regulatory sequences to generate a dual or multi-tuned effector module or biocircuit system.

[0490] Each aspect or tuned modality may bring to the effector module or biocircuit a differentially tuned feature. For example, an SRE may represent a destabilizing domain, while mutations in the protein payload may alter its cleavage sites or dimerization properties or half-life and the inclusion of one or more microRNA or microRNA binding site may impart cellular detargeting or trafficking features. Consequently, the present disclosure embraces biocircuits which are multifactorial in their tenability.

[0491] In some embodiments, compositions of the disclosure may include optional proteasome adaptors. As used herein, the term “proteasome adaptor” refers to any nucleotide/amino acid sequence that targets the appended payload for degradation. In some aspects, the adaptors target the payload for degradation directly thereby circumventing the need for ubiquitination reactions. Proteasome adaptors may be used in conjunction with destabilizing domains to reduce the basal expression of the payload. Exemplary proteasome adaptors include the UbL domain of Rad23 or hHR23b, HPV E7 which binds to both the target protein Rb and the S4 subunit of the proteasome with high affinity, which allows direct proteasome targeting, bypassing the ubiquitination machinery; the protein gankyrin which binds to Rb and the proteasome subunit S6.

[0492] Such biocircuits may be engineered to contain one, two, three, four or more tuned features.

### Polynucleotides

[0493] The present disclosure provides polynucleotides encoding novel hPDE5 DDs, effector modules comprising payloads and associated DDs, biocircuit systems comprising DDs and effector modules, and other components of the present disclosure.

[0494] The disclosure provides isolated biocircuit polypeptides, effector modules, stimulus response elements (SREs) and payloads, as well as polynucleotides encoding any of the foregoing; vectors comprising polynucleotides of the disclosure; and cells expressing polypeptides, polynucleotides and vectors of the disclosure. The polypeptides, polynucleotides, viral vectors and cells are useful for inducing anti-tumor immune responses in a subject.

[0495] The term “polynucleotide” or “nucleic acid molecule” in its broadest sense, includes any compound and/or substance that comprise a polymer of nucleotides, e.g., linked nucleosides. These polymers are often referred to as polynucleotides. Exemplary nucleic acids or polynucleotides of the disclosure include, but are not limited to, ribonucleic acids (RNAs), deoxyribonucleic acids (DNAs), threose nucleic acids (TNAs), glycol nucleic acids (GNAs), peptide nucleic acids (PNAs), locked nucleic acids (LNAs, including LNA having a β-D-ribo configuration, α-LNA having an α-L-ribo configuration (a diastereomer of LNA), 2′-amino-LNA having a 2′-amino functionalization, and 2′-amino-α-LNA having a 2′-amino functionalization) or hybrids thereof.

[0496] In some embodiments, polynucleotides of the disclosure may be a messenger RNA (mRNA) or any nucleic acid molecule and may or may not be chemically modified. In one aspect, the nucleic acid molecule is a mRNA. As used herein, the term “messenger RNA (mRNA)” refers to any polynucleotide which encodes a polypeptide of interest and which is capable of being translated to produce the encoded polypeptide of interest in vitro, in vivo, in situ or ex vivo.

[0497] Traditionally, the basic components of an mRNA molecule include at least a coding region, a 5′UTR, a 3′UTR, a 5′ cap and a poly-A tail. Building on this wild type modular structure, the present disclosure expands the scope of functionality of traditional mRNA molecules by providing payload constructs which maintain a modular organization, but which comprise one or more structural and/or chemical modifications or alterations which impart useful properties to the polynucleotide, for example tenability of function. As used herein, a “structural” feature or modification is one in which two or more linked nucleosides are inserted, deleted, duplicated, inverted or randomized in a polynucleotide without significant chemical modification to the nucleosides themselves. Because chemical bonds will necessarily be broken and reformed to effect a structural modification, structural modifications are of a chemical nature and hence are chemical modifications. However, structural modifications will result in a different sequence of nucleotides. For example, the polynucleotide “ATCG” may be chemically modified to “AT-5meC-G”. The same polynucleotide may be structurally modified from “ATCG” to “ATCCCG”. Here, the dinucleotide “CC” has been inserted, resulting in a structural modification to the polynucleotide.

[0498] In some embodiments, polynucleotides of the present disclosure may harbor 5′UTR sequences which play a role in translation initiation. 5′UTR sequences may include features such as Kozak sequences which are commonly known to be involved in the process by which the ribosome initiates translation of genes, Kozak sequences have the consensus XCCR(A/G) CCAUG, where R is a purine (adenine or guanine) three bases upstream of the start codon (AUG) and X is any nucleotide. In one embodiment, the Kozak sequence is ACCGCC. By engineering the features that are typically found in abundantly expressed genes of target cells or tissues, the stability and protein production of the polynucleotides of the disclosure can be enhanced.

[0499] Further provided are polynucleotides, which may contain an internal ribosome entry site (IRES) which play an important role in initiating protein synthesis in the absence of 5′ cap structure in the polynucleotide. An IRES may act as the sole ribosome binding site, or may serve as one of the multiple binding sites. Polynucleotides of the disclosure containing more than one functional ribosome binding site may encode several peptides or polypeptides that are translated independently by the ribosomes giving rise to bicistronic and/or multicistronic nucleic acid molecules. In one embodiment, the IRES may be SEQ ID NO: 8667.

[0500] In some embodiments, polynucleotides encoding biocircuits, effector modules, DDs and payloads may include from about 30 to about 100,000 nucleotides (e.g., from 30 to 50, from 30 to 100, from 30 to 250, from 30 to 500, from 30 to 1,000, from 30 to 1,500, from 30 to 3,000, from 30 to 5,000, from 30 to 7,000, from 30 to 10,000, from 30 to 25,000, from 30 to 50,000, from 30 to 70,000, from 100 to 250, from 100 to 500, from 100 to 1,000, from 100 to 1,500, from 100 to 3,000, from 100 to 5,000, from 100 to 7,000, from 100 to 10,000, from 100 to 25,000, from 100 to 50,000, from 100 to 70,000, from 100 to 100,000, from 500 to 1,000, from 500 to 1,500, from 500 to 2,000, from 500 to 3,000, from 500 to 5,000, from 500 to 7,000, from 500 to 10,000, from 500 to 25,000, from 500 to 50,000, from 500 to 70,000, from 500 to 100,000, from 1,000 to 1,500, from 1,000 to 2,000, from 1,000 to 3,000, from 1,000 to 5,000, from 1,000 to 7,000, from 1,000 to 10,000, from 1,000 to 25,000, from 1,000 to 50,000, from 1,000 to 70,000, from 1,000 to 100,000, from 1,500 to 3,000, from 1,500 to 5,000, from 1,500 to 7,000, from 1,500 to 10,000, from 1,500 to 25,000, from 1,500 to 50,000, from 1,500 to 70,000, from 1,500 to 100,000, from 2,000 to 3,000, from 2,000 to 5,000, from 2,000 to 7,000, from 2,000 to 10,000, from 2,000 to 25,000, from 2,000 to 50,000, from 2,000 to 70,000, and from 2,000 to 100,000 nucleotides). In some aspects, polynucleotides of the disclosure may include more than 10,000 nucleotides.

[0501] Regions of the polynucleotides which encode certain features such as cleavage sites, linkers, trafficking signals, tags or other features may range independently from 10-1,000 nucleotides in length (e.g., greater than 20, 30, 40, 45, 50, 55, 60, 70, 80, 90, 100, 120, 140, 160, 180, 200, 250, 300, 350, 400, 450, 500, 600, 700, 800, and 900 nucleotides or at least 10, 15, 20, 25, 30, 35, 40, 45, 50, 55, 60, 70, 80, 90, 100, 120, 140, 160, 180, 200, 250, 300, 350, 400, 450, 500, 600, 700, 800, 900, and 1,000 nucleotides).

[0502] In some embodiments, polynucleotides of the present disclosure may further comprise embedded regulatory moieties such as microRNA binding sites within the 3′UTR of nucleic acid molecules which when bind to microRNA molecules, down-regulate gene expression either by reducing nucleic acid molecule stability or by inhibiting translation. Conversely, for the purposes of the polynucleotides of the present disclosure, microRNA binding sites can be engineered out of (i.e. removed from) sequences in which they naturally occur in order to increase protein expression in specific tissues. For example, miR-142 and miR-146 binding sites may be removed to improve protein expression in the immune cells. In some embodiments, any of the encoded payloads may be regulated by an SRE and then combined with one or more regulatory sequences to generate a dual or multi-tuned effector module or biocircuit system.

[0503] In some embodiments, polynucleotides of the present disclosure may encode fragments, variants, derivatives of polypeptides of the disclosures. In some aspects, the variant sequence may keep the same or a similar activity. Alternatively, the variant may have an altered activity (e.g., increased or decreased) relative to the start sequence. Generally, variants of a particular polynucleotide or polypeptide of the disclosure will have at least about 40%, 45%, 50%, 55%, 60%, 65%, 70%, 75%, 80%, 85%, 90%, 91%, 92%, 93%, 94%, 95%, 96%, 97%, 98%, 99% but less than 100% sequence identity to that particular reference polynucleotide or polypeptide as determined by sequence alignment programs and parameters described herein and known to those skilled in the art. Such tools for alignment include those of the BLAST suite (Stephen et al., Gapped BLAST and PSI-BLAST: a new generation of protein database search programs, Nucleic Acids Res., 1997, 25:3389-3402.)

[0504] In some embodiments, polynucleotides of the present disclosure may be modified. As used herein, the terms “modified”, or as appropriate, “modification” refers to chemical modification with respect to A, G, U (T in DNA) or C nucleotides. Modifications may be on the nucleoside base and/or sugar portion of the nucleosides which comprise the polynucleotide. In some embodiments, multiple modifications are included in the modified nucleic acid or in one or more individual nucleoside or nucleotide. For example, modifications to a nucleoside may include one or more modifications to the nucleobase and the sugar. Modifications to the polynucleotides of the present disclosure may include any of those taught in, for example, International Publication NO. WO2013/052523, the contents of which are incorporated herein by reference in its entirety.

[0505] As described herein “nucleoside” is defined as a compound containing a sugar molecule (e.g., a pentose or ribose) or a derivative thereof in combination with an organic base (e.g., a purine or pyrimidine) or a derivative thereof (also referred to herein as “nucleobase”). As described herein, “nucleotide” is defined as a nucleoside including a phosphate group.

[0506] In some embodiments, the modification may be on the internucleoside linkage (e.g., phosphate backbone). Herein, in the context of the polynucleotide backbone, the phrases “phosphate” and “phosphodiester” are used interchangeably. Backbone phosphate groups can be modified by replacing one or more of the oxygen atoms with a different substituent. Further, the modified nucleosides and nucleotides can include the wholesale replacement of an unmodified phosphate moiety with another internucleoside linkage. Examples of modified phosphate groups include, but are not limited to, phosphorothioate, phosphonoselenoates, boranophosphates, boranophosphate esters, hydrogen phosphonates, phosphoramidates, phosphonodiamidites, alkyl or aryl phosphonates, and phosphotriesters. Phosphorodithioates have both non-linking oxygens replaced by sulfur. The phosphate linker can also be modified by the replacement of a linking oxygen with nitrogen (bridged phosphoramidates), sulfur (bridged phosphorothioates), and carbon (bridged methylene-phosphonates). Other modifications which may be used are taught in, for example, International Application NO.: WO2013/052523, the contents of which are incorporated herein by reference in their entirety.

[0507] Chemical modifications and/or substitution of the nucleotides or nucleobases of the polynucleotides of the disclosure which are useful in the present disclosure include any modified substitutes known in the art, for example, (±)1-(2-Hydroxypropyl)pseudouridine TP, (2R)-1-(2-Hydroxypropyl)pseudouridine TP, 1-(4-Methoxy-phenyl)pseudo-UTP-2′-O-dimethyladenosine, 1,2′-O-dimethylguanosine, 1,2′-O-dimethylinosine, 1-Hexyl-pseudo-UTP, 1-Homoallylpseudouridine TP, 1-Hydroxymethylpseudouridine TP, 1-iso-propyl-pseudo-UTP, 1-Me-2-thio-pseudo-UTP, 1-Me-4-thio-pseudo-UTP, 1-Me-alpha-thio-pseudo-UTP, 1-Me-GTP, 2′-Amino-2′-deoxy-ATP, 2′-Amino-2′-deoxy-CTP, 2′-Amino-2′-deoxy-GTP, 2′-Amino-2′-deoxy-UTP, 2′-Azido-2′-deoxy-ATP, tubercidine, undermodified hydroxywybutosine, uridine 5-oxyacetic acid, uridine 5-oxyacetic acid methyl ester, wybutosine, wyosine, xanthine, Xanthosine-5′-TP, xylo-adenosine, zebularine, α-thio-adenosine, α-thio-cytidine, α-thio-guanosine, and/or α-thio-uridine.

[0508] Polynucleotides of the present disclosure may comprise one or more of the modifications taught herein. Different sugar modifications, base modifications, nucleotide modifications, and/or internucleoside linkages (e.g., backbone structures) may exist at various positions in the polynucleotide of the disclosure. One of ordinary skill in the art will appreciate that the nucleotide analogs or other modification(s) may be located at any position(s) of a polynucleotide such that the function of the polynucleotide is not substantially decreased. A modification may also be a 5′ or 3′ terminal modification. The polynucleotide may contain from about 1% to about 100% modified nucleotides (either in relation to overall nucleotide content, or in relation to one or more types of nucleotide, i.e. any one or more of A, G, U or C) or any intervening percentage (e.g., from 1% to 20%, from 1% to 25%, from 1% to 50%, from 1% to 60%, from 1% to 70%, from 1% to 80%, from 1% to 90%, from 1% to 95%, from 10% to 20%, from 10% to 25%, from 10% to 50%, from 10% to 60%, from 10% to 70%, from 10% to 80%, from 10% to 90%, from 10% to 95%, from 10% to 100%, from 20% to 25%, from 20% to 50%, from 20% to 60%, from 20% to 70%, from 20% to 80%, from 20% to 90%, from 20% to 95%, from 20% to 100%, from 50% to 60%, from 50% to 70%, from 50% to 80%, from 50% to 90%, from 50% to 95%, from 50% to 100%, from 70% to 80%, from 70% to 90%, from 70% to 95%, from 70% to 100%, from 80% to 90%, from 80% to 95%, from 80% to 100%, from 90% to 95%, from 90% to 100%, and from 95% to 100%).

[0509] In some embodiments, one or more codons of the polynucleotides of the present disclosure may be replaced with other codons encoding the native amino acid sequence to tune the expression of the SREs, through a process referred to as codon selection. Since mRNA codon, and tRNA anticodon pools tend to vary among organisms, cell types, sub cellular locations and over time, the codon selection described herein is a spatiotemporal (ST) codon selection.

[0510] In some embodiments of the disclosure, certain polynucleotide features may be codon optimized. Codon optimization refers to a process of modifying a nucleic acid sequence for enhanced expression in the host cell by replacing at least 1, 2, 3, 4, 5, 10, 15, 20, 25, 50 or more codons of the native sequence with codons that are most frequently used in the genes of that host cell while maintaining the native amino acid sequence. Codon usage may be measured using the Codon Adaptation Index (CAI) which measures the deviation of a coding polynucleotide sequence from a reference gene set. Codon usage tables are available at the Codon Usage Database (www.kazusa.or.jp/codon/) and the CAI can be calculated by EMBOSS CAI program (emboss.sourceforge.net/). Codon optimization methods are known in the art and may be useful in efforts to achieve one or more of several goals. These goals include to match codon frequencies in target and host organisms to ensure proper folding, bias nucleotide content to alter stability or reduce secondary structures, minimize tandem repeat codons or base runs that may impair gene construction or expression, customize transcriptional and translational control regions, insert or remove protein signaling sequences, remove/add post translation modification sites in encoded protein (e.g. glycosylation sites), add, remove or shuffle protein domains, insert or delete restriction sites, modify ribosome binding sites and degradation sites, to adjust translational rates to allow the various domains of the protein to fold properly, or to reduce or eliminate problem secondary structures within the polynucleotide. Codon optimization tools, algorithms and services are known in the art, and non-limiting examples include services from GeneArt (Life Technologies), DNA2.0 (Menlo Park Calif.), OptimumGene (GenScript, Piscataway, N.J.), algorithms such as but not limited to, DNAWorks v3.2.3, and/or proprietary methods. In one embodiment, a polynucleotide sequence or portion thereof is codon optimized using optimization algorithms. Codon options for each amino acid are well-known in the art as are various species table for optimizing for expression in that particular species.

[0511] In some embodiments of the disclosure, certain polynucleotide features may be codon optimized. For example, a preferred region for codon optimization may be upstream (5′) or downstream (3′) to a region which encodes a polypeptide. These regions may be incorporated into the polynucleotide before and/or after codon optimization of the payload encoding region or open reading frame (ORF).

[0512] After optimization (if desired), the polynucleotide components are reconstituted and transformed into a vector such as, but not limited to, plasmids, viruses, cosmids, and artificial chromosomes.

[0513] Spatiotemporal codon selection may impact the expression of the polynucleotides of the disclosure, since codon composition determines the rate of translation of the mRNA species and its stability. For example, tRNA anticodons to optimized codons are abundant, and thus translation may be enhanced. In contrast, tRNA anticodons to less common codons are fewer and thus translation may proceed at a slower rate. Presnyak et al. have shown that the stability of an mRNA species is dependent on the codon content, and higher stability and thus higher protein expression may be achieved by utilizing optimized codons (Presnyak et al. (2015) Cell 160, 1111-1124; the contents of which are incorporated herein by reference in their entirety). Thus, in some embodiments, ST codon selection may include the selection of optimized codons to enhance the expression of the SRES, effector modules and biocircuits of the disclosure. In other embodiments, spatiotemporal codon selection may involve the selection of codons that are less commonly used in the genes of the host cell to decrease the expression of the compositions of the disclosure. The ratio of optimized codons to codons less commonly used in the genes of the host cell may also be varied to tune expression.

[0514] In some embodiments, certain regions of the polynucleotide may be modified using codon selection methods. For example, a preferred region for codon selection may be upstream (5′) or downstream (3′) to a region which encodes a polypeptide. These regions may be incorporated into the polynucleotide before and/or after codon selection of the payload encoding region or open reading frame (ORF).

[0515] The stop codon of the polynucleotides of the present disclosure may be modified to include sequences and motifs to alter the expression levels of the SREs, payloads and effector modules of the present disclosure. Such sequences may be incorporated to induce stop codon readthrough, wherein the stop codon may specify amino acids e.g. selenocysteine or pyrrolysine. In other instances, stop codons may be skipped altogether to resume translation through an alternate open reading frame. Stop codon read through may be utilized to tune the expression of components of the effector modules at a specific ratio (e.g. as dictated by the stop codon context). Examples of preferred stop codon motifs include UGAN, UAAN, and UAGN, where N is either C or U.

[0516] Suppression of termination occurs during translation of many viral mRNAs as a means of generating a second protein with extended carboxy terminus. In retroviruses, gag and pol genes are encoded by a single mRNA and separated by an amber termination codon UAG. Translational suppression of the amber codon allows synthesis of the gag pol precursor. Translation suppression is mediated by suppressor tRNAs that can recognize termination codons and insert a specific amino acid. In some embodiments, effector modules described herein may incorporate amber termination codons. Such codons may be used in lieu of or in addition to IRES and p2A sequences in bicistronic constructs. Stop codon read through may be combined with P2A to obtain low level expression of downstream gene (e.g. IL12). In some embodiments, the amber stop codons may be combined with tRNA expression or amino-acyl tRNA synthetase for further control. In one aspect, the payload may be a regulated tRNA synthetase.

[0517] Polynucleotide modifications and manipulations can be accomplished by methods known in the art such as, but not limited to, site directed mutagenesis and recombinant technology. The resulting modified molecules may then be tested for activity using in vitro or in vivo assays such as those described herein or any other suitable screening assay known in the art.

[0518] In some embodiments, polynucleotides of the disclosure may comprise two or more effector module sequences, or two or more payload sequences, which are in a pattern such as ABABAB or AABBAABBAABB or ABCABCABC or variants thereof repeated once, twice, or more than three times. In these patterns, each letter, A, B, or C represent a different effector module component.

[0519] In yet another embodiment, polynucleotides of the disclosure may comprise two or more effector module component sequences with each component having one or more SRE sequences (DD sequences), or two or more payload sequences. As a non-limiting example, the sequences may be in a pattern such as ABABAB or AABBAABBAABB or ABCABCABC or variants thereof repeated once, twice, or more than three times in each of the regions. As another non-limiting example, the sequences may be in a pattern such as ABABAB or AABBAABBAABB or ABCABCABC or variants thereof repeated once, twice, or more than three times across the entire polynucleotide. In these patterns, each letter, A, B, or C represent a different sequence or component.

[0520] According to the present disclosure, polynucleotides encoding distinct biocircuits, effector modules, SREs and payload constructs may be linked together through the 3′-end using nucleotides which are modified at the 3′-terminus. Chemical conjugation may be used to control the stoichiometry of delivery into cells. Polynucleotides can be designed to be conjugated to other polynucleotides, dyes, intercalating agents (e.g. acridines), cross-linkers (e.g. psoralen, mitomycin C), porphyrins (TPPC4, texaphyrin, Sapphyrin), polycyclic aromatic hydrocarbons (e.g., phenazine, dihydrophenazine), artificial endonucleases (e.g. EDTA), alkylating agents, phosphate, amino, mercapto, PEG (e.g., PEG-40K), MPEG, [MPEG]2, polyamino, alkyl, substituted alkyl, radiolabeled markers, enzymes, haptens (e.g. biotin), transport/absorption facilitators (e.g., aspirin, vitamin E, folic acid), synthetic ribonucleases, proteins, e.g., glycoproteins, or peptides, e.g., molecules having a specific affinity for a co-ligand, or antibodies e.g., an antibody, that binds to a specified cell type such as a cancer cell, endothelial cell, or bone cell, hormones and hormone receptors, non-peptidic species, such as lipids, lectins, carbohydrates, vitamins, cofactors, or a drug. As non-limiting examples, they may be conjugates with other immune conjugates.

[0521] In some embodiments, the compositions of the polynucleotides of the disclosure may generated by combining the various components of the effector modules using the Gibson assembly method. The Gibson assembly reaction consists of three isothermal reactions, each relying on a different enzymatic activity including a 5′ exonuclease which generates long overhangs, a polymerase which fills in the gaps of the annealed single strand regions and a DNA ligase which seals the nicks of the annealed and filled-in gaps. Polymerase chain reactions are performed prior to Gibson assembly which may be used to generate PCR products with overlapping sequence. These methods can be repeated sequentially, to assemble larger and larger molecules. For example, the method can comprise repeating a method as above to join a second set of two or more DNA molecules of interest to one another, and then repeating the method again to join the first and second set DNA molecules of interest, and so on. At any stage during these multiple rounds of assembly, the assembled DNA can be amplified by transforming it into a suitable microorganism, or it can be amplified in vitro (e.g., with PCR).

[0522] In some embodiments, polynucleotides of the disclosure may encode effector modules comprising a destabilizing domain (DD) and at least one payload taught herein. The DD domain may be a hPDE5 mutant comprising one, two, three, four, five or more mutations

[0523] In some embodiments, the effector module may be a PDE5-GFP fusion encoded by SEQ ID NO: 95-106; 205-222; 234-236; 256-260; 378-379; 469-503; 526-533; 8521-8550; 8644-8647; and 8611-8629. In some embodiments, the effector module may be hPDE5-CAR constructs, encoded by SEQ ID NO: 8285-8298 or a hPDE5-IL15-IL15Ra constructs, encoded by SEQ ID NO: 8352-8361; 8670-8684 or 8702-8718.

### Cells

[0524] In accordance with the present disclosure, cells genetically modified to express at least one biocircuit, SRE (e. g, DD), effector module and immunotherapeutic agent of the disclosure, are provided. Cells of the disclosure may include, without limitation, immune cells, stem cells and tumor cells. In some embodiments, immune cells are immune effector cells, including, but not limiting to, T cells such as CD8⁺ T cells and CD4⁺ T cells (e.g., Th1, Th2, Th17, Foxp3+ cells), memory T cells such as T memory stem cells, central T memory cells, and effector memory T cells, terminally differentiated effector T cells, natural killer (NK) cells, NK T cells, tumor infiltrating lymphocytes (TILs), cytotoxic T lymphocytes (CTLs), regulatory T cells (Tregs), and dendritic cells (DCs), other immune cells that can elicit an effector function, or the mixture thereof. T cells may be Tαβ cells and Tγδ cells. In some embodiments, stem cells may be from human embryonic stem cells, mesenchymal stem cells, and neural stem cells. In some embodiments, T cells may be depleted endogenous T cell receptors (See U.S. Pat. Nos. 9,273,283; 9,181,527; and 9,028,812; the contents of each of which are incorporated herein by reference in their entirety).

[0525] In some embodiments, cells of the disclosure may be autologous, allogeneic, syngeneic, or xenogeneic in relation to a particular individual subject.

[0526] In some embodiments, cells of the disclosure may be mammalian cells, particularly human cells. Cells of the disclosure may be primary cells or immortalized cell lines.

[0527] In some embodiments, cells of the disclosure may include expansion factors as payload to trigger proliferation and expansion of the cells. Exemplary payloads include RAS such as KRAS, NRAS, RRAS, RRAS2, MRAS, ERAS, and HRAS, DIRAS such as DIRAS1, DIRAS2, and DIRAS3, NKIRAS such as NKIRAS1, and NKIRAS2, RAL such as RALA, and RALB, RAP such as RAP1A, RAP1B, RAP2A, RAP2B, and RAP2C, RASD such as RASD1, and RASD2, RASL such as RASL10A, RASL10B, RASL11A, RASL11B, and RASL12, REM such as REM1, and REM2, GEM, RERG, RERGL, and RRAD.

[0528] Engineered immune cells can be accomplished by transducing a cell with a polypeptide of a biocircuit, an effector module, a SRE and/or a payload of interest (i.e., immunotherapeutic agent), or a polynucleotide encoding said polypeptide, or a vector comprising said polynucleotide. The vector may be a viral vector such as a lentiviral vector, a gamma-retroviral vector, a recombinant AAV, an adenoviral vector and an oncolytic viral vector. In other aspects, non-viral vectors for example, nanoparticles and liposomes may also be used. In some embodiments, immune cells of the disclosure are genetically modified to express at least one immunotherapeutic agent of the disclosure which is tunable using a stimulus. In some examples, two, three or more immunotherapeutic agents constructed in the same biocircuit and effector module are introduced into a cell. In other examples, two, three, or more biocircuits, effector modules, each of which comprises an immunotherapeutic agent, may be introduced into a cell.

[0529] In some embodiments, immune cells of the disclosure may be T cells modified to express an antigen-specific T cell receptor (TCR), or an antigen specific chimeric antigen receptor (CAR) taught herein (known as CAR T cells). Accordingly, at least one polynucleotide encoding a CAR system (or a TCR) described herein, or a vector comprising the polynucleotide is introduced into a T cell. The T cell expressing the CAR or TCR binds to a specific antigen via the extracellular targeting moiety of the CAR or TCR, thereby a signal via the intracellular signaling domain (s) is transmitted into the T cell, and as a result, the T cell is activated. The activated CAR T cell changes its behavior including release of a cytotoxic cytokine (e.g., a tumor necrosis factor, and lymphotoxin, etc.), improvement of a cell proliferation rate, change in a cell surface molecule, or the like. Such changes cause destruction of a target cell expressing the antigen recognized by the CAR or TCR. In addition, release of a cytokine or change in a cell surface molecule stimulates other immune cells, for example, a B cell, a dendritic cell, a NK cell, and a macrophage.

[0530] The CAR introduced into a T cell may be a first-generation CAR including only the intracellular signaling domain from TCR CD3zeta, or a second-generation CAR including the intracellular signaling domain from TCR CD3zeta and a costimulatory signaling domain, or a third-generation CAR including the intracellular signaling domain from TCR CD3zeta and two or more costimulatory signaling domains, or a split CAR system, or an on/off switch CAR system. In one example, the expression of the CAR or TCR is controlled by a destabilizing domain (DD) such as a hDHFR mutant, in the effector module of the disclosure. The presence or absence of hDHFR binding ligand such as TMP is used to tune the CAR or TCR expression in transduced T cells or NK cells.

[0531] In some embodiments, CAR T cells of the disclosure may be further modified to express another one, two, three or more immunotherapeutic agents. The immunotherapeutic agents may be another CAR or TCR specific to a different target molecule; a cytokine such as IL2, IL12, IL15 and IL18, or a cytokine receptor such as IL15Ra; a chimeric switch receptor that converts an inhibitory signal to a stimulatory signal; a homing receptor that guides adoptively transferred cells to a target site such as the tumor tissue; an agent that optimizes the metabolism of the immune cell; or a safety switch gene (e.g., a suicide gene) that kills activated T cells when a severe event is observed after adoptive cell transfer or when the transferred immune cells are no-longer needed. These molecules may be included in the same effector module or in separate effector modules.

[0532] In one embodiment, the CAR T cell (including TCR T cell) of the disclosure may be an “armed” CAR T cell which is transformed with an effector module comprising a CAR and an effector module comprising a cytokine. The inducible or constitutively secrete active cytokines further armor CAR T cells to improve efficacy and persistence. In this context, such CAR T cell is also referred to as “armored CAR T cell”. The “armor” molecule may be selected based on the tumor microenvironment and other elements of the innate and adaptive immune systems. In some embodiments, the molecule may be a stimulatory factor such as IL2, IL12, IL15, IL18, type I IFN, CD40L and 4-1BBL which have been shown to further enhance CART cell efficacy and persistence in the face of a hostile tumor microenvironment via different mechanisms (Yeku et al., Biochem Soc Trans., 2016, 44(2): 412-418).

[0533] In some aspects, the armed CART cell of the disclosure is modified to express a CD19 CAR and IL12. Such T cells, after CAR mediated activation in the tumor, release inducible IL12 which augments T-cell activation and attracts and activates innate immune cells to eliminate CD19-negative cancer cells.

[0534] In one embodiment, T cells of the disclosure may be modified to express an effector module comprising a CAR and an effector module comprising a suicide gene.

[0535] In one embodiment, the CAR T cell (including TCR T cell) of the disclosure may be transformed with effector modules comprising a cytokine and a safety switch gene (e.g., suicide gene). The suicide gene may be an inducible caspase such as caspase 9 which induces apoptosis, when activated by an extracellular stimulus of a biocircuit system. Such induced apoptosis eliminates transferred cell as required to decrease the risk of direct toxicity and uncontrolled cell proliferation.

[0536] In some embodiments, immune cells of the disclosure may be NK cells modified to express an antigen-specific T cell receptor (TCR), or an antigen specific chimeric antigen receptor (CAR) taught herein.

[0537] Natural killer (NK) cells are members of the innate lymphoid cell family and characterized in humans by expression of the phenotypic marker CD56 (neural cell adhesion molecule) in the absence of CD3 (T-cell co-receptor). NK cells are potent effector cells of the innate immune system which mediate cytotoxic attack without the requirement of prior antigen priming, forming the first line of defense against diseases including cancer malignancies and viral infection.

[0538] Several pre-clinical and clinical trials have demonstrated that adoptive transfer of NK cells is a promising treatment approach against cancers such as acute myeloid leukemia (Ruggeri et al., Science; 2002, 295: 2097-2100; and Geller et al., Immunotherapy, 2011, 3: 1445-1459). Adoptive transfer of NK cells expressing CAR such as DAP12-Based Activating CAR revealed improved eradication of tumor cells (Topfer et al., J Immunol. 2015; 194:3201-3212). NK cell engineered to express a CS-1 specific CAR also displayed enhanced cytolysis and interferon-γ (IFN γ) production in multiple myeloma (Chu et al., Leukemia, 2014, 28(4): 917-927).

[0539] NK cell activation is characterized by an array of receptors with activating and inhibitory functions. The important activation receptors on NK cells include CD94/NKG2C and NKG2D (the C-type lectin-like receptors), and the natural cytotoxicity receptors (NCR) NKp30, NKp44 and NKp46, which recognize ligands on tumor cells or virally infected cells. NK cell inhibition is essentially mediated by interactions of the polymorphic inhibitory killer cell immunoglobulin-like receptors (KIRs) with their cognate human-leukocyte-antigen (HLA) ligands via the alpha-1 helix of the HLA molecule. The balance between signals that are generated from activating receptors and inhibitory receptors mainly determines the immediate cytotoxic activation.

[0540] NK cells may be isolated from peripheral blood mononuclear cells (PBMCs), or derived from human embryonic stem (ES) cells and induced pluripotent stem cells (iPSCs). The primary NK cells isolated from PBMCs may be further expanded for adoptive immunotherapy. Strategies and protocols useful for the expansion of NK cells may include interleukin 2 (IL2) stimulation and the use of autologous feeder cells, or the use of genetically modified allogeneic feeder cells. In some aspects, NK cells can be selectively expanded with a combination of stimulating ligands including IL15, IL21, IL2, 4-1BBL, IL12, IL18, MICA, 2B4, LFA-1, and BCM1/SLAMF2 (e.g., US patent publication NO: US20150190471).

[0541] Immune cells expressing effector modules comprising a CAR and/or other immunotherapeutic agents can be used as cancer immunotherapy. The immunotherapy comprises the cells expressing a CAR and/or other immunotherapeutic agents as an active ingredient, and may further comprise a suitable excipient. Examples of the excipient may include the pharmaceutically acceptable excipients, including various cell culture media, and isotonic sodium chloride.

[0542] In some embodiments, cells of the present disclosure may be dendritic cells that are genetically modified to express the compositions of the disclosure. Such cells may be used as cancer vaccines.

### III. Pharmaceutical Compositions and Formulations

[0543] The present disclosure further provides pharmaceutical compositions comprising one or more biocircuits, effector modules, SREs (e.g., DDs), stimuli and payloads of interest (i.e., immunotherapeutic agents), vectors, cells and other components of the disclosure, and optionally at least one pharmaceutically acceptable excipient or inert ingredient.

[0544] As used herein the term “pharmaceutical composition” refers to a preparation of biocircuits, SREs, stimuli and payloads of interest (i.e., immunotherapeutic agents), other components, vectors, cells and described herein, or pharmaceutically acceptable salts thereof, optionally with other chemical components such as physiologically suitable carriers and excipients. The pharmaceutical compositions of the disclosure comprise an effective amount of one or more active compositions of the disclosure. The preparation of a pharmaceutical composition that contains at least one composition of the present disclosure and/or an additional active ingredient will be known to those skilled in the art considering the present disclosure, as exemplified by Remington's Pharmaceutical Sciences, 18th Ed. Mack Printing Company, 1990, incorporated herein by reference.

[0545] The term “excipient” or “inert ingredient” refers to an inactive substance added to a pharmaceutical composition and formulation to further facilitate administration of an active ingredient. For the purposes of the present disclosure, the phrase “active ingredient” generally refers to any one or more biocircuits, effector modules, SREs, stimuli and payloads of interest (i.e., immunotherapeutic agents), other components, vectors, and cells to be delivered as described herein. The phrases “pharmaceutically acceptable” refers to molecular entities and compositions that do not produce an adverse, allergic or other untoward reaction when administered to an animal, such as, for example, a human, as appropriate.

[0546] In some embodiments, pharmaceutical compositions and formulations are administered to humans, human patients or subjects. Although the descriptions of pharmaceutical compositions provided herein are principally directed to pharmaceutical compositions which are suitable for administration to humans, it will be understood by the skilled artisan that such compositions are generally suitable for administration to any other animal, e.g., to non-human animals, e.g. non-human mammals Subjects to which administration of the pharmaceutical compositions is contemplated include, but are not limited to, non-human mammals, including agricultural animals such as cattle, horses, chickens and pigs, domestic animals such as cats, dogs, or research animals such as mice, rats, rabbits, dogs and non-human primates. It will be understood that, for human administration, preparations should meet sterility, pyrogenicity, general safety and purity standards as required by FDA Office of Biological Standards.

[0547] A pharmaceutical composition and formulation in accordance with the disclosure may be prepared, packaged, and/or sold in bulk, as a single unit dose, and/or as a plurality of single unit doses. As used herein, a “unit dose” is discrete amount of the pharmaceutical composition comprising a predetermined amount of the active ingredient. The amount of the active ingredient is generally equal to the dosage of the active ingredient which would be administered to a subject and/or a convenient fraction of such a dosage such as, for example, one-half or one-third of such a dosage.

[0548] The compositions of the present disclosure may be formulated in any manner suitable for delivery. The formulation may be, but is not limited to, nanoparticles, poly (lactic-co-glycolic acid) (PLGA) microspheres, lipidoids, lipoplex, liposome, polymers, carbohydrates (including simple sugars), cationic lipids and combinations thereof.

[0549] In one embodiment, the formulation is a nanoparticle which may comprise at least one lipid. The lipid may be selected from, but is not limited to, DLin-DMA, DLin-K-DMA, 98N12-5, C12-200, DLin-MC3-DMA, DLin-KC2-DMA, DODMA, PLGA, PEG, PEG-DMG and PEGylated lipids. In another aspect, the lipid may be a cationic lipid such as, but not limited to, DLin-DMA, DLin-D-DMA, DLin-MC3-DMA, DLin-KC2-DMA and DODMA.

[0550] For polynucleotides of the disclosure, the formulation may be selected from any of those taught, for example, in International Application PCT/US2012/069610, the contents of which are incorporated herein by reference in its entirety.

[0551] Relative amounts of the active ingredient, the pharmaceutically acceptable excipient or inert ingredient, and/or any additional ingredients in a pharmaceutical composition in accordance with the disclosure will vary, depending upon the identity, size, and/or condition of the subject treated and further depending upon the route by which the composition is to be administered. By way of example, the composition may comprise between 0.1 and 100, e.g., between 0.5 and 50, between 1-30, between 5-80, at least 80 (w/w) active ingredient.

[0552] Efficacy of treatment or amelioration of disease can be assessed, for example by measuring disease progression, disease remission, symptom severity, reduction in pain, quality of life, dose of a medication required to sustain a treatment effect, level of a disease marker or any other measurable parameter appropriate for a given disease being treated or targeted for prevention. It is well within the ability of one skilled in the art to monitor efficacy of treatment or prevention by measuring any one of such parameters, or any combination of parameters. In connection with the administration of compositions of the present disclosure, “effective against” for example a cancer, indicates that administration in a clinically appropriate manner results in a beneficial effect for at least a statistically significant fraction of patients, such as an improvement of symptoms, a cure, a reduction in disease load, reduction in tumor mass or cell numbers, extension of life, improvement in quality of life, or other effect generally recognized as positive by medical doctors familiar with treating the particular type of cancer.

[0553] A treatment or preventive effect is evident when there is a statistically significant improvement in one or more parameters of disease status, or by a failure to worsen or to develop symptoms where they would otherwise be anticipated. As an example, a favorable change of at least 10 in a measurable parameter of disease, and preferably at least 20, 30, 40, 50 or more can be indicative of effective treatment. Efficacy for a given composition or formulation of the present disclosure can also be judged using an experimental animal model for the given disease as known in the art. When using an experimental animal model, efficacy of treatment is evidenced when a statistically significant change is observed.

### IV. Delivery Modalities and/or Vectors

### Vectors

[0554] The present disclosure also provides vectors that package polynucleotides of the disclosure encoding biocircuits, effector modules, SREs (DDs) and payload constructs, and combinations thereof. In some embodiments, polynucleotides encoding destabilizing domains, effector modules and biocircuit systems, are provided. Vectors comprising polynucleotides of the disclosure are provided. In some aspects, the vector may be a non-viral vector, or a viral vector. In some embodiments, the vector of the disclosure is a viral vector. The viral vector may include, but is not limited to a retroviral vector, an adenoviral vector, an adeno-associated viral vector, or a lentiviral vector. In some embodiments, the vector of the disclosure may be a non-viral vector, such as a nanoparticles and liposomes.

[0555] Vectors of the present disclosure may also be used to deliver the packaged polynucleotides to a cell, a local tissue site or a subject. These vectors may be of any kind, including DNA vectors, RNA vectors, plasmids, viral vectors and particles. Viral vector technology is well known and described in Sambrook et al. (2001, Molecular Cloning: A Laboratory Manual, Cold Spring Harbor Laboratory, New York). Viruses, which are useful as vectors include, but are not limited to lentiviral vectors, adenoviral vectors, adeno-associated viral (AAV) vectors, herpes simplex viral vectors, retroviral vectors, oncolytic viruses, and the like.

[0556] In general, vectors contain an origin of replication functional in at least one organism, a promoter sequence and convenient restriction endonuclease site, and one or more selectable markers e.g. a drug resistance gene.

[0557] As used herein a promoter is defined as a DNA sequence recognized by transcription machinery of the cell, required to initiate specific transcription of the polynucleotide sequence of the present disclosure. Vectors can comprise native or non-native promoters operably linked to the polynucleotides of the disclosure. The promoters selected may be strong, weak, constitutive, inducible, tissue specific, development stage-specific, and/or organism specific. One example of a suitable promoter is the immediate early cytomegalovirus (CMV) promoter sequence. This promoter sequence is a strong constitutive promoter sequence capable of driving high levels of expression of polynucleotide sequence that is operatively linked to it. Another example of a preferred promoter is Elongation Growth Factor-1. Alpha (EF-1. alpha). Other constitutive promoters may also be used, including, but not limited to simian virus 40 (SV40), mouse mammary tumor virus (MMTV), human immunodeficiency virus (HIV), long terminal repeat (LTR), promoter, an avian leukemia virus promoter, an Epstein-Barr virus immediate early promoter, a Rous sarcoma virus promoter as well as human gene promoters including, but not limited to the phosphoglycerate kinase (PGK) promoter, actin promoter, the myosin promoter, the hemoglobin promoter, the Ubiquitin C (Ubc) promoter, the human U6 small nuclear protein promoter and the creatine kinase promoter. In some instances, inducible promoters such as but not limited to metallothionine promoter, glucocorticoid promoter, a progesterone promoter, and a tetracycline promoter may be used. In some embodiments, the promoter may be selected from the following a CMV promoter, comprising a nucleotide sequence of SEQ ID NO: 335, an EF1a promoter, comprising a nucleotide sequence of SEQ ID NOs. 336-337, and a PGK promoter, comprising a nucleotide sequence of SEQ ID NO: 338.

[0558] In some embodiments, the optimal promoter may be selected based on its ability to achieve minimal expression of the SREs and payloads of the disclosure in the absence of the ligand and detectable expression in the presence of the ligand.

[0559] Additional promoter elements e.g. enhancers may be used to regulate the frequency of transcriptional initiation. Such regions may be located 10-100 base pairs upstream or downstream of the start site. In some instances, two or more promoter elements may be used to cooperatively or independently activate transcription.

[0560] In some embodiments, the recombinant expression vector may comprise regulatory sequences, such as transcription and translation initiation and termination codons, which are specific to the type of host cell into which the vector is to be introduced.

### 1. Lentiviral Vectors

[0561] In some embodiments, lentiviral vectors/particles may be used as vehicles and delivery modalities. Lentiviruses are subgroup of the Retroviridae family of viruses, named because reverse transcription of viral RNA genomes to DNA is required before integration into the host genome. As such, the most important features of lentiviral vehicles/particles are the integration of their genetic material into the genome of a target/host cell. Some examples of lentivirus include the Human Immunodeficiency Viruses: HIV-1 and HIV-2, the Simian Immunodeficiency Virus (SIV), feline immunodeficiency virus (FIV), bovine immunodeficiency virus (BIV), Jembrana Disease Virus (JDV), equine infectious anemia virus (EIAV), equine infectious anemia virus. visna-maedi and caprine arthritis encephalitis virus (CAEV).

[0562] Typically, lentiviral particles making up the gene delivery vehicle are replication defective on their own (also referred to as “self-inactivating”). Lentiviruses can infect both dividing and non-dividing cells by virtue of the entry mechanism through the intact host nuclear envelope (Naldini L et al., Curr. Opin. Biotechnol, 1998, 9: 457-463). Recombinant lentiviral vehicles/particles have been generated by multiply attenuating the HIV virulence genes, for example, the genes Env, Vif, Vpr, Vpu, Nef and Tat are deleted making the vector biologically safe. Correspondingly, lentiviral vehicles, for example, derived from HIV-1/HIV-2 can mediate the efficient delivery, integration and long-term expression of transgenes into non-dividing cells. As used herein, the term “recombinant” refers to a vector or other nucleic acid containing both lentiviral sequences and non-lentiviral retroviral sequences.

[0563] Lentiviral particles may be generated by co-expressing the virus packaging elements and the vector genome itself in a producer cell such as human HEK293T cells. These elements are usually provided in three (in second generation lentiviral systems) or four separate plasmids (in third generation lentiviral systems). The producer cells are co-transfected with plasmids that encode lentiviral components including the core (i.e. structural proteins) and enzymatic components of the virus, and the envelope protein(s) (referred to as the packaging systems), and a plasmid that encodes the genome including a foreign transgene, to be transferred to the target cell, the vehicle itself (also referred to as the transfer vector). In general, the plasmids or vectors are included in a producer cell line. The plasmids/vectors are introduced via transfection, transduction or infection into the producer cell line. Methods for transfection, transduction or infection are well known by those of skill in the art. As non-limiting example, the packaging and transfer constructs can be introduced into producer cell lines by calcium phosphate transfection, lipofection or electroporation, generally together with a dominant selectable marker, such as neo, DHFR, Gln synthetase or ADA, followed by selection in the presence of the appropriate drug and isolation of clones.

[0564] The producer cell produces recombinant viral particles that contain the foreign gene, for example, the effector module of the present disclosure. The recombinant viral particles are recovered from the culture media and titrated by standard methods used by those of skill in the art. The recombinant lentiviral vehicles can be used to infect target cells.

[0565] Cells that can be used to produce high-titer lentiviral particles may include, but are not limited to, HEK293T cells, 2936 cells, STAR cells (Relander et al., Mol. Ther 2005, 11: 452-459), FreeStyle™ 293 Expression System (ThermoFisher, Waltham, Mass.), and other HEK293T-based producer cell lines (e.g., Stewart et al., Hum Gene Ther. 2011, 22(3):357-369; Lee et al., Biotechnol Bioeng, 2012, 10996): 1551-1560; Throm et al., Blood. 2009, 113(21): 5104-5110; the contents of each of which are incorporated herein by reference in their entirety).

[0566] In some aspects, the envelope proteins may be heterologous envelop proteins from other viruses, such as the G protein of vesicular stomatitis virus (VSV G) or baculoviral gp64 envelop proteins. The VSV-G glycoprotein may especially be chosen among species classified in the vesiculovirus genus: Carajas virus (CJSV), Chandipura virus (CHPV), Cocal virus (COCV), Isfahan virus (ISFV), Maraba virus (MARAV), Piry virus (PIRYV), Vesicular stomatitis Alagoas virus (VSAV), Vesicular stomatitis Indiana virus (VSIV) and Vesicular stomatitis New Jersey virus (VSNJV) and/or stains provisionally classified in the vesiculovirus genus as Grass carp rhabdovirus, BeAn 157575 virus (BeAn 157575), Boteke virus (BTKV), Calchaqui virus (CQIV), Eel virus American (EVA), Gray Lodge virus (GLOV), Jurona virus (JURY), Klamath virus (KLAV), Kwatta virus (KWAV), La Joya virus (LJV), Malpais Spring virus (MSPV), Mount Elgon bat virus (MEBV), Perinet virus (PERV), Pike fry rhabdovirus (PFRV), Porton virus (PORV), Radi virus (RADIV), Spring viremia of carp virus (SVCV), Tupaia virus (TUPV), Ulcerative disease rhabdovirus (UDRV) and Yug Bogdanovac virus (YBV). The gp64 or other baculoviral env protein can be derived from Autographa californica nucleopolyhedrovirus (AcMNPV), Anagrapha falcifera nuclear polyhedrosis virus, Bombyx mori nuclear polyhedrosis virus, Ghoristoneura fumiferana nucleopolyhedrovirus, Orgyia pseudotsugata single capsid nuclear polyhedrosis virus, Epiphyas postvittana nucleopolyhedrovirus, Hyphantria cunea nucleopolyhedrovirus, Galleria mellonella nuclear polyhedrosis virus, Dhori virus, Thogoto virus, Antheraea pemyi nucleopolyhedrovirus or Batken virus.

[0567] Additional elements provided in lentiviral particles may comprise retroviral LTR (long-terminal repeat) at either 5′ or 3′ terminus, a retroviral export element, optionally a lentiviral reverse response element (RRE), a promoter or active portion thereof, and a locus control region (LCR) or active portion thereof. Other elements include central polypurine tract (cPPT) sequence to improve transduction efficiency in non-dividing cells, Woodchuck Hepatitis Virus (WHP) Posttranscriptional Regulatory Element (WPRE) which enhances the expression of the transgene, and increases titer. The effector module is linked to the vector.

[0568] Methods for generating recombinant lentiviral particles are discussed in the art, for example, U.S. Pat. Nos. 8,846,385; 7,745,179; 7,629,153; 7,575,924; 7,179,903; and 6,808,905; the contents of each of which are incorporated herein by reference in their entirety.

[0569] Lentivirus vectors used may be selected from, but are not limited to pLVX, pLenti, pLenti6, pLJM1, FUGW, pWPXL, pWPI, pLenti CMV puro DEST, pLJM1-EGFP, pULTRA, pInducer20, pHIV-EGFP, pCW57.1, pTRPE, pELPS, pRRL, and pLionII.

[0570] Lentiviral vehicles known in the art may also be used (See, U.S. Pat. Nos. 9,260,725; 9,068,199; 9,023,646; 8,900,858; 8,748,169; 8,709,799; 8,420,104; 8,329,462; 8,076,106; 6,013,516; and 5,994,136; International Patent Publication NO.: WO2012079000; the contents of each of which are incorporated herein by reference in their entirety).

### Lentiviral Vectors and Cell Engineering

[0571] Lentiviral vectors are used for introducing transgenes into T cells (e.g., primary human T cells or Jurkat cells) for preclinical research and clinical applications, including recently approved products such as Tisagenlecleucel (KYMRIAH®) for relapsed/refractory B-cell lymphoma. VSV-G pseudotyped 3rd generation lentiviral vectors offer high titers, high transduction efficiency and safety, and have become the vectors of choice for T cell engineering. While not wishing to be bound by theory, T cell engineering usually involves T cell activation by CD3/CD28 antibodies, followed by lentivirus transduction, and then cell expansion which can last from 5 to 30 days (e.g., 9 to 14 days or 9 to 15 days). In general, lentivirus transgene integration may take over 7 days to fully stabilize in T cells (e.g., primary human T cells or Jurkat cells). While longer cultures can increase the cell numbers, the longer cultures can also change the T cell phenotype to a more differentiated state. Therefore, the duration of ex vivo culture can impact the persistence and efficacy of CAR T cells. For example, cells cultured for shorter duration may display a less differentiated phenotype and can be highly efficacious in preclinical models.

[0572] While not wishing to be bound by theory, the state of T cell differentiation may influence the engraftment and persistence of T cells following adoptive transfer. Ghassemi et al (Reducing Ex Vivo Culture Improves the Antileukemic Activity of Chimeric Antigen Receptor (CAR) T Cells. Cancer Immunol Res; 6(9) September 2018; the contents of which are herein incorporated by reference in their entirety) describe primary human T cell differentiation over time and saw that early harvested CAR T cells exhibited enhanced effector function and proliferation, as well as enhanced potency and persistence in vivo.

[0573] Lentivirus dynamics such as transduction, integration and/or expression kinetics of lentivirally introduced transgenes in T cells (e.g., primal), human T cells or Jurkat cells) ex vivo may impact the efficacy and durability of in vivo anti-tumor responses. Some type of T cells may produce different results. For example, the Jurkat cell line may not provide the dynamic range of expression as primary human T cells. Methods to evaluate these lentivirus dynamics are known in the art and are described herein.

[0574] In some embodiment, to determine the transgene expression kinetics CD3/CD28 activated primary human T cells can be transduced with lentivirus carrying a transgene (e.g., a regulated transgene or constitutive transgene such as CD19 CAR, IL12, fluorescent protein or any transgene (e.g., payload) described herein). The cells may be analyzed by methods described herein and/or known in the art for viability, viral genomic integration (e.g., by using quantitative PCR), transcript levels (e.g., by using quantitative RT-PCR), and cell surface expression of the transgene if applicable (e.g., if the transgene is or includes CD19 CAR then the surface expression of the CD19 CAR can be evaluated). The cells may be analyzed prior to transduction and/or after transduction such as 1 day, 2 days, 3 days, 4 days, 5 days, 6 days, 7 days, 8 days, 9 days, 10 days, 11 days, 12 days, 13 days, 14 days, 15 days, 16 days, 17 days, 18 days, 19 days, 20 days, 21 days, 22 days, 23 days, 24 days, 25 days, 26 days, 27 days, 28 days, 29 days, 30 or more than 30 days after transduction. As a non-limiting example, the cells may be analyzed at various time points between 3 to 14 days after transduction (e.g., 3 days, 4 days, 5 days, 6 days, 7 days, 8 days, 9 days, 10 days, 11 days, 12 days, 13 days, and/or 14 days). As a non-limiting example, the cells may be analyzed 3 to 15 days after transduction. As a non-limiting example, the cells may be analyzed 9 to 15 days after transduction.

[0575] In some embodiments, the CD3/CD28 activated primary human T cells can be reactivated with CD3/CD28 beads after transduction. The cells may be reactivated 5 days, 6 days, 7 days, 8 days, 9 days, 10 days, 11 days, 12 days, 13 days, 14 days, 15 days, 16 days, 17 days, 18 days, 19 days, 20 days, 21 days, 22 days, 23 days, 24 days, 25 days, 26 days, 27 days, 28 days, 29 days, 30 or more than 30 days after transduction. The cells may be analyzed by methods described herein and/or known in the art for viability, viral genomic integration (e.g., by using quantitative PCR), transcript levels (e.g., by using quantitative RT-PCR), cell surface expression of the transgene if applicable (e.g., if the transgene is or includes CD19 CAR then the surface expression of the CD19 CAR can be evaluated), copy number, and/or mRNA levels.

[0576] In some embodiments, the cell viability of activated primary human T cells transduced with lentivirus carrying a transgene is greater than 65%, 70%, 75%, 80%, 85%, 90%, 95%, 97%, or 99%. As a non-limiting example, the cell viability is greater than 90%. As a non-limiting example, the cell viability is greater than 85%.

[0577] In some embodiments, the cell viability of Jurkat cells transduced with lentivirus carrying a transgene is greater than 65%, 70%, 75%, 80%, 85%, 90%, 95%, 97%, or 99%. As a non-limiting example, the cell viability is greater than 90%. As a non-limiting example, the cell viability is greater than 85%.

[0578] In some embodiments, the integration of the transgene into the genome of the cell may be at or above the saturation point. As a non-limiting example, the saturation point may be 3 copies per cell.

[0579] In some embodiments, the integration of the transgene into the genome may be high in the initial timepoints evaluated and then decline to a lower integration value before becoming stable for the remainder of the culture. As a non-limiting example, the integration may be up to 20 copies per cell of the transgene into the genome during the early timepoints before declining to 2 copies per cell and being stable throughout the remainder of the culture.

[0580] In some embodiments, the transduction of ability of T cells may be evaluated. T cells from at least one donor may be transduced with a lentivirus containing a transgene at a dose that is predicted to reach the saturating levels (e.g., enough virus that each cell should contain a copy if a Poisson distribution is expected) and a higher lentivirus dose that exceeds saturation 5 times. Copies per cell, percentage and MFI of cells (or concentration in media of transgene) may be detected in order to determine if all cells are expressing transgene. As a non-limiting example, T cells from two distinct donors may be transduced with lentivirus which includes a transgene. The transduction may be at two doses, saturation and 5× saturation, and show that 5-10 days after transduction that all groups may reach or exceed a predicted saturating level of integrated transgene and similar expression intensity across groups but not all cells are expressing the transgene. Not all T cells may have equal transduction susceptibility, even when sourced from the same donor. The fraction of total cells that express GFP (above the detection threshold) may vary between donors, lots and/or viral dose. The percent of total cells that express GFP from a single donor may be between 70% and 95%, such as, but not limited to, 70%, 70.1%, 70.2%, 70.3%, 70.4%, 70.5%, 70.6%, 70.7%, 70.8%, 70.9%, 71%, 71.1%, 71.2%, 71.3%, 71.4%, 71.5%, 71.6%, 71.7%, 71.8%, 71.9%, 72%, 72.1%, 72.2%, 72.3%, 72.4%, 72.5%, 72.6%, 72.7%, 72.8%, 72.9%, 73%, 73.1%, 73.2%, 73.3%, 73.4%, 73.5%, 73.6%, 73.7%, 73.8%, 73.9%, 74%, 74.1%, 74.2%, 74.3%, 74.4%, 74.5%, 74.6%, 74.7%, 74.8%, 74.9%, 75%, 75.1%, 75.2%, 75.3%, 75.4%, 75.5%, 75.6%, 75.7%, 75.8%, 75.9%, 76%, 76.1%, 76.2%, 76.3%, 76.4%, 76.5%, 76.6%, 76.7%, 76.8%, 76.9%, 77%, 77.1%, 77.2%, 77.3%, 77.4%, 77.5%, 77.6%, 77.7%, 77.8%, 77.9%, 78%, 78.1%, 78.2%, 78.3%, 78.4%, 78.5%, 78.6%, 78.7%, 78.8%, 78.9%, 79%, 79.1%, 79.2%, 79.3%, 79.4%, 79.5%, 79.6%, 79.7%, 79.8%, 79.9%, 80%, 80.1%, 80.2%, 80.3%, 80.4%, 80.5%, 80.6%, 80.7%, 80.8%, 80.9%, 81%, 81.1%, 81.2%, 81.3%, 81.4%, 81.5%, 81.6%, 81.7%, 81.8%, 81.9%, 82%, 82.1%, 82.2%, 82.3%, 82.4%, 82.5%, 82.6%, 82.7%, 82.8%, 82.9%, 83%, 83.1%, 83.2%, 83.3%, 83.4%, 83.5%, 83.6%, 83.7%, 83.8%, 83.9%, 84%, 84.1%, 84.2%, 84.3%, 84.4%, 84.5%, 84.6%, 84.7%, 84.8%, 84.9%, 85%, 85.1%, 85.2%, 85.3%, 85.4%, 85.5%, 85.6%, 85.7%, 85.8%, 85.9%, 86%, 86.1%, 86.2%, 86.3%, 86.4%, 86.5%, 86.6%, 86.7%, 86.8%, 86.9%, 87%, 87.1%, 87.2%, 87.3%, 87.4%, 87.5%, 87.6%, 87.7%, 87.8%, 87.9%, 88%, 88.1%, 88.2%, 88.3%, 88.4%, 88.5%, 88.6%, 88.7%, 88.8%, 88.9%, 89%, 89.1%, 89.2%, 89.3%, 89.4%, 89.5%, 89.6%, 89.7%, 89.8%, 89.9%, 90%, 90.1%, 90.2%, 90.3%, 90.4%, 90.5%, 90.6%, 90.7%, 90.8%, 90.9%, 91%, 91.1%, 91.2%, 91.3%, 91.4%, 91.5%, 91.6%, 91.7%, 91.8%, 91.9%, 92%, 92.1%, 92.2%, 92.3%, 92.4%, 92.5%, 92.6%, 92.7%, 92.8%, 92.9%, 93%, 93.1%, 93.2%, 93.3%, 93.4%, 93.5%, 93.6%, 93.7%, 93.8%, 93.9%, 94%, 94.1%, 94.2%, 94.3%, 94.4%, 94.5%, 94.6%, 94.7%, 94.8%, 94.9%, or 95%. As a non-limiting example, the percent of total cells expressing GFP in cells from one donor may be 83.8% for a dose of 1 uL and 83.7% or 78.8% for a dose of 5 uL. As another non-limiting example, the percent of total cells expressing GFP in cells from one donor may be 80.6%, 89.1%, or 91.2% fora dose of 1 uL and 75.1%, 89.6% or 91.7% fora dose of 5 uL.

[0581] In some embodiments, a percentage of the cultured T cells (e.g., primary human T cells and/or Jurkat cells) may express the transgene. The percentage of culture T cells expressing the transgene may be, but is not limited to, 5%, 10%, 15%, 20%, 25%, 30%, 35%, 40%, 45%, 50%, 55%, 60%, 65%, 70%, 75%, 80%, 85%, 90%, 95%, 97%, 99% or greater than 99%. As a non-limiting example, the percentage may be greater than 70%. As a non-limiting example, the percentage may be greater than 75%. As a non-limiting example, the percentage may be greater than 80%. As a non-limiting example, the percentage may be greater than 85%. As a non-limiting example, the percentage may be greater than 90%. As a non-limiting example, the percentage may be greater than 95%.

[0582] In some embodiments, the mRNA levels from the culture may decline over the duration of the study. The decline may not be limited to a specific transgene and the trend may be seen across multiple classes of expressed proteins. In order to increase the mRNA levels, the cells may be reactivated after the mRNA levels decrease from the initial levels. The cells may be reactivated 5 days, 6 days, 7 days, 8 days, 9 days, 10 days, 11 days, 12 days, 13 days, 14 days, 15 days, 16 days, 17 days, 18 days, 19 days, 20 days, 21 days, 22 days, 23 days, 24 days, 25 days, 26 days, 27 days, 28 days, 29 days, 30 or more than 30 days after transduction. As a non-limiting example, in order to increase mRNA levels in the culture, the cells may be reactivated with CD3/CD28 beads 13 days after transduction. As a non-limiting example, in order to increase mRNA levels in the culture, the cells may be reactivated with CD3/CD28 beads 14 days after transduction. As a non-limiting example, in order to increase mRNA levels in the culture, the cells may be reactivated with CD3/CD28 beads 15 days after transduction

[0583] In some embodiments, the surface expression from the culture may decline over the duration of the study. For example, the surface expression may decline between days 3 to 13 days, 3 to 14 days, or 3 to 15 days after transduction. In order to increase the surface expression, the cells may be reactivated after the surface expression decrease from the initial levels. The cells may be reactivated 5 days, 6 days, 7 days, 8 days, 9 days, 10 days, 11 days, 12 days, 13 days, 14 days, 15 days, 16 days, 17 days, 18 days, 19 days, 20 days, 21 days, 22 days, 23 days, 24 days, 25 days, 26 days, 27 days, 28 days, 29 days, 30 or more than 30 days after transduction. As a non-limiting example, in order to increase surface expression in the culture, the cells may be reactivated with CD3/CD28 beads 13 days after transduction. As a non-limiting example, in order to increase surface expression in the culture, the cells may be reactivated with CD3/CD28 beads 14 days after transduction. As a non-limiting example, in order to increase surface expression in the culture, the cells may be reactivated with CD3/CD28 beads 15 days after transduction.

[0584] In some embodiments, the transgene is a CAR such as, but not limited to, CD19 CAR. As a non-limiting example, the CAR is CD19 CAR. The cell viability may be greater than 90% in cells transduced with a CD19 CAR. The cell viability may be greater than 85% in cells transduced with a CD19 CAR. If the cells are primary T cells transduced with a CD19 CAR, then number of viable cells may increase over the initial timepoints before decreasing. If the cells are Jurkat cells transduced with a CD19 CAR, then the number of viable cells may increase for at least 10 days. The number of copies per cell for CD19 CAR transduced cells may be higher for the initial timepoints before decreasing by 50% or more for the later timepoints. The cell surface expression of CD19 CAR may decrease during the course of the study from about 20000 CAR MFI to less than 5000 CAR MFI over a period of 10 days (e.g., day 3 to day 13). After restimulation on day 15 the MFI may increase to above 5000 CAR MR. The percentage of primary human T cells expressing CAR may be between 40% and 60% for 3-13 days after transduction. The percentage of Jurkat cells expressing CAR may be between 30% and 70% for 3-13 days after transduction. An initial decline of about 20% may be seen between days 3 and 6 after transduction. Restimulation of the T cells may increase the percent of CAR positive cells back to initial percentage levels (e.g., around 60%).

[0585] In some embodiments, the transgene is an interleukin such as, but not limited to, IL12 (e.g., membrane bound IL12 or secreted cytokine IL12), IL15 (e.g., membrane bound IL15), and IL15Ra. As a non-limiting example, the interleukin is IL12. The cell viability may be greater than 90% in cells transduced with IL12. The cell viability may be greater than 85% in cells transduced with IL12. If the cells are primary T cells transduced with IL12, the number of viable cells may increase over the initial timepoints before decreasing. If the cells are Jurkat cells transduced with IL12, the number of viable cells may increase for at least 10 days. The number of copies per cell for IL12 transduced cells may be higher for the initial timepoints before decreasing by 50% or more for the later timepoints. For IL12 transduced primary human T cells, the level of soluble IL12 in the media may drop steadily over the time course of the study with a slight increase visible in the restimulated group. For IL12 transduced Jurkat cells, the level of soluble IL12 in the media may have a drop in IL12 secretion in the first half of the culture with the levels remaining low through the second half of the culture time.

[0586] In some embodiments, the transgene encodes a fluorescent protein such as, but not limited to cytosolic green fluorescence protein (GFP), luciferase, and mCherry. As a non-limiting example, the fluorescent protein is GFP. The cell viability may be greater than 90% in cells transduced with GFP. The cell viability may be greater than 85% in cells transduced with GFP. If the cells are primary T cells transduced with GFP, then the number of viable cells may increase over the initial timepoints before decreasing. If the cells are Jurkat cells transduced with GFP, then the number of viable cells may increase for at least 10 days. The number of copies per cell for GFP transduced cells may be higher for the initial timepoints before decreasing by 50% or more for the later timepoints. The surface expression of the cells may have a steady and rapid decline bottoming out at day 10 with a slight increase if restimulated. The highest level of cell surface expression of GFP in Jurkat cells may be at day 10 (about 35000 GFP MFI) before decreasing for the rest of the study. The percentage of primary human T cells expressing GFP may be around 80% for 3-13 days after transduction. The percentage of Jurkat cells expressing GFP may be around 90% for 3-13 days after transduction.

[0587] In some embodiments, lentivirally engineered cells described herein have genomic DNA integration that stabilizes after an initial decline of copy number, decreasing RNA and surface expression levels over time, and an increase in RNA and surface expression after re-stimulation.

[0588] In some embodiments, lentivirally engineering cells may be evaluated using the following 14-day method where samples are collected 5 times throughout the culture. On day −1 the T cells (e.g., primary human T cells or Jurkat cells) may be thawed and the CD3/CD28 beads are added. On day 0, the lentivirus for each of the conditions is added (e.g., 4 mL of cells at 0.5e6/mL) and there is a control of non-transduced cells. Double media to 8 mL on day 1 and then double the media to 16 mL on day 2. On day 3, harvest 4 mL and then double media to 24 mL on day 4. Harvest 4 mL on day 6 before doubling media to 40 mL. The cells can be split (e.g., 14 mL 0.5e6 cells/mL) on day 8 and then on day 6 harvest 4 mL before doubling media to 40 mL. 4 mL may be harvested on day 10 before the media is doubled to 20 mL. On day 13, 4 mL are harvested before doubling the media to 32 mL. The culture is split in half and half of the culture is activated (CD3/CD28 activation beads 1:1) and stimulated overnight. On day 14, 4 mL of each stimulated and non-stimulated cells are harvested and the culture is ended. Transgene copy number per cell are assayed by harvesting cells and extracting genomic DNA then quantifying with standard curve qPCR against the endogenous genome and against the transgene sequence, then converting the detected quantities to a ratio. Mean Fluorescence Intensity (MFI) is assayed by FLO on an Attune with appropriate staining for each group. Percent expressing may also be assayed by FLO on an attune quantifying the percent of cells fluorescing above threshold. Soluble payloads can be quantified by harvesting culture supernatant at each marked timepoint and running MesoScale Discovery plate assay (MSD) then normalizing for cell density.

### 2. Retroviral Vectors (γ-Retroviral Vectors)

[0589] In some embodiments, retroviral vectors may be used to package and deliver the biocircuits, biocircuit components, effector modules, SREs or payload constructs of the present disclosure. Retroviral vectors (RVs) allow the permanent integration of a transgene in target cells. In addition to lentiviral vectors based on complex HIV-1/2, retroviral vectors based on simple gamma-retroviruses have been widely used to deliver therapeutic genes and demonstrated clinically as one of the most efficient and powerful gene delivery systems capable of transducing a broad range of cell types. Example species of Gamma retroviruses include the murine leukemia viruses (MLVs) and the feline leukemia viruses (FeLV).

[0590] In some embodiments, gamma-retroviral vectors derived from a mammalian gamma-retrovirus such as murine leukemia viruses (MLVs), are recombinant. The MLV families of gamma retroviruses include the ecotropic, amphotropic, xenotropic and polytropic subfamilies. Ecotropic viruses are able to infect only murine cells using mCAT-1 receptor. Examples of ecotropic viruses are Moloney MLV and AKV. Amphotropic viruses infect murine, human and other species through the Pit-2 receptor. One example of an amphotropic virus is the 4070A virus. Xenotropic and polytropic viruses utilize the same (Xpr1) receptor, but differ in their species tropism. Xenotropic viruses such as NZB-9-1 infect human and other species but not murine species, whereas polytropic viruses such as focus-forming viruses (MCF) infect murine, human and other species.

[0591] Gamma-retroviral vectors may be produced in packaging cells by co-transfecting the cells with several plasmids including one encoding the retroviral structural and enzymatic (gag-pol) polyprotein, one encoding the envelope (env) protein, and one encoding the vector mRNA comprising polynucleotide encoding the compositions of the present disclosure that is to be packaged in newly formed viral particles.

[0592] In some aspects, the recombinant gamma-retroviral vectors are pseudotyped with envelope proteins from other viruses. Envelope glycoproteins are incorporated in the outer lipid layer of the viral particles which can increase/alter the cell tropism. Exemplary envelop proteins include the gibbon ape leukemia virus envelope protein (GALV) or vesicular stomatitis virus G protein (VSV-G), or Simian endogenous retrovirus envelop protein, or Measles Virus H and F proteins, or Human immunodeficiency virus gp120 envelope protein, or cocal vesiculovirus envelop protein (See, e.g., U.S. application publication NO.: 2012/164118; the contents of which are incorporated herein by reference in its entirety). In other aspects, envelope glycoproteins may be genetically modified to incorporate targeting/binding ligands into gamma-retroviral vectors, binding ligands including, but not limited to, peptide ligands, single chain antibodies and growth factors (Waehler et al., Nat. Rev. Genet. 2007, 8(8):573-587; the contents of which are incorporated herein by reference in its entirety). These engineered glycoproteins can retarget vectors to cells expressing their corresponding target moieties. In other aspects, a “molecular bridge” may be introduced to direct vectors to specific cells. The molecular bridge has dual specificities: one end can recognize viral glycoproteins, and the other end can bind to the molecular determinant on the target cell. Such molecular bridges, for example ligand-receptor, avidin-biotin, and chemical conjugations, monoclonal antibodies and engineered fusogenic proteins, can direct the attachment of viral vectors to target cells for transduction (Yang et al., Biotechnol. Bioeng., 2008, 101(2): 357-368; and Maetzig et al., Viruses, 2011, 3, 677-713; the contents of each of which are incorporated herein by reference in their entirety).

[0593] In some embodiments, the recombinant gamma-retroviral vectors are self-inactivating (SIN) gammaretroviral vectors. The vectors are replication incompetent. SIN vectors may harbor a deletion within the 3′ U3 region initially comprising enhancer/promoter activity. Furthermore, the 5′ U3 region may be replaced with strong promoters (needed in the packaging cell line) derived from Cytomegalovirus or RSV, or an internal promoter of choice, and/or an enhancer element. The choice of the internal promoters may be made according to specific requirements of gene expression needed for a particular purpose of the disclosure.

[0594] In some embodiments, polynucleotides encoding the biocircuit, biocircuit components, effector module, SRE are inserted within the recombinant viral genome. The other components of the viral mRNA of a recombinant gamma-retroviral vector may be modified by insertion or removal of naturally occurring sequences (e.g., insertion of an IRES, insertion of a heterologous polynucleotide encoding a polypeptide or inhibitory nucleic acid of interest, shuffling of a more effective promoter from a different retrovirus or virus in place of the wild-type promoter and the like). In some examples, the recombinant gamma-retroviral vectors may comprise modified packaging signal, and/or primer binding site (PBS), and/or 5′-enhancer/promoter elements in the U3-region of the 5′-long terminal repeat (LTR), and/or 3′-SIN elements modified in the U3-region of the 3′-LTR. These modifications may increase the titers and the ability of infection.

[0595] Gamma retroviral vectors suitable for delivering biocircuit components, effector modules, SREs or payload constructs of the present disclosure may be selected from those disclosed in U.S. Pat. Nos. 8,828,718; 7,585,676; 7,351,585; U.S. application publication NO.: 2007/048285; PCT application publication NOs.: WO2010/113037; WO2014/121005; WO2015/056014; and EP Pat. NOs.: EP1757702; EP1757703 (the contents of each of which are incorporated herein by reference in their entirety).

### 3. Adeno-Associated Viral Vectors (AAV)

[0596] In some embodiments, polynucleotides of present disclosure may be packaged into recombinant adeno-associated viral (rAAV) vectors. Such vectors or viral particles may be designed to utilize any of the known serotype capsids or combinations of serotype capsids. The serotype capsids may include capsids from any identified AAV serotypes and variants thereof, for example, AAV1, AAV2, AAV2G9, AAV3, AAV4, AAV4-4, AAV5, AAV6, AAV7, AAV8, AAV9, AAV10, AAV11, AAV12 and AAVrh10.

[0597] In one embodiment, the AAV serotype may be or have a sequence as described in United States Publication No. US20030138772, herein incorporated by reference in its entirety, such as, but not limited to, AAV1 (SEQ ID NO: 6 and 64 of US20030138772), AAV2 (SEQ ID NO: 7 and 70 of US20030138772), AAV3 (SEQ ID NO: 8 and 71 of US20030138772), AAV4 (SEQ ID NO: 63 of US20030138772), AAV5 (SEQ ID NO: 114 of US20030138772), AAV6 (SEQ ID NO: 65 of US20030138772), AAV7 (SEQ ID NO: 1-3 of US20030138772), AAV8 (SEQ ID NO: 4 and 95 of US20030138772), AAV9 (SEQ ID NO: 5 and 100 of US20030138772), AAV10 (SEQ ID NO: 117 of US20030138772), AAV11 (SEQ ID NO: 118 of US20030138772), AAV12 (SEQ ID NO: 119 of US20030138772), AAVrh10 (amino acids 1 to 738 of SEQ ID NO: 81 of US20030138772) or variants thereof. Non-limiting examples of variants include SEQ ID NOs: 9, 27-45, 47-62, 66-69, 73-81, 84-94, 96, 97, 99, 101-113 of US20030138772, the contents of which are herein incorporated by reference in their entirety.

[0598] In one embodiment, the AAV serotype may have a sequence as described in Pulicherla et al. (Molecular Therapy, 2011, 19(6):1070-1078), U.S. Pat. Nos. 6,156,303; 7,198,951; U.S. Patent Publication NOs.: US2015/0159173 and US2014/0359799; and International Patent Publication NOs.: WO1998/011244, WO2005/033321 and WO2014/14422; the contents of each of which are incorporated herein by reference in their entirety.

[0599] AAV vectors include not only single stranded vectors but self-complementary AAV vectors (scAAVs). scAAV vectors contain DNA which anneals together to form double stranded vector genome. By skipping second strand synthesis, scAAVs allow for rapid expression in the cell.

[0600] The rAAV vectors may be manufactured by standard methods in the art such as by triple transfection, in sf9 insect cells or in suspension cell cultures of human cells such as HEK293 cells.

[0601] The biocircuits, biocircuit components, effector modules, SREs or payload constructs may be encoded in one or more viral genomes to be packaged in the AAV capsids taught herein.

[0602] Such vectors or viral genomes may also include, in addition to at least one or two ITRs (inverted terminal repeats), certain regulatory elements necessary for expression from the vector or viral genome. Such regulatory elements are well known in the art and include for example promoters, introns, spacers, stuffer sequences, and the like.

[0603] In some embodiments, more than one effector module or SRE (e.g. DD) may be encoded in a viral genome.

### 4. Oncolytic Viral Vector

[0604] In some embodiments, polynucleotides of present disclosure may be packaged into oncolytic viruses, such as vaccine viruses. Oncolytic vaccine viruses may include viral particles of a thymidine kinase (TK)-deficient, granulocyte macrophage (GM)-colony stimulating factor (CSF)-expressing, replication-competent vaccinia virus vector sufficient to induce oncolysis of cells in the tumor (e.g., U.S. Pat. No. 9,226,977).

[0605] In some embodiments, the viral vector of the disclosure may comprise two or more immunotherapeutic agents taught herein, wherein the two or more immunotherapeutic agents may be included in one effector module under the regulation of the same DD. In this case, the two or more immunotherapeutic agents are tuned by the same stimulus simultaneously. In other embodiments, the viral vector of the disclosure may comprise two or more effector modules, wherein each effector module comprises a different immunotherapeutic agent. In this case, the two or more effector modules and immunotherapeutic agents are tuned by different stimuli, providing separately independent regulation of the two or more components.

5. Messenger RNA (mRNA)

[0606] In some embodiments, the effector modules of the disclosure may be designed as a messenger RNA (mRNA). As used herein, the term “messenger RNA” (mRNA) refers to any polynucleotide which encodes a polypeptide of interest and which is capable of being translated to produce the encoded polypeptide of interest in vitro, in vivo, in situ or ex vivo. Such mRNA molecules may have the structural components or features of any of those taught in International Application number PCT/US2013/030062, the contents of which are incorporated herein by reference in its entirety.

[0607] Polynucleotides of the disclosure may also be designed as taught in, for example, Ribostem Limited in United Kingdom patent application serial number 0316089.2 filed on Jul. 9, 2003 now abandoned, PCT application number PCT/GB2004/002981 filed on Jul. 9, 2004 published as WO2005005622, U.S. patent application Ser. No. 10/563,897 filed on Jun. 8, 2006 published as US20060247195 now abandoned, and European patent application national phase entry serial number EP2004743322 filed on Jul. 9, 2004 published as EP1646714 now withdrawn; Novozymes, Inc. in PCT application number PCT/US2007/88060 filed on Dec. 19, 2007 published as WO2008140615, U.S. patent application Ser. No. 12/520,072 filed on Jul. 2, 2009 published as US20100028943 and European patent application national phase entry serial number EP2007874376 filed on Jul. 7, 2009 published as EP2104739; University of Rochester in PCT application number PCT/US2006/46120 filed on Dec. 4, 2006 published as WO2007064952 and U.S. patent application Ser. No. 11/606,995 filed on Dec. 1, 2006 published as US20070141030; BioNTech AG in European patent application serial number EP2007024312 filed Dec. 14, 2007 now abandoned, PCT application number PCT/EP2008/01059 filed on Dec. 12, 2008 published as WO2009077134, European patent application national phase entry serial number EP2008861423 filed on Jun. 2, 2010 published as EP2240572, U.S. patent application Ser. No. 12/735,060 filed Nov. 24, 2010 published as US20110065103, German patent application serial number DE 10 2005 046 490 filed Sep. 28, 2005, PCT application PCT/EP2006/0448 filed Sep. 28, 2006 published as WO2007036366, national phase European patent EP1934345 published Mar. 21, 2012 and national phase U.S. patent application Ser. No. 11/992,638 filed Aug. 14, 2009 published as 20100129877; Immune Disease Institute Inc. in U.S. patent application Ser. No. 13/088,009 filed Apr. 15, 2011 published as US20120046346 and PCT application PCT/US2011/32679 filed Apr. 15, 2011 published as WO20110130624; Shire Human Genetic Therapeutics in U.S. patent application Ser. No. 12/957,340 filed on Nov. 20, 2010 published as US20110244026; Sequitur Inc. in PCT application PCT/US1998/019492 filed on Sep. 18, 1998 published as WO1999014346; The Scripps Research Institute in PCT application number PCT/US2010/00567 filed on Feb. 24, 2010 published as WO2010098861, and U.S. patent application Ser. No. 13/203,229 filed Nov. 3, 2011 published as US20120053333; Ludwig-Maximillians University in PCT application number PCT/EP2010/004681 filed on Jul. 30, 2010 published as WO2011012316; Cellscript Inc. in U.S. Pat. No. 8,039,214 filed Jun. 30, 2008 and granted Oct. 18, 2011, U.S. patent application Ser. No. 12/962,498 filed on Dec. 7, 2010 published as US20110143436, Ser. No. 12/962,468 filed on Dec. 7, 2010 published as US20110143397, Ser. No. 13/237,451 filed on Sep. 20, 2011 published as US20120009649, and PCT applications PCT/US2010/59305 filed Dec. 7, 2010 published as WO2011071931 and PCT/US2010/59317 filed on Dec. 7, 2010 published as WO2011071936; The Trustees of the University of Pennsylvania in PCT application number PCT/US2006/32372 filed on Aug. 21, 2006 published as WO2007024708, and U.S. patent application Ser. No. 11/990,646 filed on Mar. 27, 2009 published as US20090286852; Curevac GMBH in German patent application serial numbers DE10 2001 027 283.9 filed Jun. 5, 2001, DE10 2001 062 480.8 filed Dec. 19, 2001, and DE 20 2006 051 516 filed Oct. 31, 2006 all abandoned, European patent numbers EP1392341 granted Mar. 30, 2005 and EP1458410 granted Jan. 2, 2008, PCT application numbers PCT/EP2002/06180 filed Jun. 5, 2002 published as WO2002098443, PCT/EP2002/14577 filed on Dec. 19, 2002 published as WO2003051401, PCT/EP2007/09469 filed on Dec. 31, 2007 published as WO2008052770, PCT/EP2008/03033 filed on Apr. 16, 2008 published as WO2009127230, PCT/EP2006/004784 filed on May 19, 2005 published as WO2006122828, PCT/EP2008/00081 filed on Jan. 9, 2007 published as WO2008083949, and U.S. patent application Ser. No. 10/729,830 filed on Dec. 5, 2003 published as US20050032730, Ser. No. 10/870,110 filed on Jun. 18, 2004 published as US20050059624, Ser. No. 11/914,945 filed on Jul. 7, 2008 published as US20080267873, Ser. No. 12/446,912 filed on Oct. 27, 2009 published as US2010047261 now abandoned, Ser. No. 12/522,214 filed on Jan. 4, 2010 published as US20100189729, Ser. No. 12/787,566 filed on May 26, 2010 published as US20110077287, Ser. No. 12/787,755 filed on May 26, 2010 published as US20100239608, Ser. No. 13/185,119 filed on Jul. 18, 2011 published as US20110269950, and Ser. No. 13/106,548 filed on May 12, 2011 published as US20110311472 all of which are herein incorporated by reference in their entirety.

[0608] In some embodiments, the effector modules may be designed as self-amplifying RNA. “Self-amplifying RNA” as used herein refers to RNA molecules that can replicate in the host resulting in the increase in the amount of the RNA and the protein encoded by the RNA. Such self-amplifying RNA may have structural features or components of any of those taught in International Patent Application Publication No. WO2011005799 (the contents of which are incorporated herein by reference in their entirety.)

### V. Dosing, Delivery and Administrations

[0609] The compositions of the disclosure may be delivered to a cell or a subject through one or more routes and modalities. The viral vectors containing one or more effector modules, SREs, immunotherapeutic agents and other components described herein may be used to deliver them to a cell and/or a subject. Other modalities may also be used such as mRNAs, plasmids, and as recombinant proteins.

### 1. Delivery to Cells

[0610] In another aspect of the disclosure, polynucleotides encoding biocircuits, effector modules, SREs (e.g., DDs), payloads of interest (immunotherapeutic agents) and compositions of the disclosure and vectors comprising said polynucleotides may be introduced into cells such as immune effector cells.

[0611] In one aspect of the disclosure, polynucleotides encoding biocircuits, effector modules, SREs (e.g., DDs), payloads of interest (immunotherapeutic agents) and compositions of the disclosure, may be packaged into viral vectors or integrated into viral genomes allowing transient or stable expression of the polynucleotides. Preferable viral vectors are retroviral vectors including lentiviral vectors. In order to construct a retroviral vector, a polynucleotide molecule encoding a biocircuit, an effector module, a DD or a payload of interest (i.e. an immunotherapeutic agent) is inserted into the viral genome in the place of certain viral sequences to produce a virus that is replication-defective. The recombinant viral vector is then introduced into a packaging cell line containing the gag, pol, and env genes, but without the LTR and packaging components. The recombinant retroviral particles are secreted into the culture media, then collected, optionally concentrated, and used for gene transfer. Lentiviral vectors are especially preferred as they are capable of infecting both dividing and non-dividing cells.

[0612] Vectors may also be transferred to cells by non-viral methods by physical methods such as needles, electroporation, sonoporation, hyrdoporation; chemical carriers such as inorganic particles (e.g. calcium phosphate, silica, gold) and/or chemical methods. In some embodiments, synthetic or natural biodegradable agents may be used for delivery such as cationic lipids, lipid nano emulsions, nanoparticles, peptide based vectors, or polymer based vectors.

[0613] In some embodiments, the polypeptides of the disclosure may be delivered to the cell directly. In one embodiment, the polypeptides of the disclosure may be delivered using synthetic peptides comprising an endosomal leakage domain (ELD) fused to a cell penetration domain (CLD). The polypeptides of the disclosure are co introduced into the cell with the ELD-CLD-synthetic peptide. ELDs facilitate the escape of proteins that are trapped in the endosome, into the cytosol. Such domains are derived proteins of microbial and viral origin and have been described in the art. CPDs allow the transport of proteins across the plasma membrane and have also been described in the art. The ELD-CLD fusion proteins synergistically increase the transduction efficiency when compared to the co-transduction with either domain alone. In some embodiments, a histidine rich domain may optionally be added to the shuttle construct as an additional method of allowing the escape of the cargo from the endosome into the cytosol. The shuttle may also include a cysteine residue at the N or C terminus to generate multimers of the fusion peptide. Multimers of the ELD-CLD fusion peptides generated by the addition of cysteine residue to the terminus of the peptide show even greater transduction efficiency when compared to the single fusion peptide constructs. The polypeptides of the disclosure may also be appended to appropriate localization signals to direct the cargo to the appropriate sub-cellular location e.g. nucleus. In some embodiments any of the ELDs, CLDs or the fusion ELD-CLD synthetic peptides taught in the International Patent Publication, WO2016161516 and WO2017175072 may be useful in the present disclosure (the contents of each of which are herein incorporated by reference in their entirety).

### 2. Dosing

[0614] The present disclosure provides methods comprising administering any one or more compositions for immunotherapy to a subject in need thereof. These may be administered to a subject using any amount and any route of administration effective for preventing or treating a clinical condition such as cancer, infection diseases and other immunodeficient diseases.

[0615] Compositions in accordance with the disclosure are typically formulated in dosage unit form for ease of administration and uniformity of dosage. It will be understood, however, that the total daily usage of the compositions of the present disclosure may be decided by the attending physician within the scope of sound medical judgment. The specific therapeutically effective, or prophylactically effective dose level for any particular patient will depend upon a variety of factors including the disorder being treated and the severity of the disorder; the activity of the specific compound employed; the specific composition employed; the age, body weight, general health, sex and diet of the patient; the time of administration, route of administration, previous or concurrent therapeutic interventions and rate of excretion of the specific compound employed; the duration of the treatment; drugs used in combination or coincidental with the specific compound employed; and like factors well known in the medical arts.

[0616] Compositions of the disclosure may be used in varying doses to avoid T cell anergy, prevent cytokine release syndrome and minimize toxicity associated with immunotherapy. For example, low doses of the compositions of the present disclosure may be used to initially treat patients with high tumor burden, while patients with low tumor burden may be treated with high and repeated doses of the compositions of the disclosure to ensure recognition of a minimal tumor antigen load. In another instance, the compositions of the present disclosure may be delivered in a pulsatile fashion to reduce tonic T cell signaling and enhance persistence in vivo. In some aspects, toxicity may be minimized by initially using low doses of the compositions of the disclosure, prior to administering high doses. Dosing may be modified if serum markers such as ferritin, serum C-reactive protein, IL6, IFN γ, and TNF-α are elevated.

[0617] In one embodiment, polypeptides and/or polynucleotides expressing the compositions described herein e.g. effector modules, are administered to a subject in need thereof to treat cancer. In one embodiment, a population of cells comprising the biocircuits, effector modules and/or the SREs described herein is administered to a subject in need thereof to treat cancer.

[0618] In one embodiment, the cells expressing the compositions described herein is administered at a dose and/or dosing schedule described herein.

[0619] In one embodiment, compositions are introduced into immune cells (e.g., T cells, NK cells). The compositions may be introduced into the immune cells by methods including but not limited to viral transduction, transfection and/or in vitro transcription. In some embodiments, the immune cells are transduced with retroviruses. In one aspect, the retrovirus may be a lentivirus. In some aspects, the titer of the lentiviruses may be used to tune the expression of the payload. In some embodiments, the titer of the lentivirus may have a multiplicity of infection (MOI) ranging from 0.001-0.01, 0.01-0.1, 0.1-1, or 1-10. In some embodiments, the MOI may be 1, 2, 3, 4, 5, 6, 7, 8, 9, or 10.

[0620] In some embodiments, the subject (e.g., human) receives an initial administration of immune cells comprising the compositions described herein e.g. SREs, and one or more subsequent administrations of cells. In some embodiments, a therapeutically effective amount of the compositions and/or cells described herein may be administered to the subject. In some embodiments, the therapeutically effective amount may indicate the precise amount required to tumor inhibition, tumor prevalence and/or tumor burden. The therapeutically effective amount may be determined with consideration of the subject's age, weight, tumor size, sex, extent of infection or metastasis. In some embodiments, the cells expressing the compositions described herein may be administered at a dosage of 10⁴ to 10⁹ cells/kg body weight of the subject. The cells can be administered by using infusion techniques that are commonly known in immunotherapy (see, e.g., Rosenberg et al., New Eng. J. of Med. 319: 1676, 1988; the contents of which are incorporated herein by reference in their entirety).

[0621] In some aspects, subjects may undergo leukapheresis, wherein leukocytes are collected, enriched, or depleted ex vivo to select and/or isolate the cells of interest, e.g., T cells. These T cell isolates may be expanded by methods known in the art and treated such that the compositions of the disclosure may be introduced into the cell. Subjects in need thereof may subsequently undergo standard treatment with high dose chemotherapy followed by peripheral blood stem cell transplantation. In certain aspects, following or concurrent with the transplant, subjects receive an infusion of the immune cells of the present disclosure. In an additional aspect, expanded cells are administered before or following surgery.

[0622] The dosage of the above treatments to be administered to a patient will vary with the precise nature of the condition being treated and the recipient of the treatment. The scaling of dosages for human administration can be performed according to art-accepted practices.

[0623] In one embodiment, the compositions are introduced into immune cells (e.g., T cells, NK cells), e.g., using in vitro transcription, and the subject (e.g., human) receives an initial administration of immune cells (e.g., T cells, NK cells) of the disclosure, and one or more subsequent administrations of the immune cells (e.g., T cells, NK cells) of the disclosure, wherein the one or more subsequent administrations are administered less than 15 days, e.g., 14, 13, 12, 11, 10, 9, 8, 7, 6, 5, 4, 3, or 2 days after the previous administration. In one embodiment, more than one administration of the immune cells (e.g., T cells, NK cells) of the disclosure are administered to the subject (e.g., human) per week, e.g., 2, 3, or 4 administrations of the immune cells (e.g., T cells, NK cells) of the disclosure are administered per week. In one embodiment, the subject (e.g., human subject) receives more than one administration of the immune cells (e.g., T cells, NK cells) per week (e.g., 2, 3 or 4 administrations per week) (also referred to herein as a cycle), followed by a week of no immune cells (e.g., T cells, NK cells) administrations, and then one or more additional administration of the immune cells (e.g., T cells, NK cells) (e.g., more than one administration of the immune cells (e.g., T cells, NK cells) per week) is administered to the subject. In another embodiment, the subject (e.g., human subject) receives more than one cycle of immune cells (e.g., T cells, NK cells), and the time between each cycle is less than 10, 9, 8, 7, 6, 5, 4, or 3 days. In one embodiment, the immune cells (e.g., T cells, NK cells) are administered every other day for 3 administrations per week. In one embodiment, the immune cells (e.g., T cells, NK cells) of the disclosure are administered for at least two, three, four, five, six, seven, eight or more weeks. In some embodiments, a dose of immune cells expressing compositions of the disclosure described herein comprises about 1×10⁶, 1.1×10⁶, 2×10⁶, 3.6×10⁶, 5×10⁶, 1×10⁷, 1.8×10⁷, 2×10⁷, 5×10⁷, 1×10⁸, 2×10⁸, 3×10⁸, or 5×10⁸ cells/kg. In some embodiments, a dose of immune cells comprises at least about 1×10⁶, 1.1×10⁶, 2×10⁶, 3.6×10⁶, 5×10⁶, 1×10⁷, 1.8×10⁷, 2×10⁷, 5×10⁷, 1×10⁸, 2×10⁸, 3×10⁸, or 5×10⁸ cells/kg. In some embodiments, a dose of immune cells comprises up to about 1×10⁶, 1.1×10⁶, 2×10⁶, 3.6×10⁶, 5×10⁶, 1×10⁷, 1.8×10⁷, 2×10⁷, 5×10⁷, 1×10⁸, 2×10⁸, 3×10⁸, or 5×10⁸ cells/kg. In some embodiments, a dose of immune cells comprises about 1.1×10⁶-1.8×10⁷ cells/kg. In some embodiments, a dose of immune cells comprises about 1×10⁷, 2×10⁷, 5×10⁷, 1×10⁸, 2×10⁸, 3×10⁸, 5×10⁸, 1×10⁹, 2×10⁹, or 5×10⁹ cells. In some embodiments, a dose of the immune cells comprises at least about 1×10⁷, 2×10⁷, 5×10⁷, 1×10⁸, 2×10⁸, 3×10⁸, 5×10⁸, 1×10⁹, 2×10⁹, or 5×10⁹ cells. In some embodiments, a dose of immune cells comprises up to about 1×10⁷, 2×10⁷, 5×10⁷, 1×10⁸, 2×10⁸, 3×10⁸, 5×10⁸, 1×10⁹, 2×10⁹, or 5×10⁹ cells. In some embodiments, a dose of the immune cells comprises up to about 1×10⁷, 1.5×10⁷, 2×10⁷, 2.5×10⁷, 3×10⁷, 3.5×10⁷, 4×10⁷, 5×10⁷, 1×10⁸, 1.5×10⁸, 2×10⁸, 2.5×10⁸, 3×10⁸, 3.5×10⁸, 4×10⁸, 5×10⁸, 1×10⁹, 2×10⁹, or 5×10⁹ cells. In some embodiments, a dose of immune cells comprises up to about 1-3×10⁷ to 1-3×10⁸ cells.

[0624] In one embodiment, the cells expressing the compositions described herein, are administered as a first line treatment for the disease, e.g., the cancer, e.g., the cancer described herein. In another embodiment, the cells expressing the compositions described herein, are administered as a second, third, fourth line treatment for the disease, e.g., the cancer, e.g., the cancer described herein. In some embodiments, the subject may undergo preconditioning prior to the administration of the cells.

[0625] Also provided herein are methods of administering ligands in accordance with the disclosure to a subject in need thereof. The ligand may be administered to a subject or to cells, using any amount and any route of administration effective for tuning the biocircuits of the disclosure. The exact amount required will vary from subject to subject, depending on the species, age, and general condition of the subject, the severity of the disease, the particular composition, its mode of administration, its mode of activity, and the like. The subject may be a human, a mammal, or an animal. Compositions in accordance with the disclosure are typically formulated in unit dosage form for ease of administration and uniformity of dosage. It will be understood, however, that the total daily usage of the compositions of the present disclosure may be decided by the attending physician within the scope of sound medical judgment. In certain embodiments, the ligands in accordance with the present disclosure may be administered at dosage levels sufficient to deliver from about 0.0001 mg/kg to about 100 mg/kg, from about 0.001 mg/kg to about 0.05 mg/kg, from about 0.005 mg/kg to about 0.05 mg/kg, from about 0.001 mg/kg to about 0.005 mg/kg, from about 0.05 mg/kg to about 0.5 mg/kg, from about 0.01 mg/kg to about 50 mg/kg, from about 0.1 mg/kg to about 40 mg/kg, from about 0.5 mg/kg to about 30 mg/kg, from about 0.01 mg/kg to about 10 mg/kg, from about 0.1 mg/kg to about 10 mg/kg, or from about 1 mg/kg to about 25 mg/kg, from about 10 mg/kg to about 100 mg/kg, from about 1 mg/kg to about 1000 mg/kg, from about 50 mg/kg to about 500 mg/kg, from about 100 mg/kg to about 1000 mg/kg, of subject body weight per day, one or more times a day, to obtain the desired effect. In some embodiments, the dosage levels may be 1 mg/kg, 5 mg/kg, 10 mg/kg, 20 mg/kg, 30 mg/kg, 40 mg/kg, 50 mg/kg, 60 mg/kg, 70 mg/kg, 80 mg/kg, 90 mg/kg, 100 mg/kg, 100 mg/kg, 110 mg/kg, 120 mg/kg, 130 mg/kg, 140 mg/kg, 150 mg/kg, 160 mg/kg, 170 mg/kg, 180 mg/kg, 190 mg/kg or mg/kg of subject body weight per day, or more times a day, to obtain the desired effect. In one embodiment, the dose of the ligand may be 10 mg/kg. In one embodiment, the dose of the ligand may be 30 mg/kg. In one aspect, the dose of the ligand may be 100 mg/kg.

[0626] The present disclosure provides methods for delivering to a cell or tissue any of the ligands described herein, comprising contacting the cell or tissue with said ligand and can be accomplished in vitro, ex vivo, or in vivo. In certain embodiments, the ligands in accordance with the present disclosure may be administered to cells at dosage levels sufficient to deliver from about 1 nM to about 10 nM, from about 5 nM to about 50 nM, from about 10 nM to about 100 nM, from about 50 nM to about 500 nM, from about 100 nM to about 1000 nM, from about 1 μM to about 10 μM, from about 5 μM to about 50 μM, from about 10 μM to about 100 μM from about 25 μM to about 250 μM, from about 50 μM to about 500 μM. In some embodiments, the ligand may be administered to cells at doses selected from but not limited to 0.0064 μM, 0.0034M, 0.016 μM, 0.08 μM, 0.4 μM, 1 μM, 2 μM, 5 μM, 10 μM, 25 μM, 50 μM, 75 μM, 100 μM, 150 μM, 200 μM, 250 μM.

[0627] The desired dosage of the ligands of the present disclosure may be delivered only once, three times a day, two times a day, once a day, every other day, every third day, every week, every two weeks, every three weeks, or every four weeks. In certain embodiments, the desired dosage may be delivered using multiple administrations (e.g., two, three, four, five, six, seven, eight, nine, ten, eleven, twelve, thirteen, fourteen, or more administrations). When multiple administrations are employed, split dosing regimens such as those described herein may be used. As used herein, a “split dose” is the division of “single unit dose” or total daily dose into two or more doses, e.g., two or more administrations of the “single unit dose”. As used herein, a “single unit dose” is a dose of any therapeutic administered in one dose/at one time/single route/single point of contact, i.e., single administration event. The desired dosage of the ligand of the present disclosure may be administered as a “pulse dose” or as a “continuous flow”. As used herein, a “pulse dose” is a series of single unit doses of any therapeutic administered with a set frequency over a period of time. As used herein, a “continuous flow” is a dose of therapeutic administered continuously for a period of time in a single route/single point of contact, i.e., continuous administration event. A total daily dose, an amount given or prescribed in 24-hour period, may be administered by any of these methods, or as a combination of these methods, or by any other methods suitable for a pharmaceutical administration.

### 3. Administration

[0628] In some embodiments, the compositions for immunotherapy may be administered to cells ex vivo and subsequently administered to the subject. Immune cells can be isolated and expanded ex vivo using a variety of methods known in the art. For example, methods of isolating cytotoxic T cells are described in U.S. Pat. Nos. 6,805,861 and 6,531,451; the contents of each of which are incorporated herein by reference in their entirety. Isolation of NK cells is described in U.S. Pat. No. 7,435,596; the contents of which are incorporated by reference herein in its entirety.

[0629] In some embodiments, depending upon the nature of the cells, the cells may be introduced into a host organism e.g. a mammal, in a wide variety of ways including by injection, transfusion, infusion, local instillation or implantation. In some aspects, the cells of the disclosure may be introduced at the site of the tumor. The number of cells that are employed will depend upon a number of circumstances, the purpose for the introduction, the lifetime of the cells, the protocol to be used, for example, the number of administrations, the ability of the cells to multiply, or the like. The cells may be in a physiologically-acceptable medium.

[0630] In some embodiments, the cells of the disclosure may be administrated in multiple doses to subjects having a disease or condition. The administrations generally effect an improvement in one or more symptoms of cancer or a clinical condition and/or treat or prevent cancer or clinical condition or symptom thereof.

[0631] In some embodiments, the compositions for immunotherapy may be administered in vivo. In some embodiments, polypeptides of the present disclosure comprising biocircuits, effector molecules, SREs, payloads of interest (immunotherapeutic agents) and compositions of the disclosure may be delivered in vivo to the subject. In vivo delivery of immunotherapeutic agents is well described in the art. For example, methods of delivery of cytokines are described in the E.P. Pat. No.: EP0930892 A1, the contents of which are incorporated herein by reference.

### Routes of Delivery

[0632] The pharmaceutical compositions, biocircuits, biocircuit components, effector modules including their SREs (e.g., DDs), payloads (i.e. immunotherapeutic agents), vectors and cells of the present disclosure may be administered by any route to achieve a therapeutically effective outcome.

[0633] These include, but are not limited to enteral (into the intestine), gastroenteral, epidural (into the dura matter), oral (by way of the mouth), transdermal, peridural, intracerebral (into the cerebrum), intracerebroventricular (into the cerebral ventricles), epicutaneous (application onto the skin), intradermal, (into the skin itself), subcutaneous (under the skin), nasal administration (through the nose), intravenous (into a vein), intravenous bolus, intravenous drip, intra-arterial (into an artery), intramuscular (into a muscle), intracranial (into the heart), intraosseous infusion (into the bone marrow), intrathecal (into the spinal canal), intraperitoneal, (infusion or injection into the peritoneum), intrasinal infusion, intravitreal, (through the eye), intravenous injection (into a pathologic cavity) intracavitary (into the base of the penis), intravaginal administration, intrauterine, extra-amniotic administration, transdermal (diffusion through the intact skin for systemic distribution), transmucosal (diffusion through a mucous membrane), transvaginal, insufflation (snorting), sublingual, sublabial, enema, eye drops (onto the conjunctiva), in ear drops, auricular (in or by way of the ear), buccal (directed toward the cheek), conjunctival, cutaneous, dental (to a tooth or teeth), electro-osmosis, endocervical, endosinusial, endotracheal, extracorporeal, hemodialysis, infiltration, interstitial, intra-abdominal, intra-amniotic, intra-articular, intrabiliary, intrabronchial, intrabursal, intracartilaginous (within a cartilage), intracaudal (within the cauda equine), intracisternal (within the cisterna magna cerebellomedularis), intracorneal (within the cornea), dental intracornal, intracoronary (within the coronary arteries), intracorporus cavernosum (within the dilatable spaces of the corporus cavernosa of the penis), intradiscal (within a disc), intraductal (within a duct of a gland), intraduodenal (within the duodenum), intradural (within or beneath the dura), intraepidermal (to the epidermis), intraesophageal (to the esophagus), intragastric (within the stomach), intragingival (within the gingivae), intraileal (within the distal portion of the small intestine), intralesional (within or introduced directly to a localized lesion), intraluminal (within a lumen of a tube), intralymphatic (within the lymph), intramedullary (within the marrow cavity of a bone), intrameningeal (within the meninges), intramyocardial (within the myocardium), intraocular (within the eye), intraovarian (within the ovary), intrapericardial (within the pericardium), intrapleural (within the pleura), intraprostatic (within the prostate gland), intrapulmonary (within the lungs or its bronchi), intrasinal (within the nasal or periorbital sinuses), intraspinal (within the vertebral column), intrasynovial (within the synovial cavity of a joint), intratendinous (within a tendon), intratesticular (within the testicle), intrathecal (within the cerebrospinal fluid at any level of the cerebrospinal axis), intrathoracic (within the thorax), intratubular (within the tubules of an organ), intratumor (within a tumor), intratympanic (within the auras media), intravascular (within a vessel or vessels), intraventricular (within a ventricle), iontophoresis (by means of electric current where ions of soluble salts migrate into the tissues of the body), irrigation (to bathe or flush open wounds or body cavities), laryngeal (directly upon the larynx), nasogastric (through the nose and into the stomach), occlusive dressing technique (topical route administration which is then covered by a dressing which occludes the area), ophthalmic (to the external eye), oropharyngeal (directly to the mouth and pharynx), parenteral, percutaneous, periarticular, peridural, perineural, periodontal, rectal, respiratory (within the respiratory tract by inhaling orally or nasally for local or systemic effect), retrobulbar (behind the pons or behind the eyeball), intramyocardial (entering the myocardium), soft tissue, subarachnoid, subconjunctival, submucosal, topical, transplacental (through or across the placenta), transtracheal (through the wall of the trachea), transtympanic (across or through the tympanic cavity), ureteral (to the ureter), urethral (to the urethra), vaginal, caudal block, diagnostic, nerve block, biliary perfusion, cardiac perfusion, photopheresis or spinal.

### Kits

[0634] The also provides a kit comprising any of the polynucleotides or expression vectors described herein.

[0635] The present disclosure includes a variety of kits for conveniently and/or effectively carrying out methods of the present disclosure. Typically, kits will comprise sufficient amounts and/or numbers of components to allow a user to perform one or multiple treatments of a subject(s) and/or to perform one or multiple experiments.

[0636] In one embodiment, the present disclosure provides kits for inhibiting genes in vitro or in vivo, comprising a biocircuit of the present disclosure or a combination of biocircuits of the present disclosure, optionally in combination with any other suitable active agents.

[0637] The kit may further comprise packaging and instructions and/or a delivery agent to form a formulation composition. The delivery agent may comprise, for example, saline, a buffered solution.

[0638] In additional embodiments, assay screening kits are provided. The kit includes a container for the screening assay. An instruction for the use of the assay and the information about the screening method are to be included in the kit.

[0639] In some embodiments, the DDs, effector modules and biocircuit system and compositions of the disclosure may be used as research tools to investigate protein activity in a biological system such a cell and a subject. In other embodiments, the DDs, effector modules and biocircuit system and compositions of the disclosure may be used for treating a disease such as a cancer and a genetic disorder.

### VI. Applications

[0640] In one aspect of the present disclosure, methods for reducing a tumor volume or burden are provided. The methods comprise administering a pharmaceutically effective amount of a pharmaceutical composition comprising at least one biocircuit system, effector module, DD, and/or payload of interest (i.e., an immunotherapeutic agent), at least one vector, or cells to a subject having a tumor. The biocircuit system and effector module having any immunotherapeutic agent as described herein may be in forms of a polypeptide, or a polynucleotide such as mRNA, or a viral vector comprising the polynucleotide, or a cell modified to express the biocircuit, effector module, DD, and payload of interest (i.e., immunotherapeutic agent).

[0641] In another aspect of the present disclosure, methods for inducing an anti-tumor immune response in a subject are provided. The methods comprise administering a pharmaceutically effective amount of a pharmaceutical composition comprising at least one biocircuit system, effector module, DD, and/or payload of interest (i.e., an immunotherapeutic agent), at least one vector, or cells to a subject having a tumor. The biocircuit and effector module having any immunotherapeutic agent as described herein may be in forms of a polypeptide, or a polynucleotide such as mRNA, or a viral vector comprising the polynucleotide, or a cell modified to express the biocircuit, effector module, DD, and payload of interest (i.e., immunotherapeutic agent).

[0642] The methods, per the present disclosure, may be adoptive cell transfer (ACT) using genetically engineered cells such as immune effector cells of the disclosure, cancer vaccines comprising biocircuit systems, effector modules, DDs, payloads of interest (i.e., immunotherapeutic agents) of the disclosure, or compositions that manipulate the tumor immunosuppressive microenvironment, or the combination thereof. These treatments may be further employed with other cancer treatment such as chemotherapy and radiotherapy.

### 1. Adoptive Cell Transfer (Adoptive Immunotherapy)

[0643] Recent progress in the field of cancer immunology has allowed the development of several approaches to help the immune system keep the cancer at bay. Such immunotherapy approaches include the targeting of cancer antigens through monoclonal antibodies or through adoptive transfer of ex vivo engineered T cells (e.g., which contain chimeric antigen receptors or engineered T cell receptors). The present disclosure also provides methods for inducing immune responses in a subject using the compositions of the disclosure. Also provided are methods for reducing a tumor burden in a subject using the compositions of the disclosure. The present disclosure also provides immune cells engineered to include one or more polypeptides, polynucleotides, or vectors of the present disclosure. The cells may be immune effector cells, including T cells such as cytotoxic T cells, helper T cells, memory T cells, regulatory T cells, natural killer (NK) cells, NK T cells, cytokine-induced killer (CIK) cells, cytotoxic T lymphocytes (CTLs), and tumor infiltrating lymphocytes (TILs). The engineered cell may be used for adoptive cell transfer for treating a disease (e.g., a cancer).

[0644] In some embodiments, pharmaceutical compositions, biocircuits, biocircuit components, effector modules including their SREs or payloads of the present disclosure may be used in the modulation or alteration or exploitation of the immune system to target one or more cancers. This approach may also be considered with other such biological approaches, e.g., immune response modifying therapies such as the administration of interferons, interleukins, colony-stimulating factors, other monoclonal antibodies, vaccines, gene therapy, and nonspecific immunomodulating agents are also envisioned as anti-cancer therapies to be combined with the pharmaceutical compositions, biocircuits, biocircuit components, effector modules including their SREs or payloads of the present disclosure.

[0645] Cancer immunotherapy refers to a diverse set of therapeutic strategies designed to induce the patient's own immune system to fight the cancer. In some embodiments, pharmaceutical compositions, biocircuits, biocircuit components, effector modules including their SREs or payloads of the present disclosure are designed as immune-oncology therapeutics.

[0646] In some embodiments, cells which are genetically modified to express at least one biocircuit system, effector module, DD, and/or payload of interest (immunotherapeutic agent) may be used for adoptive cell therapy (ACT). As used herein, Adoptive cell transfer refers to the administration of immune cells (from autologous, allogenic or genetically modified hosts) with direct anticancer activity. ACT has shown promise in clinical application against malignant and infectious disease. For example, T cells genetically engineered to recognize CD19 have been used to treat follicular B cell lymphoma (Kochenderfer et al., Blood, 2010, 116:4099-4102; and Kochenderfer and Rosenberg, Nat Rev Clin Oncol., 2013, 10(5): 267-276) and ACT using autologous lymphocytes genetically-modified to express anti-tumor T cell receptors has been used to treat metastatic melanoma (Rosenberg and Dudley, Curr. Opin. Immunol. 2009, 21: 233-240).

[0647] Immune cells for adoptive cell therapy may be selected from but not limited to selected from a CD8+ T cell, a CD4+ T cell, a helper T cell, a natural killer (NK) cell, a NKT cell, a cytotoxic T lymphocyte (CTL), a tumor infiltrating lymphocyte (TIL), a memory T cell, a regulatory T (Treg) cell, a cytokine-induced killer (CIK) cell, a dendritic cell, a human embryonic stem cell, a mesenchymal stem cell, a hematopoietic stem cell, or a mixture thereof.

[0648] There are several types of cellular immunotherapies, including tumor infiltrating lymphocyte (TIL) therapy, genetically engineered T cells bearing chimeric antigen receptors (CARs), and recombinant TCR technology. In some embodiments, the compositions of the present disclosure may be utilized to alter TIL (tumor infiltrating lymphocyte) populations in a subject. In one embodiment, any of the payloads described herein may be utilized to change the ratio of CD4 positive cells to CD8 positive populations. In some embodiments, TILs may be sorted ex vivo and engineered to express any of the cytokines described herein. Payloads of the disclosure may be used to expand CD4 and/or CD8 populations of TILs to enhance TIL mediated immune response.

[0649] In one embodiment, the chimeric antigen receptor (CAR) of the present disclosure may be a conditionally active CAR. A wild type protein or domain thereof, such as those described herein may be used to generate a conditionally active biologic protein which are reversibly or irreversibly inactivated at the wild type normal physiological conditions as well as to such conditionally active biologic proteins and domains and uses of such conditional active biologic proteins and domains are provided. Such methods and conditionally active proteins are taught in, for example, International Publication No. WO2016033331, the contents of which are incorporated herein by reference in their entirety. As a non-limiting example, the CAR comprises at least one antigen specific targeting region evolved from a wild type protein or a domain thereof and one or more of a decrease in activity in the assay at the normal physiological condition compared to the antigen specific targeting region of the wild-type protein or a domain thereof, and an increase in activity in the assay under the aberrant condition compared to the antigen specific targeting region of the wild-type protein or a domain thereof.

[0650] According to the present disclosure, the biocircuits and systems may be used in the development and implementation of cell therapies such as adoptive cell therapy. Certain effector modules useful in cell therapy are given in FIGS. 7-12. The biocircuits, their components, effector modules and their SREs and payloads may be used in cell therapies to effect TCR removal-TCR gene disruption, TCR engineering, to regulate epitope tagged receptors, in APC platforms for stimulating T cells, as a tool to enhance ex vivo APC stimulation, to improve methods of T cell expansion, in ex vivo stimulation with antigen, in TCR/CAR combinations, in the manipulation or regulation of TILs, in allogeneic cell therapy, in combination T cell therapy with other treatment lines (e.g. radiation, cytokines), to encode engineered TCRs, or modified TCRs, or to enhance T cells other than TCRs (e.g. by introducing cytokine genes, genes for the checkpoint inhibitors PD1, CTLA4).

[0651] In some embodiments, improved response rates are obtained in support of cell therapies.

[0652] Expansion and persistence of cell populations may be achieved through regulation or fine tuning of the payloads, e.g., the receptors or pathway components in T cells, NK cells or other immune-related cells. In some embodiments, biocircuits, their components, SREs or effector modules are designed to spatially and/or temporally control the expression of proteins which enhance T-cell or NK cell response. In some embodiments, biocircuits, their components, SREs or effector modules are designed to spatially and/or temporally control the expression of proteins which inhibit T-cell or NK cell response.

[0653] Provided herein are methods for use in adoptive cell therapy. The methods involve preconditioning a subject in need thereof, modulating immune cells with SRE, biocircuits and compositions of the present disclosure, administering to a subject, engineered immune cells expressing compositions of the disclosure and the successful engraftment of engineered cells within the subject.

[0654] In some embodiments, SREs, biocircuits and compositions of the present disclosure may be used to minimize preconditioning regimens associated with adoptive cell therapy. As used herein “preconditioning” refers to any therapeutic regimen administered to a subject in order to improve the outcome of adoptive cell therapy. Preconditioning strategies include, but are not limited to total body irradiation and/or lymphodepleting chemotherapy. Adoptive therapy clinical trials without preconditioning have failed to demonstrate any clinical benefit, indicating its importance in ACT. Yet, preconditioning is associated with significant toxicity and limits the subject cohort that is suitable for ACT. In some instances, immune cells for ACT may be engineered to express cytokines such as IL12 and IL15 as payload using SREs of the present disclosure to reduce the need for preconditioning (Pengram et al. (2012) Blood 119 (18): 4133-41; the contents of which are incorporated by reference in their entirety).

[0655] In some embodiments, the neurotoxicity may be associated with CAR or TIL therapy. Such neurotoxicity may be associated CD19-CARs. Toxicity may be due to excessive T cell infiltration into the brain. In some embodiments, neurotoxicity may be alleviated by preventing the passage of T cells through the blood brain barrier. This can be achieved by the targeted gene deletion of the endogenous alpha-4 integrin inhibitors such as tysabri/natalizumab may also be useful in the present disclosure.

[0656] In some embodiments, the effector modules may encode one or more cytokines. In some embodiments, the cytokine is IL15. Effector modules encoding IL15 may be designed to induce proliferation in cytotoxic populations and avoid stimulation of T regs. In other cases, the effector modules which induce proliferation in cytotoxic populations may also stimulate NK and NKT cells.

[0657] In some embodiments, effector modules may encode, or be tuned or induced to produce, one or more cytokines for expansion of cells in the biocircuits of the disclosure. In such cases the cells may be tested for actual expansion. Expansion may be at least 5%, 10%, 20%, 30%, 40%, 50%, 60%, 70%, 80%, 90% or more.

[0658] In some embodiments, the tumor microenvironment may be remodeled using a biocircuit containing an effector module encoding IL17.

[0659] In some embodiments, biocircuits, their components, SREs or effector modules are designed to modulate Tregs to attenuate autoimmune disorders. In such a case, IL2 may be regulated using a singly tuned module or one having multiple tuned features as described herein.

[0660] In some embodiments, immune cells for ACT may be dendritic cells, T cells such as CD8⁺ T cells and CD4⁺ T cells, natural killer (NK) cells, NK T cells, Cytotoxic T lymphocytes (CTLs), tumor infiltrating lymphocytes (TILs), lymphokine activated killer (LAK) cells, memory T cells, regulatory T cells (Tregs), helper T cells, cytokine-induced killer (CIK) cells, and any combination thereof. In other embodiments, immune stimulatory cells for ACT may be generated from embryonic stem cell (ESC) and induced pluripotent stem cell (iPSC). In some embodiments, autologous or allogeneic immune cells are used for ACT.

[0661] In some embodiments, cells used for ACT may be T cells engineered to express T cell receptors (TCRs) with new specificities or CARs comprising an antigen-binding domain specific to an antigen on tumor cells of interest. In other embodiments, cells used for ACT may be NK cells engineered to express CARs comprising an antigen-binding domain specific to an antigen on tumor cells of interest. In addition to adoptive transfer of genetically modified T cells (e.g., CAR T cells) for immunotherapy, alternate types of CAR-expressing leukocytes, either alone, or in combination with CAR T cells may be used for adoptive immunotherapy. In one example, a mixture of T cells and NK cells may be used for ACT. The expression level of CARs in T cells and NK cells, according to the present disclosure, is tuned and controlled by a small molecule that binds to the DD(s) operably linked to the CAR in the effector module.

[0662] In some embodiments, NK cells engineered to express the present compositions may be used for ACT. NK cell activation induces perforin/granzyme-dependent apoptosis in target cells. NK cell activation also induces cytokine secretion such as IFN γ, TNF-α and GM-CSF. These cytokines enhance the phagocytic function of macrophages and their antimicrobial activity, and augment the adaptive immune response via up-regulation of antigen presentation by antigen presenting cells such as dendritic cells (DCs) (Reviewed by Vivier et al., Nat. Immunol., 2008, 9(5): 503-510).

[0663] Other examples of genetic modification may include the introduction of chimeric antigen receptors (CARs) and the down-regulation of inhibitory NK cell receptors such as NKG2A. Examples of CARs include, but are not limited to, CD19 and CD20 specific CARs against B cell malignancies, CARs targeting CD33 on leukemia cells, CS1 CAR and CD138 CAR on myeloma cells, GD2 CAR on neuroblastoma cells, Her2/Neu and erbB2 on breast cancer cells, carcinoembryonic antigen (CEA) on colon cancers, EpCAM on epithelial tumors, GPA7 on melanoma, NKG2D ligand on leukemia and solid tumors, and TRAIL R1 on various tumor targets. The CARs may be POIs of the effector modules and regulated by the binding of the DD with its corresponding ligand.

[0664] In another example, NK cells for ACT may be modified to express an effector module comprising the high-affinity CD16-158V polymorphism (HA-CD16) which augments NK cell mediated antibody dependent cell cytotoxicity (ADCC) against tumors. Infusion of NK cells genetically modified to express HA-CD16 could be used as a strategy to improve the efficacy of antibody-based therapies for cancer patients.

[0665] NK cells may also be genetically reprogrammed to circumvent NK cell inhibitory signals upon interaction with tumor cells. For example, using CRISPR, ZFN, or TALEN to genetically modify NK cells to silence their inhibitory receptors may enhance the anti-tumor capacity of NK cells.

[0666] Immune cells can be isolated and expanded ex vivo using a variety of methods known in the art. For example, methods of isolating and expanding cytotoxic T cells are described in U.S. Pat. Nos. 6,805,861 and 6,531,451; US Patent Publication No.: US20160348072A1 and International Patent Publication NO: WO2016168595A1; the contents of each of which are incorporated herein by reference in their entirety. Isolation and expansion of NK cells is described in US Patent Publication NO.: US20150152387A1, U.S. Pat. No. 7,435,596; and Oyer, J. L. (2016). Cytotherapy. 18(5):653-63; the contents of each of which are incorporated by reference herein in its entirety. Specifically, human primary NK cells may be expanded in the presence of feeder cells e.g. a myeloid cell line that has been genetically modified to express membrane bound IL15, IL21, IL12 and 4-1BBL.

[0667] In some instances, sub populations of immune cells may be enriched for ACT. Methods for immune cell enrichment are taught in International Patent Publication NO.: WO2015039100A1. In another example, T cells positive for B and T lymphocyte attenuator marker BTLA) may be used to enrich for T cells that are anti-cancer reactive as described in U.S. Pat. No. 9,512,401 (the content of each of which are incorporated herein by reference in their entirety).

[0668] In some embodiments, immune cells for ACT may be depleted of select sub populations to enhance T cell expansion. For example, immune cells may be depleted of Foxp3+T lymphocytes to minimize the ant-tumor immune response using methods taught in US Patent Publication NO.: US 20160298081A1; the contents of which are incorporated by reference herein in their entirety.

[0669] In some embodiments, activation and expansion of T cells for ACT is achieved antigenic stimulation of a transiently expressed Chimeric Antigen Receptor (CAR) on the cell surface. Such activation methods are taught in International Patent NO.: WO2017015427, the content of which are incorporated herein by reference in their entirety.

[0670] In some embodiments, immune cells may be activated by antigens associated with antigen presenting cells (APCs). In some embodiments, the APCs may be dendritic cells, macrophages or B cells that antigen specific or nonspecific. The APCs may autologous or homologous in their organ. In some embodiments the APCs may be artificial antigen presenting cells (aAPCs) such as cell based aAPCs or acellular aAPCs. Cell based aAPCs are may be selected from either genetically modified allogeneic cells such as human erythroleukemia cells or xenogeneic cells such as murine fibroblasts and Drosophila cells. Alternatively, the APCs maybe be acellular wherein the antigens or costimulatory domains are presented on synthetic surfaces such as latex beads, polystyrene beads, lipid vesicles or exosomes.

[0671] In some embodiments, adoptive cell therapy is carried out by autologous transfer, wherein the cells are derived from a subject in need of a treatment and the cells, following isolation and processing are administered to the same subject. In other instances, ACT may involve allogenic transfer wherein the cells are isolated and/or prepared from a donor subject other than the recipient subject who ultimately receives cell therapy. The donor and recipient subject may be genetically identical, or similar or may express the same HLA class or subtype.

[0672] In some embodiments, the multiple immunotherapeutic agents introduced into the immune cells for ACT (e.g., T cells and NK cells) may be controlled by the same biocircuit system. In one example, a cytokine such as IL12 and a CAR construct such as CD19 CAR are linked to the same hDHFR destabilizing domain The expression of IL12 and CD19 CAR is tuned using TMP simultaneously. In other embodiments, the multiple immunotherapeutic agents introduced into the immune cells for ACT (e.g., T cells and NK cells) may be controlled by different biocircuit systems. In one example, a cytokine such as IL12 and a CAR construct such as CD19 CAR are linked to different DDs in two separate effector modules, thereby can be tuned separately using different stimuli. In another example, a suicide gene and a CAR construct may be linked to two separate effector modules.

[0673] Following genetic modulation using SREs, biocircuits and compositions of the disclosure, cells are administered to the subject in need thereof. Methods for administration of cells for adoptive cell therapy are known and may be used in connection with the provided methods and compositions. For example, adoptive T cell therapy methods are described, e.g., in US Patent Application Publication No. 2003/0170238 to Gruenberg et al; U.S. Pat. No. 4,690,915 to Rosenberg; Rosenberg (2011) Nat Rev Clin Oncol. 8(10):577-85). See, e.g., Themeli et al. (2013) Nat Biotechnol. 31(10): 928-933; Tsukahara et al. (2013) Biochem Biophys Res Commun 438(1): 84-9; Davila et al. (2013) PLoS ONE 8(4): e61338; the contents of each of which are incorporated herein by reference in their entirety.

[0674] In some embodiments, immune cells for ACT may be modified to express one or more immunotherapeutic agents which facilitate immune cells activation, infiltration, expansion, survival and anti-tumor functions. The immunotherapeutic agents may be a second CAR or TCR specific to a different target molecule; a cytokine or a cytokine receptor; a chimeric switch receptor that converts an inhibitory signal to a stimulatory signal; a homing receptor that guides adoptively transferred cells to a target site such as the tumor tissue; an agent that optimizes the metabolism of the immune cell; or a safety switch gene (e.g., a suicide gene) that kills activated T cells when a severe event is observed after adoptive cell transfer or when the transferred immune cells are no-longer needed.

[0675] In some embodiments, immune cells used for adoptive cell transfer can be genetically manipulated to improve their persistence, cytotoxicity, tumor targeting capacity, and ability to home to disease sites in vivo, with the overall aim of further improving upon their capacity to kill tumors in cancer patients. One example is to introduce effector modules of the disclosure comprising cytokines such as gamma-cytokines (IL2 and IL15) into immune cells to promote immune cell proliferation and survival. Transduction of cytokine genes (e.g., gamma-cytokines IL2 and IL15) into cells will be able to propagate immune cells without addition of exogenous cytokines and cytokine expressing NK cells have enhanced tumor cytotoxicity.

[0676] Another example includes the use of genetic modification for directing the infused NK cells to proper tumor tissues. NK cells may be genetically engineered with an effector module that encodes the CCR7 receptor to improve their migration toward one of its ligands CCL19. Other strategies may involve utilizing chemokine receptors, such as CXCR3 to improve NK cell migration to inflamed tissues, such as those infiltrated with metastatic tumors.

[0677] NK cells may be modified to become insensitive to suppressive cytokines such as TGF-β, thereby preserving their cytotoxicity. For example, NK cells can be genetically modified to express the dominant negative mutant form of TGF-β type II receptor (DNTβRII) on their surface that render NK cells resistant to the suppressive effects of TGF-β.

[0678] In some embodiments, biocircuits, their components, SREs or effector modules are designed to be significantly less immunogenic than other biocircuits or switches in the art.

[0679] As used herein, “significantly less immunogenic” refers to a detectable decrease in immunogenicity. In another embodiment, the term refers to a fold decrease in immunogenicity. In another embodiment, the term refers to a decrease such that an effective amount of the biocircuits, their components, SREs or effector modules which can be administered without triggering a detectable immune response. In another embodiment, the term refers to a decrease such that the biocircuits, their components, SREs or effector modules can be repeatedly administered without eliciting an immune response. In another embodiment, the decrease is such that the biocircuits, their components, SREs or effector modules can be repeatedly administered without eliciting an immune response.

[0680] In another embodiment, the biocircuits, their components, SREs or effector modules is 2-fold less immunogenic than its unmodified counterpart or reference compound. In another embodiment, immunogenicity is reduced by a 3-fold factor. In another embodiment, immunogenicity is reduced by a 5-fold factor. In another embodiment, immunogenicity is reduced by a 7-fold factor. In another embodiment, immunogenicity is reduced by a 10-fold factor. In another embodiment, immunogenicity is reduced by a 15-fold factor. In another embodiment, immunogenicity is reduced by a fold factor. In another embodiment, immunogenicity is reduced by a 50-fold factor. In another embodiment, immunogenicity is reduced by a 100-fold factor. In another embodiment, immunogenicity is reduced by a 200-fold factor. In another embodiment, immunogenicity is reduced by a 500-fold factor. In another embodiment, immunogenicity is reduced by a 1000-fold factor. In another embodiment, immunogenicity is reduced by a 2000-fold factor. In another embodiment, immunogenicity is reduced by another fold difference.

[0681] Methods of determining immunogenicity are well known in the art, and include, e.g. measuring secretion of cytokines (e.g. IL12, IFNalpha, TNF-alpha, RANTES, MIP-1alpha or beta, IL6, IFN beta, or IL8), measuring expression of DC activation markers (e.g. CD83, HLA-DR, CD80 and CD86), or measuring ability to act as an adjuvant for an adaptive immune response.

[0682] The present disclosure provides method of inducing an immune response in a cell. As used herein the term “immune response” refers to the activity of the cells of the immune system in response to stimulus, or an antigen. In some embodiments, the antigen may be a cancer antigen. In some aspects, the methods of inducing an immune response may involve administering to the cell, a therapeutically effective amount of any of the compositions described herein. In one aspect, the method may involve administering the pharmaceutical compositions described herein. In one aspect, the method may involve administering the polynucleotides, vectors. In some embodiments, induction of the immune response occurs due to the expression and or function of the immunotherapeutic agents described herein. Methods of inducing immune response further may involve administering to the cell, an effective amount of the stimulus to tune the expression of the immunotherapeutic agent. In some embodiments, the immunotherapeutic agent is capable of inducing an immune response in response to the stimulus. The induction of the immune response may occur in a cell within a subject i.e. in vivo, ex vivo or in vitro. The induction of an immune response may be evaluated by measuring the release of cytokine such as IL2 and IFNγ from the cells. In some embodiments, the induction of an immune response may be measured by evaluating the cell surface markers such as but not limited to CD3, CD4, CD8, CD 14, CD20, CD11b, CD16, CD45 and HLA-DR, CD 69, CD28, CD44, IFNgamma. Examples of cell surface markers for antigen presenting cells include, but are not limited to, MK class I, MHC Class II, CD40, CD45, B7-1, B7-2, IFN γ receptor and IL2 receptor, ICAM-1 and/or Fcγ receptor. Examples of cell surface markers for dendritic cells include, but are not limited to, MHC class I, MHC Class II, B7-2, CD18, CD29, CD31, CD43, CD44, CD45, CD54, CD58, CD83, CD86, CMRF-44, CMRF-56, DCIR and/or Dectin-1 and the like; while in some cases also having the absence of CD2, CD3, CD4, CD8, CD14, CD15, CD16, CD 19, CD20, CD56, and/or CD57. Examples of cell surface markers for NK cells include, but are not limited to, CCL3, CCL4, CCL5, Granulysin, Granzyme B, Granzyme K, IL10, IL22, IFNg, LAP, Perforin, and TNFa.

[0683] Parameters for improving CAR-T therapy outcome are described in Finney et al. JCI. 2019; 129(5):2123-2132 (the contents of which are herein incorporated by reference in their entirety). The levels of biomarker LAG3 (high)/TNF-α (low) in peripheral blood CD8+ T cells at the time of apheresis may also predict a subsequent dysfunctional response in subjects with high antigen load who do not achieve complete response that is durable for more than a few weeks. T cell-intrinsic features that are a consequence of the starting T cell repertoire and the effects of the manufacturing process converge with CD19 antigen-induced activation following adoptive transfer may also play a role in the outcome of CAR-T therapy. The starting T cell repertoire may in part be affected by the timing of the apheresis. In one embodiment, the apheresis may be performed prior to chemotherapy. Cumulative burden of CD19 expressing leukemic and normal B cells, as evaluated in the bone marrow prior to lymphodepleting chemotherapy may be important for determining CAR-T therapy outcome. According to Finney et al., increase antigen burden improves CAR-T therapy outcome. To increase CD19 antigen burden in vivo, subjects may also be infused with expanded subject derived T cells genetically modified to express CD19 (also referred to as T-APCs).

### 2. Cancer Vaccines

[0684] In some embodiments, biocircuits, effector modules, payloads of interest (immunotherapeutic agents), vectors, cells and compositions of the present disclosure may be used for cancer vaccines. In one aspect, dendritic cells are modified to express the compositions of the disclosure and used as cancer vaccines.

[0685] In some embodiments, cancer vaccine may comprise peptides and/or proteins derived from tumor associated antigen (TAA). Such strategies may be utilized to evoke an immune response in a subject, which in some instances may be a cytotoxic T lymphocyte (CTL) response. Peptides used for cancer vaccines may also modified to match the mutation profile of a subject. For example, EGFR derived peptides with mutations matched to the mutations found in the subject in need of therapy have been successfully used in patients with lung cancer (Li F et al. (2016) Oncoimmunology. October 7; 5(12): e1238539; the contents of which are incorporated herein by reference in their entirety).

[0686] In one embodiment, cancer vaccines of the present disclosure may superagonist altered peptide ligands (APL) derived from TAAs. These are mutant peptide ligands deviate from the native peptide sequence by one or more amino acids, which activate specific CTL clones more effectively than native epitopes. These alterations may allow the peptide to bind better to the restricting Class I MHC molecule or interact more favorably with the TCR of a given tumor-specific CTL subset. APLs may be selected using methods taught in US Patent Publication NO.: US20160317633A1, the contents of which are incorporated herein by reference in their entirety.

### 3. Tumor Microenvironment (TME)

[0687] In some embodiments, biocircuits, their components, SREs or effector modules are designed to reshape the tumor microenvironment in order to extend utility of the biocircuit or a pharmaceutical composition beyond direct cell killing

[0688] In some embodiments, biocircuits, their components, SREs or effector modules are designed to reduce, mitigate or eliminate the CAR cytokine storm. In some embodiments, such reduction, mitigation and/or elimination occurs in solid tumors or tumor microenvironments.

[0689] In some embodiments, biocircuits, effector modules, payloads of interest (immunotherapeutic agents), vectors, cells and pharmaceutical compositions of the present disclosure may be used to convert the immunosuppressive microenvironment to increase immune responses.

[0690] In some embodiments, the disclosure provides methods for converting the inhibitory immunoregulatory signals from immunosuppressive cytokines secreted by cancer cells or the surrounding tumor stroma into stimulatory signals using compositions of the disclosure. Immunosuppressive cytokines include without limitation, IL13, IL4, TGF-beta, IL6, IL8, and IL10. In one aspect, the genetically modified tumor-specific T cells (e.g., CART cells) or T cells with native tumor specificity may be further engineered to express an effector module comprising a chimeric switch receptor that binds to inhibitory/suppressive cytokines and converts their intracellular consequences to an immunostimulatory/activating signal, thus improving the efficacy of tumor-specific T cells. The chimeric switch receptor is composed of the extracellular domains of an inhibitory cytokine receptor (e.g., IL13R, IL4R, IL10R, TGFβR1/ALK5, TGFβR2, and TGFβR3/β-glycan) fused with the intracellular signal transducing domains derived from stimulatory cytokine receptors such as IL2R (i.e., IL2Rα/CD25, IL2Rβ/CD122, and common γ chain receptor/CD132 which is shared by various cytokine receptors) and/or IL7R (IL7Rα/CD127, common γ chain receptor/CD132). These manipulations render tumor specific T cells or CART cells resistant to the suppressive tumor microenvironment.

[0691] In some embodiments, the present disclosure provides methods to abrogate the immunosuppressive effects produced by myeloid derived suppressor cells (MDSCs). Tumor cells secrete indoleamine 2,3-dioxygenase (IDO) which promotes immunosuppression through the recruitment of MDSCs. The immunosuppressive environment is further promoted by the MDSCs through nitric oxide synthase (NOS) and arginase 1 (ARG1) which can degrade extracellular arginine. Amino acid deprivation within the tumor microenvironment suppresses T cell anti-tumor activity. In some embodiments, payloads of the present disclosure may comprise inhibitors of NOS, ARG1 and tryptophan metabolism pathway such as IDO. In one embodiment, the payload may include inhibitors of colony stimulating factor receptor 1 (CSFR1) which required for the proliferation and function of MDSCs.

[0692] In some embodiments, dominant negative mutants of inhibitory co receptor such as PD-1, CTLA-4, LAG-3, TIM-3, KIRs, or BTLA may be utilized as payloads of the disclosure to overcome inhibitory signals in the tumor microenvironment.

### 4. Combination Treatments

[0693] In some embodiments, it is desirable to combine compositions, vectors and cells of the disclosure for administration to a subject. Compositions of the disclosure comprising different immunotherapeutic agents may be used in combination for enhancement of immunotherapy.

### Immunotherapeutic Agents

[0694] In some embodiments, it is desirable to combine compositions of the disclosure with adjuvants, that can enhance the potency and longevity of antigen-specific immune responses. Adjuvants used as immunostimulants in combination therapy include biological molecules or delivery carriers that deliver antigens. As non-limiting examples, the compositions of the disclosure may be combined with biological adjuvants such as cytokines, Toll Like Receptors, bacterial toxins, and/or saponins. In other embodiments, the compositions of the present disclosure may be combined with delivery carriers. Exemplary delivery carriers include, polymer microspheres, immune stimulating complexes, emulsions (oil-in-water or water-in-oil), aluminum salts, liposomes or virosomes.

[0695] In some embodiments, immune effector cells modified to express biocircuits, effector modules, DDs and payloads of the disclosure may be combined with the biological adjuvants described herein. Dual regulation of CAR and cytokines and ligands to segregate the kinetic control of target-mediated activation from intrinsic cell T cell expansion. Such dual regulation also minimizes the need for pre-conditioning regimens in patients. As a non-limiting example, DD regulated CAR e.g. CD19 CAR may be combined with cytokines e.g. IL12 to enhance the anti-tumor efficacy of the CAR (Pegram H. J., et al. Tumor-targeted T cells modified to secrete IL12 eradicate systemic tumors without need for prior conditioning. Blood. 2012; 119:4133-41; the contents of each of which are incorporated herein by reference in their entirety). As another non-limiting example, Merchant et al. combined dendritic cell-based vaccinations with recombinant human IL7 to improve outcome in high-risk pediatric sarcomas patients (Merchant, M. S. et. al. Adjuvant immunotherapy to Improve Outcome in High-Risk Pediatric Sarcomas. Clin Cancer Res. 2016. 22(13):3182-91; the contents of each of which are incorporated herein by reference in their entirety).

[0696] In some embodiments, immune effector cells modified to express one or more antigen-specific TCRs or CARs may be combined with compositions of the disclosure comprising immunotherapeutic agents that convert the immunosuppressive tumor microenvironment.

[0697] In one aspect, effector immune cells modified to express CARs specific to different target molecules on the same cell may be combined. In another aspect, different immune cells modified to express the same CAR construct such as NK cells and T cells may be used in combination for a tumor treatment, for instance, a T cell modified to express a CD19 CAR may be combined with a NK cell modified to express the same CD19 CAR to treat B cell malignancy

[0698] In other embodiments, immune cells modified to express CARs may be combined with checkpoint blockade agents.

[0699] In some embodiments, immune effector cells modified to expressed biocircuits, effector modules, DDs and payloads of the disclosure may be combined with cancer vaccines of the disclosure.

[0700] In some embodiments, an effector module comprising a CAR may be used in combination with an effector module comprising a cytokine, or an effector module comprising a safety switch, or an effector module comprising a metabolic factor, or an effector module comprising a homing receptor.

[0701] In one embodiment, an effector module comprising a CD19 CAR may be used in combination with amino pyrimidine derivatives such as the Burkit's tyrosine receptor kinase (BTK) inhibitor using methods taught in International Patent Application NO.: WO2016164580, the contents of which are incorporated herein by reference in their entirety.

### Cancer

[0702] In some embodiments, methods of the disclosure may include combination of the compositions of the disclosure with other agents effective in the treatment of cancers, infection diseases and other immunodeficient disorders, such as anti-cancer agents. As used herein, the term “anti-cancer agent” refers to any agent which is capable of negatively affecting cancer in a subject, for example, by killing cancer cells, inducing apoptosis in cancer cells, reducing the growth rate of cancer cells, reducing the incidence or number of metastases, reducing tumor size, inhibiting tumor growth, reducing the blood supply to a tumor or cancer cells, promoting an immune response against cancer cells or a tumor, preventing or inhibiting the progression of cancer, or increasing the lifespan of a subject with cancer.

[0703] In some embodiments, anti-cancer agent or therapy may be a chemotherapeutic agent, or radiotherapy, immunotherapeutic agent, surgery, or any other therapeutic agent which, in combination with the present disclosure, improves the therapeutic efficacy of treatment.

[0704] In some embodiments, compositions of the present disclosure may be used in combination with immunotherapeutics other than the inventive therapy described herein, such as antibodies specific to some target molecules on the surface of a tumor cell.

[0705] Exemplary chemotherapies include, without limitation, Acivicin; Aclarubicin; Acodazole hydrochloride; Acronine; Adozelesin; Aldesleukin; Altretamine; Ambomycin; Ametantrone acetate; Amsacrine; Anastrozole; Anthramycin; Asparaginase; Asperrin, Sulindac, Curcumin, alkylating agents including: Nitrogen mustards such as mechlor-ethamine, cyclophosphamide, ifosfamide, melphalan and chlorambucil; nitrosoureas such as carmustine (BC U), lomustine (CCNU), and semustine (methyl-CC U); thylenimines/methylmelamine such as thriethylenemelamine (TEM), triethylene, thiophosphoramide (thiotepa), hexamethylmelamine (HMM, altretamine); alkyl sulfonates such as busulfan; triazines such as dacarbazine (DTIC); antimetabolites including folic acid analogs such as methotrexate and trimetrexate, pyrrolidine analogs such as 5-fluorouracil, fluorodeoxyuridine, gemcitabine, cytosine arabinoside (AraC, cytarabine), 5-azacytidine, 2,2′-difluorodeoxycytidine, purine analogs such as 6-mercaptopurine, 6-thioguanine, azathioprine, 2′-deoxycoformycin (pentostatin), erythrohydroxynonyladenine (EHNA), fludarabine phosphate, and 2-chlorodeoxyadenosine (cladribine, 2-CdA); natural products including antimitotic drugs such as paclitaxel, vinca alkaloids including vinblastine (VLB), vincristine, and vinorelbine, taxotere, estramustine, and estramustine phosphate; epipodophylotoxins such as etoposide and teniposide; antibiotics, such as actimomycin D, daunomycin (rubidomycin), doxorubicin, mitoxantrone, idarubicin, bleomycins, plicamycin (mithramycin), mitomycinC, and actinomycin; enzymes such as L-asparaginase, cytokines such as interferon (IFN)-gamma, tumor necrosis factor (TNF)-alpha, TNF-beta and GM-CSF, anti-angiogenic factors, such as angiostatin and endostatin, inhibitors of FGF or VEGF such as soluble forms of receptors for angiogenic factors, including soluble VGF/VEGF receptors, platinum coordination complexes such as cisplatin and carboplatin, anthracenediones such as mitoxantrone, substituted urea such as hydroxyurea, methylhydrazine derivatives including N-methylhydrazine (MIFf) and procarbazine, adrenocortical suppressants such as mitotane (o,ρ′-DDD) and aminoglutethimide; hormones and antagonists including adrenocorticosteroid antagonists such as prednisone and equivalents, dexamethasone and aminoglutethimide; progestin such as hydroxyprogesterone caproate, medroxyprogesterone acetate and megestrol acetate; estrogen such as diethylstilbestrol and ethinyl estradiol equivalents; antiestrogen such as tamoxifen; androgens including testosterone propionate and fluoxymesterone/equivalents; antiandrogens such as flutamide, gonadotropin-releasing hormone analogs and leuprolide; non-steroidal antiandrogens such as flutamide; kinase inhibitors, histone deacetylase inhibitors, methylation inhibitors, proteasome inhibitors, monoclonal antibodies, oxidants, anti-oxidants, telomerase inhibitors, BH3 mimetics, ubiquitin ligase inhibitors, stat inhibitors and receptor tyrosin kinase inhibitors such as imatinib mesylate (marketed as Gleevac or Glivac) and erlotinib (an EGF receptor inhibitor) now marketed as Tarveca; anti-virals such as oseltamivir phosphate, Amphotericin B, and palivizumab; Sdi 1 mimetics; Semustine; Senescence derived inhibitor 1; Sparfosic acid; Spicamycin D; Spiromustine; Splenopentin; Spongistatin 1; Squalamine; Stipiamide; Stromelysin inhibitors; Sulfinosine; Superactive vasoactive intestinal peptide antagonist; Velaresol; Veramine; Verdins; Verteporfin; Vinorelbine; Vinxaltine; Vitaxin; Vorozole; Zanoterone; Zeniplatin; Zilascorb; and Zinostatin stimalamer; PI3Kβ small-molecule inhibitor, GSK2636771; pan-PI3K inhibitor (BKM120); BRAF inhibitors. Vemurafenib (Zelboraf) and dabrafenib (Tafinlar); or any analog or derivative and variant of the foregoing.

[0706] In one embodiment, the disclosure further relates to the use of pharmaceutical compositions, biocircuits, biocircuit components, effector modules including their SREs or payloads of the present disclosure for treating one or more forms of cancer, in combination with other pharmaceuticals and/or other therapeutic methods, e.g., with known pharmaceuticals and/or known therapeutic methods, such as, for example, those which are currently employed for treating these disorders. For example, the pharmaceutical compositions, biocircuits, biocircuit components, effector modules including their SREs or payloads of the present disclosure can also be administered in conjunction with one or more additional anti-cancer treatments, such as biological, chemotherapy and radiotherapy. Accordingly, a treatment can include, for example, imatinib (Gleevac), all-trans-retinoic acid, a monoclonal antibody treatment (gemtuzumab, ozogamicin), chemotherapy (for example, chlorambucil, prednisone, prednisolone, vincristine, cytarabine, clofarabine, farnesyl transferase inhibitors, decitabine, inhibitors of MDR1), rituximab, interferon-α, anthracycline drugs (such as daunorubicin or idarubicin), L-asparaginase, doxorubicin, cyclophosphamide, doxorubicin, bleomycin, fludarabine, etoposide, pentostatin, or cladribine), bone marrow transplant, stem cell transplant, radiation therapy, anti-metabolite drugs (methotrexate and 6-mercaptopurine), or any of the antibodies taught herein such as those in Table 6 of the co-owned U.S. Provisional Patent Application No. 62/320,864 filed Apr. 11, 2016, 62/466,596 filed Mar. 3, 2017 and the International Publication WO2017/180587 (the contents of each of which are herein incorporated by reference in their entirety), or combinations thereof.

[0707] The present disclosure provides methods for increasing the survival of a subject with cancer. Such methods may include (a) administering to the subject, an effective amount of an immune cell. The immune cell may express an effector module which includes a stimulus response element (SRE) derived from a region or a portion of PDE5 (SEQ ID NO:1) operably linked to a payload. In one embodiment, the payload may be a chimeric antigen receptor (CAR). The SRE described herein may be responsive to and/or interact with at least one stimulus. The methods for increasing survival may also include administering the stimulus to the subject. The stimulus may cause the expression of the CAR to be modulated. The modulation of CAR expression may induce an anti-cancer immune response, which may increase the survival of the subject. The stimulus useful in the methods for promoting survival may be a small molecule. The small molecule may be Tadalafil, Vardenafil or Vardenafil. In one embodiment, the small molecule is Tadalafil. The small molecule may be administered to the subject at a dose of from about 1 mg/kg to about 1000 mg/kg body weight of the subject. In one embodiment, the small molecule may be administered at a dose of 100 mg/kg. In one aspect, the small molecule is administered at a dose of 30 mg/kg. The method of increasing the survival in the subject with cancer may involve administering the small molecule to the subject at least once a day. In one embodiment, the survival in the subject may be increased by a survival ratio of at least 1.3. The SRE described herein may be derived from a region or portion of PDE5 (SEQ ID NO:1) may include at least one mutation selected from the group comprising S542L, V548M, P549S, S550F, L554R, I556S, S562G, F564I, L569M, T571S, T571I, L573M, C574Y, V585M, Q586L, Q586P, Q589E, H592R, V594I, K604R, N605D, N605Y, R607W, R607Q, N609Y, A611T, Y612F, Y612W, Y612A, H613L, H613R, W615R, H617L, N620S, M625I, K633E, H653A, D656L, R658H, G659A, N662Y, S663Y, Q666H, L675P, I680S, E682A, D687A, H685L, M691I, L693P, I700F, I706N, E708V, Y709H, K710N, T712M, I715K, A722V, T723S, T723R, D724Y, D724A, D7240, L727P, Y728L, K730E, R732L, R732G, R732A, R732V, R732I, R732P, R732F, R732W, R732Y, R732H, R732S, R732T, R732D, R732E, R732Q, R732N, R732M, R732C, R732K, F735L, F736A, F7360, F736L, F736M, F736R, F736W, F736K, F736Q, F736E, F736S, F736P, F736V, F736C, F736Y, F736H, F736I, F736N, F736D, F736T, Q743L, F755Y, M758I, M760I, A762T, D764A, A767E, I768N, K770Q, W772C, A779T, L781P, T784I, F787V, F787A, E795R, K795N, E796G, E796D, I799L, D803N, E808G, M816A, F820I, I821A, A823T, Y829A, T833S, R847G, R847T, K848N, W853F, E858V, and Q859R.

[0708] Also provided herein are methods of reducing tumor burden in a subject. Such methods may include (a) administering to the subject, an effective amount of an immune cell. The immune cell may express an effector module which includes a stimulus response element (SRE) derived from a region or a portion of PDE5 (SEQ ID NO:1) operably linked to a payload. In one embodiment, the payload may be a chimeric antigen receptor (CAR). The SRE described herein may be responsive to and/or interact with at least one stimulus. The methods for increasing survival may also include administering the stimulus to the subject. The stimulus may cause the expression of the CAR to be modulated. The modulation of CAR expression may induce an anti-tumor immune response in the subject. The stimulus useful in the methods for reducing tumor burden may be a small molecule. The small molecule may be Tadalafil, Vardenafil or Vardenafil. In one embodiment, the small molecule is Tadalafil. The small molecule may be administered to the subject at a dose of from about 1 mg/kg to about 1000 mg/kg body weight of the subject. In one embodiment, the small molecule may be administered at a dose of 100 mg/kg. In one aspect, the small molecule is administered at a dose of 30 mg/kg. The methods reducing tumor burden in the subject may involve administering the small molecule to the subject at least once a day. In one embodiment, the small molecule may be administered twice a day. The SRE described herein may be derived from a region or portion of PDE5 (SEQ ID NO:1) may include at least one mutation selected from the group comprising S542L, V548M, P549S, S550F, L554R, I556S, S562G, F564I, L569M, T571S, T571I, L573M, C574Y, V585M, Q586L, Q586P, Q589E, H592R, V594I, K604R, N605D, N605Y, R607W, R607Q, N609Y, A611T, Y612F, Y612W, Y612A, H613L, H613R, W615R, H617L, N620S, M625I, K633E, H653A, D656L, R658H, G659A, N662Y, S663Y, Q666H, L675P, I680S, E682A, D687A, H685L, M691I, L693P, I700F, I706N, E708V, Y709H, K710N, T712M, I715K, A722V, T723S, T723R, D724Y, D724A, D7240, L727P, Y728L, K730E, R732L, R7320, R732A, R732V, R732I, R732P, R732F, R732W, R732Y, R732H, R732S, R732T, R732D, R732E, R732Q, R732N, R732M, R732C, R732K, F735L, F736A, F736G, F736L, F736M, F736R, F736W, F736K, F736Q, F736E, F736S, F736P, F736V, F736C, F736Y, F736H, F736I, F736N, F736D, F736T, Q743L, F755Y, M758I, M760I, A762T, D764A, A767E, I768N, K770Q, W772C, A779T, L781P, T784I, F787V, F787A, E795R, K795N, E796G, E796D, I799L, D803N, E808G, M816A, F820I, I821A, A823T, Y829A, T833S, R847G, R847T, K848N, W853F, E858V, and Q859R.

[0709] Radiotherapeutic agents and factors include radiation and waves that induce DNA damage for example, γ-irradiation, X-rays, UV-irradiation, microwaves, electronic emissions, radioisotopes, and the like. Therapy may be achieved by irradiating the localized tumor site with the above described forms of radiations. It is most likely that all of these factors effect a broad range of damage DNA, on the precursors of DNA, the replication and repair of DNA, and the assembly and maintenance of chromosomes. Dosage ranges for X-rays range from daily doses of 50 to 200 roentgens for prolonged periods of time (3 to 4 weeks), to single doses of 2000 to 6000 roentgens. Dosage ranges for radioisotopes vary widely, and depend on the half-life of the isotope, the strength and type of radiation emitted, and the uptake by the neoplastic cells.

[0710] Radiation therapy (also called radiotherapy, X-ray therapy, or irradiation) is the use of ionizing radiation to kill cancer cells and shrink tumors. Radiation therapy can be administered externally via external beam radiotherapy (EBRT) or internally via brachytherapy. The effects of radiation therapy are localized and confined to the region being treated. Radiation therapy may be used to treat almost every type of solid tumor, including cancers of the brain, breast, cervix, larynx, lung, pancreas, prostate, skin, stomach, uterus, or soft tissue sarcomas. Radiation is also used to treat leukemia and lymphoma.

[0711] In some embodiments, the chemotherapeutic agent may be an immunomodulatory agent such as lenalidomide (LEN). Recent studies have demonstrated that lenalidomide can enhance antitumor functions of CAR modified T cells (Otahal et al., Oncoimmunology, 2015, 5(4): e1115940). Some examples of anti-tumor antibodies include tocilizumab, siltuximab.

[0712] Chemotherapy is the treatment of cancer with drugs that can destroy cancer cells. In current usage, the term “chemotherapy” usually refers to cytotoxic drugs which affect rapidly dividing cells in general, in contrast with targeted therapy. Chemotherapy drugs interfere with cell division in various possible ways, e.g. with the duplication of DNA or the separation of newly formed chromosomes. Most forms of chemotherapy target all rapidly dividing cells and are not specific to cancer cells, although some degree of specificity may come from the inability of many cancer cells to repair DNA damage, while normal cells generally can.

[0713] Most chemotherapy regimens are given in combination. Exemplary chemotherapeutic agents include, but are not limited to, 5-FU Enhancer, 9-AC, AG2037, AG3340, Aggrecanase Inhibitor, Aminoglutethimide, Amsacrine (m-AMSA), Asparaginase, Azacitidine, Batimastat (BB94), BAY 12-9566, BCH-4556, Bis-Naphthalimide, Busulfan, Capecitabine, Carboplatin, Carmustaine+Polifepr Osan, cdk4/cdk2 inhibitors, Chlorambucil, CI-994, Cisplatin, Cladribine, CS-682, Cytarabine HCl, D2163, Dactinomycin, Daunorubicin HCl, DepoCyt, Dexifosamide, Docetaxel, Dolastain, Doxifluridine, Doxorubicin, DX8951f, E 7070, EGFR, Epirubicin, Erythropoietin, Estramustine phosphate sodium, Etoposide (VP16-213), Farnesyl Transferase Inhibitor, FK 317, Flavopiridol, Floxuridine, Fludarabine, Fluorouracil (5-FU), Flutamide, Fragyline, Gemcitabine, Hexamethylmelamine (HMM), Hydroxyurea (hydroxycarbamide), Ifosfamide, Interferon Alfa-2a, Interferon Alfa-2b, Interleukin-2, Irinotecan, ISI 641, Krestin, Lemonal DP 2202, Leuprolide acetate (LHRH-releasing factor analogue), Levamisole, LiGLA (lithium-gamma linolenate), Lodine Seeds, Lometexol, Lomustine (CCNU), Marimistat, Mechlorethamine HCl (nitrogen mustard), Megestrol acetate, Meglamine GLA, Mercaptopurine, Mesna, Mitoguazone (methyl-GAG; methyl glyoxal bis-guanylhydrazone; MGBG), Mitotane (o.p′-DDD), Mitoxantrone, Mitoxantrone HCl, MMI 270, MMP, MTA/LY 231514, Octreotide, ODN 698, OK-432, Oral Platinum, Oral Taxoid, Paclitaxel (TAXOL®), PARP Inhibitors, PD 183805, Pentostatin (2′ deoxycoformycin), PKC 412, Plicamycin, Procarbazine HCl, PSC 833, Ralitrexed, RAS Farnesyl Transferase Inhibitor, RAS Oncogene Inhibitor, Semustine (methyl-CCNU), Streptozocin, Suramin, Tamoxifen citrate, Taxane Analog, Temozolomide, Teniposide (VM-26), Thioguanine, Thiotepa, Topotecan, Tyrosine Kinase, UFT (Tegafur/Uracil), Valrubicin, Vinblastine sulfate, Vindesine sulfate, VX-710, VX-853, YM 116, ZD 0101, ZD 0473/Anormed, ZD 1839, ZD 9331.

[0714] Other agents may be used in combination with compositions of the disclosure may also include, but not limited to, agents that affect the upregulation of cell surface receptors and their ligands such as Fas/Fas ligand, DR4 or DR5/TRAIL and GAP junctions, cytostatic and differentiation agents, inhibitors of cell adhesion such as focal adhesion kinase (FAKs) inhibitors and Lovastatin, or agents that increase the sensitivity of the hyper proliferative cells to apoptotic inducers such as the antibody C225.

[0715] The combinations may include administering the compositions of the disclosure and other agents at the same time or separately. Alternatively, the present immunotherapy may precede or follow the other agent/therapy by intervals ranging from minutes, days, weeks to months.

### 5. Therapeutic Uses

[0716] Provided in the present disclosure is a method of reducing a tumor volume or burden in a subject in need, the method comprising introducing into the subject a composition of the disclosure.

[0717] Also provided herein are methods of increasing the survival in a subject with cancer. The methods may comprise introducing into the subject, any of the compositions described herein. The subject may be administered at least one stimulus described herein. In one embodiment the stimulus may be a ligand. In one embodiment, administration of the ligand may result in the modulation of the payload. Payloads such as but not limited to CARs when expressed in response to the ligand, may trigger an anti-cancer immune response. Such anti-cancer immune responses may result in reduction of tumor burden which in turn may increase the survival of the subject with cancer. Ligand may be administered prior to, during or after the introduction of the compositions into the subject. Survival may be measured and quantified using any of the methods known in the art. In some embodiment, survival may be quantified using Kaplan Meier analysis and/or the log rank test. In some embodiments, survival may be quantified using the survival ratio, which may be defined as the ratio of the median survival observed in a group to the median survival of the untransduced-vehicle treatment group. In some embodiments, the survival ratio is at least 1. In some embodiments, the survival ratio is at least 1.1, 1.2, 1.3, 1.4, 1.5, 1.6, 1.7 1.8, 1.9, 2, 3, 4, 5, 6, 7, 8, 9, or 10.

[0718] The present disclosure also provides methods for treating a cancer in a subject, comprising administering to the subject an effective amount of an immune effector cell genetically modified to express at least one effector module of the disclosure.

### Cancer

[0719] Various cancers may be treated with pharmaceutical compositions, biocircuits, biocircuit components, effector modules including their SREs or payloads of the present disclosure. As used herein, the term “cancer” refers to any of various malignant neoplasms characterized by the proliferation of anaplastic cells that tend to invade surrounding tissue and metastasize to new body sites and refers to the pathological condition characterized by such malignant neoplastic growths. Cancers may be tumors or hematological malignancies, and include but are not limited to, all types of lymphomas/leukemias, carcinomas and sarcomas, such as those cancers or tumors found in the anus, bladder, bile duct, bone, brain, breast, cervix, colon/rectum, endometrium, esophagus, eye, gallbladder, head and neck, liver, kidney, larynx, lung, mediastinum (chest), mouth, ovaries, pancreas, penis, prostate, skin, small intestine, stomach, spinal marrow, tailbone, testicles, thyroid and uterus.

[0720] Types of carcinomas which may be treated with the compositions of the present disclosure include, but are not limited to, papilloma/carcinoma, choriocarcinoma, endodermal sinus tumor, teratoma, adenoma/adenocarcinoma, melanoma, fibroma, lipoma, leiomyoma, rhabdomyoma, mesothelioma, angioma, osteoma, chondroma, glioma, lymphoma/leukemia, squamous cell carcinoma, small cell carcinoma, large cell undifferentiated carcinomas, basal cell carcinoma and sinonasal undifferentiated carcinoma.

[0721] Types of carcinomas which may be treated with the compositions of the present disclosure include, but are not limited to, soft tissue sarcoma such as alveolar soft part sarcoma, angiosarcoma, dermatofibrosarcoma, desmoid tumor, desmoplastic small round cell tumor, extraskeletal chondrosarcoma, extraskeletal osteosarcoma, fibrosarcoma, hemangiopericytoma, hemangiosarcoma, Kaposi's sarcoma, leiomyosarcoma, liposarcoma, lymphangiosarcoma, lymphosarcoma, malignant fibrous histiocytoma, neurofibrosarcoma, rhabdomyosarcoma, synovial sarcoma, and Askin's tumor, Ewing's sarcoma (primitive neuroectodermal tumor), malignant hemangioendothelioma, malignant schwannoma, osteosarcoma, and chondrosarcoma.

[0722] As a non-limiting example, the carcinoma which may be treated may be Acute granulocytic leukemia, Acute lymphocytic leukemia, Acute myelogenous leukemia, Adenocarcinoma, Adenosarcoma, Adrenal cancer, Adrenocortical carcinoma, Anal cancer, Anaplastic astrocytoma, Angiosarcoma, Appendix cancer, Astrocytoma, Basal cell carcinoma, B-Cell lymphoma), Bile duct cancer, Bladder cancer, Bone cancer, Bowel cancer, Brain cancer, Brain stem glioma, Brain tumor, Breast cancer, Carcinoid tumors, Cervical cancer, Cholangiocarcinoma, Chondrosarcoma, Chronic lymphocytic leukemia, Chronic myelogenous leukemia, Colon cancer, Colorectal cancer, Craniopharyngioma, Cutaneous lymphoma, Cutaneous melanoma, Diffuse astrocytoma, Ductal carcinoma in situ, Endometrial cancer, Ependymoma, Epithelioid sarcoma, Esophageal cancer, Ewing sarcoma, Extrahepatic bile duct cancer, Eye cancer, Fallopian tube cancer, Fibrosarcoma, Gallbladder cancer, Gastric cancer, Gastrointestinal cancer, Gastrointestinal carcinoid cancer, Gastrointestinal stromal tumors, General, Germ cell tumor, Glioblastoma multiforme, Glioma, Hairy cell leukemia, Head and neck cancer, Hemangioendothelioma, Hodgkin lymphoma, Hodgkin's disease, Hodgkin's lymphoma, Hypopharyngeal cancer, Infiltrating ductal carcinoma, Infiltrating lobular carcinoma, Inflammatory breast cancer, Intestinal Cancer, Intrahepatic bile duct cancer, Invasive/infiltrating breast cancer, Islet cell cancer, Jaw cancer, Kaposi sarcoma, Kidney cancer, Laryngeal cancer, Leiomyosarcoma, Leptomeningeal metastases, Leukemia, Lip cancer, Liposarcoma, Liver cancer, Lobular carcinoma in situ, Low-grade astrocytoma, Lung cancer, Lymph node cancer, Lymphoma, Male breast cancer, Medullary carcinoma, Medulloblastoma, Melanoma, Meningioma, Merkel cell carcinoma, Mesenchymal chondrosarcoma, Mesenchymous, Mesothelioma, Metastatic breast cancer, Metastatic melanoma, Metastatic squamous neck cancer, Mixed gliomas, Mouth cancer, Mucinous carcinoma, Mucosal melanoma, Multiple myeloma, Nasal cavity cancer, Nasopharyngeal cancer, Neck cancer, Neuroblastoma, Neuroendocrine tumors, Non-Hodgkin lymphoma, Non-Hodgkin's lymphoma, Non-small cell lung cancer, Oat cell cancer, Ocular cancer, Ocular melanoma, Oligodendroglioma, Oral cancer, Oral cavity cancer, Oropharyngeal cancer, Osteogenic sarcoma, Osteosarcoma, Ovarian cancer, Ovarian epithelial cancer, Ovarian germ cell tumor, Ovarian primary peritoneal carcinoma, Ovarian sex cord stromal tumor, Paget's disease, Pancreatic cancer, Papillary carcinoma, Paranasal sinus cancer, Parathyroid cancer, Pelvic cancer, Penile cancer, Peripheral nerve cancer, Peritoneal cancer, Pharyngeal cancer, Pheochromocytoma, Pilocytic astrocytoma, Pineal region tumor, Pineoblastoma, Pituitary gland cancer, Primary central nervous system lymphoma, Prostate cancer, Rectal cancer, Renal cell cancer, Renal pelvis cancer, Rhabdomyosarcoma, Salivary gland cancer, Sarcoma, Sarcoma, bone, Sarcoma, soft tissue, Sarcoma, uterine, Sinus cancer, Skin cancer, Small cell lung cancer, Small intestine cancer, Soft tissue sarcoma, Spinal cancer, Spinal column cancer, Spinal cord cancer, Spinal tumor, Squamous cell carcinoma, Stomach cancer, Synovial sarcoma, T-cell lymphoma), Testicular cancer, Throat cancer, Thymoma/thymic carcinoma, Thyroid cancer, Tongue cancer, Tonsil cancer, Transitional cell cancer, Transitional cell cancer, Transitional cell cancer, Triple-negative breast cancer, Tubal cancer, Tubular carcinoma, Ureteral cancer, Ureteral cancer, Urethral cancer, Uterine adenocarcinoma, Uterine cancer, Uterine sarcoma, Vaginal cancer, and Vulvar cancer.

[0723] In some embodiments, the CARs of the present disclosure may be a CAR useful in the treatment of multiple myeloma such as a CS1 CAR, a CD38 CAR, a CD138 CAR, and a BCMA CAR. In some embodiments, the CARs of the present disclosure may be a CAR useful in the treatment of acute myeloid leukemia such as a CD33 CAR, a CD123 CAR, and a CLL1 CAR. In some embodiments, the CARs of the present disclosure may be a CAR useful in the treatment of T cell leukemia such as a CD5 CAR, and a CD7 CAR. In some embodiments, the CARs of the present disclosure may be a CAR useful in the treatment of solid tumors such a mesothelin CAR, a GD2 CAR, a GPC3 CAR, a Her2 CAR, an EGFR CAR, a Muc1 CAR, an EpCAM CAR, a PD-L1 CAR, a CEA CAR, a Muc16 CAR, a CD133 CAR, a CD171 CAR, a CD70 CAR, a CLD18 CAR, a cMET CAR, a EphA2 CAR, a FAP CAR, a Folate Receptor CAR, an IL13Ra2 CAR, an MG7 CAR, a PSMA CAR, a ROR1 CAR, and a VEGFR2 CAR.

[0724] The present disclosure also provides methods of reducing tumor burden in a subject. In some embodiments. As used herein, “tumor burden” refers to the number of cancer cells, or the amount of cancer in a subject. In some aspects tumor burden also refers to tumor load. In some embodiments, the tumor may be disseminated throughout the body of the subject. In one aspect, the tumor may be a liquid tumor such as leukemia or a lymphoma. The methods of reducing tumor burden may involve administering to the subject, a therapeutically effective amount of the immune cells. Immune cells may be engineered to express the compositions described herein. In some embodiments, the immune cells expressing the compositions of the disclosure may be administered to the subject via any of the routes of delivery described herein. Also provided herein are dosing regimens for administering the immune cells. In some embodiments, the subject may also be administered a therapeutically effective amount of the stimulus to tune the expression of the immunotherapeutic agent. In some aspects, the immunotherapeutic agents may be capable of reducing the tumor burden. Regimens for ligand/stimulus dosing are also provided. Reduction in tumor burden may be measured by any of the methods known in the art including tumor imaging, and measurement of marker proteins. In some aspects, bioluminescent imaging may be used to measure tumor burden. Bioluminescence imaging utilizes native light emission from bioluminescent proteins such as luciferase. Such bioluminescent proteins can participate in chemical reactions that release photons by the addition of suitable substrates. The release of photons can be captured by sensitive detection methods and quantified. Tumor cells may be engineered to express luciferase and the efficacy of the compositions described herein to reduce tumor burden may quantified by imaging In some aspects, the tumor burden may be measured by the flux of photons (photons per sec). In some embodiments, photon flux positively correlates with tumor burden.

### Diseases and Toxins

[0725] Various infectious diseases may be treated with pharmaceutical compositions, biocircuits, biocircuit components, effector modules including their SREs or payloads of the present disclosure. As used herein, the term “infectious disease” refers to any disorders caused by organisms such as bacteria, viruses, fungi or parasites. As a non-limiting example, the infectious disease may be Acute bacterial rhinosinusitis, 14-day measles, Acne, Acrodermatitis chronica atrophicans (ACA)-(late skin manifestation of latent Lyme disease), Acute hemorrhagic conjunctivitis, Acute hemorrhagic cystitis, Acute rhinosinusitis, Adult T-cell Leukemia-Lymphoma (ATLL), African Sleeping Sickness, AIDS (Acquired Immunodeficiency Syndrome), Alveolar hydatid, Amebiasis, Amebic meningoencephalitis, Anaplasmosis, Anthrax, Arboviral or parainfectious, Ascariasis—(Roundworm infections), Aseptic meningitis, Athlete's foot (Tinea pedis), Australian tick typhus, Avian Influenza, Babesiosis, Bacillary angiomatosis, Bacterial meningitis, Bacterial vaginosis, Balanitis, Balantidiasis, Bang's disease, Barmah Forest virus infection, Bartonellosis (Verruga peruana; Carrion's disease; Oroya fever), Bat Lyssavirus Infection, Bay sore (Chiclero's ulcer), Baylisascaris infection (Racoon roundworm infection), Beaver fever, Beef tapeworm, Bejel (endemic syphilis), Biphasic meningoencephalitis, Black Bane, Black death, Black piedra, Blackwater Fever, Blastomycosis, Blennorrhea of the newborn, Blepharitis, Boils, Bornholm disease (pleurodynia), Borrelia miyamotoi Disease, Botulism, Boutonneuse fever, Brazilian purpuric fever, Break Bone fever, Brill, Bronchiolitis, Bronchitis, Brucellosis (Bang's disease), Bubonic plague, Bullous impetigo, Burkholderia mallei (Glanders), Burkholderia pseudomallei (Melioidosis), Buruli ulcers (also Mycoburuli ulcers), Busse, Busse-Buschke disease (Cryptococcosis), California group encephalitis, Campylobacteriosis, Candidiasis, Canefield fever (Canicola fever; 7-day fever; Weil's disease; leptospirosis; canefield fever), Canicola fever, Capillariasis, Carate, Carbapenem-resistant Enterobacteriaceae (CRE), Carbuncle, Carrion's disease, Cat Scratch fever, Cave disease, Central Asian hemorrhagic fever, Central European tick, Cervical cancer, Chagas disease, Chancroid (Soft chancre), Chicago disease, Chickenpox (Varicella), Chiclero's ulcer, Chikungunya fever, Chlamydial infection, Cholera, Chromoblastomycosis, Ciguatera, Clap, Clonorchiasis (Liver fluke infection), Clostridium Difficile Infection, Clostridium Perfringens (Epsilon Toxin), Coccidioidomycosis fungal infection (Valley fever; desert rheumatism), Coenurosis, Colorado tick fever, Condyloma accuminata, Condyloma accuminata(Warts), Condyloma lata, Congo fever, Congo hemorrhagic fever virus, Conjunctivitis, cowpox, Crabs, Crimean, Croup, Cryptococcosis, Cryptosporidiosis (Crypto), Cutaneous Larval Migrans, Cyclosporiasis, Cystic hydatid, Cysticercosis, Cystitis, Czechoslovak tick, D68 (EV-D68), Dacryocytitis, Dandy fever, Darling's Disease, Deer fly fever, Dengue fever (1, 2, 3 and 4), Desert rheumatism, Devil's grip, Diphasic milk fever, Diphtheria, Disseminated Intravascular Coagulation, Dog tapeworm, Donovanosis, Donovanosis (Granuloma inguinale), Dracontiasis, Dracunculosis, Duke's disease, Dum Dum Disease, Durand-Nicholas-Favre disease, Dwarf tapeworm, E. Coli infection (E. coli), Eastern equine encephalitis, Ebola Hemorrhagic Fever (Ebola virus disease EVD), Ectothrix, Ehrlichiosis (Sennetsu fever), Encephalitis, Endemic Relapsing fever, Endemic syphilis, Endophthalmitis, Endothrix, Enterobiasis (Pinworm infection), Enterotoxin-B Poisoning (Staph Food Poisoning), Enterovirus Infection, Epidemic Keratoconjunctivitis, Epidemic Relapsing fever, Epidemic typhus, Epiglottitis, Erysipelis, Erysipeloid (Erysipelothricosis), Erythema chronicum migrans, Erythema infectiosum, Erythema marginatum, Erythema multiforme, Erythema nodosum, Erythema nodosum leprosum, Erythrasma, Espundia, Eumycotic mycetoma, European blastomycosis, Exanthem subitum (Sixth disease), Eyeworm, Far Eastern tick, Fascioliasis, Fievre boutonneuse (Tick typhus), Fifth Disease (erythema infectiosum), Filatow-Dukes' Disease (Scalded Skin Syndrome; Ritter's Disease), Fish tapeworm, Fitz-Hugh-Curtis syndrome-Perihepatitis, Flinders Island Spotted Fever, Flu (Influenza), Folliculitis, Four Corners Disease, Four Corners Disease (Human Pulmonary Syndrome (HPS)), Frambesia, Francis disease, Furunculosis, Gas gangrene, Gastroenteritis, Genital Herpes, Genital Warts, German measles, Gerstmann-Straussler-Scheinker (GSS), Giardiasis, Gilchrist's disease, Gingivitis, Gingivostomatitis, Glanders, Glandular fever (infectious mononucleosis), Gnathostomiasis, Gonococcal Infection (Gonorrhea), Gonorrhea, Granuloma inguinale (Donovanosis), Guinea Worm, Haemophilus Influenza disease, Hamburger disease, Hansen's disease—leprosy, Hantaan disease, Hantaan-Korean hemorrhagic fever, Hantavirus Pulmonary Syndrome, Hantavirus Pulmonary Syndrome (HPS), Hard chancre, Hard measles, Haverhill fever—Rat bite fever, Head and Body Lice, Heartland fever, Helicobacterosis, Hemolytic Uremic Syndrome (HUS), Hepatitis A, Hepatitis B, Hepatitis C, Hepatitis D, Hepatitis E, Herpangina, Herpes—genital, Herpes labialis, Herpes—neonatal, Hidradenitis, Histoplasmosis, Histoplasmosis infection (Histoplasmosis), His-Werner disease, HIV infection, Hookworm infections, Hordeola, Hordeola (Stye), HTLV, HTLV-associated myelopathy (HAM), Human granulocytic ehrlichiosis, Human monocytic ehrlichiosis, Human Papillomavirus (HPV), Human Pulmonary Syndrome, Hydatid cyst, Hydrophobia, Impetigo, Including congenital (German Measles), Inclusion conjunctivitis, Inclusion conjunctivitis—Swimming Pool conjunctivitis—Pannus, Infantile diarrhea, Infectious Mononucleosis, Infectious myocarditis, Infectious pericarditis, Influenza, Isosporiasis, Israeli spotted fever, Japanese Encephalitis, Jock itch, Jorge Lobo disease—lobomycosis, Jungle yellow fever, Junin Argentinian hemorrhagic fever, Kala Azar, Kaposi's sarcoma, Keloidal blastomycosis, Keratoconjunctivitis, Kuru, Kyasanur forest disease, LaCrosse encephalitis, Lassa hemorrhagic fever, Legionellosis (Legionnaires Disease), Legionnaire's pneumonia, Lemierre's Syndrome (Postanginal septicemia), Lemming fever, Leprosy, Leptospirosis (Nanukayami fever; Weil's disease), Listeriosis (Listeria), Liver fluke infection, Lobo's mycosis, Lockjaw, Loiasis, Louping III, Ludwig's angina, Lung fluke infection, Lung fluke infection (Paragonimiasis), Lyme disease, Lymphogranuloma venereum infection (LGV), Machupo Bolivian hemorrhagic fever, Madura foot, Mal del pinto, Malaria, Malignant pustule, Malta fever, Marburg hemorrhagic fever, Masters disease, Maternal Sepsis (Puerperal fever), Measles, Mediterranean spotted fever, Melioidosis (Whitmore's disease), Meningitis, Meningococcal Disease, MERS, Milker's nodule, Molluscum contagiosum, Moniliasis, monkeypox, Mononucleosis, Mononucleosis-like syndrome, Montezuma's Revenge, Morbilli, MRSA (methicillin-resistant Staphylococcus aureus) infection, Mucormycosis—Zygomycosis, Multiple Organ Dysfunction Syndrome or MODS, Multiple-system atrophy (MSA), Mumps, Murine typhus, Murray Valley Encephalitis(MVE), Mycoburuli ulcers, Mycoburuli ulcers—Buruli ulcers, Mycotic vulvovaginitis, Myositis, Nanukayami fever, Necrotizing fasciitis, Necrotizing fasciitis—Type 1, Necrotizing fasciitis—Type 2, Negishi, New world spotted fever, Nocardiosis, Nongonococcal urethritis, Non-Polio (Non-Polio Enterovirus), Norovirus infection, North American blastomycosis, North Asian tick typhus, Norwalk virus infection, Norwegian itch, O'Hara disease, Omsk hemorrhagic fever, Onchoceriasis, Onychomycosis, Opisthorchiasis, Opthalmia neonatorium, Oral hairy leukoplakia, Orf, Oriental Sore, Oriental Spotted Fever, Ornithosis (Parrot fever; Psittacosis), Oroya fever, Otitis externa, Otitis media, Pannus, Paracoccidioidomycosis, Paragonimiasis, Paralytic Shellfish Poisoning (Paralytic Shellfish Poisoning), Paronychia (Whitlow), Parotitis, PCP pneumonia, Pediculosis, Peliosis hepatica, Pelvic Inflammatory Disease, Pertussis (also called Whooping cough), Phaeohyphomycosis, Pharyngoconjunctival fever, Piedra (White Piedra), Piedra(Black Piedra), Pigbel, Pink eye conjunctivitis, Pinta, Pinworm infection, Pitted Keratolysis, Pityriasis versicolor (Tinea versicolor), Plague; Bubonic, Pleurodynia, Pneumococcal Disease, Pneumocystosis, Pneumonia, Pneumonic (Plague), Polio or Poliomyelitis, Polycystic hydatid, Pontiac fever, Pork tapeworm, Posada-Wernicke disease, Postanginal septicemia, Powassan, Progressive multifocal leukoencephalopathy, Progressive Rubella Panencephalitis, Prostatitis, Pseudomembranous colitis, Psittacosis, Puerperal fever, Pustular Rash diseases (Small pox), Pyelonephritis, Pylephlebitis, Q-Fever, Quinsy, Quintana fever (5-day fever), Rabbit fever, Rabies, Racoon roundworm infection, Rat bite fever, Rat tapeworm, Reiter Syndrome, Relapsing fever, Respiratory syncytial virus (RSV) infection, Rheumatic fever, Rhodotorulosis, Ricin Poisoning, Rickettsialpox, Rickettsiosis, Rift Valley Fever, Ringworm, Ritter's Disease, River Blindness, Rocky Mountain spotted fever, Rose Handler's disease (Sporotrichosis), Rose rash of infants, Roseola, Ross River fever, Rotavirus infection, Roundworm infections, Rubella, Rubeola, Russian spring, Salmonellosis gastroenteritis, San Joaquin Valley fever, Sao Paulo Encephalitis, Sao Paulo fever, SARS, Scabies Infestation (Scabies) (Norwegian itch), Scalded Skin Syndrome, Scarlet fever (Scarlatina), Schistosomiasis, Scombroid, Scrub typhus, Sennetsu fever, Sepsis (Septic shock), Severe Acute Respiratory Syndrome, Severe Acute Respiratory Syndrome (SARS), Shiga Toxigenic Escherichia coli (STEC/VTEC), Shigellosis gastroenteritis (Shigella), Shinbone fever, Shingles, Shipping fever, Siberian tick typhus, Sinusitis, Sixth disease, Slapped cheek disease, Sleeping sickness, Smallpox (Variola), Snail Fever, Soft chancre, Southern tick associated rash illness, Sparganosis, Spelunker's disease, Sporadic typhus, Sporotrichosis, Spotted fever, Spring, St. Louis encephalitis, Staphylococcal Food Poisoning, Staphylococcal Infection, Strep. throat, Streptococcal Disease, Streptococcal Toxic-Shock Syndrome, Strongyloiciasis, Stye, Subacute Sclerosing Panencephalitis, Subacute Sclerosing Panencephalitis (SSPE), Sudden Acute Respiratory Syndrome, Sudden Rash, Swimmer's ear, Swimmer's Itch, Swimming Pool conjunctivitis, Sylvatic yellow fever, Syphilis, Systemic Inflammatory Response Syndrome (SIRS), Tabes dorsalis (tertiary syphilis), Taeniasis, Taiga encephalitis, Tanner's disease, Tapeworm infections, Temporal lobe encephalitis, Temporal lobe encephalitis, tetani (Lock Jaw), Tetanus Infection, Threadworm infections, Thrush, Tick, Tick typhus, Tinea barbae, Tinea capitis, Tinea corporis, Tinea cruris, Tinea manuum, Tinea nigra, Tinea pedis, Tinea unguium, Tinea versicolor, Torulopsosis, Torulosis, Toxic Shock Syndrome, Toxoplasmosis, transmissible spongioform (CJD), Traveler's diarrhea, Trench fever 5, Trichinellosis, Trichomoniasis, Trichomycosis axillaris, Trichuriasis, Tropical Spastic Paraparesis (TSP), Trypanosomiasis, Tuberculosis (TB), Tuberculosis, Tularemia, Typhoid Fever, Typhus fever, Ulcus molle, Undulant fever, Urban yellow fever, Urethritis, Vaginitis, Vaginosis, Vancomycin Intermediate (VISA), Vancomycin Resistant (VRSA), Varicella, Venezuelan Equine encephalitis, Verruga peruana, Vibrio cholerae (Cholera), Vibriosis (Vibrio), Vincent's disease or Trench mouth, Viral conjunctivitis, Viral Meningitis, Viral meningoencephalitis, Viral rash, Visceral Larval Migrans, Vomito negro, Vulvovaginitis, Warts, Waterhouse, Weil's disease, West Nile Fever, Western equine encephalitis, Whipple's disease, Whipworm infection, White Piedra, Whitlow, Whitmore's disease, Winter diarrhea, Wolhynia fever, Wool sorters' disease, Yaws, Yellow Fever, Yersinosis, Yersinosis (Yersinia), Zahorsky's disease, Zika virus disease, Zoster, Zygomycosis, John Cunningham Virus (JCV), Human immunodeficiency virus (HIV), Influenza virus, Hepatitis B, Hepatitis C, Hepatitis D, Respiratory syncytial virus (RSV), Herpes simplex virus 1 and 2, Human Cytomegalovirus, Epstein-Barr virus, Varicella zoster virus, Coronaviruses, Poxviruses, Enterovirus 71, Rubella virus, Human papilloma virus, Streptococcus pneumoniae, Streptococcus viridans, Staphylococcus aureus (S. aureus), Methicillin-resistant Staphylococcus aureus (MRSA), Vancomycin-intermediate Staphylococcus aureus (VISA), Vancomycin-resistant Staphylococcus aureus (VRSA), Staphylococcus epidermidis (S. epidermidis), Clostridium Tetani, Bordetella pertussis, Bordetella paratussis, Mycobacterium, Francisella tularensis, Toxoplasma gondii, Candida (C. albicans, C. glabrata, C. parapsilosis, C. tropicalis, C. krusei and C. lusitaniae) and/or any other infectious diseases, disorders or syndromes.

[0726] Various toxins may be treated with pharmaceutical compositions, biocircuits, biocircuit components, effector modules including their SREs or payloads of the present disclosure. Non-limited examples of toxins include Ricin, Bacillus anthracis, Shiga toxin and Shiga-like toxin, Botulinum toxins.

[0727] Various tropical diseases may be treated with pharmaceutical compositions, biocircuits, biocircuit components, effector modules including their SREs or payloads of the present disclosure. Non-limited examples of tropical diseases include Chikungunya fever, Dengue fever, Chagas disease, Rabies, Malaria, Ebola virus, Marburg virus, West Nile Virus, Yellow Fever, Japanese encephalitis virus, St. Louis encephalitis virus.

[0728] Various foodborne illnesses and gastroenteritis may be treated with pharmaceutical compositions, biocircuits, biocircuit components, effector modules including their SREs or payloads of the present disclosure. Non-limited examples of foodborne illnesses and gastroenteritis include Rotavirus, Norwalk virus (Norovirus), Campylobacter jejuni, Clostridium difficile, Entamoeba histolytica, Helicobacter pylori, Enterotoxin B of Staphylococcus aureus, Hepatitis A virus (HAV), Hepatitis E, Listeria monocytogenes, Salmonella, Clostridium perfringens, and Salmonella.

[0729] Various infectious agents may be treated with pharmaceutical compositions, biocircuits, biocircuit components, effector modules including their SREs or payloads of the present disclosure. Non-limited examples of infectious agents include adenoviruses, Anaplasma phagocytophilium, Ascaris lumbricoides, Bacillus anthracis, Bacillus cereus, Bacteroides sp, Barmah Forest virus, Bartonella bacilliformis, Bartonella henselae, Bartonella quintana, beta-toxin of Clostridium perfringens, Bordetella pertussis, Bordetella parapertussis, Borrelia burgdorferi, Borrelia miyamotoi, Borrelia recurrentis, Borrelia sp., Botulinum toxin, Brucella sp., Burkholderia pseudomallei, California encephalitis virus, Campylobacter, Candida albicans, chikungunya virus, Chlamydia psittaci, Chlamydia trachomatis, Clonorchis sinensis, Clostridium difficile bacteria, Clostridium tetani, Colorado tick fever virus, Corynebacterium diphtheriae, Corynebacterium minutissimum, Coxiella burnetii, coxsackie A, coxsackie B, Crimean-Congo hemorrhagic fever virus, cytomegalovirus, dengue virus, Eastern Equine encephalitis virus, Ebola viruses, echovirus, Ehrlichia chaffeensis, Ehrlichia equi, Ehrlichia sp., Entamoeba histolytica, Enterobacter sp., Enterococcus faecalis, Enterovirus 71, Epstein-Barr virus (EBV), Erysipelothrix rhusiopathiae, Escherichia coli, Flavivirus, Fusobacterium necrophorum, Gardnerella vaginalis, Group B streptococcus, Haemophilus aegyptius, Haemophilus ducreyi, Haemophilus influenzae, hantavirus, Helicobacter pylori, Hepatitis A, Hepatitis B, Hepatitis C, Hepatitis D, Hepatitis E, herpes simplex virus 1 and 2-human herpes virus 6, human herpes Virus 8, human immunodeficiency virus 1 and 2, human T-cell leukemia viruses I and II, influenza viruses (A, B, C), Jamestown Canyon virus, Japanese encephalitis antigenic, Japanese encephalitis virus, John Cunninham virus, juninvirus, Kaposi's Sarcoma-associated Herpes Virus (KSHV), Klebsiella granulomatis, Klebsiella sp., Kyasanur Forest Disease virus, La Crosse virus, Lassavirus, Legionella pneumophila, Leptospira interrogans, Listeria monocytogenes, lymphocytic choriomeningitis virus, lyssavirus, Machupovirus, Marburg virus, measles virus, MERS coronavirus (MERS-CoV), Micrococcus sedentarius, Mobiluncus sp., Molluscipoxvirus, Moraxella catarrhalis, Morbilli—Rubeola virus, Mumps virus, Mycobacterium leprae, Mycobacterium tuberculosis, Mycobacterium ulcerans, Mycoplasma genitalium, Mycoplasma sp, Nairovirus, Neisseria gonorrhoeae, Neisseria meningitidis, Nocardia, Norwalk virus, norovirus, Omsk hemorrhagic fever virus, papilloma virus, parainfluenza viruses 1-3, parapoxvirus, parvovirus B19, Peptostreptococccus sp., Plasmodium sp., polioviruses types I, II, and III, Proteus sp., Pseudomonas aeruginosa, Pseudomonas pseudomallei, Pseudomonas sp., rabies virus, respiratory syncytial virus, ricin toxin, Rickettsia australis, Rickettsia conori, Rickettsia honei, Rickettsia prowazekii, Ross River Virus, rotavirus, rubellavirus, Saint Louis encephalitis, Salmonella typhi, Sarcoptes scabiei, SARS-associated coronavirus (SARS-CoV), Serratia sp., Shiga toxin and Shiga-like toxin, Shigella sp., Sin Nombre Virus, Snowshoe hare virus, Staphylococcus aureus, Staphylococcus epidermidis, Streptobacillus moniliformis, Streptococcus pneumoniae, Streptococcus agalactiae, Streptococcus agalactiae, Streptococcus group A-H, Streptococcus pneumoniae, Streptococcus pyogenes, Treponema pallidum subsp. Pallidum, Treponema pallidum var. carateum, Treponema pallidum var. endemicum, Tropheryma whippelii, Ureaplasma urealyticum, Varicella-Zoster virus, variola virus, Vibrio cholerae, West Nile virus, yellow fever virus, Yersinia enterocolitica, Yersinia pestis, and Zika virus.

[0730] Various rare diseases may be treated with pharmaceutical compositions, biocircuits, biocircuit components, effector modules including their SREs or payloads of the present disclosure. As used herein, the term “rare disease” refers to any disease that affects a small percentage of the population. As a non-limiting example, the rare disease may be Acrocephalosyndactylia, Acrodermatitis, Addison Disease, Adie Syndrome, Alagille Syndrome, Amylose, Amyotrophic Lateral Sclerosis, Angelman Syndrome, Angiolymphoid Hyperplasia with Eosinophilia, Arnold-Chiari Malformation, Arthritis, Juvenile Rheumatoid, Asperger Syndrome, Bardet-Biedl Syndrome, Barrett Esophagus, Beckwith-Wiedemann Syndrome, Behcet Syndrome, Bloom Syndrome, Bowen's Disease, Brachial Plexus Neuropathies, Brown-Sequard Syndrome, Budd-Chiari Syndrome, Burkitt Lymphoma, Carcinoma 256, Walker, Caroli Disease, Charcot-Marie-Tooth Disease, Chediak-Higashi Syndrome, Chiari-Frommel Syndrome, Chondrodysplasia Punctata, Colonic Pseudo-Obstruction, Colorectal Neoplasms, Hereditary Nonpolyposis, Craniofacial Dysostosis, Creutzfeldt-Jakob Syndrome, Crohn Disease, Cushing Syndrome, Cystic Fibrosis, Dandy-Walker Syndrome, De Lange Syndrome, Dementia, Vascular, Dermatitis Herpetiformis, DiGeorge Syndrome, Diffuse Cerebral Sclerosis of Schilder, Duane Retraction Syndrome, Dupuytren Contracture, Ebstein Anomaly, Eisenmenger Complex, Ellis-Van Creveld Syndrome, Encephalitis, Enchondromatosis, Epidermal Necrolysis, Toxic, Facial Hemiatrophy, Factor XII Deficiency, Fanconi Anemia, Felty's Syndrome, Fibrous Dysplasia, Polyostotic, Fox-Fordyce Disease, Friedreich Ataxia, Fusobacterium, Gardner Syndrome, Gaucher Disease, Gerstmann Syndrome, Giant Lymph Node Hyperplasia, Glycogen Storage Disease Type I, Glycogen Storage Disease Type II, Glycogen Storage Disease Type IV, Glycogen Storage Disease Type V, Glycogen Storage Disease Type VII, Goldenhar Syndrome, Guillain-Barre Syndrome, Hallermann's Syndrome, Hamartoma Syndrome, Multiple, Hartnup Disease, Hepatolenticular Degeneration, Hepatolenticular Degeneration, Hereditary Sensory and Motor Neuropathy, Hirschsprung Disease, Histiocytic Necrotizing Lymphadenitis, Histiocytosis, Langerhans-Cell, Hodgkin Disease, Horner Syndrome, Huntington Disease, Hyperaldosteronism, Hyperhidrosis, Hyperostosis, Diffuse Idiopathic Skeletal, Hypopituitarism, Inappropriate ADH Syndrome, Intestinal Polyps, Isaacs Syndrome, Kartagener Syndrome, Kearns-Sayre Syndrome, Klippel-Feil Syndrome, Klippel-Trenaunay-Weber Syndrome, Kluver-Bucy Syndrome, Korsakoff Syndrome, Lafora Disease, Lambert-Eaton Myasthenic Syndrome, Landau-Kleffner Syndrome, Langer-Giedion Syndrome, Leigh Disease, Lesch-Nyhan Syndrome, Leukodystrophy, Globoid Cell, Li-Fraumeni Syndrome, Long QT Syndrome, Machado-Joseph Disease, Mallory-Weiss Syndrome, Marek Disease, Marfan Syndrome, Meckel Diverticulum, Meige Syndrome, Melkersson-Rosenthal Syndrome, Meniere Disease, Mikulicz's Disease, Miller Fisher Syndrome, Mobius Syndrome, Moyamoya Disease, Mucocutaneous Lymph Node Syndrome, Mucopolysaccharidosis I, Mucopolysaccharidosis II, Mucopolysaccharidosis III, Mucopolysaccharidosis IV, Mucopolysaccharidosis VI, Multiple Endocrine Neoplasia Type 1, Munchausen Syndrome by Proxy, Muscular Atrophy, Spinal, Narcolepsy, Neuroaxonal Dystrophies, Neuromyelitis Optica, Neuronal Ceroid-Lipofuscinoses, Niemann-Pick Diseases, Noonan Syndrome, Optic Atrophies, Hereditary, Osteitis Deformans, Osteochondritis, Osteochondrodysplasias, Osteolysis, Essential, Paget Disease Extramammary, Paget's Disease, Mammary, Panniculitis, Nodular Nonsuppurative, Papillon-Lefevre Disease, Paralysis, Pelizaeus-Merzbacher Disease, Pemphigus, Benign Familial, Penile Induration, Pericarditis, Constrictive, Peroxisomal Disorders, Peutz-Jeghers Syndrome, Pick Disease of the Brain, Pierre Robin Syndrome, Pigmentation Disorders, Pityriasis Lichenoides, Polycystic Ovary Syndrome, Polyendocrinopathies, Autoimmune, Prader-Willi Syndrome, Pupil Disorders, Rett Syndrome, Reye Syndrome, Rubinstein-Taybi Syndrome, Sandhoff Disease, Sarcoma, Ewing's, Schnitzler Syndrome, Sjogren's Syndrome, Sjogren-Larsson Syndrome, Smith-Lemli-Opitz Syndrome, Spinal Muscular Atrophies of Childhood, Sturge-Weber Syndrome, Sweating, Gustatory, Takayasu Arteritis, Tangier Disease, Tay-Sachs Disease, Thromboangiitis Obliterans, Thyroiditis, Autoimmune, Tietze's Syndrome, Togaviridae Infections, Tolosa-Hunt Syndrome, Tourette Syndrome, Uveomeningoencephalitic Syndrome, Waardenburg's Syndrome, Wegener Granulomatosis, Weil Disease, Werner Syndrome, Williams Syndrome, Wilms Tumor, Wolff-Parkinson-White Syndrome, Wolfram Syndrome, Wolman Disease, Zellweger Syndrome, Zollinger-Ellison Syndrome, and von Willebrand Diseases.

[0731] Various autoimmune diseases and autoimmune-related diseases may be treated with pharmaceutical compositions, biocircuits, biocircuit components, effector modules including their SREs or payloads of the present disclosure. As used herein, the term “autoimmune disease” refers to a disease in which the body produces antibodies that attack its own tissues. As a non-limiting example, the autoimmune disease may be Acute Disseminated Encephalomyelitis (ADEM), Acute necrotizing hemorrhagic leukoencephalitis, Addison's disease, Agammaglobulinemia, Alopecia areata, Amyloidosis, Ankylosing spondylitis, Anti-GBM/Anti-TBM nephritis, Antiphospholipid syndrome (APS), Autoimmune angioedema, Autoimmune aplastic anemia, Autoimmune dysautonomia, Autoimmune hepatitis, Autoimmune hyperlipidemia, Autoimmune immunodeficiency, Autoimmune inner ear disease (AIED), Autoimmune myocarditis, Autoimmune oophoritis, Autoimmune pancreatitis, Autoimmune retinopathy, Autoimmune thrombocytopenic purpura (ATP), Autoimmune thyroid disease, Autoimmune urticaria, Axonal & neuronal neuropathies, Balo disease, Behcet's disease, Bullous pemphigoid, Cardiomyopathy, Castleman disease, Celiac disease, Chagas disease, Chronic fatigue syndrome, Chronic inflammatory demyelinating polyneuropathy (CIDP), Chronic recurrent multifocal ostomyelitis (CRMO), Churg-Strauss syndrome, Cicatricial pemphigoid/benign mucosal pemphigoid, Crohn's disease, Cogans syndrome, Cold agglutinin disease, Congenital heart block, Coxsackie myocarditis, CREST disease, Essential mixed cryoglobulinemia, Demyelinating neuropathies, Dermatitis herpetiformis, Dermatomyositis, Devic's disease (neuromyelitis optica), Discoid lupus, Dressler's syndrome, Endometriosis, Eosinophilic esophagitis, Eosinophilic fasciitis, Erythema nodosum, Experimental allergic encephalomyelitis, Evans syndrome, Fibromyalgia**, Fibrosing alveolitis, Giant cell arteritis (temporal arteritis), Giant cell myocarditis, Glomerulonephritis, Goodpasture's syndrome, Granulomatosis with Polyangiitis (GPA) (formerly called Wegener's Granulomatosis), Graves' disease, Guillain-Barre syndrome, Hashimoto's encephalitis, Hashimoto's thyroiditis, Hemolytic anemia, Henoch-Schonlein purpura, Herpes gestationis, Hypogammaglobulinemia, Idiopathic thrombocytopenic purpura (ITP), IgA nephropathy, IgG4-related sclerosing disease, Immunoregulatory lipoproteins, Inclusion body myositis, Interstitial cystitis, Juvenile arthritis, Juvenile diabetes (Type 1 diabetes), Juvenile myositis, Kawasaki syndrome, Lambert-Eaton syndrome, Leukocytoclastic vasculitis, Lichen planus, Lichen sclerosis, Ligneous conjunctivitis, Linear IgA disease (LAD), Lupus (SLE), Lyme disease, chronic, Meniere's disease, Microscopic polyangiitis, Mixed connective tissue disease (MCTD), Mooren's ulcer, Mucha-Habermann disease, Multiple sclerosis, Myasthenia gravis, Myositis, Narcolepsy, Neuromyelitis optica (Devic's), Neutropenia, Ocular cicatricial pemphigoid, Optic neuritis, Palindromic rheumatism, PANDAS (Pediatric Autoimmune Neuropsychiatric Disorders Associated with Streptococcus), Paraneoplastic cerebellar degeneration, Paroxysmal nocturnal hemoglobinuria (PNH), Parry Romberg syndrome, Parsonnage-Turner syndrome, Pars planitis (peripheral uveitis), Pemphigus, Peripheral neuropathy, Perivenous encephalomyelitis, Pernicious anemia, POEMS syndrome, Polyarteritis nodosa, Type I, II, & III autoimmune polyglandular syndromes, Polymyalgia rheumatica, Polymyositis, Postmyocardial infarction syndrome, Postpericardiotomy syndrome, Progesterone dermatitis, Primary biliary cirrhosis, Primary sclerosing cholangitis, Psoriasis, Psoriatic arthritis, Idiopathic pulmonary fibrosis, Pyoderma gangrenosum, Pure red cell aplasia, Raynauds phenomenon, Reactive Arthritis, Reflex sympathetic dystrophy, Reiter's syndrome, Relapsing polychondritis, Restless legs syndrome, Retroperitoneal fibrosis, Rheumatic fever, Rheumatoid arthritis, Sarcoidosis, Schmidt syndrome, Scleritis, Scleroderma, Sjogren's syndrome, Sperm & testicular autoimmunity, Stiff person syndrome, Subacute bacterial endocarditis (SBE), Susac's syndrome, Sympathetic ophthalmia, Takayasu's arteritis, Temporal arteritis/Giant cell arteritis, Thrombocytopenic purpura (TTP), Tolosa-Hunt syndrome, Transverse myelitis, Ulcerative colitis, Undifferentiated connective tissue disease (UCTD), Uveitis, Vasculitis, Vesiculobullous dermatosis, Vitiligo, and Wegener's granulomatosis (now termed Granulomatosis with Polyangiitis (GPA).

[0732] Various kidney diseases may be treated with pharmaceutical compositions, biocircuits, biocircuit components, effector modules including their SREs or payloads of the present disclosure. As a non-limiting example, the kidney disease Abderhalden-Kaufmann-Lignac syndrome (Nephropathic Cystinosis), Abdominal Compartment Syndrome, Acute Kidney Failure/Acute Kidney Injury, Acute Lobar Nephronia, Acute Phosphate Nephropathy, Acute Tubular Necrosis, Adenine Phosphoribosyltransferase Deficiency, Adenovirus Nephritis, Alport Syndrome, Amyloidosis, ANCA Vasculitis Related to Endocarditis and Other Infections, Angiomyolipoma, Analgesic Nephropathy, Anorexia Nervosa and Kidney Disease, Angiotensin Antibodies and Focal Segmental Glomerulosclerosis, Antiphospholipid Syndrome, Anti-TNF-α Therapy-related Glomerulonephritis, APOL1 Mutations, Apparent Mineralocorticoid Excess Syndrome, Aristolochic Acid Nephropathy, Chinese Herbal Nephropathy, Balkan Endemic Nephropathy, Bartter Syndrome, Beeturia, βThalassemia Renal Disease, Bile Cast Nephropathy, BK Polyoma Virus Nephropathy in the Native Kidney, Bladder Rupture, Bladder Sphincter Dyssynergia, Bladder Tamponade, Border-Crossers' Nephropathy, Bourbon Virus and Acute Kidney Injury, Burnt Sugarcane Harvesting and Acute Renal Dysfunction, Byetta and Renal Failure, C1q Nephropathy, Cannabinoid Hyperemesis Acute Renal Failure, Cardiorenal syndrome, Carfilzomib-Indiced Renal Injury, CFHR5 nephropathy, Charcot-Marie-Tooth Disease with Glomerulopathy, Cherry Concentrate and Acute Kidney Injury, Cholesterol Emboli, Churg-Strauss syndrome, Chyluria, Colistin Nephrotoxicity, Collagenofibrotic Glomerulopathy, Collapsing Glomerulopathy, Collapsing Glomerulopathy Related to CMV, Congenital Nephrotic Syndrome, Conorenal syndrome (Mainzer-Saldino Syndrome or Saldino-Mainzer Disease), Contrast Nephropathy, Copper Sulfate Intoxication, Cortical Necrosis, Crizotinib-related Acute Kidney Injury, Cryoglobuinemia, Crystalglobulin-Induced Nephropathy, Crystal-Induced Acute Kidney injury, Cystic Kidney Disease, Acquired, Cystinuria, Dasatinib-Induced Nephrotic-Range Proteinuria, Dense Deposit Disease (MPGN Type 2), Dent Disease (X-linked Recessive Nephrolithiasis), Dialysis Disequilibrium Syndrome, Diabetes and Diabetic Kidney Disease, Diabetes Insipidus, Dietary Supplements and Renal Failure, Drugs of Abuse and Kidney Disease, Duplicated Ureter, EAST syndrome, Ebola and the Kidney, Ectopic Kidney, Ectopic Ureter, Edema, Swelling, Erdheim-Chester Disease, Fabry's Disease, Familial Hypocalciuric Hypercalcemia, Fanconi Syndrome, Fraser syndrome, Fibronectin Glomerulopathy, Fibrillary Glomerulonephritis and Immunotactoid Glomerulopathy, Fraley syndrome, Focal Segmental Glomerulosclerosis, Focal Sclerosis, Focal Glomerulosclerosis, Galloway Mowat syndrome, Giant Cell (Temporal) Arteritis with Kidney Involvement, Gestational Hypertension, Gitelman Syndrome, Glomerular Diseases, Glomerular Tubular Reflux, Glycosuria, Goodpasture Syndrome, Hair Dye Ingestion and Acute Kidney Injury, Hantavirus Infection Podocytopathy, Hematuria (Blood in Urine), Hemolytic Uremic Syndrome (HUS), Atypical Hemolytic Uremic Syndrome (aHUS), Hemophagocytic Syndrome, Hemorrhagic Cystitis, Hemorrhagic Fever with Renal Syndrome (HFRS, Hantavirus Renal Disease, Korean Hemorrhagic Fever, Epidemic Hemorrhagic Fever, Nephropathis Epidemica), Hemosiderosis related to Paroxysmal Nocturnal Hemoglobinuria and Hemolytic Anemia, Hepatic Glomerulopathy, Hepatic Veno-Occlusive Disease, Sinusoidal Obstruction Syndrome, Hepatitis C-Associated Renal Disease, Hepatorenal Syndrome, Herbal Supplements and Kidney Disease, High Blood Pressure and Kidney Disease, HIV-Associated Nephropathy (HIVAN), Horseshoe Kidney (Renal Fusion), Hunner's Ulcer, Hyperaldosteronism, Hypercalcemia, Hyperkalemia, Hypermagnesemia, Hypernatremia, Hyperoxaluria, Hyperphosphatemia, Hypocalcemia, Hypokalemia, Hypokalemia-induced renal dysfunction, Hypokalemic Periodic Paralysis, Hypomagnesemia, Hyponatremia, Hypophosphatemia, IgA Nephropathy, IgG4 Nephropathy, Interstitial Cystitis, Painful Bladder Syndrome (Questionnaire), Interstitial Nephritis, Ivemark's syndrome, Ketamine-Associated Bladder Dysfunction, Kidney Stones, Nephrolithiasis, Kombucha Tea Toxicity, Lead Nephropathy and Lead-Related Nephrotoxicity, Leptospirosis Renal Disease, Light Chain Deposition Disease, Monoclonal Immunoglobulin Deposition Disease, Liddle Syndrome, Lightwood-Albright Syndrome, Lipoprotein Glomerulopathy, Lithium Nephrotoxicity, LMX1B Mutations Cause Hereditary FSGS, Loin Pain Hematuria, Lupus, Systemic Lupus Erythematosis, Lupus Kidney Disease, Lupus Nephritis, Lupus Nephritis with Antineutrophil Cytoplasmic Antibody Seropositivity, Lyme Disease-Associated Glomerulonephritis, Malarial Nephropathy, Malignancy-Associated Renal Disease, Malignant Hypertension, Malakoplakia, Meatal Stenosis, Medullary Cystic Kidney Disease, Medullary Sponge Kidney, Megaureter, Melamine Toxicity and the Kidney, Membranoproliferative Glomerulonephritis, Membranous Nephropathy, MesoAmerican Nephropathy, Metabolic Acidosis, Metabolic Alkalosis, Methotrexate-related Renal Failure, Microscopic Polyangiitis, Milk-alkalai syndrome, Minimal Change Disease, MDMA (Molly; Ecstacy; 3,4-Methylenedioxymethamphetamine) and Kidney Failure, Multicystic dysplastic kidney, Multiple Myeloma, Myeloproliferative Neoplasms and Glomerulopathy, Nail-patella Syndrome, Nephrocalcinosis, Nephrogenic Systemic Fibrosis, Nephroptosis (Floating Kidney, Renal Ptosis), Nephrotic Syndrome, Neurogenic Bladder, Nodular Glomerulosclerosis, Non-Gonococcal Urethritis, Nutcracker syndrome, Orofaciodigital Syndrome, Orotic Aciduria, Orthostatic Hypotension, Orthostatic Proteinuria, Osmotic Diuresis, Ovarian Hyperstimulation Syndrome, Page Kidney, Papillary Necrosis, Papillorenal Syndrome (Renal-Coloboma Syndrome, Isolated Renal Hypoplasia), Parvovirus B19 and the Kidney, The Peritoneal-Renal Syndrome, Posterior Urethral Valve, Post-infectious Glomerulonephritis, Post-streptococcal Glomerulonephritis, Polyarteritis Nodosa, Polycystic Kidney Disease, Posterior Urethral Valves, Preeclampsia, Propofol infusion syndrome, Proliferative Glomerulonephritis with Monoclonal IgG Deposits (Nasr Disease), Propolis (Honeybee Resin) Related Renal Failure, Proteinuria (Protein in Urine), Pseudohyperaldosteronism, Pseudohypobicarbonatemia, Pseudohypoparathyroidism, Pulmonary-Renal Syndrome, Pyelonephritis (Kidney Infection), Pyonephrosis, Radiation Nephropathy, Ranolazine and the Kidney, Refeeding syndrome, Reflux Nephropathy, Rapidly Progressive Glomerulonephritis, Renal Abscess, Perinephric Abscess, Renal Agenesis, Renal Arcuate Vein Microthrombi-Associated Acute Kidney Injury, Renal Artery Aneurysm, Renal Artery Stenosis, Renal Cell Cancer, Renal Cyst, Renal Hypouricemia with Exercise-induced Acute Renal Failure, Renal Infarction, Renal Osteodystrophy, Renal Tubular Acidosis, Renin Secreting Tumors (Juxtaglomerular Cell Tumor), Reset Osmostat, Retrocaval Ureter, Retroperitoneal Fibrosis, Rhabdomyolysis, Rhabdomyolysis related to Bariatric Surgery, Rheumatoid Arthritis-Associated Renal Disease, Sarcoidosis Renal Disease, Salt Wasting, Renal and Cerebral, Schistosomiasis and Glomerular Disease, Schimke immuno-osseous dysplasia, Scleroderma Renal Crisis, Serpentine Fibula-Polycystic Kidney Syndrome, Exner Syndrome, Sickle Cell Nephropathy, Silica Exposure and Chronic Kidney Disease, Sri Lankan Farmers' Kidney Disease, Sjögren's Syndrome and Renal Disease, Synthetic Cannabinoid Use and Acute Kidney Injury, Kidney Disease Following Hematopoietic Cell Transplantation, Kidney Disease Related to Stem Cell Transplantation, Thin Basement Membrane Disease, Benign Familial Hematuria, Trigonitis, Tuberculosis, Genitourinary, Tuberous Sclerosis, Tubular Dysgenesis, Immune Complex Tubulointerstitial Nephritis Due to Autoantibodies to the Proximal Tubule Brush Border, Tumor Lysis Syndrome, Uremia, Uremic Optic Neuropathy, Ureteritis Cystica, Ureterocele, Urethral Caruncle, Urethral Stricture, Urinary Incontinence, Urinary Tract Infection, Urinary Tract Obstruction, Vesicointestinal Fistula, Vesicoureteral Reflux, Volatile Anesthetics and Acute Kidney Injury, Von Hippel-Lindau Disease, Waldenstrom's Macroglobulinemic Glomerulonephritis, Warfarin-Related Nephropathy, Wasp Stings and Acute Kidney Injury, Wegener's Granulomatosis, Granulomatosis with Polyangiitis, West Nile Virus and Chronic Kidney Disease, and Wunderlich syndrome.

[0733] Various cardiovascular diseases may be treated with pharmaceutical compositions, biocircuits, biocircuit components, effector modules including their SREs or payloads of the present disclosure. As a non-limiting example, the cardiovascular disease may be Ischemic heart disease also known as coronary artery disease, Cerebrovascular disease (Stroke), Peripheral vascular disease, Heart failure, Rheumatic heart disease, and Congenital heart disease.

[0734] Various antibody deficiencies may be treated with pharmaceutical compositions, biocircuits, biocircuit components, effector modules including their SREs or payloads of the present disclosure. As a non-limiting example, the antibody deficiencies may be X-Linked Agammaglobulinemia (XLA), Autosomal Recessive Agammaglobulinemia (ARA), Common Variable Immune Deficiency (CVID), IgG (IgG1, IgG2, IgG3 and IgG4) Subclass Deficiency, Selective IgA Deficiency, Specific Antibody Deficiency (SAD), Transient Hypogammaglobulinemia of Infancy, Antibody Deficiency with Normal or Elevated Immunoglobulins, Selective IgM Deficiency, Immunodeficiency with Thymoma (Good's Syndrome), Transcobalamin II Deficiency, Warts, Hypogammaglobulinemia, Infection, Myelokathexis (WHIM) Syndrome, Drug-Induced Antibody Deficiency, Kappa Chain Deficiency, Heavy Chain Deficiencies, Post-Meiotic Segregation (PMS2) Disorder, and Unspecified Hypogammaglobulinemia.

[0735] Various ocular diseases may be treated with pharmaceutical compositions, biocircuits, biocircuit components, effector modules including their SREs or payloads of the present disclosure. As a non-limiting example, the ocular disease may be thyroid eye disease (TED), Graves' disease (GD) and orbitopathy, Retina Degeneration, Cataract, optic atrophy, macular degeneration, Leber congenital amaurosis, retinal degeneration, cone-rod dystrophy, Usher syndrome, leopard syndrome, photophobia, and photoaversion.

[0736] Various neurological diseases may be treated with pharmaceutical compositions, biocircuits, biocircuit components, effector modules including their SREs or payloads of the present disclosure. As a non-limiting example, the neurological disease may be Absence of the Septum Pellucidum, Acid Lipase Disease, Acid Maltase Deficiency, Acquired Epileptiform Aphasia, Acute Disseminated Encephalomyelitis, Attention Deficit-Hyperactivity Disorder (ADHD), Adie's Pupil, Adie's Syndrome, Adrenoleukodystrophy, Agenesis of the Corpus Callosum, Agnosia, Aicardi Syndrome, Aicardi-Goutieres Syndrome Disorder, AIDS—Neurological Complications, Alexander Disease, Alpers' Disease, Alternating Hemiplegia, Alzheimer's Disease, Amyotrophic Lateral Sclerosis (ALS), Anencephaly, Aneurysm, Angelman Syndrome, Angiomatosis, Anoxia, Antiphospholipid Syndrome, Aphasia, Apraxia, Arachnoid Cysts, Arachnoiditis, Arnold-Chiari Malformation, Arteriovenous Malformation, Asperger Syndrome, Ataxia, Ataxia Telangiectasia, Ataxias and Cerebellar or Spinocerebellar Degeneration, Atrial Fibrillation and Stroke, Attention Deficit-Hyperactivity Disorder, Autism Spectrum Disorder, Autonomic Dysfunction, Back Pain, Barth Syndrome, Batten Disease, Becker's Myotonia, Behcet's Disease, Bell's Palsy, Benign Essential Blepharospasm, Benign Focal Amyotrophy, Benign Intracranial Hypertension, Bernhardt-Roth Syndrome, Binswanger's Disease, Blepharospasm, Bloch-Sulzberger Syndrome, Brachial Plexus Birth Injuries, Brachial Plexus Injuries, Bradbury-Eggleston Syndrome, Brain and Spinal Tumors, Brain Aneurysm, Brain Injury, Brown-Sequard Syndrome, Bulbospinal Muscular Atrophy, Cerebral Autosomal Dominant Arteriopathy with Sub-cortical Infarcts and Leukoencephalopathy (CADASIL), Canavan Disease, Carpal Tunnel Syndrome, Causalgia, Cavernomas, Cavernous Angioma, Cavernous Malformation, Central Cervical Cord Syndrome, Central Cord Syndrome, Central Pain Syndrome, Central Pontine Myelinolysis, Cephalic Disorders, Ceramidase Deficiency, Cerebellar Degeneration, Cerebellar Hypoplasia, Cerebral Aneurysms, Cerebral Arteriosclerosis, Cerebral Atrophy, Cerebral Beriberi, Cerebral Cavernous Malformation, Cerebral Gigantism, Cerebral Hypoxia, Cerebral Palsy, Cerebro-Oculo-Facio-Skeletal Syndrome (COFS), Charcot-Marie-Tooth Disease, Chiari Malformation, Cholesterol Ester Storage Disease, Chorea, Choreoacanthocytosis, Chronic Inflammatory Demyelinating Polyneuropathy (CIDP), Chronic Orthostatic Intolerance, Chronic Pain, Cockayne Syndrome Type II, Coffin Lowry Syndrome, Colpocephaly, Coma, Complex Regional Pain Syndrome, Congenital Facial Diplegia, Congenital Myasthenia, Congenital Myopathy, Congenital Vascular Cavernous Malformations, Corticobasal Degeneration, Cranial Arteritis, Craniosynostosis, Cree encephalitis, Creutzfeldt-Jakob Disease, Cumulative Trauma Disorders, Cushing's Syndrome, Cytomegalic Inclusion Body Disease, Cytomegalovirus Infection, Dancing Eyes-Dancing Feet Syndrome, Dandy-Walker Syndrome, Dawson Disease, De Morsier's Syndrome, Dejerine-Klumpke Palsy, Dementia, Dementia—Multi-Infarct, Dementia—Semantic, Dementia—Subcortical, Dementia With Lewy Bodies, Dentate Cerebellar Ataxia, Dentatorubral Atrophy, Dermatomyositis, Developmental Dyspraxia, Devic's Syndrome, Diabetic Neuropathy, Diffuse Sclerosis, Dravet Syndrome, Dysautonomia, Dysgraphia, Dyslexia, Dysphagia, Dyspraxia, Dyssynergia Cerebellaris Myoclonica, Dyssynergia Cerebellaris Progressiva, Dystonias, Early Infantile Epileptic Encephalopathy, Empty Sella Syndrome, Encephalitis, Encephalitis Lethargica, Encephaloceles, Encephalopathy, Encephalopathy (familial infantile), Encephalotrigeminal Angiomatosis, Epilepsy, Epileptic Hemiplegia, Erb's Palsy, Erb-Duchenne and Dejerine-Klumpke Palsies, Essential Tremor, Extrapontine Myelinolysis, Fabry Disease, Fahr's Syndrome, Fainting, Familial Dysautonomia, Familial Hemangioma, Familial Idiopathic Basal Ganglia Calcification, Familial Periodic Paralyses, Familial Spastic Paralysis, Farber's Disease, Febrile Seizures, Fibromuscular Dysplasia, Fisher Syndrome, Floppy Infant Syndrome, Foot Drop, Friedreich's Ataxia, Frontotemporal Dementia, Gaucher Disease, Generalized Gangliosidoses, Gerstmann's Syndrome, Gerstmann-Straussler-Scheinker Disease, Giant Axonal Neuropathy, Giant Cell Arteritis, Giant Cell Inclusion Disease, Globoid Cell Leukodystrophy, Glossopharyngeal Neuralgia, Glycogen Storage Disease, Guillain-Barr-Syndrome, Hallervorden-Spatz Disease, Head Injury, Headache, Hemicrania Continua, Hemifacial Spasm, Hemiplegia Alterans, Hereditary Neuropathies, Hereditary Spastic Paraplegia, Heredopathia Atactica Polyneuritiformis, Herpes Zoster, Herpes Zoster Oticus, Hirayama Syndrome, Holmes-Adie syndrome, Holoprosencephaly, HTLV-1 Associated Myelopathy, Hughes Syndrome, Huntington's Disease, Hydranencephaly, Hydrocephalus, Hydrocephalus—Normal Pressure, Hydromyelia, Hypercortisolism, Hypersomnia, Hypertonia, Hypotonia, Hypoxia, Immune-Mediated Encephalomyelitis, Inclusion Body Myositis, Incontinentia Pigmenti, Infantile Hypotonia, Infantile Neuroaxonal Dystrophy, Infantile Phytanic Acid Storage Disease, Infantile Refsum Disease, Infantile Spasms, Inflammatory Myopathies, Iniencephaly, Intestinal Lipodystrophy, Intracranial Cysts, Intracranial Hypertension, Isaacs' Syndrome, Joubert Syndrome, Kearns-Sayre Syndrome, Kennedy's Disease, Kinsbourne syndrome, Kleine-Levin Syndrome, Klippel-Feil Syndrome, Klippel-Trenaunay Syndrome (KTS), Klüver-Bucy Syndrome, Korsakoff's Amnesic Syndrome, Krabbe Disease, Kugelberg-Welander Disease, Kuru, Lambert-Eaton Myasthenic Syndrome, Landau-Kleffner Syndrome, Lateral Femoral Cutaneous Nerve Entrapment, Lateral Medullary Syndrome, Learning Disabilities, Leigh's Disease, Lennox-Gastaut Syndrome, Lesch-Nyhan Syndrome, Leukodystrophy, Levine-Critchley Syndrome, Lewy Body Dementia, Lipid Storage Diseases, Lipoid Proteinosis, Lissencephaly, Locked-In Syndrome, Lou Gehrig's Disease, Lupus—Neurological Sequelae, Lyme Disease—Neurological Complications, Machado-Joseph Disease, Macrocephaly, Megalocephaly, Melkersson-Rosenthal Syndrome, Meningitis, Meningitis and Encephalitis, Menkes Disease, Meralgia Paresthetica, Metachromatic Leukodystrophy, Microcephaly, Migraine, Miller Fisher Syndrome, Mini Stroke, Mitochondrial Myopathy, Moebius Syndrome, Monomelic Amyotrophy, Motor Neuron Diseases, Moyamoya Disease, Mucolipidoses, Mucopolysaccharidosis, Multi-Infarct Dementia, Multifocal Motor Neuropathy, Multiple Sclerosis, Multiple System Atrophy, Multiple System Atrophy with Orthostatic Hypotension, Muscular Dystrophy, Myasthenia—Congenital, Myasthenia Gravis, Myelinoclastic Diffuse Sclerosis, Myoclonic Encephalopathy of Infants, Myoclonus, Myopathy, Myopathy—Congenital, Myopathy—Thyrotoxic, Myotonia, Myotonia Congenita, Narcolepsy, Neuroacanthocytosis, Neurodegeneration with Brain Iron Accumulation, Neurofibromatosis, Neuroleptic Malignant Syndrome, Neurological Complications of AIDS, Neurological Complications of Lyme Disease, Neurological Consequences of Cytomegalovirus Infection, Neurological Manifestations of Pompe Disease, Neurological Sequelae Of Lupus, Neuromyelitis Optica, Neuromyotonia, Neuronal Ceroid Lipofuscinosis, Neuronal Migration Disorders, Neuropathy—Hereditary, Neurosarcoidosis, Neurosyphilis, Neurotoxicity, Nevus Cavernosus, Niemann-Pick Disease, O'Sullivan-McLeod Syndrome, Occipital Neuralgia, Ohtahara Syndrome, Olivopontocerebellar Atrophy, Opsoclonus Myoclonus, Orthostatic Hypotension, Overuse Syndrome, Pain—Chronic, Pantothenate Kinase-Associated Neurodegeneration, Paraneoplastic Syndromes, Paresthesia, Parkinson's Disease, Paroxysmal Choreoathetosis, Paroxysmal Hemicrania, Parry-Romberg, Pelizaeus-Merzbacher Disease, Pena Shokeir II Syndrome, Perineural Cysts, Periodic Paralyses, Peripheral Neuropathy, Periventricular Leukomalacia, Persistent Vegetative State, Pervasive Developmental Disorders, Phytanic Acid Storage Disease, Pick's Disease, Pinched Nerve, Piriformis Syndrome, Pituitary Tumors, Polymyositis, Pompe Disease, Porencephaly, Post-Polio Syndrome, Postherpetic Neuralgia, Post infectious Encephalomyelitis, Postural Hypotension, Postural Orthostatic Tachycardia Syndrome, Postural Tachycardia Syndrome, Primary Dentatum Atrophy, Primary Lateral Sclerosis, Primary Progressive Aphasia, Prion Diseases, Progressive Hemifacial Atrophy, Progressive Locomotor Ataxia, Progressive Multifocal Leukoencephalopathy, Progressive Sclerosing Poliodystrophy, Progressive Supranuclear Palsy, Prosopagnosia, Pseudo-Torch syndrome, Pseudotoxoplasmosis syndrome, Pseudotumor Cerebri, Psychogenic Movement, Ramsay Hunt Syndrome I, Ramsay Hunt Syndrome II, Rasmussen's Encephalitis, Reflex Sympathetic Dystrophy Syndrome, Refsum Disease, Refsum Disease—Infantile, Repetitive Motion Disorders, Repetitive Stress Injuries, Restless Legs Syndrome, Retrovirus-Associated Myelopathy, Rett Syndrome, Reye's Syndrome, Rheumatic Encephalitis, Riley-Day Syndrome, Sacral Nerve Root Cysts, Saint Vitus Dance, Salivary Gland Disease, Sandhoff Disease, Schilder's Disease, Schizencephaly, Seitelberger Disease, Seizure Disorder, Semantic Dementia, Septo-Optic Dysplasia, Severe Myoclonic Epilepsy of Infancy (SMEI), Shaken Baby Syndrome, Shingles, Shy-Drager Syndrome, Sjögren's Syndrome, Sleep Apnea, Sleeping Sickness, Sotos Syndrome, Spasticity, Spina Bifida, Spinal Cord Infarction, Spinal Cord Injury, Spinal Cord Tumors, Spinal Muscular Atrophy, Spinocerebellar Atrophy, Spinocerebellar Degeneration, Steele-Richardson-Olszewski Syndrome, Stiff-Person Syndrome, Striatonigral Degeneration, Stroke, Sturge-Weber Syndrome, Subacute Sclerosing Panencephalitis, Subcortical Arteriosclerotic Encephalopathy, Short-lasting, Unilateral, Neuralgiform (SUNCT) Headache, Swallowing Disorders, Sydenham Chorea, Syncope, Syphilitic Spinal Sclerosis, Syringohydromyelia, Syringomyelia, Systemic Lupus Erythematosus, Tabes Dorsalis, Tardive Dyskinesia, Tarlov Cysts, Tay-Sachs Disease, Temporal Arteritis, Tethered Spinal Cord Syndrome, Thomsen's Myotonia, Thoracic Outlet Syndrome, Thyrotoxic Myopathy, Tic Douloureux, Todd's Paralysis, Tourette Syndrome, Transient Ischemic Attack, Transmissible Spongiform Encephalopathies, Transverse Myelitis, Traumatic Brain Injury, Tremor, Trigeminal Neuralgia, Tropical Spastic Paraparesis, Troyer Syndrome, Tuberous Sclerosis, Vascular Erectile Tumor, Vasculitis Syndromes of the Central and Peripheral Nervous Systems, Von Economo's Disease, Von Hippel-Lindau Disease (VHL), Von Recklinghausen's Disease, Wallenberg's Syndrome, Werdnig-Hoffman Disease, Wernicke-Korsakoff Syndrome, West Syndrome, Whiplash, Whipple's Disease, Williams Syndrome, Wilson Disease, Wolman's Disease, X-Linked Spinal and Bulbar Muscular Atrophy.

[0737] Various psychological disorders may be treated with pharmaceutical compositions, biocircuits, biocircuit components, effector modules including their SREs or payloads of the present disclosure. As a non-limiting example, the psychological disorders may be Aboulia, Absence epilepsy, Acute stress Disorder, Adjustment Disorders, Adverse effects of medication NOS, Age related cognitive decline, Agoraphobia, Alcohol Addiction, Alzheimer's Disease, Amnesia (also known as Amnestic Disorder), Amphetamine Addiction, Anorexia Nervosa, Anterograde amnesia, Antisocial personality disorder (also known as Sociopathy), Anxiety Disorder (Also known as Generalized Anxiety Disorder), Anxiolytic related disorders, Asperger's Syndrome (now part of Autism Spectrum Disorder), Attention Deficit Disorder (Also known as ADD), Attention Deficit Hyperactivity Disorder (Also known as ADHD), Autism Spectrum Disorder (also known as Autism), Autophagia, Avoidant Personality Disorder, Barbiturate related disorders, Benzodiazepine related disorders, Bereavement, Bibliomania, Binge Eating Disorder, Bipolar disorder (also known as Manic Depression, includes Bipolar I and Bipolar II), Body Dysmorphic Disorder, Borderline intellectual functioning, Borderline Personality Disorder, Breathing-Related Sleep Disorder, Brief Psychotic Disorder, Bruxism, Bulimia Nervosa, Caffeine Addiction, Cannabis Addiction, Catatonic disorder, Catatonic schizophrenia, Childhood amnesia, Childhood Disintegrative Disorder (now part of Autism Spectrum Disorder), Childhood Onset Fluency Disorder (formerly known as Stuttering), Circadian Rhythm Disorders, Claustrophobia, Cocaine related disorders, Communication disorder, Conduct Disorder, Conversion Disorder, Cotard delusion, Cyclothymia (also known as Cyclothymic Disorder), Delerium, Delusional Disorder, dementia, Dependent Personality Disorder (also known as Asthenic Personality Disorder), Depersonalization disorder (now known as Depersonalization/Derealization Disorder), Depression (also known as Major Depressive Disorder), Depressive personality disorder, Derealization disorder (now known as Depersonalization/Derealization Disorder), Dermotillomania, Desynchronosis, Developmental coordination disorder, Diogenes Syndrome, Disorder of written expression, Dispareunia, Dissocial Personality Disorder, Dissociative Amnesia, Dissociative Fugue, Dissociative Identity Disorder (formerly known as Multiple Personality Disorder), Down syndrome, Dyslexia, Dyspareunia, Dysthymia (now known as Persistent Depressive Disorder), Eating disorder NOS, Ekbom's Syndrome (Delusional Parasitosis), Emotionally unstable personality disorder, Encopresis, Enuresis (bedwetting), Erotomania, Exhibitionistic Disorder, Expressive language disorder, Factitious Disorder, Female Sexual Disorders, Fetishistic Disorder, Folie à deux, Fregoli delusion, Frotteuristic Disorder, Fugue State, Ganser syndrome, Gambling Addiction, Gender Dysphoria (formerly known as Gender Identity Disorder), Generalized Anxiety Disorder, General adaptation syndrome, Grandiose delusions, Hallucinogen Addiction, Haltlose personality disorder, Histrionic Personality Disorder, Primary hypersomnia, Huntington's Disease, Hypoactive sexual desire disorder, Hypochondriasis, Hypomania, Hyperkinetic syndrome, Hypersomnia, Hysteria, Impulse control disorder, Impulse control disorder NOS, Inhalant Addiction, Insomnia, Intellectual Development Disorder, Intermittent Explosive Disorder, Joubert syndrome, Kleptomania, Korsakoff's syndrome, Lacunar amnesia, Language Disorder, Learning Disorders, Major Depression (also known as Major Depressive Disorder), major depressive disorder, Male Sexual Disorders, Malingering, Mathematics disorder, Medication-related disorder, Melancholia, Mental Retardation (now known as Intellectual Development Disorder), Misophonia, Morbid jealousy, Multiple Personality Disorder (now known as Dissociative Identity Disorder), Munchausen Syndrome, Munchausen by Proxy, Narcissistic Personality Disorder, Narcolepsy, Neglect of child, Neurocognitive Disorder (formerly known as Dementia), Neuroleptic-related disorder, Nightmare Disorder, Non Rapid Eye Movement, Obsessive-Compulsive Disorder, Obsessive-Compulsive Personality Disorder (also known as Anankastic Personality Disorder), Oneirophrenia, Onychophagia, Opioid Addiction, Oppositional Defiant Disorder, Orthorexia (ON), Pain disorder, Panic attacks, Panic Disorder, Paranoid Personality Disorder, Parkinson's Disease, Partner relational problem, Passive-aggressive personality disorder, Pathological gambling, Pedophilic Disorder, Perfectionism, Persecutory delusion, Persistent Depressive Disorder (also known as Dysthymia), Personality change due to a general medical condition, Personality disorder, Pervasive developmental disorder (PDD), Phencyclidine related disorder, Phobic disorder, Phonological disorder, Physical abuse, Pica, Polysubstance related disorder, Postpartum Depression, Post-traumatic embitterment disorder (PTED), Post-Traumatic Stress Disorder, Premature ejaculation, Premenstrual Dysphoric Disorder, Psychogenic amnesia, Psychological factor affecting medical condition, Psychoneurotic personality disorder, Psychotic disorder, not otherwise specified, Pyromania, Reactive Attachment Disorder, Reading disorder, Recurrent brief depression, Relational disorder, REM Sleep Behavior Disorder, Restless Leg Syndrome, Retrograde amnesia, Retts Disorder (now part of Autism Spectrum Disorder), Rumination syndrome, Sadistic personality disorder, Schizoaffective Disorder, Schizoid Personality Disorder, Schizophrenia, Schizophreniform disorder, Schizotypal Personality Disorder, Seasonal Affective Disorder, Sedative, Hypnotic, or Anxiolytic Addiction, Selective Mutism, Self-defeating personality disorder, Separation Anxiety Disorder, Sexual Disorders Female, Sexual Disorders Male, Sexual Addiction, Sexual Masochism Disorder, Sexual Sadism Disorder, Shared Psychotic Disorder, Sleep Arousal Disorders, Sleep Paralysis, Sleep Terror Disorder (now part of Nightmare Disorder, Social Anxiety Disorder, Somatization Disorder, Specific Phobias, Stendhal syndrome, Stereotypic movement disorder, Stimulant Addiction, Stuttering (now known as Childhood Onset Fluency Disorder), Substance related disorder, Tardive dyskinesia, Tobacco Addiction, Tourettes Syndrome, Transient tic disorder, Transient global amnesia, Transvestic Disorder, Trichotillomania, Undifferentiated Somatoform Disorder, Vaginismus, and Voyeuristic Disorder.

[0738] Various lung diseases may be treated with pharmaceutical compositions, biocircuits, biocircuit components, effector modules including their SREs or payloads of the present disclosure. As a non-limiting example, the lung diseases may be Asbestosis, Asthma, Bronchiectasis, Bronchitis, Chronic Cough, Chronic Obstructive Pulmonary Disease (COPD), Croup, Cystic Fibrosis, Hantavirus, Idiopathic Pulmonary Fibrosis, Pertussis, Pleurisy, Pneumonia, Pulmonary Embolism, Pulmonary Hypertension, Sarcoidosis, Sleep Apnea, Spirometry, Sudden Infant Death Syndrome (SIDS), Tuberculosis, Alagille Syndrome, Autoimmune Hepatitis, Mai)/Atresia, Cirrhosis, ERCP (Endoscopic Retrograde Cholangiopancreatography), and Hemochromatosis. Nonalcoholic Steatohepatitis, Porphyria, Primary Mai)/Cirrhosis, Primary Sclerosing Cholangitis.

[0739] Various bone diseases may be treated with pharmaceutical compositions, biocircuits, biocircuit components, effector modules including their SREs or payloads of the present disclosure. As a non-limiting example, the bone diseases may be osteoporosis, neurofibromatosis, osteogenesis imperfecta (OI), rickets, osteosarcoma, achondroplasia, fracture, osteomyelitis, Ewing tumor of bone, osteomalacia, hip dysplasia, Paget disease of bone, marble bone disease, osteochondroma, bone cancer, bone disease, osteochondrosis, osteoma, fibrous dysplasia, cleidocranial dysostosis, osteoclastoma, bone cyst, metabolic bone disease, melorheostosis, callus, Caffey syndrome, and mandibulofacial dysostosis.

[0740] Various blood diseases may be treated with pharmaceutical compositions, biocircuits, biocircuit components, effector modules including their SREs or payloads of the present disclosure. As a non-limiting example, the blood diseases may be Anemia and CKD (for health care professionals), Aplastic Anemia and Myelodysplastic Syndromes, Deep Vein Thrombosis, Hemochromatosis, Hemophilia, Henoch-Schonlein Purpura, Idiopathic Thrombocytopenic Purpura, Iron-Deficiency Anemia, Pernicious Anemia, Pulmonary Embolism, Sickle Cell Anemia, Sickle Cell Trait and Other Hemoglobinopathies, Thalassemia, Thrombotic Thrombocytopenic Purpura, and Von Willebrand Disease.

[0741] In some embodiment, biocircuits of the disclosure may be used for the treatment of infectious diseases. Biocircuits of the disclosure may be introduced in cells suitable for adoptive cell transfer such as macrophages, dendritic cells, natural killer cells, and or T cells. Infectious diseases treated by the biocircuits of the disclosure may be diseases caused by viruses, bacteria, fungi, and/or parasites. IL15-IL15Ra payloads of the disclosure may be used to increase immune cell proliferation and/or persistence of the immune cells useful in treating infectious diseases.

### 6. Microbiome

[0742] Alterations in the composition of the microbiome may impact the action of anti-cancer therapies. A diverse community of symbiotic, commensal and pathogenic microorganisms exist in all environmentally exposed sites in the body and is herein referred to as the “Microbiome.” Environmentally exposed sites of the body that may be inhabited by a microbiome include the skin, nasopharynx, the oral cavity, respiratory tract, gastrointestinal tract, and the reproductive tract.

[0743] In some embodiments, microbiome engineered with the biocircuits of the present disclosure may be used to improve the efficacy of the anti-cancer immunotherapies. Sivan et al., found that mice with Bifidobacterium in their gut microbiome were more responsive to immune check point blockage e.g. anti PD-L1 immunotherapy in subcutaneous melanoma tumor model (Sivan A., et al. Commensal Bifidobacterium promotes antitumor immunity and facilitates anti-PD-L1 efficacy. Science 2015; 350:1084-9; the contents of which are incorporated herein by reference in their entirety). In one embodiment, protein, RNA and/or other biomolecules derived from the microbiome may be used as a payload to influence the efficacy of the anti-cancer immunotherapies. In other embodiments, the microorganisms may be delivered along with immunotherapeutic compositions of the present disclosure to improve the efficacy of immunotherapy.

### 7. Tools and Agents for Making Therapeutics

[0744] Provided in the present disclosure are tools and agents that may be used in generating immunotherapeutics for reducing a tumor volume or burden in a subject in need. A considerable number of variables are involved in producing a therapeutic agent, such as structure of the payload, type of cells, method of gene transfers, method and time of ex vivo expansion, pre-conditioning and the amount and type of tumor burden in the subject. Such parameters may be optimized using tools and agents described herein.

### Cell Lines

[0745] The present disclosure provides a mammalian cell that has been genetically modified with the compositions of the disclosure. Suitable mammalian cells include primary cells and immortalized cell lines. Suitable mammalian cell lines include, but are not limited to Human embryonic kidney cell line 293, fibroblast cell line NIB 3T3, human colorectal carcinoma cell line HCT116, ovarian carcinoma cell line SKOV-3, immortalized T cell lines Jurkat cells, lymphoma cell line Raji cells, NALM-6 cells, K562 cells, HeLa cells, PC12 cells, HL-60 cells, NK cell lines (e.g. NKL. NK962, and YTS), and the like. In some instances, the cell is not an immortalized cell line, but instead a cell obtained from an individual and is herein referred to as a primary cell. For example, the cell is a T lymphocyte obtained from an individual. Other examples include, but are not limited to cytotoxic cells, stem cells, peripheral blood mononuclear cells or progenitor cells obtained from an individual.

### Tracking SREs, Biocircuits and Cell Lines

[0746] In some embodiments, it may be desirable to track the compositions of the disclosure or the cells modified by the compositions of the disclosure. Tracking may be achieved by using payloads such as reporter moieties, which, as used herein, refers to any protein capable of creating a detectable signal, in response to an input. Examples include alkaline phosphatase, β-galactosidase, chloramphenicol acetyltransferase, β-glucuronidase, peroxidase, β-lactamase, catalytic antibodies, bioluminescent proteins e.g. luciferase, and fluorescent proteins such as Green fluorescent protein (GFP).

[0747] Reporter moieties may be used to monitor the response of the DD upon addition of the ligand corresponding to the DD. In other instances, reporter moieties may be used to track cell survival, persistence, cell growth, and/or localization in vitro, in vivo, or ex vivo.

[0748] In some embodiments, the preferred reporter moiety may be luciferase proteins. In one embodiment, the reporter moiety is the Renilla luciferase, or a firefly luciferase.

### Animal Models

[0749] The utility and efficacy of the compositions of the present disclosure may be tested in vivo animal models, preferably mouse models. Mouse models used to may be syngeneic mouse models wherein mouse cells are modified with compositions of the disclosure and tested in mice of the same genetic background. Examples include pMEL-1 and 4T1 mouse models. Alternatively, xenograft models where human cells such as tumor cells and immune cells are introduced into immunodeficient mice may also be utilized in such studies. Immunodeficient mice used may be CByJ.Cg-Foxn1^{nu}/J, B6; 129S7-Rag1^{tm1Mom}/J, B6.129S7-Rag1^{tm1Mom}/J, B6. CB17-Prkdc^{scid}/SzJ, NOD.129S7(B6)-Rag1^{tm1Mom}/J, NOD.CgRag1^{tm1Mom}Prf1^{tm1Sd}z/Sz, NOD.CB17-Prkdc^{scid}/SzJ, NOD.Cg-Prkdc^{scid}B2^{tm1Unc}/J, NOD-scid IL2Rg^{null}, Nude (nu)mice, SCID mice, NOD mice, RAG1/RAG2 mice, NOD-Scid mice, IL2rgnull mice, b2mnull mice, NOD-scid IL2rγnull mice, NOD-scid-B2mnull mice, and HLA transgenic mice.

### Cellular Assays

[0750] In some embodiments, the effectiveness of the compositions of the disclosures as immunotherapeutic agents may be evaluated using cellular assays. Levels of expression and/or identity of the compositions of the disclosure may be determined according to any methods known in the art for identifying proteins and/or quantitating proteins levels. In some embodiments, such methods may include Western Blotting, flow cytometry, and immunoprecipitation.

[0751] Provided herein are methods for functionally characterizing cells expressing SRE, biocircuits and compositions of the disclosure. In some embodiments, functional characterization is carried out in primary immune cells or immortalized immune cell lines and may be determined by expression of cell surface markers. Examples of cell surface markers for T cells include, but are not limited to, CD3, CD4, CD8, CD 14, CD20, CD11b, CD16, CD45 and HLA-DR, CD 69, CD28, CD44, IFNgamma. Examples of cell surface markers for antigen presenting cells include, but are not limited to, MHC class I, MHC Class II, CD40, CD45, B7-1, B7-2, IFN γ receptor and IL2 receptor, ICAM-1 and/or Fcγ receptor. Examples of cell surface markers for dendritic cells include, but are not limited to, MHC class I, MHC Class II, B7-2, CD18, CD29, CD31, CD43, CD44, CD45, CD54, CD58, CD83, CD86, CMRF-44, CMRF-56, DCIR and/or Dectin-1 and the like; while in some cases also having the absence of CD2, CD3, CD4, CD8, CD14, CD15, CD16, CD 19, CD20, CD56, and/or CD57. Examples of cell surface markers for NK cells include, but are not limited to, CCL3, CCL4, CCLS, Granulysin, Granzyme B, Granzyme K, IL10, IL22, IFNg, LAP, Perforin, and TNFa.

### 8. Gene Editing

[0752] The CRISPR-Cas9 system is a novel genome editing system which has been rapidly developed and implemented in a multitude of model organisms and cell types, and supplants other genome editing technologies, such as TALENs and ZFNs. CRISPRs are sequence motifs are present in bacterial and archaeal genomes, and are composed of short (about 24-48 nucleotide) direct repeats separated by similarly sized, unique spacers (Grissa et al. BMC Bioinformatics 8, 172 (2007). They are generally flanked by a set of CRISPR-associated (Cas) protein-coding genes that are required for CRISPR maintenance and function (Barrangou et al., Science 315, 1709 (2007), Brouns et al., Science 321, 960 (2008), Haft et al. PLoS Comput Biol 1, e60 (2005)). CRISPR-Cas systems provide adaptive immunity against invasive genetic elements (e.g., viruses, phages and plasmids) (Horvath and Barrangou, Science, 2010, 327: 167-170; Bhaya et al., Annu. Rev. Genet., 2011, 45: 273-297; and Brrangou R, RNA, 2013, 4: 267-278). Three different types of CRISPR-Cas systems have been classified in bacteria and the type II CRISPR-Cas system is most studied. In the bacterial Type II CRISPR-Cas system, small CRISPR RNAs (crRNAs) processed from the pre-repeat-spacer transcript (pre-crRNA) in the presence of a trans-activating RNA (tracrRNA)/Cas9 can form a duplex with the tracrRNA/Cas9 complex. The mature complex is recruited to a target double strand DNA sequence that is complementary to the spacer sequence in the tracrRNA: crRNA duplex to cleave the target DNA by Cas9 endonuclease (Garneau et al., Nature, 2010, 468: 67-71; Jinek et al., Science, 2012, 337: 816-821; Gasiunas et al., Proc. Natl Acad. Sci. USA., 109: E2579-2586; and Haurwitz et al., Science, 2010, 329: 1355-1358). Target recognition and cleavage by the crRNA: tracrRNA/Cas9 complex in the type II CRISPR-CAS system not only requires a sequence in the tracrRNA: crRNA duplex that is a complementary to the target sequence (also called “protospacer” sequence) but also requires a protospacer adjacent motif (PAM) sequence located 3′end of the protospacer sequence of a target polynucleotide. The PAM motif can vary between different CRISPR-Cas systems.

[0753] CRISPR-Cas9 systems have been developed and modified for use in genetic editing and prove to be a high effective and specific technology for editing a nucleic acid sequence even in eukaryotic cells. Many researchers disclosed various modifications to the bacterial CRISPR-Cas systems and demonstrated that CRISPR-Cas systems can be used to manipulate a nucleic acid in a cell, such as in a mammalian cell and in a plant cell. Representative references include U.S. Pat. Nos. 8,993,233; 8,999,641; 8,945,839; 8,932,814; 8,906, 616; 8,895,308; 8,889,418; 8,889,356; 8,871,445; 8,865,406; 8,771,945; and 8,697,359; US patent publication NOs.: 20150031134; 20150203872; 20150218253; 20150176013; 20150191744; 20150071889; 20150067922; and 20150167000; each of which is incorporated herein by reference in their entirety.

[0754] However, controlling the effects and activity of the CRISPR-Cas system (e.g., guide RNA and nuclease) has been challenging and often can be problematic.

[0755] The biocircuits of the present disclosure and/or any of their components may be utilized in regulating or tuning the CRISPR/Cas9 system to optimize its utility.

[0756] In some embodiments, the payloads of the effector modules of the disclosure may include alternative isoforms or orthologs of the Cas9 enzyme.

[0757] The most commonly used Cas9 is derived from Streptococcus pyogenes and the RuvC domain can be inactivated by a D10A mutation and the HNH domain can be inactivated by an H840A mutation.

[0758] In addition to Cas9 derived from S. pyogenes, other RNA guided endonucleases (RGEN) may also be used for programmable genome editing. Cas9 sequences have been identified in more than 600 bacterial strains. Though Cas9 family shows high diversity of amino acid sequences and protein sizes, All Cas9 proteins share a common architecture with a central HNH nuclease domain and a split RuvC/RHase H domain Examples of Cas9 orthologs from other bacterial strains including but not limited to, Cas proteins identified in Acaryochloris marina MBIC11017; Acetohalobium arabaticum DSM 5501; Acidithiobacillus caldus; Acidithiobacillus ferrooxidans ATCC 23270; Alicyclobacillus acidocaldarius LAA1; Alicyclobacillus acidocaldarius subsp. acidocaldarius DSM 446; Allochromatium vinosum DSM 180; Ammonifex degensii KC4; Anabaena variabilis ATCC 29413; Arthrospira maxima CS-328; Arthrospira platensis str. Paraca; Arthrospira sp. PCC 8005; Bacillus pseudomycoides DSM 12442; Bacillus selenitireducens MLS10; Burkholderiales bacterium 1_1_47; Caldicelulosiruptor becscii DSM 6725; Candidatus Desulforudis audaxviator MP104C; Caldicellulosiruptor hydrothermalis_108; Clostridium phage c-st; Clostridium botulinum A3 str. Loch Maree; Clostridium botulinum Ba4 str. 657; Clostridium difficile QCD-63q42; Crocosphaera watsonii WH 8501; Cyanothece sp. ATCC 51142; Cyanothece sp. CCY0110; Cyanothece sp. PCC 7424; Cyanothece sp. PCC 7822; Exiguobacterium sibiricum 255-15; Finegoldia magna ATCC 29328; Ktedonobacter racemifer DSM 44963; Lactobacillus delbrueckii subsp. bulgaricus PB2003/044-T3-4; Lactobacillus salivarius ATCC 11741; Listeria innocua; Lyngbya sp. PCC 8106; Marinobacter sp. ELB17; Methanohalobium evestigatum Z-7303; Microcystis phage Ma-LMM01; Microcystis aeruginosa NIES-843; Microscilla marina ATCC 23134; Microcoleus chthonoplastes PCC 7420; Neisseria meningitidis; Nitrosococcus halophilus Nc4; Nocardiopsis dassonvillei subsp. dassonvillei DSM 43111; Nodularia spumigena CCY9414; Nostoc sp. PCC 7120; Oscillatoria sp. PCC 6506; Pelotomaculum thermopropionicum SI; Petrotoga mobilis SJ95; Polaromonas naphthalenivorans CJ2; Polaromonas sp. J5666; Pseudoalteromonas haloplanktis TAC125; Streptomyces pristinaespiralis ATCC 25486; Streptomyces pristinaespiralis ATCC 25486; Streptococcus thermophiles; Streptomyces viridochromogenes DSM 40736; Streptosporangium roseum DSM 43021; Synechococcus sp. PCC 7335; and Thermosipho africanus TCF52B (Chylinski et al., RNA Biol., 2013; 10(5): 726-737).

[0759] In addition to Cas9 orthologs, other Cas9 variants such as fusion proteins of inactive dCas9 and effector domains with different functions may be served as a platform for genetic modulation. Any of the foregoing enzymes may be useful in the present disclosure.

### 9. Stem Cell Applications

[0760] The biocircuits of the present disclosure and/or any of their components may be utilized in the regulated reprogramming of cells, stem cell engraftment or other application where controlled or tunable expression of such reprogramming factors are useful.

[0761] The biocircuits of the present disclosure may be used in reprogramming cells including stem cells or induced stem cells. Induction of induced pluripotent stem cells (iPSC) was first achieved by Takahashi and Yamanaka (Cell, 2006. 126(4):663-76; herein incorporated by reference in its entirety) using viral vectors to express KLF4, c-MYC, OCT4 and SOX2 otherwise collectively known as KMOS.

[0762] Excisable lentiviral and transposon vectors, repeated application of transient plasmid, episomal and adenovirus vectors have also been used to try to derive iPSC (Chang, C.-W., et al., Stem Cells, 2009. 27(5):1042-1049; Kaji, K., et al., Nature, 2009. 458(7239):771-5; Okita, K., et al., Science, 2008. 322(5903):949-53; Stadtfeld, M., et al., Science, 2008. 322(5903):945-9; Woltjen, K., et al., Nature, 2009; Yu, J., et al., Science, 2009:1172482; Fusaki, N., et al., Proc Jpn Acad Ser B Phys Biol Sci, 2009. 85(8):348-62; each of which is herein incorporated by reference in its entirety).

[0763] DNA-free methods to generate human iPSC has also been derived using serial protein transduction with recombinant proteins incorporating cell-penetrating peptide moieties (Kim, D., et al., Cell Stem Cell, 2009. 4(6): 472-476; Zhou, H., et al., Cell Stem Cell, 2009. 4(5):381-4; each of which is herein incorporated by reference in its entirety), and infectious transgene delivery using the Sendai virus (Fusaki, N., et al., Proc Jpn Acad Ser B Phys Biol Sci, 2009. 85(8): p. 348-62; herein incorporated by reference in its entirety).

[0764] The effector modules of the present disclosure may include a payload comprising any of the genes including, but not limited to, OCT such as OCT4, SOX such as SOX1, SOX2, SOX3, SOX15 and SOX18, NANOG, KLF such as KLF1, KLF2, KLF4 and KLFS, MYC such as c-MYC and n-MYC, REM2, TERT and LIN28 and variants thereof in support of reprogramming cells. Sequences of such reprogramming factors are taught in for example International Application PCT/US2013/074560, the contents of which are incorporated herein by reference in their entirety.

[0765] In some embodiments, the payload of the present disclosure may be cardiac lineage specification factors such as eomesodermin (EOMES), a T-box transcription factor; WNT signaling pathway components such as WNT3 and WNT 3A. EOMES is crucially required for the development of the heart. Cardiomyocyte programming by EOMES involves autocrine activation of the canonical WNT signaling pathway and vice versa. Under conditions that are conducive to promoting cardiac lineage, WNT signaling activates EOMES and EOMES in turn promotes WNT signaling creating a self-sustaining loop that promotes the cardiac lineage. An activation loop that is too weak or too strong promotes non-cardiac fates such as endodermal and other mesodermal fates respectively. The DDs of the present disclosure may be used to tune EOMES and WNT payload levels to generate an activation loop that initiate and/or sustain cardiac specification during gastrulation.

### VII. Definitions

[0766] At various places in the present specification, features or functions of the compositions of the present disclosure are disclosed in groups or in ranges. It is specifically intended that the present disclosure include each and every individual sub-combination of the members of such groups and ranges. The following is a non-limiting list of term definitions.

[0767] Activity: As used herein, the term “activity” refers to the condition in which things are happening or being done. Compositions of the disclosure may have activity and this activity may involve one or more biological events. In some embodiments, biological events may include cell signaling events. In some embodiments, biological events may include cell signaling events associated protein interactions with one or more corresponding proteins, receptors, small molecules or any of the biocircuit components described herein.

[0768] Adoptive cell therapy (ACT): The terms “Adoptive cell therapy” or “Adoptive cell transfer”, as used herein, refer to a cell therapy involving in the transfer of cells into a patient, wherein cells may have originated from the patient, or from another individual, and are engineered (altered) before being transferred back into the patient. The therapeutic cells may be derived from the immune system, such as Immune effector cells: CD4+ T cell; CD8+ T cell, Natural Killer cell (NK cell); and B cells and tumor infiltrating lymphocytes (TILs) derived from the resected tumors. Most commonly transferred cells are autologous anti-tumor T cells after ex vivo expansion or manipulation. For example, autologous peripheral blood lymphocytes can be genetically engineered to recognize specific tumor antigens by expressing T-cell receptors (TCR) or chimeric antigen receptor (CAR).

[0769] Agent: As used herein, the term “agent” refers to a biological, pharmaceutical, or chemical compound. Non-limiting examples include simple or complex organic or inorganic molecule, a peptide, a protein, an oligonucleotide, an antibody, an antibody derivative, antibody fragment, a receptor, and soluble factor.

[0770] Agonist: the term “agonist” as used herein, refers to a compound that, in combination with a receptor, can produce a cellular response. An agonist may be a ligand that directly binds to the receptor. Alternatively, an agonist may combine with a receptor indirectly by, for example, (a) forming a complex with another molecule that directly binds to the receptor, or (b) otherwise resulting in the modification of another compound so that the other compound directly binds to the receptor. An agonist may be referred to as an agonist of a particular receptor or family of receptors, e.g., agonist of a co-stimulatory receptor.

[0771] Antagonist: the term “antagonist” as used herein refers to any agent that inhibits or reduces the biological activity of the target(s) it binds.

[0772] Antigen: the term “antigen” as used herein is defined as a molecule that provokes an immune response when it is introduced into a subject or produced by a subject such as tumor antigens which arise by the cancer development itself. This immune response may involve either antibody production, or the activation of specific immunologically-competent cells such as cytotoxic T lymphocytes and T helper cells, or both. An antigen can be derived from organisms, subunits of proteins/antigens, killed or inactivated whole cells or lysates. In the context of the disclosure, the terms “antigens of interest” or “desired antigens” refers to those proteins and/or other biomolecules provided herein that are immunospecifically bound or interact with antibodies of the present disclosure and/or fragments, mutants, variants, and/or alterations thereof described herein. In some embodiments, antigens of interest may comprise any of the polypeptides or payloads or proteins described herein, or fragments or portions thereof.

[0773] Approximately: As used herein, the term “approximately” or “about,” as applied to one or more values of interest, refers to a value that is similar to a stated reference value. In certain embodiments, the term “approximately” or “about” refers to a range of values that fall within 25%, 20%, 19%, 18%, 17%, 16%, 15%, 14%, 13%, 12%, 11%, 10%, 9%, 8%, 7%, 6%, 5%, 4%, 3%, 2%, 1%, or less in either direction (greater than or less than) of the stated reference value unless otherwise stated or otherwise evident from the context (except where such number would exceed 100% of a possible value).

[0774] Alkyl: The terms “alkyl”, “alkoxy”, “hydroxyalkyl”, “alkoxyalkyl”, and “alkoxycarbonyl”, as used herein, include both straight and branched chains containing one to twelve carbon atoms, and/or which may or may not be substituted.

[0775] Alkenyl: The terms “alkenyl” and “alkynyl” as used herein alone or as part of a larger moiety shall include both straight and branched chains containing two to twelve carbon atoms.

[0776] Aryl: The term “aryl” as used herein alone or as part of a larger moiety as in “aralkyl”, “aralkoxy”, or “aryloxyalkyl”, refers to monocyclic, bicyclic and tricyclic carbocyclic ring systems having a total of five to fourteen ring members, wherein at least one ring is aromatic and wherein each ring in the system contains 3 to 8 ring members. The term “aryl” may be used interchangeably with the term “aryl ring.”

[0777] Aromatic: The term “aromatic” as used herein, refers to an unsaturated hydrocarbon ring structure with delocalized pi electrons. As used herein “aromatic” may refer to monocyclic, bicyclic or polycyclic aromatic compounds.

[0778] Aliphatic: The term “aliphatic” or “aliphatic group” as used herein, refers to a straight or branched C1-C8 hydrocarbon chain or a monocyclic C3-C8hydrocarbon or bicyclic C8-C12 hydrocarbon which are fully saturated or that contains one or more units of unsaturation, that is completely saturated or that contains one or more units of unsaturation, but which is not aromatic (also referred to herein as “carbocycle” or “cycloalkyl”), and that has a single point of attachment to the rest of the molecule wherein any individual ring in said bicyclic ring system has 3-7 members.

[0779] Associated with: As used herein, the terms “associated with,” “conjugated,” “linked,” “attached,” and “tethered,” when used with respect to two or more moieties, mean that the moieties are physically associated or connected with one another, either directly or via one or more additional moieties that serve as linking agents, to form a structure that is sufficiently stable so that the moieties remain physically associated under the conditions in which the structure is used, e.g., physiological conditions. An “association” need not be strictly through direct covalent chemical bonding. It may also suggest ionic or hydrogen bonding or a hybridization based connectivity sufficiently stable such that the “associated” entities remain physically associated.

[0780] Autologous: the term “autologous” as used herein is meant to refer to any material derived from the same individual to which it is later to be re-introduced into the individual.

[0781] Barcode: the term “barcode” as used herein refers to polynucleotide or amino acid sequence that distinguishes one polynucleotide or amino acid from another.

[0782] Biocircuit system: As used herein, a “biocircuit” or “biocircuit system” is defined as a circuit within or useful in biologic systems comprising a stimulus and at least one effector module responsive to a stimulus, where the response to the stimulus produces at least one signal or outcome within, between, as an indicator of, or on a biologic system. Biologic systems are generally understood to be any cell, tissue, organ, organ system or organism, whether animal, plant, fungi, bacterial, or viral. It is also understood that biocircuits may be artificial circuits which employ the stimuli or effector modules taught by the present disclosure and effect signals or outcomes in acellular environments such as with diagnostic, reporter systems, devices, assays or kits. The artificial circuits may be associated with one or more electronic, magnetic, or radioactive components or parts. In the context of the present disclosure, a biocircuit includes a destabilizing domain (DD) biocircuit system.

[0783] Checkpoint factor: As used herein, a checkpoint factor is any moiety or molecule whose function acts at the junction of a process. For example, a checkpoint protein, ligand or receptor may function to stall or accelerate the cell cycle.

[0784] Co-stimulatory molecule: As used herein, in accordance with its meaning in immune T cell activation, refers to a group of immune cell surface receptor/ligands which engage between T cells and APCs and generate a stimulatory signal in T cells which combines with the stimulatory signal in T cells that results from T cell receptor (TCR) recognition of antigen/MHC complex (pMHC) on APCs

[0785] Cytokines: the term “cytokines”, as used herein, refers to a family of small soluble factors with pleiotropic functions that are produced by many cell types that can influence and regulate the function of the immune system.

[0786] Delivery: the term “delivery” as used herein refers to the act or manner of delivering a compound, substance, entity, moiety, cargo or payload. A “delivery agent” refers to any agent which facilitates, at least in part, the in vivo delivery of one or more substances (including, but not limited to compounds and/or compositions of the present disclosure) to a cell, subject or other biological system cells.

[0787] Destabilized: As used herein, the term “destable,” “destabilize,” “destabilizing region” or “destabilizing domain” means a region or molecule that is less stable than a starting, reference, wild-type or native form of the same region or molecule.

[0788] Engineered: As used herein, embodiments of the disclosure are “engineered” when they are designed to have a feature or property, whether structural or chemical, that varies from a starting point, wild type or native molecule.

[0789] Expression: As used herein, “expression” of a nucleic acid sequence refers to one or more of the following events: (1) production of an RNA template from a DNA sequence (e.g., by transcription); (2) processing of an RNA transcript (e.g., by splicing, editing, 5′ cap formation, and/or 3′ end processing); (3) translation of an RNA into a polypeptide or protein; (4) folding of a polypeptide or protein; and (5) post-translational modification of a polypeptide or protein.

[0790] Feature: As used herein, a “feature” refers to a characteristic, a property, or a distinctive element.

[0791] Formulation: As used herein, a “formulation” includes at least a compound and/or composition of the present disclosure and a delivery agent.

[0792] Fragment: A “fragment,” as used herein, refers to a portion. For example, fragments of proteins may comprise polypeptides obtained by digesting full-length protein. In some embodiments, a fragment of a protein includes at least 3, 4, 5, 6, 7, 8, 9, 10, 11, 12, 13, 14, 15, 16, 17, 18, 19, 20, 25, 30, 35, 40, 45, 50, 55, 60, 65, 70, 75, 80, 85, 90, 95, 100, 150, 200, 250 or more amino acids. In some embodiments, fragments of an antibody include portions of an antibody.

[0793] Functional: As used herein, a “functional” biological molecule is a biological entity with a structure and in a form in which it exhibits a property and/or activity by which it is characterized.

[0794] Heterocycle: The term “heterocycle”, “heterocyclyl”, or “heterocyclic” as used herein refers to monocyclic, bicyclic or tricyclic ring systems having three to fourteen ring members in which one or more ring members is a heteroatom, wherein each ring in the system contains 3 to 7 ring members and is non-aromatic.

[0795] Hotspot: As used herein, a “hotspot” or a “mutational hotspot” refers to an amino acid position in a protein coding gene that is mutated (by substitutions) more frequently relative to elsewhere within the same gene.

[0796] Hydrophilic: As used herein, “hydrophilic” refers to a molecule that interacts with or has affinity for water.

[0797] Hydrophobic: As used herein, “hydrophobic” refers to a molecule that does not interact or have affinity for water.

[0798] Immune cells: the term “an immune cell”, as used herein, refers to any cell of the immune system that originates from a hematopoietic stem cell in the bone marrow, which gives rise to two major lineages, a myeloid progenitor cell (which give rise to myeloid cells such as monocytes, macrophages, dendritic cells, megakaryocytes and granulocytes) and a lymphoid progenitor cell (which give rise to lymphoid cells such as T cells, B cells and natural killer (NK) cells). Exemplary immune system cells include a CD4+ T cell, a CD8+ T cell, a CD4− CD8− double negative T cell, a T γδ cell, a Tαβ cell, a regulatory T cell, a natural killer cell, and a dendritic cell. Macrophages and dendritic cells may be referred to as “antigen presenting cells” or “APCs,” which are specialized cells that can activate T cells when a major histocompatibility complex (MHC) receptor on the surface of the APC complexed with a peptide interacts with a TCR on the surface of a T cell.

[0799] Immunotherapy: the term “immunotherapy” as used herein, refers to a type of treatment of a disease that uses immunological tools, such as monoclonal antibodies, receptor-immunoglobulin fusion proteins, vaccines and/or immune cells.

[0800] In vitro: As used herein, the term “in vitro” refers to events that occur in an artificial environment, e.g., in a test tube or reaction vessel, in cell culture, in a Petri dish, etc., rather than within an organism (e.g., animal, plant, or microbe).

[0801] In vivo: As used herein, the term “in vivo” refers to events that occur within an organism (e.g., animal, plant, or microbe or cell or tissue thereof).

[0802] Linker: As used herein, a linker refers to a moiety that connects two or more domains, moieties or entities. In one embodiment, a linker may comprise 10 or more atoms. In a further embodiment, a linker may comprise a group of atoms, e.g., 10-1,000 atoms, and can be comprised of the atoms or groups such as, but not limited to, carbon, amino, alkylamino, oxygen, sulfur, sulfoxide, sulfonyl, carbonyl, and imine. In some embodiments, a linker may comprise one or more nucleic acids comprising one or more nucleotides. In some embodiments, the linker may comprise an amino acid, peptide, polypeptide or protein. In some embodiments, a moiety bound by a linker may include, but is not limited to an atom, a chemical group, a nucleoside, a nucleotide, a nucleobase, a sugar, a nucleic acid, an amino acid, a peptide, a polypeptide, a protein, a protein complex, a payload (e.g., a therapeutic agent), or a marker (including, but not limited to a chemical, fluorescent, radioactive or bioluminescent marker). The linker can be used for any useful purpose, such as to form multimers or conjugates, as well as to administer a payload, as described herein. Examples of chemical groups that can be incorporated into the linker include, but are not limited to, alkyl, alkenyl, alkynyl, amido, amino, ether, thioether, ester, alkylene, heteroalkylene, aryl, or heterocyclyl, each of which can be optionally substituted, as described herein. Examples of linkers include, but are not limited to, unsaturated alkanes, polyethylene glycols (e.g., ethylene or propylene glycol monomeric units, e.g., diethylene glycol, dipropylene glycol, triethylene glycol, tripropylene glycol, tetraethylene glycol, or tetraethylene glycol), and dextran polymers, Other examples include, but are not limited to, cleavable moieties within the linker, such as, for example, a disulfide bond (—S—S—) or an azo bond (—N═N—), which can be cleaved using a reducing agent or photolysis. Non-limiting examples of a selectively cleavable bonds include an amido bond which may be cleaved for example by the use of tris(2-carboxyethyl) phosphine (TCEP), or other reducing agents, and/or photolysis, as well as an ester bond which may be cleaved for example by acidic or basic hydrolysis.

[0803] Lipophilic: As used herein, the term “lipophilic” refers to an affinity for lipids or fats.

[0804] Metabolite: Metabolites are the intermediate products of metabolic reactions catalyzed by enzymes that naturally occur within cells. This term is usually used to describe small molecules, fragments of larger biomolecules or processed products.

[0805] Modified: As used herein, the term “modified” refers to a changed state or structure of a molecule or entity as compared with a parent or reference molecule or entity. Molecules may be modified in many ways including chemically, structurally, and functionally. In some embodiments, compounds and/or compositions of the present disclosure are modified by the introduction of non-natural amino acids.

[0806] Mutation: As used herein, the term “mutation” refers to a change and/or alteration. In some embodiments, mutations may be changes and/or alterations to proteins (including peptides and polypeptides) and/or nucleic acids (including polynucleic acids). In some embodiments, mutations comprise changes and/or alterations to a protein and/or nucleic acid sequence. Such changes and/or alterations may comprise the addition, substitution and or deletion of one or more amino acids (in the case of proteins and/or peptides) and/or nucleotides (in the case of nucleic acids and or polynucleic acids). In some embodiments, wherein mutations comprise the addition and/or substitution of amino acids and/or nucleotides, such additions and/or substitutions may comprise 1 or more amino acid and/or nucleotide residues and may include modified amino acids and/or nucleotides. The resulting construct, molecule or sequence of a mutation, change or alteration may be referred to herein as a mutant.

[0807] Neoantigen: the term “neoantigen”, as used herein, refers to a tumor antigen that is present in tumor cells but not normal cells and do not induce deletion of their cognate antigen specific T cells in thymus (i.e., central tolerance). These tumor neoantigens may provide a “foreign” signal, similar to pathogens, to induce an effective immune response needed for cancer immunotherapy. A neoantigen may be restricted to a specific tumor. A neoantigen be a peptide/protein with a missense mutation (missense neoantigen), or a new peptide with long, completely novel stretches of amino acids from novel open reading frames (neoORFs). The neoORFs can be generated in some tumors by out-of-frame insertions or deletions (due to defects in DNA mismatch repair causing microsatellite instability), gene-fusion, read-through mutations in stop codons, or translation of improperly spliced RNA (e.g., Saeterdal et al., Proc Natl Acad Sci USA, 2001, 98: 13255-13260).

[0808] Off-target: As used herein, “off target” refers to any unintended effect on any one or more target, gene, cellular transcript, cell, and/or tissue.

[0809] Operably linked: As used herein, the phrase “operably linked” refers to a functional connection between two or more molecules, constructs, transcripts, entities, moieties or the like.

[0810] Phenyl: As used herein, “phenyl” refers to a cyclic group of atoms with a formula C6H5.

[0811] Payload or payload of interest (POI): the terms “payload” and “payload of interest (POI)”, as used herein, are used interchangeable. A payload of interest (POI) refers to any protein or compound whose function is to be altered. In the context of the present disclosure, the POI is a component in the immune system, including both innate and adaptive immune systems. Payloads of interest may be a protein, a fusion construct encoding a fusion protein, or non-coding gene, or variant and fragment thereof. Payload of interest may, when amino acid based, may be referred to as a protein of interest.

[0812] Pharmaceutically acceptable excipients: the term “pharmaceutically acceptable excipient,” as used herein, refers to any ingredient other than active agents (e.g., as described herein) present in pharmaceutical compositions and having the properties of being substantially nontoxic and non-inflammatory in subjects. In some embodiments, pharmaceutically acceptable excipients are vehicles capable of suspending and/or dissolving active agents. Excipients may include, for example: antiadherents, antioxidants, binders, coatings, compression aids, disintegrants, dyes (colors), emollients, emulsifiers, fillers (diluents), film formers or coatings, flavors, fragrances, glidants (flow enhancers), lubricants, preservatives, printing inks, sorbents, suspending or dispersing agents, sweeteners, and waters of hydration. Exemplary excipients include, but are not limited to: butylated hydroxytoluene (BHT), calcium carbonate, calcium phosphate (dibasic), calcium stearate, croscarmellose, crosslinked polyvinyl pyrrolidone, citric acid, crospovidone, cysteine, ethylcellulose, gelatin, hydroxypropyl cellulose, hydroxypropyl methylcellulose, lactose, magnesium stearate, maltitol, mannitol, methionine, methylcellulose, methyl paraben, microcrystalline cellulose, polyethylene glycol, polyvinyl pyrrolidone, povidone, pregelatinized starch, propyl paraben, retinyl palmitate, shellac, silicon dioxide, sodium carboxymethyl cellulose, sodium citrate, sodium starch glycolate, sorbitol, starch (corn), stearic acid, sucrose, talc, titanium dioxide, vitamin A, vitamin E, vitamin C, and xylitol.

[0813] Pharmaceutically acceptable salts: Pharmaceutically acceptable salts of the compounds described herein are forms of the disclosed compounds wherein the acid or base moiety is in its salt form (e.g., as generated by reacting a free base group with a suitable organic acid). Examples of pharmaceutically acceptable salts include, but are not limited to, mineral or organic acid salts of basic residues such as amines; alkali or organic salts of acidic residues such as carboxylic acids; and the like. Representative acid addition salts include acetate, adipate, alginate, ascorbate, aspartate, benzenesulfonate, benzoate, bisulfate, borate, butyrate, camphorate, camphorsulfonate, citrate, cyclopentanepropionate, digluconate, dodecylsulfate, ethanesulfonate, fumarate, glucoheptonate, glycerophosphate, hemisulfate, heptonate, hexanoate, hydrobromide, hydrochloride, hydroiodide, 2-hydroxy-ethanesulfonate, lactobionate, lactate, laurate, lauryl sulfate, malate, maleate, malonate, methanesulfonate, 2-naphthalenesulfonate, nicotinate, nitrate, oleate, oxalate, palmitate, pamoate, pectinate, persulfate, 3-phenylpropionate, phosphate, picrate, pivalate, propionate, stearate, succinate, sulfate, tartrate, thiocyanate, toluenesulfonate, undecanoate, valerate salts, and the like. Representative alkali or alkaline earth metal salts include sodium, lithium, potassium, calcium, magnesium, and the like, as well as nontoxic ammonium, quaternary ammonium, and amine cations, including, but not limited to ammonium, tetramethylammonium, tetraethylammonium, methylamine, dimethylamine, trimethylamine, triethylamine, ethylamine, and the like. Pharmaceutically acceptable salts include the conventional non-toxic salts, for example, from non-toxic inorganic or organic acids. In some embodiments, a pharmaceutically acceptable salt is prepared from a parent compound which contains a basic or acidic moiety by conventional chemical methods. Generally, such salts can be prepared by reacting the free acid or base forms of these compounds with a stoichiometric amount of the appropriate base or acid in water or in an organic solvent, or in a mixture of the two; generally, nonaqueous media like ether, ethyl acetate, ethanol, isopropanol, or acetonitrile are preferred. Lists of suitable salts are found in Remington's Pharmaceutical Sciences, 17th ed., Mack Publishing Company, Easton, Pa., 1985, p. 1418, Pharmaceutical Salts: Properties, Selection, and Use, P. H. Stahl and C. G. Wermuth (eds.), Wiley-VCH, 2008, and Berge et al., Journal of Pharmaceutical Science, 66, 1-19 (1977), each of which is incorporated herein by reference in its entirety. Pharmaceutically acceptable solvate: The term “pharmaceutically acceptable solvate,” as used herein, refers to a crystalline form of a compound wherein molecules of a suitable solvent are incorporated in the crystal lattice. For example, solvates may be prepared by crystallization, recrystallization, or precipitation from a solution that includes organic solvents, water, or a mixture thereof. Examples of suitable solvents are ethanol, water (for example, mono-, di-, and tri-hydrates), N-methylpyrrolidinone (NMP), dimethyl sulfoxide (DMSO), N, N′-dimethylformamide (DMF), N, N′-dimethylacetamide (DMAC), 1,3-dimethyl-2-imidazolidinone (DMEU), 1,3-dimethyl-3,4,5,6-tetrahydro-2-(1H)-pyrimidinone (DMPU), acetonitrile (ACN), propylene glycol, ethyl acetate, benzyl alcohol, 2-pyrrolidone, benzyl benzoate, and the like. When water is the solvent, the solvate is referred to as a “hydrate.” In some embodiments, the solvent incorporated into a solvate is of a type or at a level that is physiologically tolerable to an organism to which the solvate is administered (e.g., in a unit dosage form of a pharmaceutical composition).

[0814] Piperazine: As used herein, “piperazine” refers to a six-membered ring containing two nitrogen atoms at opposite positions in the ring.

[0815] Protein of interest: As used herein, the terms “proteins of interest” or “desired proteins” include those provided herein and fragments, mutants, variants, and alterations thereof.

[0816] Purine: As used herein, “purine” refers to an aromatic heterocyclic structure, wherein one of the heterocycles is an imidazole ring and one of the heterocycles is a pyrimidine ring.

[0817] Pyrimidine: As used herein, “pyrimidine” refers to an aromatic heterocyclic structure similar to benzene, but wherein two of the carbon atoms are replaced by nitrogen atoms.

[0818] Pyridopyrimidine: As used herein, “Pyridopyrimidine” refers to an aromatic heterocyclic structure, wherein one of the heterocycles is a purine ring and one of the heterocycles is a pyrimidine ring.

[0819] Quinazoline: As used herein, the term, “Quinazoline” refers to an aromatic heterocyclic structure, wherein one of the heterocycles is a benzene ring and one of the heterocycles is a pyrimidine ring.

[0820] Stable: As used herein “stable” refers to a compound or entity that is sufficiently robust to survive isolation to a useful degree of purity from a reaction mixture, and preferably capable of formulation into an efficacious therapeutic agent.

[0821] Stabilized: As used herein, the term “stabilize”, “stabilized,” “stabilized region” means to make or become stable. In some embodiments, stability is measured relative to an absolute value. In some embodiments, stability is measured relative to a secondary status or state or to a reference compound or entity.

[0822] Standard CAR: As used herein, the term “standard CAR” refers to the standard design of a chimeric antigen receptor. The components of a CAR fusion protein including the extracellular scFv fragment, transmembrane domain and one or more intracellular domains are linearly constructed as a single fusion protein.

[0823] Stimulus response element (SRE): the term “stimulus response element (SRE), as used herein, is a component of an effector module which is joined, attached, linked to or associated with one or more payloads of the effector module and in some instances, is responsible for the responsive nature of the effector module to one or more stimuli. As used herein, the “responsive” nature of an SRE to a stimulus may be characterized by a covalent or non-covalent interaction, a direct or indirect association or a structural or chemical reaction to the stimulus. Further, the response of any SRE to a stimulus may be a matter of degree or kind. The response may be a partial response. The response may be a reversible response. The response may ultimately lead to a regulated signal or output. Such output signal may be of a relative nature to the stimulus, e.g., producing a modulatory effect of between 1 and 100 or a factored increase or decrease such as 2-fold, 3-fold, 4-fold, 5-fold, 10-fold or more. One non-limiting example of an SRE is a destabilizing domain (DD).

[0824] Subject: As used herein, the term “subject” or “patient” refers to any organism to which a composition in accordance with the disclosure may be administered, e.g., for experimental, diagnostic, prophylactic, and/or therapeutic purposes. Typical subjects include animals (e g, mammals such as mice, rats, rabbits, non-human primates, and humans) and/or plants.

[0825] T cell: A T cell is an immune cell that produces T cell receptors (TCRs). T cells can be naïve (not exposed to antigen; increased expression of CD62L, CCR7, CD28, CD3, CD127, and CD45RA, and decreased expression of CD45RO as compared to TCM), memory T cells (TM) (antigen-experienced and long-lived), and effector cells (antigen-experienced, cytotoxic). TM can be further divided into subsets of central memory T cells (TCM, increased expression of CD62L, CCR7, CD28, CD127, CD45RO, and CD95, and decreased expression of CD54RA as compared to naïve T cell and effector memory T cells (TEM, decreased expression of CD62L, CCR7, CD28, CD45RA, and increased expression of CD127 as compared to naïve T cells or TCM). Effector T cells (TE) refers to antigen-experienced CD8+ cytotoxic T lymphocytes that have decreased expression of CD62L, CCR7, CD28, and are positive for granzyme and perform as compared to TCM. Other exemplary T cells include regulatory T cells, such as CD4+CD25+(Foxp3+) regulatory T cells and Treg17 cells, as well as Tr1, Th3, CD8+CD28−, and Qa-1 restricted T cells.

[0826] T cell receptor: T cell receptor (TCR) refers to an immunoglobulin superfamily member having a variable antigen binding domain, a constant domain, a transmembrane region, and a short cytoplasmic tail, which is capable of specifically binding to an antigen peptide bound to a MHC receptor. A TCR can be found on the surface of a cell or in soluble form and generally is comprised of a heterodimer having α and β chains (also known as TCRα and TCRβ, respectively), or γ and δ chains (also known as TCRγ and TCRδ, respectively). The extracellular portion of TCR chains (e.g., α-chain, β-chain) contains two immunoglobulin domains, a variable domain (e.g., α-chain variable domain or Vα, β-chain variable domain or Vβ) at the N-terminus, and one constant domain (e.g., α-chain constant domain or Cα and β-chain constant domain or Cβ) adjacent to the cell membrane Similar to immunoglobulin, the variable domains contain complementary determining regions (CDRs) separated by framework regions (FRs). A TCR is usually associated with the CD3 complex to form a TCR complex. As used herein, the term “TCR complex” refers to a complex formed by the association of CD3 with TCR. For example, a TCR complex can be composed of a CD3γ chain, a CD3δ chain, two CD3ε chains, a homodimer of CD3ζ chains, a TCRα chain, and a TCRβ chain. Alternatively, a TCR complex can be composed of a CD3γ chain, a CD3δ chain, two CD3ε chains, a homodimer of CD3ζ chains, a TCRγ chain, and a TCRδ chain. A “component of a TCR complex,” as used herein, refers to a TCR chain (i.e., TCRα, TCRβ, TCRγ or TCRδ), a CD3 chain (i.e., CD3γ, CD3δ, CD3ε or CD3ζ) or a complex formed by two or more TCR chains or CD3 chains (e.g., a complex of TCRα and TCRβ, a complex of TCRγ and TCRδ, a complex of CD3ε and CD3δ, a complex of CD3γ and CD3ε, or a sub-TCR complex of TCRα, TCRβ, CD3γ, CD3δ, and two CD3ε chains.

[0827] Therapeutic Agent: The term “therapeutic agent” refers to any agent that, when administered to a subject, has a therapeutic, diagnostic, and/or prophylactic effect and/or elicits a desired biological and/or pharmacological effect. Therapeutic agents of the present disclosure include any of the biocircuit components taught herein either alone or in combination with other therapeutic agents.

[0828] Therapeutically effective amount: As used herein, the term “therapeutically effective amount” means an amount of an agent to be delivered (e.g., nucleic acid, drug, therapeutic agent, diagnostic agent, prophylactic agent, etc.) that is sufficient, when administered to a subject suffering from or susceptible to an infection, disease, disorder, and/or condition, to treat, improve symptoms of, diagnose, prevent, and/or delay the onset of the infection, disease, disorder, and/or condition. In some embodiments, a therapeutically effective amount is provided in a single dose. In some embodiments, a therapeutically effective amount is administered in a dosage regimen comprising a plurality of doses. Those skilled in the art will appreciate that in some embodiments, a unit dosage form may be considered to comprise a therapeutically effective amount of a particular agent or entity if it comprises an amount that is effective when administered as part of such a dosage regimen.

[0829] Triazine: As used herein, “triazine” is a class of nitrogen containing heterocycles with a structure similar to benzene, but wherein three carbon atoms are replaced by nitrogen atoms.

[0830] Treatment or treating: As used herein, the terms “treatment” or “treating” denote an approach for obtaining a beneficial or desired result including and preferably a beneficial or desired clinical result. Such beneficial or desired clinical results include, but are not limited to, one or more of the following: reducing the proliferation of (or destroying) cancerous cells or other diseased, reducing metastasis of cancerous cells found in cancers, shrinking the size of the tumor, decreasing symptoms resulting from the disease, increasing the quality of life of those suffering from the disease, decreasing the dose of other medications required to treat the disease, delaying the progression of the disease, and/or prolonging survival of individuals.

[0831] Survival: As used herein, the term “survival” may be used to denote that a subject is alive at a particular point in time. In some embodiments, the subject may have been diagnosed with cancer. In one aspect, the subject may be an animal model, in which case the subject may be injected with cancer prior to the analysis of survival. Survival may be denoted as median survival which refers to how long patients survive with a disease in general or after a certain treatment. Survival may also be measured using survival ratio.

[0832] Tune: As used herein, the term “tune” means to adjust, balance or adapt one thing in response to a stimulus or toward a particular outcome. In one non-limiting example, the SREs and/or DDs of the present disclosure adjust, balance or adapt the function or structure of compositions to which they are appended, attached or associated with in response to particular stimuli and/or environments.

[0833] Variant: As used herein, the term “variant” refers to a first composition (e.g., a first DD or payload), that is related to a second composition (e.g., a second DD or payload, also termed a “parent” molecule). The variant molecule can be derived from, isolated from, based on or homologous to the parent molecule. The term variant can be used to describe either polynucleotides or polypeptides.

### VIII. Equivalents and Scope

[0834] Those skilled in the art will recognize, or be able to ascertain using no more than routine experimentation, many equivalents to the specific embodiments in accordance with the disclosure described herein. The scope of the present disclosure is not intended to be limited to the above Description, but rather is as set forth in the appended claims.

[0835] In the claims, articles such as “a,” “an,” and “the” may mean one or more than one unless indicated to the contrary or otherwise evident from the context. Claims or descriptions that include “or” between one or more members of a group are considered satisfied if one, more than one, or all of the group members are present in, employed in, or otherwise relevant to a given product or process unless indicated to the contrary or otherwise evident from the context. The disclosure includes embodiments in which exactly one member of the group is present in, employed in, or otherwise relevant to a given product or process. The disclosure includes embodiments in which more than one, or the entire group members are present in, employed in, or otherwise relevant to a given product or process.

[0836] It is also noted that the term “comprising” is intended to be open and permits but does not require the inclusion of additional elements or steps. When the term “comprising” is used herein, the term “consisting of” is thus also encompassed and disclosed.

[0837] Where ranges are given, endpoints are included. Furthermore, it is to be understood that unless otherwise indicated or otherwise evident from the context and understanding of one of ordinal), skill in the art, values that are expressed as ranges can assume any specific value or subrange within the stated ranges in different embodiments of the disclosure, to the tenth of the unit of the lower limit of the range, unless the context clearly dictates otherwise.

[0838] In addition, it is to be understood that any particular embodiment of the present disclosure that falls within the prior art may be explicitly excluded from any one or more of the claims. Since such embodiments are deemed to be known to one of ordinal), skill in the art, they may be excluded even if the exclusion is not set forth explicitly herein. Any particular embodiment of the compositions of the disclosure (e.g., any antibiotic, therapeutic or active ingredient; any method of production; any method of use; etc.) can be excluded from any one or more claims, for any reason, whether or not related to the existence of prior art.

[0839] It is to be understood that the words which have been used are words of description rather than limitation, and that changes may be made within the purview of the appended claims without departing from the true scope and spirit of the disclosure in its broader aspects.

[0840] While the present disclosure has been described at some length and with some particularity with respect to the several described embodiments, it is not intended that it should be limited to any such particulars or embodiments or any particular embodiment, but it is to be construed with references to the appended claims so as to provide the broadest possible interpretation of such claims in view of the prior art and, therefore, to effectively encompass the intended scope of the disclosure. The present disclosure is further illustrated by the following nonlimiting examples.

### EXAMPLES

[0841] In the examples below, constructs and DDs are referred to by their identifiers (e.g., OT-001075). Additional information regarding the constructs and DDs may be found throughout the specification.

### Example 1. Generation of Novel Ligand Responsive DDs by Mutagenesis Screening

### Study Design

[0842] To engineer constructs that display ligand dependent stability, a candidate ligand binding domain (LBD) is selected and a cell-based screen using yellow fluorescent protein (YFP) as a reporter for protein stability is designed to identify mutants of the candidate LBD possessing the desired characteristics of a destabilizing domain: low protein levels in the absence of a ligand of the LBD, (i.e., low basal stability), large dynamic range, robust and predictable dose-response behavior, and rapid kinetics of degradation (Banaszynski, et al., (2006) Cell; 126(5): 995-1004). The candidate LBD binds to a desired ligand but not endogenous signaling molecules.

[0843] The candidate LBD sequence (as a template) is first mutated using a combination of nucleotide analog mutagenesis and error-prone PCR, to generate libraries of mutants based on the template candidate domain sequence. The libraries generated are cloned in-frame at either the 5′- or 3′-ends of the YFP gene, and a retroviral expression system is used to stably transduce the libraries of YFP fusions into NIH3T3 fibroblasts.

[0844] The transduced NIH3T3 cells are subjected to three to four rounds of sorting using fluorescence-activated cell sorting (FACS) to screen the libraries of candidate DDs. Transduced NIH3T3 cells are cultured in the absence of the high affinity ligand of the ligand binding domain (LBD), and cells that exhibit low levels of YFP expression are selected through FACS.

### Screening Strategy I

[0845] The selected cell population is cultured in the presence of the high affinity ligand of the ligand binding domain for a period of time (e.g., 24 hours), at which point cells are sorted again by FACS. Cells that exhibit high levels of YFP expression are selected through FACS and the selected cell population is split into two groups and treated again with the high affinity ligand of the ligand binding domain at different concentrations; one group is treated with the lower concentration of the ligand and the other is treated with a high concentration of the ligand, for a period of time (e.g., 24 hours), at which point cells are sorted again by FACS. Cells expressing mutants that are responsive to lower concentrations of the ligand are isolated.

[0846] The isolated cells responsive to the lower concentration of the ligand are treated with the ligand again and cells exhibiting low fluorescence levels are collected 4 hours following removal of the ligand from the media. This fourth sorting is designed to enrich cells that exhibit fast kinetics of degradation (Iwamoto et al., Chem Biol. 2010 Sep. 24; 17(9): 981-988).

### Screening Strategy II

[0847] The selected cell population is subject to additional one or more sorts by FACS in the absence of high affinity ligand of LBD and cells that exhibit low levels of YFP expression are selected for further analysis. Cells are treated with high affinity ligand of the ligand binding domain, for a period of time (e.g. 24 hours), and sorted again by FACS. Cells expressing high levels of YFP are selected for through FACS. Cells with high expression of YFP are treated with ligand again and cells exhibiting low fluorescence levels are collected 4 hours following removal of the ligand from the media to enrich cells that exhibit fast kinetics of degradation. Any of the sorting steps may be repeated to identify DDs with ligand dependent stability.

[0848] The cells are recovered after sorting. The identified candidate cells are harvested and the genomic DNA is extracted. The candidate DDs are amplified by PCR and isolated. The candidate DDs are sequenced and compared to the LBD template to identify the mutations in candidate DDs.

### Example 2. Novel DDs Derived from Human PDE5 by Site Directed Mutagenesis

[0849] To identify novel destabilizing domain mutations, mutagenic PCR was performed on the open reading frame of human PDE5 catalytic domain (SEQ ID NO: 3) using non-natural nucleotides. The mutant library was ligated in frame with an AcGFP reporter at C-terminus and cloned into pLVX-IRES—Puro vectors. The lentivirus library was then used to infect HEK 293T cells. Cells were selected with puromycin and the library was screened using screening strategies described in Example 1. DNA was extracted from the cell pool, cloned into vectors, and transformed into E. coli. Individual clones were sequenced and cloned in frame with a linker GGSGGGSGG (SEQ ID NO: 77) and AcGFP at C terminus into pLVX.IRES puro. The catalytic domain of wildtype hPDE5 was also cloned into pLVX.IRES. Puro and used as a control. HEK293 cells were transduced with individual clones and selected with puromycin.

[0850] HEK293 cells expressing OT-hPDE5 N terminus constructs were incubated with 10 μM Sildenafil or vehicle control, DMSO for 48 hours and the stability of hPDE5 mutants was evaluated at the protein level. Cell lysates obtained from hPDE5N construct expressing cells were immunoblotted using the AcGFP antibody (Clonetech, Mountain View, Calif.). Samples were also immunoblotted with the GAPDH antibody to ensure uniform protein loading. The immunoblot demonstrated that OT-001078, OT-001080, OT-001076, OT-001083, OT-001084, OT-001070 showed an increase in PDE5-GFP protein levels with Sildenafil treatment when compared to DMSO treatment suggesting a Sildenafil dependent stabilization of the construct. Further, the hPDE5-GFP levels with DMSO treatment in OT-001078, OT-001080, and OT-001076 was lower than in the wildtype hPDE5 construct, OT-001075, indicating that these constructs are destabilized in the absence of ligand.

[0851] The GFP expression in cells expressing hPDE5 constructs was measured by FACS. HEK293 cells expressing OT-001075 to OT-001070 were incubated with 10 μM Sildenafil or vehicle control, DMSO for 48 hours and the mean fluorescence intensity (MFI) was calculated. The stabilization ratio was calculated as the fold change in GFP intensity in Sildenafil treated samples compared to treatment with DMSO (i.e. in the absence of ligand) with the same construct. The destabilizing mutation co-efficient was calculated as the fold change in GFP intensity in the hPDE5 mutant constructs (OT-001078 to OT-001070) compared to the hPDE5 wildtype construct (OT-001075) in the absence of the ligand. Destabilizing mutation co-efficient less than 1 and stabilization ratios greater than 1 are desired in DDs. The results and ratios are presented in Table 21.

TABLE 21
GFP expression in hPDE5 derived DDs

| | | | | Destabilizing |
|---|---|---|---|---|
| | MFI | | Stabilization | mutation |
| Constructs | DMSO | Sildenafil | ratio | coefficient |
| OT-001075 | 11064 | 25789 | 2.33 | |
| OT-001078 | 1649 | 12285 | 7.45 | 0.15 |
| OT-001080 | 1184 | 7303 | 6.17 | 0.11 |
| OT-001081 | 795 | 1065 | 1.34 | 0.07 |
| OT-001074 | 6924 | 29491 | 4.26 | 0.63 |
| OT-001076 | 1542 | 19211 | 12.46 | 0.14 |
| OT-001082 | 3038 | 7078 | 2.33 | 0.27 |
| OT-001083 | 1134 | 13189 | 11.63 | 0.10 |
| OT-001084 | 744 | 15587 | 20.95 | 0.07 |
| OT-001070 | 5053 | 21755 | 4.31 | 0.46 |

[0852] As shown in Table 21, all constructs demonstrated a stabilization ratio greater than one, indicating that all constructs show ligand (Sildenafil) dependent stabilization. The stabilization ratios of OT-001076, OT-001083, and OT-001084 was greater than 10 indicating strong ligand dependent stabilization. Constructs OT-001078, OT-001080, OT-001074, and OT-001070 showed stabilization ratio in the range of 2 to 10 indicating modest ligand dependent stabilization. The destabilizing mutation coefficient observed with all constructs was less than 1 indicating that all hPDE5 mutants are destabilized as compared to the wildtype hPDE5. Notably, constructs OT-001078, OT-001080, OT-001081, OT-001076, OT-001083, and OT-001084 demonstrated destabilizing mutation coefficients less than 0.2 indicating strong destabilizing in the absence of ligand. OT-001076, OT-001083, and OT-001084 were identified as mutants with desirable characteristics of a DD i.e., low basal expression in the absence of ligand and high expression in the presence of ligand.

### Example 3. Sildenafil Dependent Stabilization of hPDE5 Mutants

[0853] HEK293 cells expressing OT-001076, OT-001083, or OT-001084 constructs were incubated with varying concentrations of Sildenafil ranging from 0.005 μM to 10 μM, or vehicle control (DMSO) for 48 hours. The stability of hPDE5 mutants was measured using FACS and mean fluorescence intensity (MFI) of GFP was calculated. The stabilization ratio was calculated as the fold change in GFP intensity in Sildenafil treated samples compared to treatment with DMSO (i.e. absence of ligand) with the same construct. Stabilization ratio greater than 1 is desired in DDs. The MFI and stabilization ratios are presented in Table 22.

TABLE 22
Sildenafil Dose titration

| | OT-001076 | | OT-001083 | | OT-001084 | |
|---|---|---|---|---|---|---|
| | | Stabi- | | Stabi- | | Stabi- |
| Sildenafil | | lization | | lization | | lization |
| dose (μM) | MFI | ratio | MFI | ratio | MFI | ratio |
| Untreated | 7036 | | 4388 | | 3506 | |
| 0.0005 | 6848 | 0.97 | 4422 | 1.01 | 3513 | 1.00 |
| 0.0015 | 7239 | 1.03 | 4557 | 1.04 | 3473 | 0.99 |
| 0.0046 | 7218 | 1.03 | 4397 | 1.00 | 3539 | 1.01 |
| 0.0137 | 7127 | 1.01 | 4274 | 0.97 | 3683 | 1.05 |
| 0.041 | 8097 | 1.15 | 4395 | 1.00 | 4171 | 1.19 |
| 0.123 | 12248 | 1.74 | 4875 | 1.11 | 6463 | 1.84 |
| 0.37 | 22018 | 3.13 | 6753 | 1.54 | 13076 | 3.73 |
| 1.11 | 34171 | 4.86 | 10495 | 2.39 | 23468 | 6.69 |
| 3.33 | 49220 | 7.00 | 17960 | 4.09 | 34615 | 9.87 |
| 10 | 67084 | 9.53 | 32480 | 7.40 | 47793 | 13.63 |

[0854] As shown in Table 22, all three constructs showed an increase in stabilization ratio with increasing doses of Sildenafil indicating a ligand dose-dependent stabilization of hPDE5 mutants. The half maximal effective concentration or EC₅₀ was approximately 1 μM.

[0855] Sildenafil dependent stabilization of hPDE5 mutants was also measured over a period of time. HEK293 cells expressing OT-001076, OT-001083, and OT-001084 were treated with 10 μM of Sildenafil for 2, 4, 6, 16, 24, and 48 hours. The stability of hPDE5 mutants was measured using FACS and mean fluorescence intensity (MFI) of GFP was calculated. The stabilization ratio was calculated as the fold change in GFP intensity in Sildenafil treated samples compared to treatment with DMSO (i.e. absence of ligand) with the same construct. Stabilization ratio greater than 1 is desired in DDs. The MFI and stabilization ratios are presented in Table 23.

TABLE 23
Time course of Sildenafil treatment

| | OT-001076 | | OT-001083 | | OT-001084 | |
|---|---|---|---|---|---|---|
| | | Stabi- | | Stabi- | | Stabi- |
| Time | | lization | | lization | | lization |
| (h) | MFI | ratio | MFI | ratio | MFI | ratio |
| Parental | 675 | — | 667 | — | 673 | — |
| 0 | 7921 | — | 5304 | — | 4195 | — |
| 2 | 12088 | 1.54 | 7290 | 1.37 | 6337 | 1.51 |
| 4 | 14046 | 1.77 | 8675 | 1.64 | 8159 | 1.95 |
| 6 | 16710 | 2.11 | 10929 | 2.06 | 10203 | 2.43 |
| 16 | 39029 | 4.93 | 19034 | 3.59 | 26279 | 6.26 |
| 24 | 51534 | 6.51 | 27246 | 5.14 | 36516 | 8.71 |
| 48 | 70811 | 8.94 | 34796 | 6.56 | 47407 | 11.30 |

[0856] As shown in Table 23, all three constructs showed an increase in stabilization ratio with increasing duration of treatment with Sildenafil indicating a time-dependent increase in stabilization of hPDE5 mutants.

### Example 4. Vardenafil Dependent Stabilization of hPDE5 DDs

[0857] Vardenafil has an IC so of 0.7 nM and is a more potent inhibitor of hPDE5 than Sildenafil which has an IC₅₀ of 3.9 nM (Doggrell S, et al. (2007) Int J Impot. Res 19(3):281-95). To test if Vardenafil is capable of stabilizing hPDE5 DDs, HEK293 cells expressing OT-001076, OT-001083, and OT-001084 were treated with Vardenafil at concentrations ranging from 0.0005 μM to 10 μM for 48 hours. The stability of hPDE5 mutants was measured using FACS and mean fluorescence intensity (MFI) of GFP was calculated. The stabilization ratio was calculated as the fold change in GFP intensity in Vardenafil treated samples compared to treatment with DMSO (i.e. absence of ligand) with the same construct. Stabilization ratio greater than 1 is desired in DDs. The MFI and stabilization ratios are presented in Table 24.

TABLE 24
Vardenafil Dose Titration

| | OT-001076 | | OT-001083 | | OT-001084 | |
|---|---|---|---|---|---|---|
| | | Stabi- | | Stabi- | | Stabi- |
| Vardenafil | | lization | | lization | | lization |
| dose (μM) | MFI | ratio | MFI | ratio | MFI | ratio |
| Parental | 988 | — | 999 | — | 980 | — |
| 0 | 11287 | — | 7971 | — | 5841 | — |
| 0.0005 | 11770 | 1.04 | 7894 | 0.99 | 5954 | 1.02 |
| 0.0015 | 12965 | 1.15 | 8099 | 1.02 | 6601 | 1.13 |
| 0.0046 | 18739 | 1.66 | 8897 | 1.12 | 9946 | 1.70 |
| 0.0137 | 36940 | 3.27 | 12440 | 1.56 | 21894 | 3.75 |
| 0.041 | 58755 | 5.21 | 18527 | 2.32 | 39580 | 6.78 |
| 0.123 | 91994 | 8.15 | 33614 | 4.22 | 63622 | 10.89 |
| 0.37 | 125140 | 11.09 | 61010 | 7.65 | 86481 | 14.81 |
| 1.11 | 144927 | 12.84 | 95149 | 11.94 | 105930 | 18.14 |
| 3.33 | 172990 | 15.33 | 134306 | 16.85 | 123757 | 21.19 |
| 10 | 188068 | 16.66 | 166236 | 20.86 | 139165 | 23.83 |

[0858] As shown in Table 24, all three constructs showed an increase in stabilization ratio with increasing doses of Vardenafil indicating a Vardenafil dose-dependent stabilization of hPDE5 DDs. The half maximal effective concentration or EC₅₀ was approximately 0.1-0.3 μM which was less than the EC₅₀ observed with sildenafil (−1 μM) indicating that Vardenafil may stabilize hPDE5 DDs more potently than sildenafil.

[0859] The ability of Vardenafil to stabilize hPDE5 derived DDs was measured in cell lines stably transduced with hPDE5 DDs e.g. HEK293 cells, HCT-116 cells, and SKOV-3 cells. Cells were transduced with OT-001076, OT-001083, and OT-001084 constructs and incubated with 1 μM or 10 μM Vardenafil or with DMSO for 48 hours. The stability of hPDE5 mutants was measured using FACS and mean fluorescence intensity (MFI) of GFP was calculated. The stabilization ratio was calculated as the fold change in GFP intensity in Vardenafil treated samples compared to treatment with DMSO (i.e. absence of ligand) with the same construct. Stabilization ratio greater than 1 is desired in DDs. The MFI and stabilization ratios are presented in Table 25.

TABLE 25
Vardenafil Dose Titration

| | OT-001076 | | OT-001083 | | OT-001084 | |
|---|---|---|---|---|---|---|
| | (hPDE5- | | (hPDE5- | | (hPDE5- | |
| | F736A) | | Y728L) | | R732L) | |
| | | Stabi- | | Stabi- | | Stabi- |
| | | lization | | lization | | lization |
| Dose | MFI | ratio | MFI | ratio | MFI | ratio |
| DMSO | 9604 | — | 5191 | — | 3605 | — |
| Vardenafil | 110603 | 11.52 | 68816 | 13.26 | 81484 | 22.60 |
| (1 μM) | | | | | | |
| Vardenafil | 143351 | 14.93 | 123150 | 23.72 | 106403 | 29.52 |
| (10 μM) | | | | | | |

[0860] As shown in Table 25, all three constructs showed an increase in stabilization ratio with both doses of Vardenafil indicating a ligand dose-dependent stabilization of hPDE5 DDs. These data are consistent with the results observed with the dose response of Vardenafil observed in Table 24.

### Example 5. Characterization of hPDE5 Combination Mutants

[0861] Single destabilizing mutants identified were combined to test if the combining two or more mutations generates domains with greater destabilizing potential either additively or synergistically. Desirable qualities of a DD include, low expression of the SRE in the absence of ligand and ligand dependent stabilization of the SRE. Constructs were generated using DDs linked to GFP using an SG linker. HCT-116 cells were stably transduced with the constructs described above and treated with 10 μM stabilizing ligands, Sildenafil, or Vardenafil or DMSO for 48 hours. As a control, parental untransduced cells and cells expressing OT-001075, or OT-001224 were also included in the analysis. The mean fluorescence intensity (MFI) of GFP was analyzed by FACS. The stabilization ratio was calculated as the fold change in GFP intensity in Sildenafil treated samples compared to treatment with DMSO (i.e. in the absence of ligand) with the same construct. The destabilizing mutation coefficient was calculated as the fold change in GFP intensity in the hPDE5 mutant constructs compared to the hPDE5 wildtype construct (OT-001216) in the absence of the ligand. Destabilizing mutation coefficient less than 1 are desirable. Stabilization ratios greater than 1 are desired in DDs. The results and ratios are presented in Table 26.

TABLE 26
Expression of hPDE5 combination mutants

| | | | | Sildenafil | Vardenafil | Destabilizing |
|---|---|---|---|---|---|---|
| | MFI | | | Stabilization | Stabilization | mutation |
| Construct | DMSO | Sildenafil | Vardenafil | ratio | ratio | coefficient |
| Parental | 2093 | 3735 | 3200 | 1.78 | 1.53 | — |
| OT-001075 | 42973 | 53736 | 49344 | 1.25 | 1.15 | — |
| OT-001224 | 150356 | 187845 | 170129 | 1.25 | 1.13 | — |
| OT-001216 | 64942 | 66860 | 67388 | 1.03 | 1.04 | — |
| OT-001222 | 12633 | 13862 | 53848 | 1.10 | 4.26 | 0.19 |
| OT-001223 | 8625 | 48592 | 109667 | 5.63 | 12.72 | 0.13 |

[0862] As shown in Table 26, only the OT-001223 construct with R732L and D764N mutations showed Sildenafil dependent stabilization with a ratio of 5.63. Similar results were obtained with OT-001223 upon treatment with Vardenafil. OT-001222 however only showed Vardenafil dependent stabilization with a ratio of 4.26. Both constructs were destabilized in the absence of ligand. As expected, hPDE5 wildtype constructs did not show any significant ligand dependent stabilization. These data suggest that the strategy of combining mutations may be used to identify improved DDs as well as DDs that are stabilized by specific ligands.

[0863] Protein expression analysis of the combination mutants was performed in parallel via western blot. HCT 116 cells expressing OT-001222, and OT-001223 were treated with 10 μM Vardenafil for 24 hours and immunoblotted for AcGFP using anti AcGFP antibodies (catalog no. 63277, Clonetech, Mountain View, Calif.). GAPDH levels were also analyzed to ensure even protein loading. OT-001222 with hPDE5 (F736A, D764N) and OT-001223 with hPDE5 (R732L, D764N) constructs consisting showed Vardenafil dependent stabilization of AcGFP protein levels as measured via western blotting. This result is consistent with the FACS analysis.

[0864] The response of hPDE5 combination mutants to increasing doses of sildenafil was tested. HCT116 cells transduced with hPDE5 constructs were treated with Sildenafil for 24 hours at doses ranging from 0.04 μM to 30 μM. Mean fluorescence intensity (MFI) was measured by FACS. Parental HCT116 and cells expressing OT-001216 wildtype construct were also included as controls. The response of the combination mutants to Sildenafil was compared to the response of the single mutant construct OT-001217. The stabilization ratio was calculated as the fold change in GFP intensity in Sildenafil treated samples compared to treatment with DMSO (i.e. in the absence of ligand) with the same construct. The destabilizing mutation coefficient ratio was calculated as the fold change in GFP intensity in the hPDE5 mutant constructs compared to the hPDE5 wildtype construct (OT-001216) in the absence of the ligand. Destabilizing mutation coefficient ratios less than 1 are desirable. Stabilization ratios greater than 1 are desired in DDs. The results and stabilization ratios are presented in Table 27.

TABLE 27
Sildenafil dose response of combination mutants

| | OT-001216 | | OT-001217 | | OT-001222 | | OT-001223 | |
|---|---|---|---|---|---|---|---|---|
| | | Stabi- | | Stabi- | | Stabi- | | Stabi- |
| Dose (μM | | lization | | lization | | lization | | lization |
| Sildenafil) | MFI | ratio | MFI | ratio | MFI | ratio | MFI | ratio |
| DMSO | 62116 | — | 6172 | — | 10736 | — | 7093 | — |
| 30 | 75478 | 1.22 | 47992 | 7.78 | 26837 | 2.50 | 69864 | 9.85 |
| 10 | — | — | 27693 | 4.49 | 13263 | 1.24 | 34587 | 4.88 |
| 3.33 | — | — | 23549 | 3.82 | 10384 | 0.97 | 22392 | 3.16 |
| 1.11 | — | — | 15952 | 2.58 | 9636 | 0.90 | 10353 | 1.46 |
| 0.37 | — | — | 12739 | 2.06 | 9802 | 0.91 | 6961 | 0.98 |
| 0.12 | — | — | 6441 | 1.04 | 8619 | 0.80 | 6603 | 0.93 |
| 0.04 | — | — | 5299 | 0.86 | 8688 | 0.81 | 5948 | 0.84 |

[0865] As shown in Table 27, the stabilization ratios for OT-001223 construct obtained across multiple doses of sildenafil were higher than the single mutant OT-001217 construct. The combination mutant 025, achieved stabilization ratios much lower than the OT-001223 construct for any given ligand dose. The destabilizing mutation co-efficient ratios obtained for the OT-001217 (ratio=0.1), OT-001222 (ratio=0.17), and OT-001223 (ratio=0.1) indicate that all constructs are destabilized in the absence of the ligand. These data indicate that the combination mutant OT-001223 is strong DD candidate when the stabilizing ligand is Sildenafil.

[0866] The response of hPDE5 combination mutants to increasing doses of Vardenafil was tested. HCT116 cells transduced with hPDE5 constructs were treated with Vardenafil for 24 hours at doses ranging from 0.04 μM to 30 μM. Mean fluorescence intensity (MFI) was measured by FACS. Parental HCT116 and cells expressing OT-001216 comprising hPDE5 wildtype construct were also included as controls. The response of the combination mutants to Vardenafil was compared to the response of the single mutant construct OT-001217. The stabilization ratio was calculated as the fold change in GFP intensity in Vardenafil treated samples compared to treatment with DMSO (i.e. in the absence of ligand) with the same construct. The destabilizing mutation coefficient ratio was calculated as the fold change in GFP intensity in the hPDE5 mutant constructs compared to the hPDE5 wildtype construct (OT-001216) in the absence of the ligand. Destabilizing mutation co-efficient ratios less than 1 are desirable. Stabilization ratios greater than 1 are desired in DDs. The results and stabilization ratios are presented in Table 28.

TABLE 28
Vardenafil dose response of combination mutants

| | OT-001216 | | OT-001217 | | OT-001222 | | OT-001223 | |
|---|---|---|---|---|---|---|---|---|
| | | Stabi- | | Stabi- | | Stabi- | | Stabi- |
| Dose (μM | | lization | | lization | | lization | | lization |
| Vardenafil) | MFI | ratio | MFI | ratio | MFI | ratio | MFI | ratio |
| DMSO | 62116 | — | 7829 | — | 7694 | — | 5156 | |
| 30 | 70898 | 1.14 | 75323 | 9.62 | 46109 | 5.99 | 55843 | 10.83 |
| 10 | — | — | 39089 | 4.99 | 29971 | 3.90 | 35191 | 6.83 |
| 3.33 | — | — | 35564 | 4.54 | 29520 | 3.84 | 40408 | 7.84 |
| 1.11 | — | — | 30879 | 3.94 | 12634 | 1.64 | 32868 | 6.37 |
| 0.37 | — | — | 24847 | 3.17 | 6667 | 0.87 | 14543 | 2.82 |
| 0.12 | — | — | 16866 | 2.15 | 7314 | 0.95 | 10676 | 2.07 |
| 0.04 | — | — | 14745 | 1.88 | 6174 | 0.80 | 5497 | 1.07 |

[0867] As shown in Table 28, the stabilization ratios for OT-001223 construct obtained across multiple doses of Vardenafil were higher than the single mutant OT-001217 construct. The combination mutant 025, achieved stabilization ratios much lower than the OT-001223 construct for any given ligand dose. The destabilizing mutation coefficient obtained for the OT-001217 (ratio=0.13), OT-001222 (ratio=0.12), and OT-001223 (ratio=0.08) indicate that all constructs are destabilized in the absence of the ligand. These data indicate that the combination mutant OT-001223 is strong DD candidate when the stabilizing ligand is Vardenafil.

[0868] The response of hPDE5 combination mutants to increasing doses of Tadalafil was tested. HCT116 cells transduced with hPDE5 constructs were treated with Tadalafil for 24 hours at doses ranging from 0.14 to 100 μM. Mean fluorescence intensity (MFI) was measured by FACS. Parental HCT116 and cells expressing OT-001216 comprising hPDE5 wildtype construct were also included as controls. The response of the combination mutants to Tadalafil was compared to the response of the single mutant construct OT-001217. The stabilization ratio was calculated as the fold change in GFP intensity in Tadalafil treated samples compared to treatment with DMSO (i.e. in the absence of ligand) with the same construct. The destabilizing mutation coefficient was calculated as the fold change in GFP intensity in the hPDE5 mutant constructs compared to the hPDE5 wildtype construct (OT-001216) in the absence of the ligand. Destabilizing mutation coefficient less than 1 are desirable. Stabilization ratios greater than 1 are desired in DDs. The results and stabilization ratios are presented in Table 29.

TABLE 29
Tadalafil dose response of combination mutants

| | OT-001216 | | OT-001217 | | OT-001222 | | OT-001223 | |
|---|---|---|---|---|---|---|---|---|
| | | Stabi- | | Stabi- | | Stabi- | | Stabi- |
| Dose (μM | | lization | | lization | | lization | | lization |
| Vardenafil) | MFI | ratio | MFI | ratio | MFI | ratio | MFI | ratio |
| DMSO | 36453 | — | 3806 | — | 6043 | — | 3746 | — |
| 100 | 58468 | 1.60 | 34041 | 8.94 | 23542 | 3.90 | 30029 | 8.02 |
| 33.33 | — | — | 44713 | 11.75 | 20464 | 3.39 | 30028 | 8.02 |
| 11.11 | — | — | 30641 | 8.05 | 13789 | 2.28 | 24499 | 6.54 |
| 3.7 | — | — | 26480 | 6.96 | 9515 | 1.57 | 17317 | 4.62 |
| 1.23 | — | — | 20458 | 5.38 | 8634 | 1.43 | 9283 | 2.48 |
| 0.41 | — | — | 13206 | 3.47 | 6141 | 1.02 | 6044 | 1.61 |
| 0.14 | — | — | 8512 | 2.24 | 5768 | 0.95 | 4682 | 1.25 |

[0869] As shown in Table 29, the stabilization ratios for OT-001223 construct obtained across multiple doses of Tadalafil were higher than the single mutant OT-001217 construct, except at the 100 μM concentration of the drug. The combination mutant OT-001222, achieved stabilization ratios much lower than the OT-001223 construct for any given ligand dose. The destabilizing mutation coefficient obtained for the OT-001217 (ratio=0.1), OT-001222 (ratio=0.17), and OT-001223 (ratio=0.1) indicate that all constructs are destabilized in the absence of the ligand. These data indicate that the combination mutant OT-001223 is strong DD candidate when the stabilizing ligand is Tadalafil.

[0870] The stabilization ratios obtained for the highest concentrations of all three ligands, Sildenafil, Vardenafil and Tadalafil for each of the constructs were compared and are shown Table 30.

TABLE 30
Comparative analysis of hPDE5 ligands

| | Stabilization ratio | | | |
|---|---|---|---|---|
| Ligand | OT-001216 | OT-001217 | OT-001222 | OT-001223 |
| Sildenafil | 1.22 | 7.78 | 2.5 | 9.85 |
| (30 μM) | | | | |
| Vardenafil | 1.14 | 9.62 | 5.99 | 10.83 |
| (30 μM) | | | | |
| Tadalafil | 1.60 | 8.94 | 3.9 | 8.02 |
| (100 μM) | | | | |

[0871] As shown in Table 30, based on the stabilization ratios it was evident that OT-001223 was effectively stabilized by all three ligands, in comparison to both the single mutant construct as well as the other combination mutant construct (OT-001222). Both combination mutants were most effectively stabilized by Vardenafil, which is the most potent inhibitor of hPDE5. Construct OT-001222 was stabilized more effectively by Tadalafil than Sildenafil, although only by a small margin—this observation is noteworthy as Sildenafil is a much stronger inhibitor of hPDE5 than Tadalafil

[0872] The response of hPDE5 combination mutants to increasing duration treatment with sildenafil was tested. HCT116 cells transduced with hPDE5 constructs were treated with Sildenafil at 0.5 or 5 μM for 0-72 hours. Mean fluorescence intensity (MFI) was measured by FACS. The response of the combination mutants to Sildenafil was compared to the response of the single mutant construct OT-001217. The stabilization ratio was calculated as the fold change in GFP intensity in Sildenafil treated samples compared to treatment with DMSO (i.e. in the absence of ligand) with the same construct. The destabilizing mutation coefficient was calculated as the fold change in GFP intensity in the hPDE5 mutant constructs compared to the hPDE5 wildtype construct (OT-001216) in the absence of the ligand. Destabilizing mutation coefficient less than 1 are desirable. Stabilization ratios greater than 1 are desired in DDs. The results and stabilization ratios for time course experiments with 5 or 0.5 μM are presented in Table 31 and Table 32 respectively.

TABLE 31
Response to Sildenafil (5 μM) over time

| | OT-001217 | | OT-001222 | | OT-001223 | |
|---|---|---|---|---|---|---|
| | | Stabi- | | Stabi- | | Stabi- |
| Time | | lization | | lization | | lization |
| (hours) | MFI | ratio | MFI | ratio | MFI | ratio |
| 0 | 2668 | — | 3364 | — | 2769 | — |
| 72 | 58479 | 21.92 | 26995 | 8.02 | 90413 | 32.65 |
| 48 | 46604 | 17.47 | 22061 | 6.56 | 65233 | 23.56 |
| 24 | 20955 | 7.85 | 16705 | 4.97 | 27962 | 10.10 |
| 20 | 15529 | 5.82 | 13280 | 3.95 | 21603 | 7.80 |
| 16 | 14855 | 5.57 | 12280 | 3.65 | 17600 | 6.36 |
| 12 | 9097 | 3.41 | 9199 | 2.73 | 10451 | 3.77 |
| 8 | 5672 | 2.13 | 7021 | 2.09 | 6179 | 2.23 |
| 4 | 4236 | 1.59 | 6314 | 1.88 | 4266 | 1.54 |

TABLE 32
Response to Sildenafil (0.5 μM) over time

| | OT-001217 | | OT-001222 | | OT-001223 | |
|---|---|---|---|---|---|---|
| | | Stabi- | | Stabi- | | Stabi- |
| Time | | lization | | lization | | lization |
| (hours) | MFI | ratio | MFI | ratio | MFI | ratio |
| 0 | 2727 | — | 3245 | — | 2611 | — |
| 72 | 58786 | 21.56 | 6906 | 2.13 | 31835 | 12.19 |
| 48 | 45754 | 16.78 | 6682 | 2.06 | 27231 | 10.43 |
| 24 | 20524 | 7.53 | 6144 | 1.89 | 17848 | 6.84 |
| 20 | 16142 | 5.92 | 6003 | 1.85 | 13318 | 5.10 |
| 16 | 14469 | 5.31 | 5600 | 1.73 | 11390 | 4.36 |
| 12 | 9058 | 3.32 | 5122 | 1.58 | 8126 | 3.11 |
| 8 | 5461 | 2.00 | 5083 | 1.57 | 5742 | 2.20 |
| 4 | 4127 | 1.51 | 5322 | 1.64 | 3870 | 1.48 |

[0873] As shown in Table 31 and Table 32, the stabilization ratios for OT-001223 construct obtained over time at 5 μM dose of Sildenafil were higher than the single mutant OT-001217 construct. However, this pattern was reversed at lower dose of 0.5 μM where the single mutant construct showed greater stabilization. The combination mutant OT-001222, achieved stabilization ratios much lower than the OT-001223 construct for both ligand doses at any given time. These data indicate that the choice of a suitable DD may sometime depend on the duration of the ligand treatment desired as well as the concentration of the ligand that is available for use in a system.

### Example 6. Vardenafil Dose Response Curve in hPDE5 Mutants

[0874] Combination mutants were generated as described in Example 9. The response of hPDE5 combination mutants to increasing doses of Vardenafil was tested in HCT116 cells transduced with hPDE5 constructs were treated with Vardenafil for 48 hours at doses ranging from 0.1 to 10 μM or vehicle control (DMSO). Mean fluorescence intensity (MFI) of GFP was measured by FACS. The response of the combination mutants to Vardenafil was compared to the response of the single mutant construct OT-001217. The fold change in MFI over DMSO is presented in Table 33.

TABLE 33
Vardenafil dose response

| Sildenafil (μM) | OT-001217 | OT-001222 | OT-001223 |
|---|---|---|---|
| 0.01 | 4026 | 4444 | 3815 |
| 0.04 | 6970 | 4934 | 3839 |
| 0.12 | 14832 | 5133 | 4870 |
| 0.37 | 26429 | 5007 | 8107 |
| 1.11 | 34932 | 5751 | 21857 |
| 3.33 | 49739 | 10516 | 49105 |
| 10.00 | 51306 | 24927 | 64734 |

[0875] As shown in Table 33, the ligand dependent stabilization obtained for OT-001217 construct was observed at lower doses i.e. 0.1 and 0.3 micro molar concentrations of Vardenafil compared to the other two constructs, indicating that very low doses of the ligand are sufficient to stabilize this hPDE5 mutant. The OT-001223 construct did not show ligand dependent stabilization at similar doses. However, at the highest dose of Vardenafil the GFP expression obtained was much higher than OT-001217. In contrast, OT-001222 showed very little expression of GFP at lower doses and only modest GFP expression compared to the other two constructs at the higher doses. These experiments indicate that combination of single hPDE5 DD mutations produces synergistic effects not predicted by the properties of the single mutants. Thus, based on the properties of the payload of interest and the expression levels desired, suitable hPDE5 DDs may be selected.

### Example 7. Sildenafil and Tadalafil Dose Response Curve in hPDE5 Mutants

[0876] Combination mutations were generated as previously described in Example 9. The response of HCT 116 cells expressing hPDE5 combination mutants to increasing doses ranging from 0.1 μM to 100 μM of Tadalafil and Sildenafil for 48 hours or vehicle control (DMSO) was tested. Mean fluorescence intensity (MFI) was measured by FACS. The response of the combination mutants to ligand treatment was compared to the single mutant construct, OT-001217. The MFI with ligand treatment is shown in Table 34 and Table 35.

TABLE 34
Tadalafil dose response

| Tadalafil (μM) | OT-001217 | OT-001222 | OT-001223 |
|---|---|---|---|
| 0.14 | 3616 | 4328 | 3720 |
| 0.41 | 5811 | 5002 | 3804 |
| 1.23 | 11694 | 5503 | 4810 |
| 3.70 | 24185 | 5744 | 7893 |
| 11.11 | 40380 | 8299 | 24617 |
| 33.33 | 57233 | 15831 | 52927 |
| 100.00 | 72587 | 31020 | 84334 |

TABLE 35
Sildenafil dose response

| Sildenafil (μM) | OT-001217 | OT-001222 | OT-001223 |
|---|---|---|---|
| 0.14 | 3771 | 4398 | 3401 |
| 0.41 | 5463 | 4832 | 3681 |
| 1.23 | 10479 | 5031 | 4477 |
| 3.70 | 22441 | 4974 | 7625 |
| 11.11 | 35561 | 5675 | 24104 |
| 33.33 | 52029 | 9677 | 51416 |
| 100.00 | 101226 | 37494 | 136010 |

[0877] As shown in Table 34 and 35, ligand dose dependent stabilization was obtained with all three constructs. The dose dependent stabilization at lower doses (e.g., up to 11 μM of Sildenafil and Tadalafil) is more evident in the single mutant construct, OT-001217, compared to the other two constructs. At higher concentrations of ligand, both OT-001222 and OT-001223 showed ligand dependent stabilization. In fact, OT-001223 construct demonstrated much higher MFI values at 33 and 100 μM, compared to both OT-001217 and OT-001222. These experiments indicate that combination of single hPDE5 DD mutations produces synergistic effects not predicted by the properties of the single mutants. Thus, suitable hPDE5 DDs may be selected based on the properties of the payload of interest and the expression levels desired,

### Example 8. Kinetics of hPDE5 Mutants

[0878] The off kinetics of hPDE5 mutants, OT-001217 and OT-001223 was tested by treating HCT 116 cells expressing these constructs or the wild type control construct OT-001216. Cells were treated with ligand for 48 hours. The media containing the ligand was removed and fresh media without the ligand was added. MFI was analyzed by FACS at 0 hours (i.e., prior to the beginning of the experiment), 48 hours after ligand treatment, as well as at several time points after the ligand washout, up until 96 hours. The stabilization ratio was calculated as the fold change in GFP intensity in ligand treated samples compared to the GFP intensity in the absence of ligand with the same construct. The results are shown in Table 36.

TABLE 36
Off-Kinetics

| | OT-001217 | | OT-001223 | | OT-001216 (WT) | |
|---|---|---|---|---|---|---|
| | | Stabi- | | Stabi- | | Stabi- |
| Time | | lization | | lization | | lization |
| (hrs) | MFI | ratio | MFI | ratio | MFI | ratio |
| 0 | 3675 | — | 3648 | — | 45512 | — |
| 48 | 71538 | 19.47 | 57105 | 15.65 | 102137 | 2.24 |
| 50 | 63832 | 17.37 | 41074 | 11.26 | 97225 | 2.14 |
| 52 | 51544 | 14.03 | 26926 | 7.38 | 96264 | 2.12 |
| 54 | 41800 | 11.37 | 16391 | 4.49 | 95410 | 2.10 |
| 56 | 25521 | 6.94 | 7700 | 2.11 | 81733 | 1.80 |
| 60 | 19598 | 5.33 | 5635 | 1.54 | 84323 | 1.85 |
| 72 | 8062 | 2.19 | 4062 | 1.11 | 70151 | 1.54 |
| 80 | 6427 | 1.75 | 3587 | 0.98 | 63208 | 1.39 |
| 96 | 4319 | 1.18 | 3443 | 0.94 | 55918 | 1.23 |

[0879] As shown in Table 36, the stabilization ratio of hPDE5 mutants decreased following removal of the ligand. The stabilization ratio values decreased more quickly in the combination mutant OT-001223 compared to OT-001217 construct suggesting the destabilization of the DD is achieved more quickly in the OT-001223 construct. The ligand dependent stabilization as indicated by the stabilization ratio, achieved with OT-001223 construct is lower than OT-001217 construct, which may also contribute to the superior off kinetics seen with the OT-001223 construct.

### Example 9. Behavior of hPDE5 C Terminal Mutants

[0880] The ability of hPDE5 mutants to tune the expression of payloads when appended to the C terminal of the payload was tested. OT-001226 was compared to OT-001232. NIH 3T3 cells were incubated with varying doses of Sildenafil or Vardenafil for 48 hours and MFIs were analyzed by FACS. The stabilization ratio was calculated as the fold change in GFP intensity in ligand treated samples compared to the GFP intensity in the absence of ligand with the same construct. The results are shown in Table 37.

TABLE 37
hPDES C-terminal mutant's response to Sildenafil and Vardenafil

| | OT-001226 | | | | OT-001232 | | | |
|---|---|---|---|---|---|---|---|---|
| | Sildenafil | | Vardenafil | | Sildenafil | | Vardenafil | |
| Ligand | | Stabi- | | Stabi- | | Stabi- | | Stabi- |
| concentration | | lization | | lization | | lization | | lization |
| (nM) | MFI | ratio | MFI | ratio | MFI | ratio | MFI | ratio |
| 0 | 102 | — | | — | 1476 | — | 1410 | — |
| 100 | 278 | 2.73 | 971 | 9.34 | 1639 | 1.11 | 1614 | 1.14 |
| 300 | 562 | 5.51 | 1165 | 11.20 | 1648 | 1.12 | 1656 | 1.03 |
| 1000 | 1039 | 10.19 | 1235 | 11.88 | 1780 | 1.21 | 1686 | 1.02 |
| 3000 | 1276 | 12.51 | 1299 | 12.49 | 1784 | 1.21 | 1721 | 1.02 |
| 10000 | 1442 | 14.14 | 1309 | 12.59 | 1888 | 1.28 | 1721 | 1.00 |

[0881] As shown in Table 37, OT-001226 construct showed stabilization ratios greater than one, indicating that both Vardenafil and Tadalafil ligand could stabilize GFP expression. As expected, the wildtype construct, OT-001232 did not stabilization much greater than one, indicating that virtually no stabilization was achieved with the wildtype construct.

[0882] GFP expression was also measured at 24 and 48 hours to monitor the dependence of hPDE5-DD GFP constructs on the duration of ligand exposure. The results are shown in Table 38 and Table 39.

TABLE 38
Dose response of hPDE5 C-terminal mutants with Sildenafil treatment

| | OT-001226 | | | | OT-001232 | | | |
|---|---|---|---|---|---|---|---|---|
| | 24 hours | | 48 hours | | 24 hours | | 48 hours | |
| Sildenafil | | Stabi- | | Stabi- | | Stabi- | | Stabi- |
| concentration | | lization | | lization | | lization | | lization |
| (nM) | MFI | ratio | MFI | ratio | MFI | ratio | MFI | ratio |
| 0 | 108 | | 102 | — | 1385 | — | 1476 | — |
| 100 | 243 | 2.25 | 278 | 2.73 | 1495 | 1.08 | 1639 | 1.11 |
| 300 | 380 | 3.52 | 562 | 5.51 | 1565 | 1.13 | 1648 | 1.12 |
| 1000 | 575 | 5.32 | 1039 | 10.19 | 1669 | 1.21 | 1780 | 1.21 |
| 3000 | 666 | 6.17 | 1276 | 12.51 | 1831 | 1.32 | 1784 | 1.21 |
| 10000 | — | — | 1442 | 14.14 | — | — | 1888 | 1.28 |

TABLE 39
Dose response of hPDES C-terminal mutants with Vardenafil treatment

| | OT-001226 | | | | OT-001232 | | | |
|---|---|---|---|---|---|---|---|---|
| | 24 hours | | 48 hours | | 24 hours | | 48 hours | |
| Vardenafil | | Stabi- | | Stabi- | | Stabi- | | Stabi- |
| concentration | | lization | | lization | | lization | | lization |
| (nM) | MFI | ratio | MFI | ratio | MFI | ratio | MFI | ratio |
| 0 | 108 | | 104 | — | 1360 | — | 1410 | — |
| 100 | 684 | 6.33 | 971 | 9.34 | 1439 | 1.06 | 1614 | 1.14 |
| 300 | 761 | 7.05 | 1165 | 11.20 | 1730 | 1.27 | 1656 | 1.17 |
| 1000 | 863 | 7.99 | 1235 | 11.88 | 1721 | 1.27 | 1666 | 1.18 |
| 3000 | 856 | 7.93 | 1299 | 12.49 | 1606 | 1.18 | 1721 | 1.22 |
| 10000 | 889 | 8.23 | 1309 | 12.59 | 1678 | 1.23 | 1721 | 1.22 |

[0883] Consistent with the responses measured at 48 hours, the responses measured at 24 hours showed that the hPDE5 mutant construct stabilized GFP expression as evidenced by the stabilization ratios greater than one, while the wildtype construct, OT-001232 showed stabilization ratios around 1, indicating no ligand dependent stabilization. Results were consistent between Sildenafil and Vardenafil treatment. It was noted that the stabilization ratios obtained at 48 hours was much greater than the values obtained at 24 hours suggesting, a time dependent stabilization of GFP expression. Similar results were obtained by western blot analysis using a GFP antibody. At 0.1 μM sildenafil, modest stabilization of GFP protein levels was observed via western blot. The stabilization of GFP increased when the cells were treated with 1 μM sildenafil Both 0.1 μM and 1 μM dose of vardenafil showed stabilization of GFP levels. These trends were observed both at 24 hours and 48 hours. All comparisons were made against cells that were not treated with either ligand.

[0884] The response of hPDE5C terminal mutants to lower doses of Vardenafil was also tested and is shown in Table 40.

TABLE 40
Low dose response of hPDE5 C-terminal
mutants with Vardenafil treatment

| | | Stabilization |
|---|---|---|
| Vardenafil (nM) | MFI | ratio |
| 0 | 137 | — |
| 1 | 163 | 1.19 |
| 3 | 230 | 1.68 |
| 10 | 477 | 3.48 |
| 30 | 909 | 6.64 |
| 100 | 1417 | 10.34 |
| 1000 | 1789 | 13.06 |

[0885] As shown in Table 40, the hPDE5C terminal mutant showed a dose dependent stabilization even at lower doses of Vardenafil as indicated by the increase in the stabilization ratio. Thus, even low nano molar doses of Vardenafil are sufficient to induce ligand dependent stabilization of hPDE5 DD.

### Example 10. Behavior of hPDE5 Luciferase Constructs

[0886] PDE5 derived DDs were appended to reporter payload such as luciferase to generate constructs OT-001227, OT-001228, OT-001229, and OT-001231 constructs. Such constructs may be useful to study in the dynamics of destabilization and stabilization of DDs in vivo. These constructs were transduced into HCT116 cells. Cells were seeded into 96 well plates at 2000 cells per well and incubated with 1 μM or DMSO Vardenafil for 48 hours. The luciferase activity was then measured using a plate reader assay. Parental untransduced cells were used as a control to measure the background fluorescence levels. The results are shown in Table 41. In Table 41, the stabilization ratio was calculated as the fold change in luciferase signal in Vardenafil treated samples compared to treatment with DMSO (i.e. in the absence of ligand) with the same construct. The destabilizing mutation coefficient was calculated as the fold change in GFP intensity in the hPDE5 mutant constructs compared to the hPDE5 wildtype construct (OT-001227) in the absence of the ligand. Destabilizing mutation coefficients less than 1 are desirable. Stabilization ratios greater than 1 are desired in DDs.

TABLE 41
Stability of Luciferase constructs

| | | | Destabilizing | |
|---|---|---|---|---|
| | Control | | mutation | Stabilization |
| Construct | (DMSO) | Vardenafil | coefficient | ratio |
| Parental cells | 1367.47 | 3824.04 | — | — |
| OT-001227 | 85429.26 | 127499.78 | — | 1.49 |
| OT-001228 | 88881.46 | 174814.64 | 1.04 | 1.97 |
| OT-001229 | 53239.88 | 88918.04 | 0.62 | 1.67 |
| OT-001231 | 96460.45 | 269718.66 | 1.13 | 2.80 |

[0887] The luciferase signal intensity observed in parental cells that did not express the construct indicated that some of the signal was likely background noise. Construct, OT-001229 showed the lowest destabilizing mutation coefficient indicating the construct is destabilized. Increase in stabilization ratios was observed with all constructs including the wildtype hPDE5 construct, OT-001227. Construct OT-001231 showed the highest stabilization ratio indicating the strongest ligand dependent stabilization. Among the constructs tested, OT-001229 showed destabilization in the absence of ligand and stabilization in the presence of ligand.

### Example 11. Mutagenesis of the Amino Acid 732 of hPDE5

[0888] The analysis of mutants identified by site directed mutagenesis identified amino acid hotspots whose mutation confers destabilization and ligand dependent stabilization properties to hPDE5. The amino acid at position 732 was chosen for the further analysis since the hPDE5 (R732L) mutation possessed the properties described above. To improve the DD characteristics of this DD, the amino acid at the position 732 was mutated to any of the known amino acids, including, but not limited to, aspartic acid, glutamic acid, glutamine, asparagine, histidine, serine, threonine, tyrosine, cysteine, methionine, tryptophan, alanine, isoleucine, leucine, phenylalanine, valine, proline, and glycine. The library of mutations was generated by site directed mutagenesis and each of the mutants in the library was fused to a reporter protein e.g. AcGFP via a linker and transduced into HCT116 cells. The properties of the DDs were analyzed in the presence and absence of ligands via FACS as previously described. Ligands that were evaluated included, but not limited Sildenafil, and Vardenafil. The results are shown in Table 42 and Table 43.

TABLE 42
Ligand responsive behavior of hotspot constructs

| | | Vardenafil | | Sildenafil | |
|---|---|---|---|---|---|
| | | 0 μM | | 0 μM | |
| Construct | Mutation | (DMSO) | 1 μM | (DMSO) | 10 μM |
| OT-001075 | — | 161 | 294 | 989 | 219 |
| OT-001084 | R732L | 182 | 173 | 143 | 122 |
| OT-001186 | R732G | 176 | 854 | 298 | 288 |
| OT-001187 | R732A | 175 | 853 | 288 | 348 |
| OT-001188 | R732V | 150 | 507 | 189 | 113 |
| OT-001189 | R732I | 151 | 587 | 201 | 170 |
| OT-001190 | R732P | 355 | 310 | 379 | 361 |
| OT-001191 | R732F | 189 | 943 | 233 | 351 |
| OT-001192 | R732W | 301 | 179 | 248 | 158 |
| OT-001193 | R732Y | 302 | 345 | 397 | 648 |
| OT-001195 | R732H | 308 | 328 | 352 | 710 |
| OT-001196 | R732S | 566 | 399 | 760 | 746 |
| OT-001197 | R732T | 235 | 270 | 276 | 546 |
| OT-001198 | R732D | 294 | 422 | 298 | 394 |
| OT-001199 | R732E | 276 | 212 | 295 | 316 |
| OT-001200 | R732Q | 305 | 289 | 353 | 553 |
| OT-001201 | R732N | 313 | 290 | 315 | 516 |
| OT-001202 | R732M | 316 | 337 | 285 | 503 |
| OT-001203 | R732C | 526 | 349 | 499 | 707 |
| OT-001204 | R732K | 113 | 423 | 165 | 765 |

TABLE 43
Stabilization ratio and Destabilizing mutation
coefficient of hotspot constructs

| | | Vardenafil | | Sildenafil | |
|---|---|---|---|---|---|
| | | Destabilizing | Stabi- | Destabilizing | Stabi- |
| | | mutation | lization | mutation | lization |
| Construct | Mutation | coefficient | ratio | coefficient | ratio |
| OT-001075 | — | — | 1.83 | — | 0.22 |
| OT-001084 | R732L | 1.13 | 0.95 | 0.14 | 0.85 |
| OT-001231 | R732G | 1.09 | 4.85 | 0.3 | 0.97 |
| OT-001187 | R732A | 1.09 | 4.87 | 0.29 | 1.21 |
| OT-001188 | R732V | 0.93 | 3.38 | 0.19 | 0.6 |
| OT-001189 | R732I | 0.94 | 3.89 | 0.2 | 0.85 |
| OT-001190 | R732P | 2.2 | 0.87 | 0.38 | 0.95 |
| OT-001191 | R732F | 1.17 | 4.99 | 0.24 | 1.51 |
| OT-001192 | R732W | 1.87 | 0.59 | 0.25 | 0.64 |
| OT-001193 | R732Y | 1.88 | 1.14 | 0.4 | 1.63 |
| OT-001195 | R732H | 1.91 | 1.06 | 0.36 | 2.02 |
| OT-001196 | R732S | 3.52 | 0.7 | 0.77 | 0.98 |
| OT-001197 | R732T | 1.46 | 1.15 | 0.28 | 1.98 |
| OT-001198 | R732D | 1.83 | 1.44 | 0.3 | 1.32 |
| OT-001199 | R732E | 1.71 | 0.77 | 0.3 | 1.07 |
| OT-001200 | R732Q | 1.89 | 0.95 | 0.36 | 1.57 |
| OT-001201 | R732N | 1.94 | 0.93 | 0.32 | 1.64 |
| OT-001202 | R732M | 1.96 | 1.07 | 0.29 | 1.76 |
| OT-001203 | R732C | 3.27 | 0.66 | 0.5 | 1.42 |
| OT-001204 | R732K | 0.7 | 3.74 | 0.17 | 4.64 |

[0889] The destabilizing mutation coefficients and stabilization ratios obtained for each construct with the indicated ligands were analyzed to identify constructs which possessed the lowest destabilizing mutation coefficient ratio and a second sort of the data was then performed to identify constructs with the highest stabilization ratio. This analysis allowed the identification of constructs with both the lowest destabilizing mutation coefficient that also possessed the highest stabilization ratios. Based on this analysis, it was identified that virtually all mutants tested showed destabilizing mutation coefficients less than one for the DMSO control of Sildenafil treatment, indicating that all constructs are destabilized in the absence of sildenafil. In the presence of Sildenafil, OT-001204 construct with arginine to lysine substitution showed high sildenafil dependent stabilization ratio Similar analysis of the constructs with Vardenafil identified OT-001204, OT-001188, OT-001189, and OT-001187 as having a low destabilizing mutation coefficient and high-ligand dependent stabilization ratios. Other constructs with low destabilizing mutation coefficients and high stabilization ratios include OT-001189, OT-001187, OT-001191, OT-001197, and OT-001198.

[0890] The response of select mutants to increasing doses of Sildenafil, Vardenafil and Tadalafil was also tested in HCT 116 cells treated with the ligand for 48 hours. The MFI values obtained with each ligand treatment are shown in Table 44, Table 45 and Table 46.

TABLE 44
Vardenafil Dose Response

| Vardenafil (μM) | OT-001187 | OT-001189 | OT-001191 | OT-001197 | OT-001198 |
|---|---|---|---|---|---|
| 0 | 2551 | 1810 | 2188 | 2854 | 4336 |
| 0.01 | 2551 | 1810 | 2188 | 2854 | 4336 |
| 0.04 | 8345 | 3356 | 8468 | 6862 | 7350 |
| 0.12 | 10946 | 4874 | 10941 | 13187 | 15637 |
| 0.37 | 13850 | 7855 | 12987 | 28895 | 25047 |
| 1.11 | 15202 | 11777 | 13754 | 33075 | 37828 |
| 3.33 | 16783 | 14531 | 14705 | 41788 | 44499 |
| 10 | 18945 | 17645 | 17021 | 48946 | 50822 |
| 30 | 22548 | 24322 | 20693 | 67364 | 70645 |
| 1000 | 22548 | 24322 | 20693 | 67364 | 70645 |

TABLE 45
Sildenafil Dose Response

| Sildenafil (μM) | OT-001187 | OT-001189 | OT-001191 | OT-001197 | OT-001198 |
|---|---|---|---|---|---|
| 0.01 | 808 | 579 | 688 | 856 | 1192 |
| 0.04 | 1025 | 612 | 916 | 1041 | 1270 |
| 0.12 | 1270 | 592 | 1205 | 1113 | 1337 |
| 0.37 | 1931 | 771 | 2002 | 1835 | 1867 |
| 1.11 | 2655 | 1040 | 2711 | 3355 | 3108 |
| 3.33 | 3769 | 1709 | 3555 | 6896 | 6171 |
| 10 | 4716 | 2733 | 4427 | 12407 | 13971 |
| 30 | 5694 | 4197 | 5449 | 21258 | 21120 |
| 1000 | 5694 | 4197 | 5449 | 21258 | 21120 |

TABLE 46
Tadalafil Dose Response

| Tadalafil (μM) | OT-001187 | OT-001189 | OT-001191 | OT-001197 | OT-001198 |
|---|---|---|---|---|---|
| 0.01 | 752 | 498 | 631 | 825 | 1163 |
| 0.14 | 1259 | 540 | 1193 | 1068 | 1361 |
| 0.41 | 2066 | 712 | 2075 | 1655 | 1548 |
| 1.23 | 3412 | 1041 | 3134 | 3433 | 2504 |
| 3.7 | 4690 | 1745 | 4294 | 6697 | 4821 |
| 11.11 | 5126 | 2746 | 4734 | 12843 | 10583 |
| 33.33 | 6264 | 3970 | 5293 | 17164 | 16956 |
| 100 | 6301 | 5487 | 5867 | 21113 | 22630 |
| 1000 | 6301 | 5487 | 5867 | 21113 | 22630 |

[0891] OT-001197 with an arginine to threonine substitution showed the strongest increase in GFP expression at the highest dose, with all three ligands tested. At doses lower than 1 μM of Vardenafil, all constructs showed ligand dependent stabilization. At doses of Sildenafil lower than 1 μM, OT-001191, OT-001197 and OT-001198 showed ligand dependent stabilization. With doses of Tadalafil lower than 1 μM, OT-001187, OT-001191 and OT-001197 showed ligand dependent stabilization. By mutagenesis of the R732 locus, DDs with a variety of properties were obtained. The selection of a particular DD may be made based on the payload utilized and the extent of expression desired with the payload. The EC50 values for each of the constructs with each of the ligands is shown in Table 47.

TABLE 47
EC₅₀ for Hotspot Mutants

| Ligand | OT-001187 | OT-00U89 | OT-001191 | OT-00U97 | OT-00U98 |
|---|---|---|---|---|---|
| Vardenafil | 0.30 | 2.20 | 0.28 | 1.47 | 1.44 |
| Sildenafil | 2.08 | 6.90 | 1.76 | 7.50 | 7.04 |
| Tadalafil | 1.45 | 14.28 | 1.33 | 8.64 | 14.54 |

[0892] These results are consistent with the western blot analysis of GFP protein levels in HCT 116 cells stably transduced with these mutants. The following constructs showed a strong stabilization of GFP levels in the presence of vardenafil and when compared to DMSO controls: OT-001084, OT-001231, OT-001187, OT-001190, OT-001192, OT-001193, OT-001195, OT-001196, OT-001197, OT-001198, OT-001199, OT-001200, OT-001201, OT-001202, and OT-001203. Modest ligand dependent stabilization of GFP levels was observed with OT-001188, OT-001189, OT-001191, and OT-001204. All samples showed equal protein loading as measured by GAPDH protein levels.

### Example 12: Dynamic Range of hPDE5 Regulation

[0893] HCT116 cells were transduced with hPDE5-GFP constructs, OT-001205, OT-001206, OT-001207, and OT-001253 and incubated with the indicated concentrations of ligand for 48 hours. GFP fluorescence was measured by FACS. The fold change in GFP expression over untreated DMSO control is shown in Table 48, Table 49 and Table 50 for vardenafil, sildenafil and tadalafil respectively.

TABLE 48
Vardenafil dose response

| Vardenafil (log) | OT-001205 | OT-001206 | OT-001207 | OT-001253 |
|---|---|---|---|---|
| 1.477 | 20.664 | 13.612 | 4.507 | 16.171 |
| 1.000 | 18.207 | 12.030 | 2.178 | 13.462 |
| 0.523 | 18.327 | 10.260 | 1.277 | 13.230 |
| 0.046 | 17.229 | 7.465 | 1.078 | 12.550 |
| −0.431 | 16.143 | 4.374 | 1.022 | 11.992 |
| −0.908 | 13.764 | 2.258 | 1.025 | 9.770 |
| −1.386 | 10.108 | 1.323 | 1.015 | 5.477 |
| −1.863 | 4.673 | 0.834 | 1.030 | 2.303 |
| −2.340 | 2.575 | 0.741 | 1.034 | 1.412 |
| −2.817 | 1.744 | 0.725 | 1.047 | 1.105 |

TABLE 49
Sildenafil dose response

| Sildenafil (log) | OT-001205 | OT-001206 | OT-001207 | OT-001253 |
|---|---|---|---|---|
| 2.000 | 11.370 | 14.212 | 1.909 | 11.290 |
| 1.523 | 12.925 | 15.247 | 1.509 | 13.091 |
| 1.046 | 12.066 | 10.028 | 1.212 | 12.344 |
| 0.569 | 10.587 | 5.408 | 1.091 | 10.615 |
| 0.092 | 9.190 | 2.822 | 0.995 | 8.165 |
| −0.386 | 6.849 | 1.640 | 1.040 | 5.536 |
| −0.863 | 4.225 | 1.249 | 0.993 | 2.540 |
| −1.340 | 2.295 | 1.106 | 1.007 | 1.397 |
| −1.817 | 1.434 | 1.025 | 1.013 | 1.134 |
| −2.294 | 1.136 | 1.024 | 0.966 | 0.997 |

TABLE 50
Tadalafil dose response

| Tadalafil (log) | OT-001205 | OT-001206 | OT-001207 | OT-001253 |
|---|---|---|---|---|
| 2.000 | 12.074 | 14.919 | 1.498 | 12.606 |
| 1.523 | 11.481 | 13.740 | 1.224 | 11.910 |
| 1.046 | 9.897 | 8.083 | 1.011 | 11.144 |
| 0.569 | 8.403 | 4.360 | 0.945 | 9.902 |
| 0.092 | 5.445 | 2.312 | 0.973 | 7.992 |
| −0.386 | 2.725 | 1.472 | 0.907 | 5.049 |
| −0.863 | 1.563 | 1.225 | 0.946 | 2.887 |
| −1.340 | 1.121 | 1.034 | 0.938 | 1.402 |
| −1.817 | 1.095 | 1.013 | 0.976 | 1.077 |
| −2.294 | 1.045 | 0.985 | 0.942 | 1.064 |

[0894] As shown in Table 48, Table 49 and Table 50, dynamic regulation of hPDE5 DDs was observed with OT-001205, OT-001206, and OT-001207. The hPDE5 wildtype construct shown little to no ligand dependent stabilization with all three ligands. The stabilization concentration 50 or (SC₅₀), which is the concentration of ligand required to achieve 50% stabilization, was also calculated for all four constructs with each of the ligands and the results are shown Table 51.

TABLE 51
Stabilization Concentration 50 (SC₅₀) of hPDE5 DPs

| Ligand | OT-001205 | OT-001206 | OT-001207 | OT-001253 |
|---|---|---|---|---|
| Vardenafil | 0.04 | 1.15 | >30 | 0.07 |
| Sildenafil | 0.38 | 6.82 | >30 | 0.67 |
| Tadalafil | 1.97 | 9.54 | >100 | 0.77 |

[0895] Taken together these results indicate that structure-guided mutagenesis of ligand-binding site in PDE5 generates 23 nM ligand-DD interaction. OT-001205 with Y612F, R732L, was able to bind to Vardenafil with SC₅₀, of 23 nM suggesting potent DD-ligand interaction.

### Example 13. DD Regulated CD19 CAR Expression and Function

[0896] Immunotherapeutic payloads of the disclosure such as CD19 CAR were fused to any of the DDs described herein and cloned into expression vectors pLVX and pELNS vectors. In this manner, OT-001300 (hPDE5 (WT)) and OT-001301 (hPDE5(R732L)). The HA tag was added to enable the easy detection of the chimeric proteins.

[0897] To test ligand dependent CD19 CAR production, NIB 3T3 cells were transiently transfected with the constructs. Cells were then plated in a growth media e.g. DMEM with 10% FBS and incubated overnight at 37° C., 5% CO2. The growth media was exchanged for media containing ligand, at various concentrations of Vardenafil ranging from 30 nM to 10,000 nM. Following 48-hour incubation with ligand, cells were analyzed by FACS using the HA antibody and the mean fluorescence intensity (MEI) was calculated. The results are shown in Table 52, where the stabilization ratio was defined as the ratio of expression, function or level of a protein of interest, i.e. CD19 CAR in response to the stimulus, i.e. Vardenafil; to the expression, of the CD19 CAR in the absence of the stimulus, i.e. DMSO control. Stabilization ratios greater than one are desired.

TABLE 52
CD19 CAR expression

| | |
|---|---|
| OT-001300 | OT-001301 (R732L) |

| Vardenafil | (WT) | | Stabilization |
|---|---|---|---|
| (nM) | MFI | MFI | ratio |
| 0 | 0 | 1336 | — |
| 30 | 9125 | 3066 | 2.29 |
| 100 | 9592 | 4674 | 3.50 |
| 300 | 10509 | 5732 | 4.29 |
| 1000 | 10328 | 6738 | 5.04 |
| 10000 | 9285 | 3931 | 2.94 |

[0898] As shown in Table 52, a stabilization ration greater than 1 was observed with all doses of Vardenafil, and even with the lowest concentration of Vardenafil (30 nM) suggesting that low doses of ligand may be sufficient to achieve ligand dependent stabilization. It was also noted that the stabilization ratio obtained at the highest concentration of ligand i.e. 10,000 nM was lower than the ratio obtained with 1000 nM ligand suggesting a bimodal pattern of stabilization.

[0899] The dose dependent regulation of OT-001300 and OT-001301 was measured in HEK 293 cells transfected with 2 ug DNA and stably selected using 2 ug/ml puromycin. CAR surface expression was detected using Protein L staining following 24 hours of ligand treatment at the indicated concentrations. The median Protein L fluorescence is shown in Table 53.

TABLE 53
Ligand dose dependent CAR expression

| | Tadalafil | | | Sildenafil | | | Vardenafil | | |
|---|---|---|---|---|---|---|---|---|---|
| | | | Empty | | | Empty | | | Empty |
| Ligand | OT- | OT- | Vector | OT- | OT- | Vector | OT- | OT- | Vector |
| (nM) | 001300 | 001301 | (pLVX) | 001300 | 001301 | (pLVX) | 001300 | 001301 | (pLVX) |
| 0.15 | 21122 | 4064 | 77 | 14703 | 2848 | 89.8 | 17946 | 4202 | 87.9 |
| 0.46 | 15335 | 3501 | 75.8 | 15335 | 3304 | 87 | 17746 | 4064 | 92 |
| 1.39 | 14662 | 3501 | 78.8 | 13143 | 3250 | 83.9 | 16175 | 4604 | 89.8 |
| 4.22 | 14377 | 3341 | 77 | 13901 | 2810 | 85.7 | 16450 | 5977 | 93.9 |
| 12.79 | 10773 | 3599 | 78.8 | 9419 | 2976 | 81.8 | 17646 | 9210 | 92 |
| 38.74 | 14098 | 4042 | 80 | 12083 | 3268 | 84.8 | 16175 | 13329 | 94.8 |
| 117.41 | 18354 | 6302 | 77 | 15037 | 3589 | 83 | 19856 | 20594 | 93.9 |
| 355.78 | 13785 | 11235 | 72.9 | 13901 | 5274 | 83.9 | 22406 | 23175 | 95.8 |
| 1078.11 | 18200 | 15640 | 80 | 13708 | 8054 | 88.8 | 22343 | 31138 | 97.7 |
| 3267.00 | 15950 | 21301 | 75.8 | 14337 | 13291 | 84.8 | 24933 | 31226 | 100 |
| 9900.00 | 21421 | 24654 | 75.8 | 17746 | 23371 | 84.8 | 26824 | 36249 | 110 |
| 30000.00 | 27902 | 33691 | 77 | 25003 | 25215 | 84.8 | 30617 | 35945 | 140 |

[0900] As shown in Table 54, Table 55 and Table 56, only OT-001301 responded to increasing doses of ligand with increase surface CAR expression, but not the WT construct OT-001300. This was observed with all three ligands. However, the highest levels of CAR expression were observed with increasing doses of vardenafil. The EC50 for vardenafil, tadalafil and sildenafil were determined to 25 nM, 380 nM, and 1500 nM respectively.

[0901] Cells were also treated with ligand for varying durations of time with ligand concentrations shown in Table 54 and Protein L expression was measured using FACS. The results are shown in Table 55 and Table 56. Stabilization ratios are shown in Table 58.

TABLE 54
Time dependent increase in CAR expression with Vardenafil

| | Vardenafil 10 μM | | | Vardenafil | DMSO | | |
|---|---|---|---|---|---|---|---|
| | Empty | | | 1 uM | | | Empty |
| | Vector | OT- | OT- | OT- | OT- | OT- | Vector |
| Hours | (pLVX) | 001300 | 001301 | 001301 | 001300 | 001301 | (pLVX) |
| 0 | 1412 | 5188 | 1486 | 65.9 | 5060 | 1386 | 71.9 |
| 2 | 2863 | 11643 | 2918 | 78.7 | 5545 | 1270 | 71 |
| 4 | 3654 | 11258 | 3526 | 76.8 | 5408 | 1274 | 71.9 |
| 24 | 6624 | 10439 | 8005 | 83.7 | 5845 | 1241 | 71 |
| 48 | 7764 | 8118 | 8489 | 93.8 | 6128 | 1287 | 71 |
| 72 | 9282 | 7961 | 9788 | 92.8 | 6442 | 1329 | 65.9 |

TABLE 55
Time dependent increase in CAR expression with Tadalafil and Sildenafil

| | Tadalafil 10 μM | | | Tadalafil | Sildenafil 10 μM | | | Sildenafil |
|---|---|---|---|---|---|---|---|---|
| | Empty | | | 1 μM | Empty | | | 1 μM |
| | Vector | OT- | OT- | OT- | Vector | OT- | OT- | OT- |
| Hours | (pLVX) | 001300 | 001301 | 001301 | (pLVX) | 001300 | 001301 | 001301 |
| 0 | 65 | 4909 | 1336 | 1368 | 62.8 | 5469 | 1534 | 1372 |
| 2 | 65 | 5911 | 2778 | 2451 | 65 | 8536 | 2801 | 2278 |
| 4 | 65 | 6196 | 3032 | 2950 | 63.7 | 8560 | 3256 | 2617 |
| 24 | 65 | 8608 | 6606 | 4346 | 62.8 | 8118 | 5499 | 3159 |
| 48 | 62.8 | 8827 | 7384 | 4683 | 62.8 | 7404 | 5927 | 3283 |
| 72 | 58.7 | 8118 | 8050 | 6027 | 58.7 | 6111 | 5188 | 3506 |

TABLE 56
Time dependent increase in CAR expression

| | | | Tadalafil | | | Sildenafil | Vardenafil | | |
|---|---|---|---|---|---|---|---|---|---|
| | Tadalafil 10 μM | | 1 μM | Sildenafil 10 μM | | 1 μM | 10 μM | Vardenafil 1 μM | |
| Time | OT- | OT- | OT- | OT- | OT- | OT- | OT- | OT- | OT- |
| (hrs) | 001300 | 001301 | 001301 | 001300 | 001301 | 001301 | 001300 | 001301 | 001301 |
| 0 | 0.97 | 0.96 | 0.99 | 1.08 | 1.11 | 0.99 | 1.03 | 1.07 | 0.05 |
| 2 | 1.07 | 2.19 | 1.93 | 1.54 | 2.21 | 1.79 | 2.10 | 2.30 | 0.06 |
| 4 | 1.15 | 2.38 | 2.32 | 1.58 | 2.56 | 2.05 | 2.08 | 2.77 | 0.06 |
| 24 | 1.47 | 5.32 | 3.50 | 1.39 | 4.43 | 2.55 | 1.79 | 6.45 | 0.07 |
| 48 | 1.44 | 5.74 | 3.64 | 1.21 | 4.61 | 2.55 | 1.32 | 6.60 | 0.07 |
| 72 | 1.26 | 6.06 | 4.53 | 0.95 | 3.90 | 2.64 | 1.24 | 7.36 | 0.07 |

[0902] The analysis of the stabilization ratios indicated that OT-001301 is stabilized by all three ligands with increased duration of incubation time with ligand. As expected, 10 μM dose of ligand showed much greater expression of CAR than the 1 μM dose. Regulation was evident even at the lower doses.

[0903] Constructs OT-001455, OT-001456 and OT-001457 were cloned into pELNS vectors and transduced into T cells. Three different volumes of lentiviral supernatant were tested on cells i.e. 1 μl, 10 μl and 20 μl. Following transduction, cells were treated with 10 μA4 Vardenafil or left untreated for 24 hours beginning on day 4. Untransduced cells were also included as negative control. On day 5, the percentage CAR positive cells were measured by FACS using 1 μg/ml CD19 Fc. The results are shown in FIG. 7A.

[0904] As shown in FIG. 7A, all three constructs showed a viral dose dependent increase in the percentage of CAR positive cells, in the presence of Vardenafil. Although similar trends were observed in untreated controls, the percentage of CAR positive cells observed with no vardenafil treatment was substantially lesser than the vardenafil treated controls. Among the three constructs, OT-001457 showed lowest basal expression of the CAR in the absence of ligand and the highest percentage of CAR positive cells in the presence of vardenafil. Similar observations were made when comparing the percentage CAR positive cells obtained with different constructs using 20 μl of virus as shown in FIG. 7B, where a shift in the number of cells that are CAR positive was observed in vardenafil treated cells (labelled treatment) compared to untransduced as well as untreated cells.

[0905] T cells maintained in culture for over 10 days reach quiescence and accordingly T cells transduced with OT-001456 did not show vardenafil dependent CAR expression at day 11. However, restimulation of the same T cells on day 11 with CD3/CD28 beads (at 3:1 bead: cell ratio, for 24 hours concomitant with ligand treatment) restored vardenafil dependent CAR expression in T cells transduced with 20 μl of virus (FIG. 7C). The effect of restimulation on the expression of the CAR was evident at all concentrations of the virus tested FIG. 7D. Taken together, these data show that CD19 CARs operably linked to hPDE5 DDs demonstrate ligand dependent CAR expression. Further, ligand responsiveness and subsequent CAR expression may be restored in quiescent T cells by restimulation with CD3/CD28 beads.

[0906] To test the effect on different ligands on hPDE5-CAR constructs, the constructs were packaged into plasmids and transduced into T cells using 10 μl of virus. On day 9, T cells expressing either OT-001454, OT-001455, OT-001456 or OT-001457 were treated with varying doses of ligand ranging from 0.1 nM to 10 μM for 24 hours. The constitutive construct OT-001407 was included as the positive control, and the cells transduced with the empty vector (pELNS) served as the negative control. Three different ligands for hPDE5 were tested including, Sildenafil, Tadalafil and Vardenafil. Cells were analyzed by FACS and sorted for singlets/live CAR positive cells. The results are shown in FIG. 7E. Among the three ligands tested, all constructs were most responsive to Vardenafil, followed by Tadalafil and Sildenafil. As seen previously, the OT-001456 and OT-001457 showed lower basal expression, and had the higher EC50 values than the other constructs. The experiments were repeated with the OT-001456 construct by transducing T cells with different volumes of virus transduced into T cells using 10 μL, 2∞L, 0.4 μL, or 0.08 μL of virus and the CAR expression was measured by FACS, both in the presence of all three ligands and in the absence of the ligands. The results are shown in Table 57, where “basal % CAR+” indicates the percentage of CAR positive cells in the absence of ligand, and the “Max % CAR+,” indicates the maximum expression of the CAR in the presence of ligand. The EC50 is defined as the concentration of a drug/ligand that gives half-maximal response. The response herein refers to the expression of the chimeric antigen receptor.

TABLE 57
hPDE5 regulation of CD19-CAR

| | Virus | Basal % | Max % | Vardenafil | Tadalafil | Sildenafil |
|---|---|---|---|---|---|---|
| Construct | Volume (uL) | CAR+ | CAR+ | EC50 (nM) | EC50 (nM) | EC50 (nM) |
| Empty vector (pELNS) | 1 | 0.2 | 0.2 | — | — | — |
| OT-001407 | 1 | 30.0 | 30.0 | — | — | — |
| OT-001456 | 10 | 3.6 | 37.5 | 140.0 | 1312.2 | >10000.0 |
| OT-001456 | 2 | 2.0 | 29 | 157.0 | 1402.8 | >10000.0 |
| OT-001456 | 0.4 | 0.9 | 16.1 | 197.7 | 2511.9 | >10000.0 |
| OT-001456 | 0.08 | 0.4 | 5.0 | 220.8 | 1857.8 | >10000.0 |

[0907] Among the three ligands tested, higher transduction volume increased the maximum CAR expression level achieved, but did not alter ligand EC50 values.

[0908] To test how rapidly hPDE5-CAR can be stabilized with ligand, the indicated constructs were tested in T cells. T cells from donor were thawed and activated overnight in the presence of CD3/CD28 Dynabeads at a 3:1 bead: cell ratio. The following day, cells were transduced with 10 μL lentivirus prepared from OT-001407, OT-001454, OT-001455, OT-001456, and OT-001457 constructs. Cells were expanded by addition of fresh media over the course of 10 days, maintaining cells around 0.5×10\hat{ }6 cells/mL, then frozen. Expanded T cells were thawed and restimulated with CD3/CD28 beads for 48 hours. Cells were treated with 10 μM Tadalafil or Vardenafil at various times such that all conditions received 48 hr of bead stimulation with either 0, 2, 4, 6, 24, or 48 hours of ligand treatment. CAR surface expression was measured with 1 μg/mL CD19-Fc. The results are shown in FIG. 7F. In activated T cells, CAR surface expression occurred at nearly maximum levels by 2 hours after ligand addition.

[0909] To test whether CD19-CARs showing regulated expression also show regulated cytotoxicity, transduced T cells were tested in a cytotoxicity assay against the CD19-expressing Nalm6 tumor cell line, T cells from a human donor were thawed and activated overnight in the presence of CD3/CD28 Dynabeads at a 3:1 bead: cell ratio. The following day, cells were transduced with 10 μL lentivirus from OT-001407, OT-001454, OT-001455, OT-001456, and OT-001457. Cells were expanded by addition of fresh media over the course of 10 days, maintaining cells around 0.5×10\hat{ }6 cells/mL, then frozen. Expanded T cells were thawed and cocultured with CD19 expressing target cells, Nalm6-Katushka, at effector: target cell ratio of 10:1 for 6 days, in the absence or presence of Tadalafil. Images captured on the Incucyte Zoom were analyzed for proliferation of target cells by measuring red fluorescence over time (Total NucRed® Area). In the absence of ligand, i.e. DMSO, OT-001456 and OT-001457 showed target cell proliferation as measured by the increase in total NucRed area (red fluorescence). Constructs, OT-001455, OT-001454 showed very low levels of red fluorescence indicating basal activity that was comparable to the constitutively expressed CAR construct OT-001407. All constructs tested showed a reduction in red fluorescence when treated with either 3 μM Tadalafil or 10 μM Tadalafil that was comparable to the red fluorescence levels observed with the constitutively expressed CAR. As expected, the untransduced cells showed high levels of red fluorescence both in the presence and absence of ligand.

[0910] Constructs showing higher basal CAR expression in T cells, OT-001454 and OT-001455, inhibited target cell growth in the absence of tadalafil. T cells transduced with OT-001457, which had the highest Tadalafil EC50 in terms of CAR expression, required higher concentrations of ligand to generate an in vitro functional response.

[0911] To measure cytokine levels in T cells, supernatants from the previous coculture assay were harvested at 48 hours and analyzed for IFNγ and IL2 levels by MSD assay (Meso Scale Discovery's ELISA). The results are shown in FIG. 7G. The cytokine levels at the following effector to target cell rations: 10:1, 3:1, 1:1, 0.3:1, and 0.1:1. High levels of both IFNγ and IL2 are produced by OT-001456 transduced T cells when co-cultured with Nalm6 targets only in the presence of 3 μM Tadalafil, correlating with the cytotoxicity observed.

[0912] To confirm the cytotoxicity and cytokine secretion is directly related to CAR expression, OT-001456 transduced T cells were cocultured with Nalm6-Katushka target cells at 10:1 effector: target cell ratio for 6 days in the presence of a dose titration of Tadalafil from 10 μM to 10 nM. The fluorescence of Nalm6 cells was measured over a period of 6 days in response to the following doses of tadalafil: 0.01 μM, 0.04 μM, 0.12 μM, 0.37 μM, 1.11 μM, 3.33 μM, 10 μM. Tadalafil doses at 0.37 μM, 1.11 μM, 3.33 μM, 10 μM showed a reduction in Nalm6 proliferation over 6 days. Lower concentrations (<0.37 μM) tadalafil did not cause a reduction in Nalm6 fluorescence, in fact, Nalm6 cells continue to proliferate over the span of 6 days. Significant CAR expression was detected by FACS using CD19-Fc at Tadalafil concentrations at or above 300 nM. This CAR expression corresponded to Tadalafil dose-dependent cytotoxicity (FIG. 7H) and cytokine secretion of IFNγ and IL2 (FIG. 7I).

[0913] The functionality of the CAR transduced T cells was also tested in vitro. T cells were transduced with OT-001456 or the constitutive construct OT-001407. Cells were then frozen. Prior to the experiment, T cells were thawed overnight, and cocultured with Nalm6 target cells stably expressing Katushka RFP. Nalm6 cells express high levels of CD19 antigen and are hence ideal target cells in cell killing assay that test CD19 CAR constructs. T cells were mixed with Nalm6 cells at an effector cell to target cell (E: T) ratio of 5:1 for 12 hours in the presence of 10 μM vardenafil or DMSO. Target cell apoptosis was determined by measuring Annexin V fluorescence over time using the Incucyte instrument. Cell killing is measured as the ratio of the total killed target area and to the NALM6-Katushka area (μM²). As shown in FIG. 7J, the total killed target cell area increased when Nalm6 cells were co-cultured with OT-001456 expressing T cells in the presence of vardenafil Similar trend was observed in the proliferation of Nalm6 cells (FIG. 7K). The same cells did not result in significant cell killing in presence of DMSO, showing that the target cell killing by the T cells is specifically in response to the presence of the ligand. As expected, the constitutive construct, OT-001407 showed increased total killed target cell area both in the presence and absence of ligand, with a trend towards more killing in the presence of the ligand. Nalm6 cells co-cultured with untransduced T cells and Nalm6 cells that were not co-cultured with T cells did not show an increase in the total killed target area. Taken together, these data show that the regulated CAR construct, OT-001456 is active on antigen positive cells only in response to ligand.

[0914] The cell supernatants were also collected from the T cell/Nalm6 cytotoxicity co-culture assays at 66 hours and Interferon gamma levels were measured by MSD assays. The results are shown in Table 58.

TABLE 58
Interferon gamma production (pg/mL)

| Construct | DMSO | Vardenafil 10 μM |
|---|---|---|
| OT-001456 | 443.99 | 2282.98 |
| OT-001407 | 3268.72 | 1980.48 |
| Untransduced | 16.57 | 18.48 |

[0915] As shown in Table 58, the interferon gamma levels showed a five-fold induction in OT-001456 transduced T cells with the addition of vardenafil. Vardenafil treatment did not induce interferon gamma production in OT-001407 transduced T cells or untransduced T cells, indicating that the ligand specific induction of interferon gamma is related to the increased CAR expression and cell killing observed under similar conditions. The interferon gamma levels in DMSO treated OT-001456 was lower than the levels observed with the constitutive construct indicating that the OT-001456 cells have low basal expression of the CD19 CAR.

### Example 14. In Vivo Assessment of hPDE5-Regulated CD19 CAR

[0916] To test the efficacy of ligand regulated CAR efficacy in a tumor rejection model, 5 million CAR positive T cells (25 million total T cells) were injected in Nalm6 tumor bearing female NSG mice. The Nalm6-Luc is a B-cell precursor leukemia cell line used to generate an intravenous disseminated tumor model for studying blood tumors. Mice were treated daily with vehicle or Tadalafil at the following mg/kg body weight or mpk: 10 mpk, 30 mpk, or 100 mpk. Constitutive OT-001407 transduced T cells served as a positive control and untransduced T cells as a negative control. T cells were injected 7 days after the Nalm6 cells were implanted. Animals in the Tadalafil groups received 2 doses of ligand prior to T cells being injected. The objective of the study was to test the ligand dose response regulation of a hPDE5 DD CD19 CAR-T and its impact on efficacy. Further, the study was also used to address if the presence of antigen was necessary for detection and expression of the CAR. Dose groups included (a) untransduced T cells (b) untransduced vehicle treated cells (c) Un-transduced cells dosed with Tadalafil 100 mg/kg (d) 5.0 Million CD19+OT-001407 CART cells (e) 5.0 Million CD19 positive Nalm6 cells with OT-001407 CAR T cells (Vehicle) (f) 5.0 Million CD19 positive Nalm6 cells with OT-001407 CAR T cells (Tadalafil 100 mg) (g) 5.0 Million CD19 positive Nalm6 cells with OT-001456 CART cells (Vehicle) (h) 5.0 Million CD19 positive Nalm6 cells with OT-001456 (Tadalafil 10 mg/kg) (i) 5.0 Million CD19 positive Nalm6 cells with OT-001456 CART cells (Tadalafil 30 mg/kg (j) 5.0 Million CD19 positive Nalm6 cells with OT-001456 CART cells (Tadalafil 100 mg/kg). All animals were dosed once a day, orally for 25 days. Tumor burden assessments were made biweekly using bio luminescent imaging and the fluorescence intensity of Nalm6 Luc cells was observed over time. Two terminal collections were made to assess bone marrow, blood and spleen cell populations. Reduction in tumor burden/prevalence was measured by decreased luminescence from Nalm6-Luciferase cells, and was observed in Tadalafil treated OT-001456 animals (FIG. 8A). In FIG. 8A, the construct marked “const” is OT-001407 and the construct marked “regulated” is OT-001456. Taken together these data show that daily oral dosing of tadalafil resulted in dose-dependent suppression of tumor growth and/or reduction in tumor burden. Maximal tumor suppression was comparable to constitutive CAR with very low activity in the absence of drug. The percentage of tumor growth inhibition was >98% across all ligand doses tested for recipients of PDE5-DD-regulated CD19-CART (OT-001456) compared to unmodified T cell recipients.

[0917] The mortality of the mice was tracked during the course of the study. Kaplan-Meier analysis, and the log rank test were applied to the survival data. A significant survival advantage was observed in mice treated with OT-001456 transduced T cells relative to the mice treated with unmodified T cells (p<0.005) with a 50% increase in median survival. The median survival of the mice is provided in Table 59. In Table 59 * indicates undetermined as the mice in this group survived the duration of the study; TDF indicates Tadalafil; VDF denotes vardenafil and “Veh” denotes vehicle. Survival ratio was calculated as ratio of the median survival observed in a group to the median survival of the untransduced—vehicle treatment group.

TABLE 59
Median survival (days)

| | Construct | | | | | | | | |
|---|---|---|---|---|---|---|---|---|---|
| | Untransduced | | | OT-001407 | | OT-001456 | | | |
| | Ligand | | | | | | | | |
| | | | TDF | | TDF | | TDF | TDF | TDF |
| | | Veh | 100 mpk | Veh | 100 mpk | Veh | 10 mpk | 30 mpk | 100 mpk |
| No. of deaths/ events | 8 | 8 | 8 | 0 | 0 | 8 | 8 | 7 | 8 |
| Median survival | 23 | 26 | 26 | * | * | 29 | 34 | 39 | 37 |
| Survival ratio | — | 1 | 1.13 | — | — | 1.15 | 1.31 | 1.5 | 1.42 |

[0918] The median survival was increased in the OT-001456 group treated with either 30 mpk or 100 mpk TDF as compared to the untransduced or OT-001407 transduced mice in the presence/absence of ligand. The enhanced survival in the OT-001456 TDF treated groups, was also evident in the observed increase in the survival ratio.

[0919] Plasma PK was also established in non-tumor-bearing mice of the hPDE5 inhibitors Tadalafil and Vardenafil after a single dose at the indicated dose levels and is shown in FIG. 8B and FIG. 8C. To determine pharmacokinetic profiles of PDE5 inhibitors, CD-1 mice were dosed orally once with Vardenafil, while NSG mice were dose with Tadalafil. Plasma samples collected over time and PDE5 inhibitor concentrations were determined by LC/MS/MS (Table 60). The Vardenafil/Tadalafil levels detected in the plasma declined over time and were commensurate with the initial dose orally administered to the animal.

TABLE 60
Vardenafil/Tadalafil Plasma levels (μM)

| Hours | Tadalafil | Tadalafil | Tadalafil | Vardenafil | Vardenafil |
|---|---|---|---|---|---|
| post dose | 10 mg/kg | 30 mg/kg | 100 mg/kg | 10 mg/kg | 100 mg/kg |
| 1 | 6.8 | 19.8 | 53.3 | 0.16 | 7.81 |
| 2 | 5.4 | 17.6 | 44.7 | 0.03 | 3.04 |
| 4 | 3.9 | 12.1 | 34.8 | 0.02 | 3.32 |
| 8 | 0.9 | 4.4 | 13.7 | — | 1.18 |
| 12 | 0.1 | 0.5 | 5.6 | — | 0.04 |
| 16 | 0.0 | 0.1 | 1.5 | — | — |
| 24 | — | 0.0 | 0.1 | — | — |

### Example 15. Destabilization Mutant Screening of Human PDE5

[0920] To identify destabilizing mutations of human PDE5 that are stabilized upon ligand binding to hPDE5, two rounds of mutant screening were performed, using a lentivirus hPDE5 mutant library (PDE5A-MUT-AcGFP_pLVX-IRES-puro) provided by Genscript (China). These methods were used to generate a library of mutant polypeptides using mutagenesis primers and error prone PCR are described herein.

### General Methods

[0921] Lentiviral vectors expressing the template, wild-type human PDE5 operably linked to GFP (OT-001075) and hPDE5 (R732L) (OT-001084) were also provided by Genscript along with the hPDE5 mutant library. These constructs were packaged into lentivirus, transduced into NIH3T3 cells and select stable cell pools were derived as described below. Cell pools were selected and treated with sildenafil or vardenafil and subjected to FACS and fluorescence microscopy analyses. Wild-type hPDE5 showed approximately a 1.5-fold increase in mean fluorescence intensity (MFI) after treatment with sildenafil or vardenafil, whereas OT-001084 showed 10 to 20-fold increase in MFI upon treatment with either compound. The hPDE5 mutant library yielded approximately 2-fold increase in MFI with Vardenafil treatment. Vardenafil proved more effective in stabilizing the hPDE5 mutant library and hPDE5 (R732L) mutant than sildenafil and was therefore chosen as the test compound for single-ligand experiments.

[0922] For lentiviral production, 293T cells were plated in a 6-well dish (approximately 1×10⁶ cells per well) and allowed to reach around 90% confluence (˜1 day). For transfection, growth medium was removed from each well and replaced with 1.5 mL fresh cell culture medium. A lipofectamine dilution was prepared (13.5 μL lipofectamine 3000 in 125 μL Opti-MEM) and mixed thoroughly with a DNA solution (containing 2 μg lentivector, 2 μg Delta 8.9, 0.5 μg VSV-G in 125 μL OptiMEM and 9 μL P3000) and incubated for 10-15 min at room temperature. Lipid-DNA complex was added drop-wise directly to cells and incubated overnight at 37° C., 5% CO₂, the medium was then replaced with 2 mL fresh complete culture medium. Forty-eight hours after transfection, the supernatant (virus) was harvested, filtered and stored in 1 mL aliquots at −80° C.

[0923] Lentiviral stocks were used for transduction of NIH3T3 cells and subsequent cell pool selection. The day before transduction, NIH3T3 cells (1.8×10⁶) were seeded in a T-25 flask and allowed to reach 60-70% confluency (˜1 day). The growth medium in the T-25 flask was then replaced with 1 mL virus (quickly thawed in a 37° C. water bath) and 5 μg/mL polybrene. After an 1 hr of incubation, with gentle rocking every 15 min, 3 mL fresh medium (with 5 μg/mL polybrene) was added to the flask and cells incubated overnight. Transduction medium was removed the following day and replaced with 5 mL fresh medium. At 48 hr after transduction, the medium was replaced with media containing 1 μg/mL puromycin. This puromycin medium was replaced every 3-4 days until cell pools were established (˜2 weeks).

[0924] To identify cell pools containing destabilizing mutants of hPDE5 that are stabilizing when hPDE5 is bound to ligand vardenafil (Selleck 52515) cells were sorted using a BD FACSJazz™ cell sorter. Cells were treated with either 1 μM or 10 μM vardenafil for 24 hours then harvested for cell sorting (1-2×10⁷ cells needed for sorting). To enrich cell pools, 3 (low-high-low) or 5 (low-high-low-high-low) rounds of cell sorting were completed as follows, i) 5% of cell population of low AcGFP in absence of ligand (ii) 5% of cell population of high Ac-GFP in presence of ligand (iii) 5% of cell population of low AcGFP in absence of ligand (iv) 5% of cell population of high Ac-GFP in presence of ligand. (v) 5% of cell population of low AcGFP in absence of ligand.

[0925] In the first experiment, after final sorting (3^{rd} or 5^{th} round), genomic DNA was isolated from cell pools using the Promega Wizard Genomic DNA Purification kit. An approximately 1 kb fragment of hPDE5 was PCR amplified using primers hPDE5A-EI-For (5′ACTAGAGGATCTATTTCCGGTGAATTCATG) (8719) and hPDE5A-BI-Rev (5′ GGATCCTCCACCACTGCCTCCA) (SEQ ID No. 8720) and high fidelity Prime STAR HS DNA Polymerase (Takara, Cat R010B), the product was gel-purified, cloned into pEASY-Blunt simple cloning vector (Transgen Cat CB111) and transformed into DH5a. Clones were picked and sent for sequencing of hPDE5. Sequencing results are summarized in Tables 61, Table 62 and Table 63.

TABLE 61
Mutants from 3^{rd} sorted pool (low-high-low)

| Library clone ID | hPDE5 mutation |
|---|---|
| LibC000009 | hPDE5 (Amino acid 535-860 of WT, L573M, F735L) |
| LibC000010 | hPDE5 (Amino acid 535-860 of WT, R658H) |
| LibC000011 | hPDE5 (Amino acid 535-860 of WT, S562G, L727P, R847T) |
| LibC000012 | hPDE5 (Amino acid 535-860 of WT, Q666H) |
| LibC000013 | hPDE5 (Amino acid 535-860 of WT, L781P) |
| LibC000014 | hPDE5 (Amino acid 535-860 of WT, A767E) |
| LibC000015 | hPDE5 (Amino acid 535-860 of WT, T571S, V585M, T723S) |
| LibC000016 | hPDE5 (Amino acid 535-860 of WT, Q743L) |
| LibC000017 | hPDE5 (Amino acid 535-860 of WT, Y709H, F787V) |
| LibC000018 | hPDE5 (Amino acid 535-860 of WT, N605Y, I715K) |
| LibC000019 | hPDE5 (Amino acid 535-860 of WT, F564I, N662Y, H685L, L693P, F736I) |
| LibC000020 | hPDE5 (Amino acid 535-860 of WT, A722V, F755L, M760I) |
| LibC000021 | hPDE5 (Amino acid 535-860 of WT, V594I) |
| LibC000022 | hPDE5 (Amino acid 535-860 of WT, H592R) |
| LibC000023 | hPDE5 (Amino acid 535-860 of WT, E858V) |
| LibC000024 | hPDE5 (Amino acid 535-860 of WT, T784I) |

TABLE 62
Mutants from 5^{th} sorted pool (low-high-low-high-low)

| Library clone ID | hPDE5 mutation |
|---|---|
| LibC000001 | hPDE5 (Amino acid 535-860 of WT, S542L, E708V, W772C) |
| LibC000002 | hPDE5 (Amino acid 535-860 of WT, I700F, E796G) |
| LibC000003 | hPDE5 (Amino acid 535-860 of WT, D724G, K848N) |
| LibC000004 | hPDE5 (Amino acid 535-860 of WT, T712M, M758I, Q859R) |
| LibC000005 | hPDE5 (Amino acid 535-860 of WT, I556S, E796D) |
| LibC000006 | hPDE5 (Amino acid 535-860 of WT, I680S) |
| LibC000007 | hPDE5 (Amino acid 535-860 of WT, H613L, D724Y, F755Y) |
| LibC000008 | hPDE5 (Amino acid 535-860 of WT, A611T) |

[0926] Select clones from the fifth sort were cloned into expression vectors and operably linked to AcGFP to generate the constructs listed in 63.

TABLE 63
Mutant constructs from 5^{th} sorted pool

| OT-ID | Mutation |
|---|---|
| OT-001358 | hPDE5 (Amino acid 535-860 of WT; N661S) |
| OT-001359 | hPDE5 (Amino acid 535-830 of WT, L569M, T833S) |
| OT-001360 | hPDE5 (Amino acid 535-860 of WT, I768N) |
| OT-001361 | hPDE5 (Amino acid 535-860 of WT, R607W) |
| OT-001362 | hPDE5 (Amino acid 535-860 of WT, N620S) |
| OT-001363 | hPDE5 (Amino acid 535-860 of WT, L554R, Q589E, M691I) |
| OT-001364 | hPDE5 (Amino acid 535-860 of WT, W615R, T723R, A762T, E808G) |
| OT-001365 | hPDE5 (Amino acid 535-860 of WT, C574Y) |

[0927] Twenty-five full length hPDE5 mutant clones were also ligated in-frame with AcGFP (Aequorea coerulescens green fluorescent protein) into a pLVX-EF1α vector and are indicated in Table 64 below by “OT” ID. Some of the clones tested are also identified by “Lib” IDs in Table 64, these clones have the same construct build as the clones identified by “OT” ID; however, the entire insert was not sequenced. Virus was produced for each of the hPDE5 mutants and transduced into NIH3T3 cells as described above, with puromycin based selection of stable cell pools, which were then tested by FACS GFP analysis following treatment with 10 μM vardenafil for 24 hr. Destabilizing mutants that provide stability upon binding of hPDE5 and vardenafil were expected to show greater GFP fluorescence by FACS analysis. Results are summarized in Table 64 below. The stabilization ratio was calculated as the fold change in GFP intensity in ligand (vardenafil) treated samples compared to treatment with DMSO (i.e. in the absence of ligand) with the same construct. The destabilizing mutation coefficient was calculated as the fold change in GFP intensity in the PDE5 mutant constructs compared to the PDE5 wildtype construct in the absence of the ligand. Destabilizing mutation coefficients less than 1 are desirable. Stabilization ratios greater than 1 are desired in DDs.

TABLE 64

| | | | | Destabilizing |
|---|---|---|---|---|
| Library ID/ | MFI | | Stabilization | mutation |
| Construct ID. | DMSO | 10 μM VDF | Ratio | co-efficient |
| LibC000009 | 510 | 4485 | 8.8 | 0.09 |
| LibC000010 | 6713 | 13940 | 2.1 | 1.17 |
| LibC000011 | 57 | 67 | 1.2 | 0.01 |
| LibC000013 | 498 | 723 | 1.5 | 0.09 |
| LibC000014 | 2500 | 6998 | 2.8 | 0.44 |
| LibC000015 | 174 | 1951 | 11.2 | 0.03 |
| LibC000016 | 2895 | 6869 | 2.4 | 0.51 |
| LibC000017 | 2244 | 6530 | 2.9 | 0.39 |
| LibC000018 | 1038 | 3102 | 3.0 | 0.18 |
| LibC000019 | 320 | 285 | 0.9 | 0.06 |
| LibC000020 | 332 | 1459 | 4.4 | 0.06 |
| LibC000021 | 1732 | 4440 | 2.6 | 0.30 |
| LibC000023 | 4386 | 6121 | 1.4 | 0.77 |
| LibC000024 | 5039 | 6905 | 1.4 | 0.88 |
| LibC000002 | 309 | 981 | 3.2 | 0.05 |
| LibC000003 | 656 | 1870 | 2.9 | 0.11 |
| LibC000005 | 271 | 2081 | 7.7 | 0.05 |
| LibC000007 | 234 | 234 | 1.0 | 0.04 |
| OT-001358 | 5726 | 7157 | 1.2 | 1.00 |
| OT-001359 | 5065 | 7544 | 1.5 | 0.88 |
| OT-001360 | 908 | 1735 | 1.9 | 0.16 |
| OT-001362 | 1283 | 2303 | 1.8 | 0.22 |
| OT-001363 | 260 | 1170 | 4.5 | 0.05 |
| OT-001364 | 121 | 141 | 1.2 | 0.02 |
| OT-001084 | 273 | 7463 | 27.3 | 0.05 |
| OT-001084 | 163 | 4127 | 25.3 | 0.03 |
| OT-001084 | 320 | 6531 | 20.4 | 0.06 |
| OT-001075 | 2003 | 3298 | 1.6 | — |
| OT-001075 | 8695 | 13100 | 1.5 | — |
| OT-001075 | 6480 | 9132 | 1.4 | — |
| NIH3T3 control | 62 | — | — | — |
| NIH3T3 control | 55 | — | — | — |
| NIH3T3 control | 72 | — | — | — |

[0928] Six clones. mostly with stabilization ratio >4 and destabilizing mutation co-efficient <0.01 were chosen for further analysis with all three ligands for FACS titration analysis. An 8-concentration, 3-fold dilution titration scheme starting at 100 μM and three ligands: vardenafil, sildenafil (Selleck, 51431) and tadalafil (Selleck, 51512) were used for the analysis. Mean fluorescence intensity (MFI) data for treatment with each of three ligands are shown in Table 65 and Table 66 below. VDF=vardenafil, SDF=sildenafil, TDF=tadalafil.

TABLE 65
GFP FACS analysis (MFI) of ligand-treated clones

| Conc. | LibC000013 | | | LibC000015 | | | LibC000020 | | | LibC000005 | | |
|---|---|---|---|---|---|---|---|---|---|---|---|---|
| (μM) | VDF | SDF | TDF | VDF | SDF | TDF | VDF | SDF | TDF | VDF | SDF | TDF |
| 100 | 7207 | 8260 | 7614 | 3069 | 630 | 518 | 2499 | 513 | 509 | 4240 | 1136 | 814 |
| 33.333 | 7308 | 7404 | 8353 | 3166 | 432 | 463 | 2144 | 407 | 440 | 3892 | 734 | 711 |
| 11.111 | 7393 | 5539 | 8085 | 2315 | 357 | 374 | 1395 | 373 | 371 | 3066 | 577 | 551 |
| 3.704 | 7330 | 3467 | 6275 | 1383 | 331 | 326 | 733 | 376 | 342 | 1968 | 518 | 453 |
| 1.235 | 6773 | 2076 | 3688 | 756 | 320 | 311 | 399 | 371 | 337 | 1044 | 479 | 418 |
| 0.412 | 5735 | 1459 | 2083 | 492 | 313 | 301 | 290 | 378 | 326 | 603 | 444 | 385 |
| 0.137 | 4220 | 1268 | 1456 | 385 | 313 | 309 | 266 | 375 | 313 | 449 | 447 | 389 |
| 0.046 | 2634 | 1243 | 1222 | 336 | 316 | 295 | 263 | 367 | 335 | 389 | 464 | 410 |
| DMSO | 854 | 943 | 847 | 373 | 301 | 306 | 238 | 338 | 243 | 376 | 335 | 366 |
| NIH3T3 | 58 | 40 | 42 | — | — | — | 58 | 40 | 42 | 58 | 40 | 42 |

TABLE 66
GFP FACS analysis (MFI) of ligand -treated pools

| Conc. | OT-001363 | | | OT-001084 | | | OT-001075 | | |
|---|---|---|---|---|---|---|---|---|---|
| (μM) | VDF | SDF | TDF | VDF | SDF | TDF | VDF | SDF | TDF |
| 100 | 1397 | 1356 | 1132 | 8608 | 3103 | 3428 | 12000 | 7082 | 10100 |
| 33.333 | 1563 | 994 | 1077 | 5866 | 2654 | 2832 | 8854 | 7025 | 7688 |
| 11.111 | 1566 | 725 | 816 | 5213 | 1962 | 2493 | 7964 | 6848 | 7388 |
| 3.704 | 1390 | 579 | 552 | 4746 | 1187 | 1941 | 7592 | 6480 | 7039 |
| 1.235 | 1047 | 456 | 405 | 3938 | 598 | 1107 | 7393 | 5740 | 6211 |
| 0.412 | 666 | 418 | 328 | 2662 | 276 | 534 | 7223 | 4806 | 5491 |
| 0.137 | 463 | 404 | 321 | 2047 | 204 | 222 | 7059 | 4245 | 4745 |
| 0.046 | 387 | 431 | 341 | 1104 | 139 | 139 | 6655 | 4647 | 4350 |
| DMSO | 327 | 336 | 284 | 357 | 93.4 | 316 | 7545 | 3140 | 9511 |
| NIH3T3 | 58 | 40 | 42 | 58 | 40 | 42 | 58 | 40 | 42 |

[0929] The mean fluorescence intensity (MFI) of GFP at 100 μM concentration treatment was set as 100% hPDE5 stabilization effect (HPE), while DMSO treatment was set as 0% effect (ZPE) of hPDE5 stabilization. The effect of the compound on hPDE5 stabilization was calculated based on the following formula: % PDE5 stabilization effect=(MFI-ZPE)/(HPE-ZPE)×100. Calculated % hPDE5 stabilization effects for mutant cell pools are shown in Table 67 and Table 68 below. VDF=vardenafil, SDF=sildenafil, TDF=tadalafil.

TABLE 67
Percent stabilization effect for ligand-treated mutant cell pools

| Conc. | LibC000009 | | | LibC000015 | | | LibC000020 | | | LibC000005 | | |
|---|---|---|---|---|---|---|---|---|---|---|---|---|
| (μM) | VDF | SDF | TDF | VDF | SDF | TDF | VDF | SDF | TDF | VDF | SDF | TDF |
| 100 | 100 | 100.0 | 100.0 | 100.0 | 100.0 | 100.0 | 100.0 | 100.0 | 100.0 | 100.0 | 100.0 | 100.0 |
| 33.333 | 101.6 | 88.3 | 110.9 | 103.6 | 39.8 | 74.1 | 84.3 | 39.4 | 74.1 | 91.0 | 49.8 | 77.0 |
| 11.111 | 102.9 | 62.8 | 107.0 | 72.0 | 17.0 | 32.1 | 51.2 | 20.0 | 48.1 | 69.6 | 30.2 | 41.3 |
| 3.704 | 101.9 | 34.5 | 80.2 | 37.5 | 9.1 | 9.4 | 21.9 | 21.7 | 37.2 | 41.2 | 22.8 | 19.4 |
| 1.235 | 93.2 | 15.5 | 42.0 | 14.2 | 5.8 | 2.4 | 7.1 | 18.9 | 35.3 | 17.3 | 18.0 | 11.6 |
| 0.412 | 76.8 | 7.1 | 18.3 | 4.4 | 3.6 | −2.4 | 2.3 | 22.9 | 31.2 | 5.9 | 13.6 | 4.2 |
| 0.137 | 53.0 | 4.4 | 9.0 | 0.4 | 3.6 | 1.4 | 1.2 | 21.1 | 26.3 | 1.9 | 14.0 | 5.1 |
| 0.046 | 28.0 | 4.1 | 5.5 | −1.4 | 4.6 | −5.2 | 1.1 | 16.6 | 34.6 | 0.3 | 16.1 | 9.8 |
| DMSO | 0.0 | 0.0 | 0.0 | 0.0 | 0.0 | 0.0 | 0.0 | 0.0 | 0.0 | 0.0 | 0.0 | 0.0 |

TABLE 68
Percent stabilization effect for ligand-treated mutant cell pools

| Conc. | OT-001363 | | | OT-001084 | | | OT-001075 | | |
|---|---|---|---|---|---|---|---|---|---|
| (μM) | VDF | SDF | TDF | VDF | SDF | TDF | VDF | SDF | TDF |
| 100 | 100.0 | 100.0 | 100.0 | 100.0 | 100.0 | 100.0 | 100.0 | 100.0 | 100.0 |
| 33.333 | 115.5 | 64.5 | 93.5 | 66.8 | 85.1 | 80.8 | 29.4 | 98.6 | −309.5 |
| 11.111 | 115.8 | 38.1 | 62.7 | 58.9 | 62.1 | 70.0 | 9.4 | 94.1 | −360.4 |
| 3.704 | 99.3 | 23.8 | 31.6 | 53.2 | 36.3 | 52.2 | 1.1 | 84.7 | −419.7 |
| 1.235 | 67.3 | 11.8 | 14.3 | 43.4 | 16.8 | 25.4 | −3.4 | 66.0 | −560.3 |
| 0.412 | 31.7 | 8.0 | 5.2 | 27.9 | 6.1 | 7.0 | −7.2 | 42.3 | −682.5 |
| 0.137 | 12.7 | 6.7 | 4.4 | 20.5 | 3.7 | −3.0 | −10.9 | 28.0 | −809.2 |
| 0.046 | 5.6 | 9.3 | 6.7 | 9.1 | 1.5 | −5.7 | −20.0 | 38.2 | −876.2 |
| DMSO | 0.0 | 0.0 | 0.0 | 0.0 | 0.0 | 0.0 | 0.0 | 0.0 | 0.0 |

[0930] Plots of the % effect versus concentration were generated with Graphpad Prism 5 and EC₅₀ values were calculated using a four-parameter nonlinear regression model. EC₅₀ data are shown in Table 69. EC₅₀ values were not calculated for HPE/ZPE <3.

TABLE 69
EC₅₀ values

| | EC50 | EC50 | EC50 |
|---|---|---|---|
| Construct | VDF | SDF | TDF |
| LibC000009 (hPDE5 (Amino acid 535-860 of WT, L573M, F735L)) | 0.2 | 7.9 | 1.8 |
| LibC000015 (hPDE5 (Amino acid 535-860 of WT, T571S, V585M, T723S)) | 5.3 | — | — |
| LibC000020 (hPDE5 (Amino acid 535-860 of WT, A722V, F755L, M760I)) | 12.0 | — | — |
| LibC000005 (hPDE5 (Amino acid 535-860 of WT, I556S, E796D)) | 5.7 | 37.3 | — |
| OT-001363 | 0.9 | 18.9 | 8.3 |
| OT-001084 | 0.7 | 6.5 | 2.8 |

[0931] Based on this screening of a human PDE5 library (Experiment 1), several clones were identified with destabilizing mutations, which upon ligand binding to PDE5 serve to stabilize the protein. LibC000009, and OT-001363 were identified as the top destabilizing mutants from this experiment, as they demonstrated HPE/ZPE values of >3 for all three ligands.

[0932] In a second experiment, cell pools were enriched by 5 rounds of cell sorting as described above. Genomic DNA was isolated, the product gel-purified, cloned into pEASY-Blunt simple cloning vector and transformed into DH5a. Clones were picked and sent for sequencing of hPDE5. Sequencing results are summarized in Table 70 below.

TABLE 70
Mutants from 5^{th} sorted pool

| Construct ID | Mutations |
|---|---|
| OT-001366 | hPDE5 (535-860 of WT, L554R, Q586P, K710N, K730E |
| OT-001367 | hPDE5 (535-860 of WT, H613R |
| OT-001368 | hPDE5 (535-860 of WT, Q586L, S663Y, A762T, E808G) |
| OT-001369 | hPDE5 (535-860 of WT, V548M, D803N) |
| OT-001370 | hPDE5 (535-860 OF WT, L554R, Q589E, A823T) |
| OT-001371 | hPDE5 (535-860 of WT, T571I, K604R, I706N, E795R) |
| OT-001372 | hPDE5 (535-860 of WT, G659A, T784I |
| OT-001373 | hPDE5 (535-860 of WT, Q666H) |
| OT-001374 | hPDE5 (535-860 of WT, H617L, A722V) |
| OT-001375 | hPDE5 (535-860 of WT, N609Y, I799L) |
| OT-001376 | hPDE5 (535-860 of WT, F561L, G659A, T784I) |
| OT-001377 | hPDE5 (535-860 of WT, K795N) |
| OT-001378 | hPDE5 (535-860 of WT, K770Q, K848N) |
| OT-001379 | hPDE5 (535-860 of WT, N605D) |
| OT-001380 | hPDE5 (535-860 of WT, I680S) |
| OT-001381 | hPDE5 (535-860 of WT, V548M, F820I) |
| OT-001382 | hPDE5 (535-860 of WT, I799L) |
| OT-001383 | hPDE5 (535-860 of WT, R607Q) |
| OT-001384 | hPDE5 (535-860 of WT, S550F, L554R) |

[0933] Twenty hPDE5 mutants were selected and sub cloned in-frame with AcGFP into a pLVX-EF1a vector. Lentiviruses expressing these hPDE5 mutants were produced and used to generate cell pools, which were then treated with 10 μM vardenafil for 24 hr and tested by FACS for GFP expression. Data were analyzed by ACEA Novocyte NovoExpress 1.2.4 software. Results are summarized in Table 71. The stabilization ratio was calculated as the fold change in GFP intensity in ligand (vardenafil) treated samples compared to treatment with DMSO (i.e. in the absence of ligand) with the same construct. The destabilizing mutation coefficient was calculated as the fold change in GFP intensity in the PDE5 mutant constructs compared to the PDE5 wildtype construct in the absence of the ligand. Destabilizing mutation coefficients less than 1 are desirable. Stabilization ratios greater than 1 are desired in DDS.

TABLE 71
GFP FACS analysis (MFD of vardenafil-treated clones

| | Mean fluorescence intensity | | | Destabilizing |
|---|---|---|---|---|
| | (MFI) | | Stabilization | mutation |
| Clone No. | DMSO | 10 μM VDF | Ratio | co-efficient |
| OT-001366 | 1620 | 5945 | 3.7 | 0.05 |
| OT-001367 | 9396 | 20753 | 2.2 | 0.32 |
| OT-001368 | 2168 | 10148 | 4.7 | 0.07 |
| OT-001369 | 6864 | 14992 | 2.2 | 0.23 |
| OT-001370 | 2717 | 16617 | 6.1 | 0.09 |
| OT-001371 | 12380 | 33121 | 2.7 | 0.42 |
| OT-001372 | 36071 | 46063 | 1.3 | 1.21 |
| OT-001373 | 32358 | 40657 | 1.3 | 1.09 |
| OT-001374 | 1208 | 1234 | 1.0 | 0.04 |
| OT-001375 | 10926 | 34449 | 3.2 | 0.37 |
| OT-001376 | 3574 | 7332 | 2.1 | 0.12 |
| OT-001377 | 34578 | 51182 | 1.5 | 1.16 |
| OT-001378 | 2050 | 31968 | 15.6 | 0.07 |
| OT-001379 | 6293 | 39197 | 6.2 | 0.21 |
| OT-001380 | 64493 | 92590 | 1.4 | 2.17 |
| OT-001381 | 1400 | 1480 | 1.1 | 0.05 |
| OT-001382 | 37015 | 47513 | 1.3 | 1.25 |
| OT-001383 | 11848 | 39923 | 3.4 | 0.40 |
| OT-001384 | 3009 | 8836 | 2.9 | 0.10 |
| OT-001385 | 975 | 2684 | 2.8 | 0.03 |
| OT-001084 | 1320 | 36657 | 27.8 | 0.04 |
| OT-001084 | 1535 | 35653 | 23.2 | 0.05 |
| OT-001075 | 30404 | 45616 | 1.5 | |
| OT-001075 | 29006 | 43134 | 1.5 | |
| NIH3T3 | 334 | — | — | |

[0934] Five clones with stabilization ratios >4 and destabilizing mutation co-efficient <0.25 were chosen for further FACS titration analysis with the three PDE5 ligands as described previously. Data were analyzed by ACEA Novocyte NovoExpress 1.2.4 and mean fluorescence intensity (MFI) data are shown in Table 72 and Table 73 below. VDF=vardenafil, SDF=sildenafil, TDF=tadalafil.

TABLE 72
GFP FACS analysis (MFI) of ligand-treated clones

| Conc. | OT-001366 | | | OT-001368 | | | OT-001370 | | | OT-001378 | | |
|---|---|---|---|---|---|---|---|---|---|---|---|---|
| (μM) | VDF | SDF | TDF | VDF | SDF | TDF | VDF | SDF | TDF | VDF | SDF | TDF |
| 100 | 10075 | 3958 | 5348 | 16225 | 6454 | 8089 | 22761 | 17471 | 25264 | 47881 | 29835 | 56820 |
| 33.333 | 9430 | 3370 | 4053 | 14792 | 4724 | 6435 | 24683 | 12196 | 21573 | 45279 | 16797 | 39880 |
| 11.111 | 7787 | 3033 | 3280 | 12476 | 3827 | 4822 | 23517 | 7761 | 14127 | 42089 | 8273 | 19260 |
| 3.704 | 5293 | 2852 | 2925 | 9212 | 3384 | 4204 | 20879 | 5502 | 8870 | 34071 | 4837 | 9255 |
| 1.235 | 3566 | 2776 | 2756 | 6223 | 3226 | 3995 | 16399 | 4517 | 6338 | 22789 | 3482 | 5353 |
| 0.412 | 2657 | 2753 | 2961 | 4285 | 3290 | 4029 | 11704 | 3959 | 5497 | 13317 | 3079 | 4077 |
| 0.137 | 2256 | 2777 | 2924 | 3198 | 3183 | 3874 | 7655 | 3559 | 5387 | 6981 | 2874 | 3777 |
| 0.046 | 2044 | 2812 | 2803 | 2679 | 3237 | 3936 | 5515 | 3758 | 5492 | 4477 | 2800 | 3841 |
| DMSO | 2228 | 2781 | 2826 | 2657 | 3322 | 3773 | 3543 | 4171 | 5207 | 2625 | 3087 | 4029 |
| NIH3T3 | 401 | 397 | 462 | 401 | 397 | 462 | 401 | 397 | 462 | 401 | 397 | 462 |

TABLE 73
GFP FACS analysis (MFI) of ligand treated clones

| Conc. | OT-001379 | | | OT-001075 | | | OT-001075 | | |
|---|---|---|---|---|---|---|---|---|---|
| (μM) | VDF | SDF | TDF | VDF | SDF | TDF | VDF | SDF | TDF |
| 100 | 50937 | 49449 | 77286 | 66821 | 39638 | 88657 | 68646 | 65696 | 124011 |
| 33.333 | 47373 | 41359 | 73260 | 44931 | 31873 | 97813 | 53578 | 64475 | 136420 |
| 11.111 | 47019 | 29331 | 55450 | 39279 | 20750 | 89646 | 50082 | 62109 | 143351 |
| 3.704 | 44984 | 18084 | 34005 | 36347 | 11248 | 58392 | 49859 | 57186 | 142331 |
| 1.235 | 39930 | 11933 | 18589 | 32753 | 4647 | 28605 | 47543 | 47748 | 121306 |
| 0.412 | 32217 | 9781 | 12030 | 25177 | 2887 | 12329 | 45747 | 37806 | 102964 |
| 0.137 | 21125 | 9355 | 9940 | 15273 | 2161 | 6399 | 45044 | 34518 | 85774 |
| 0.046 | 13855 | 9188 | 10204 | 7877 | 1983 | 5246 | 45287 | 33102 | 73045 |
| DMSO | 7173 | 9629 | 11082 | 3378 | 2114 | 4958 | 29006 | 35174 | 70819 |
| NIH3T3 | 401 | 397 | 462 | 401 | 397 | 462 | 401 | 397 | 462 |

[0935] The stabilization effect was calculated based on the following formula: % PDE5 stabilization effect=(MFI−ZPE)/(HPE−ZPE)×100 and the results are shown in Table 74 and Table 75 below.

TABLE 74
Percent stabilization effect for ligand-treated mutant clones

| Conc. | OT-001366 | | | OT-001368 | | | OT-001370 | | | OT-001378 | | |
|---|---|---|---|---|---|---|---|---|---|---|---|---|
| (μM) | VDF | SDF | TDF | VDF | SDF | TDF | VDF | SDF | TDF | VDF | SDF | TDF |
| 100 | 100.0 | 100.0 | 100.0 | 100.0 | 100.0 | 100.0 | 100.0 | 100.0 | 100.0 | 100.0 | 100.0 | 100.0 |
| 33.333 | 91.8 | 50.0 | 48.7 | 89.4 | 44.8 | 61.7 | 110.0 | 60.3 | 81.6 | 94.3 | 51.3 | 67.9 |
| 11.111 | 70.8 | 21.4 | 18.0 | 72.4 | 16.1 | 24.3 | 103.9 | 27.0 | 44.5 | 87.2 | 19.4 | 28.9 |
| 3.704 | 39.1 | 6.0 | 3.9 | 48.3 | 2.0 | 10.0 | 90.2 | 10.0 | 18.3 | 69.5 | 6.5 | 9.9 |
| 1.235 | 17.1 | −0.4 | −2.8 | 26.3 | −3.1 | 5.1 | 66.9 | 2.6 | 5.6 | 44.6 | 1.5 | 2.5 |
| 0.412 | 5.5 | −2.4 | 5.4 | 12.0 | −1.0 | 5.9 | 42.5 | −1.6 | 1.4 | 23.6 | 0.0 | 0.1 |
| 0.137 | 0.4 | −0.3 | 3.9 | 4.0 | −4.4 | 2.3 | 21.4 | −4.6 | 0.9 | 9.6 | −0.8 | −0.5 |
| 0.046 | −2.3 | 2.6 | −0.9 | 0.2 | −2.7 | 3.8 | 10.3 | −3.1 | 1.4 | 4.1 | −1.1 | −0.4 |
| DMSO | 0.0 | 0.0 | 0.0 | 0.0 | 0.0 | 0.0 | 0.0 | 0.0 | 0.0 | 0.0 | 0.0 | 0.0 |
| NIH3T3 | — | — | — | — | — | — | — | — | — | — | — | — |

TABLE 75
Percent stabilization effect for ligand-treated mutant clones

| Conc. | OT-001379 | | | OT-001075 | | | OT-001075 | | |
|---|---|---|---|---|---|---|---|---|---|
| (μM) | VDF | SDF | TDF | VDF | SDF | TDF | VDF | SDF | TDF |
| 100 | 100.0 | 100.0 | 100.0 | 100.0 | 100.0 | 100.0 | 100.0 | 100.0 | 100.0 |
| 33.333 | 91.9 | 79.7 | 93.9 | 65.5 | 79.3 | 110.9 | 62.0 | 96.0 | 123.3 |
| 11.111 | 91.0 | 49.5 | 67.0 | 56.6 | 49.7 | 101.2 | 53.2 | 88.2 | 136.4 |
| 3.704 | 86.4 | 21.2 | 34.6 | 52.0 | 24.3 | 63.8 | 52.6 | 72.1 | 134.4 |
| 1.235 | 74.8 | 5.8 | 11.3 | 46.3 | 6.8 | 28.3 | 46.8 | 41.2 | 94.9 |
| 0.412 | 57.2 | 0.4 | 1.4 | 34.4 | 2.1 | 8.8 | 42.2 | 8.6 | 60.4 |
| 0.137 | 31.9 | −0.7 | −1.7 | 18.7 | 0.1 | 1.7 | 40.5 | −2.1 | 28.1 |
| 0.046 | 15.3 | −1.1 | −1.3 | 7.1 | −0.3 | 0.3 | 41.1 | −6.8 | 4.2 |
| DMSO | 0.0 | 0.0 | 0.0 | 0.0 | 0.0 | 0.0 | 0.0 | 0.0 | 0.0 |
| NIH3T3 | — | — | — | — | — | — | — | — | — |

[0936] Plots of the % effect versus concentration were generated with Graphpad Prism 5 and EC₅₀ values were calculated using a four-parameter nonlinear regression model. EC₅₀ data are shown in Table 76. EC₅₀ values were not calculated for HPE/ZPE <3.

TABLE 76
EC₅₀ values for mutant cell pools

| | EC₅₀ | EC₅₀ | EC₅₀ |
|---|---|---|---|
| Construct ID (Description) | VDF | SDF | TDF |
| OT-001366 (hPDE5 (535-860 of WT, L554R, Q586P, K710N, K730E) | 5.6 | — | — |
| OT-001368 (hPDE5 (535-860 of WT, Q586L, S663Y, A762T, E808G)) | 4.6 | — | — |
| OT-001370 (hPDE5 (535-860 of WT, L554R, Q589E, A823T)) | 0.8 | 21.4 | 14.8 |
| OT-001378 (hPDE5 (535-860 of WT, K770Q, K848N)) | 1.6 | 29.4 | 19.6 |
| OT-001379 (hPDE5 (535-860 of WT, N605D)) | 0.3 | 13.6 | 6.4 |
| OT-001084 | 0.4 | 14.2 | 2.7 |
| OT-001075 | — | — | — |

[0937] Based on this screening of a human PDE5 library (Experiment 2), several clones were identified with destabilizing mutations, which upon ligand binding to PDE5 serve to stabilize the protein. OT-001366, OT-001368, OT-001370, OT-001378 and OT-001379 were all identified as destabilizing mutants that may warrant further characterization.

[0938] Select PDE5 clones from both experiment 1 and experiment 2 were directly compared. Cells expressing individual clones were then incubated with vehicle, Dimethylsulfoxide (DMSO), 10 μM Vardenafil, Sildenafil or Tadalafil. Median GFP fluorescence was quantified using FACS and the results from the experiment are presented in Table 77. The stabilization ratio was calculated as the fold change in GFP intensity in ligand treated samples compared to treatment with DMSO (i.e. in the absence of ligand) with the same construct. The destabilizing mutation co-efficient was calculated as the fold change in GFP intensity in the DHFR mutant constructs in the absence of the ligand; to the GFP intensity of the wildtype construct in the absence of the ligand and is represented in Table 78. Destabilizing mutation co-efficient ratio less than 1 and stabilization ratios greater than 1 are desired in DDs. The experiments were conducted using the PDE5 (R732L) mutant as a control.

TABLE 77
Fluorescence intensity of PDE5 mutants

| Construct | | | | |
|---|---|---|---|---|
| ID/Library | | | | |
| clone ID | DMSO | Vardenafil | Sildenafil | Tadalafil |
| Parental | 46.47 | — | — | — |
| OT-001084 | 255.47 | 8608 | 3103 | 3428 |
| LibC000020 | 273 | 2499 | 513 | 509 |
| OT-001363 | 315.67 | 1566 | 1356 | 1132 |
| LibC000005 | 359 | 4240 | 1136 | 814 |
| LibC000009 | 881.33 | 7393 | 8260 | 8353 |
| OT-001075 | 6732 | 12000 | 7082 | 10100 |

TABLE 78
Ratio calculations for PDE5 mutants

| Construct | | | | Destabilizing |
|---|---|---|---|---|
| ID/Library | Stabilization ratio | | | mutation |
| clone ID | Vardenafil | Sildenafil | Tadalafil | co-efficient |
| Parental | — | — | — | — |
| OT-001075 | 1.78 | 1.05 | 1.50 | — |
| OT-001084 | 33.70 | 12.15 | 13.42 | 0.04 |
| LibC000020 | 9.15 | 1.88 | 1.86 | 0.04 |
| OT-001363 | 4.96 | 4.30 | 3.59 | 0.05 |
| LibC000005 | 11.81 | 3.16 | 2.27 | 0.05 |
| LibC000009 | 8.39 | 9.37 | 9.48 | 0.13 |

[0939] As shown in Table 78, all constructs showed destabilizing mutation co-efficient less than one indicating strong destabilization. All constructs also showed ligand dependent stabilization with all three ligands as observed by the stabilization ratios of less than one. It was noted, however, that the ligand dependent stabilization observed for all the mutants generated by random mutagenesis was less than the stabilization ratios observed with the PDE5 (R732L) mutation.

### Example 16. Analysis of IL15-PDE5-R732 Constructs

[0940] A library of mutations was generated by site directed mutagenesis of amino acid 732 of PDE5. The amino acid at the position 732 was mutated to any of the known amino acids, including, but not limited to, aspartic acid, glutamic acid, glutamine, asparagine, histidine, serine, threonine, tyrosine, cysteine, methionine, tryptophan, alanine, isoleucine, leucine, phenylalanine, valine, proline, and glycine. and each of the mutants was fused to a payload of interest, IL15-IL15Ra fusion protein via a linker. The constructs were transiently transfected into HEK 293T cells and incubated with 1 μM Vardenafil for 48 hours. The properties of the DDs regulated IL15-IL15Ra payloads were analyzed in the presence and absence of ligands via FACS using the HA antibody as previously described. The results are shown in Table 79, where the stabilization ratio was defined as the ratio of expression, function or level of a protein of interest, i.e. IL15-IL15Ra in response to the stimulus, i.e. Vardenafil; to the expression, of the IL15-IL15Ra in the absence of the stimulus, i.e. DMSO control. The constructs were ordered by their stabilization ratio from highest to the lowest. The destabilizing mutation coefficient was calculated as the fold change in GFP intensity in the PDE5 mutant constructs compared to the PDE5 wildtype construct OT-IL15-082) in the absence of the ligand. Destabilizing mutation coefficients less than 1 are desirable. Stabilization ratios greater than 1 are desired in DDs.

TABLE 79
% of HA positive, IL15-IL15Ra positive cells

| | | | | | Destabilizing |
|---|---|---|---|---|---|
| | | | 1 μM | Stabilization | mutation |
| Construct ID | Mutation | DMSO | Vardenafil | ratio | co-efficient |
| OT-001341 | R732G | 16 | 45.5 | 2.84 | 0.34 |
| OT-001336 | R732N | 19 | 43.5 | 2.29 | 0.41 |
| OT-001339 | R732E | 17.5 | 40 | 2.29 | 0.37 |
| OT-001333 | R732Y | 20.3 | 46.4 | 2.29 | 0.43 |
| OT-001335 | R732Q | 19.7 | 43.9 | 2.23 | 0.42 |
| OT-001338 | R732D | 19.6 | 43.4 | 2.21 | 0.42 |
| OT-001332 | R732A | 22 | 47.3 | 2.15 | 0.47 |
| OT-001334 | R732H | 18.9 | 39.5 | 2.09 | 0.40 |
| OT-001328 | R732M | 21.7 | 44.9 | 2.07 | 0.46 |
| OT-001329 | R732V | 21.3 | 43.7 | 2.05 | 0.46 |
| OT-001324 | R732L | 23.7 | 47 | 1.98 | 0.51 |
| OT-001340 | R732C | 22.9 | 43.3 | 1.89 | 0.49 |
| OT-001342 | R732W | 23.4 | 44.2 | 1.89 | 0.50 |
| OT-001330 | R732S | 27.3 | 51.4 | 1.88 | 0.58 |
| OT-001327 | R732I | 24.3 | 44.6 | 1.84 | 0.52 |
| OT-001337 | R732K | 27.6 | 44.7 | 1.62 | 0.59 |
| OT-001331 | R732P | 29.8 | 40.8 | 1.37 | 0.64 |
| OT-001321 | WT | 46.8 | 56 | 1.20 | — |

[0941] As shown in Table 79, constructs OT-001341, OT-001336, OT-001339, OT-IL15-098, OT-001335, OT-001338, OT-001332, OT-001334, OT-001328, and OT-001329 showed stabilization ratios greater than the initially identified PDE5 DD mutant, R732L indicating superior ligand dependent stabilization. While constructs, OT-001340, OT-001342, OT-001330, OT-001327, OT-001337 and OT-001331 showed ligand dependent stabilization lower than the R723L construct. However, all constructs displayed stabilization ratios greater than wild type construct. Compared to the wildtype control, all constructs tested also showed lower percentage HA positive cells in the absence of ligand and destabilizing mutation co-efficient less than 1 indicating that engineering any of the mutations at position 732 of the full length PDE5, destabilizes the protein. Taken together, mutagenesis of the PDE5-IL15-IL15Ra constructs at R732 of PDE5 identified mutants with reduced basal expression and improved dynamic range.

[0942] HA and/or Flag tags were cloned into vectors containing the IL15-IL15Ra fusion constructs to generate constructs OT-001388, OT-001321, OT-001323, OT-001324 and OT-001325. One of the tags was placed in frame with the IL15 sequence while the other was placed in frame with the IL15Ra sequence. The tags were added to facilitate the easy detection of both IL15 and IL15Ra. HEK 293T cells were transiently transfected with the constructs for 24 hours and treated with Vardenafil for 48 hours at 1 μM. The percentage of Flag and HA double positive cells was analyzed by FACS. The results are shown in Table 80. The stabilization ratio was defined as the ratio of expression, function or level of a protein of interest, i.e. IL15-IL15Ra in response to the stimulus, i.e. Vardenafil; to the expression, of the IL15-IL15Ra in the absence of the stimulus, i.e. DMSO control. The destabilization ratio was calculated as the ratio of expression, of IL15Ra in the absence of the stimulus specific to the effector module i.e. Vardenafil to the expression, function or level of the protein of interest, that is expressed constitutively (OT-001388) and in the absence of the stimulus specific to the SRE. The destabilizing mutation co-efficient refers to the expression, function or level or a protein of interest, appended to a particular DD mutant e.g. PDE5 (R732L), in the absence of the stimulus specific to the SRE; to the protein expression, function or level of the protein of interest, appended to the corresponding wildtype sequence from which the particular DD mutant is derived e.g., PDE5 (WT), in the absence of the stimulus. The Stabilization ratios greater than one and destabilization ratio as well as destabilizing mutation co-efficient less than one is desired.

TABLE 80
Percentage HA positive and Flag positive cells

| | | | | | | Destabilizing |
|---|---|---|---|---|---|---|
| | | | | Stabilization | Destabilization | mutation |
| Construct | Mutation | Control | Vardenafil | ratio | ratio | coefficient |
| OT-001388 | No DD | 26 | 25 | 0.96 | — | — |
| OT-001321 | WT | 19.6 | 16.8 | 0.86 | 0.75 | — |
| OT-001323 | F736A | 8.11 | 24.9 | 3.07 | 0.31 | 0.41 |
| OT-001324 | R723L | 9.25 | 26.4 | 2.85 | 0.36 | 0.47 |
| OT-001325 | R732L, F736A | 7.44 | 21.6 | 2.90 | 0.29 | 0.38 |

[0943] As expected, the constitutive construct OT-001388 and the PDE5 wildtype construct, OT-001321 did not show any ligand dependent increase in double positive cells. Ligand dependent increase in double positive cells was observed with constructs 084-086. These data suggest that the tags can be utilized as reliable surrogates to investigate the expression of IL15 and IL15Ra proteins in the constructs. All IL15-IL15Ra constructs appended to a DD mutant showed destabilization ratios and destabilizing mutant co-efficient less than 1, which indicates that the specific mutations engineered can destabilize the protein of interest.

### Example 17. Anti-Tumor Efficacy of Tadalafil and Vardenafil

[0944] To evaluate PDE5 inhibitor small molecule drugs, human T cells were transduced with lentiviral vectors expressing a human CD19-targeting CAR fused to PDE5-DD. To confirm transduction, T cells were cultured with Tadalafil or Vardenafil (ligand) and analyzed by flow cytometry analysis for CD19 CAR expression. To evaluate anti-tumor activity in vivo, immunodeficient (NOD.Cg PrkdcscidIl2rgtm1Wjl/SzJ, NSG) mice were implanted with luciferase-expressing, CD19+ Nalm6 B cell leukemia cell line (tumor). After tumor implantation, tumor burden was assessed by bioluminescent imaging (BLI) on day 5 and mice were distributed into groups to create equivalent tumor burden across cohorts. T cells were thawed and tumor bearing NSG mice were infused with either: (1) unmodified T cells, (2) PDE5-regulated CD19-CART (OT-001456) cells, or (3) Constitutive CD19-CART (OT-001407). Total T cell dose was adjusted to achieve 5 million CD19-CAR⁺ T cells and injected into mice on day 5. Ligand treatment was initiated on day 7 and continued till day 28. Mice were dosed orally Q.D (once a day) or B.I.D (twice a day). for 25 days with Tadalafil or Vardenafil at 0 (vehicle, DMSO alone), or 30 mg/kg (mpk). Tumor growth was monitored by bi-weekly bioluminescent imaging (FIG. 9A and FIG. 9B). Increased Tadalafil dose-density from a Q.D. dose regime to a B.I.D dose regime significantly increased DD-CAR T cell anti-tumor efficacy in mice transduced with OT-001456. Dosing with Vardenafil in OT-001456 transduced mice reduced tumor burden compared to mice treated with vehicle controls (OT-001456 transduced or untransduced). However, increasing dose density did not improve Vardenafil dependent anti-tumor efficacy of OT-001456 transduced T cells.

### Example 18. Induction of Apoptosis by Regulated CD19 CAR

[0945] Donor derived T cells were thawed and activated overnight in the presence of CD3/CD28 Dynabeads at a 3:1 bead: cell ratio. The following day, cells were transduced with lentivirus corresponding to constructs, OT-001407 and OT-001456. Cells were expanded over the course of 9 days by the addition of fresh media, maintaining cells around 0.5×10\hat{ }6 cells/mL. The cells were then frozen. To confirm that the transduced T cells are functional, they were thawed and cultured with CD19 expressing target cells, Nalm6-Katushka, at effector: target ratios of 10:1, 3:1, 1:1, 0.3:1, 0.1:1, and 0.03:1 for 6 days. Images captured on the Incucyte Zoom were analyzed for proliferation of target cells by measuring red fluorescence over time, and for apoptosis of target cells by measuring Annexin V-Green reagent over time. OT-001407 effector cells were included as a positive control, which effectively killed Nalm6 targets at 1:1 ratio and above. OT-001456 transduced cells demonstrated regulated CAR activity as evidenced by the killing Nalm6 target cells only in the presence of 3 μm Tadalafil at 10:1 effector: target ratio, but had no activity in the presence of DMSO.

[0946] Forty-eight hours after co-cultures were started, supernatants were harvested for cytokines, IL2 and IFN gamma analysis by MSD. Data show that inhibition of proliferation and cytokine secretion are proportional to the amount of CAR expression.

### Example 19. Regulated CAR Expression and Function with Different Construct Designs

[0947] To test regulated CAR expression and function with CD28 costimulatory domain, donor T cells were thawed and activated overnight in the presence of CD3/CD28 Dynabeads at a 3:1 bead: cell ratio. The following day, cells were transduced with lentivirus corresponding to OT-001456 and OT-001508 constructs. Cells were expanded by addition of fresh media over the course of 10 days, maintaining cells around 0.5×10\hat{ }6 cells/mL. Cells were co-cultured with Nalm6-Katushka cells at T cell: Nalm6 ratios of 10:1, 5:1, and 2.5:1 for 4 days to evaluate CAR function in the presence or absence of 10 μm tadalafil. Images captured on the Incucyte Zoom were analyzed for proliferation of target cells by measuring red fluorescence over time. To confirm CAR expression, FACS was performed with CD19-Fc staining on day 7 and day 10 of the T cell expansion, following an overnight incubation with 10 μM tadalafil. Constructs with CD28 costimulatory domain appeared to lose expression over time, similar to OT-001456. In contrast to OT-001456, construct with CD28 co-stimulatory domains OT-001508 demonstrated high basal killing even in the absence of tadalafil.

[0948] Experiments similar to those described in testing CD28 domain were performed to test for regulated CAR expression and function in constructs where the DD domain is placed internally versus at the C terminal domains Constructs utilized included OT-001456 with C terminal PDE5 and OT-001511 with PDE5 placed internally. Regulated CAR expression was maintained when the DD was placed internally within the construct. Tadalafil dependent cell killing was also observed with the internal PDE5 DD construct Similar results were obtained when performed in cells transduced with hPDE5 wildtype with a C terminal PDE5 placement (OT-001512) or an internal PDE5 placement (OT-001510). The wild type hPDE5 constructs demonstrated that the CAR containing the wildtype PDE5 had reduced CAR expression compared to the PDE5 DD regulated constructs. However, the expression of CAR was sufficient to reduce Nalm6 proliferation indicating that the expression levels were functional.

[0949] The percentage of CAR positive cells and Median fluorescence intensity of the CAR constructs described in this example are provided in Table 81.

TABLE 81
CAR expression

| | Day 7 | | | | Day 10 | | | |
|---|---|---|---|---|---|---|---|---|
| | DMSO | | Tadalafil | | DMSO | | Tadalafil | |
| | Avg (% | Avg | Avg (% | Avg | Avg (% | Avg | Avg (% | Avg |
| Construct | CAR+) | (MF) | CAR+) | (MF) | CAR+) | (MF) | CAR+) | (MF) |
| OT-001407 | 66.1 | 3475 | 65.3 | 3736 | 51 | 723 | 51.8 | 980 |
| OT-001512 | 67.7 | 1584 | 67.4 | 1811 | 49.2 | 459 | 51.5 | 547 |
| OT-001456 | 445 | 253 | 74.3 | 1944 | 1.7 | 49 | 32.5 | 213 |
| OT-001501 | 62 | 591 | 70.3 | 1721 | 12 | 106 | 39.6 | 279 |
| OT-001510 | 68 | 1245 | 66.7 | 1285 | 35.9 | 144 | 39.8 | 181 |
| OT-001511 | 59.5 | 505 | 69.7 | 1591 | 7.7 | 84 | 22.2 | 121 |
| OT-001509 | 63.5 | 658 | 68.8 | 1621 | 14.5 | 104 | 29.7 | 151 |
| OT-001508 | 23.8 | 90 | 44 | 172 | 0.6 | 36 | 12.6 | 71 |
| Vector | 0.9 | 18 | 1 | 18 | 0.4 | 13 | 0.1 | 12 |
| Untransduced | 0.5 | 6 | 0.4 | 6 | 0.2 | 10 | 0.1 | 10 |

[0950] U2OS cells were transduced with various volumes of lentivirus for GFP tagged constitutive (OT-001905) or PDE5-DD (OT-001904) CD19 CAR construct, or HA tagged constitutive (OT-001906) or PDE5-DD (OT-001903) and (OT-001907) CD19 CAR construct, or empty vector. Cells were cultured overnight in the presence or absence of 10 μm tadalafil. Expression of CAR was detected by staining cells with 10 ug/mL CD19-Fc. A correlation was observed between (a) CAR expression and the GFP tag/HA tag expression, and (b) the regulated expression of CAR and GFP/HA expression by PDE5-DD.

[0951] U2OS cells were transduced with lentivirus corresponding to the constitutive (OT-001906) or PDE5-DD (OT-001903) HA-tagged CD19-CAR constructs, or empty vector. Cells were seeded at 5000 cells/well in 96 well plates and cultured overnight. Expression of CAR was detected using an anti-HA antibody and Incucyte Immunocytochemistry (Ann Arbor, Mich.) with Opti-Green background eliminator and FabFluor488 reagents according to manufacturer's protocol, and quantitated using Incucyte Zoom software to measure green fluorescence (antibody binding per well) normalized to cell confluence to account for growth of cells over time. A negative control mouse IgG1 isotype antibody was included. Antibodies were added 5 hours after the initiation of the experiment and an increase in fluorescence was observed in the cells expressing the constitutive construct or the ligand pretreated regulated construct, but not the regulated construct in the absence of ligand. As expected, the negative control mouse IgG1 isotype resulted in no fluorescent signal. At 24 hours, 5 μM tadalafil was added to the (OT-001903) group and an increase fluorescence was observed which correlated with the stabilization of the DD.

[0952] T cells from transduced with OT-001903 or OT-001906 were treated overnight with 10 μM tadalafil or vardenafil or left untreated. Cells were washed 3 times with cell media, then stained for CAR expression using 10 μg/mL CD19-Fc 0, 2, 4, and 24 hr post-washout. CD19 CAR expression on the surface of T cells began to decrease as early as two hours after ligand withdrawal and by 24 hours CAR expression levels were similar to untreated controls.

[0953] To test for regulated CAR expression with GFP and Luciferase tagged constructs, T cells were thawed and activated overnight in the presence of CD3/CD28 Dynabeads at a 3:1 bead: cell ratio. The following day, cells were transduced with lentivirus from indicated constructs. Constructs OT-001602, OT-001598, OT-001456, OT-001902, OT-001901, OT-001900, OT-001899, OT-001898, and OT-001908 were tested with increasing volumes of lentivirus. Cells were expanded by addition of fresh media over the course of 10 days, maintaining cells around 0.5×10\hat{ }6 cells/mL, then co-cultured with Nalm6-iRFP cells to evaluate CAR function in the presence or absence of 10 μM tadalafil. Images captured on the Incucyte Zoom were analyzed for proliferation of target cells by measuring red fluorescence over time. To confirm CAR expression, FACS was performed with CD19-Fc staining on day 7 and day 10 of the T cell expansion, following an overnight incubation with 10 μm tadalafil. For GFP containing constructs, CAR expression correlated with increased GFP fluorescence. For luciferase constructs, luminescence was measured following addition of luciferin substrate for 5 minutes and similar to GFP, luciferase showed an increased signal which correlated with CAR expression. The increase in signal for both GFP and luciferase activity also corresponded to higher transduction amounts.

### Example 20. In Vivo Ligand Dosing

[0954] An in vivo study was performed to determine if cell dosing and/or various ligand exposure schemas lead to enhanced efficacy against NALM-Luc cells in female NSG mice. The different groups included in the study are provided in Table 82.

TABLE 82
CAR expression

| | | in vitro | in vivo | Dosing | Cell Dose |
|---|---|---|---|---|---|
| Group | Construct | treatment | treatment | Schedule | (M = million) |
| 1 | Empty Vector | None | Vehicle | | 5M |
| 2 | OT-001407 | None | Vehicle | | 1M |
| 3 | OT-001512 | None | Vehicle | | 5M |
| 4 | OT-001456 | None | Vehicle | | 5M |
| 5 | OT-001456 | None | Tadalafil | BID 50 mg/kg | 5M |
| 6 | OT-001456 | None | Tadalafil | BID 100 mg/kg (for | 5M |
| | | | | 7 days); QD 50 mg/kg | |
| 7 | OT-001456 | None | Tadalafil | BID 100 mg/kg (for | 5M |
| | | | | 7 days); BID 50 mg/kg | |
| 8 | OT-001456 | Tadalafil 10 μM | Vehicle | | 5M |
| | | (24 hr prior to freeze) | | | |
| 9 | OT-001456 | Tadalafil 10 μM | Tadalafil | BID 50 mg/kg | 5M |
| | | (24 hr prior to freeze) | | | |
| 10 | OT-001456 | None | Vehicle | | 5M (day 7) and |
| | | | | | 5M (day 10) |
| 11 | OT-001456 | None | Tadalafil | BID 50 mg/kg | 5M (day7) and |
| | | | | | 5M (day 10) |
| 12 | OT-001456 | None | Vehicle | | 10M |
| 13 | OT-001456 | None | Tadalafil | BID 50 mg/kg | 10M |
| 14 | OT-001455 | None | Vehicle | | 5M |
| 15 | OT-001455 | None | Tadalafil | BID 50 mg/kg | 5M |

[0955] The average bioluminescence intensity was measured for all groups until day 31. The results are shown in Table 83.

TABLE 83
Average BLI

| Days Post | 6 | 13 | 19 | 23 | 26 | 31 |
|---|---|---|---|---|---|---|
| Empty Vector | 5.78E+06 | 1.42E+09 | 1.71E+10 | | | |
| | 2.72E+06 | 4.63E+08 | 3.60E+09 | 4.04E+10 | | |
| | 3.89E+06 | 1.36E+09 | 1.31E+09 | 1.19E+10 | | |
| | 1.11E+06 | 9.48E+07 | 3.16E+09 | 1.14E+10 | | |
| | 3.82E+06 | 8.06E+08 | 1.11E+10 | | | |
| | 2.16E+06 | 5.71E+08 | 9.52E+09 | | | |
| | 2.13E+06 | 2.60E+08 | 1.06E+10 | | | |
| | 2.70E+06 | 7.32E+08 | 9.47E+09 | | | |
| OT-001407 | 1.31E+06 | 2.86E+07 | 2.44E+08 | 1.08E+09 | 1.03E+10 | |
| (1M) | 5.72E+06 | 1.12E+08 | 1.10E+09 | 1.73E+09 | 8.83E+09 | |
| | 3.79E+06 | 9.43E+07 | 1.14E+09 | 5.13E+09 | | |
| | 4.03E+06 | 7.71E+07 | 9.38E+08 | 3.65E+09 | 2.81E+10 | |
| | 2.68E+06 | 5.10E+07 | 4.76E+08 | 1.77E+09 | 1.04E+10 | |
| | 2.77E+06 | 1.12E+08 | 5.20E+08 | 2.72E+09 | 1.81E+10 | |
| | 2.12E+06 | 4.81E+07 | 7.84E+08 | 2.69E+09 | 1.48E+10 | |
| | 2.19E+06 | 1.09E+08 | 5.81E+08 | 1.61E+09 | 1.02E+10 | |
| OT-001512 | 2.65E+06 | 8.20E+05 | 1.17E+06 | 5.18E+06 | 1.06E+07 | 5.03E+07 |
| (5M PDE5 | 1.51E+06 | 1.20E+06 | 1.40E+06 | 1.94E+06 | 5.64E+06 | 9.82E+07 |
| WT) | 5.70E+06 | 1.20E+06 | 3.06E+06 | 6.29E+06 | 1.25E+07 | 7.62E+06 |
| | 4.11E+06 | 1.05E+06 | 9.67E+05 | 7.95E+05 | 1.33E+06 | 1.11E+06 |
| | 2.11E+06 | 9.44E+05 | 1.00E+06 | 8.88E+05 | 9.22E+05 | 1.49E+06 |
| | 2.20E+06 | 9.02E+05 | 9.11E+05 | 1.25E+06 | 2.95E+06 | 1.35E+07 |
| | 3.71E+06 | 4.23E+06 | 1.00E+07 | 8.18E+06 | 1.47E+07 | 8.09E+07 |
| | 2.78E+06 | 9.51E+05 | 7.60E+05 | 5.68E+05 | 5.41E+05 | 8.20E+05 |
| OT-001456 | 3.68E+06 | 4.13E+08 | 1.24E+10 | | | |
| (Vehicle) | 2.05E+06 | 2.65E+08 | 4.08E+09 | | | |
| | 4.13E+06 | 1.17E+07 | 1.72E+10 | | | |
| | 2.64E+06 | 3.08E+08 | 8.41E+09 | | | |
| | 1.54E+06 | 1.19E+08 | 2.58E+09 | 8.37E+09 | | |
| | 5.66E+06 | 9.57E+08 | 3.24E+09 | 4.33E+10 | | |
| | 2.22E+06 | 4.19E+08 | 8.71E+09 | | | |
| | 2.82E+06 | 5.02E+08 | 9.29E+09 | | | |
| OT-001456 | 5.62E+06 | 5.33E+06 | 6.96E+06 | 6.84E+05 | 1.01E+06 | 5.87E+08 |
| (TDF 50 mpk | 4.25E+06 | 2.29E+06 | 6.91E+06 | 6.48E+05 | 2.95E+07 | 1.58E+06 |
| BID) | 1.55E+06 | 1.11E+06 | 5.08E+05 | 1.96E+06 | 4.37E+06 | 3.39E+07 |
| | 2.64E+06 | 3.75E+06 | 5.03E+06 | 5.96E+05 | 3.62E+07 | 1.67E+07 |
| | 2.85E+06 | 3.61E+06 | 5.45E+05 | 2.82E+07 | 4.12E+07 | 2.26E+06 |
| | 3.62E+06 | 3.32E+06 | 4.62E+05 | 6.02E+05 | 6.84E+05 | 2.66E+07 |
| | 2.05E+06 | 3.07E+06 | | | | |
| | 2.27E+06 | 2.95E+07 | | | | |
| OT-001456 | 4.35E+06 | 8.29E+06 | 8.71E+06 | 4.15E+07 | 2.10E+08 | 3.46E+09 |
| (TDF 100 mpk | 2.31E+06 | 1.39E+06 | 4.54E+06 | 1.17E+07 | 1.10E+06 | 3.63E+06 |
| BID (7 days) | 1.58E+06 | 1.45E+06 | 3.38E+06 | 1.50E+07 | 5.32E+07 | 1.61E+08 |
| followed by | 5.54E+06 | 4.62E+06 | 6.09E+05 | 3.80E+07 | 1.84E+08 | 2.00E+08 |
| 50 mpk QD) | 2.03E+06 | 8.08E+05 | 6.17E+05 | 4.72E+07 | 2.46E+06 | 1.88E+09 |
| | 2.85E+06 | 6.72E+05 | 1.42E+07 | 1.42E+06 | 3.70E+08 | 3.60E+09 |
| | 3.59E+06 | 3.27E+06 | 8.86E+06 | 5.04E+07 | 2.05E+08 | 1.49E+09 |
| | 2.63E+06 | 5.69E+05 | 4.40E+06 | 1.03E+07 | 4.85E+07 | 9.72E+07 |
| OT-001456 | 2.86E+06 | 2.89E+06 | 5.46E+05 | 7.61E+06 | 1.06E+07 | 1.13E+08 |
| (TDF 100 mpk | 1.59E+06 | 5.11E+05 | 3.47E+06 | 5.86E+05 | 1.95E+07 | 1.66E+07 |
| BID (7 days) | 2.00E+06 | 2.40E+06 | 6.36E+06 | 1.72E+07 | 5.24E+07 | 3.75E+08 |
| followed by | 2.31E+06 | 1.92E+06 | 3.08E+06 | 1.40E+07 | 1.24E+07 | 1.10E+07 |
| 50 mpk BID) | 2.62E+06 | 3.73E+06 | 5.78E+05 | 9.21E+06 | 2.69E+06 | 2.76E+08 |
| | 4.43E+06 | 5.66E+05 | 3.14E+06 | 6.16E+06 | 1.00E+07 | 1.90E+07 |
| | 3.59E+06 | 9.95E+06 | 1.53E+07 | 6.86E+05 | 1.13E+08 | 1.89E+09 |
| | 5.51E+06 | 7.59E+06 | 7.38E+06 | 2.13E+07 | 1.46E+06 | 4.44E+08 |
| OT-001456 | 2.58E+06 | 1.92E+08 | 3.52E+07 | 8.32E+07 | 3.32E+10 | |
| (10 μM in | 2.32E+06 | 1.06E+08 | 2.97E+09 | 9.80E+09 | | |
| Vitro_Vehicle) | 2.00E+06 | 2.32E+06 | 3.03E+09 | 1.32E+10 | | |
| | 1.59E+06 | 1.22E+08 | 3.38E+09 | 1.28E+10 | | |
| | 4.43E+06 | 4.09E+08 | 5.16E+09 | | | |
| | 5.42E+06 | 5.27E+08 | 3.35E+07 | 6.89E+09 | | |
| | 2.87E+06 | 2.07E+08 | 9.73E+06 | 6.58E+09 | | |
| | 3.55E+06 | | | | | |
| OT-001456 | 1.60E+06 | 1.32E+06 | 1.85E+06 | 5.19E+06 | 1.56E+07 | 1.37E+07 |
| (10 μM in | 1.81E+06 | 1.80E+06 | 4.61E+05 | 9.32E+05 | 8.50E+05 | 1.61E+06 |
| Vitro and TDF | 2.53E+06 | 1.97E+06 | 4.41E+06 | 4.13E+05 | 6.08E+05 | 6.91E+06 |
| 50 mpk BID) | 3.47E+06 | 2.58E+06 | 9.23E+05 | 4.94E+05 | 3.08E+07 | 3.14E+07 |
| | 2.92E+06 | 1.78E+06 | 4.18E+06 | 1.05E+07 | 1.60E+07 | 3.77E+07 |
| | 5.32E+06 | 1.45E+07 | 1.26E+07 | 4.13E+07 | 6.03E+07 | 1.80E+09 |
| | 4.44E+06 | 1.35E+07 | 6.35E+07 | 1.42E+08 | 2.89E+08 | 3.00E+09 |
| | 2.33E+06 | 1.18E+06 | 1.07E+06 | 2.14E+06 | 1.17E+06 | 5.78E+06 |
| OT-001456 | 1.79E+06 | 1.30E+08 | 2.19E+07 | 1.43E+09 | 3.14E+07 | 2.96E+10 |
| (5M (day | 2.93E+06 | 1.85E+08 | 2.36E+09 | 1.12E+10 | | |
| 7) + 5M (day | 1.60E+06 | 7.71E+07 | 4.63E+08 | 4.20E+09 | 9.97E+07 | |
| 10) Vehicle) | 4.46E+06 | 2.89E+08 | 2.98E+09 | 6.01E+09 | | |
| | 5.26E+06 | 4.40E+08 | 5.56E+09 | | | |
| | 2.53E+06 | 9.93E+07 | 2.14E+09 | 8.57E+09 | | |
| | 2.35E+06 | 1.59E+08 | 1.54E+07 | 6.94E+07 | 1.30E+10 | |
| | 3.47E+06 | | | | | |
| OT-001456 | 3.44E+06 | | | | | |
| (5M (day | 4.63E+06 | 1.69E+06 | 4.45E+05 | 4.57E+06 | 4.72E+06 | 8.27E+06 |
| 7) + 5M (day | 5.25E+06 | 4.46E+05 | | | | |
| 10) TDF | 1.63E+06 | 5.02E+05 | 1.05E+06 | 1.24E+06 | 1.52E+06 | 2.16E+06 |
| 50 mpk BID | 2.49E+06 | 1.16E+06 | 5.10E+05 | 5.34E+05 | 8.27E+05 | 4.90E+05 |
| | 2.93E+06 | 1.15E+06 | 5.07E+05 | 5.13E+05 | 7.71E+05 | 4.80E+05 |
| | 2.37E+06 | 1.24E+06 | 1.31E+06 | 4.30E+05 | | |
| | 1.78E+06 | 9.98E+05 | 1.30E+06 | 1.07E+06 | 1.28E+06 | 9.16E+05 |
| OT-001456 | 3.05E+06 | 1.60E+08 | 5.34E+09 | | | |
| (10M) Vehicle | 2.38E+06 | 1.06E+08 | 3.40E+09 | 1.76E+10 | | |
| | 4.65E+06 | 1.23E+08 | 2.53E+09 | 1.42E+10 | | |
| | 1.64E+06 | 2.81E+07 | 5.84E+08 | | | |
| | 2.48E+06 | 1.34E+08 | 3.02E+09 | 6.21E+09 | | |
| | 1.76E+06 | 9.03E+07 | 1.98E+09 | 4.85E+09 | 1.90E+10 | |
| | 3.32E+06 | 1.77E+08 | 4.17E+09 | | | |
| | 5.23E+06 | 3.56E+08 | 5.38E+09 | | | |
| OT-001456 | 2.38E+06 | 2.26E+06 | 4.76E+06 | 6.55E+06 | 8.28E+06 | 1.35E+07 |
| ((10M) TDF | 4.65E+06 | 7.78E+06 | 9.50E+06 | 3.19E+07 | 9.26E+07 | 1.68E+09 |
| 50 mpk BID) | 5.08E+06 | 5.75E+07 | 2.07E+07 | | | |
| | 1.65E+06 | 2.12E+06 | 3.44E+06 | 5.48E+05 | 3.08E+07 | 6.35E+07 |
| | 2.45E+06 | 2.47E+06 | | | | |
| | 3.08E+06 | 1.22E+06 | | | | |
| | 3.29E+06 | 1.21E+06 | 2.15E+06 | 3.37E+06 | 4.84E+06 | 8.80E+06 |
| | 1.72E+06 | 1.56E+06 | 3.71E+06 | 3.56E+06 | 1.29E+07 | 5.89E+05 |
| OT-001455 | 4.67E+06 | 2.77E+06 | 4.84E+06 | 1.14E+07 | 1.82E+07 | 6.04E+06 |
| (Vehicle) | 1.71E+06 | 2.19E+06 | 4.68E+06 | 8.10E+06 | 1.42E+07 | 5.87E+07 |
| | 2.39E+06 | 2.25E+06 | 5.89E+06 | 2.67E+07 | 4.25E+07 | 3.96E+08 |
| | 3.26E+06 | 1.88E+06 | 4.63E+05 | 7.64E+05 | 7.80E+05 | 4.12E+07 |
| | 2.43E+06 | 1.57E+06 | 5.24E+05 | 1.39E+07 | 1.17E+06 | 1.32E+08 |
| | 5.06E+06 | 3.60E+06 | 1.37E+07 | 6.52E+07 | 1.29E+08 | 1.30E+09 |
| | 1.65E+06 | 5.88E+05 | 4.05E+06 | 6.82E+06 | 5.94E+06 | 3.99E+07 |
| | 3.10E+06 | 1.98E+06 | 6.28E+06 | 1.35E+07 | 9.73E+05 | 3.75E+06 |
| OT-001455 | 1.71E+06 | 8.06E+05 | 1.05E+06 | 8.46E+05 | 6.23E+05 | 6.89E+06 |
| (TDF 50 mpk | 3.12E+06 | 1.11E+06 | 1.30E+06 | 9.82E+05 | 1.10E+06 | 6.14E+05 |
| BID) | 3.14E+06 | 9.73E+05 | 6.66E+05 | 4.92E+05 | 9.90E+05 | 5.28E+05 |
| | 2.41E+06 | 9.25E+05 | 1.25E+06 | 4.45E+05 | 8.58E+05 | 1.15E+06 |
| | 4.92E+06 | 9.62E+05 | 1.21E+06 | 1.29E+06 | 1.95E+06 | 2.97E+06 |
| | 5.01E+06 | 8.78E+05 | | | | |
| | 2.43E+06 | 9.71E+05 | 8.78E+05 | 4.88E+05 | 8.45E+05 | 7.24E+05 |
| | 1.65E+06 | | | | | |

[0956] Table 84 provides the median survival for each of the groups in the cohort.

TABLE 84
Median survival

| Construct | Median survival (days) |
|---|---|
| Empty Vector | 19 |
| OT-001407 (1M) | 26 |
| OT-001512 (5M PDE5 WT) | Undefined |
| OT-001456 (Vehicle) | 20 |
| OT-001456 (TDF 50 mpk BID) | Undefined |
| OT-001456 (TDF 100 mpk BID > 50 mpk QD) | 32 |
| OT-001456 (TDF 100 mpk BID > 50 mpk BID) | Undefined |
| OT-001456 (10 uM in Vitro_Vehicle) | 23 |
| OT-001456 (10 uM in Vitro_TDF 50 mpk BID) | Undefined |
| OT-001456 ((5M + 5M) Vehicle) | 23 |
| OT-001456 ((5M + 5M) TDF 50 mpk BID) | Undefined |
| OT-001456 ((10M) Vehicle) | 22 |
| OT-001456 ((10M) TDF 50 mpk BID) | Undefined |
| OT-001455(Vehicle) | Undefined |
| OT-001455 (TDF 50 mpk BID) | Undefined |

### Example 21. Mutagenesis of the Amino Acid F736 of hPDE5

[0957] The analysis of mutants identified by site directed mutagenesis identified amino acid hotspots whose mutation confers destabilization and ligand dependent stabilization properties to hPDE5. The amino acid at position 736 was chosen for the further analysis since the hPDE5 (F736A) mutation possessed the properties described above. To improve the DD characteristics of this DD, the amino acid at the position 736 was mutated to any of the known amino acids, including, but not limited to, aspartic acid, glutamic acid, glutamine, asparagine, histidine, serine, threonine, tyrosine, cysteine, methionine, tryptophan, alanine, isoleucine, leucine, phenylalanine, valine, proline, and glycine. The library of mutations was generated by site directed mutagenesis and each of the mutants in the library was fused to a reporter protein e.g. AcGFP via a linker and transduced into HCT116 cells. The properties of the DDs were analyzed via FACS both in the presence and absence of ligands. Ligands that were evaluated included, but not limited Sildenafil, and Vardenafil. Table 85 shows the MFI of cells treated with 10 μM vardenafil for 48 hours. In Table 85 VDF indicates vardenafil.

TABLE 85
Vardenafil dependent MFIs

| | | | | Stabilization |
|---|---|---|---|---|
| Alias | Mutation | Group | MFI | ratio |
| — | | Parental | 1153 | |
| OT-001269 | F736P | Control | 6690 | — |
| | | VDF | 144781 | 21.64 |
| OT-001264 | F736W | Control | 32415 | — |
| | | VDF | 158156 | 4.88 |
| OT-001272 | F736C | Control | 44895 | — |
| | | VDF | 151888 | 3.38 |
| OT-001276 | F736D | Control | 25733 | — |
| | | VDF | 167459 | 6.51 |
| OT-001266 | F736Q | Control | 54247 | — |
| | | VDF | 240810 | 4.44 |
| OT-001267 | F736E | Control | 38227 | — |
| | | VDF | 199986 | 5.23 |
| OT-001275 | F736N | Control | 27563 | — |
| | | VDF | 141843 | 5.15 |
| OT-001274 | F736H | Control | 30463 | — |
| | | VDF | 129332 | 4.25 |
| OT-001263 | F736R | Control | 23282 | — |
| | | VDF | 168331 | 7.23 |
| OT-001265 | F736K | Control | 20219 | — |
| | | VDF | 150258 | 7.43 |
| OT-001268 | F736S | Control | 39511 | — |
| | | VDF | 243585 | 6.16 |
| OT-001277 | F736T | Control | 47397 | — |
| | | VDF | 203516 | 4.29 |
| OT-001273 | F736Y | Control | 69893 | — |
| | | VDF | 193231 | 2.76 |
| OT-001260 | F736A | Control | 25583 | — |
| | | VDF | 124553 | 4.87 |
| OT-001259 | F736G | Control | 19279 | — |
| | | VDF | 144347 | 7.49 |
| OT-001261 | F736L | Control | 66857 | — |
| | | VDF | 169009 | 2.53 |
| OT-001271 | F736I | Control | 75543 | — |
| | | VDF | 221732 | 2.94 |
| OT-001270 | F736V | Control | 81977 | — |
| | | VDF | 333677 | 4.07 |
| OT-001262 | F736M | Control | 110217 | — |
| | | VDF | 353885 | 3.21 |

[0958] Among the constructs tested, F736P, F736R, F736K, F736A, F736G showed stabilization ratios greater than 7 indicating strong ligand dependent stabilization. These constructs were chosen for further dose response characterization studies. Dose response studies were performed in HCT-116 cells with doses ranging from 0.002 to 30 μM for vardenafil, 0.005 to 100 μM for sildenafil and tadalafil. Cells were treated with the indicated dose for 48 hours and the MFI was measured using FACS. The vardenafil, sildenafil and tadalafil dose responses are shown in Table 86, Table 87 and Table 88.

TABLE 86
Vardenafil dose response in F736 mutants

| | | Vardenafil | | |
|---|---|---|---|---|
| | | Dose | | Stabilization |
| Construct | Mutation | (μM) | MFI | ratio |
| Parental | — | — | 1035 | — |
| OT-001269 | F736P | 30 | 158216 | 21.26 |
| | | 10 | 144184 | 19.37 |
| | | 3.333 | 130695 | 17.56 |
| | | 1.111 | 114355 | 15.36 |
| | | 0.370 | 92834 | 12.47 |
| | | 0.123 | 61401 | 8.25 |
| | | 0.041 | 32907 | 4.42 |
| | | 0.014 | 16591 | 2.23 |
| | | 0.005 | 10071 | 1.35 |
| | | 0.002 | 8253 | 1.11 |
| | | DMSO | 7443 | — |
| OT-001263 | F736R | 30 | 180839 | 8.45 |
| | | 10 | 177263 | 8.28 |
| | | 3.333 | 165159 | 7.72 |
| | | 1.111 | 152487 | 7.12 |
| | | 0.370 | 130186 | 6.08 |
| | | 0.123 | 103375 | 4.83 |
| | | 0.041 | 64283 | 3.00 |
| | | 0.014 | 37755 | 1.76 |
| | | 0.005 | 25227 | 1.18 |
| | | 0.002 | 22913 | 1.07 |
| | | DMSO | 21406 | — |
| OT-001265 | F736K | 30 | 182761 | 9.82 |
| | | 10 | 156978 | 8.43 |
| | | 3.333 | 151181 | 8.12 |
| | | 1.111 | 141783 | 7.62 |
| | | 0.370 | 118662 | 6.38 |
| | | 0.123 | 100311 | 5.39 |
| | | 0.041 | 56035 | 3.01 |
| | | 0.014 | 32977 | 1.77 |
| | | 0.005 | 22525 | 1.21 |
| | | 0.002 | 19109 | 1.03 |
| | | DMSO | 18611 | — |
| OT-001260 | F736A | 30 | 140875 | 5.51 |
| | | 10 | 127144 | 4.97 |
| | | 3.333 | 125782 | 4.92 |
| | | 1.111 | 125078 | 4.89 |
| | | 0.370 | 115016 | 4.50 |
| | | 0.123 | 100026 | 3.91 |
| | | 0.041 | 75486 | 2.95 |
| | | 0.014 | 46252 | 1.81 |
| | | 0.005 | 30287 | 1.18 |
| | | 0.002 | 25820 | 1.01 |
| | | DMSO | 25560 | — |
| OT-001259 | F736G | 30 | 132814 | 6.44 |
| | | 10 | 128225 | 6.22 |
| | | 3.333 | 120003 | 5.82 |
| | | 1.111 | 121525 | 5.89 |
| | | 0.370 | 113357 | 5.50 |
| | | 0.123 | 91136 | 4.42 |
| | | 0.041 | 60953 | 2.96 |
| | | 0.014 | 37052 | 1.80 |
| | | 0.005 | 25469 | 1.24 |
| | | 0.002 | 22445 | 1.09 |
| | | DMSO | 20615 | — |

TABLE 87
Sildenafil dose resnonse in F736 mutants

| | | Sildenafil | | |
|---|---|---|---|---|
| | | Dose | | Stabilization |
| Construct | Mutation | (μM) | MFI | ratio |
| Parental | | | 1009 | |
| OT-001269 | F736P | 100 | 90704 | 13.86 |
| | | 33.333 | 97811 | 14.95 |
| | | 11.111 | 76720 | 11.73 |
| | | 3.704 | 49658 | 7.59 |
| | | 1.235 | 26727 | 4.08 |
| | | 0.412 | 15073 | 2.30 |
| | | 0.137 | 9548 | 1.46 |
| | | 0.046 | 6977 | 1.07 |
| | | 0.015 | 6836 | 1.04 |
| | | 0.005 | 6718 | 1.03 |
| | | DMSO | 6543 | — |
| OT-001263 | F736R | 100 | 141542 | 6.77 |
| | | 33.333 | 158814 | 7.59 |
| | | 11.111 | 136805 | 6.54 |
| | | 3.704 | 103181 | 4.93 |
| | | 1.235 | 69456 | 3.32 |
| | | 0.412 | 43588 | 2.08 |
| | | 0.137 | 27361 | 1.31 |
| | | 0.046 | 22043 | 1.05 |
| | | 0.015 | 21600 | 1.03 |
| | | 0.005 | 20051 | 0.96 |
| | | DMSO | 20922 | — |
| OT-001265 | F736K | 100 | 117668 | 6.24 |
| | | 33.333 | 132672 | 7.04 |
| | | 11.111 | 111812 | 5.93 |
| | | 3.704 | 89823 | 4.76 |
| | | 1.235 | 61268 | 3.25 |
| | | 0.412 | 37507 | 1.99 |
| | | 0.137 | 25307 | 1.34 |
| | | 0.046 | 19932 | 1.06 |
| | | 0.015 | 18778 | 1.00 |
| | | 0.005 | 19365 | 1.03 |
| | | DMSO | 18856 | — |
| OT-001260 | F736A | 100 | 93652 | 4.12 |
| | | 33.333 | 110048 | 4.84 |
| | | 11.111 | 103954 | 4.57 |
| | | 3.704 | 85884 | 3.78 |
| | | 1.235 | 67277 | 2.96 |
| | | 0.412 | 48774 | 2.15 |
| | | 0.137 | 31578 | 1.39 |
| | | 0.046 | 25710 | 1.13 |
| | | 0.015 | 22537 | 0.99 |
| | | 0.005 | 24395 | 1.07 |
| | | DMSO | 22727 | — |
| OT-001259 | F736G | 100 | 85769 | 5.03 |
| | | 33.333 | 93490 | 5.48 |
| | | 11.111 | 96630 | 5.66 |
| | | 3.704 | 70643 | 4.14 |
| | | 1.235 | 49434 | 2.90 |
| | | 0.412 | 31138 | 1.83 |
| | | 0.137 | 22228 | 1.30 |
| | | 0.046 | 17226 | 1.01 |
| | | 0.015 | 17591 | 1.03 |
| | | 0.005 | 17329 | 1.02 |
| | | DMSO | 17059 | — |

TABLE 88
Tadalafil dose response in F736 mutants

| | | Tadalafil | | |
|---|---|---|---|---|
| | | Dose | | Stabilization |
| Construct | Mutation | (μM) | MFI | ratio |
| Parental | | | 1111 | — |
| OT-001269 | F736P | 100 | 130984 | 19.71 |
| | | 33.333 | 108698 | 16.36 |
| | | 11.111 | 87589 | 13.18 |
| | | 3.704 | 53208 | 8.01 |
| | | 1.235 | 26467 | 3.98 |
| | | 0.412 | 14220 | 2.14 |
| | | 0.137 | 9298 | 1.40 |
| | | 0.046 | 7795 | 1.17 |
| | | 0.015 | 7378 | 1.11 |
| | | 0.005 | 6662 | 1.00 |
| | | DMSO | 6646 | — |
| OT-001263 | F736R | 100 | 175124 | 8.27 |
| | | 33.333 | 149164 | 7.05 |
| | | 11.111 | 127766 | 6.03 |
| | | 3.704 | 97047 | 4.58 |
| | | 1.235 | 56547 | 2.67 |
| | | 0.412 | 34314 | 1.62 |
| | | 0.137 | 25603 | 1.21 |
| | | 0.046 | 21049 | 0.99 |
| | | 0.015 | 20533 | 0.97 |
| | | 0.005 | 21220 | 1.00 |
| | | DMSO | 21172 | — |
| OT-001265 | F736K | 100 | 162392 | 8.30 |
| | | 33.333 | 151730 | 7.76 |
| | | 11.111 | 134986 | 6.90 |
| | | 3.704 | 102372 | 5.23 |
| | | 1.235 | 63261 | 3.23 |
| | | 0.412 | 36476 | 1.87 |
| | | 0.137 | 26447 | 1.35 |
| | | 0.046 | 21404 | 1.09 |
| | | 0.015 | 20043 | 1.02 |
| | | 0.005 | 19212 | 0.98 |
| | | DMSO | 19558 | — |
| OT-001260 | F736A | 100 | 131921 | 5.29 |
| | | 33.333 | 120132 | 4.82 |
| | | 11.111 | 116598 | 4.67 |
| | | 3.704 | 108477 | 4.35 |
| | | 1.235 | 76753 | 3.08 |
| | | 0.412 | 53672 | 2.15 |
| | | 0.137 | 34408 | 1.38 |
| | | 0.046 | 25447 | 1.02 |
| | | 0.015 | 24416 | 0.98 |
| | | 0.005 | 24661 | 0.99 |
| | | DMSO | 24943 | — |
| OT-001259 | F736G | 100 | 136173 | 6.85 |
| | | 33.333 | 120303 | 6.05 |
| | | 11.111 | 109416 | 5.50 |
| | | 3.704 | 89786 | 4.51 |
| | | 1.235 | 60600 | 3.05 |
| | | 0.412 | 36777 | 1.85 |
| | | 0.137 | 25357 | 1.27 |
| | | 0.046 | 21222 | 1.07 |
| | | 0.015 | 19748 | 0.99 |
| | | 0.005 | 19490 | 0.98 |
| | | DMSO | 19890 | — |

[0959] Dose dependent increase in GFP expression was observed with all constructs tested and upon treatment with all three ligands. However, OT-001269, OT-001263, and OT-001265 showed stronger ligand dependent stabilization when compared to the other two constructs. EC50 values for each of the constructs is shown in Table 89.

TABLE 89
EC50 (μM) of F736 mutants

| Ligand | OT-001269 | OT-001263 | OT-001265 | OT-001260 | OT-001259 |
|---|---|---|---|---|---|
| Sildenafil | 3.844 | 2.066 | 1.884 | 0.9580 | 1.553 |
| Vardenafil | 0.2724 | 0.1202 | 0.1264 | 0.04424 | 0.06552 |
| Tadalafil | 7.503 | 4.825 | 2.853 | 1.072 | 2.519 |

### Example 22. hPDE5 (R732, F736) Selective Library Screen

[0960] Mutant library wherein both the amino acid at the position 732 (R732) as well as at position 736 (F736) were mutated to any of the known amino acids, including, but not limited to, aspartic acid, glutamic acid, glutamine, asparagine, histidine, serine, threonine, tyrosine, cysteine, methionine, tryptophan, alanine, isoleucine, leucine, phenylalanine, valine, proline, and glycine were generated. The library of mutations was generated by mutagenesis and the library was fused to a reporter protein e.g. AcGFP via a linker and transduced into NIH3T3 cells. The library expressing cells were selected using the selectable marker, mCherry. The ligand response of the initial library was characterized using different doses (3 or 10 μM) vardenafil or tadalafil. In general, treatment with ligand shifted the GFP expression of the library expressing cells to the right.

[0961] A GFP “low” sort was performed where the bottom 5% of the population was sorted out to keep only the lowest basal expressing clones. The library expressing cells were treated with 3 μM Tadalafil for 24 hours and the top 10% and 10-25% library expressing cells were sorted out. The two groups i.e. 10% and 10-25% were characterized using 3 μM Tadalafil. Following characterization, the genomic DNA was extracted from the top 10% library expressing cells' group and inserted into lentiviral vectors by Gibson assembly. Clones were prepared from the library and sequenced. A little under a half of the clones sequenced showed mutations in both R732 and F736. Mutants occurring with a frequency of greater than 5 in the library are described herein. The nature of the R732 mutation and the frequency of occurrence of the mutation in parenthesis are as follows: R732D (24), R732E (12), R732G (8), R732L (11), R732P (10), R732V (15), R732W (17). The nature of F736 mutation and the frequency of occurrence of the mutation in parenthesis are as follows: F736D (12), F736F (6), F736G (22), F736L (6), F736S (23), F736V (12). The frequency of the combination of R732 and F736 mutants is described in Table 90.

TABLE 90
EC50 (μM) of R732, F736 mutants

| Mutation Combination | |
|---|---|
| (with respect to | |
| SEQ ID NO: 1) | Frequency |
| R732D, F736S | 22 |
| R732E, F736D | 10 |
| R732V, F736G | 9 |
| R732W, F736G | 7 |
| R732W, F736V | 5 |
| R732L, F736W | 4 |
| R732P, F736Q | 4 |
| R732W, F736L | 3 |
| R732G, F736G | 2 |
| R732L, F736F | 2 |
| R732L, F736V | 2 |
| R732L, F736Y | 2 |
| R732P, F736D | 2 |
| R732T, F736P | 2 |
| R732V, F736F | 2 |
| R732Y, F736M | 2 |
| R732A, F736A | 1 |
| R732C, F736V | 1 |
| R732D, F736L | 1 |
| R732D, F736T | 1 |
| R732E, F736C | 1 |
| R732E, F736E | 1 |
| R732F, F736C | 1 |
| R732F, F736V | 1 |
| R732G, F736L | 1 |
| R732G, F736P | 1 |
| R732G, F736R | 1 |
| R732G, F736V | 1 |
| R732I, F736G | 1 |
| R732I, F736V | 1 |
| R732L, F736S | 1 |
| R732M, F736G | 1 |
| R732M, F736H | 1 |
| R732M, F736R | 1 |
| R732P, F736C | 1 |
| R732P, F736F | 1 |
| R732P, F736G | 1 |
| R732P, F736I | 1 |
| R732S, F736G | 1 |
| R732V, F736E | 1 |
| R732V, F736I | 1 |
| R732V, F736R | 1 |
| R732V, F736V | 1 |
| R732W, F736A | 1 |
| R732W, F736F | 1 |
| R732Y, F736L | 1 |

[0962] Based on this screen, constructs described in Table 12 were prepared for further characterization.

### Example 23. PDE5 Mutant Saturation Library

[0963] Mutant library wherein every amino acid within position 535 to 860 of SEQ ID NO: 1 was mutated were generated. The library of mutations was fused to a reporter protein e.g. AcGFP via a linker and transduced into Jurkat cells. The library expressing cells were selected using the selectable marker, mCherry. The ligand response of the initial library was characterized using different doses (3 or 10 μM) vardenafil or tadalafil. In general, treatment with ligand shifted the GFP expression of the library expressing cells to the right.

[0964] A GFP “low” sort was performed where the bottom 5% and 5-15% of the population was sorted out to keep only the lowest basal expressing clones. The library expressing cells (both 5 and 5-15%) were treated with 10 Tadalafil for 24 hours and the top 30% library expressing cells were sorted out and characterized using 10 μM Tadalafil. Following characterization, the genomic DNA was extracted from the top 10% library expressing cells' group and inserted into vector. Clones were prepared from the library and sequenced. The nature of the mutation and the frequency of occurrence of the mutation in parenthesis are shown in Table 91. In the table * indicates the translation of the stop codon and X indicates any amino acid.

TABLE 91
Frequency of occurrence within saturation library

| Mutant | Frequency of occurrence |
|---|---|
| C574N | 6 |
| E536K, I739W | 6 |
| R732V, L756H | 5 |
| H653N | 4 |
| H678F, S702F | 4 |
| R732T, R740Y | 4 |
| A722E | 3 |
| E536N, E708K, E734K, M758I | 3 |
| F735N | 3 |
| F736P | 3 |
| G697F | 3 |
| I576K, M625Y | 3 |
| Q541P, H678L | 3 |
| R732P | 3 |
| T712N | 3 |
| V602S, F736M | 3 |
| A645I, E707K | 2 |
| D764N | 2 |
| D822V | 2 |
| F588N | 2 |
| F619H | 2 |
| F735P | 2 |
| H617K | 2 |
| I739F, R850F | 2 |
| K604F, R732L | 2 |
| L600K, K608I | 2 |
| N583L, F736S | 2 |
| Q635H, R732S, I739M, R740F | 2 |
| R732W, E800K | 2 |
| A628T, A722T, E734L | 1 |
| C574N, L804I | 1 |
| C574N, R732T, R740Y | 1 |
| C846N | 1 |
| E536V, R732T | 1 |
| E539G, R732L | 1 |
| F561I | 1 |
| F579L, C846N | 1 |
| F588K | 1 |
| F619Y | 1 |
| F735P, Q854K | 1 |
| F735Q, K848N | 1 |
| F735R | 1 |
| F736R, F744R | 1 |
| F736S, F744S | 1 |
| F736S, N849S | 1 |
| F744A, R850Y | 1 |
| H617S, I680F | 1 |
| H678I, S702F | 1 |
| H678Y, F736S | 1 |
| H834R, V835G | 1 |
| I739W | 1 |
| K603F, R732L | 1 |
| K608S, P771F | 1 |
| K730R, R731G, R732E, G733E, E734N | 1 |
| K741P, R850K | 1 |
| K741T, P749*, L765F | 1 |
| K752N, E753X | 1 |
| L554I, P771F | 1 |
| L554I, R732L, E785G | 1 |
| L582S | 1 |
| L651V, V660X, D791X | 1 |
| L675H, E708K, N742S | 1 |
| N698F, K741I | 1 |
| P549F | 1 |
| P771L | 1 |
| Q718K, E734W | 1 |
| R577Y | 1 |
| R597G, R732W | 1 |
| R732I, R740I | 1 |
| R732L, D788Y | 1 |
| R732V | 1 |
| R740K, P771X | 1 |
| R850N | 1 |
| T621F | 1 |
| V602N, M758I | 1 |

[0965] Based on the frequency of occurrence of the mutations, 3 clones were selected for further characterization and inserted into viral vectors namely the C574N bearing (OT-001869), E536K and I739W bearing clone OT-001868 and H678F, and S702F bearing clone OT-001870.

### Example 24. PDE5 Cytosolic Screen

[0966] The position of hPDE5 in a construct comprising hPDE5 fused to GFP may affect the resultant library of mutants generated by mutagenesis screening. The effect of positioning the DD at the c terminal construct on the identification of DD clones was tested. PDE5 library generated by random mutagenesis fused GFP to generate AcGFP-PDE5-IRES-Puro constructs. The library plasmid was packaged in lentivirus and used to infect 3T3 at a MOI=0.3. The cells were selected with puromycin (2 μg/mL) for 2 weeks. The bottom 10% of cells expressing the lowest GFP in the absence of ligand were collected from the initial sort. In the subsequent sort, 5% of cells expressing the highest GFP levels 48 hours after incubation with 1 μM vardenafil or 10 μM sildenafil were collected. This was followed by the selection of the 5% of cells expressing the lowest GFP level after the removal of ligand. Approximately 50 clones from vardenafil and sildenafil treated libraries were sequenced. The top 10 clones were selected for characterization based on frequency of mutations. Table 92 shows the mutation position, and its frequency.

TABLE 92
Mutation frequency

| | Point | | | Ligand |
|---|---|---|---|---|
| | mutation | | AA | used in |
| Clone | number | Frequency | position | screen |
| OT-001944 | 1 | 8 | 228 | Mutations |
| OT-001941 | 1 | 2 | 102 | present in |
| OT-001947 | 2 | 4 | 135 | clones of |
| | | 8 | 166 | both |
| OT-001946 | 4 | 14 | 126 | Screens |
| | | 14 | 247 | (Vardenafil |
| | | 15 | 260 | and |
| | | 15 | 291 | Sildenafil) |
| OT-001943 | 1 | 6 | 106 | |
| OT-001939 | 3 | 4 | 107 | |
| | | 4 | 163 | |
| | | 4 | 279 | |
| OT-001945 | 1 | 1 (STOP) | 241 | Vardenafil |
| OT-001942 | 3 | 2 | 89 | |
| | | 2 | 120 | |
| | | 3 | 207 | |
| OT-001940 | 1 | 4 | 222 | Sildenafil |
| OT-001948 | 2 | 1 | 98 | |
| | | 5 | 114 | |

[0967] Stable cell lines were made with lentivirus transduction of the constructs into 3T3 cells. Cells were treated with ligand (0.1 or 1 μM Vardenafil) for 48 hours, then analyzed by flow cytometry. Ligand dependent and dose dependent regulation was observed with OT-001939, OT-001948, OT-001947 and to a modest extent with OT-001944. Clones OT-001940, OT-001946, OT-001945, OT-001943, and OT-001942 did not show an increase in GFP expression in response to ligand. The median fluorescence intensity (MFI) for mutants OT-001948 and OT-001947 is shown in Table 93. To calculate the stabilization ratio, the MFI of the parental cells was subtracted from the untreated control.

TABLE 93
Mutant MFI

| | | | OT-001232 | | | |
|---|---|---|---|---|---|---|
| Ligand | Description | Parental | (Wild Type) | OT-001226 | OT-001948 | OT-001947 |
| No Vardenafil | MFI | 103 | 15600 | 1530 | 478 | 308 |
| Vardenafil 0.1 μM | MFI | — | 16200 | 11700 | 1363 | 823 |
| | Stabilization ratio | — | 1.04 | 8.1 | 3.4 | 3.5 |
| Vardenafil 1 μM | MFI | — | 16200 | 13800 | 4478 | 2881 |
| | Stabilization ratio | — | 1.04 | 9.6 | 11.7 | 13.6 |

[0968] As shown in Table 93, both clones showed ligand dependent stabilization at both 0.1 and 1 μM vardenafil. OT-001948 and OT-001947 clones were characterized by western blot using all three ligands. Cells were treated with Vardenafil (0.3 and 10 μM), sildenafil and tadalafil (3 and 100 μM) for 24 hours and immunoblotted with anti-GFP antibody. Both OT-001948 and OT-001947 showed ligand dose dependent expression with all three ligands. Samples were also immunoblotted with beta actin and showed even protein loading.

[0969] OT-001948 and OT-001947 were treated with varying concentration of ligand for 48 hours and then analyzed by flow cytometry (see Table 94, Table 95, Table 96).

TABLE 94
Tadalafil dose response

| +Tadalafil | OT-001232 | | | |
|---|---|---|---|---|
| (μM) | (Wild Type) | OT-001226 | OT-001947 | OT-001947 |
| 0 | 3.05E+04 | 2627 | 838 | 1244 |
| 0.001 | 3.10E+04 | 2499 | 807 | 1201 |
| 0.003 | 3.09E+04 | 2753 | 783 | 1168 |
| 0.01 | 3.04E+04 | 3.01E+03 | 870 | 1168 |
| 0.03 | 3.12E+04 | 3.42E+03 | 867 | 1231 |
| 0.1 | 3.37E+04 | 7.53E+03 | 900 | 1259 |
| 0.3 | 3.55E+04 | 1.50E+04 | 1194 | 1597 |
| 1 | 3.71E+04 | 2.26E+04 | 1812 | 2197 |
| 3 | 3.87E+04 | 2.62E+04 | 3237 | 3476 |
| 10 | 3.64E+04 | 2.73E+04 | 6499 | 6419 |

TABLE 95
Vardenafil dose response

| Vardenafil | OT-001232 | | | |
|---|---|---|---|---|
| (μM) | (Wild Type) | OT-001226 | OT-001947 | OT-001947 |
| 0 | 3.09E+04 | 2345 | 889 | 1321 |
| 0.001 | 3.15E+04 | 3453 | 983 | 1362 |
| 0.003 | 3.27E+04 | 5207 | 1079 | 1407 |
| 0.01 | 3.22E+04 | 1.14E+04 | 1198 | 1708 |
| 0.03 | 3.18E+04 | 1.92E+04 | 1711 | 2365 |
| 0.1 | 3.13E+04 | 2.40E+04 | 2831 | 3892 |
| 0.3 | 3.01E+04 | 2.61E+04 | 4935 | 6919 |
| 1 | 2.93E+04 | 2.64E+04 | 8232 | 1.06E+04 |
| 3 | 3.00E+04 | 2.72E+04 | 1.04E+04 | 1.44E+04 |
| 10 | 3.18E+04 | 2.73E+04 | 1.21E+04 | 1.57E+04 |

TABLE 96
Sildenafil dose response

| | OT-001232 | | | |
|---|---|---|---|---|
| Sildenafil (μM) | (Wild Type) | OT-001226 | OT-001947 | OT-001947 |
| 0 | 3.09E+04 | 2472 | 762 | 1114 |
| 0.001 | 3.04E+04 | 2401 | 729 | 1089 |
| 0.003 | 2.70E+04 | 2554 | 739 | 1099 |
| 0.01 | 2.96E+04 | 2848 | 740 | 1086 |
| 0.03 | 3.07E+04 | 4053 | 766 | 1136 |
| 0.1 | 3.26E+04 | 8260 | 860 | 1285 |
| 0.3 | 3.27E+04 | 1.54E+04 | 1074 | 1630 |
| 1 | 3.44E+04 | 2.12E+04 | 1744 | 2610 |
| 3 | 3.37E+04 | 2.27E+04 | 2777 | 3888 |
| 10 | 3.43E+04 | 2.34E+04 | 5259 | 6788 |

[0970] Ligand dependent regulation was observed with both OT-001947, and OT-001948 clones. The lowest dose of ligand required to achieve detectable expression was higher for clones when compared to OT-001226. The GFP expression in the absence of any of the three ligands tested, was very low indicating low basal expression.

### Example 25. PDE5 Regulated CARs

[0971] Select PDE5 DDs generated by mutagenesis were cloned into construct OT-001300 and responsiveness to PDE5 ligands was tested. The clones selected for characterization are shown in Table 97.

TABLE 97
PDE5 clone mutation frequency

| | Number of | Mutation | |
|---|---|---|---|
| Construct | mutations | Frequency | AA position |
| OT-001922 | 5 | 4 | 251 |
| OT-001910 | 5 | 3 | 230 |
| OT-001926 | 4 | 3 | 229 |
| OT-001929 | 2 | 3 | 214 |
| OT-001924 | 3 | 4 | 175 |
| OT-001925 | 3 | 4/8 | 49/218 |
| OT-001921 | 2 | 5 | 286 |
| OT-001913 | 2 | 4 | 190 |
| OT-001911 | 1 | 8 | 218 |
| OT-001912 | 1 | 4 | 224 |
| OT-001936 | 2 | 2/2 | 194/283 |
| OT-001935 | 1 | 3 | 57 |
| OT-001914 | 1 | 4 | 5 |
| OT-001937 | 4 | 3 | 116 |
| OT-001917 | 1 | 3 | 230 |
| OT-001909 | 3 | 2 | 43 |
| OT-001938 | 2 | 3 | 207 |
| OT-001915 | 2 | 2/2 | 138/302 |
| OT-001916 | 2 | 2 | 101 |
| OT-001934 | 3 | 3 | 25 |

[0972] CARs appended to PDE5 clones were tested in 3T3 cells. Ligands were tested at the doses indicated for 48 hours in Table 98. CAR expression was measured using FACS performed with CD19-Fc staining or HA staining. In Table 98, MFI indicates Median Fluorescence Intensity and SR indicates stabilization ratio. Dose responses studies were also performed with vardenafil and tadalafil (Table 99 and Table 100).

TABLE 98
Ligand dependent CAR expression

| | | Vardenafil | | Sildenafil | | Tadalafil | |
|---|---|---|---|---|---|---|---|
| | Untreated | (1 μM) | | (10 μM) | | (10 μM) | |
| Construct | MFI | MFI | SR | MFI | SR | MFI | SR |
| OT-001913 | 700 | 1700 | 2.5 | 1300 | 2 | — | — |
| OT-001912 | 600 | 2600 | 4 | 2000 | 3 | — | — |
| OT-001911 | 600 | 2100 | 3.5 | 2100 | 3.5 | — | — |
| OT-001910 | 180 | 2000 | 11 | 1750 | 10 | — | — |
| OT-001918 | 80 | 341 | 4.3 | 204 | 2.6 | 199 | 2.5 |
| OT-001920 | 186 | 698 | 3.8 | 701 | 3.8 | 704 | 3.8 |
| OT-001930 | 58.2 | 51.3 | 0.9 | 65 | 1.1 | 64.2 | 1.1 |
| OT-001933 | 234 | 522 | 2.2 | 428 | 1.8 | 525 | 2.2 |
| OT-001927 | 53.7 | 78 | 1.5 | 65.8 | 1.2 | 10.7 | 0.2 |
| OT-001919 | 225 | 774 | 3.4 | 693 | 3.1 | 645 | 2.9 |
| OT-001928 | 60 | 216 | 3.6 | 160 | 2.7 | 110 | 1.8 |
| OT-001914 | 365 | 1279 | 3.5 | 1260 | 3.5 | 1180 | 3.2 |
| OT-001916 | 312 | 911 | 2.9 | 757 | 2.4 | 487 | 1.6 |
| OT-001915 | 198 | 1156 | 5.8 | 933 | 4.7 | 490 | 2.5 |
| OT-001917 | 249 | 1062 | 4.3 | 1252 | 5 | 823 | 3.3 |

TABLE 99
Tadalafil dependent CAR expression

| Across: | | | | | | | | |
|---|---|---|---|---|---|---|---|---|
| Tadalafil (μM) | | Parental | 0 | 0.3 | 1 | 3 | 10 | 30 |
| OT-001920 | MFI | 8.3 | 218.0 | 266.0 | 330.0 | 435.0 | 580.0 | 688.0 |
| (Sample A) | SR | — | — | 1.2 | 1.5 | 2.0 | 2.7 | 3.2 |
| OT-001920 | MFI | 7.2 | 527.0 | 256.0 | 714.0 | 519.0 | 744.0 | 1142.0 |
| (Sample B) | SR | — | — | 0.5 | 1.4 | 1.0 | 1.4 | 2.2 |
| OT-001920 | MFI | 8.3 | 218.0 | 266.0 | 330.0 | 435.0 | 580.0 | 688.0 |
| (Sample C) | SR | — | — | 1.2 | 1.5 | 2.0 | 2.7 | 3.2 |
| OT-001919 | MFI | 8.3 | 93.4 | 108.0 | 158.0 | 236.0 | 335.0 | 370.0 |
| | SR | — | — | 1.2 | 1.7 | 2.5 | 3.6 | 4.0 |
| OT-001911 | MFI | 12.0 | 327.0 | 371.0 | 469.0 | 725.0 | 1119.0 | 1311.0 |
| (EC50: 4.6 μM) | SR | — | — | 1.1 | 1.4 | 2.2 | 3.4 | 4.0 |
| OT-001912 | MFI | 11.3 | 267.0 | 707.0 | 1044.0 | 1511.0 | 1611.0 | 1724.0 |
| (EC50: 800 nM) | SR | — | — | 2.6 | 3.9 | 5.7 | 6.0 | 6.5 |
| OT-001919 | MFI | 7.2 | 143.0 | 213.0 | 370.0 | 261.0 | 456.0 | 448.0 |
| (EC50: 5.82 μM) | SR | — | — | 1.5 | 2.6 | 1.8 | 3.2 | 3.1 |
| OT-001918 | MFI | 7.2 | 32.1 | 74.5 | 87.9 | 125.0 | 186.0 | 280.0 |
| | SR | — | — | 2.3 | 2.7 | 3.9 | 5.8 | 8.7 |
| OT-001919 | MFI | 8.3 | 93.4 | 108.0 | 158.0 | 236.0 | 335.0 | 370.0 |
| | SR | — | — | 1.2 | 1.7 | 2.5 | 3.6 | 4.0 |
| OT-001913 | MFI | 11.3 | 110.0 | 141.0 | 159.0 | 193.0 | 232.0 | 369.0 |
| | SR | — | — | 1.3 | 1.4 | 1.8 | 2.1 | 3.4 |
| OT-001914 | MFI | — | 215.0 | 255.0 | 383.0 | 511.0 | 1030.0 | 1158.0 |
| | SR | — | — | 1.2 | 1.8 | 2.4 | 4.8 | 5.4 |
| OT-001916 | MFI | — | 267.0 | 325.0 | 398.0 | 409.0 | 758.0 | 852.0 |
| | SR | — | — | 1.2 | 1.5 | 1.5 | 2.8 | 3.2 |
| OT-001915 | MFI | — | 132.0 | 95.4 | 102.0 | 150.0 | 253.0 | 348.0 |
| | SR | — | — | 0.7 | 0.8 | 1.1 | 1.9 | 2.6 |
| OT-001917 | MFI | — | 73.9 | 302.0 | 427.0 | 748.0 | 1239.0 | 1141.0 |
| | SR | — | — | 4.1 | 5.8 | 10.1 | 16.8 | 15.4 |

TABLE 100
Vardenafil dependent CAR expression

| Across: | | | | | | | | |
|---|---|---|---|---|---|---|---|---|
| Vardenafil (μM) | | Parental | 0 | 0.03 | 0.1 | 0.3 | 1 | 10 |
| OT-001920 | MFI | 12 | 61 | 204 | 343 | 680 | 936 | 908 |
| (Sample A; | SR | — | — | 3.34 | 5.62 | 11.15 | 15.34 | 14.89 |
| EC50: 170 nM) | | | | | | | | |
| OT-001910 | MFI | 12 | 61 | 223 | 336 | 764 | 948 | 916 |
| (EC50: 1.6 μM) | SR | — | — | 3.66 | 5.51 | 12.52 | 15.54 | 15.02 |
| OT-001911 | MFI | 12 | 327 | 430 | 647 | 1037 | 1451 | 1442 |
| (EC50: 200 nM) | SR | — | — | 1.31 | 1.98 | 3.17 | 4.44 | 4.41 |
| OT-001912 | MFI | 12 | 267 | 539 | 653 | 969 | 1299 | 822 |
| (Sample A) | SR | — | — | 2.02 | 2.45 | 3.63 | 4.87 | 3.08 |
| OT-001912 | MFI | 7.24 | 185 | 645 | 775 | 833 | 883 | 878 |
| (Sample B) | SR | — | — | 3.49 | 4.19 | 4.50 | 4.77 | 4.75 |
| OT-001919 | MFI | 7.24 | 143 | 271 | 380 | 506 | 544 | 483 |
| (EC50: 56 nM) | SR | — | — | 1.90 | 2.66 | 3.54 | 3.80 | 3.38 |
| V32 (EC50: 398 | MFI | 7.24 | 32.1 | 91.4 | 116 | 209 | 308 | 401 |
| nM) | SR | — | — | 2.85 | 3.61 | 6.51 | 9.60 | 12.49 |
| OT-001920 | MFI | 7.24 | 527 | 496 | 881 | 941 | 1185 | 1004 |
| (Sample B; | SR | — | — | 0.94 | 1.67 | 1.79 | 2.25 | 1.91 |
| EC50: 80 nM) | | | | | | | | |
| OT-001913 | MFI | 12 | 108 | 86.5 | 132 | 239 | 331 | 265 |
| | SR | — | — | 0.80 | 1.22 | 2.21 | 3.06 | 2.45 |
| OT-001914 | MFI | — | 215 | 467 | 665 | 1026 | 1234 | 1136 |
| | SR | — | — | 2.17 | 3.09 | 4.77 | 5.74 | 5.28 |
| OT-001916 | MFI | — | 267 | 380 | 382 | 518 | 955 | 1095 |
| | SR | — | — | 1.42 | 1.43 | 1.94 | 3.58 | 4.10 |
| OT-001915 | MFI | — | 132 | 308 | 514 | 719 | 918 | 960 |
| | SR | — | — | 2.33 | 3.89 | 5.45 | 6.95 | 7.27 |
| OT-001917 | MFI | — | 158 | 384 | 624 | 915 | 1123 | 1084 |
| | SR | — | — | 2.43 | 3.95 | 5.79 | 7.11 | 6.86 |

[0973] Most of the constructs tested in Table 98 showed ligand dependent stabilization with all three ligands. Exceptions include OT-001930, which did not demonstrate ligand dependent stabilization with any of the ligands tested (Stabilization ratio <1.5) and OT-001927 which only showed regulation in the presence of vardenafil with a stabilization ratio >1.5). All of the clones tested in tested in Table 99 and Table 100 showed ligand dependent regulation. The kinetics of the regulation varied between the clones. While some clones e.g. OT-001917, and OT-001910, showed ligand dependent regulation at lower doses, other clones such as OT-001915 and OT-001916 showed ligand dependent regulation only at higher ligand doses. These results were further confirmed by western blot analysis. Stable 3T3 cell lines PDE5 CAR constructs were treated with 0.3 or 10 μm Vardenafil; or Sildenafil and Tadalafil at 1 or 30 μM for 48 hours and immunoblotted for PDE5 or HA tag. Tested clones included OT-001913, OT-001911, OT-001912, OT-001910, OT-001918, OT-001920, OT-001919, OT-001914, OT-001916, OT-001915, OT-001917. All show clones showed ligand dependent regulation with each of the three ligands.

### Example 26. CAR Regulation by hPDE5

[0974] To test regulated CAR expression by hPDE5 DDs with Tadalafil in vitro, donor T cells were thawed and activated overnight in the presence of CD3/CD28 Dynabeads at a 3:1 bead: cell ratio. The following day, cells were transduced with lentivirus (empty vector), OT-001512, OT-001455, or OT-001456 constructs. Cells were expanded by addition of fresh media over the course of 10 days, maintaining cells around 0.5×10⁶ cells/mL and then they were frozen. As shown in Table 101, CAR expression was confirmed on day 7 of the expansion by culturing with DMSO or 10 uM Tadalafil 24 hours prior to FACS staining with 10 ug/mL CD19-Fc.

TABLE 101
Day 7 Expanded T cells

Day 7

| | DMSO | Tadalafil |
|---|---|---|
| Construct | % CAR+ Cells | % CAR+ Cells |
| Empty Vector | 0 | 0 |
| OT-001512 | 48 | 0 |
| OT-001455 | 15 | 53 |
| OT-001456 | 11 | 60 |

[0975] Expression was also confirmed in the frozen, expanded T cells by thawing, stimulating with CD3/CD28 Dynabeads (3:1 bead:cell ratio), and treating with DMSO or a dose response of Tadalafil for 24 hours. The results are shown in Table 102.

TABLE 102
Tadalafil Titration

| | OT-001455 | OT-001456 |
|---|---|---|
| Tadalafil (uM) | % CAR+ Cells | % CAR+ Cells |
| 0 | 3.1 | 4.2 |
| 0.04 | 16.6 | 5.3 |
| 0.1 | 22.2 | 10.2 |
| 0.4 | 32.9 | 17.6 |
| 1.1 | 33.8 | 35.1 |
| 3.3 | 36.5 | 41.2 |
| 10 | 38.3 | 47.7 |
| 30 | 38.3 | 48.7 |

[0976] To confirm that cytotoxicity and cytokine secretion is directly related to CAR expression, transduced T cells were thawed and cocultured with red fluorescent Nalm6 target cells at 10:1, 3:1, and 1:1 effector:target cell ratios for 5 days in the presence or absence of luM Tadalafil. The results are shown in Table 103.

TABLE 103
Nalm6 Proliferation

| | 10:1 | | 3:1 | | 1:1 | |
|---|---|---|---|---|---|---|
| Construct | DMSO | Tadalafil | DMSO | Tadalafil | DMSO | Tadalafil |
| Empty Vector | 757794 | 0 | 805634 | 0 | 977464 | 0 |
| OT-001512 | 4485 | 0 | 154256 | 0 | 422304 | 0 |
| OT-001455 | 15351 | 1658 | 185756 | 17319 | 833197 | 265637 |
| OT-001456 | 221126 | 3004 | 468664 | 22179 | 614952 | 402447 |

[0977] Coculture supernatants (3:1) were collected after 48 hours and analyzed for IFNg and IL2 levels by MSD. The results are shown in Table 104.

TABLE 104
IFNg and IL2 Levels

| | |
|---|---|
| IFNg | IL2 |

| | DMSO | Tadalafil | DMSO | Tadalafil |
|---|---|---|---|---|
| Construct | pg/mL | pg/mL | pg/mL | pg/mL |
| Empty Vector | 8.1 | 0 | 0.4 | 0 |
| OT-001512 | 1023.6 | 0 | 394 | 0 |
| OT-001455 | 161.9 | 1094.5 | 5 | 42.2 |
| OT-001456 | 66.8 | 762.2 | 3 | 110.2 |

[0978] As shown in Table 105, Tadalafil regulated CD19 chimeric antigen receptor (OT-001456) controls CD19+ Nalm6-luc tumors in NSG mice.

TABLE 105
Tadalafil regulated CD19 chimeric antigen receptor (OT-001456)

| | | Nalm6 | IFNg | IL2 |
|---|---|---|---|---|
| Tadalafil (uM) | % CAR+ | cell count | (pg/mL) | (pg/mL) |
| 10 | 26.7 | 74442 | 1048 | 447 |
| 3.333 | 22.3 | 19624 | 1616 | 394 |
| 1.111 | 13.4 | 37555 | 692 | 298 |
| 0.37 | 6.25 | 72377 | 315 | 105 |
| 0.123 | 3.35 | 1145929 | 20 | 7 |
| 0.041 | 2.92 | 1117625 | 12 | 4 |
| 0.013 | 2.21 | 1150899 | 11 | 2 |
| 0.004 | 1.83 | 1212262 | 8 | 2 |

### Example 27: hPDE5 Regulation in HCT116 Cells

[0979] To test regulated expression in HCT116 cells by PDE5 DDs, HCT116 cells were transduced with hPDE5-GFP constructs (OT-001211, OT-001212, OT-001213, and OT-001214) and incubated with the indicated concentrations of ligand for 48 hours. GFP fluorescence was measured by FACS. The normalized GFP MFI is shown in Table 106, Table 107 and Table 108 for vardenafil, sildenafil and tadalafil respectively.

TABLE 106
Vardenafil dose response

| Vardenafil | | | | |
|---|---|---|---|---|
| (uM) | OT-001211 | OT-001212 | OT-001213 | OT-001214 |
| 10000 | 107.2 | 103.2 | 103.8 | 101.8 |
| 3333.3 | 101.8 | 101.3 | 91.6 | 99 |
| 1111.1 | 100.5 | 94.9 | 67.4 | 80.1 |
| 370.4 | 102 | 73.5 | 43.9 | 56.6 |
| 123.5 | 87.3 | 48.6 | 14.4 | 33.6 |
| 41.2 | 82.4 | 14.7 | 2.8 | 13.4 |
| 13.7 | 40.6 | 2.5 | 0.5 | 3.7 |
| 4.6 | 14.9 | 0.2 | 0.2 | 1.7 |
| 1.5 | 3.5 | 0.1 | 0.2 | 0.6 |
| 0.5 | 1.3 | 0 | 0.3 | 0.1 |

TABLE 107
Sildenafil dose response

| Sildenafil (uM) | OT-001211 | OT-001212 | OT-001213 | OT-001214 |
|---|---|---|---|---|
| 10000 | 106.7 | 73.9 | 46.8 | 45.5 |
| 3333.3 | 95.3 | 42.8 | 17.7 | 21.3 |
| 1111.1 | 77.5 | 10.5 | 2.9 | 5.9 |
| 370.4 | 65.4 | 2.2 | 0.7 | 1.7 |
| 123.5 | 29.9 | 0.1 | 0 | 0.7 |
| 41.2 | 7.6 | 0.1 | 0.1 | 0.3 |
| 13.7 | 2.1 | −0.1 | 0 | 0.5 |
| 4.6 | 1.2 | 0 | 0 | 0.1 |
| 1.5 | 0.4 | 2.6 | 0 | 0.3 |
| 0.5 | 0.2 | 0 | −0.2 | 0.2 |

TABLE 108
Tadalafil dose response

| Sildenafil (uM) | OT-001211 | OT-001212 | OT-001213 | OT-001214 |
|---|---|---|---|---|
| 10000 | 106.7 | 88.7 | 42.2 | 42 |
| 3333.3 | 98.3 | 71.4 | 12.1 | 18.9 |
| 1111.1 | 83.7 | 35.1 | 3 | 4.7 |
| 370.4 | 57.4 | 8.6 | 0.6 | 1.3 |
| 123.5 | 29.3 | 1.9 | 0.3 | 0.5 |
| 41.2 | 8.8 | 0.5 | 0.1 | 0 |
| 13.7 | 1.8 | −0.2 | 0.4 | −0.2 |
| 4.6 | 0 | −0.2 | 0 | −0.1 |
| 1.5 | −0.3 | 0 | 0 | 0.2 |
| 0.5 | 0 | 0 | 0.3 | 0.3 |

[0980] As shown in Table 106, Table 107 and Table 108, regulation with hPDE5 DDs was observed with OT-001211, OT-001212, OT-001213, and OT-001214 M a dose dependent manner.

### Example 28: hPDE5 Regulation in Human T Cells

[0981] To test regulated CD19CAR protein expression in human T cells by PDE5 DDs, donor T cells were thawed and activated overnight in the presence of CD3/CD28 Dynabeads at a 3:1 bead: cell ratio. The following day, cells were transduced with hPDE5-CD19CAR constructs (OT-001456, OT-001455, OT-001457, or OT-001454) or empty vector at a virus volume of 10 uL. Cells were expanded by addition of fresh media and then they were frozen. The percent of cells expressing CAR after treatment with vardenafil, sildenafil and tadalafil are shown below. The percentage for the empty vector for each ligand dose was between 0.2 and 0.4%.

TABLE 109
Vardenafil dose response

| Vardenafil | | | | |
|---|---|---|---|---|
| (uM) | OT-001456 | OT-001455 | OT-001457 | OT-001454 |
| 10000 | 37 | 44.7 | 40.2 | 53.4 |
| 3333.3 | 34.8 | 41.2 | 37.2 | 52.9 |
| 1111.1 | 35.2 | 33.7 | 27.2 | 52.9 |
| 370.4 | 29.3 | 24 | 14.1 | 52.5 |
| 123.5 | 18.6 | 16.9 | 7.8 | 50 |
| 41.2 | 9.4 | 14.5 | 5.5 | 44.9 |
| 13.7 | 5.6 | 13.3 | 3.9 | 40 |
| 4.6 | 4.4 | 12.8 | 3.8 | 33.5 |
| 1.5 | 3.7 | 11.7 | 3.5 | 30.5 |
| 0.5 | 4 | 11.1 | 3.2 | 30.2 |
| 0.2 | 3.1 | 10.7 | 3.1 | 29.2 |

TABLE 110
Sildenafil dose response

| Sildenafil (uM) | OT-001456 | OT-001455 | OT-001457 | OT-001454 |
|---|---|---|---|---|
| 10000 | 21.3 | 45.3 | 6.9 | 49.9 |
| 3333.3 | 10 | 45 | 4.5 | 45.7 |
| 1111.1 | 6.2 | 45.5 | 3.8 | 40.1 |
| 370.4 | 5 | 44.6 | 3.5 | 34.1 |
| 123.5 | 4.1 | 44.1 | 3.9 | 31 |
| 41.2 | 3.7 | 40.9 | 3.8 | 29.4 |
| 13.7 | 3.7 | 33.6 | 4 | 28.9 |
| 4.6 | 3.2 | 23.4 | 3 | 28.1 |
| 1.5 | 3.2 | 17 | 3.2 | 28 |
| 0.5 | 3.5 | 14.1 | 3.5 | 28.5 |
| 0.2 | 2.8 | 12.5 | 3.1 | 28.2 |

TABLE 111
Tadalafil dose response

| Tadalafil (uM) | OT-001456 | OT-001455 | OT-001457 | OT-001454 |
|---|---|---|---|---|
| 10000 | 35.6 | 48.6 | 16.1 | 51.4 |
| 3333.3 | 30.4 | 48.5 | 7.2 | 50 |
| 1111.1 | 19 | 44.7 | 4.9 | 44.8 |
| 370.4 | 9.4 | 39.9 | 3.4 | 40.3 |
| 123.5 | 5.9 | 28.8 | 3.7 | 33 |
| 41.2 | 4.4 | 19 | 3.7 | 28.7 |
| 13.7 | 4 | 15.7 | 3.6 | 29.2 |
| 4.6 | 3.5 | 12.7 | 3.7 | 27.7 |
| 1.5 | 3.4 | 11.8 | 3.6 | 28.2 |
| 0.5 | 3.7 | 11.5 | 3 | 27.6 |
| 0.2 | 3.1 | 10.6 | 3.1 | 27.1 |

[0982] As shown in Table 109, Table 110 and Table 111, regulation with hPDE5 DDs was observed with OT-001456, OT-001455, OT-001457, and OT-001454 M a dose dependent manner.

### Example 29: Ligand Exposure Schemes

[0983] Effect of pre-freezing treatment of T cells with tadalafil on expression of CD19-CAR was tested. T cells were thawed and activated overnight in the presence of CD3/CD28 Dynabeads at a 3:1 bead:cell ratio. The following day, cells were transduced with OT-001456. Cells were expanded by addition of fresh media over the course of 10 days, maintaining cells around 0.5×10\hat{ }6 cells/mL. On day 9 of the expansion, cells were treated with 10 uM tadalafil overnight, then frozen. Upon thawing, cells treated with tadalafil prior to freezing had similar CAR expression (37%) to cells that were thawed and treated overnight with 10 uM tadalafil (35%), indicating that CAR expression was maintained during the freezing process.

[0984] A Nalm6-luciferase tumor model in female NSG mice was used to determine if various ligand exposure schemes lead to enhanced efficacy in vivo. The experimental setup was as described in Example 20, Table 82. One week after implantation of Nalm6-luciferase tumors, mice were randomized and injected at indicated cell doses with freshly thawed CD19-CAR T cells that had previously been transduced with OT-001455 or OT-001456 and expanded in vitro for 10 days. Groups 8 and 9 CAR T cells had been treated with 10 uM tadalafil overnight prior to cells being frozen so they would express CAR at time of injection. Mice received either tadalafil or vehicle, beginning 12 hours prior to CD19-CAR T injection, then once or twice a day, as indicated, at the listed concentrations. Body weights and tumor BLI measurements were recorded over time, with higher BLI measures indicating high Nalm6-luciferase tumor burden.

[0985] As shown in FIG. 10, a high initial dose of tadalafil with later shift to maintenance dosing does not improve efficacy of PDE5-regulated CD19 CAR-mediated cytotoxicity

[0986] The effect of pre-exposing cells to tadalafil ligand prior to infusing them was also tested. As shown in FIG. 11, ligand pre-treatment prior to freezing CAR T cells increases basal CAR activity in vehicle treated animals but does not improve efficacy of ligand-regulated CAR-mediated cytotoxicity.

### Example 30: CAR T Cell Dose Schemes

[0987] A Nalm6-luciferase tumor model in female NSG mice was used to determine if various cell dose schemes lead to enhanced efficacy in vivo. The experimental setup was as described in Example 20 and Example 29. Groups 8 and 9 CAR T cells had been treated with 10 uM tadalafil overnight prior to cells being frozen so they would express CAR at time of injection (see Example 29). Groups 10 and 11 received an additional CD19-CAR T cell dose on day 10 post tumor implantation. Mice received either tadalafil or vehicle, beginning 12 hours prior to CD19-CAR T injection, then once or twice a day, as indicated, at the listed concentrations. Body weights and tumor BLI measurements were recorded over time, with higher BLI measures indicating high Nalm6-luciferase tumor burden.

[0988] As shown in FIG. 12, increased cell dose fractionated over 3 days led to increased anti-tumor efficacy as compared to a single cell infusion.

### Example 31: Comparison of OT-001455 and OT-001456 In Vivo

[0989] A Nalm6-luciferase tumor model in female NSG mice was used to compare PDE5-regulated CD19 CAR OT-001455 and OT-001456 efficacy in vivo. The experimental setup was as described in Example 20, Example 29, and Example 30.

[0990] As shown in FIG. 13, OT-001455 showed increased efficacy but higher basal activity as compared to OT-001456.

### Example 32: Time Course of CAR Expression

[0991] To evaluate expansion time matched dose response and time course of ligand induced CAR expression,

[0992] T cells were thawed and activated overnight in the presence of CD3/CD28 Dynabeads at a 3:1 bead:cell ratio. The following day, cells were transduced with OT-001407, OT-001456, and OT-001900, or empty vector. Cells were expanded by addition of fresh media over the course of 10 days, maintaining cells around 0.5×10\hat{ }6 cells/mL. On day 7 of the expansion, an aliquot of cells was seeded into 96 well plates, the following day treated with a titration of tadalafil or vardenafil, then analyzed for CAR expression after a 24 hr incubation by FACS staining with 10 ug/mL CD19-Fc.

[0993] EC50 values were calculated in Spotfire by fitting a 4-parameter curve to the % CAR+ cells in a Singlet Live Cell gate versus the dose of ligand. As shown in Table 112, similar EC50 values were observed for OT-001456 and OT-001900 (PDE5-regulated CD19 CAR with eGFP).

TABLE 112
EC50 values for PDE5-regulated CD19 CAR +/− GFP tag

| EC50 (uM) | Tadalafil | Vardenafil |
|---|---|---|
| OT-001456 | 1.08 | 0.20 |
| OT-001900 | 0.84 | 0.13 |

[0994] As shown in FIG. 14A and FIG. 14B, saturating concentrations of ligand (Tadalafil in FIG. 14A and Vardenafil in FIG. 14B) resulted in similar time courses of CAR expression.

[0995] To evaluate the time course of reversible CAR expression following ligand removal, T cells were thawed and activated overnight in the presence of CD3/CD28 Dynabeads at a 3:1 bead:cell ratio. The following day, cells were transduced with 10 uL lentivirus from OT-001906 (HA-tagged constitutive CAR) and OT-001903 (HA-tagged PDE5 DD CAR). Cells were expanded by addition of fresh media over the course of 10 days, maintaining cells around 0.5×10\hat{ }6 cells/mL. T cells on day 6 of transduction/expansion were treated overnight with 10 uM ligand or vehicle control. Cells were washed 3× with T cell media, then stained for CAR expression using 10 ug/mL CD19-Fc 0, 2, 4, and 24 hr post-washout.

[0996] As shown in FIG. 15, PDE5-regulated CD19 CAR expression on the surface of T cells drops rapidly following removal of ligand.

[0997] In order to demonstrate the reversible nature and ability for multiple rounds of dosing, T cells were thawed and activated overnight in the presence of CD3/CD28 Dynabeads at a 3:1 bead:cell ratio. The following day, cells were transduced with OT-001456. Cells were expanded by addition of fresh media over the course of 10 days, maintaining cells around 0.5×10\hat{ }6 cells/mL. On day 6 of the expansion, an aliquot of cells was treated with 10 uM tadalafil for 24 hours. The next day this sample was divided into 2 portions: Group 1 stayed in culture with ligand, and Group 2 was washed 3× and cultured in T cell conditioned media without ligand. On day 8 of the expansion, the washed Group 2 cells, along with an aliquot of Group 3 cells that had never been exposed to ligand, were stimulated with 10 uM tadalafil for 24 hours. FACS staining with 1 ug/mL of CD19-Fc was performed daily just prior to ligand addition or wash steps.

[0998] The results are shown in FIG. 16, demonstrating that OT-001456 allows reversibility of CAR expression based on ligand exposure time course, along with the ability to perform multiple rounds of pulsed ligand dosing while maintaining equal expression levels.

### Example 33: N-Terminal Vs. C-Terminal PDE5 DD Configuration

[0999] Human donor T cells were thawed and activated overnight in the presence of 3:1 ratio bead:cell, then transduced with empty vector, OT-001456 (C-terminal PDE5 DD), or OT-001908 (N-terminal PDE5 with furin). Cells were expanded over the course of 10 days with addition of fresh media to maintain cells around 0.5×10\hat{ }6 cells/mL. On day 9, an aliquot of cells was removed, treated with 10 uM tadalafil overnight, then stained with 10 ug/mL CD19-Fc. The results are provided in Table 113, demonstrating that PDE5 DDs regulated CD19-CAR expression better when placed at the C-terminus.

TABLE 113
% CAR+ Cells with N-terminal vs. C-terminal PDE5 DP

| | Vehicle (DMSO) | Ligand (10 uM tadalafil) |
|---|---|---|
| Vector | 0.10 | — |
| OT-001456 (C-terminal) | 3.20 | 60.8 |
| OT-001908 (N-terminal) | 6.80 | 6.9 |

The application's sequence listing, which the Patent Office published only in electronic form, follows.

SEQUENCE LISTING (9026 sequences)

SEQ ID NO: 1 - protein, 875 aa, Homo sapiens
MERAGPSFGQQRQQQQPQQQKQQQRDQDSVEAWLDDHWDFTFSYFVRKATREMVNAWFAERVHTIPVCKEGIRGHTESCSCPLQQSPRADNSAPGTPTRKISASEFDRPLRPIVVKDSEGTVSFLSDSEKKEQMPLTPPRFDHDEGDQCSRLLELVKDISSHLDVTALCHKIFLHIHGLISADRYSLFLVCEDSSNDKFLISRLFDVAEGSTLEEVSNNCIRLEWNKGIVGHVAALGEPLNIKDAYEDPRFNAEVDQITGYKTQSILCMPIKNHREEVVGVAQAINKKSGNGGTFTEKDEKDFAAYLAFCGIVLHNAQLYETSLLENKRNQVLLDLASLIFEEQQSLEVILKKIAATIISFMQVQKCTIFIVDEDCSDSFSSVFHMECEELEKSSDTLTREHDANKINYMYAQYVKNTMEPLNIPDVSKDKRFPWTTENTGNVNQQCIRSLLCTPIKNGKKNKVIGVCQLVNKMEENTGKVKPFNRNDEQFLEAFVIFCGLGIQNTQMYEAVERAMAKQMVTLEVLSYHASAAEEETRELQSLAAAVVPSAQTLKITDFSFSDFELSDLETALCTIRMFTDLNLVQNFQMKHEVLCRWILSVKKNYRKNVAYHNWRHAFNTAQCMFAALKAGKIQNKLTDLEILALLIAALSHDLDHRGVNNSYIQRSEHPLAQLYCHSIMEHHHFDQCLMILNSPGNQILSGLSIEEYKTTLKIIKQAILATDLALYIKRRGEFFELIRKNQFNLEDPHQKELFLAMLMTACDLSAITKPWPIQQRIAELVATEFFDQGDRERKELNIEPTDLMNREKKNKIPSMQVGFIDAICLQLYEALTHVSEDCFPLLDGCRKNRQKWQALAEQQEKMLINGESGQAKRN

SEQ ID NO: 2 - DNA, 2628 bp, Homo sapiens
atggagcgggccggccccagcttcgggcagcagcgacagcagcagcagccccagcagcagaagcagcagcagagggatcaggactcggtcgaagcatggctggacgatcactgggactttaccttctcatactttgttagaaaagccaccagagaaatggtcaatgcatggtttgctgagagagttcacaccatccctgtgtgcaaggaaggtatcagaggccacaccgaatcttgctcttgtcccttgcagcagagtcctcgtgcagataacagtgcccctggaacaccaaccaggaaaatctctgcctctgaatttgaccggcctcttagacccattgttgtcaaggattctgagggaactgtgagcttcctctctgactcagaaaagaaggaacagatgcctctaacccctccaaggtttgatcatgatgaaggggaccagtgctcaagactcttggaattagtgaaggatatttctagtcatttggatgtcacagccttatgtcacaaaattttcttgcatatccatggactgatatctgctgaccgctattccctgttccttgtctgtgaagacagctccaatgacaagtttcttatcagccgcctctttgatgttgctgaaggttcaacactggaagaagtttcaaataactgtatccgcttagaatggaacaaaggcattgtgggacatgtggcagcgcttggtgagcccttgaacatcaaagatgcatatgaggatcctcggttcaatgcagaagttgaccaaattacaggctacaagacacaaagcattctttgtatgccaattaagaatcatagggaagaggttgttggtgtagcccaggccatcaacaagaaatcaggaaacggtgggacatttactgaaaaagatgaaaaggactttgctgcttatttggcattttgtggtattgttcttcataatgctcagctctatgagacttcactgctggagaacaagagaaatcaggtgctgcttgaccttgctagtttaatttttgaagaacaacaatcattagaagtaattttgaagaaaatagctgccactattatctctttcatgcaagtgcagaaatgcaccattttcatagtggatgaagattgctccgattctttttctagtgtgtttcacatggagtgtgaggaattagaaaaatcatctgatacattaacaagggaacatgatgcaaacaaaatcaattacatgtatgctcagtatgtcaaaaatactatggaaccacttaatatcccagatgtcagtaaggataaaagatttccctggacaactgaaaatacaggaaatgtaaaccagcagtgcattagaagtttgctttgtacacctataaaaaatggaaagaagaataaagttataggggtttgccaacttgttaataagatggaggagaatactggcaaggttaagcctttcaaccgaaatgacgaacagtttctggaagcttttgtcatcttttgtggcttggggatccagaacacgcagatgtatgaagcagtggagagagccatggccaagcaaatggtcacattggaggttctgtcgtatcatgcttcagcagcagaggaagaaacaagagagctacagtcgttagcggctgctgtggtgccatctgcccagacccttaaaattactgactttagcttcagtgactttgagctgtctgatctggaaacagcactgtgtacaattcggatgtttactgacctcaaccttgtgcagaacttccagatgaaacatgaggttctttgcagatggattttaagtgttaagaagaattatcggaagaatgttgcctatcataattggagacatgcctttaatacagctcagtgcatgtttgctgctctaaaagcaggcaaaattcagaacaagctgactgacctggagatacttgcattgctgattgctgcactaagccacgatttggatcaccgtggtgtgaataactcttacatacagcgaagtgaacatccacttgcccagctttactgccattcaatcatggaacaccatcattttgaccagtgcctgatgattcttaatagtccaggcaatcagattctcagtggcctctccattgaagaatataagaccacgttgaaaataatcaagcaagctattttagctacagacctagcactgtacattaagaggcgaggagaattttttgaacttataagaaaaaatcaattcaatttggaagatcctcatcaaaaggagttgtttttggcaatgctgatgacagcttgtgatctttctgcaattacaaaaccctggcctattcaacaacggatagcagaacttgtagcaactgaattttttgatcaaggagacagagagagaaaagaactcaacatagaacccactgatctaatgaacagggagaagaaaaacaaaatcccaagtatgcaagttgggttcatagatgccatctgcttgcaactgtatgaggccctgacccacgtgtcagaggactgtttccctttgctagatggctgcagaaagaacaggcagaaatggcaggcccttgcagaacagcaggagaagatgctgattaatggggaaagcggccaggccaagcggaactga

SEQ ID NO: 3 - protein, 326 aa, Homo sapiens
EETRELQSLAAAVVPSAQTLKITDFSFSDFELSDLETALCTIRMFTDLNLVQNFQMKHEVLCRWILSVKKNYRKNVAYHNWRHAFNTAQCMFAALKAGKIQNKLTDLEILALLIAALSHDLDHRGVNNSYIQRSEHPLAQLYCHSIMEHHHFDQCLMILNSPGNQILSGLSIEEYKTTLKIIKQAILATDLALYIKRRGEFFELIRKNQFNLEDPHQKELFLAMLMTACDLSAITKPWPIQQRIAELVATEFFDQGDRERKELNIEPTDLMNREKKNKIPSMQVGFIDAICLQLYEALTHVSEDCFPLLDGCRKNRQKWQALAEQQ

SEQ ID NO: 4 - DNA, 981 bp, Artificial Sequence
  source: /note="Description of Artificial Sequence: Synthetic Construct"
atggaagaaacaagagagctacagtcgttagcggctgctgtggtgccatctgcccagacccttaaaattactgactttagcttcagtgactttgagctgtctgatctggaaacagcactgtgtacaattcggatgtttactgacctcaaccttgtgcagaacttccagatgaaacatgaggttctttgcagatggattttaagtgttaagaagaattatcggaagaatgttgcctatcataattggagacatgcctttaatacagctcagtgcatgtttgctgctctaaaagcaggcaaaattcagaacaagctgactgacctggagatacttgcattgctgattgctgcactaagccacgatttggatcaccgtggtgtgaataactcttacatacagcgaagtgaacatccacttgcccagctttactgccattcaatcatggaacaccatcattttgaccagtgcctgatgattcttaatagtccaggcaatcagattctcagtggcctctccattgaagaatataagaccacgttgaaaataatcaagcaagctattttagctacagacctagcactgtacattaagaggcgaggagaattttttgaacttataagaaaaaatcaattcaatttggaagatcctcatcaaaaggagttgtttttggcaatgctgatgacagcttgtgatctttctgcaattacaaaaccctggcctattcaacaacggatagcagaacttgtagcaactgaattttttgatcaaggagacagagagagaaaagaactcaacatagaacccactgatctaatgaacagggagaagaaaaacaaaatcccaagtatgcaagttgggttcatagatgccatctgcttgcaactgtatgaggccctgacccacgtgtcagaggactgtttccctttgctagatggctgcagaaagaacaggcagaaatggcaggcccttgcagaacagcag

SEQ ID NO: 5 - protein, 326 aa, Artificial Sequence
  source: /note="Description of Artificial Sequence: Synthetic Destabilizing Domain (DD)"
EETRELQSLAAAVVPSAQTLKITDFSFSDFELSDLETALCTIRMFTDLNLVQNFQMKHEVLCRWILSVKKNYRKNVAYHNWRHAFNTAQCMFAALKAGKIQNKLTDLEILALLIAALSHDLDHRGVNNSYIQRSEHPLAQLYCHSIMEHHHFDQCLMILNSPGNQILSGLSIEEYKTTLKIIKQAILATDLALYIKRRGEFFELIRKNQFNLEDPHQKELFLAMLMTACDLSAITKPWPIQQRIAELVATEFFDQGDRERKELNIEPTDLMNREKKNKIPSMQVGFIDAICLQLYEALTHVSEDCFPLLDGCRKNRQKFQALAEQQ

SEQ ID NO: 6 - protein, 326 aa, Artificial Sequence
  source: /note="Description of Artificial Sequence: Synthetic Destabilizing Domain (DD)"
EETRELQSLAAAVVPSAQTLKITDFSFSDFELSDLETALCTIRMFTDLNLVQNFQMKHEVLCRWILSVKKNYRKNVAYHNWRHAFNTAQCMFAALKAGKIQNKLTDLEILALLIAALSHDLDHRGVNNSYIQRSEHPLAQLYCHSIMEHHHFDQCLMILNSPGNQILSGLSIEEYKTTLKIIKQAILATDLALYIKRRGEFFELIRKNQFNLEDPHQKELFLAMLMTACDLSAITKPWPIQQRIAELVATEFFDQGDRERKELNIEPTDLMNREKKNKIPSMQVGFADAICLQLYEALTHVSEDCFPLLDGCRKNRQKWQALAEQQ

SEQ ID NO: 7 - protein, 326 aa, Artificial Sequence
  source: /note="Description of Artificial Sequence: Synthetic Destabilizing Domain (DD)"
EETRELQSLAAAVVPSAQTLKITDFSFSDFELSDLETALCTIRMFTDLNLVQNFQMKHEVLCRWILSVKKNYRKNVAYHNWRHAFNTAQCMFAALKAGKIQNKLTDLEILALLIAALSHDLDHRGVNNSYIQRSEHPLAQLYCHSIMEHHHFDQCLMILNSPGNQILSGLSIEEYKTTLKIIKQAILATDLALYIKRRGEFFELIRKNQFNLEDPHQKELFLAMLMTACDLSAITKPWPIQQRIAELVATEFFDQGDRERKELNIEPTDLMNREKKNKIPSMQVGFIDAICLQLAEALTHVSEDCFPLLDGCRKNRQKWQALAEQQ

SEQ ID NO: 8 - protein, 326 aa, Artificial Sequence
  source: /note="Description of Artificial Sequence: Synthetic Destabilizing Domain (DD)"
EETRELQSLAAAVVPSAQTLKITDFSFSDFELSDLETALCTIRMFTDLNLVQNFQMKHEVLCRWILSVKKNYRKNVAYHNWRHAFNTAQCMFAALKAGKIQNKLTDLEILALLIAALSHDLDHRGVNNSYIQRSEHPLAQLYCHSIMEHHHFDQCLMILNSPGNQILSGLSIEEYKTTLKIIKQAILATDLALYIKRRGEFFELIRKNQFNLEDPHQKELFLAMLMTACDLSAITKPWPIQQRIAELVATEFADQGDRERKELNIEPTDLMNREKKNKIPSMQVGFIDAICLQLYEALTHVSEDCFPLLDGCRKNRQKWQALAEQQ

SEQ ID NO: 9 - protein, 326 aa, Artificial Sequence
  source: /note="Description of Artificial Sequence: Synthetic Destabilizing Domain (DD)"
EETRELQSLAAAVVPSAQTLKITDFSFSDFELSDLETALCTIRMFTDLNLVQNFQMKHEVLCRWILSVKKNYRKNVAYHNWRHAFNTAQCMFAALKAGKIQNKLTDLEILALLIAALSHDLDHRGVNNSYIQRSEHPLAQLYCHSIMEHHHFDQCLMILNSPGNQILSGLSIEEYKTTLKIIKQAILATDLALYIKRRGEFAELIRKNQFNLEDPHQKELFLAMLMTACDLSAITKPWPIQQRIAELVATEFFDQGDRERKELNIEPTDLMNREKKNKIPSMQVGFIDAICLQLYEALTHVSEDCFPLLDGCRKNRQKWQALAEQQ

SEQ ID NO: 10 - protein, 326 aa, Artificial Sequence
  source: /note="Description of Artificial Sequence: Synthetic Destabilizing Domain (DD)"
EETRELQSLAAAVVPSAQTLKITDFSFSDFELSDLETALCTIRMFTDLNLVQNFQMKHEVLCRWILSVKKNYRKNVAYHNWRHAFNTAQCMFAALKAGKIQNKLTDLEILALLIAALSHDLLHRGVNNSYIQRSEHPLAQLYCHSIMEHHHFDQCLMILNSPGNQILSGLSIEEYKTTLKIIKQAILATDLALYIKRRGEFFELIRKNQFNLEDPHQKELFLAMLMTACDLSAITKPWPIQQRIAELVATEFFDQGDRERKELNIEPTDLMNREKKNKIPSMQVGFIDAICLQLYEALTHVSEDCFPLLDGCRKNRQKWQALAEQQ

SEQ ID NO: 11 - protein, 326 aa, Artificial Sequence
  source: /note="Description of Artificial Sequence: Synthetic Destabilizing Domain (DD)"
EETRELQSLAAAVVPSAQTLKITDFSFSDFELSDLETALCTIRMFTDLNLVQNFQMKHEVLCRWILSVKKNYRKNVAYHNWRHAFNTAQCMFAALKAGKIQNKLTDLEILALLIAALSHDLDHRGVNNSYIQRSEHPLAQLYCHSIMEHHHFDQCLMILNSPGNQILSGLSIEEYKTTLKIIKQAILATDLALLIKRRGEFFELIRKNQFNLEDPHQKELFLAMLMTACDLSAITKPWPIQQRIAELVATEFFDQGDRERKELNIEPTDLMNREKKNKIPSMQVGFIDAICLQLYEALTHVSEDCFPLLDGCRKNRQKWQALAEQQ

SEQ ID NO: 12 - protein, 326 aa, Artificial Sequence
  source: /note="Description of Artificial Sequence: Synthetic Destabilizing Domain (DD)"
EETRELQSLAAAVVPSAQTLKITDFSFSDFELSDLETALCTIRMFTDLNLVQNFQMKHEVLCRWILSVKKNYRKNVAYHNWRHAFNTAQCMFAALKAGKIQNKLTDLEILALLIAALSHDLDHRGVNNSYIQRSEHPLAQLYCHSIMEHHHFDQCLMILNSPGNQILSGLSIEEYKTTLKIIKQAILATDLALYIKRLGEFFELIRKNQFNLEDPHQKELFLAMLMTACDLSAITKPWPIQQRIAELVATEFFDQGDRERKELNIEPTDLMNREKKNKIPSMQVGFIDAICLQLYEALTHVSEDCFPLLDGCRKNRQKWQALAEQQ

SEQ ID NO: 13 - protein, 326 aa, Artificial Sequence
  source: /note="Description of Artificial Sequence: Synthetic Destabilizing Domain (DD)"
EETRELQSLAAAVVPSAQTLKITDFSFSDFELSDLETALCTIRMFTDLNLVQNFQMKHEVLCRWILSVKKNYRKNVAYHNWRHAFNTAQCIFAALKAGKIQNKLTDLEILALLIAALSHDLDHRGVNNSYIQRSEHPLAQLYCHSIMEHHHFDQCLMILNSPGNQILSGLSIEEYKTTLKIIKQAILATDLALYIKRRGEFFELIRKNQFNLEDPHQKELFLAMLMTACDLSAITKPWPIQQRIAELVATEFFDQGDRERKELNIEPTDLMNREKKNKIPSMQVGFIDAICLQLYEALTHVSEDCFPLLDGCRKNRQKWQALAEQQ

SEQ ID NO: 14 - DNA, 981 bp, Artificial Sequence
  source: /note="Description of Artificial Sequence: Synthetic Destabilizing Domain (DD)"
atggaagaaacaagagagctacagtcgttagcggctgctgtggtgccatctgcccagacccttaaaattactgactttagcttcagtgactttgagctgtctgatctggaaacagcactgtgtacaattcggatgtttactgacctcaaccttgtgcagaacttccagatgaaacatgaggttctttgcagatggattttaagtgttaagaagaattatcggaagaatgttgcctatcataattggagacatgcctttaatacagctcagtgcatgtttgctgctctaaaagcaggcaaaattcagaacaagctgactgacctggagatacttgcattgctgattgctgcactaagccacgatttggatcaccgtggtgtgaataactcttacatacagcgaagtgaacatccacttgcccagctttactgccattcaatcatggaacaccatcattttgaccagtgcctgatgattcttaatagtccaggcaatcagattctcagtggcctctccattgaagaatataagaccacgttgaaaataatcaagcaagctattttagctacagacctagcactgtacattaagaggcgaggagaattttttgaacttataagaaaaaatcaattcaatttggaagatcctcatcaaaaggagttgtttttggcaatgctgatgacagcttgtgatctttctgcaattacaaaaccctggcctattcaacaacggatagcagaacttgtagcaactgaattttttgatcaaggagacagagagagaaaagaactcaacatagaacccactgatctaatgaacagggagaagaaaaacaaaatcccaagtatgcaagttgggttcatagatgccatctgcttgcaactgtatgaggccctgacccacgtgtcagaggactgtttccctttgctagatggctgcagaaagaacaggcagaaattccaggcccttgcagaacagcag

SEQ ID NO: 15 - DNA, 981 bp, Artificial Sequence
  source: /note="Description of Artificial Sequence: Synthetic Destabilizing Domain (DD)"
atggaagaaacaagagagctacagtcgttagcggctgctgtggtgccatctgcccagacccttaaaattactgactttagcttcagtgactttgagctgtctgatctggaaacagcactgtgtacaattcggatgtttactgacctcaaccttgtgcagaacttccagatgaaacatgaggttctttgcagatggattttaagtgttaagaagaattatcggaagaatgttgcctatcataattggagacatgcctttaatacagctcagtgcatgtttgctgctctaaaagcaggcaaaattcagaacaagctgactgacctggagatacttgcattgctgattgctgcactaagccacgatttggatcaccgtggtgtgaataactcttacatacagcgaagtgaacatccacttgcccagctttactgccattcaatcatggaacaccatcattttgaccagtgcctgatgattcttaatagtccaggcaatcagattctcagtggcctctccattgaagaatataagaccacgttgaaaataatcaagcaagctattttagctacagacctagcactgtacattaagaggcgaggagaattttttgaacttataagaaaaaatcaattcaatttggaagatcctcatcaaaaggagttgtttttggcaatgctgatgacagcttgtgatctttctgcaattacaaaaccctggcctattcaacaacggatagcagaacttgtagcaactgaattttttgatcaaggagacagagagagaaaagaactcaacatagaacccactgatctaatgaacagggagaagaaaaacaaaatcccaagtatgcaagttgggttcgccgatgccatctgcttgcaactgtatgaggccctgacccacgtgtcagaggactgtttccctttgctagatggctgcagaaagaacaggcagaaatggcaggcccttgcagaacagcag

SEQ ID NO: 16 - DNA, 981 bp, Artificial Sequence
  source: /note="Description of Artificial Sequence: Synthetic Destabilizing Domain (DD)"
atggaagaaacaagagagctacagtcgttagcggctgctgtggtgccatctgcccagacccttaaaattactgactttagcttcagtgactttgagctgtctgatctggaaacagcactgtgtacaattcggatgtttactgacctcaaccttgtgcagaacttccagatgaaacatgaggttctttgcagatggattttaagtgttaagaagaattatcggaagaatgttgcctatcataattggagacatgcctttaatacagctcagtgcatgtttgctgctctaaaagcaggcaaaattcagaacaagctgactgacctggagatacttgcattgctgattgctgcactaagccacgatttggatcaccgtggtgtgaataactcttacatacagcgaagtgaacatccacttgcccagctttactgccattcaatcatggaacaccatcattttgaccagtgcctgatgattcttaatagtccaggcaatcagattctcagtggcctctccattgaagaatataagaccacgttgaaaataatcaagcaagctattttagctacagacctagcactgtacattaagaggcgaggagaattttttgaacttataagaaaaaatcaattcaatttggaagatcctcatcaaaaggagttgtttttggcaatgctgatgacagcttgtgatctttctgcaattacaaaaccctggcctattcaacaacggatagcagaacttgtagcaactgaattttttgatcaaggagacagagagagaaaagaactcaacatagaacccactgatctaatgaacagggagaagaaaaacaaaatcccaagtatgcaagttgggttcatagatgccatctgcttgcaactggccgaggccctgacccacgtgtcagaggactgtttccctttgctagatggctgcagaaagaacaggcagaaatggcaggcccttgcagaacagcag

SEQ ID NO: 17 - DNA, 981 bp, Artificial Sequence
  source: /note="Description of Artificial Sequence: Synthetic Destabilizing Domain (DD)"
atggaagaaacaagagagctacagtcgttagcggctgctgtggtgccatctgcccagacccttaaaattactgactttagcttcagtgactttgagctgtctgatctggaaacagcactgtgtacaattcggatgtttactgacctcaaccttgtgcagaacttccagatgaaacatgaggttctttgcagatggattttaagtgttaagaagaattatcggaagaatgttgcctatcataattggagacatgcctttaatacagctcagtgcatgtttgctgctctaaaagcaggcaaaattcagaacaagctgactgacctggagatacttgcattgctgattgctgcactaagccacgatttggatcaccgtggtgtgaataactcttacatacagcgaagtgaacatccacttgcccagctttactgccattcaatcatggaacaccatcattttgaccagtgcctgatgattcttaatagtccaggcaatcagattctcagtggcctctccattgaagaatataagaccacgttgaaaataatcaagcaagctattttagctacagacctagcactgtacattaagaggcgaggagaattttttgaacttataagaaaaaatcaattcaatttggaagatcctcatcaaaaggagttgtttttggcaatgctgatgacagcttgtgatctttctgcaattacaaaaccctggcctattcaacaacggatagcagaacttgtagcaactgaatttgccgatcaaggagacagagagagaaaagaactcaacatagaacccactgatctaatgaacagggagaagaaaaacaaaatcccaagtatgcaagttgggttcatagatgccatctgcttgcaactgtatgaggccctgacccacgtgtcagaggactgtttccctttgctagatggctgcagaaagaacaggcagaaatggcaggcccttgcagaacagcag

SEQ ID NO: 18 - DNA, 981 bp, Artificial Sequence
  source: /note="Description of Artificial Sequence: Synthetic Destabilizing Domain (DD)"
atggaagaaacaagagagctacagtcgttagcggctgctgtggtgccatctgcccagacccttaaaattactgactttagcttcagtgactttgagctgtctgatctggaaacagcactgtgtacaattcggatgtttactgacctcaaccttgtgcagaacttccagatgaaacatgaggttctttgcagatggattttaagtgttaagaagaattatcggaagaatgttgcctatcataattggagacatgcctttaatacagctcagtgcatgtttgctgctctaaaagcaggcaaaattcagaacaagctgactgacctggagatacttgcattgctgattgctgcactaagccacgatttggatcaccgtggtgtgaataactcttacatacagcgaagtgaacatccacttgcccagctttactgccattcaatcatggaacaccatcattttgaccagtgcctgatgattcttaatagtccaggcaatcagattctcagtggcctctccattgaagaatataagaccacgttgaaaataatcaagcaagctattttagctacagacctagcactgtacattaagaggcgaggagaatttgccgaacttataagaaaaaatcaattcaatttggaagatcctcatcaaaaggagttgtttttggcaatgctgatgacagcttgtgatctttctgcaattacaaaaccctggcctattcaacaacggatagcagaacttgtagcaactgaattttttgatcaaggagacagagagagaaaagaactcaacatagaacccactgatctaatgaacagggagaagaaaaacaaaatcccaagtatgcaagttgggttcatagatgccatctgcttgcaactgtatgaggccctgacccacgtgtcagaggactgtttccctttgctagatggctgcagaaagaacaggcagaaatggcaggcccttgcagaacagcag

SEQ ID NO: 19 - DNA, 981 bp, Artificial Sequence
  source: /note="Description of Artificial Sequence: Synthetic Destabilizing Domain (DD)"
atggaagaaacaagagagctacagtcgttagcggctgctgtggtgccatctgcccagacccttaaaattactgactttagcttcagtgactttgagctgtctgatctggaaacagcactgtgtacaattcggatgtttactgacctcaaccttgtgcagaacttccagatgaaacatgaggttctttgcagatggattttaagtgttaagaagaattatcggaagaatgttgcctatcataattggagacatgcctttaatacagctcagtgcatgtttgctgctctaaaagcaggcaaaattcagaacaagctgactgacctggagatacttgcattgctgattgctgcactaagccacgatttgctgcaccgtggtgtgaataactcttacatacagcgaagtgaacatccacttgcccagctttactgccattcaatcatggaacaccatcattttgaccagtgcctgatgattcttaatagtccaggcaatcagattctcagtggcctctccattgaagaatataagaccacgttgaaaataatcaagcaagctattttagctacagacctagcactgtacattaagaggcgaggagaattttttgaacttataagaaaaaatcaattcaatttggaagatcctcatcaaaaggagttgtttttggcaatgctgatgacagcttgtgatctttctgcaattacaaaaccctggcctattcaacaacggatagcagaacttgtagcaactgaattttttgatcaaggagacagagagagaaaagaactcaacatagaacccactgatctaatgaacagggagaagaaaaacaaaatcccaagtatgcaagttgggttcatagatgccatctgcttgcaactgtatgaggccctgacccacgtgtcagaggactgtttccctttgctagatggctgcagaaagaacaggcagaaatggcaggcccttgcagaacagcag

SEQ ID NO: 20 - DNA, 981 bp, Artificial Sequence
  source: /note="Description of Artificial Sequence: Synthetic Destabilizing Domain (DD)"
atggaagaaacaagagagctacagtcgttagcggctgctgtggtgccatctgcccagacccttaaaattactgactttagcttcagtgactttgagctgtctgatctggaaacagcactgtgtacaattcggatgtttactgacctcaaccttgtgcagaacttccagatgaaacatgaggttctttgcagatggattttaagtgttaagaagaattatcggaagaatgttgcctatcataattggagacatgcctttaatacagctcagtgcatgtttgctgctctaaaagcaggcaaaattcagaacaagctgactgacctggagatacttgcattgctgattgctgcactaagccacgatttggatcaccgtggtgtgaataactcttacatacagcgaagtgaacatccacttgcccagctttactgccattcaatcatggaacaccatcattttgaccagtgcctgatgattcttaatagtccaggcaatcagattctcagtggcctctccattgaagaatataagaccacgttgaaaataatcaagcaagctattttagctacagacctagcactgctgattaagaggcgaggagaattttttgaacttataagaaaaaatcaattcaatttggaagatcctcatcaaaaggagttgtttttggcaatgctgatgacagcttgtgatctttctgcaattacaaaaccctggcctattcaacaacggatagcagaacttgtagcaactgaattttttgatcaaggagacagagagagaaaagaactcaacatagaacccactgatctaatgaacagggagaagaaaaacaaaatcccaagtatgcaagttgggttcatagatgccatctgcttgcaactgtatgaggccctgacccacgtgtcagaggactgtttccctttgctagatggctgcagaaagaacaggcagaaatggcaggcccttgcagaacagcag

SEQ ID NO: 21 - DNA, 981 bp, Artificial Sequence
  source: /note="Description of Artificial Sequence: Synthetic Destabilizing Domain (DD)"
atggaagaaacaagagagctacagtcgttagcggctgctgtggtgccatctgcccagacccttaaaattactgactttagcttcagtgactttgagctgtctgatctggaaacagcactgtgtacaattcggatgtttactgacctcaaccttgtgcagaacttccagatgaaacatgaggttctttgcagatggattttaagtgttaagaagaattatcggaagaatgttgcctatcataattggagacatgcctttaatacagctcagtgcatgtttgctgctctaaaagcaggcaaaattcagaacaagctgactgacctggagatacttgcattgctgattgctgcactaagccacgatttggatcaccgtggtgtgaataactcttacatacagcgaagtgaacatccacttgcccagctttactgccattcaatcatggaacaccatcattttgaccagtgcctgatgattcttaatagtccaggcaatcagattctcagtggcctctccattgaagaatataagaccacgttgaaaataatcaagcaagctattttagctacagacctagcactgtacattaagaggctgggagaattttttgaacttataagaaaaaatcaattcaatttggaagatcctcatcaaaaggagttgtttttggcaatgctgatgacagcttgtgatctttctgcaattacaaaaccctggcctattcaacaacggatagcagaacttgtagcaactgaattttttgatcaaggagacagagagagaaaagaactcaacatagaacccactgatctaatgaacagggagaagaaaaacaaaatcccaagtatgcaagttgggttcatagatgccatctgcttgcaactgtatgaggccctgacccacgtgtcagaggactgtttccctttgctagatggctgcagaaagaacaggcagaaatggcaggcccttgcagaacagcag

SEQ ID NO: 22 - DNA, 981 bp, Artificial Sequence
  source: /note="Description of Artificial Sequence: Synthetic Destabilizing Domain (DD)"
atggaagaaacaagagagctacagtcgttagcggctgctgtggtgccatctgcccagacccttaaaattactgactttagcttcagtgactttgagctgtctgatctggaaacagcactgtgtacaattcggatgtttactgacctcaaccttgtgcagaacttccagatgaaacatgaggttctttgcagatggattttaagtgttaagaagaattatcggaagaatgttgcctatcataattggagacatgcctttaatacagctcagtgcatctttgctgctctaaaagcaggcaaaattcagaacaagctgactgacctggagatacttgcattgctgattgctgcactaagccacgatttggatcaccgtggtgtgaataactcttacatacagcgaagtgaacatccacttgcccagctttactgccattcaatcatggaacaccatcattttgaccagtgcctgatgattcttaatagtccaggcaatcagattctcagtggcctctccattgaagaatataagaccacgttgaaaataatcaagcaagctattttagctacagacctagcactgtacattaagaggcgaggagaattttttgaacttataagaaaaaatcaattcaatttggaagatcctcatcaaaaggagttgtttttggcaatgctgatgacagcttgtgatctttctgcaattacaaaaccctggcctattcaacaacggatagcagaacttgtagcaactgaattttttgatcaaggagacagagagagaaaagaactcaacatagaacccactgatctaatgaacagggagaagaaaaacaaaatcccaagtatgcaagttgggttcatagatgccatctgcttgcaactgtatgaggccctgacccacgtgtcagaggactgtttccctttgctagatggctgcagaaagaacaggcagaaatggcaggcccttgcagaacagcag

SEQ ID NO: 23 - protein, 326 aa, Artificial Sequence
  source: /note="Description of Artificial Sequence: Synthetic Destabilizing Domain (DD)"
DETRELQSLAAAVVPSAQTLKITDFSFSDFELSDLETALCTIRMFTDLNLVQNFQMKHEVLCRWILSVKKNYRKNVAYHNWRHAFNTAQCMFAALKAGKIQNKLTDLEILALLIAALSHDLDHRGVNNSYIQRSEHPLAQLYCHSIMEHHHFDQCLMILNSPGNQILSGLSIEEYKTTLKIIKQAILATDLALYIKRRGEFFELIRKNQFNLEDPHQKELFLAMLMTACDLSAITKPWPIQQRIAELVATEFFDQGDRERKELNIEPTDLMNREKKNKIPSMQVGFIDAICLQLYEALTHVSEDCFPLLDGCRKNRQKWQALAEQQ

SEQ ID NO: 24 - protein, 326 aa, Artificial Sequence
  source: /note="Description of Artificial Sequence: Synthetic Destabilizing Domain (DD)"
EGTRELQSLAAAVVPSAQTLKITDFSFSDFELSDLETALCTIRMFTDLNLVQNFQMKHEVLCRWILSVKKNYRKNVAYHNWRHAFNTAQCMFAALKAGKIQNKLTDLEILALLIAALSHDLDHRGVNNSYIQRSEHPLAQLYCHSIMEHHHFDQCLMILNSPGNQILSGLSIEEYKTTLKIIKQAILATDLALYIKRRGEFFELIRKNQFNLEDPHQKELFLAMLMTACDLSAITKPWPIQQRIAELVATEFFDQGDRERKELNIEPTDLMNREKKNKIPSMQVGFIDAICLQLYEALTHVSEDCFPLLDGCRKNRQKWQALAEQQ

SEQ ID NO: 25 - protein, 326 aa, Artificial Sequence
  source: /note="Description of Artificial Sequence: Synthetic Destabilizing Domain (DD)"
EETRELRSLAAAVVPSAQTLKITDFSFSDFELSDLETALCTIRMFTDLNLVQNFQMKHEVLCRWILSVKKNYRKNVAYHNWRHAFNTAQCMFAALKAGKIQNKLTDLEILALLIAALSHDLDHRGVNNSYIQRSEHPLAQLYCHSIMEHHHFDQCLMILNSPGNQILSGLSIEEYKTTLKIIKQAILATDLALYIKRRGEFFELIRKNQFNLEDPHQKELFLAMLMTACDLSAITKPWPIQQRIAELVATEFFDQGDRERKELNIEPTDLMNREKKNKIPSMQVGFIDAICLQLYEALTHVSEDCFPLLDGCRKNRQKWQALAEQQ

SEQ ID NO: 26 - protein, 326 aa, Artificial Sequence
  source: /note="Description of Artificial Sequence: Synthetic Destabilizing Domain (DD)"
EETRELQSLAAAVVPSAQTLRITDFSFSDFELSDLETALCTIRMFTDLNLVQNFQMKHEVLCRWILSVKKNYRKNVAYHNWRHAFNTAQCMFAALKAGKIQNKLTDLEILALLIAALSHDLDHRGVNNSYIQRSEHPLAQLYCHSIMEHHHFDQCLMILNSPGNQILSGLSIEEYKTTLKIIKQAILATDLALYIKRRGEFFELIRKNQFNLEDPHQKELFLAMLMTACDLSAITKPWPIQQRIAELVATEFFDQGDRERKELNIEPTDLMNREKKNKIPSMQVGFIDAICLQLYEALTHVSEDCFPLLDGCRKNRQKWQALAEQQ

SEQ ID NO: 27 - protein, 326 aa, Artificial Sequence
  source: /note="Description of Artificial Sequence: Synthetic Destabilizing Domain (DD)"
EETRELQSLAAAVVPSAQTLKITDLSFSDFELSDLETALCTIRMFTDLNLVQNFQMKHEVLCRWILSVKKNYRKNVAYHNWRHAFNTAQCMFAALKAGKIQNKLTDLEILALLIAALSHDLDHRGVNNSYIQRSEHPLAQLYCHSIMEHHHFDQCLMILNSPGNQILSGLSIEEYKTTLKIIKQAILATDLALYIKRRGEFFELIRKNQFNLEDPHQKELFLAMLMTACDLSAITKPWPIQQRIAELVATEFFDQGDRERKELNIEPTDLMNREKKNKIPSMQVGFIDAICLQLYEALTHVSEDCFPLLDGCRKNRQKWQALAEQQ

SEQ ID NO: 28 - protein, 326 aa, Artificial Sequence
  source: /note="Description of Artificial Sequence: Synthetic Destabilizing Domain (DD)"
EETRELQSLAAAVVPSAQTLKITDFSLSDFELSDLETALCTIRMFTDLNLVQNFQMKHEVLCRWILSVKKNYRKNVAYHNWRHAFNTAQCMFAALKAGKIQNKLTDLEILALLIAALSHDLDHRGVNNSYIQRSEHPLAQLYCHSIMEHHHFDQCLMILNSPGNQILSGLSIEEYKTTLKIIKQAILATDLALYIKRRGEFFELIRKNQFNLEDPHQKELFLAMLMTACDLSAITKPWPIQQRIAELVATEFFDQGDRERKELNIEPTDLMNREKKNKIPSMQVGFIDAICLQLYEALTHVSEDCFPLLDGCRKNRQKWQALAEQQ

SEQ ID NO: 29 - protein, 326 aa, Artificial Sequence
  source: /note="Description of Artificial Sequence: Synthetic Destabilizing Domain (DD)"
EETRELQSLAAAVVPSAQTLKITDFSFSDLELSDLETALCTIRMFTDLNLVQNFQMKHEVLCRWILSVKKNYRKNVAYHNWRHAFNTAQCMFAALKAGKIQNKLTDLEILALLIAALSHDLDHRGVNNSYIQRSEHPLAQLYCHSIMEHHHFDQCLMILNSPGNQILSGLSIEEYKTTLKIIKQAILATDLALYIKRRGEFFELIRKNQFNLEDPHQKELFLAMLMTACDLSAITKPWPIQQRIAELVATEFFDQGDRERKELNIEPTDLMNREKKNKIPSMQVGFIDAICLQLYEALTHVSEDCFPLLDGCRKNRQKWQALAEQQ

SEQ ID NO: 30 - protein, 326 aa, Artificial Sequence
  source: /note="Description of Artificial Sequence: Synthetic Destabilizing Domain (DD)"
EETRELQSLAAAVVPSAQTLKITDFSFSDSELSDLETALCTIRMFTDLNLVQNFQMKHEVLCRWILSVKKNYRKNVAYHNWRHAFNTAQCMFAALKAGKIQNKLTDLEILALLIAALSHDLDHRGVNNSYIQRSEHPLAQLYCHSIMEHHHFDQCLMILNSPGNQILSGLSIEEYKTTLKIIKQAILATDLALYIKRRGEFFELIRKNQFNLEDPHQKELFLAMLMTACDLSAITKPWPIQQRIAELVATEFFDQGDRERKELNIEPTDLMNREKKNKIPSMQVGFIDAICLQLYEALTHVSEDCFPLLDGCRKNRQKWQALAEQQ

SEQ ID NO: 31 - protein, 326 aa, Artificial Sequence
  source: /note="Description of Artificial Sequence: Synthetic Destabilizing Domain (DD)"
EETRELQSLAAAVVPSAQTLKITDFSFSDFELSDLETALCTIRMFTDLNLVQNFQMEHEVLCRWILSVKKNYRKNVAYHNWRHAFNTAQCMFAALKAGKIQNKLTDLEILALLIAALSHDLDHRGVNNSYIQRSEHPLAQLYCHSIMEHHHFDQCLMILNSPGNQILSGLSIEEYKTTLKIIKQAILATDLALYIKRRGEFFELIRKNQFNLEDPHQKELFLAMLMTACDLSAITKPWPIQQRIAELVATEFFDQGDRERKELNIEPTDLMNREKKNKIPSMQVGFIDAICLQLYEALTHVSEDCFPLLDGCRKNRQKWQALAEQQ

SEQ ID NO: 32 - protein, 326 aa, Artificial Sequence
  source: /note="Description of Artificial Sequence: Synthetic Destabilizing Domain (DD)"
EETRELQSLAAAVVPSAQTLKITDFSFSDFELSDLETALCTIRMFTDLNLVQSFQMKHEVLCRWILSVKKNYRKNVAYHNWRHAFNTAQCMFAALKAGKIQNKLTDLEILALLIAALSHDLDHRGVNNSYIQRSEHPLAQLYCHSIMEHHHFDQCLMILNSPGNQILSGLSIEEYKTTLKIIKQAILATDLALYIKRRGEFFELIRKNQFNLEDPHQKELFLAMLMTACDLSAITKPWPIQQRIAELVATEFFDQGDRERKELNIEPTDLMNREKKNKIPSMQVGFIDAICLQLYEALTHVSEDCFPLLDGCRKNRQKWQALAEQQ

SEQ ID NO: 33 - protein, 326 aa, Artificial Sequence
  source: /note="Description of Artificial Sequence: Synthetic Destabilizing Domain (DD)"
EETRELQSLAAAVVPSAQTLKITDFSFSDFELSDLETALCTIRMFTDLNLVQNFQMKHEVLCRWILSVKENYRKNVAYHNWRHAFNTAQCMFAALKAGKIQNKLTDLEILALLIAALSHDLDHRGVNNSYIQRSEHPLAQLYCHSIMEHHHFDQCLMILNSPGNQILSGLSIEEYKTTLKIIKQAILATDLALYIKRRGEFFELIRKNQFNLEDPHQKELFLAMLMTACDLSAITKPWPIQQRIAELVATEFFDQGDRERKELNIEPTDLMNREKKNKIPSMQVGFIDAICLQLYEALTHVSEDCFPLLDGCRKNRQKWQALAEQQ

SEQ ID NO: 34 - protein, 326 aa, Artificial Sequence
  source: /note="Description of Artificial Sequence: Synthetic Destabilizing Domain (DD)"
EETRELQSLAAAVVPSAQTLKITDFSFSDFELSDLETALCTIRMFTDLNLVQNFQMKHEVLCRWILSVKKNYRENVAYHNWRHAFNTAQCMFAALKAGKIQNKLTDLEILALLIAALSHDLDHRGVNNSYIQRSEHPLAQLYCHSIMEHHHFDQCLMILNSPGNQILSGLSIEEYKTTLKIIKQAILATDLALYIKRRGEFFELIRKNQFNLEDPHQKELFLAMLMTACDLSAITKPWPIQQRIAELVATEFFDQGDRERKELNIEPTDLMNREKKNKIPSMQVGFIDAICLQLYEALTHVSEDCFPLLDGCRKNRQKWQALAEQQ

SEQ ID NO: 35 - protein, 326 aa, Artificial Sequence
  source: /note="Description of Artificial Sequence: Synthetic Destabilizing Domain (DD)"
EETRELQSLAAAVVPSAQTLKITDFSFSDFELSDLETALCTIRMFTDLNLVQNFQMKHEVLCRWILSVKKNYRKHVAYHNWRHAFNTAQCMFAALKAGKIQNKLTDLEILALLIAALSHDLDHRGVNNSYIQRSEHPLAQLYCHSIMEHHHFDQCLMILNSPGNQILSGLSIEEYKTTLKIIKQAILATDLALYIKRRGEFFELIRKNQFNLEDPHQKELFLAMLMTACDLSAITKPWPIQQRIAELVATEFFDQGDRERKELNIEPTDLMNREKKNKIPSMQVGFIDAICLQLYEALTHVSEDCFPLLDGCRKNRQKWQALAEQQ

SEQ ID NO: 36 - protein, 326 aa, Artificial Sequence
  source: /note="Description of Artificial Sequence: Synthetic Destabilizing Domain (DD)"
EETRELQSLAAAVVPSAQTLKITDFSFSDFELSDLETALCTIRMFTDLNLVQNFQMKHEVLCRWILSVKKNYRKNVAYHNWRHAFNTAQCMFAALRAGKIQNKLTDLEILALLIAALSHDLDHRGVNNSYIQRSEHPLAQLYCHSIMEHHHFDQCLMILNSPGNQILSGLSIEEYKTTLKIIKQAILATDLALYIKRRGEFFELIRKNQFNLEDPHQKELFLAMLMTACDLSAITKPWPIQQRIAELVATEFFDQGDRERKELNIEPTDLMNREKKNKIPSMQVGFIDAICLQLYEALTHVSEDCFPLLDGCRKNRQKWQALAEQQ

SEQ ID NO: 37 - protein, 326 aa, Artificial Sequence
  source: /note="Description of Artificial Sequence: Synthetic Destabilizing Domain (DD)"
EETRELQSLAAAVVPSAQTLKITDFSFSDFELSDLETALCTIRMFTDLNLVQNFQMKHEVLCRWILSVKKNYRKNVAYHNWRHAFNTAQCMFAALKAGEIQNKLTDLEILALLIAALSHDLDHRGVNNSYIQRSEHPLAQLYCHSIMEHHHFDQCLMILNSPGNQILSGLSIEEYKTTLKIIKQAILATDLALYIKRRGEFFELIRKNQFNLEDPHQKELFLAMLMTACDLSAITKPWPIQQRIAELVATEFFDQGDRERKELNIEPTDLMNREKKNKIPSMQVGFIDAICLQLYEALTHVSEDCFPLLDGCRKNRQKWQALAEQQ

SEQ ID NO: 38 - protein, 326 aa, Artificial Sequence
  source: /note="Description of Artificial Sequence: Synthetic Destabilizing Domain (DD)"
EETRELQSLAAAVVPSAQTLKITDFSFSDFELSDLETALCTIRMFTDLNLVQNFQMKHEVLCRWILSVKKNYRKNVAYHNWRHAFNTAQCMFAALKAGKIQSKLTDLEILALLIAALSHDLDHRGVNNSYIQRSEHPLAQLYCHSIMEHHHFDQCLMILNSPGNQILSGLSIEEYKTTLKIIKQAILATDLALYIKRRGEFFELIRKNQFNLEDPHQKELFLAMLMTACDLSAITKPWPIQQRIAELVATEFFDQGDRERKELNIEPTDLMNREKKNKIPSMQVGFIDAICLQLYEALTHVSEDCFPLLDGCRKNRQKWQALAEQQ

SEQ ID NO: 39 - protein, 326 aa, Artificial Sequence
  source: /note="Description of Artificial Sequence: Synthetic Destabilizing Domain (DD)"
EETRELQSLAAAVVPSAQTLKITDFSFSDFELSDLETALCTIRMFTDLNLVQNFQMKHEVLCRWILSVKKNYRKNVAYHNWRHAFNTAQCMFAALKAGKIQNKLTDLEILALLIAALSHDLDHRGVSNSYIQRSEHPLAQLYCHSIMEHHHFDQCLMILNSPGNQILSGLSIEEYKTTLKIIKQAILATDLALYIKRRGEFFELIRKNQFNLEDPHQKELFLAMLMTACDLSAITKPWPIQQRIAELVATEFFDQGDRERKELNIEPTDLMNREKKNKIPSMQVGFIDAICLQLYEALTHVSEDCFPLLDGCRKNRQKWQALAEQQ

SEQ ID NO: 40 - protein, 326 aa, Artificial Sequence
  source: /note="Description of Artificial Sequence: Synthetic Destabilizing Domain (DD)"
EETRELQSLAAAVVPSAQTLKITDFSFSDFELSDLETALCTIRMFTDLNLVQNFQMKHEVLCRWILSVKKNYRKNVAYHNWRHAFNTAQCMFAALKAGKIQNKLTDLEILALLIAALSHDLDHRGVNNSYIQRSEHPLAQLDCHSIMEHHHFDQCLMILNSPGNQILSGLSIEEYKTTLKIIKQAILATDLALYIKRRGEFFELIRKNQFNLEDPHQKELFLAMLMTACDLSAITKPWPIQQRIAELVATEFFDQGDRERKELNIEPTDLMNREKKNKIPSMQVGFIDAICLQLYEALTHVSEDCFPLLDGCRKNRQKWQALAEQQ

SEQ ID NO: 41 - protein, 326 aa, Artificial Sequence
  source: /note="Description of Artificial Sequence: Synthetic Destabilizing Domain (DD)"
EETRELQSLAAAVVPSAQTLKITDFSFSDFELSDLETALCTIRMFTDLNLVQNFQMKHEVLCRWILSVKKNYRKNVAYHNWRHAFNTAQCMFAALKAGKIQNKLTDLEILALLIAALSHDLDHRGVNNSYIQRSEHPLAQLNCHSIMEHHHFDQCLMILNSPGNQILSGLSIEEYKTTLKIIKQAILATDLALYIKRRGEFFELIRKNQFNLEDPHQKELFLAMLMTACDLSAITKPWPIQQRIAELVATEFFDQGDRERKELNIEPTDLMNREKKNKIPSMQVGFIDAICLQLYEALTHVSEDCFPLLDGCRKNRQKWQALAEQQ

SEQ ID NO: 42 - protein, 326 aa, Artificial Sequence
  source: /note="Description of Artificial Sequence: Synthetic Destabilizing Domain (DD)"
EETRELQSLAAAVVPSAQTLKITDFSFSDFELSDLETALCTIRMFTDLNLVQNFQMKHEVLCRWILSVKKNYRKNVAYHNWRHAFNTAQCMFAALKAGKIQNKLTDLEILALLIAALSHDLDHRGVNNSYIQRSEHPLAQLYRHSIMEHHHFDQCLMILNSPGNQILSGLSIEEYKTTLKIIKQAILATDLALYIKRRGEFFELIRKNQFNLEDPHQKELFLAMLMTACDLSAITKPWPIQQRIAELVATEFFDQGDRERKELNIEPTDLMNREKKNKIPSMQVGFIDAICLQLYEALTHVSEDCFPLLDGCRKNRQKWQALAEQQ

SEQ ID NO: 43 - protein, 326 aa, Artificial Sequence
  source: /note="Description of Artificial Sequence: Synthetic Destabilizing Domain (DD)"
EETRELQSLAAAVVPSAQTLKITDFSFSDFELSDLETALCTIRMFTDLNLVQNFQMKHEVLCRWILSVKKNYRKNVAYHNWRHAFNTAQCMFAALKAGKIQNKLTDLEILALLIAALSHDLDHRGVNNSYIQRSEHPLAQLYCRSIMEHHHFDQCLMILNSPGNQILSGLSIEEYKTTLKIIKQAILATDLALYIKRRGEFFELIRKNQFNLEDPHQKELFLAMLMTACDLSAITKPWPIQQRIAELVATEFFDQGDRERKELNIEPTDLMNREKKNKIPSMQVGFIDAICLQLYEALTHVSEDCFPLLDGCRKNRQKWQALAEQQ

SEQ ID NO: 44 - protein, 326 aa, Artificial Sequence
  source: /note="Description of Artificial Sequence: Synthetic Destabilizing Domain (DD)"
EETRELQSLAAAVVPSAQTLKITDFSFSDFELSDLETALCTIRMFTDLNLVQNFQMKHEVLCRWILSVKKNYRKNVAYHNWRHAFNTAQCMFAALKAGKIQNKLTDLEILALLIAALSHDLDHRGVNNSYIQRSEHPLAQLYCHSIMEHHHFAQCLMILNSPGNQILSGLSIEEYKTTLKIIKQAILATDLALYIKRRGEFFELIRKNQFNLEDPHQKELFLAMLMTACDLSAITKPWPIQQRIAELVATEFFDQGDRERKELNIEPTDLMNREKKNKIPSMQVGFIDAICLQLYEALTHVSEDCFPLLDGCRKNRQKWQALAEQQ

SEQ ID NO: 45 - protein, 326 aa, Artificial Sequence
  source: /note="Description of Artificial Sequence: Synthetic Destabilizing Domain (DD)"
EETRELQSLAAAVVPSAQTLKITDFSFSDFELSDLETALCTIRMFTDLNLVQNFQMKHEVLCRWILSVKKNYRKNVAYHNWRHAFNTAQCMFAALKAGKIQNKLTDLEILALLIAALSHDLDHRGVNNSYIQRSEHPLAQLYCHSIMEHHHFDQCLMILNSPGNQILSGLSIEEYKTSLKIIKQAILATDLALYIKRRGEFFELIRKNQFNLEDPHQKELFLAMLMTACDLSAITKPWPIQQRIAELVATEFFDQGDRERKELNIEPTDLMNREKKNKIPSMQVGFIDAICLQLYEALTHVSEDCFPLLDGCRKNRQKWQALAEQQ

SEQ ID NO: 46 - protein, 326 aa, Artificial Sequence
  source: /note="Description of Artificial Sequence: Synthetic Destabilizing Domain (DD)"
EETRELQSLAAAVVPSAQTLKITDFSFSDFELSDLETALCTIRMFTDLNLVQNFQMKHEVLCRWILSVKKNYRKNVAYHNWRHAFNTAQCMFAALKAGKIQNKLTDLEILALLIAALSHDLDHRGVNNSYIQRSEHPLAQLYCHSIMEHHHFDQCLMILNSPGNQILSGLSIEEYKTTLKIIKQAILATNLALYIKRRGEFFELIRKNQFNLEDPHQKELFLAMLMTACDLSAITKPWPIQQRIAELVATEFFDQGDRERKELNIEPTDLMNREKKNKIPSMQVGFIDAICLQLYEALTHVSEDCFPLLDGCRKNRQKWQALAEQQ

SEQ ID NO: 47 - protein, 326 aa, Artificial Sequence
  source: /note="Description of Artificial Sequence: Synthetic Destabilizing Domain (DD)"
EETRELQSLAAAVVPSAQTLKITDFSFSDFELSDLETALCTIRMFTDLNLVQNFQMKHEVLCRWILSVKKNYRKNVAYHNWRHAFNTAQCMFAALKAGKIQNKLTDLEILALLIAALSHDLDHRGVNNSYIQRSEHPLAQLYCHSIMEHHHFDQCLMILNSPGNQILSGLSIEEYKTTLKIIKQAILATGLALYIKRRGEFFELIRKNQFNLEDPHQKELFLAMLMTACDLSAITKPWPIQQRIAELVATEFFDQGDRERKELNIEPTDLMNREKKNKIPSMQVGFIDAICLQLYEALTHVSEDCFPLLDGCRKNRQKWQALAEQQ

SEQ ID NO: 48 - protein, 326 aa, Artificial Sequence
  source: /note="Description of Artificial Sequence: Synthetic Destabilizing Domain (DD)"
EETRELQSLAAAVVPSAQTLKITDFSFSDFELSDLETALCTIRMFTDLNLVQNFQMKHEVLCRWILSVKKNYRKNVAYHNWRHAFNTAQCMFAALKAGKIQNKLTDLEILALLIAALSHDLDHRGVNNSYIQRSEHPLAQLYCHSIMEHHHFDQCLMILNSPGNQILSGLSIEEYKTTLKIIKQAILATDLALYIKRRGEFFEHIRKNQFNLEDPHQKELFLAMLMTACDLSAITKPWPIQQRIAELVATEFFDQGDRERKELNIEPTDLMNREKKNKIPSMQVGFIDAICLQLYEALTHVSEDCFPLLDGCRKNRQKWQALAEQQ

SEQ ID NO: 49 - protein, 326 aa, Artificial Sequence
  source: /note="Description of Artificial Sequence: Synthetic Destabilizing Domain (DD)"
EETRELQSLAAAVVPSAQTLKITDFSFSDFELSDLETALCTIRMFTDLNLVQNFQMKHEVLCRWILSVKKNYRKNVAYHNWRHAFNTAQCMFAALKAGKIQNKLTDLEILALLIAALSHDLDHRGVNNSYIQRSEHPLAQLYCHSIMEHHHFDQCLMILNSPGNQILSGLSIEEYKTTLKIIKQAILATDLALYIKRRGEFFELIRKSQFNLEDPHQKELFLAMLMTACDLSAITKPWPIQQRIAELVATEFFDQGDRERKELNIEPTDLMNREKKNKIPSMQVGFIDAICLQLYEALTHVSEDCFPLLDGCRKNRQKWQALAEQQ

SEQ ID NO: 50 - protein, 326 aa, Artificial Sequence
  source: /note="Description of Artificial Sequence: Synthetic Destabilizing Domain (DD)"
EETRELQSLAAAVVPSAQTLKITDFSFSDFELSDLETALCTIRMFTDLNLVQNFQMKHEVLCRWILSVKKNYRKNVAYHNWRHAFNTAQCMFAALKAGKIQNKLTDLEILALLIAALSHDLDHRGVNNSYIQRSEHPLAQLYCHSIMEHHHFDQCLMILNSPGNQILSGLSIEEYKTTLKIIKQAILATDLALYIKRRGEFFELIRKNQFNLEDPHQKELFLAMLMTSCDLSAITKPWPIQQRIAELVATEFFDQGDRERKELNIEPTDLMNREKKNKIPSMQVGFIDAICLQLYEALTHVSEDCFPLLDGCRKNRQKWQALAEQQ

SEQ ID NO: 51 - protein, 326 aa, Artificial Sequence
  source: /note="Description of Artificial Sequence: Synthetic Destabilizing Domain (DD)"
EETRELQSLAAAVVPSAQTLKITDFSFSDFELSDLETALCTIRMFTDLNLVQNFQMKHEVLCRWILSVKKNYRKNVAYHNWRHAFNTAQCMFAALKAGKIQNKLTDLEILALLIAALSHDLDHRGVNNSYIQRSEHPLAQLYCHSIMEHHHFDQCLMILNSPGNQILSGLSIEEYKTTLKIIKQAILATDLALYIKRRGEFFELIRKNQFNLEDPHQKELFLAMLMTACNLSAITKPWPIQQRIAELVATEFFDQGDRERKELNIEPTDLMNREKKNKIPSMQVGFIDAICLQLYEALTHVSEDCFPLLDGCRKNRQKWQALAEQQ

SEQ ID NO: 52 - protein, 326 aa, Artificial Sequence
  source: /note="Description of Artificial Sequence: Synthetic Destabilizing Domain (DD)"
EETRELQSLAAAVVPSAQTLKITDFSFSDFELSDLETALCTIRMFTDLNLVQNFQMKHEVLCRWILSVKKNYRKNVAYHNWRHAFNTAQCMFAALKAGKIQNKLTDLEILALLIAALSHDLDHRGVNNSYIQRSEHPLAQLYCHSIMEHHHFDQCLMILNSPGNQILSGLSIEEYKTTLKIIKQAILATDLALYIKRRGEFFELIRKNQFNLEDPHQKELFLAMLMTACGLSAITKPWPIQQRIAELVATEFFDQGDRERKELNIEPTDLMNREKKNKIPSMQVGFIDAICLQLYEALTHVSEDCFPLLDGCRKNRQKWQALAEQQ

SEQ ID NO: 53 - protein, 326 aa, Artificial Sequence
  source: /note="Description of Artificial Sequence: Synthetic Destabilizing Domain (DD)"
EETRELQSLAAAVVPSAQTLKITDFSFSDFELSDLETALCTIRMFTDLNLVQNFQMKHEVLCRWILSVKKNYRKNVAYHNWRHAFNTAQCMFAALKAGKIQNKLTDLEILALLIAALSHDLDHRGVNNSYIQRSEHPLAQLYCHSIMEHHHFDQCLMILNSPGNQILSGLSIEEYKTTLKIIKQAILATDLALYIKRRGEFFELIRKNQFNLEDPHQKELFLAMLMTACVLSAITKPWPIQQRIAELVATEFFDQGDRERKELNIEPTDLMNREKKNKIPSMQVGFIDAICLQLYEALTHVSEDCFPLLDGCRKNRQKWQALAEQQ

SEQ ID NO: 54 - protein, 326 aa, Artificial Sequence
  source: /note="Description of Artificial Sequence: Synthetic Destabilizing Domain (DD)"
EETRELQSLAAAVVPSAQTLKITDFSFSDFELSDLETALCTIRMFTDLNLVQNFQMKHEVLCRWILSVKKNYRKNVAYHNWRHAFNTAQCMFAALKAGKIQNKLTDLEILALLIAALSHDLDHRGVNNSYIQRSEHPLAQLYCHSIMEHHHFDQCLMILNSPGNQILSGLSIEEYKTTLKIIKQAILATDLALYIKRRGEFFELIRKNQFNLEDPHQKELFLAMLMTACDLFAITKPWPIQQRIAELVATEFFDQGDRERKELNIEPTDLMNREKKNKIPSMQVGFIDAICLQLYEALTHVSEDCFPLLDGCRKNRQKWQALAEQQ

SEQ ID NO: 55 - protein, 326 aa, Artificial Sequence
  source: /note="Description of Artificial Sequence: Synthetic Destabilizing Domain (DD)"
EETRELQSLAAAVVPSAQTLKITDFSFSDFELSDLETALCTIRMFTDLNLVQNFQMKHEVLCRWILSVKKNYRKNVAYHNWRHAFNTAQCMFAALKAGKIQNKLTDLEILALLIAALSHDLDHRGVNNSYIQRSEHPLAQLYCHSIMEHHHFDQCLMILNSPGNQILSGLSIEEYKTTLKIIKQAILATDLALYIKRRGEFFELIRKNQFNLEDPHQKELFLAMLMTACDLSAITKPWPIQQRIAELVATEFFDQGDREREELNIEPTDLMNREKKNKIPSMQVGFIDAICLQLYEALTHVSEDCFPLLDGCRKNRQKWQALAEQQ

SEQ ID NO: 56 - protein, 326 aa, Artificial Sequence
  source: /note="Description of Artificial Sequence: Synthetic Destabilizing Domain (DD)"
EETRELQSLAAAVVPSAQTLKITDFSFSDFELSDLETALCTIRMFTDLNLVQNFQMKHEVLCRWILSVKKNYRKNVAYHNWRHAFNTAQCMFAALKAGKIQNKLTDLEILALLIAALSHDLDHRGVNNSYIQRSEHPLAQLYCHSIMEHHHFDQCLMILNSPGNQILSGLSIEEYKTTLKIIKQAILATDLALYIKRRGEFFELIRKNQFNLEDPHQKELFLAMLMTACDLSAITKPWPIQQRIAELVATEFFDQGDRERKEFNIEPTDLMNREKKNKIPSMQVGFIDAICLQLYEALTHVSEDCFPLLDGCRKNRQKWQALAEQQ

SEQ ID NO: 57 - protein, 326 aa, Artificial Sequence
  source: /note="Description of Artificial Sequence: Synthetic Destabilizing Domain (DD)"
EETRELQSLAAAVVPSAQTLKITDFSFSDFELSDLETALCTIRMFTDLNLVQNFQMKHEVLCRWILSVKKNYRKNVAYHNWRHAFNTAQCMFAALKAGKIQNKLTDLEILALLIAALSHDLDHRGVNNSYIQRSEHPLAQLYCHSIMEHHHFDQCLMILNSPGNQILSGLSIEEYKTTLKIIKQAILATDLALYIKRRGEFFELIRKNQFNLEDPHQKELFLAMLMTACDLSAITKPWPIQQRIAELVATEFFDQGDRERKELNTEPTDLMNREKKNKIPSMQVGFIDAICLQLYEALTHVSEDCFPLLDGCRKNRQKWQALAEQQ

SEQ ID NO: 58 - protein, 326 aa, Artificial Sequence
  source: /note="Description of Artificial Sequence: Synthetic Destabilizing Domain (DD)"
EETRELQSLAAAVVPSAQTLKITDFSFSDFELSDLETALCTIRMFTDLNLVQNFQMKHEVLCRWILSVKKNYRKNVAYHNWRHAFNTAQCMFAALKAGKIQNKLTDLEILALLIAALSHDLDHRGVNNSYIQRSEHPLAQLYCHSIMEHHHFDQCLMILNSPGNQILSGLSIEEYKTTLKIIKQAILATDLALYIKRRGEFFELIRKNQFNLEDPHQKELFLAMLMTACDLSAITKPWPIQQRIAELVATEFFDQGDRERKELNIEPPDLMNREKKNKIPSMQVGFIDAICLQLYEALTHVSEDCFPLLDGCRKNRQKWQALAEQQ

SEQ ID NO: 59 - protein, 326 aa, Artificial Sequence
  source: /note="Description of Artificial Sequence: Synthetic Destabilizing Domain (DD)"
EETRELQSLAAAVVPSAQTLKITDFSFSDFELSDLETALCTIRMFTDLNLVQNFQMKHEVLCRWILSVKKNYRKNVAYHNWRHAFNTAQCMFAALKAGKIQNKLTDLEILALLIAALSHDLDHRGVNNSYIQRSEHPLAQLYCHSIMEHHHFDQCLMILNSPGNQILSGLSIEEYKTTLKIIKQAILATDLALYIKRRGEFFELIRKNQFNLEDPHQKELFLAMLMTACDLSAITKPWPIQQRIAELVATEFFDQGDRERKELNIEPTDLMNREKKNKIPCMQVGFIDAICLQLYEALTHVSEDCFPLLDGCRKNRQKWQALAEQQ

SEQ ID NO: 60 - protein, 326 aa, Artificial Sequence
  source: /note="Description of Artificial Sequence: Synthetic Destabilizing Domain (DD)"
EETRELQSLAAAVVPSAQTLKITDFSFSDFELSDLETALCTIRMFTDLNLVQNFQMKHEVLCRWILSVKKNYRKNVAYHNWRHAFNTAQCMFAALKAGKIQNKLTDLEILALLIAALSHDLDHRGVNNSYIQRSEHPLAQLYCHSIMEHHHFDQCLMILNSPGNQILSGLSIEEYKTTLKIIKQAILATDLALYIKRRGEFFELIRKNQFNLEDPHQKELFLAMLMTACDLSAITKPWPIQQRIAELVATEFFDQGDRERKELNIEPTDLMNREKKNKIPSAQVGFIDAICLQLYEALTHVSEDCFPLLDGCRKNRQKWQALAEQQ

SEQ ID NO: 61 - protein, 326 aa, Artificial Sequence
  source: /note="Description of Artificial Sequence: Synthetic Destabilizing Domain (DD)"
EETRELQSLAAAVVPSAQTLKITDFSFSDFELSDLETALCTIRMFTDLNLVQNFQMKHEVLCRWILSVKKNYRKNVAYHNWRHAFNTAQCMFAALKAGKIQNKLTDLEILALLIAALSHDLDHRGVNNSYIQRSEHPLAQLYCHSIMEHHHFDQCLMILNSPGNQILSGLSIEEYKTTLKIIKQAILATDLALYIKRRGEFFELIRKNQFNLEDPHQKELFLAMLMTACDLSAITKPWPIQQRIAELVATEFFDQGDRERKELNIEPTDLMNREKKNKIPSMQVGFIDATCLQLYEALTHVSEDCFPLLDGCRKNRQKWQALAEQQ

SEQ ID NO: 62 - protein, 326 aa, Artificial Sequence
  source: /note="Description of Artificial Sequence: Synthetic Destabilizing Domain (DD)"
EETRELQSLAAAVVPSAQTLKITDFSFSDFELSDLETALCTIRMFTDLNLVQNFQMKHEVLCRWILSVKKNYRKNVAYHNWRHAFNTAQCMFAALKAGKIQNKLTDLEILALLIAALSHDLDHRGVNNSYIQRSEHPLAQLYCHSIMEHHHFDQCLMILNSPGNQILSGLSIEEYKTTLKIIKQAILATDLALYIKRRGEFFELIRKNQFNLEDPHQKELFLAMLMTACDLSAITKPWPIQQRIAELVATEFFDQGDRERKELNIEPTDLMNREKKNKIPSMQVGFIDAICLQLYEALTHVSEDSFPLLDGCRKNRQKWQALAEQQ

SEQ ID NO: 63 - protein, 326 aa, Artificial Sequence
  source: /note="Description of Artificial Sequence: Synthetic Destabilizing Domain (DD)"
EETRELQSLAAAVVPSAQTLKITDFSFSDFELSDLETALCTIRMFTDLNLVQNFQMKHEVLCRWILSVKKNYRKNVAYHNWRHAFNTAQCMFAALKAGKIQNKLTDLEILALLIAALSHDLDHRGVNNSYIQRSEHPLAQLYCHSIMEHHHFDQCLMILNSPGNQILSGLSIEEYKTTLKIIKQAILATDLALYIKRRGEFFELIRKNQFNLEDPHQKELFLAMLMTACDLSAITKPWPIQQRIAELVATEFFDQGDRERKELNIEPTDLMNREKKNKIPSMQVGFIDAICLQLYEALTHVSEDCFPLLDGCRKNRQEWQALAEQQ

SEQ ID NO: 64 - protein, 326 aa, Artificial Sequence
  source: /note="Description of Artificial Sequence: Synthetic Destabilizing Domain (DD)"
EETRELQSLAAAVVPSAQTLKITDFGFSDFELSDLETALCTIRMFTDLNLVQNFQMKHEVLCRWILSVKKNYRKNVAYHNWRHAFNTAQCMFAALKAGKIQNKLTDLEILALLIAALSHDLDHRGVNNSYIQRSEHPLAQLYCHSIMEHHHFDQCLMILNSPGNQILSGLSIEEYKTTLKIIKQAILATDLALYIKRRGEFFELIRKNQFNLEDPHQKELFLAMLMTACDLSAITKPWPIQQRIAELVATEFFDQGDRERKELNIEPTDLMNREKKNKIPSMQVGFIDAICLQLYEALTHVSEDCFPLLDGCRKNRQKWQALAEQQ

SEQ ID NO: 65 - protein, 326 aa, Artificial Sequence
  source: /note="Description of Artificial Sequence: Synthetic Destabilizing Domain (DD)"
EETRELQSLAAAVVPSAQTLKITDFSFSDFELSDLETALCTIRMFTDLNLAQNFQMKHEVLCRWILSVKKNYRKNVAYHNWRHAFNTAQCMFAALKAGKIQNKLTDLEILALLIAALSHDLDHRGVNNSYIQRSEHPLAQLYCHSIMEHHHFDQCLMILNSPGNQILSGLSIEEYKTTLKIIKQAILATDLALYIKRRGEFFELIRKNQFNLEDPHQKELFLAMLMTACDLSAITKPWPIQQRIAELVATEFFDQGDRERKELNIEPTDLMNREKKNKIPSMQVGFIDAICLQLYEALTHVSEDCFPLLDGCRKNRQKWQALAEQQ

SEQ ID NO: 66 - protein, 326 aa, Artificial Sequence
  source: /note="Description of Artificial Sequence: Synthetic Destabilizing Domain (DD)"
EETRELQSLAAAVVPSAQTLKITDFSFSDFELSDLETALCTIRMFTDLNLVQNFQMKHEVLCRWVLSVKKNYRKNVAYHNWRHAFNTAQCMFAALKAGKIQNKLTDLEILALLIAALSHDLDHRGVNNSYIQRSEHPLAQLYCHSIMEHHHFDQCLMILNSPGNQILSGLSIEEYKTTLKIIKQAILATDLALYIKRRGEFFELIRKNQFNLEDPHQKELFLAMLMTACDLSAITKPWPIQQRIAELVATEFFDQGDRERKELNIEPTDLMNREKKNKIPSMQVGFIDAICLQLYEALTHVSEDCFPLLDGCRKNRQKWQALAEQQ

SEQ ID NO: 67 - protein, 326 aa, Artificial Sequence
  source: /note="Description of Artificial Sequence: Synthetic Destabilizing Domain (DD)"
EETRELQSLAAAVVPSAQTLKITDFSFSDFELSDLETALCTIRMFTDLNLVQNFQMKHEVLCRWILSVKKNYRKNVAYHNWRHAFNTAQCMFAALKAGKIQNKLTDLEILALLVAALSHDLDHRGVNNSYIQRSEHPLAQLYCHSIMEHHHFDQCLMILNSPGNQILSGLSIEEYKTTLKIIKQAILATDLALYIKRRGEFFELIRKNQFNLEDPHQKELFLAMLMTACDLSAITKPWPIQQRIAELVATEFFDQGDRERKELNIEPTDLMNREKKNKIPSMQVGFIDAICLQLYEALTHVSEDCFPLLDGCRKNRQKWQALAEQQ

SEQ ID NO: 68 - protein, 326 aa, Artificial Sequence
  source: /note="Description of Artificial Sequence: Synthetic Destabilizing Domain (DD)"
EETRELQSLAAAVVPSAQTLKITDFSFSDFELSDLETALCTIRMFTDLNLVQNFQMKHEVLCRWILSVKKNYRKNVAYHNWRHAFNTAQCMFAALKAGKIQNKLTDLEILALLIAALSHDLDHRGVNNPYIQRSEHPLAQLYCHSIMEHHHFDQCLMILNSPGNQILSGLSIEEYKTTLKIIKQAILATDLALYIKRRGEFFELIRKNQFNLEDPHQKELFLAMLMTACDLSAITKPWPIQQRIAELVATEFFDQGDRERKELNIEPTDLMNREKKNKIPSMQVGFIDAICLQLYEALTHVSEDCFPLLDGCRKNRQKWQALAEQQ

SEQ ID NO: 69 - protein, 326 aa, Artificial Sequence
  source: /note="Description of Artificial Sequence: Synthetic Destabilizing Domain (DD)"
EETRELQSLAAAVVPSAQTLKITDFSFSDFELSDLETALCTIRMFTDLNLVQNFQMKHEVLCRWILSVKKNYRKNVAYHNWRHAFNTAQCMFAALKAGKIQNKLTDLEILALLIAALSHDLDHRGVNNSYIQRSEHPLAQPYCHSIMEHHHFDQCLMILNSPGNQILSGLSIEEYKTTLKIIKQAILATDLALYIKRRGEFFELIRKNQFNLEDPHQKELFLAMLMTACDLSAITKPWPIQQRIAELVATEFFDQGDRERKELNIEPTDLMNREKKNKIPSMQVGFIDAICLQLYEALTHVSEDCFPLLDGCRKNRQKWQALAEQQ

SEQ ID NO: 70 - protein, 326 aa, Artificial Sequence
  source: /note="Description of Artificial Sequence: Synthetic Destabilizing Domain (DD)"
EETRELQSLAAAVVPSAQTLKITDFSFSDFELSDLETALCTIRMFTDLNLVQNFQMKHEVLCRWILSVKKNYRKNVAYHNWRHAFNTAQCMFAALKAGKIQNKLTDLEILALLIAALSHDLDHRGVNNSYIQRSEHPLAQLYCHSIMEHHHFDQCLMILNSPGNQILSGLSIEEYKATLKIIKQAILATDLALYIKRRGEFFELIRKNQFNLEDPHQKELFLAMLMTACDLSAITKPWPIQQRIAELVATEFFDQGDRERKELNIEPTDLMNREKKNKIPSMQVGFIDAICLQLYEALTHVSEDCFPLLDGCRKNRQKWQALAEQQ

SEQ ID NO: 71 - protein, 326 aa, Artificial Sequence
  source: /note="Description of Artificial Sequence: Synthetic Destabilizing Domain (DD)"
EETRELQSLAAAVVPSAQTLKITDFSFSDFELSDLETALCTIRMFTDLNLVQNFQMKHEVLCRWILSVKKNYRKNVAYHNWRHAFNTAQCMFAALKAGKIQNKLTDLEILALLIAALSHDLDHRGVNNSYIQRSEHPLAQLYCHSIMEHHHFDQCLMILNSPGNQILSGLSIEEYKTTLKIIKQAILATDLALYIKRRGEFFELIRKNQLNLEDPHQKELFLAMLMTACDLSAITKPWPIQQRIAELVATEFFDQGDRERKELNIEPTDLMNREKKNKIPSMQVGFIDAICLQLYEALTHVSEDCFPLLDGCRKNRQKWQALAEQQ

SEQ ID NO: 72 - protein, 326 aa, Artificial Sequence
  source: /note="Description of Artificial Sequence: Synthetic Destabilizing Domain (DD)"
EETRELQSLAAAVVPSAQTLKITDFSFSDFELSDLETALCTIRMFTDLNLVQNFQMKHEVLCRWILSVKKNYRKNVAYHNWRHAFNTAQCMFAALKAGKIQNKLTDLEILALLIAALSHDLDHRGVNNSYIQRSEHPLAQLYCHSIMEHHHFDQCLMILNSPGNQILSGLSIEEYKTTLKIIKQAILATDLALYIKRRGEFFELIRKNQFNSEDPHQKELFLAMLMTACDLSAITKPWPIQQRIAELVATEFFDQGDRERKELNIEPTDLMNREKKNKIPSMQVGFIDAICLQLYEALTHVSEDCFPLLDGCRKNRQKWQALAEQQ

SEQ ID NO: 73 - protein, 326 aa, Artificial Sequence
  source: /note="Description of Artificial Sequence: Synthetic Destabilizing Domain (DD)"
EETRELQSLAAAVVPSAQTLKITDFSFSDFELSDLETALCTIRMFTDLNLVQNFQMKHEVLCRWILSVKKNYRKNVAYHNWRHAFNTAQCMFAALKAGKIQNKLTDLEILALLIAALSHDLDHRGVNNSYIQRSEHPLAQLYCHSIMEHHHFDQCLMILNSPGNQILSGLSIEEYKTTLKIIKQAILATDLALYIKRRGEFFELIRKNQFNLEDPHQKELLLAMLMTACDLSAITKPWPIQQRIAELVATEFFDQGDRERKELNIEPTDLMNREKKNKIPSMQVGFIDAICLQLYEALTHVSEDCFPLLDGCRKNRQKWQALAEQQ

SEQ ID NO: 74 - protein, 326 aa, Artificial Sequence
  source: /note="Description of Artificial Sequence: Synthetic Destabilizing Domain (DD)"
EETRELQSLAAAVVPSAQTLKITDFSFSDFELSDLETALCTIRMFTDLNLVQNFQMKHEVLCRWILSVKKNYRKNVAYHNWRHAFNTAQCMFAALKAGKIQNKLTDLEILALLIAALSHDLDHRGVNNSYIQRSEHPLAQLYCHSIMEHHHFDQCLMILNSPGNQILSGLSIEEYKTTLKIIKQAILATDLALYIKRRGEFFELIRKNQFNLEDPHQKELFLAMLMTACDLSAITKPWPIQQRIAELVATEFFDQGDRERKELNIEPTDPMNREKKNKIPSMQVGFIDAICLQLYEALTHVSEDCFPLLDGCRKNRQKWQALAEQQ

SEQ ID NO: 75 - protein, 326 aa, Artificial Sequence
  source: /note="Description of Artificial Sequence: Synthetic Destabilizing Domain (DD)"
EETRELQSLAAAVVPSAQTLKITDFSFSDFELSDLETALCTIRMFTDLNLVQNFQMKHEVLCRWILSVKKNYRKNVAYHNWRHAFNTAQCMFAALKAGKIQNKLTDLEILALLIAALSHDLDHRGVNNSYIQRSEHPLAQLYCHSIMEHHHFDQCLMILNSPGNQILSGLSIEEYKTTLKIIKQAILATDLALYIKRRGEFFELIRKNQFNLEDPHQKELFLAMLMTACDLSAITKPWPIQQRIAELVATEFFDQGDRERKELNIEPTDLMNREKKNKIPSTQVGFIDAICLQLYEALTHVSEDCFPLLDGCRKNRQKWQALAEQQ

SEQ ID NO: 76 - protein, 326 aa, Artificial Sequence
  source: /note="Description of Artificial Sequence: Synthetic Destabilizing Domain (DD)"
EETRELQSLAAAVVPSAQTLKITDFSFSDFELSDLETALCTIRMFTDLNLVQNFQMKHEVLCRWILSVKKNYRKNVAYHNWRHAFNTAQCMFAALKAGKIQNKLTDLEILALLIAALSHDLDHRGVNNSYIQRSEHPLAQLYCHSIMEHHHFDQCLMILNSPGNQILSGLSIEEYKTTLKIIKQAILATDLALYIKRRGEFFELIRKNQFNLEDPHQKELFLAMLMTACDLSAITKPWPIQQRIAELVATEFFDQGDRERKELNIEPTDLMNREKKNKIPSMQVGFIDAICLQLYEALTHVSEDCSPLLDGCRKNRQKWQALAEQQ

SEQ ID NO: 77 - protein, 9 aa, Artificial Sequence
  source: /note="Description of Artificial Sequence: Synthetic Linker"
GGSGGGSGG

SEQ ID NO: 78 - protein, 6 aa, Artificial Sequence
  source: /note="Description of Artificial Sequence: Synthetic Linker"
GGSGGG

SEQ ID NO: 79 - protein, 238 aa, Aequorea coerulescens
VSKGAELFTGIVPILIELNGDVNGHKFSVSGEGEGDATYGKLTLKFICTTGKLPVPWPTLVTTLSYGVQCFSRYPDHMKQHDFFKSAMPEGYIQERTIFFEDDGNYKSRAEVKFEGDTLVNRIELTGTDFKEDGNILGNKMEYNYNAHNVYIMTDKAKNGIKVNFKIRHNIEDGSVQLADHYQQNTPIGDGPVLLPDNHYLSTQSALSKDPNEKRDHMIYFGFVTAAAITHGMDELYK

SEQ ID NO: 80 - protein, 574 aa, Artificial Sequence
  source: /note="Description of Artificial Sequence: Synthetic polypeptide"
MEETRELQSLAAAVVPSAQTLKITDFSFSDFELSDLETALCTIRMFTDLNLVQNFQMKHEVLCRWILSVKKNYRKNVAYHNWRHAFNTAQCMFAALKAGKIQNKLTDLEILALLIAALSHDLDHRGVNNSYIQRSEHPLAQLYCHSIMEHHHFDQCLMILNSPGNQILSGLSIEEYKTTLKIIKQAILATDLALYIKRRGEFFELIRKNQFNLEDPHQKELFLAMLMTACDLSAITKPWPIQQRIAELVATEFFDQGDRERKELNIEPTDLMNREKKNKIPSMQVGFIDAICLQLYEALTHVSEDCFPLLDGCRKNRQKWQALAEQQGGSGGGSGGVSKGAELFTGIVPILIELNGDVNGHKFSVSGEGEGDATYGKLTLKFICTTGKLPVPWPTLVTTLSYGVQCFSRYPDHMKQHDFFKSAMPEGYIQERTIFFEDDGNYKSRAEVKFEGDTLVNRIELTGTDFKEDGNILGNKMEYNYNAHNVYIMTDKAKNGIKVNFKIRHNIEDGSVQLADHYQQNTPIGDGPVLLPDNHYLSTQSALSKDPNEKRDHMIYFGFVTAAAITHGMDELYK

SEQ ID NO: 81 - protein, 574 aa, Artificial Sequence
  source: /note="Description of Artificial Sequence: Synthetic polypeptide"
MEETRELQSLAAAVVPSAQTLKITDFSFSDFELSDLETALCTIRMFTDLNLVQNFQMKHEVLCRWILSVKKNYRKNVAYHNWRHAFNTAQCMFAALKAGKIQNKLTDLEILALLIAALSHDLDHRGVNNSYIQRSEHPLAQLYCHSIMEHHHFDQCLMILNSPGNQILSGLSIEEYKTTLKIIKQAILATDLALYIKRRGEFFELIRKNQFNLEDPHQKELFLAMLMTACDLSAITKPWPIQQRIAELVATEFFDQGDRERKELNIEPTDLMNREKKNKIPSMQVGFIDAICLQLYEALTHVSEDCFPLLDGCRKNRQKFQALAEQQGGSGGGSGGVSKGAELFTGIVPILIELNGDVNGHKFSVSGEGEGDATYGKLTLKFICTTGKLPVPWPTLVTTLSYGVQCFSRYPDHMKQHDFFKSAMPEGYIQERTIFFEDDGNYKSRAEVKFEGDTLVNRIELTGTDFKEDGNILGNKMEYNYNAHNVYIMTDKAKNGIKVNFKIRHNIEDGSVQLADHYQQNTPIGDGPVLLPDNHYLSTQSALSKDPNEKRDHMIYFGFVTAAAITHGMDELYK

SEQ ID NO: 82 - protein, 574 aa, Artificial Sequence
  source: /note="Description of Artificial Sequence: Synthetic polypeptide"
MEETRELQSLAAAVVPSAQTLKITDFSFSDFELSDLETALCTIRMFTDLNLVQNFQMKHEVLCRWILSVKKNYRKNVAYHNWRHAFNTAQCMFAALKAGKIQNKLTDLEILALLIAALSHDLDHRGVNNSYIQRSEHPLAQLYCHSIMEHHHFDQCLMILNSPGNQILSGLSIEEYKTTLKIIKQAILATDLALYIKRRGEFFELIRKNQFNLEDPHQKELFLAMLMTACDLSAITKPWPIQQRIAELVATEFFDQGDRERKELNIEPTDLMNREKKNKIPSMQVGFADAICLQLYEALTHVSEDCFPLLDGCRKNRQKWQALAEQQGGSGGGSGGVSKGAELFTGIVPILIELNGDVNGHKFSVSGEGEGDATYGKLTLKFICTTGKLPVPWPTLVTTLSYGVQCFSRYPDHMKQHDFFKSAMPEGYIQERTIFFEDDGNYKSRAEVKFEGDTLVNRIELTGTDFKEDGNILGNKMEYNYNAHNVYIMTDKAKNGIKVNFKIRHNIEDGSVQLADHYQQNTPIGDGPVLLPDNHYLSTQSALSKDPNEKRDHMIYFGFVTAAAITHGMDELYK

SEQ ID NO: 83 - protein, 574 aa, Artificial Sequence
  source: /note="Description of Artificial Sequence: Synthetic polypeptide"
MEETRELQSLAAAVVPSAQTLKITDFSFSDFELSDLETALCTIRMFTDLNLVQNFQMKHEVLCRWILSVKKNYRKNVAYHNWRHAFNTAQCMFAALKAGKIQNKLTDLEILALLIAALSHDLDHRGVNNSYIQRSEHPLAQLYCHSIMEHHHFDQCLMILNSPGNQILSGLSIEEYKTTLKIIKQAILATDLALYIKRRGEFFELIRKNQFNLEDPHQKELFLAMLMTACDLSAITKPWPIQQRIAELVATEFFDQGDRERKELNIEPTDLMNREKKNKIPSMQVGFIDAICLQLAEALTHVSEDCFPLLDGCRKNRQKWQALAEQQGGSGGGSGGVSKGAELFTGIVPILIELNGDVNGHKFSVSGEGEGDATYGKLTLKFICTTGKLPVPWPTLVTTLSYGVQCFSRYPDHMKQHDFFKSAMPEGYIQERTIFFEDDGNYKSRAEVKFEGDTLVNRIELTGTDFKEDGNILGNKMEYNYNAHNVYIMTDKAKNGIKVNFKIRHNIEDGSVQLADHYQQNTPIGDGPVLLPDNHYLSTQSALSKDPNEKRDHMIYFGFVTAAAITHGMDELYK

SEQ ID NO: 84 - protein, 574 aa, Artificial Sequence
  source: /note="Description of Artificial Sequence: Synthetic polypeptide"
MEETRELQSLAAAVVPSAQTLKITDFSFSDFELSDLETALCTIRMFTDLNLVQNFQMKHEVLCRWILSVKKNYRKNVAYHNWRHAFNTAQCMFAALKAGKIQNKLTDLEILALLIAALSHDLDHRGVNNSYIQRSEHPLAQLYCHSIMEHHHFDQCLMILNSPGNQILSGLSIEEYKTTLKIIKQAILATDLALYIKRRGEFFELIRKNQFNLEDPHQKELFLAMLMTACDLSAITKPWPIQQRIAELVATEFADQGDRERKELNIEPTDLMNREKKNKIPSMQVGFIDAICLQLYEALTHVSEDCFPLLDGCRKNRQKWQALAEQQGGSGGGSGGVSKGAELFTGIVPILIELNGDVNGHKFSVSGEGEGDATYGKLTLKFICTTGKLPVPWPTLVTTLSYGVQCFSRYPDHMKQHDFFKSAMPEGYIQERTIFFEDDGNYKSRAEVKFEGDTLVNRIELTGTDFKEDGNILGNKMEYNYNAHNVYIMTDKAKNGIKVNFKIRHNIEDGSVQLADHYQQNTPIGDGPVLLPDNHYLSTQSALSKDPNEKRDHMIYFGFVTAAAITHGMDELYK

SEQ ID NO: 85 - protein, 574 aa, Artificial Sequence
  source: /note="Description of Artificial Sequence: Synthetic polypeptide"
MEETRELQSLAAAVVPSAQTLKITDFSFSDFELSDLETALCTIRMFTDLNLVQNFQMKHEVLCRWILSVKKNYRKNVAYHNWRHAFNTAQCMFAALKAGKIQNKLTDLEILALLIAALSHDLDHRGVNNSYIQRSEHPLAQLYCHSIMEHHHFDQCLMILNSPGNQILSGLSIEEYKTTLKIIKQAILATDLALYIKRRGEFAELIRKNQFNLEDPHQKELFLAMLMTACDLSAITKPWPIQQRIAELVATEFFDQGDRERKELNIEPTDLMNREKKNKIPSMQVGFIDAICLQLYEALTHVSEDCFPLLDGCRKNRQKWQALAEQQGGSGGGSGGVSKGAELFTGIVPILIELNGDVNGHKFSVSGEGEGDATYGKLTLKFICTTGKLPVPWPTLVTTLSYGVQCFSRYPDHMKQHDFFKSAMPEGYIQERTIFFEDDGNYKSRAEVKFEGDTLVNRIELTGTDFKEDGNILGNKMEYNYNAHNVYIMTDKAKNGIKVNFKIRHNIEDGSVQLADHYQQNTPIGDGPVLLPDNHYLSTQSALSKDPNEKRDHMIYFGFVTAAAITHGMDELYK

SEQ ID NO: 86 - protein, 574 aa, Artificial Sequence
  source: /note="Description of Artificial Sequence: Synthetic polypeptide"
MEETRELQSLAAAVVPSAQTLKITDFSFSDFELSDLETALCTIRMFTDLNLVQNFQMKHEVLCRWILSVKKNYRKNVAYHNWRHAFNTAQCMFAALKAGKIQNKLTDLEILALLIAALSHDLLHRGVNNSYIQRSEHPLAQLYCHSIMEHHHFDQCLMILNSPGNQILSGLSIEEYKTTLKIIKQAILATDLALYIKRRGEFFELIRKNQFNLEDPHQKELFLAMLMTACDLSAITKPWPIQQRIAELVATEFFDQGDRERKELNIEPTDLMNREKKNKIPSMQVGFIDAICLQLYEALTHVSEDCFPLLDGCRKNRQKWQALAEQQGGSGGGSGGVSKGAELFTGIVPILIELNGDVNGHKFSVSGEGEGDATYGKLTLKFICTTGKLPVPWPTLVTTLSYGVQCFSRYPDHMKQHDFFKSAMPEGYIQERTIFFEDDGNYKSRAEVKFEGDTLVNRIELTGTDFKEDGNILGNKMEYNYNAHNVYIMTDKAKNGIKVNFKIRHNIEDGSVQLADHYQQNTPIGDGPVLLPDNHYLSTQSALSKDPNEKRDHMIYFGFVTAAAITHGMDELYK

SEQ ID NO: 87 - protein, 574 aa, Artificial Sequence
  source: /note="Description of Artificial Sequence: Synthetic polypeptide"
MEETRELQSLAAAVVPSAQTLKITDFSFSDFELSDLETALCTIRMFTDLNLVQNFQMKHEVLCRWILSVKKNYRKNVAYHNWRHAFNTAQCMFAALKAGKIQNKLTDLEILALLIAALSHDLDHRGVNNSYIQRSEHPLAQLYCHSIMEHHHFDQCLMILNSPGNQILSGLSIEEYKTTLKIIKQAILATDLALLIKRRGEFFELIRKNQFNLEDPHQKELFLAMLMTACDLSAITKPWPIQQRIAELVATEFFDQGDRERKELNIEPTDLMNREKKNKIPSMQVGFIDAICLQLYEALTHVSEDCFPLLDGCRKNRQKWQALAEQQGGSGGGSGGVSKGAELFTGIVPILIELNGDVNGHKFSVSGEGEGDATYGKLTLKFICTTGKLPVPWPTLVTTLSYGVQCFSRYPDHMKQHDFFKSAMPEGYIQERTIFFEDDGNYKSRAEVKFEGDTLVNRIELTGTDFKEDGNILGNKMEYNYNAHNVYIMTDKAKNGIKVNFKIRHNIEDGSVQLADHYQQNTPIGDGPVLLPDNHYLSTQSALSKDPNEKRDHMIYFGFVTAAAITHGMDELYK

SEQ ID NO: 88 - protein, 574 aa, Artificial Sequence
  source: /note="Description of Artificial Sequence: Synthetic polypeptide"
MEETRELQSLAAAVVPSAQTLKITDFSFSDFELSDLETALCTIRMFTDLNLVQNFQMKHEVLCRWILSVKKNYRKNVAYHNWRHAFNTAQCMFAALKAGKIQNKLTDLEILALLIAALSHDLDHRGVNNSYIQRSEHPLAQLYCHSIMEHHHFDQCLMILNSPGNQILSGLSIEEYKTTLKIIKQAILATDLALYIKRLGEFFELIRKNQFNLEDPHQKELFLAMLMTACDLSAITKPWPIQQRIAELVATEFFDQGDRERKELNIEPTDLMNREKKNKIPSMQVGFIDAICLQLYEALTHVSEDCFPLLDGCRKNRQKWQALAEQQGGSGGGSGGVSKGAELFTGIVPILIELNGDVNGHKFSVSGEGEGDATYGKLTLKFICTTGKLPVPWPTLVTTLSYGVQCFSRYPDHMKQHDFFKSAMPEGYIQERTIFFEDDGNYKSRAEVKFEGDTLVNRIELTGTDFKEDGNILGNKMEYNYNAHNVYIMTDKAKNGIKVNFKIRHNIEDGSVQLADHYQQNTPIGDGPVLLPDNHYLSTQSALSKDPNEKRDHMIYFGFVTAAAITHGMDELYK

SEQ ID NO: 89 - protein, 574 aa, Artificial Sequence
  source: /note="Description of Artificial Sequence: Synthetic polypeptide"
MEETRELQSLAAAVVPSAQTLKITDFSFSDFELSDLETALCTIRMFTDLNLVQNFQMKHEVLCRWILSVKKNYRKNVAYHNWRHAFNTAQCIFAALKAGKIQNKLTDLEILALLIAALSHDLDHRGVNNSYIQRSEHPLAQLYCHSIMEHHHFDQCLMILNSPGNQILSGLSIEEYKTTLKIIKQAILATDLALYIKRRGEFFELIRKNQFNLEDPHQKELFLAMLMTACDLSAITKPWPIQQRIAELVATEFFDQGDRERKELNIEPTDLMNREKKNKIPSMQVGFIDAICLQLYEALTHVSEDCFPLLDGCRKNRQKWQALAEQQGGSGGGSGGVSKGAELFTGIVPILIELNGDVNGHKFSVSGEGEGDATYGKLTLKFICTTGKLPVPWPTLVTTLSYGVQCFSRYPDHMKQHDFFKSAMPEGYIQERTIFFEDDGNYKSRAEVKFEGDTLVNRIELTGTDFKEDGNILGNKMEYNYNAHNVYIMTDKAKNGIKVNFKIRHNIEDGSVQLADHYQQNTPIGDGPVLLPDNHYLSTQSALSKDPNEKRDHMIYFGFVTAAAITHGMDELYK

SEQ ID NO: 90 - protein, 571 aa, Artificial Sequence
  source: /note="Description of Artificial Sequence: Synthetic polypeptide"
MEETRELQSLAAAVVPSAQTLKITDFSFSDFELSDLETALCTIRMFTDLNLVQNFQMKHEVLCRWILSVKKNYRKNVAYHNWRHAFNTAQCMFAALKAGKIQNKLTDLEILALLIAALSHDLDHRGVNNSYIQRSEHPLAQLYCHSIMEHHHFDQCLMILNSPGNQILSGLSIEEYKTTLKIIKQAILATDLALYIKRRGEFFELIRKNQFNLEDPHQKELFLAMLMTACDLSAITKPWPIQQRIAELVATEFFDQGDRERKELNIEPTDLMNREKKNKIPSMQVGFIDAICLQLYEALTHVSEDCFPLLDGCRKNRQKWQALAEQQGGSGGGVSKGAELFTGIVPILIELNGDVNGHKFSVSGEGEGDATYGKLTLKFICTTGKLPVPWPTLVTTLSYGVQCFSRYPDHMKQHDFFKSAMPEGYIQERTIFFEDDGNYKSRAEVKFEGDTLVNRIELTGTDFKEDGNILGNKMEYNYNAHNVYIMTDKAKNGIKVNFKIRHNIEDGSVQLADHYQQNTPIGDGPVLLPDNHYLSTQSALSKDPNEKRDHMIYFGFVTAAAITHGMDELYK

SEQ ID NO: 91 - protein, 567 aa, Artificial Sequence
  source: /note="Description of Artificial Sequence: Synthetic polypeptide"
MVSKGAELFTGIVPILIELNGDVNGHKFSVSGEGEGDATYGKLTLKFICTTGKLPVPWPTLVTTLSYGVQCFSRYPDHMKQHDFFKSAMPEGYIQERTIFFEDDGNYKSRAEVKFEGDTLVNRIELTGTDFKEDGNILGNKMEYNYNAHNVYIMTDKAKNGIKVNFKIRHNIEDGSVQLADHYQQNTPIGDGPVLLPDNHYLSTQSALSKDPNEKRDHMIYFGFVTAAAITHGMDELYKSGEETRELQSLAAAVVPSAQTLKITDFSFSDFELSDLETALCTIRMFTDLNLVQNFQMKHEVLCRWILSVKKNYRKNVAYHNWRHAFNTAQCMFAALKAGKIQNKLTDLEILALLIAALSHDLDHRGVNNSYIQRSEHPLAQLYCHSIMEHHHFDQCLMILNSPGNQILSGLSIEEYKTTLKIIKQAILATDLALYIKRRGEFFELIRKNQFNLEDPHQKELFLAMLMTACDLSAITKPWPIQQRIAELVATEFFDQGDRERKELNIEPTDLMNREKKNKIPSMQVGFIDAICLQLYEALTHVSEDCFPLLDGCRKNRQKWQALAEQQ

SEQ ID NO: 92 - DNA, 27 bp, Artificial Sequence
  source: /note="Description of Artificial Sequence: Synthetic Linker"
ggaggtagtggtggaggcagtggtgga

SEQ ID NO: 93 - DNA, 18 bp, Artificial Sequence
  source: /note="Description of Artificial Sequence: Synthetic Linker"
ggtggctctggtggtggt

SEQ ID NO: 94 - DNA, 717 bp, Artificial Sequence
  source: /note="Description of Artificial Sequence: Synthetic polynucleotide"
atggtttctaaaggtgcggagctgttcaccggtatcgttccgatcctgatcgaactgaacggtgacgtaaacggtcacaaattctctgtttctggtgaaggcgagggtgacgcgacgtacggtaagctgacgctgaagttcatctgcactaccggcaaactgccggttccgtggccgaccctggttaccaccctctcttacggtgttcagtgcttctctcgttacccggaccatatgaaacagcacgacttcttcaaatctgctatgccggaaggttacatccaggaacgtaccatctttttcgaagacgatggtaactataagtctcgtgcagaggttaaattcgagggcgataccctcgtgaaccgcatcgagctgaccggcactgacttcaaggaagacggtaacatcctgggtaacaaaatggaatacaactacaacgctcacaacgtttacatcatgaccgacaaagccaaaaacggtatcaaggttaacttcaaaatccgtcacaacatcgaggatggttctgttcagctggcggaccactaccagcaaaacacccctatcggcgacggtccggtgctgctgccggacaatcactatctgtccacccagtccgcgctgtctaaagaccctaacgaaaaacgtgaccacatgatctacttcggtttcgtgaccgcagcggcaattacccacggtatggacgaactctacaaa

SEQ ID NO: 95 - DNA, 1725 bp, Artificial Sequence
  source: /note="Description of Artificial Sequence: Synthetic polynucleotide"
atggaagaaacaagagagctacagtcgttagcggctgctgtggtgccatctgcccagacccttaaaattactgactttagcttcagtgactttgagctgtctgatctggaaacagcactgtgtacaattcggatgtttactgacctcaaccttgtgcagaacttccagatgaaacatgaggttctttgcagatggattttaagtgttaagaagaattatcggaagaatgttgcctatcataattggagacatgcctttaatacagctcagtgcatgtttgctgctctaaaagcaggcaaaattcagaacaagctgactgacctggagatacttgcattgctgattgctgcactaagccacgatttggatcaccgtggtgtgaataactcttacatacagcgaagtgaacatccacttgcccagctttactgccattcaatcatggaacaccatcattttgaccagtgcctgatgattcttaatagtccaggcaatcagattctcagtggcctctccattgaagaatataagaccacgttgaaaataatcaagcaagctattttagctacagacctagcactgtacattaagaggcgaggagaattttttgaacttataagaaaaaatcaattcaatttggaagatcctcatcaaaaggagttgtttttggcaatgctgatgacagcttgtgatctttctgcaattacaaaaccctggcctattcaacaacggatagcagaacttgtagcaactgaattttttgatcaaggagacagagagagaaaagaactcaacatagaacccactgatctaatgaacagggagaagaaaaacaaaatcccaagtatgcaagttgggttcatagatgccatctgcttgcaactgtatgaggccctgacccacgtgtcagaggactgtttccctttgctagatggctgcagaaagaacaggcagaaatggcaggcccttgcagaacagcagggaggtagtggtggaggcagtggtggagtgagcaagggcgccgagctgttcaccggcatcgtgcccatcctgatcgagctgaatggcgatgtgaatggccacaagttcagcgtgagcggcgagggcgagggcgatgccacctacggcaagctgaccctgaagttcatctgcaccaccggcaagctgcctgtgccctggcccaccctggtgaccaccctgagctacggcgtgcagtgcttctcacgctaccccgatcacatgaagcagcacgacttcttcaagagcgccatgcctgagggctacatccaggagcgcaccatcttcttcgaggatgacggcaactacaagtcgcgcgccgaggtgaagttcgagggcgataccctggtgaatcgcatcgagctgaccggcaccgatttcaaggaggatggcaacatcctgggcaataagatggagtacaactacaacgcccacaatgtgtacatcatgaccgacaaggccaagaatggcatcaaggtgaacttcaagatccgccacaacatcgaggatggcagcgtgcagctggccgaccactaccagcagaatacccccatcggcgatggccctgtgctgctgcccgataaccactacctgtccacccagagcgccctgtccaaggaccccaacgagaagcgcgatcacatgatctacttcggcttcgtgaccgccgccgccatcacccacggcatggatgagctgtacaagtga

SEQ ID NO: 96 - DNA, 1725 bp, Artificial Sequence
  source: /note="Description of Artificial Sequence: Synthetic polynucleotide"
atggaagaaacaagagagctacagtcgttagcggctgctgtggtgccatctgcccagacccttaaaattactgactttagcttcagtgactttgagctgtctgatctggaaacagcactgtgtacaattcggatgtttactgacctcaaccttgtgcagaacttccagatgaaacatgaggttctttgcagatggattttaagtgttaagaagaattatcggaagaatgttgcctatcataattggagacatgcctttaatacagctcagtgcatgtttgctgctctaaaagcaggcaaaattcagaacaagctgactgacctggagatacttgcattgctgattgctgcactaagccacgatttggatcaccgtggtgtgaataactcttacatacagcgaagtgaacatccacttgcccagctttactgccattcaatcatggaacaccatcattttgaccagtgcctgatgattcttaatagtccaggcaatcagattctcagtggcctctccattgaagaatataagaccacgttgaaaataatcaagcaagctattttagctacagacctagcactgtacattaagaggcgaggagaattttttgaacttataagaaaaaatcaattcaatttggaagatcctcatcaaaaggagttgtttttggcaatgctgatgacagcttgtgatctttctgcaattacaaaaccctggcctattcaacaacggatagcagaacttgtagcaactgaattttttgatcaaggagacagagagagaaaagaactcaacatagaacccactgatctaatgaacagggagaagaaaaacaaaatcccaagtatgcaagttgggttcatagatgccatctgcttgcaactgtatgaggccctgacccacgtgtcagaggactgtttccctttgctagatggctgcagaaagaacaggcagaaattccaggcccttgcagaacagcagggaggtagtggtggaggcagtggtggagtgagcaagggcgccgagctgttcaccggcatcgtgcccatcctgatcgagctgaatggcgatgtgaatggccacaagttcagcgtgagcggcgagggcgagggcgatgccacctacggcaagctgaccctgaagttcatctgcaccaccggcaagctgcctgtgccctggcccaccctggtgaccaccctgagctacggcgtgcagtgcttctcacgctaccccgatcacatgaagcagcacgacttcttcaagagcgccatgcctgagggctacatccaggagcgcaccatcttcttcgaggatgacggcaactacaagtcgcgcgccgaggtgaagttcgagggcgataccctggtgaatcgcatcgagctgaccggcaccgatttcaaggaggatggcaacatcctgggcaataagatggagtacaactacaacgcccacaatgtgtacatcatgaccgacaaggccaagaatggcatcaaggtgaacttcaagatccgccacaacatcgaggatggcagcgtgcagctggccgaccactaccagcagaatacccccatcggcgatggccctgtgctgctgcccgataaccactacctgtccacccagagcgccctgtccaaggaccccaacgagaagcgcgatcacatgatctacttcggcttcgtgaccgccgccgccatcacccacggcatggatgagctgtacaagtga

SEQ ID NO: 97 - DNA, 1725 bp, Artificial Sequence
  source: /note="Description of Artificial Sequence: Synthetic polynucleotide"
atggaagaaacaagagagctacagtcgttagcggctgctgtggtgccatctgcccagacccttaaaattactgactttagcttcagtgactttgagctgtctgatctggaaacagcactgtgtacaattcggatgtttactgacctcaaccttgtgcagaacttccagatgaaacatgaggttctttgcagatggattttaagtgttaagaagaattatcggaagaatgttgcctatcataattggagacatgcctttaatacagctcagtgcatgtttgctgctctaaaagcaggcaaaattcagaacaagctgactgacctggagatacttgcattgctgattgctgcactaagccacgatttggatcaccgtggtgtgaataactcttacatacagcgaagtgaacatccacttgcccagctttactgccattcaatcatggaacaccatcattttgaccagtgcctgatgattcttaatagtccaggcaatcagattctcagtggcctctccattgaagaatataagaccacgttgaaaataatcaagcaagctattttagctacagacctagcactgtacattaagaggcgaggagaattttttgaacttataagaaaaaatcaattcaatttggaagatcctcatcaaaaggagttgtttttggcaatgctgatgacagcttgtgatctttctgcaattacaaaaccctggcctattcaacaacggatagcagaacttgtagcaactgaattttttgatcaaggagacagagagagaaaagaactcaacatagaacccactgatctaatgaacagggagaagaaaaacaaaatcccaagtatgcaagttgggttcgccgatgccatctgcttgcaactgtatgaggccctgacccacgtgtcagaggactgtttccctttgctagatggctgcagaaagaacaggcagaaatggcaggcccttgcagaacagcagggaggtagtggtggaggcagtggtggagtgagcaagggcgccgagctgttcaccggcatcgtgcccatcctgatcgagctgaatggcgatgtgaatggccacaagttcagcgtgagcggcgagggcgagggcgatgccacctacggcaagctgaccctgaagttcatctgcaccaccggcaagctgcctgtgccctggcccaccctggtgaccaccctgagctacggcgtgcagtgcttctcacgctaccccgatcacatgaagcagcacgacttcttcaagagcgccatgcctgagggctacatccaggagcgcaccatcttcttcgaggatgacggcaactacaagtcgcgcgccgaggtgaagttcgagggcgataccctggtgaatcgcatcgagctgaccggcaccgatttcaaggaggatggcaacatcctgggcaataagatggagtacaactacaacgcccacaatgtgtacatcatgaccgacaaggccaagaatggcatcaaggtgaacttcaagatccgccacaacatcgaggatggcagcgtgcagctggccgaccactaccagcagaatacccccatcggcgatggccctgtgctgctgcccgataaccactacctgtccacccagagcgccctgtccaaggaccccaacgagaagcgcgatcacatgatctacttcggcttcgtgaccgccgccgccatcacccacggcatggatgagctgtacaagtga

SEQ ID NO: 98 - DNA, 1725 bp, Artificial Sequence
  source: /note="Description of Artificial Sequence: Synthetic polynucleotide"
atggaagaaacaagagagctacagtcgttagcggctgctgtggtgccatctgcccagacccttaaaattactgactttagcttcagtgactttgagctgtctgatctggaaacagcactgtgtacaattcggatgtttactgacctcaaccttgtgcagaacttccagatgaaacatgaggttctttgcagatggattttaagtgttaagaagaattatcggaagaatgttgcctatcataattggagacatgcctttaatacagctcagtgcatgtttgctgctctaaaagcaggcaaaattcagaacaagctgactgacctggagatacttgcattgctgattgctgcactaagccacgatttggatcaccgtggtgtgaataactcttacatacagcgaagtgaacatccacttgcccagctttactgccattcaatcatggaacaccatcattttgaccagtgcctgatgattcttaatagtccaggcaatcagattctcagtggcctctccattgaagaatataagaccacgttgaaaataatcaagcaagctattttagctacagacctagcactgtacattaagaggcgaggagaattttttgaacttataagaaaaaatcaattcaatttggaagatcctcatcaaaaggagttgtttttggcaatgctgatgacagcttgtgatctttctgcaattacaaaaccctggcctattcaacaacggatagcagaacttgtagcaactgaattttttgatcaaggagacagagagagaaaagaactcaacatagaacccactgatctaatgaacagggagaagaaaaacaaaatcccaagtatgcaagttgggttcatagatgccatctgcttgcaactggccgaggccctgacccacgtgtcagaggactgtttccctttgctagatggctgcagaaagaacaggcagaaatggcaggcccttgcagaacagcagggaggtagtggtggaggcagtggtggagtgagcaagggcgccgagctgttcaccggcatcgtgcccatcctgatcgagctgaatggcgatgtgaatggccacaagttcagcgtgagcggcgagggcgagggcgatgccacctacggcaagctgaccctgaagttcatctgcaccaccggcaagctgcctgtgccctggcccaccctggtgaccaccctgagctacggcgtgcagtgcttctcacgctaccccgatcacatgaagcagcacgacttcttcaagagcgccatgcctgagggctacatccaggagcgcaccatcttcttcgaggatgacggcaactacaagtcgcgcgccgaggtgaagttcgagggcgataccctggtgaatcgcatcgagctgaccggcaccgatttcaaggaggatggcaacatcctgggcaataagatggagtacaactacaacgcccacaatgtgtacatcatgaccgacaaggccaagaatggcatcaaggtgaacttcaagatccgccacaacatcgaggatggcagcgtgcagctggccgaccactaccagcagaatacccccatcggcgatggccctgtgctgctgcccgataaccactacctgtccacccagagcgccctgtccaaggaccccaacgagaagcgcgatcacatgatctacttcggcttcgtgaccgccgccgccatcacccacggcatggatgagctgtacaagtga

SEQ ID NO: 99 - DNA, 1725 bp, Artificial Sequence
  source: /note="Description of Artificial Sequence: Synthetic polynucleotide"
atggaagaaacaagagagctacagtcgttagcggctgctgtggtgccatctgcccagacccttaaaattactgactttagcttcagtgactttgagctgtctgatctggaaacagcactgtgtacaattcggatgtttactgacctcaaccttgtgcagaacttccagatgaaacatgaggttctttgcagatggattttaagtgttaagaagaattatcggaagaatgttgcctatcataattggagacatgcctttaatacagctcagtgcatgtttgctgctctaaaagcaggcaaaattcagaacaagctgactgacctggagatacttgcattgctgattgctgcactaagccacgatttggatcaccgtggtgtgaataactcttacatacagcgaagtgaacatccacttgcccagctttactgccattcaatcatggaacaccatcattttgaccagtgcctgatgattcttaatagtccaggcaatcagattctcagtggcctctccattgaagaatataagaccacgttgaaaataatcaagcaagctattttagctacagacctagcactgtacattaagaggcgaggagaattttttgaacttataagaaaaaatcaattcaatttggaagatcctcatcaaaaggagttgtttttggcaatgctgatgacagcttgtgatctttctgcaattacaaaaccctggcctattcaacaacggatagcagaacttgtagcaactgaatttgccgatcaaggagacagagagagaaaagaactcaacatagaacccactgatctaatgaacagggagaagaaaaacaaaatcccaagtatgcaagttgggttcatagatgccatctgcttgcaactgtatgaggccctgacccacgtgtcagaggactgtttccctttgctagatggctgcagaaagaacaggcagaaatggcaggcccttgcagaacagcagggaggtagtggtggaggcagtggtggagtgagcaagggcgccgagctgttcaccggcatcgtgcccatcctgatcgagctgaatggcgatgtgaatggccacaagttcagcgtgagcggcgagggcgagggcgatgccacctacggcaagctgaccctgaagttcatctgcaccaccggcaagctgcctgtgccctggcccaccctggtgaccaccctgagctacggcgtgcagtgcttctcacgctaccccgatcacatgaagcagcacgacttcttcaagagcgccatgcctgagggctacatccaggagcgcaccatcttcttcgaggatgacggcaactacaagtcgcgcgccgaggtgaagttcgagggcgataccctggtgaatcgcatcgagctgaccggcaccgatttcaaggaggatggcaacatcctgggcaataagatggagtacaactacaacgcccacaatgtgtacatcatgaccgacaaggccaagaatggcatcaaggtgaacttcaagatccgccacaacatcgaggatggcagcgtgcagctggccgaccactaccagcagaatacccccatcggcgatggccctgtgctgctgcccgataaccactacctgtccacccagagcgccctgtccaaggaccccaacgagaagcgcgatcacatgatctacttcggcttcgtgaccgccgccgccatcacccacggcatggatgagctgtacaagtga

SEQ ID NO: 100 - DNA, 1725 bp, Artificial Sequence
  source: /note="Description of Artificial Sequence: Synthetic polynucleotide"
atggaagaaacaagagagctacagtcgttagcggctgctgtggtgccatctgcccagacccttaaaattactgactttagcttcagtgactttgagctgtctgatctggaaacagcactgtgtacaattcggatgtttactgacctcaaccttgtgcagaacttccagatgaaacatgaggttctttgcagatggattttaagtgttaagaagaattatcggaagaatgttgcctatcataattggagacatgcctttaatacagctcagtgcatgtttgctgctctaaaagcaggcaaaattcagaacaagctgactgacctggagatacttgcattgctgattgctgcactaagccacgatttggatcaccgtggtgtgaataactcttacatacagcgaagtgaacatccacttgcccagctttactgccattcaatcatggaacaccatcattttgaccagtgcctgatgattcttaatagtccaggcaatcagattctcagtggcctctccattgaagaatataagaccacgttgaaaataatcaagcaagctattttagctacagacctagcactgtacattaagaggcgaggagaatttgccgaacttataagaaaaaatcaattcaatttggaagatcctcatcaaaaggagttgtttttggcaatgctgatgacagcttgtgatctttctgcaattacaaaaccctggcctattcaacaacggatagcagaacttgtagcaactgaattttttgatcaaggagacagagagagaaaagaactcaacatagaacccactgatctaatgaacagggagaagaaaaacaaaatcccaagtatgcaagttgggttcatagatgccatctgcttgcaactgtatgaggccctgacccacgtgtcagaggactgtttccctttgctagatggctgcagaaagaacaggcagaaatggcaggcccttgcagaacagcagggaggtagtggtggaggcagtggtggagtgagcaagggcgccgagctgttcaccggcatcgtgcccatcctgatcgagctgaatggcgatgtgaatggccacaagttcagcgtgagcggcgagggcgagggcgatgccacctacggcaagctgaccctgaagttcatctgcaccaccggcaagctgcctgtgccctggcccaccctggtgaccaccctgagctacggcgtgcagtgcttctcacgctaccccgatcacatgaagcagcacgacttcttcaagagcgccatgcctgagggctacatccaggagcgcaccatcttcttcgaggatgacggcaactacaagtcgcgcgccgaggtgaagttcgagggcgataccctggtgaatcgcatcgagctgaccggcaccgatttcaaggaggatggcaacatcctgggcaataagatggagtacaactacaacgcccacaatgtgtacatcatgaccgacaaggccaagaatggcatcaaggtgaacttcaagatccgccacaacatcgaggatggcagcgtgcagctggccgaccactaccagcagaatacccccatcggcgatggccctgtgctgctgcccgataaccactacctgtccacccagagcgccctgtccaaggaccccaacgagaagcgcgatcacatgatctacttcggcttcgtgaccgccgccgccatcacccacggcatggatgagctgtacaagtga

SEQ ID NO: 101 - DNA, 1725 bp, Artificial Sequence
  source: /note="Description of Artificial Sequence: Synthetic polynucleotide"
atggaagaaacaagagagctacagtcgttagcggctgctgtggtgccatctgcccagacccttaaaattactgactttagcttcagtgactttgagctgtctgatctggaaacagcactgtgtacaattcggatgtttactgacctcaaccttgtgcagaacttccagatgaaacatgaggttctttgcagatggattttaagtgttaagaagaattatcggaagaatgttgcctatcataattggagacatgcctttaatacagctcagtgcatgtttgctgctctaaaagcaggcaaaattcagaacaagctgactgacctggagatacttgcattgctgattgctgcactaagccacgatttgctgcaccgtggtgtgaataactcttacatacagcgaagtgaacatccacttgcccagctttactgccattcaatcatggaacaccatcattttgaccagtgcctgatgattcttaatagtccaggcaatcagattctcagtggcctctccattgaagaatataagaccacgttgaaaataatcaagcaagctattttagctacagacctagcactgtacattaagaggcgaggagaattttttgaacttataagaaaaaatcaattcaatttggaagatcctcatcaaaaggagttgtttttggcaatgctgatgacagcttgtgatctttctgcaattacaaaaccctggcctattcaacaacggatagcagaacttgtagcaactgaattttttgatcaaggagacagagagagaaaagaactcaacatagaacccactgatctaatgaacagggagaagaaaaacaaaatcccaagtatgcaagttgggttcatagatgccatctgcttgcaactgtatgaggccctgacccacgtgtcagaggactgtttccctttgctagatggctgcagaaagaacaggcagaaatggcaggcccttgcagaacagcagggaggtagtggtggaggcagtggtggagtgagcaagggcgccgagctgttcaccggcatcgtgcccatcctgatcgagctgaatggcgatgtgaatggccacaagttcagcgtgagcggcgagggcgagggcgatgccacctacggcaagctgaccctgaagttcatctgcaccaccggcaagctgcctgtgccctggcccaccctggtgaccaccctgagctacggcgtgcagtgcttctcacgctaccccgatcacatgaagcagcacgacttcttcaagagcgccatgcctgagggctacatccaggagcgcaccatcttcttcgaggatgacggcaactacaagtcgcgcgccgaggtgaagttcgagggcgataccctggtgaatcgcatcgagctgaccggcaccgatttcaaggaggatggcaacatcctgggcaataagatggagtacaactacaacgcccacaatgtgtacatcatgaccgacaaggccaagaatggcatcaaggtgaacttcaagatccgccacaacatcgaggatggcagcgtgcagctggccgaccactaccagcagaatacccccatcggcgatggccctgtgctgctgcccgataaccactacctgtccacccagagcgccctgtccaaggaccccaacgagaagcgcgatcacatgatctacttcggcttcgtgaccgccgccgccatcacccacggcatggatgagctgtacaagtga

SEQ ID NO: 102 - DNA, 1725 bp, Artificial Sequence
  source: /note="Description of Artificial Sequence: Synthetic polynucleotide"
atggaagaaacaagagagctacagtcgttagcggctgctgtggtgccatctgcccagacccttaaaattactgactttagcttcagtgactttgagctgtctgatctggaaacagcactgtgtacaattcggatgtttactgacctcaaccttgtgcagaacttccagatgaaacatgaggttctttgcagatggattttaagtgttaagaagaattatcggaagaatgttgcctatcataattggagacatgcctttaatacagctcagtgcatgtttgctgctctaaaagcaggcaaaattcagaacaagctgactgacctggagatacttgcattgctgattgctgcactaagccacgatttggatcaccgtggtgtgaataactcttacatacagcgaagtgaacatccacttgcccagctttactgccattcaatcatggaacaccatcattttgaccagtgcctgatgattcttaatagtccaggcaatcagattctcagtggcctctccattgaagaatataagaccacgttgaaaataatcaagcaagctattttagctacagacctagcactgctgattaagaggcgaggagaattttttgaacttataagaaaaaatcaattcaatttggaagatcctcatcaaaaggagttgtttttggcaatgctgatgacagcttgtgatctttctgcaattacaaaaccctggcctattcaacaacggatagcagaacttgtagcaactgaattttttgatcaaggagacagagagagaaaagaactcaacatagaacccactgatctaatgaacagggagaagaaaaacaaaatcccaagtatgcaagttgggttcatagatgccatctgcttgcaactgtatgaggccctgacccacgtgtcagaggactgtttccctttgctagatggctgcagaaagaacaggcagaaatggcaggcccttgcagaacagcagggaggtagtggtggaggcagtggtggagtgagcaagggcgccgagctgttcaccggcatcgtgcccatcctgatcgagctgaatggcgatgtgaatggccacaagttcagcgtgagcggcgagggcgagggcgatgccacctacggcaagctgaccctgaagttcatctgcaccaccggcaagctgcctgtgccctggcccaccctggtgaccaccctgagctacggcgtgcagtgcttctcacgctaccccgatcacatgaagcagcacgacttcttcaagagcgccatgcctgagggctacatccaggagcgcaccatcttcttcgaggatgacggcaactacaagtcgcgcgccgaggtgaagttcgagggcgataccctggtgaatcgcatcgagctgaccggcaccgatttcaaggaggatggcaacatcctgggcaataagatggagtacaactacaacgcccacaatgtgtacatcatgaccgacaaggccaagaatggcatcaaggtgaacttcaagatccgccacaacatcgaggatggcagcgtgcagctggccgaccactaccagcagaatacccccatcggcgatggccctgtgctgctgcccgataaccactacctgtccacccagagcgccctgtccaaggaccccaacgagaagcgcgatcacatgatctacttcggcttcgtgaccgccgccgccatcacccacggcatggatgagctgtacaagtga

SEQ ID NO: 103 - DNA, 1725 bp, Artificial Sequence
  source: /note="Description of Artificial Sequence: Synthetic polynucleotide"
atggaagaaacaagagagctacagtcgttagcggctgctgtggtgccatctgcccagacccttaaaattactgactttagcttcagtgactttgagctgtctgatctggaaacagcactgtgtacaattcggatgtttactgacctcaaccttgtgcagaacttccagatgaaacatgaggttctttgcagatggattttaagtgttaagaagaattatcggaagaatgttgcctatcataattggagacatgcctttaatacagctcagtgcatgtttgctgctctaaaagcaggcaaaattcagaacaagctgactgacctggagatacttgcattgctgattgctgcactaagccacgatttggatcaccgtggtgtgaataactcttacatacagcgaagtgaacatccacttgcccagctttactgccattcaatcatggaacaccatcattttgaccagtgcctgatgattcttaatagtccaggcaatcagattctcagtggcctctccattgaagaatataagaccacgttgaaaataatcaagcaagctattttagctacagacctagcactgtacattaagaggctgggagaattttttgaacttataagaaaaaatcaattcaatttggaagatcctcatcaaaaggagttgtttttggcaatgctgatgacagcttgtgatctttctgcaattacaaaaccctggcctattcaacaacggatagcagaacttgtagcaactgaattttttgatcaaggagacagagagagaaaagaactcaacatagaacccactgatctaatgaacagggagaagaaaaacaaaatcccaagtatgcaagttgggttcatagatgccatctgcttgcaactgtatgaggccctgacccacgtgtcagaggactgtttccctttgctagatggctgcagaaagaacaggcagaaatggcaggcccttgcagaacagcagggaggtagtggtggaggcagtggtggagtgagcaagggcgccgagctgttcaccggcatcgtgcccatcctgatcgagctgaatggcgatgtgaatggccacaagttcagcgtgagcggcgagggcgagggcgatgccacctacggcaagctgaccctgaagttcatctgcaccaccggcaagctgcctgtgccctggcccaccctggtgaccaccctgagctacggcgtgcagtgcttctcacgctaccccgatcacatgaagcagcacgacttcttcaagagcgccatgcctgagggctacatccaggagcgcaccatcttcttcgaggatgacggcaactacaagtcgcgcgccgaggtgaagttcgagggcgataccctggtgaatcgcatcgagctgaccggcaccgatttcaaggaggatggcaacatcctgggcaataagatggagtacaactacaacgcccacaatgtgtacatcatgaccgacaaggccaagaatggcatcaaggtgaacttcaagatccgccacaacatcgaggatggcagcgtgcagctggccgaccactaccagcagaatacccccatcggcgatggccctgtgctgctgcccgataaccactacctgtccacccagagcgccctgtccaaggaccccaacgagaagcgcgatcacatgatctacttcggcttcgtgaccgccgccgccatcacccacggcatggatgagctgtacaagtga

SEQ ID NO: 104 - DNA, 1725 bp, Artificial Sequence
  source: /note="Description of Artificial Sequence: Synthetic polynucleotide"
atggaagaaacaagagagctacagtcgttagcggctgctgtggtgccatctgcccagacccttaaaattactgactttagcttcagtgactttgagctgtctgatctggaaacagcactgtgtacaattcggatgtttactgacctcaaccttgtgcagaacttccagatgaaacatgaggttctttgcagatggattttaagtgttaagaagaattatcggaagaatgttgcctatcataattggagacatgcctttaatacagctcagtgcatctttgctgctctaaaagcaggcaaaattcagaacaagctgactgacctggagatacttgcattgctgattgctgcactaagccacgatttggatcaccgtggtgtgaataactcttacatacagcgaagtgaacatccacttgcccagctttactgccattcaatcatggaacaccatcattttgaccagtgcctgatgattcttaatagtccaggcaatcagattctcagtggcctctccattgaagaatataagaccacgttgaaaataatcaagcaagctattttagctacagacctagcactgtacattaagaggcgaggagaattttttgaacttataagaaaaaatcaattcaatttggaagatcctcatcaaaaggagttgtttttggcaatgctgatgacagcttgtgatctttctgcaattacaaaaccctggcctattcaacaacggatagcagaacttgtagcaactgaattttttgatcaaggagacagagagagaaaagaactcaacatagaacccactgatctaatgaacagggagaagaaaaacaaaatcccaagtatgcaagttgggttcatagatgccatctgcttgcaactgtatgaggccctgacccacgtgtcagaggactgtttccctttgctagatggctgcagaaagaacaggcagaaatggcaggcccttgcagaacagcagggaggtagtggtggaggcagtggtggagtgagcaagggcgccgagctgttcaccggcatcgtgcccatcctgatcgagctgaatggcgatgtgaatggccacaagttcagcgtgagcggcgagggcgagggcgatgccacctacggcaagctgaccctgaagttcatctgcaccaccggcaagctgcctgtgccctggcccaccctggtgaccaccctgagctacggcgtgcagtgcttctcacgctaccccgatcacatgaagcagcacgacttcttcaagagcgccatgcctgagggctacatccaggagcgcaccatcttcttcgaggatgacggcaactacaagtcgcgcgccgaggtgaagttcgagggcgataccctggtgaatcgcatcgagctgaccggcaccgatttcaaggaggatggcaacatcctgggcaataagatggagtacaactacaacgcccacaatgtgtacatcatgaccgacaaggccaagaatggcatcaaggtgaacttcaagatccgccacaacatcgaggatggcagcgtgcagctggccgaccactaccagcagaatacccccatcggcgatggccctgtgctgctgcccgataaccactacctgtccacccagagcgccctgtccaaggaccccaacgagaagcgcgatcacatgatctacttcggcttcgtgaccgccgccgccatcacccacggcatggatgagctgtacaagtga

SEQ ID NO: 105 - DNA, 1716 bp, Artificial Sequence
  source: /note="Description of Artificial Sequence: Synthetic polynucleotide"
atggaagaaacaagagagctacagtcgttagcggctgctgtggtgccatctgcccagacccttaaaattactgactttagcttcagtgactttgagctgtctgatctggaaacagcactgtgtacaattcggatgtttactgacctcaaccttgtgcagaacttccagatgaaacatgaggttctttgcagatggattttaagtgttaagaagaattatcggaagaatgttgcctatcataattggagacatgcctttaatacagctcagtgcatgtttgctgctctaaaagcaggcaaaattcagaacaagctgactgacctggagatacttgcattgctgattgctgcactaagccacgatttggatcaccgtggtgtgaataactcttacatacagcgaagtgaacatccacttgcccagctttactgccattcaatcatggaacaccatcattttgaccagtgcctgatgattcttaatagtccaggcaatcagattctcagtggcctctccattgaagaatataagaccacgttgaaaataatcaagcaagctattttagctacagacctagcactgtacattaagaggcgaggagaattttttgaacttataagaaaaaatcaattcaatttggaagatcctcatcaaaaggagttgtttttggcaatgctgatgacagcttgtgatctttctgcaattacaaaaccctggcctattcaacaacggatagcagaacttgtagcaactgaattttttgatcaaggagacagagagagaaaagaactcaacatagaacccactgatctaatgaacagggagaagaaaaacaaaatcccaagtatgcaagttgggttcatagatgccatctgcttgcaactgtatgaggccctgacccacgtgtcagaggactgtttccctttgctagatggctgcagaaagaacaggcagaaatggcaggcccttgcagaacagcagggaggtagtggtggaggcgtgagcaagggcgccgagctgttcaccggcatcgtgcccatcctgatcgagctgaatggcgatgtgaatggccacaagttcagcgtgagcggcgagggcgagggcgatgccacctacggcaagctgaccctgaagttcatctgcaccaccggcaagctgcctgtgccctggcccaccctggtgaccaccctgagctacggcgtgcagtgcttctcacgctaccccgatcacatgaagcagcacgacttcttcaagagcgccatgcctgagggctacatccaggagcgcaccatcttcttcgaggatgacggcaactacaagtcgcgcgccgaggtgaagttcgagggcgataccctggtgaatcgcatcgagctgaccggcaccgatttcaaggaggatggcaacatcctgggcaataagatggagtacaactacaacgcccacaatgtgtacatcatgaccgacaaggccaagaatggcatcaaggtgaacttcaagatccgccacaacatcgaggatggcagcgtgcagctggccgaccactaccagcagaatacccccatcggcgatggccctgtgctgctgcccgataaccactacctgtccacccagagcgccctgtccaaggaccccaacgagaagcgcgatcacatgatctacttcggcttcgtgaccgccgccgccatcacccacggcatggatgagctgtacaagtga

SEQ ID NO: 106 - DNA, 1704 bp, Artificial Sequence
  source: /note="Description of Artificial Sequence: Synthetic polynucleotide"
atggtgagcaagggcgccgagctgttcaccggcatcgtgcccatcctgatcgagctgaatggcgatgtgaatggccacaagttcagcgtgagcggcgagggcgagggcgatgccacctacggcaagctgaccctgaagttcatctgcaccaccggcaagctgcctgtgccctggcccaccctggtgaccaccctgagctacggcgtgcagtgcttctcacgctaccccgatcacatgaagcagcacgacttcttcaagagcgccatgcctgagggctacatccaggagcgcaccatcttcttcgaggatgacggcaactacaagtcgcgcgccgaggtgaagttcgagggcgataccctggtgaatcgcatcgagctgaccggcaccgatttcaaggaggatggcaacatcctgggcaataagatggagtacaactacaacgcccacaatgtgtacatcatgaccgacaaggccaagaatggcatcaaggtgaacttcaagatccgccacaacatcgaggatggcagcgtgcagctggccgaccactaccagcagaatacccccatcggcgatggccctgtgctgctgcccgataaccactacctgtccacccagagcgccctgtccaaggaccccaacgagaagcgcgatcacatgatctacttcggcttcgtgaccgccgccgccatcacccacggcatggatgagctgtacaagagtggtgaagaaacaagagagctacagtcgttagcggctgctgtggtgccatctgcccagacccttaaaattactgactttagcttcagtgactttgagctgtctgatctggaaacagcactgtgtacaattcggatgtttactgacctcaaccttgtgcagaacttccagatgaaacatgaggttctttgcagatggattttaagtgttaagaagaattatcggaagaatgttgcctatcataattggagacatgcctttaatacagctcagtgcatgtttgctgctctaaaagcaggcaaaattcagaacaagctgactgacctggagatacttgcattgctgattgctgcactaagccacgatttggatcaccgtggtgtgaataactcttacatacagcgaagtgaacatccacttgcccagctttactgccattcaatcatggaacaccatcattttgaccagtgcctgatgattcttaatagtccaggcaatcagattctcagtggcctctccattgaagaatataagaccacgttgaaaataatcaagcaagctattttagctacagacctagcactgtacattaagaggcgaggagaattttttgaacttataagaaaaaatcaattcaatttggaagatcctcatcaaaaggagttgtttttggcaatgctgatgacagcttgtgatctttctgcaattacaaaaccctggcctattcaacaacggatagcagaacttgtagcaactgaattttttgatcaaggagacagagagagaaaagaactcaacatagaacccactgatctaatgaacagggagaagaaaaacaaaatcccaagtatgcaagttgggttcatagatgccatctgcttgcaactgtatgaggccctgacccacgtgtcagaggactgtttccctttgctagatggctgcagaaagaacaggcagaaatggcaggcccttgcagaacagcagtga

SEQ ID NO: 107 - protein, 519 aa, Homo sapiens
MDDHVTIRKKHLQRPIFRLRCLVKQLERGDVNVVDLKKNIEYAASVLEAVYIDETRRLLDTEDELSDIQTDSVPSEVRDWLASTFTRKMGMTKKKPEEKPKFRSIVHAVQAGIFVERMYRKTYHMVGLAYPAAVIVTLKDVDKWSFDVFALNEASGEHSLKFMIYELFTRYDLINRFKIPVSCLITFAEALEVGYSKYKNPYHNLIHAADVTQTVHYIMLHTGIMHWLTELEILAMVFAAAIHDYEHTGTTNNFHIQTRSDVAILYNDRSVLENHHVSAAYRLMQEEEMNILINLSKDDWRDLRNLVIEMVLSTDMSGHFQQIKNIRNSLQQPEGIDRAKTMSLILHAADISHPAKSWKLHYRWTMALMEEFFLQGDKEAELGLPFSPLCDRKSTMVAQSQIGFIDFIVEPTFSLLTDSTEKIVIPLIEEASKAETSSYVASSSTTIVGLHIADALRRSNTKGSMSDGSYSPDYSLAAVDLKSFKNNLVDIIQQNKERWKELAAQEARTSSQKCEFIHQ

SEQ ID NO: 108 - protein, 323 aa, Homo sapiens
FKIPVSCLITFAEALEVGYSKYKNPYHNLIHAADVTQTVHYIMLHTGIMHWLTELEILAMVFAAAIHDYEHTGTTNNFHIQTRSDVAILYNDRSVLENHHVSAAYRLMQEEEMNILINLSKDDWRDLRNLVIEMVLSTDMSGHFQQIKNIRNSLQQPEGIDRAKTMSLILHAADISHPAKSWKLHYRWTMALMEEFFLQGDKEAELGLPFSPLCDRKSTMVAQSQIGFIDFIVEPTFSLLTDSTEKIVIPLIEEASKAETSSYVASSSTTIVGLHIADALRRSNTKGSMSDGSYSPDYSLAAVDLKSFKNNLVDIIQQNKERW

SEQ ID NO: 109 - protein, 536 aa, Homo sapiens
MELSPRSPPEMLEESDCPSPLELKSAPSKKMWIKLRSLLRYMVKQLENGEINIEELKKNLEYTASLLEAVYIDETRQILDTEDELQELRSDAVPSEVRDWLASTFTQQARAKGRRAEEKPKFRSIVHAVQAGIFVERMFRRTYTSVGPTYSTAVLNCLKNLDLWCFDVFSLNQAADDHALRTIVFELLTRHNLISRFKIPTVFLMSFLDALETGYGKYKNPYHNQIHAADVTQTVHCFLLRTGMVHCLSEIELLAIIFAAAIHDYEHTGTTNSFHIQTKSECAIVYNDRSVLENHHISSVFRLMQDDEMNIFINLTKDEFVELRALVIEMVLATDMSCHFQQVKTMKTALQQLERIDKPKALSLLLHAADISHPTKQWLVHSRWTKALMEEFFRQGDKEAELGLPFSPLCDRTSTLVAQSQIGFIDFIVEPTFSVLTDVAEKSVQPLADEDSKSKNQPSFQWRQPSLDVEVGDPNPDVVSFRSTWVKRIQENKQKWKERAASGITNQMSIDELSPCEEEAPPSPAEDEHNQNGNLD

SEQ ID NO: 110 - protein, 300 aa, Homo sapiens
FKIPTVFLMSFLDALETGYGKYKNPYHNQIHAADVTQTVHCFLLRTGMVHCLSEIELLAIIFAAAIHDYEHTGTTNSFHIQTKSECAIVYNDRSVLENHHISSVFRLMQDDEMNIFINLTKDEFVELRALVIEMVLATDMSCHFQQVKTMKTALQQLERIDKPKALSLLLHAADISHPTKQWLVHSRWTKALMEEFFRQGDKEAELGLPFSPLCDRTSTLVAQSQIGFIDFIVEPTFSVLTDVAEKSVQPLADEDSKSKNQPSFQWRQPSLDVEVGDPNPDVVSFRSTWVKRIQENKQKW

SEQ ID NO: 111 - protein, 709 aa, Homo sapiens
MESPTKEIEEFESNSLKYLQPEQIEKIWLRLRGLRKYKKTSQRLRSLVKQLERGEASVVDLKKNLEYAATVLESVYIDETRRLLDTEDELSDIQSDAVPSEVRDWLASTFTRQMGMMLRRSDEKPRFKSIVHAVQAGIFVERMYRRTSNMVGLSYPPAVIEALKDVDKWSFDVFSLNEASGDHALKFIFYELLTRYDLISRFKIPISALVSFVEALEVGYSKHKNPYHNLMHAADVTQTVHYLLYKTGVANWLTELEIFAIIFSAAIHDYEHTGTTNNFHIQTRSDPAILYNDRSVLENHHLSAAYRLLQDDEEMNILINLSKDDWREFRTLVIEMVMATDMSCHFQQIKAMKTALQQPEAIEKPKALSLMLHTADISHPAKAWDLHHRWTMSLLEEFFRQGDREAELGLPFSPLCDRKSTMVAQSQVGFIDFIVEPTFTVLTDMTEKIVSPLIDETSQTGGTGQRRSSLNSISSSDAKRSGVKTSGSEGSAPINNSVISVDYKSFKATWTEVVHINRERWRAKVPKEEKAKKEAEEKARLAAEEQQKEMEAKSQAEEGASGKAEKKTSGETKNQVNGTRANKSDNPRGKNSKAEKSSGEQQQNGDFKDGKNKTDKKDHSNIGNDSKKTDGTKQRSHGSPAPSTSSTCRLTLPVIKPPLRHFKRPAYASSSYAPSVSKKTDEHPARYKMLDQRIKMKKIQNISHNWNRK

SEQ ID NO: 112 - protein, 320 aa, Homo sapiens
FKIPISALVSFVEALEVGYSKHKNPYHNLMHAADVTQTVHYLLYKTGVANWLTELEIFAIIFSAAIHDYEHTGTTNNFHIQTRSDPAILYNDRSVLENHHLSAAYRLLQDDEEMNILINLSKDDWREFRTLVIEMVMATDMSCHFQQIKAMKTALQQPEAIEKPKALSLMLHTADISHPAKAWDLHHRWTMSLLEEFFRQGDREAELGLPFSPLCDRKSTMVAQSQVGFIDFIVEPTFTVLTDMTEKIVSPLIDETSQTGGTGQRRSSLNSISSSDAKRSGVKTSGSEGSAPINNSVISVDYKSFKATWTEVVHINRERW

SEQ ID NO: 113 - protein, 941 aa, Homo sapiens
MGQACGHSILCRSQQYPAARPAEPRGQQVFLKPDEPPPPPQPCADSLQDALLSLGSVIDISGLQRAVKEALSAVLPRVETVYTYLLDGESQLVCEDPPHELPQEGKVREAIISQKRLGCNGLGFSDLPGKPLARLVAPLAPDTQVLVMPLADKEAGAVAAVILVHCGQLSDNEEWSLQAVEKHTLVALRRVQVLQQRGPREAPRAVQNPPEGTAEDQKGGAAYTDRDRKILQLCGELYDLDASSLQLKVLQYLQQETRASRCCLLLVSEDNLQLSCKVIGDKVLGEEVSFPLTGCLGQVVEDKKSIQLKDLTSEDVQQLQSMLGCELQAMLCVPVISRATDQVVALACAFNKLEGDLFTDEDEHVIQHCFHYTSTVLTSTLAFQKEQKLKCECQALLQVAKNLFTHLDDVSVLLQEIITEARNLSNAEICSVFLLDQNELVAKVFDGGVVDDESYEIRIPADQGIAGHVATTGQILNIPDAYAHPLFYRGVDDSTGFRTRNILCFPIKNENQEVIGVAELVNKINGPWFSKFDEDLATAFSIYCGISIAHSLLYKKVNEAQYRSHLANEMMMYHMKVSDDEYTKLLHDGIQPVAAIDSNFASFTYTPRSLPEDDTSMAILSMLQDMNFINNYKIDCPTLARFCLMVKKGYRDPPYHNWMHAFSVSHFCYLLYKNLELTNYLEDIEIFALFISCMCHDLDHRGTNNSFQVASKSVLAALYSSEGSVMERHHFAQAIAILNTHGCNIFDHFSRKDYQRMLDLMRDIILATDLAHHLRIFKDLQKMAEVGYDRNNKQHHRLLLCLLMTSCDLSDQTKGWKTTRKIAELIYKEFFSQGDLEKAMGNRPMEMMDREKAYIPELQISFMEHIAMPIYKLLQDLFPKAAELYERVASNREHWTKVSHKFTIRGLPSNNSLDFLDEEYEVPDLDGTRAPINGCCSLDAE

SEQ ID NO: 114 - protein, 259 aa, Homo sapiens
KIDCPTLARFCLMVKKGYRDPPYHNWMHAFSVSHFCYLLYKNLELTNYLEDIEIFALFISCMCHDLDHRGTNNSFQVASKSVLAALYSSEGSVMERHHFAQAIAILNTHGCNIFDHFSRKDYQRMLDLMRDIILATDLAHHLRIFKDLQKMAEVGYDRNNKQHHRLLLCLLMTSCDLSDQTKGWKTTRKIAELIYKEFFSQGDLEKAMGNRPMEMMDREKAYIPELQISFMEHIAMPIYKLLQDLFPKAAELYERVASN

SEQ ID NO: 115 - protein, 1141 aa, Homo sapiens
MAVPGDAARVRDKPVHSGVSQAPTAGRDCHHRADPASPRDSGCRGCWGDLVLQPLRSSRKLSSALCAGSLSFLLALLVRLVRGEVGCDLEQCKEAAAAEEEEAAPGAEGGVFPGPRGGAPGGGARLSPWLQPSALLFSLLCAFFWMGLYLLRAGVRLPLAVALLAACCGGEALVQIGLGVGEDHLLSLPAAGVVLSCLAAATWLVLRLRLGVLMIALTSAVRTVSLISLERFKVAWRPYLAYLAGVLGILLARYVEQILPQSAEAAPREHLGSQLIAGTKEDIPVFKRRRRSSSVVSAEMSGCSSKSHRRTSLPCIPREQLMGHSEWDHKRGPRGSQSSGTSITVDIAVMGEAHGLITDLLADPSLPPNVCTSLRAVSNLLSTQLTFQAIHKPRVNPVTSLSENYTCSDSEESSEKDKLAIPKRLRRSLPPGLLRRVSSTWTTTTSATGLPTLEPAPVRRDRSTSIKLQEAPSSSPDSWNNPVMMTLTKSRSFTSSYAISAANHVKAKKQSRPGALAKISPLSSPCSSPLQGTPASSLVSKISAVQFPESADTTAKQSLGSHRALTYTQSAPDLSPQILTPPVICSSCGRPYSQGNPADEPLERSGVATRTPSRTDDTAQVTSDYETNNNSDSSDIVQNEDETECLREPLRKASACSTYAPETMMFLDKPILAPEPLVMDNLDSIMEQLNTWNFPIFDLVENIGRKCGRILSQVSYRLFEDMGLFEAFKIPIREFMNYFHALEIGYRDIPYHNRIHATDVLHAVWYLTTQPIPGLSTVINDHGSTSDSDSDSGFTHGHMGYVFSKTYNVTDDKYGCLSGNIPALELMALYVAAAMHDYDHPGRTNAFLVATSAPQAVLYNDRSVLENHHAAAAWNLFMSRPEYNFLINLDHVEFKHFRFLVIEAILATDLKKHFDFVAKFNGKVNDDVGIDWTNENDRLLVCQMCIKLADINGPAKCKELHLQWTDGIVNEFYEQGDEEASLGLPISPFMDRSAPQLANLQESFISHIVGPLCNSYDSAGLMPGKWVEDSDESGDTDDPEEEEEEAPAPNEEETCENNESPKKKTFKRRKIYCQITQHLLQNHKMWKKVIEEEQRLAGIENQSLDQTPQSHSSEQIQAIKEEEEEKGKPRGEEIPTQKPDQ

SEQ ID NO: 116 - protein, 359 aa, Homo sapiens
FKIPIREFMNYFHALEIGYRDIPYHNRIHATDVLHAVWYLTTQPIPGLSTVINDHGSTSDSDSDSGFTHGHMGYVFSKTYNVTDDKYGCLSGNIPALELMALYVAAAMHDYDHPGRTNAFLVATSAPQAVLYNDRSVLENHHAAAAWNLFMSRPEYNFLINLDHVEFKHFRFLVIEAILATDLKKHFDFVAKFNGKVNDDVGIDWTNENDRLLVCQMCIKLADINGPAKCKELHLQWTDGIVNEFYEQGDEEASLGLPISPFMDRSAPQLANLQESFISHIVGPLCNSYDSAGLMPGKWVEDSDESGDTDDPEEEEEEAPAPNEEETCENNESPKKKTFKRRKIYCQITQHLLQNHKMW

SEQ ID NO: 117 - protein, 1112 aa, Homo sapiens
MRRDERDAKAMRSLQPPDGAGSPPESLRNGYVKSCVSPLRQDPPRGFFFHLCRFCNVELRPPPASPQQPRRCSPFCRARLSLGALAAFVLALLLGAEPESWAAGAAWLRTLLSVCSHSLSPLFSIACAFFFLTCFLTRTKRGPGPGRSCGSWWLLALPACCYLGDFLVWQWWSWPWGDGDAGSAAPHTPPEAAAGRLLLVLSCVGLLLTLAHPLRLRHCVLVLLLASFVWWVSFTSLGSLPSALRPLLSGLVGGAGCLLALGLDHFFQIREAPLHPRLSSAAEEKVPVIRPRRRSSCVSLGETAASYYGSCKIFRRPSLPCISREQMILWDWDLKQWYKPHYQNSGGGNGVDLSVLNEARNMVSDLLTDPSLPPQVISSLRSISSLMGAFSGSCRPKINPLTPFPGFYPCSEIEDPAEKGDRKLNKGLNRNSLPTPQLRRSSGTSGLLPVEQSSRWDRNNGKRPHQEFGISSQGCYLNGPFNSNLLTIPKQRSSSVSLTHHVGLRRAGVLSSLSPVNSSNHGPVSTGSLTNRSPIEFPDTADFLNKPSVILQRSLGNAPNTPDFYQQLRNSDSNLCNSCGHQMLKYVSTSESDGTDCCSGKSGEEENIFSKESFKLMETQQEEETEKKDSRKLFQEGDKWLTEEAQSEQQTNIEQEVSLDLILVEEYDSLIEKMSNWNFPIFELVEKMGEKSGRILSQVMYTLFQDTGLLEIFKIPTQQFMNYFRALENGYRDIPYHNRIHATDVLHAVWYLTTRPVPGLQQIHNGCGTGNETDSDGRINHGRIAYISSKSCSNPDESYGCLSSNIPALELMALYVAAAMHDYDHPGRTNAFLVATNAPQAVLYNDRSVLENHHAASAWNLYLSRPEYNFLLHLDHVEFKRFRFLVIEAILATDLKKHFDFLAEFNAKANDVNSNGIEWSNENDRLLVCQVCIKLADINGPAKVRDLHLKWTEGIVNEFYEQGDEEANLGLPISPFMDRSSPQLAKLQESFITHIVGPLCNSYDAAGLLPGQWLEAEEDNDTESGDDEDGEELDTEDEEMENNLNPKPPRRKSRRRIFCQLMHHLTENHKIWKEIVEEEEKCKADGNKLQVENSSLPQADEIQVIEEADEEE

SEQ ID NO: 118 - protein, 360 aa, Homo sapiens
FKIPTQQFMNYFRALENGYRDIPYHNRIHATDVLHAVWYLTTRPVPGLQQIHNGCGTGNETDSDGRINHGRIAYISSKSCSNPDESYGCLSSNIPALELMALYVAAAMHDYDHPGRTNAFLVATNAPQAVLYNDRSVLENHHAASAWNLYLSRPEYNFLLHLDHVEFKRFRFLVIEAILATDLKKHFDFLAEFNAKANDVNSNGIEWSNENDRLLVCQVCIKLADINGPAKVRDLHLKWTEGIVNEFYEQGDEEANLGLPISPFMDRSSPQLAKLQESFITHIVGPLCNSYDAAGLLPGQWLEAEEDNDTESGDDEDGEELDTEDEEMENNLNPKPPRRKSRRRIFCQLMHHLTENHKIW

SEQ ID NO: 119 - protein, 886 aa, Homo sapiens
MEPPTVPSERSLSLSLPGPREGQATLKPPPQHLWRQPRTPIRIQQRGYSDSAERAERERQPHRPIERADAMDTSDRPGLRTTRMSWPSSFHGTGTGSGGAGGGSSRRFEAENGPTPSPGRSPLDSQASPGLVLHAGAATSQRRESFLYRSDSDYDMSPKTMSRNSSVTSEAHAEDLIVTPFAQVLASLRSVRSNFSLLTNVPVPSNKRSPLGGPTPVCKATLSEETCQQLARETLEELDWCLEQLETMQTYRSVSEMASHKFKRMLNRELTHLSEMSRSGNQVSEYISTTFLDKQNEVEIPSPTMKEREKQQAPRPRPSQPPPPPVPHLQPMSQITGLKKLMHSNSLNNSNIPRFGVKTDQEELLAQELENLNKWGLNIFCVSDYAGGRSLTCIMYMIFQERDLLKKFRIPVDTMVTYMLTLEDHYHADVAYHNSLHAADVLQSTHVLLATPALDAVFTDLEILAALFAAAIHDVDHPGVSNQFLINTNSELALMYNDESVLENHHLAVGFKLLQEDNCDIFQNLSKRQRQSLRKMVIDMVLATDMSKHMTLLADLKTMVETKKVTSSGVLLLDNYSDRIQVLRNMVHCADLSNPTKPLELYRQWTDRIMAEFFQQGDRERERGMEISPMCDKHTASVEKSQVGFIDYIVHPLWETWADLVHPDAQEILDTLEDNRDWYYSAIRQSPSPPPEEESRGPGHPPLPDKFQFELTLEEEEEEEISMAQIPCTAQEALTAQGLSGVEEALDATIAWEASPAQESLEVMAQEASLEAELEAVYLTQQAQSTGSAPVAPDEFSSREEFVVAVSHSSPSALALQSPLLPAWRTLSVSEHAPGLPGLPSTAAEVEAQREHQAAKRACSACAGTFGEDTSALPAPGGGGSGGDPT

SEQ ID NO: 120 - protein, 394 aa, Homo sapiens
QPMSQITGLKKLMHSNSLNNSNIPRFGVKTDQEELLAQELENLNKWGLNIFCVSDYAGGRSLTCIMYMIFQERDLLKKFRIPVDTMVTYMLTLEDHYHADVAYHNSLHAADVLQSTHVLLATPALDAVFTDLEILAALFAAAIHDVDHPGVSNQFLINTNSELALMYNDESVLENHHLAVGFKLLQEDNCDIFQNLSKRQRQSLRKMVIDMVLATDMSKHMTLLADLKTMVETKKVTSSGVLLLDNYSDRIQVLRNMVHCADLSNPTKPLELYRQWTDRIMAEFFQQGDRERERGMEISPMCDKHTASVEKSQVGFIDYIVHPLWETWADLVHPDAQEILDTLEDNRDWYYSAIRQSPSPPPEEESRGPGHPPLPDKFQFELTLEEEEEEEISM

SEQ ID NO: 121 - protein, 736 aa, Homo sapiens
MKKSRSVMTVMADDNVKDYFECSLSKSYSSSSNTLGIDLWRGRRCCSGNLQLPPLSQRQSERARTPEGDGISRPTTLPLTTLPSIAITTVSQECFDVENGPSPGRSPLDPQASSSAGLVLHATFPGHSQRRESFLYRSDSDYDLSPKAMSRNSSLPSEQHGDDLIVTPFAQVLASLRSVRNNFTILTNLHGTSNKRSPAASQPPVSRVNPQEESYQKLAMETLEELDWCLDQLETIQTYRSVSEMASNKFKRMLNRELTHLSEMSRSGNQVSEYISNTFLDKQNDVEIPSPTQKDREKKKKQQLMTQISGVKKLMHSSSLNNTSISRFGVNTENEDHLAKELEDLNKWGLNIFNVAGYSHNRPLTCIMYAIFQERDLLKTFRISSDTFITYMMTLEDHYHSDVAYHNSLHAADVAQSTHVLLSTPALDAVFTDLEILAAIFAAAIHDVDHPGVSNQFLINTNSELALMYNDESVLENHHLAVGFKLLQEEHCDIFMNLTKKQRQTLRKMVIDMVLATDMSKHMSLLADLKTMVETKKVTSSGVLLLDNYTDRIQVLRNMVHCADLSNPTKSLELYRQWTDRIMEEFFQQGDKERERGMEISPMCDKHTASVEKSQVGFIDYIVHPLWETWADLVQPDAQDILDTLEDNRNWYQSMIPQSPSPPLDEQNRDCQGLMEKFQFELTLDEEDSEGPEKEGEGHSYFSSTKTLCVIDPENRDSLGETDIDIATEDKSPVDT

SEQ ID NO: 122 - protein, 353 aa, Homo sapiens
VNTENEDHLAKELEDLNKWGLNIFNVAGYSHNRPLTCIMYAIFQERDLLKTFRISSDTFITYMMTLEDHYHSDVAYHNSLHAADVAQSTHVLLSTPALDAVFTDLEILAAIFAAAIHDVDHPGVSNQFLINTNSELALMYNDESVLENHHLAVGFKLLQEEHCDIFMNLTKKQRQTLRKMVIDMVLATDMSKHMSLLADLKTMVETKKVTSSGVLLLDNYTDRIQVLRNMVHCADLSNPTKSLELYRQWTDRIMEEFFQQGDKERERGMEISPMCDKHTASVEKSQVGFIDYIVHPLWETWADLVQPDAQDILDTLEDNRNWYQSMIPQSPSPPLDEQNRDCQGLMEKFQFEL

SEQ ID NO: 123 - protein, 712 aa, Homo sapiens
MENLGVGEGAEACSRLSRSRGRHSMTRAPKHLWRQPRRPIRIQQRFYSDPDKSAGCRERDLSPRPELRKSRLSWPVSSCRRFDLENGLSCGRRALDPQSSPGLGRIMQAPVPHSQRRESFLYRSDSDYELSPKAMSRNSSVASDLHGEDMIVTPFAQVLASLRTVRSNVAALARQQCLGAAKQGPVGNPSSSNQLPPAEDTGQKLALETLDELDWCLDQLETLQTRHSVGEMASNKFKRILNRELTHLSETSRSGNQVSEYISRTFLDQQTEVELPKVTAEEAPQPMSRISGLHGLCHSASLSSATVPRFGVQTDQEEQLAKELEDTNKWGLDVFKVAELSGNRPLTAIIFSIFQERDLLKTFQIPADTLATYLLMLEGHYHANVAYHNSLHAADVAQSTHVLLATPALEAVFTDLEILAALFASAIHDVDHPGVSNQFLINTNSELALMYNDASVLENHHLAVGFKLLQAENCDIFQNLSAKQRLSLRRMVIDMVLATDMSKHMNLLADLKTMVETKKVTSLGVLLLDNYSDRIQVLQNLVHCADLSNPTKPLPLYRQWTDRIMAEFFQQGDRERESGLDISPMCDKHTASVEKSQVGFIDYIAHPLWETWADLVHPDAQDLLDTLEDNREWYQSKIPRSPSDLTNPERDGPDRFQFELTLEEAEEEDEEEEEEGEETALAKEALELPDTELLSPEAGPDPGDLPLDNQRT

SEQ ID NO: 124 - protein, 366 aa, Homo sapiens
VQTDQEEQLAKELEDTNKWGLDVFKVAELSGNRPLTAIIFSIFQERDLLKTFQIPADTLATYLLMLEGHYHANVAYHNSLHAADVAQSTHVLLATPALEAVFTDLEILAALFASAIHDVDHPGVSNQFLINTNSELALMYNDASVLENHHLAVGFKLLQAENCDIFQNLSAKQRLSLRRMVIDMVLATDMSKHMNLLADLKTMVETKKVTSLGVLLLDNYSDRIQVLQNLVHCADLSNPTKPLPLYRQWTDRIMAEFFQQGDRERESGLDISPMCDKHTASVEKSQVGFIDYIAHPLWETWADLVHPDAQDLLDTLEDNREWYQSKIPRSPSDLTNPERDGPDRFQFELTLEEAEEEDEEEEEEGE

SEQ ID NO: 125 - protein, 809 aa, Homo sapiens
MEAEGSSAPARAGSGEGSDSAGGATLKAPKHLWRHEQHHQYPLRQPQFRLLHPHHHLPPPPPPSPQPQPQCPLQPPPPPPLPPPPPPPGAARGRYASSGATGRVRHRGYSDTERYLYCRAMDRTSYAVETGHRPGLKKSRMSWPSSFQGLRRFDVDNGTSAGRSPLDPMTSPGSGLILQANFVHSQRRESFLYRSDSDYDLSPKSMSRNSSIASDIHGDDLIVTPFAQVLASLRTVRNNFAALTNLQDRAPSKRSPMCNQPSINKATITEEAYQKLASETLEELDWCLDQLETLQTRHSVSEMASNKFKRMLNRELTHLSEMSRSGNQVSEFISNTFLDKQHEVEIPSPTQKEKEKKKRPMSQISGVKKLMHSSSLTNSSIPRFGVKTEQEDVLAKELEDVNKWGLHVFRIAELSGNRPLTVIMHTIFQERDLLKTFKIPVDTLITYLMTLEDHYHADVAYHNNIHAADVVQSTHVLLSTPALEAVFTDLEILAAIFASAIHDVDHPGVSNQFLINTNSELALMYNDSSVLENHHLAVGFKLLQEENCDIFQNLTKKQRQSLRKMVIDIVLATDMSKHMNLLADLKTMVETKKVTSSGVLLLDNYSDRIQVLQNMVHCADLSNPTKPLQLYRQWTDRIMEEFFRQGDRERERGMEISPMCDKHNASVEKSQVGFIDYIVHPLWETWADLVHPDAQDILDTLEDNREWYQSTIPQSPSPAPDDPEEGRQGQTEKFQFELTLEEDGESDTEKDSGSQVEEDTSCSDSKTLCTQDSESTEIPLDEQVEEEAVGEEEESQPEACVIDDRSPDT

SEQ ID NO: 126 - protein, 366 aa, Homo sapiens
VKTEQEDVLAKELEDVNKWGLHVFRIAELSGNRPLTVIMHTIFQERDLLKTFKIPVDTLITYLMTLEDHYHADVAYHNNIHAADVVQSTHVLLSTPALEAVFTDLEILAAIFASAIHDVDHPGVSNQFLINTNSELALMYNDSSVLENHHLAVGFKLLQEENCDIFQNLTKKQRQSLRKMVIDIVLATDMSKHMNLLADLKTMVETKKVTSSGVLLLDNYSDRIQVLQNMVHCADLSNPTKPLQLYRQWTDRIMEEFFRQGDRERERGMEISPMCDKHNASVEKSQVGFIDYIVHPLWETWADLVHPDAQDILDTLEDNREWYQSTIPQSPSPAPDDPEEGRQGQTEKFQFELTLEEDGESDTEKD

SEQ ID NO: 127 - protein, 860 aa, Homo sapiens
MGEVTAEEVEKFLDSNIGFAKQYYNLHYRAKLISDLLGAKEAAVDFSNYHSPSSMEESEIIFDLLRDFQENLQTEKCIFNVMKKLCFLLQADRMSLFMYRTRNGIAELATRLFNVHKDAVLEDCLVMPDQEIVFPLDMGIVGHVAHSKKIANVPNTEEDEHFCDFVDILTEYKTKNILASPIMNGKDVVAIIMAVNKVDGSHFTKRDEEILLKYLNFANLIMKVYHLSYLHNCETRRGQILLWSGSKVFEELTDIERQFHKALYTVRAFLNCDRYSVGLLDMTKQKEFFDVWPVLMGEVPPYSGPRTPDGREINFYKVIDYILHGKEDIKVIPNPPPDHWALVSGLPAYVAQNGLICNIMNAPAEDFFAFQKEPLDESGWMIKNVLSMPIVNKKEEIVGVATFYNRKDGKPFDEMDETLMESLTQFLGWSVLNPDTYESMNKLENRKDIFQDIVKYHVKCDNEEIQKILKTREVYGKEPWECEEEELAEILQAELPDADKYEINKFHFSDLPLTELELVKCGIQMYYELKVVDKFHIPQEALVRFMYSLSKGYRKITYHNWRHGFNVGQTMFSLLVTGKLKRYFTDLEALAMVTAAFCHDIDHRGTNNLYQMKSQNPLAKLHGSSILERHHLEFGKTLLRDESLNIFQNLNRRQHEHAIHMMDIAIIATDLALYFKKRTMFQKIVDQSKTYESEQEWTQYMMLEQTRKEIVMAMMMTACDLSAITKPWEVQSQVALLVAAEFWEQGDLERTVLQQNPIPMMDRNKADELPKLQVGFIDFVCTFVYKEFSRFHEEITPMLDGITNNRKEWKALADEYDAKMKVQEEKKQKQQSAKSAAAGNQPGGNPSPGGATTSKSCCIQ

SEQ ID NO: 128 - protein, 337 aa, Homo sapiens
EEEELAEILQAELPDADKYEINKFHFSDLPLTELELVKCGIQMYYELKVVDKFHIPQEALVRFMYSLSKGYRKITYHNWRHGFNVGQTMFSLLVTGKLKRYFTDLEALAMVTAAFCHDIDHRGTNNLYQMKSQNPLAKLHGSSILERHHLEFGKTLLRDESLNIFQNLNRRQHEHAIHMMDIAIIATDLALYFKKRTMFQKIVDQSKTYESEQEWTQYMMLEQTRKEIVMAMMMTACDLSAITKPWEVQSQVALLVAAEFWEQGDLERTVLQQNPIPMMDRNKADELPKLQVGFIDFVCTFVYKEFSRFHEEITPMLDGITNNRKEWKALADEYDAK

SEQ ID NO: 129 - protein, 854 aa, Homo sapiens
MSLSEEQARSFLDQNPDFARQYFGKKLSPENVAAACEDGCPPDCDSLRDLCQVEESTALLELVQDMQESINMERVVFKVLRRLCTLLQADRCSLFMYRQRNGVAELATRLFSVQPDSVLEDCLVPPDSEIVFPLDIGVVGHVAQTKKMVNVEDVAECPHFSSFADELTDYKTKNMLATPIMNGKDVVAVIMAVNKLNGPFFTSEDEDVFLKYLNFATLYLKIYHLSYLHNCETRRGQVLLWSANKVFEELTDIERQFHKAFYTVRAYLNCERYSVGLLDMTKEKEFFDVWSVLMGESQPYSGPRTPDGREIVFYKVIDYVLHGKEEIKVIPTPSADHWALASGLPSYVAESGFICNIMNASADEMFKFQEGALDDSGWLIKNVLSMPIVNKKEEIVGVATFYNRKDGKPFDEQDEVLMESLTQFLGWSVMNTDTYDKMNKLENRKDIAQDMVLYHVKCDRDEIQLILPTRARLGKEPADCDEDELGEILKEELPGPTTFDIYEFHFSDLECTELDLVKCGIQMYYELGVVRKFQIPQEVLVRFLFSISKGYRRITYHNWRHGFNVAQTMFTLLMTGKLKSYYTDLEAFAMVTAGLCHDIDHRGTNNLYQMKSQNPLAKLHGSSILERHHLEFGKFLLSEETLNIYQNLNRRQHEHVIHLMDIAIIATDLALYFKKRAMFQKIVDESKNYQDKKSWVEYLSLETTRKEIVMAMMMTACDLSAITKPWEVQSKVALLVAAEFWEQGDLERTVLDQQPIPMMDRNKAAELPKLQVGFIDFVCTFVYKEFSRFHEEILPMFDRLQNNRKEWKALADEYEAKVKALEEKEEEERVAAKKVGTEICNGGPAPKSSTCCIL

SEQ ID NO: 130 - protein, 341 aa, Homo sapiens
PADCDEDELGEILKEELPGPTTFDIYEFHFSDLECTELDLVKCGIQMYYELGVVRKFQIPQEVLVRFLFSISKGYRRITYHNWRHGFNVAQTMFTLLMTGKLKSYYTDLEAFAMVTAGLCHDIDHRGTNNLYQMKSQNPLAKLHGSSILERHHLEFGKFLLSEETLNIYQNLNRRQHEHVIHLMDIAIIATDLALYFKKRAMFQKIVDESKNYQDKKSWVEYLSLETTRKEIVMAMMMTACDLSAITKPWEVQSKVALLVAAEFWEQGDLERTVLDQQPIPMMDRNKAAELPKLQVGFIDFVCTFVYKEFSRFHEEILPMFDRLQNNRKEWKALADEYEAK

SEQ ID NO: 131 - protein, 858 aa, Homo sapiens
MGEINQVAVEKYLEENPQFAKEYFDRKLRVEVLGEIFKNSQVPVQSSMSFSELTQVEESALCLELLWTVQEEGGTPEQGVHRALQRLAHLLQADRCSMFLCRSRNGIPEVASRLLDVTPTSKFEDNLVGPDKEVVFPLDIGIVGWAAHTKKTHNVPDVKKNSHFSDFMDKQTGYVTKNLLATPIVVGKEVLAVIMAVNKVNASEFSKQDEEVFSKYLNFVSIILRLHHTSYMYNIESRRSQILMWSANKVFEELTDVERQFHKALYTVRSYLNCERYSIGLLDMTKEKEFYDEWPIKLGEVEPYKGPKTPDGREVNFYKIIDYILHGKEEIKVIPTPPADHWTLISGLPTYVAENGFICNMMNAPADEYFTFQKGPVDETGWVIKNVLSLPIVNKKEDIVGVATFYNRKDGKPFDEHDEYITETLTQFLGWSLLNTDTYDKMNKLENRKDIAQEMLMNQTKATPEEIKSILKFQEKLNVDVIDDCEEKQLVAILKEDLPDPRSAELYEFRFSDFPLTEHGLIKCGIRLFFEINVVEKFKVPVEVLTRWMYTVRKGYRAVTYHNWRHGFNVGQTMFTLLMTGRLKKYYTDLEAFAMLAAAFCHDIDHRGTNNLYQMKSTSPLARLHGSSILERHHLEYSKTLLQDESLNIFQNLNKRQFETVIHLFEVAIIATDLALYFKKRTMFQKIVDACEQMQTEEEAIKYVTVDPTKKEIIMAMMMTACDLSAITKPWEVQSQVALMVANEFWEQGDLERTVLQQQPIPMMDRNKRDELPKLQVGFIDFVCTFVYKEFSRFHKEITPMLSGLQNNRVEWKSLADEYDAKMKVIEEEAKKQEGGAEKAAEDSGGGDDKKSKTCLML

SEQ ID NO: 132 - protein, 340 aa, Homo sapiens
DDCEEKQLVAILKEDLPDPRSAELYEFRFSDFPLTEHGLIKCGIRLFFEINVVEKFKVPVEVLTRWMYTVRKGYRAVTYHNWRHGFNVGQTMFTLLMTGRLKKYYTDLEAFAMLAAAFCHDIDHRGTNNLYQMKSTSPLARLHGSSILERHHLEYSKTLLQDESLNIFQNLNKRQFETVIHLFEVAIIATDLALYFKKRTMFQKIVDACEQMQTEEEAIKYVTVDPTKKEIIMAMMMTACDLSAITKPWEVQSQVALMVANEFWEQGDLERTVLQQQPIPMMDRNKRDELPKLQVGFIDFVCTFVYKEFSRFHKEITPMLSGLQNNRVEWKSLADEYDAK

SEQ ID NO: 133 - protein, 482 aa, Homo sapiens
MEVCYQLPVLPLDRPVPQHVLSRRGAISFSSSSALFGCPNPRQLSQRRGAISYDSSDQTALYIRMLGDVRVRSRAGFESERRGSHPYIDFRIFHSQSEIEVSVSARNIRRLLSFQRYLRSSRFFRGTAVSNSLNILDDDYNGQAKCMLEKVGNWNFDIFLFDRLTNGNSLVSLTFHLFSLHGLIEYFHLDMMKLRRFLVMIQEDYHSQNPYHNAVHAADVTQAMHCYLKEPKLANSVTPWDILLSLIAAATHDLDHPGVNQPFLIKTNHYLATLYKNTSVLENHHWRSAVGLLRESGLFSHLPLESRQQMETQIGALILATDISRQNEYLSLFRSHLDRGDLCLEDTRHRHLVLQMALKCADICNPCRTWELSKQWSEKVTEEFFHQGDIEKKYHLGVSPLCDRHTESIANIQIGFMTYLVEPLFTEWARFSNTRLSQTMLGHVGLNKASWKGLQREQSSSEDTDAAFELNSQLLPQENRLS

SEQ ID NO: 134 - protein, 265 aa, Homo sapiens
FHLDMMKLRRFLVMIQEDYHSQNPYHNAVHAADVTQAMHCYLKEPKLANSVTPWDILLSLIAAATHDLDHPGVNQPFLIKTNHYLATLYKNTSVLENHHWRSAVGLLRESGLFSHLPLESRQQMETQIGALILATDISRQNEYLSLFRSHLDRGDLCLEDTRHRHLVLQMALKCADICNPCRTWELSKQWSEKVTEEFFHQGDIEKKYHLGVSPLCDRHTESIANIQIGFMTYLVEPLFTEWARFSNTRLSQTMLGHVGLNKASW

SEQ ID NO: 135 - protein, 450 aa, Homo sapiens
MSCLMVERCGEILFENPDQNAKCVCMLGDIRLRGQTGVRAERRGSYPFIDFRLLNSTTYSGEIGTKKKVKRLLSFQRYFHASRLLRGIIPQAPLHLLDEDYLGQARHMLSKVGMWDFDIFLFDRLTNGNSLVTLLCHLFNTHGLIHHFKLDMVTLHRFLVMVQEDYHSQNPYHNAVHAADVTQAMHCYLKEPKLASFLTPLDIMLGLLAAAAHDVDHPGVNQPFLIKTNHHLANLYQNMSVLENHHWRSTIGMLRESRLLAHLPKEMTQDIEQQLGSLILATDINRQNEFLTRLKAHLHNKDLRLEDAQDRHFMLQIALKCADICNPCRIWEMSKQWSERVCEEFYRQGELEQKFELEISPLCNQQKDSIPSIQIGFMSYIVEPLFREWAHFTGNSTLSENMLGHLAHNKAQWKSLLPRQHRSRGSSGSGPDHDHAGQGTESEEQEGDSP

SEQ ID NO: 136 - protein, 239 aa, Homo sapiens
YHNAVHAADVTQAMHCYLKEPKLASFLTPLDIMLGLLAAAAHDVDHPGVNQPFLIKTNHHLANLYQNMSVLENHHWRSTIGMLRESRLLAHLPKEMTQDIEQQLGSLILATDINRQNEFLTRLKAHLHNKDLRLEDAQDRHFMLQIALKCADICNPCRIWEMSKQWSERVCEEFYRQGELEQKFELEISPLCNQQKDSIPSIQIGFMSYIVEPLFREWAHFTGNSTLSENMLGHLAHNK

SEQ ID NO: 137 - protein, 829 aa, Homo sapiens
MGCAPSIHISERLVAEDAPSPAAPPLSSGGPRLPQGQKTAALPRTRGAGLLESELRDGSGKKVAVADVQFGPMRFHQDQLQVLLVFTKEDNQCNGFCRACEKAGFKCTVTKEAQAVLACFLDKHHDIIIIDHRNPRQLDAEALCRSIRSSKLSENTVIVGVVRRVDREELSVMPFISAGFTRRYVENPNIMACYNELLQLEFGEVRSQLKLRACNSVFTALENSEDAIEITSEDRFIQYANPAFETTMGYQSGELIGKELGEVPINEKKADLLDTINSCIRIGKEWQGIYYAKKKNGDNIQQNVKIIPVIGQGGKIRHYVSIIRVCNGNNKAEKISECVQSDTHTDNQTGKHKDRRKGSLDVKAVASRATEVSSQRRHSSMARIHSMTIEAPITKVINIINAAQESSPMPVTEALDRVLEILRTTELYSPQFGAKDDDPHANDLVGGLMSDGLRRLSGNEYVLSTKNTQMVSSNIITPISLDDVPPRIARAMENEEYWDFDIFELEAATHNRPLIYLGLKMFARFGICEFLHCSESTLRSWLQIIEANYHSSNPYHNSTHSADVLHATAYFLSKERIKETLDPIDEVAALIAATIHDVDHPGRTNSFLCNAGSELAILYNDTAVLESHHAALAFQLTTGDDKCNIFKNMERNDYRTLRQGIIDMVLATEMTKHFEHVNKFVNSINKPLATLEENGETDKNQEVINTMLRTPENRTLIKRMLIKCADVSNPCRPLQYCIEWAARISEEYFSQTDEEKQQGLPVVMPVFDRNTCSIPKSQISFIDYFITDMFDAWDAFVDLPDLMQHLDNNFKYWKGLDEMKLRNLRPPPE

SEQ ID NO: 138 - protein, 283 aa, Homo sapiens
LHCSESTLRSWLQIIEANYHSSNPYHNSTHSADVLHATAYFLSKERIKETLDPIDEVAALIAATIHDVDHPGRTNSFLCNAGSELAILYNDTAVLESHHAALAFQLTTGDDKCNIFKNMERNDYRTLRQGIIDMVLATEMTKHFEHVNKFVNSINKPLATLEENGETDKNQEVINTMLRTPENRTLIKRMLIKCADVSNPCRPLQYCIEWAARISEEYFSQTDEEKQQGLPVVMPVFDRNTCSIPKSQISFIDYFITDMFDAWDAFVDLPDLMQHLDNNFKYW

SEQ ID NO: 139 - protein, 885 aa, Homo sapiens
MGCAPSIHVSQSGVIYCRDSDESSSPRQTTSVSQGPAAPLPGLFVQTDAADAIPPSRASGPPSVARVRRARTELGSGSSAGSAAPAATTSRGRRRHCCSSAEAETQTCYTSVKQVSSAEVRIGPMRLTQDPIQVLLIFAKEDSQSDGFWWACDRAGYRCNIARTPESALECFLDKHHEIIVIDHRQTQNFDAEAVCRSIRATNPSEHTVILAVVSRVSDDHEEASVLPLLHAGFNRRFMENSSIIACYNELIQIEHGEVRSQFKLRACNSVFTALDHCHEAIEITSDDHVIQYVNPAFERMMGYHKGELLGKELADLPKSDKNRADLLDTINTCIKKGKEWQGVYYARRKSGDSIQQHVKITPVIGQGGKIRHFVSLKKLCCTTDNNKQIHKIHRDSGDNSQTEPHSFRYKNRRKESIDVKSISSRGSDAPSLQNRRYPSMARIHSMTIEAPITKVINIINAAQENSPVTVAEALDRVLEILRTTELYSPQLGTKDEDPHTSDLVGGLMTDGLRRLSGNEYVFTKNVHQSHSHLAMPITINDVPPCISQLLDNEESWDFNIFELEAITHKRPLVYLGLKVFSRFGVCEFLNCSETTLRAWFQVIEANYHSSNAYHNSTHAADVLHATAFFLGKERVKGSLDQLDEVAALIAATVHDVDHPGRTNSFLCNAGSELAVLYNDTAVLESHHTALAFQLTVKDTKCNIFKNIDRNHYRTLRQAIIDMVLATEMTKHFEHVNKFVNSINKPMAAEIEGSDCECNPAGKNFPENQILIKRMMIKCADVANPCRPLDLCIEWAGRISEEYFAQTDEEKRQGLPVVMPVFDRNTCSIPKSQISFIDYFITDMFDAWDAFAHLPALMQHLADNYKHWKTLDDLKCKSLRLPSDS

SEQ ID NO: 140 - protein, 279 aa, Homo sapiens
LNCSETTLRAWFQVIEANYHSSNAYHNSTHAADVLHATAFFLGKERVKGSLDQLDEVAALIAATVHDVDHPGRTNSFLCNAGSELAVLYNDTAVLESHHTALAFQLTVKDTKCNIFKNIDRNHYRTLRQAIIDMVLATEMTKHFEHVNKFVNSINKPMAAEIEGSDCECNPAGKNFPENQILIKRMMIKCADVANPCRPLDLCIEWAGRISEEYFAQTDEEKRQGLPVVMPVFDRNTCSIPKSQISFIDYFITDMFDAWDAFAHLPALMQHLADNYKHW

SEQ ID NO: 141 - protein, 593 aa, Homo sapiens
MGSGSSSYRPKAIYLDIDGRIQKVIFSKYCNSSDIMDLFCIATGLPRNTTISLLTTDDAMVSIDPTMPANSERTPYKVRPVAIKQLSAGVEDKRTTSRGQSAERPLRDRRVVGLEQPRREGAFESGQVEPRPREPQGCYQEGQRIPPEREELIQSVLAQVAEQFSRAFKINELKAEVANHLAVLEKRVELEGLKVVEIEKCKSDIKKMREELAARSSRTNCPCKYSFLDNHKKLTPRRDVPTYPKYLLSPETIEALRKPTFDVWLWEPNEMLSCLEHMYHDLGLVRDFSINPVTLRRWLFCVHDNYRNNPFHNFRHCFCVAQMMYSMVWLCSLQEKFSQTDILILMTAAICHDLDHPGYNNTYQINARTELAVRYNDISPLENHHCAVAFQILAEPECNIFSNIPPDGFKQIRQGMITLILATDMARHAEIMDSFKEKMENFDYSNEEHMTLLKMILIKCCDISNEVRPMEVAEPWVDCLLEEYFMQSDREKSEGLPVAPFMDRDKVTKATAQIGFIKFVLIPMFETVTKLFPMVEEIMLQPLWESRDRYEELKRIDDAMKELQKKTDSLTSGATEKSRERSRDVKNSEGDCA

SEQ ID NO: 142 - protein, 263 aa, Homo sapiens
FSINPVTLRRWLFCVHDNYRNNPFHNFRHCFCVAQMMYSMVWLCSLQEKFSQTDILILMTAAICHDLDHPGYNNTYQINARTELAVRYNDISPLENHHCAVAFQILAEPECNIFSNIPPDGFKQIRQGMITLILATDMARHAEIMDSFKEKMENFDYSNEEHMTLLKMILIKCCDISNEVRPMEVAEPWVDCLLEEYFMQSDREKSEGLPVAPFMDRDKVTKATAQIGFIKFVLIPMFETVTKLFPMVEEIMLQPLWESRDRY

SEQ ID NO: 143 - protein, 779 aa, Homo sapiens
MRIEERKSQHLTGLTDEKVKAYLSLHPQVLDEFVSESVSAETVEKWLKRKNNKSEDESAPKEVSRYQDTNMQGVVYELNSYIEQRLDTGGDNQLLLYELSSIIKIATKADGFALYFLGECNNSLCIFTPPGIKEGKPRLIPAGPITQGTTVSAYVAKSRKTLLVEDILGDERFPRGTGLESGTRIQSVLCLPIVTAIGDLIGILELYRHWGKEAFCLSHQEVATANLAWASVAIHQVQVCRGLAKQTELNDFLLDVSKTYFDNIVAIDSLLEHIMIYAKNLVNADRCALFQVDHKNKELYSDLFDIGEEKEGKPVFKKTKEIRFSIEKGIAGQVARTGEVLNIPDAYADPRFNREVDLYTGYTTRNILCMPIVSRGSVIGVVQMVNKISGSAFSKTDENNFKMFAVFCALALHCANMYHRIRHSECIYRVTMEKLSYHSICTSEEWQGLMQFTLPVRLCKEIELFHFDIGPFENMWPGIFVYMVHRSCGTSCFELEKLCRFIMSVKKNYRRVPYHNWKHAVTVAHCMYAILQNNHTLFTDLERKGLLIACLCHDLDHRGFSNSYLQKFDHPLAALYSTSTMEQHHFSQTVSILQLEGHNIFSTLSSSEYEQVLEIIRKAIIATDLALYFGNRKQLEEMYQTGSLNLNNQSHRDRVIGLMMTACDLCSVTKLWPVTKLTANDIYAEFWAEGDEMKKLGIQPIPMMDRDKKDEVPQGQLGFYNAVAIPCYTTLTQILPPTEPLLKACRDNLSQWEKVIRGEETATWISSPSVAQKAAASED

SEQ ID NO: 144 - protein, 302 aa, Homo sapiens
CKEIELFHFDIGPFENMWPGIFVYMVHRSCGTSCFELEKLCRFIMSVKKNYRRVPYHNWKHAVTVAHCMYAILQNNHTLFTDLERKGLLIACLCHDLDHRGFSNSYLQKFDHPLAALYSTSTMEQHHFSQTVSILQLEGHNIFSTLSSSEYEQVLEIIRKAIIATDLALYFGNRKQLEEMYQTGSLNLNNQSHRDRVIGLMMTACDLCSVTKLWPVTKLTANDIYAEFWAEGDEMKKLGIQPIPMMDRDKKDEVPQGQLGFYNAVAIPCYTTLTQILPPTEPLLKACRDNLSQWEKVIRGEE

SEQ ID NO: 145 - protein, 933 aa, Homo sapiens
MAASRLDFGEVETFLDRHPELFEDYLMRKGKQEMVEKWLQRHSQGQGALGPRPSLAGTSSLAHSTCRGGSSVGGGTGPNGSAHSQPLPGGGDCGGVPLSPSWAGGSRGDGNLQRRASQKELRKSFARSKAIHVNRTYDEQVTSRAQEPLSSVRRRALLRKASSLPPTTAHILSALLESRVNLPRYPPTAIDYKCHLKKHNERQFFLELVKDISNDLDLTSLSYKILIFVCLMVDADRCSLFLVEGAAAGKKTLVSKFFDVHAGTPLLPCSSTENSNEVQVPWGKGIIGYVGEHGETVNIPDAYQDRRFNDEIDKLTGYKTKSLLCMPIRSSDGEIIGVAQAINKIPEGAPFTEDDEKVMQMYLPFCGIAISNAQLFAASRKEYERSRALLEVVNDLFEEQTDLEKIVKKIMHRAQTLLKCERCSVLLLEDIESPVVKFTKSFELMSPKCSADAENSFKESMEKSSYSDWLINNSIAELVASTGLPVNISDAYQDPRFDAEADQISGFHIRSVLCVPIWNSNHQIIGVAQVLNRLDGKPFDDADQRLFEAFVIFCGLGINNTIMYDQVKKSWAKQSVALDVLSYHATCSKAEVDKFKAANIPLVSELAIDDIHFDDFSLDVDAMITAALRMFMELGMVQKFKIDYETLCRWLLTVRKNYRMVLYHNWRHAFNVCQLMFAMLTTAGFQDILTEVEILAVIVGCLCHDLDHRGTNNAFQAKSGSALAQLYGTSATLEHHHFNHAVMILQSEGHNIFANLSSKEYSDLMQLLKQSILATDLTLYFERRTEFFELVSKGEYDWNIKNHRDIFRSMLMTACDLGAVTKPWEISRQVAELVTSEFFEQGDRERLELKLTPSAIFDRNRKDELPRLQLEWIDSICMPLYQALVKVNVKLKPMLDSVATNRSKWEELHQKRLLASTASSSPASVMVAKEDRN

SEQ ID NO: 146 - protein, 266 aa, Homo sapiens
FKIDYETLCRWLLTVRKNYRMVLYHNWRHAFNVCQLMFAMLTTAGFQDILTEVEILAVIVGCLCHDLDHRGTNNAFQAKSGSALAQLYGTSATLEHHHFNHAVMILQSEGHNIFANLSSKEYSDLMQLLKQSILATDLTLYFERRTEFFELVSKGEYDWNIKNHRDIFRSMLMTACDLGAVTKPWEISRQVAELVTSEFFEQGDRERLELKLTPSAIFDRNRKDELPRLQLEWIDSICMPLYQALVKVNVKLKPMLDSVATNRSKW

SEQ ID NO: 147 - protein, 833 aa, Homo sapiens
MLPFGDKTREMVNAWFAERVHTIPVCKEGIRGHTESCSCPLQQSPRADNSAPGTPTRKISASEFDRPLRPIVVKDSEGTVSFLSDSEKKEQMPLTPPRFDHDEGDQCSRLLELVKDISSHLDVTALCHKIFLHIHGLISADRYSLFLVCEDSSNDKFLISRLFDVAEGSTLEEVSNNCIRLEWNKGIVGHVAALGEPLNIKDAYEDPRFNAEVDQITGYKTQSILCMPIKNHREEVVGVAQAINKKSGNGGTFTEKDEKDFAAYLAFCGIVLHNAQLYETSLLENKRNQVLLDLASLIFEEQQSLEVILKKIAATIISFMQVQKCTIFIVDEDCSDSFSSVFHMECEELEKSSDTLTREHDANKINYMYAQYVKNTMEPLNIPDVSKDKRFPWTTENTGNVNQQCIRSLLCTPIKNGKKNKVIGVCQLVNKMEENTGKVKPFNRNDEQFLEAFVIFCGLGIQNTQMYEAVERAMAKQMVTLEVLSYHASAAEEETRELQSLAAAVVPSAQTLKITDFSFSDFELSDLETALCTIRMFTDLNLVQNFQMKHEVLCRWILSVKKNYRKNVAYHNWRHAFNTAQCMFAALKAGKIQNKLTDLEILALLIAALSHDLDHRGVNNSYIQRSEHPLAQLYCHSIMEHHHFDQCLMILNSPGNQILSGLSIEEYKTTLKIIKQAILATDLALYIKRRGEFFELIRKNQFNLEDPHQKELFLAMLMTACDLSAITKPWPIQQRIAELVATEFFDQGDRERKELNIEPTDLMNREKKNKIPSMQVGFIDAICLQLYEALTHVSEDCFPLLDGCRKNRQKWQALAEQQEKMLINGESGQAKRN

SEQ ID NO: 148 - DNA, 6836 bp, Homo sapiens
tggttctgagtcgccgacctcacctcacctcacctgcgcgcgttgttgcccctacggagcctcctggagtccaggatcggcggagttcgaaaacgaacttcccacgtttgctatgttgccctttggagacaaaacaagagaaatggtcaatgcatggtttgctgagagagttcacaccatccctgtgtgcaaggaaggtatcagaggccacaccgaatcttgctcttgtcccttgcagcagagtcctcgtgcagataacagtgcccctggaacaccaaccaggaaaatctctgcctctgaatttgaccggcctcttagacccattgttgtcaaggattctgagggaactgtgagcttcctctctgactcagaaaagaaggaacagatgcctctaacccctccaaggtttgatcatgatgaaggggaccagtgctcaagactcttggaattagtgaaggatatttctagtcatttggatgtcacagccttatgtcacaaaattttcttgcatatccatggactgatatctgctgaccgctattccctgttccttgtctgtgaagacagctccaatgacaagtttcttatcagccgcctctttgatgttgctgaaggttcaacactggaagaagtttcaaataactgtatccgcttagaatggaacaaaggcattgtgggacatgtggcagcgcttggtgagcccttgaacatcaaagatgcatatgaggatcctcggttcaatgcagaagttgaccaaattacaggctacaagacacaaagcattctttgtatgccaattaagaatcatagggaagaggttgttggtgtagcccaggccatcaacaagaaatcaggaaacggtgggacatttactgaaaaagatgaaaaggactttgctgcttatttggcattttgtggtattgttcttcataatgctcagctctatgagacttcactgctggagaacaagagaaatcaggtgctgcttgaccttgctagtttaatttttgaagaacaacaatcattagaagtaattttgaagaaaatagctgccactattatctctttcatgcaagtgcagaaatgcaccattttcatagtggatgaagattgctccgattctttttctagtgtgtttcacatggagtgtgaggaattagaaaaatcatctgatacattaacaagggaacatgatgcaaacaaaatcaattacatgtatgctcagtatgtcaaaaatactatggaaccacttaatatcccagatgtcagtaaggataaaagatttccctggacaactgaaaatacaggaaatgtaaaccagcagtgcattagaagtttgctttgtacacctataaaaaatggaaagaagaataaagttataggggtttgccaacttgttaataagatggaggagaatactggcaaggttaagcctttcaaccgaaatgacgaacagtttctggaagcttttgtcatcttttgtggcttggggatccagaacacgcagatgtatgaagcagtggagagagccatggccaagcaaatggtcacattggaggttctgtcgtatcatgcttcagcagcagaggaagaaacaagagagctacagtcgttagcggctgctgtggtgccatctgcccagacccttaaaattactgactttagcttcagtgactttgagctgtctgatctggaaacagcactgtgtacaattcggatgtttactgacctcaaccttgtgcagaacttccagatgaaacatgaggttctttgcagatggattttaagtgttaagaagaattatcggaagaatgttgcctatcataattggagacatgcctttaatacagctcagtgcatgtttgctgctctaaaagcaggcaaaattcagaacaagctgactgacctggagatacttgcattgctgattgctgcactaagccacgatttggatcaccgtggtgtgaataactcttacatacagcgaagtgaacatccacttgcccagctttactgccattcaatcatggaacaccatcattttgaccagtgcctgatgattcttaatagtccaggcaatcagattctcagtggcctctccattgaagaatataagaccacgttgaaaataatcaagcaagctattttagctacagacctagcactgtacattaagaggcgaggagaattttttgaacttataagaaaaaatcaattcaatttggaagatcctcatcaaaaggagttgtttttggcaatgctgatgacagcttgtgatctttctgcaattacaaaaccctggcctattcaacaacggatagcagaacttgtagcaactgaattttttgatcaaggagacagagagagaaaagaactcaacatagaacccactgatctaatgaacagggagaagaaaaacaaaatcccaagtatgcaagttgggttcatagatgccatctgcttgcaactgtatgaggccctgacccacgtgtcagaggactgtttccctttgctagatggctgcagaaagaacaggcagaaatggcaggcccttgcagaacagcaggagaagatgctgattaatggggaaagcggccaggccaagcggaactgagtggcctatttcatgcagagttgaagtttacagagatggtgtgttctgcaatatgcctagtttcttacacactgtctgtatagtgtctgtatttggtatatactttgccactgctgtatttttatttttgcacaacttttgagagtatagcatgaatgtttttagaggactattacatattttttgtatatttgttttatgctactgaactgaaaggatcaacaacatccactgttagcacattgataaaagcattgtttgtgatatttcgtgtactgcaaagtgtatgcagtattcttgcactgaggtttttttgcttggggattattttaaataattggtttttgtgttttctgaattaccattttttcaagaatgtttggaatctttcctttttcaaaagtaggttaggagcaaattatcatacattctgtgacatttaaagcctttataggatagtgaaaaatgctggctgagtggattttaagagaaataattgtatttgttaacagtgtctttttttaaaaagttaaggcactctgaaacaaatggaaagtcctatgaaactgtattgtaaagaaaacattatttaattgatatgctgttttgtgagagaacaggcaagacagaactttgtcacttcagtgcagtacatttttctgaaagctacccataaaatcactttcatctcacctacctgatgcaaagcaggtgaaaccttaggagatgatccagtcactgacttgattgagggataagtgtgatttagaaatggaatggccttggatgtctatcagtgaagaaaaatgttctgttagaagatctctctaagagtttttttccttctgagcttccttttcaaaataaaagtgacaattgtagcattgacttgaagtgagacatggttatagataagagagtacaaaatgactctttttcctgtcaattgaaatttaaagaaaagttttaattatataaatagcaaagggctattgccaatactagggtcaaaaatgaatttgagggaacagtgggtaagaaactttatgcctgaataacatttagcagtattgtgattgaaaaattgccatattttgatgtataggacaagtcaactgagatccagagaatcctggatgtgaatgctaaacactggcccttaactcacattcaatgtattttcttcccataacatttagtatagttaatattttcttagaatttgagcccatttaagtggattaatattctacatgtgtgcccctaaagacacatttactcaatattggagaagtagataatgaattaagcaactggtctaggaaaggaaaatttgtttcaaatatgcaggaatgtttggatttggggagagtagaaggagagatttgcttgatttgttaacttctacctccaacccacaaaaaagatatttgatctgagtttctatcactaatttggatagaaaatttctaagggacatggtaatccagcattctcaaggacctttcgccaaaatgtgttttccatctatgtcccgattcccctaaattttgcctaaaattcagtatgttccttaagtttttaaaattctgagtgtgtacaaatatcttgacataatgcagttttatttttatcattctggtaaaaaaacaaaaaatagaagcaaaacacattgtattgccattattttgtatttggtaaaggttaatctaggaagttaccaactgtttaatgctatatgtattgtatacttgtattttcaggatattttattttttttgccatacagataaaatttgtaaggttgcccctttgtggcactggtgtgtaaaatacacagactatcactaaaataatagttatatatacatacaggtgtatacttatgcatgcatacataaatccttagtatagaaaaattgcataaagaatagcaatctttaataaacctttttattacattgtgatttagcagttatgctaaaatatgtacttatgctttagtagtttgtttggtcccctctagtatgtgtcactgagaaattttttaaagacatggtagatcgtgtttagaggctttgtatgtgtgtcattttaataagcaagaagatatatttagattagaaatggtttggtctgcctttgaatattgtttattttactttactagttgagacattaaaggaagctgggcaatgcctattttatttctttgttggatattttagttcatacaaagcagagtacttctttagggctggttaattggttcaaataatttttaatttcctttctagtatcttctcaagttggaaaaatatacatacagtcctccttcaccttactctgtatttatattacccataactagcaagaagttcttgttctagattttttgtttgtttagttataacagagtaacataccatttaattacaatttttagccagaaaagtccccactattttactaacttgttaaaagatatctatataattgcctggccttatatttttcagtagattagaccgtgccaatcacaatcctgggtggatttgtgtaagtcacttaacctctgtgtgcctaaacaagttgtgcttttttaaaaggagttatgtttgggcaaagcctttgtcttcaagcagaatgtcacagaaggcagctactttataagccccaatgggccatggagaccactgtcagaaatgggatattagtctagagagaaggtgatctattcccacatgtcatttctaatgttgagtttccatgactgaacaaagagaatatatttattcagcttcacttgcagatcactagtgaatgtgagatttagagctcattgagtatattgcttcaaggtacaaacccaggatgatgatgttgtcaccactgtctcttaattttgaataatagtttcctttaataggagtattagagataagaaagtatatgaaaatatactggaaatattggattcttggagaaaactgttcagtcacagatatattcttgcctagcagtgaagtgcctttattttcagcatagcaaataaatattagacctgttccaatttgatctacaatttttttctgtgtttttcaccagattgtactcctaaaacttaacaggccatcacaagcaattgtcttttgtttacaagattgatttaatatgagaggatacaaaatgtcatcgttatcctctcttatgaacaactgtagtcaaaataaggtggcacaatttaattgttttgtatcagaaatacactgacccaccttttattgagtcctgccacatgttaggtaccgtgctctgctgtggagacagagcagtgaccccaaggagctcacggtccctgaaggaggtgctagagaagagacttagcttctgatactgccaatttaatgtgagaacatggggtatactgcatcatttccattttcatcaataacatatgttttatgcaccttctttacctgaaacttactaagaatctaccagtaaacaaacatcctgtctttttgcaagtatgaatcacttaacctgctgatagttgaagaacactttaggagttttgtattcttgtatatagtttattttttccatgtgctagccaggtaaagattacacagttcttctggactgttaaattgtgcatggttttggaccccttctgctctactacagagagtgaagaagaaagtattaaagctcactttaccattccatatacttactaaaagcctgtgtaaacatgtcttaatgaatgttgttgaaagcaatgtaaatagttgaaaatataaatttatattacagtttaagaaaaccttatgaggcatcactagccactgttaatatctatttgtattcttataccttttcaatatatttgaacaaatatagtttctggcactatttttatactaggaaaaggagttactatgtatattatgcttagcttttaaggcattttaaataaccatgaatgttgatttcattactttcctttcctccatcacgagagtcatttcagatgactctttcatgacaaaatcactttaaaggaacacttacctccgattcctgtataaagtcatgagatggtcaaggtggttttccattgtgcaaattcttcacctgtcagtggtttcctcattttgccatgctttgtaaaaataaaaagaatgatcaagtaggtatgaaaaaaaaaaaaaaaaaa

SEQ ID NO: 149 - protein, 823 aa, Homo sapiens
MVNAWFAERVHTIPVCKEGIRGHTESCSCPLQQSPRADNSAPGTPTRKISASEFDRPLRPIVVKDSEGTVSFLSDSEKKEQMPLTPPRFDHDEGDQCSRLLELVKDISSHLDVTALCHKIFLHIHGLISADRYSLFLVCEDSSNDKFLISRLFDVAEGSTLEEVSNNCIRLEWNKGIVGHVAALGEPLNIKDAYEDPRFNAEVDQITGYKTQSILCMPIKNHREEVVGVAQAINKKSGNGGTFTEKDEKDFAAYLAFCGIVLHNAQLYETSLLENKRNQVLLDLASLIFEEQQSLEVILKKIAATIISFMQVQKCTIFIVDEDCSDSFSSVFHMECEELEKSSDTLTREHDANKINYMYAQYVKNTMEPLNIPDVSKDKRFPWTTENTGNVNQQCIRSLLCTPIKNGKKNKVIGVCQLVNKMEENTGKVKPFNRNDEQFLEAFVIFCGLGIQNTQMYEAVERAMAKQMVTLEVLSYHASAAEEETRELQSLAAAVVPSAQTLKITDFSFSDFELSDLETALCTIRMFTDLNLVQNFQMKHEVLCRWILSVKKNYRKNVAYHNWRHAFNTAQCMFAALKAGKIQNKLTDLEILALLIAALSHDLDHRGVNNSYIQRSEHPLAQLYCHSIMEHHHFDQCLMILNSPGNQILSGLSIEEYKTTLKIIKQAILATDLALYIKRRGEFFELIRKNQFNLEDPHQKELFLAMLMTACDLSAITKPWPIQQRIAELVATEFFDQGDRERKELNIEPTDLMNREKKNKIPSMQVGFIDAICLQLYEALTHVSEDCFPLLDGCRKNRQKWQALAEQQEKMLINGESGQAKRN

SEQ ID NO: 150 - DNA, 6788 bp, Homo sapiens
cctcgccctggccctggctgggcggggaagctggggtgagggacgagtccacgggacagcccaaaggcaacatgacggaaccttgccaaaagaaatggtcaatgcatggtttgctgagagagttcacaccatccctgtgtgcaaggaaggtatcagaggccacaccgaatcttgctcttgtcccttgcagcagagtcctcgtgcagataacagtgcccctggaacaccaaccaggaaaatctctgcctctgaatttgaccggcctcttagacccattgttgtcaaggattctgagggaactgtgagcttcctctctgactcagaaaagaaggaacagatgcctctaacccctccaaggtttgatcatgatgaaggggaccagtgctcaagactcttggaattagtgaaggatatttctagtcatttggatgtcacagccttatgtcacaaaattttcttgcatatccatggactgatatctgctgaccgctattccctgttccttgtctgtgaagacagctccaatgacaagtttcttatcagccgcctctttgatgttgctgaaggttcaacactggaagaagtttcaaataactgtatccgcttagaatggaacaaaggcattgtgggacatgtggcagcgcttggtgagcccttgaacatcaaagatgcatatgaggatcctcggttcaatgcagaagttgaccaaattacaggctacaagacacaaagcattctttgtatgccaattaagaatcatagggaagaggttgttggtgtagcccaggccatcaacaagaaatcaggaaacggtgggacatttactgaaaaagatgaaaaggactttgctgcttatttggcattttgtggtattgttcttcataatgctcagctctatgagacttcactgctggagaacaagagaaatcaggtgctgcttgaccttgctagtttaatttttgaagaacaacaatcattagaagtaattttgaagaaaatagctgccactattatctctttcatgcaagtgcagaaatgcaccattttcatagtggatgaagattgctccgattctttttctagtgtgtttcacatggagtgtgaggaattagaaaaatcatctgatacattaacaagggaacatgatgcaaacaaaatcaattacatgtatgctcagtatgtcaaaaatactatggaaccacttaatatcccagatgtcagtaaggataaaagatttccctggacaactgaaaatacaggaaatgtaaaccagcagtgcattagaagtttgctttgtacacctataaaaaatggaaagaagaataaagttataggggtttgccaacttgttaataagatggaggagaatactggcaaggttaagcctttcaaccgaaatgacgaacagtttctggaagcttttgtcatcttttgtggcttggggatccagaacacgcagatgtatgaagcagtggagagagccatggccaagcaaatggtcacattggaggttctgtcgtatcatgcttcagcagcagaggaagaaacaagagagctacagtcgttagcggctgctgtggtgccatctgcccagacccttaaaattactgactttagcttcagtgactttgagctgtctgatctggaaacagcactgtgtacaattcggatgtttactgacctcaaccttgtgcagaacttccagatgaaacatgaggttctttgcagatggattttaagtgttaagaagaattatcggaagaatgttgcctatcataattggagacatgcctttaatacagctcagtgcatgtttgctgctctaaaagcaggcaaaattcagaacaagctgactgacctggagatacttgcattgctgattgctgcactaagccacgatttggatcaccgtggtgtgaataactcttacatacagcgaagtgaacatccacttgcccagctttactgccattcaatcatggaacaccatcattttgaccagtgcctgatgattcttaatagtccaggcaatcagattctcagtggcctctccattgaagaatataagaccacgttgaaaataatcaagcaagctattttagctacagacctagcactgtacattaagaggcgaggagaattttttgaacttataagaaaaaatcaattcaatttggaagatcctcatcaaaaggagttgtttttggcaatgctgatgacagcttgtgatctttctgcaattacaaaaccctggcctattcaacaacggatagcagaacttgtagcaactgaattttttgatcaaggagacagagagagaaaagaactcaacatagaacccactgatctaatgaacagggagaagaaaaacaaaatcccaagtatgcaagttgggttcatagatgccatctgcttgcaactgtatgaggccctgacccacgtgtcagaggactgtttccctttgctagatggctgcagaaagaacaggcagaaatggcaggcccttgcagaacagcaggagaagatgctgattaatggggaaagcggccaggccaagcggaactgagtggcctatttcatgcagagttgaagtttacagagatggtgtgttctgcaatatgcctagtttcttacacactgtctgtatagtgtctgtatttggtatatactttgccactgctgtatttttatttttgcacaacttttgagagtatagcatgaatgtttttagaggactattacatattttttgtatatttgttttatgctactgaactgaaaggatcaacaacatccactgttagcacattgataaaagcattgtttgtgatatttcgtgtactgcaaagtgtatgcagtattcttgcactgaggtttttttgcttggggattattttaaataattggtttttgtgttttctgaattaccattttttcaagaatgtttggaatctttcctttttcaaaagtaggttaggagcaaattatcatacattctgtgacatttaaagcctttataggatagtgaaaaatgctggctgagtggattttaagagaaataattgtatttgttaacagtgtctttttttaaaaagttaaggcactctgaaacaaatggaaagtcctatgaaactgtattgtaaagaaaacattatttaattgatatgctgttttgtgagagaacaggcaagacagaactttgtcacttcagtgcagtacatttttctgaaagctacccataaaatcactttcatctcacctacctgatgcaaagcaggtgaaaccttaggagatgatccagtcactgacttgattgagggataagtgtgatttagaaatggaatggccttggatgtctatcagtgaagaaaaatgttctgttagaagatctctctaagagtttttttccttctgagcttccttttcaaaataaaagtgacaattgtagcattgacttgaagtgagacatggttatagataagagagtacaaaatgactctttttcctgtcaattgaaatttaaagaaaagttttaattatataaatagcaaagggctattgccaatactagggtcaaaaatgaatttgagggaacagtgggtaagaaactttatgcctgaataacatttagcagtattgtgattgaaaaattgccatattttgatgtataggacaagtcaactgagatccagagaatcctggatgtgaatgctaaacactggcccttaactcacattcaatgtattttcttcccataacatttagtatagttaatattttcttagaatttgagcccatttaagtggattaatattctacatgtgtgcccctaaagacacatttactcaatattggagaagtagataatgaattaagcaactggtctaggaaaggaaaatttgtttcaaatatgcaggaatgtttggatttggggagagtagaaggagagatttgcttgatttgttaacttctacctccaacccacaaaaaagatatttgatctgagtttctatcactaatttggatagaaaatttctaagggacatggtaatccagcattctcaaggacctttcgccaaaatgtgttttccatctatgtcccgattcccctaaattttgcctaaaattcagtatgttccttaagtttttaaaattctgagtgtgtacaaatatcttgacataatgcagttttatttttatcattctggtaaaaaaacaaaaaatagaagcaaaacacattgtattgccattattttgtatttggtaaaggttaatctaggaagttaccaactgtttaatgctatatgtattgtatacttgtattttcaggatattttattttttttgccatacagataaaatttgtaaggttgcccctttgtggcactggtgtgtaaaatacacagactatcactaaaataatagttatatatacatacaggtgtatacttatgcatgcatacataaatccttagtatagaaaaattgcataaagaatagcaatctttaataaacctttttattacattgtgatttagcagttatgctaaaatatgtacttatgctttagtagtttgtttggtcccctctagtatgtgtcactgagaaattttttaaagacatggtagatcgtgtttagaggctttgtatgtgtgtcattttaataagcaagaagatatatttagattagaaatggtttggtctgcctttgaatattgtttattttactttactagttgagacattaaaggaagctgggcaatgcctattttatttctttgttggatattttagttcatacaaagcagagtacttctttagggctggttaattggttcaaataatttttaatttcctttctagtatcttctcaagttggaaaaatatacatacagtcctccttcaccttactctgtatttatattacccataactagcaagaagttcttgttctagattttttgtttgtttagttataacagagtaacataccatttaattacaatttttagccagaaaagtccccactattttactaacttgttaaaagatatctatataattgcctggccttatatttttcagtagattagaccgtgccaatcacaatcctgggtggatttgtgtaagtcacttaacctctgtgtgcctaaacaagttgtgcttttttaaaaggagttatgtttgggcaaagcctttgtcttcaagcagaatgtcacagaaggcagctactttataagccccaatgggccatggagaccactgtcagaaatgggatattagtctagagagaaggtgatctattcccacatgtcatttctaatgttgagtttccatgactgaacaaagagaatatatttattcagcttcacttgcagatcactagtgaatgtgagatttagagctcattgagtatattgcttcaaggtacaaacccaggatgatgatgttgtcaccactgtctcttaattttgaataatagtttcctttaataggagtattagagataagaaagtatatgaaaatatactggaaatattggattcttggagaaaactgttcagtcacagatatattcttgcctagcagtgaagtgcctttattttcagcatagcaaataaatattagacctgttccaatttgatctacaatttttttctgtgtttttcaccagattgtactcctaaaacttaacaggccatcacaagcaattgtcttttgtttacaagattgatttaatatgagaggatacaaaatgtcatcgttatcctctcttatgaacaactgtagtcaaaataaggtggcacaatttaattgttttgtatcagaaatacactgacccaccttttattgagtcctgccacatgttaggtaccgtgctctgctgtggagacagagcagtgaccccaaggagctcacggtccctgaaggaggtgctagagaagagacttagcttctgatactgccaatttaatgtgagaacatggggtatactgcatcatttccattttcatcaataacatatgttttatgcaccttctttacctgaaacttactaagaatctaccagtaaacaaacatcctgtctttttgcaagtatgaatcacttaacctgctgatagttgaagaacactttaggagttttgtattcttgtatatagtttattttttccatgtgctagccaggtaaagattacacagttcttctggactgttaaattgtgcatggttttggaccccttctgctctactacagagagtgaagaagaaagtattaaagctcactttaccattccatatacttactaaaagcctgtgtaaacatgtcttaatgaatgttgttgaaagcaatgtaaatagttgaaaatataaatttatattacagtttaagaaaaccttatgaggcatcactagccactgttaatatctatttgtattcttataccttttcaatatatttgaacaaatatagtttctggcactatttttatactaggaaaaggagttactatgtatattatgcttagcttttaaggcattttaaataaccatgaatgttgatttcattactttcctttcctccatcacgagagtcatttcagatgactctttcatgacaaaatcactttaaaggaacacttacctccgattcctgtataaagtcatgagatggtcaaggtggttttccattgtgcaaattcttcacctgtcagtggtttcctcattttgccatgctttgtaaaaataaaaagaatgatcaagtaggtatgaaaaaaaaaaaaaaaaaa

SEQ ID NO: 151 - protein, 247 aa, Artificial Sequence
  source: /note="Description of Artificial Sequence: Synthetic Destabilizing Domain (DD)"
MKHEVLCRWILSVKKNYRKNVAYHNWRHAFNTAQCMFAALKAGKIQNKLTDLEILALLIAALSHDLDHRGVNNSYIQRSEHPLAQLYCHSIMEHHHFDQCLMILNSPGNQILSGLSIEEYKTTLKIIKQAILATDLALYIKRGGEFFELIRKNQFNLEDPHQKELFLAMLMTACDLSAITKPWPIQQRIAELVATEFFDQGDRERKELNIEPTDLMNREKKNKIPSMQVGFIDAICLQLYEALTHVS

SEQ ID NO: 152 - protein, 247 aa, Artificial Sequence
  source: /note="Description of Artificial Sequence: Synthetic Destabilizing Domain (DD)"
MKHEVLCRWILSVKKNYRKNVAYHNWRHAFNTAQCMFAALKAGKIQNKLTDLEILALLIAALSHDLDHRGVNNSYIQRSEHPLAQLYCHSIMEHHHFDQCLMILNSPGNQILSGLSIEEYKTTLKIIKQAILATDLALYIKRAGEFFELIRKNQFNLEDPHQKELFLAMLMTACDLSAITKPWPIQQRIAELVATEFFDQGDRERKELNIEPTDLMNREKKNKIPSMQVGFIDAICLQLYEALTHVS

SEQ ID NO: 153 - protein, 247 aa, Artificial Sequence
  source: /note="Description of Artificial Sequence: Synthetic Destabilizing Domain (DD)"
MKHEVLCRWILSVKKNYRKNVAYHNWRHAFNTAQCMFAALKAGKIQNKLTDLEILALLIAALSHDLDHRGVNNSYIQRSEHPLAQLYCHSIMEHHHFDQCLMILNSPGNQILSGLSIEEYKTTLKIIKQAILATDLALYIKRVGEFFELIRKNQFNLEDPHQKELFLAMLMTACDLSAITKPWPIQQRIAELVATEFFDQGDRERKELNIEPTDLMNREKKNKIPSMQVGFIDAICLQLYEALTHVS

SEQ ID NO: 154 - protein, 247 aa, Artificial Sequence
  source: /note="Description of Artificial Sequence: Synthetic Destabilizing Domain (DD)"
MKHEVLCRWILSVKKNYRKNVAYHNWRHAFNTAQCMFAALKAGKIQNKLTDLEILALLIAALSHDLDHRGVNNSYIQRSEHPLAQLYCHSIMEHHHFDQCLMILNSPGNQILSGLSIEEYKTTLKIIKQAILATDLALYIKRIGEFFELIRKNQFNLEDPHQKELFLAMLMTACDLSAITKPWPIQQRIAELVATEFFDQGDRERKELNIEPTDLMNREKKNKIPSMQVGFIDAICLQLYEALTHVS

SEQ ID NO: 155 - protein, 247 aa, Artificial Sequence
  source: /note="Description of Artificial Sequence: Synthetic Destabilizing Domain (DD)"
MKHEVLCRWILSVKKNYRKNVAYHNWRHAFNTAQCMFAALKAGKIQNKLTDLEILALLIAALSHDLDHRGVNNSYIQRSEHPLAQLYCHSIMEHHHFDQCLMILNSPGNQILSGLSIEEYKTTLKIIKQAILATDLALYIKRPGEFFELIRKNQFNLEDPHQKELFLAMLMTACDLSAITKPWPIQQRIAELVATEFFDQGDRERKELNIEPTDLMNREKKNKIPSMQVGFIDAICLQLYEALTHVS

SEQ ID NO: 156 - protein, 247 aa, Artificial Sequence
  source: /note="Description of Artificial Sequence: Synthetic Destabilizing Domain (DD)"
MKHEVLCRWILSVKKNYRKNVAYHNWRHAFNTAQCMFAALKAGKIQNKLTDLEILALLIAALSHDLDHRGVNNSYIQRSEHPLAQLYCHSIMEHHHFDQCLMILNSPGNQILSGLSIEEYKTTLKIIKQAILATDLALYIKRFGEFFELIRKNQFNLEDPHQKELFLAMLMTACDLSAITKPWPIQQRIAELVATEFFDQGDRERKELNIEPTDLMNREKKNKIPSMQVGFIDAICLQLYEALTHVS

SEQ ID NO: 157 - protein, 247 aa, Artificial Sequence
  source: /note="Description of Artificial Sequence: Synthetic Destabilizing Domain (DD)"
MKHEVLCRWILSVKKNYRKNVAYHNWRHAFNTAQCMFAALKAGKIQNKLTDLEILALLIAALSHDLDHRGVNNSYIQRSEHPLAQLYCHSIMEHHHFDQCLMILNSPGNQILSGLSIEEYKTTLKIIKQAILATDLALYIKRWGEFFELIRKNQFNLEDPHQKELFLAMLMTACDLSAITKPWPIQQRIAELVATEFFDQGDRERKELNIEPTDLMNREKKNKIPSMQVGFIDAICLQLYEALTHVS

SEQ ID NO: 158 - protein, 247 aa, Artificial Sequence
  source: /note="Description of Artificial Sequence: Synthetic Destabilizing Domain (DD)"
MKHEVLCRWILSVKKNYRKNVAYHNWRHAFNTAQCMFAALKAGKIQNKLTDLEILALLIAALSHDLDHRGVNNSYIQRSEHPLAQLYCHSIMEHHHFDQCLMILNSPGNQILSGLSIEEYKTTLKIIKQAILATDLALYIKRYGEFFELIRKNQFNLEDPHQKELFLAMLMTACDLSAITKPWPIQQRIAELVATEFFDQGDRERKELNIEPTDLMNREKKNKIPSMQVGFIDAICLQLYEALTHVS

SEQ ID NO: 159 - protein, 247 aa, Artificial Sequence
  source: /note="Description of Artificial Sequence: Synthetic Destabilizing Domain (DD)"
MKHEVLCRWILSVKKNYRKNVAYHNWRHAFNTAQCMFAALKAGKIQNKLTDLEILALLIAALSHDLDHRGVNNSYIQRSEHPLAQLYCHSIMEHHHFDQCLMILNSPGNQILSGLSIEEYKTTLKIIKQAILATDLALYIKRHGEFFELIRKNQFNLEDPHQKELFLAMLMTACDLSAITKPWPIQQRIAELVATEFFDQGDRERKELNIEPTDLMNREKKNKIPSMQVGFIDAICLQLYEALTHVS

SEQ ID NO: 160 - protein, 247 aa, Artificial Sequence
  source: /note="Description of Artificial Sequence: Synthetic Destabilizing Domain (DD)"
MKHEVLCRWILSVKKNYRKNVAYHNWRHAFNTAQCMFAALKAGKIQNKLTDLEILALLIAALSHDLDHRGVNNSYIQRSEHPLAQLYCHSIMEHHHFDQCLMILNSPGNQILSGLSIEEYKTTLKIIKQAILATDLALYIKRSGEFFELIRKNQFNLEDPHQKELFLAMLMTACDLSAITKPWPIQQRIAELVATEFFDQGDRERKELNIEPTDLMNREKKNKIPSMQVGFIDAICLQLYEALTHVS

SEQ ID NO: 161 - protein, 247 aa, Artificial Sequence
  source: /note="Description of Artificial Sequence: Synthetic Destabilizing Domain (DD)"
MKHEVLCRWILSVKKNYRKNVAYHNWRHAFNTAQCMFAALKAGKIQNKLTDLEILALLIAALSHDLDHRGVNNSYIQRSEHPLAQLYCHSIMEHHHFDQCLMILNSPGNQILSGLSIEEYKTTLKIIKQAILATDLALYIKRTGEFFELIRKNQFNLEDPHQKELFLAMLMTACDLSAITKPWPIQQRIAELVATEFFDQGDRERKELNIEPTDLMNREKKNKIPSMQVGFIDAICLQLYEALTHVS

SEQ ID NO: 162 - protein, 247 aa, Artificial Sequence
  source: /note="Description of Artificial Sequence: Synthetic Destabilizing Domain (DD)"
MKHEVLCRWILSVKKNYRKNVAYHNWRHAFNTAQCMFAALKAGKIQNKLTDLEILALLIAALSHDLDHRGVNNSYIQRSEHPLAQLYCHSIMEHHHFDQCLMILNSPGNQILSGLSIEEYKTTLKIIKQAILATDLALYIKRDGEFFELIRKNQFNLEDPHQKELFLAMLMTACDLSAITKPWPIQQRIAELVATEFFDQGDRERKELNIEPTDLMNREKKNKIPSMQVGFIDAICLQLYEALTHVS

SEQ ID NO: 163 - protein, 247 aa, Artificial Sequence
  source: /note="Description of Artificial Sequence: Synthetic Destabilizing Domain (DD)"
MKHEVLCRWILSVKKNYRKNVAYHNWRHAFNTAQCMFAALKAGKIQNKLTDLEILALLIAALSHDLDHRGVNNSYIQRSEHPLAQLYCHSIMEHHHFDQCLMILNSPGNQILSGLSIEEYKTTLKIIKQAILATDLALYIKREGEFFELIRKNQFNLEDPHQKELFLAMLMTACDLSAITKPWPIQQRIAELVATEFFDQGDRERKELNIEPTDLMNREKKNKIPSMQVGFIDAICLQLYEALTHVS

SEQ ID NO: 164 - protein, 247 aa, Artificial Sequence
  source: /note="Description of Artificial Sequence: Synthetic Destabilizing Domain (DD)"
MKHEVLCRWILSVKKNYRKNVAYHNWRHAFNTAQCMFAALKAGKIQNKLTDLEILALLIAALSHDLDHRGVNNSYIQRSEHPLAQLYCHSIMEHHHFDQCLMILNSPGNQILSGLSIEEYKTTLKIIKQAILATDLALYIKRQGEFFELIRKNQFNLEDPHQKELFLAMLMTACDLSAITKPWPIQQRIAELVATEFFDQGDRERKELNIEPTDLMNREKKNKIPSMQVGFIDAICLQLYEALTHVS

SEQ ID NO: 165 - protein, 247 aa, Artificial Sequence
  source: /note="Description of Artificial Sequence: Synthetic Destabilizing Domain (DD)"
MKHEVLCRWILSVKKNYRKNVAYHNWRHAFNTAQCMFAALKAGKIQNKLTDLEILALLIAALSHDLDHRGVNNSYIQRSEHPLAQLYCHSIMEHHHFDQCLMILNSPGNQILSGLSIEEYKTTLKIIKQAILATDLALYIKRNGEFFELIRKNQFNLEDPHQKELFLAMLMTACDLSAITKPWPIQQRIAELVATEFFDQGDRERKELNIEPTDLMNREKKNKIPSMQVGFIDAICLQLYEALTHVS

SEQ ID NO: 166 - protein, 247 aa, Artificial Sequence
  source: /note="Description of Artificial Sequence: Synthetic Destabilizing Domain (DD)"
MKHEVLCRWILSVKKNYRKNVAYHNWRHAFNTAQCMFAALKAGKIQNKLTDLEILALLIAALSHDLDHRGVNNSYIQRSEHPLAQLYCHSIMEHHHFDQCLMILNSPGNQILSGLSIEEYKTTLKIIKQAILATDLALYIKRMGEFFELIRKNQFNLEDPHQKELFLAMLMTACDLSAITKPWPIQQRIAELVATEFFDQGDRERKELNIEPTDLMNREKKNKIPSMQVGFIDAICLQLYEALTHVS

SEQ ID NO: 167 - protein, 247 aa, Artificial Sequence
  source: /note="Description of Artificial Sequence: Synthetic Destabilizing Domain (DD)"
MKHEVLCRWILSVKKNYRKNVAYHNWRHAFNTAQCMFAALKAGKIQNKLTDLEILALLIAALSHDLDHRGVNNSYIQRSEHPLAQLYCHSIMEHHHFDQCLMILNSPGNQILSGLSIEEYKTTLKIIKQAILATDLALYIKRCGEFFELIRKNQFNLEDPHQKELFLAMLMTACDLSAITKPWPIQQRIAELVATEFFDQGDRERKELNIEPTDLMNREKKNKIPSMQVGFIDAICLQLYEALTHVS

SEQ ID NO: 168 - protein, 247 aa, Artificial Sequence
  source: /note="Description of Artificial Sequence: Synthetic Destabilizing Domain (DD)"
MKHEVLCRWILSVKKNYRKNVAYHNWRHAFNTAQCMFAALKAGKIQNKLTDLEILALLIAALSHDLDHRGVNNSYIQRSEHPLAQLYCHSIMEHHHFDQCLMILNSPGNQILSGLSIEEYKTTLKIIKQAILATDLALYIKRKGEFFELIRKNQFNLEDPHQKELFLAMLMTACDLSAITKPWPIQQRIAELVATEFFDQGDRERKELNIEPTDLMNREKKNKIPSMQVGFIDAICLQLYEALTHVS

SEQ ID NO: 169 - DNA, 741 bp, Artificial Sequence
  source: /note="Description of Artificial Sequence: Synthetic Destabilizing Domain (DD)"
atgaaacatgaggttctttgcagatggattttaagtgttaagaagaattatcggaagaatgttgcctatcataattggagacatgcctttaatacagctcagtgcatgtttgctgctctaaaagcaggcaaaattcagaacaagctgactgacctggagatacttgcattgctgattgctgcactaagccacgatttggatcaccgtggtgtgaataactcttacatacagcgaagtgaacatccacttgcccagctttactgccattcaatcatggaacaccatcattttgaccagtgcctgatgattcttaatagtccaggcaatcagattctcagtggcctctccattgaagaatataagaccacgttgaaaataatcaagcaagctattttagctacagacctagcactgtacattaagcggggcggagaattttttgaacttataagaaaaaatcaattcaatttggaagatcctcatcaaaaggagttgtttttggcaatgctgatgacagcttgtgatctttctgcaattacaaaaccctggcctattcaacaacggatagcagaacttgtagcaactgaattttttgatcaaggagacagagagagaaaagaactcaacatagaacccactgatctaatgaacagggagaagaaaaacaaaatcccaagtatgcaagttgggttcatagatgccatctgcttgcaactgtatgaggccctgacccacgtgtca

SEQ ID NO: 170 - DNA, 741 bp, Artificial Sequence
  source: /note="Description of Artificial Sequence: Synthetic Destabilizing Domain (DD)"
atgaaacatgaggttctttgcagatggattttaagtgttaagaagaattatcggaagaatgttgcctatcataattggagacatgcctttaatacagctcagtgcatgtttgctgctctaaaagcaggcaaaattcagaacaagctgactgacctggagatacttgcattgctgattgctgcactaagccacgatttggatcaccgtggtgtgaataactcttacatacagcgaagtgaacatccacttgcccagctttactgccattcaatcatggaacaccatcattttgaccagtgcctgatgattcttaatagtccaggcaatcagattctcagtggcctctccattgaagaatataagaccacgttgaaaataatcaagcaagctattttagctacagacctagcactgtacattaagcgggccggagaattttttgaacttataagaaaaaatcaattcaatttggaagatcctcatcaaaaggagttgtttttggcaatgctgatgacagcttgtgatctttctgcaattacaaaaccctggcctattcaacaacggatagcagaacttgtagcaactgaattttttgatcaaggagacagagagagaaaagaactcaacatagaacccactgatctaatgaacagggagaagaaaaacaaaatcccaagtatgcaagttgggttcatagatgccatctgcttgcaactgtatgaggccctgacccacgtgtca

SEQ ID NO: 171 - DNA, 741 bp, Artificial Sequence
  source: /note="Description of Artificial Sequence: Synthetic Destabilizing Domain (DD)"
atgaaacatgaggttctttgcagatggattttaagtgttaagaagaattatcggaagaatgttgcctatcataattggagacatgcctttaatacagctcagtgcatgtttgctgctctaaaagcaggcaaaattcagaacaagctgactgacctggagatacttgcattgctgattgctgcactaagccacgatttggatcaccgtggtgtgaataactcttacatacagcgaagtgaacatccacttgcccagctttactgccattcaatcatggaacaccatcattttgaccagtgcctgatgattcttaatagtccaggcaatcagattctcagtggcctctccattgaagaatataagaccacgttgaaaataatcaagcaagctattttagctacagacctagcactgtacattaagcgggtgggagaattttttgaacttataagaaaaaatcaattcaatttggaagatcctcatcaaaaggagttgtttttggcaatgctgatgacagcttgtgatctttctgcaattacaaaaccctggcctattcaacaacggatagcagaacttgtagcaactgaattttttgatcaaggagacagagagagaaaagaactcaacatagaacccactgatctaatgaacagggagaagaaaaacaaaatcccaagtatgcaagttgggttcatagatgccatctgcttgcaactgtatgaggccctgacccacgtgtca

SEQ ID NO: 172 - DNA, 741 bp, Artificial Sequence
  source: /note="Description of Artificial Sequence: Synthetic Destabilizing Domain (DD)"
atgaaacatgaggttctttgcagatggattttaagtgttaagaagaattatcggaagaatgttgcctatcataattggagacatgcctttaatacagctcagtgcatgtttgctgctctaaaagcaggcaaaattcagaacaagctgactgacctggagatacttgcattgctgattgctgcactaagccacgatttggatcaccgtggtgtgaataactcttacatacagcgaagtgaacatccacttgcccagctttactgccattcaatcatggaacaccatcattttgaccagtgcctgatgattcttaatagtccaggcaatcagattctcagtggcctctccattgaagaatataagaccacgttgaaaataatcaagcaagctattttagctacagacctagcactgtacattaagcggatcggagaattttttgaacttataagaaaaaatcaattcaatttggaagatcctcatcaaaaggagttgtttttggcaatgctgatgacagcttgtgatctttctgcaattacaaaaccctggcctattcaacaacggatagcagaacttgtagcaactgaattttttgatcaaggagacagagagagaaaagaactcaacatagaacccactgatctaatgaacagggagaagaaaaacaaaatcccaagtatgcaagttgggttcatagatgccatctgcttgcaactgtatgaggccctgacccacgtgtca

SEQ ID NO: 173 - DNA, 741 bp, Artificial Sequence
  source: /note="Description of Artificial Sequence: Synthetic Destabilizing Domain (DD)"
atgaaacatgaggttctttgcagatggattttaagtgttaagaagaattatcggaagaatgttgcctatcataattggagacatgcctttaatacagctcagtgcatgtttgctgctctaaaagcaggcaaaattcagaacaagctgactgacctggagatacttgcattgctgattgctgcactaagccacgatttggatcaccgtggtgtgaataactcttacatacagcgaagtgaacatccacttgcccagctttactgccattcaatcatggaacaccatcattttgaccagtgcctgatgattcttaatagtccaggcaatcagattctcagtggcctctccattgaagaatataagaccacgttgaaaataatcaagcaagctattttagctacagacctagcactgtacattaagcggcccggagaattttttgaacttataagaaaaaatcaattcaatttggaagatcctcatcaaaaggagttgtttttggcaatgctgatgacagcttgtgatctttctgcaattacaaaaccctggcctattcaacaacggatagcagaacttgtagcaactgaattttttgatcaaggagacagagagagaaaagaactcaacatagaacccactgatctaatgaacagggagaagaaaaacaaaatcccaagtatgcaagttgggttcatagatgccatctgcttgcaactgtatgaggccctgacccacgtgtca

SEQ ID NO: 174 - DNA, 741 bp, Artificial Sequence
  source: /note="Description of Artificial Sequence: Synthetic Destabilizing Domain (DD)"
atgaaacatgaggttctttgcagatggattttaagtgttaagaagaattatcggaagaatgttgcctatcataattggagacatgcctttaatacagctcagtgcatgtttgctgctctaaaagcaggcaaaattcagaacaagctgactgacctggagatacttgcattgctgattgctgcactaagccacgatttggatcaccgtggtgtgaataactcttacatacagcgaagtgaacatccacttgcccagctttactgccattcaatcatggaacaccatcattttgaccagtgcctgatgattcttaatagtccaggcaatcagattctcagtggcctctccattgaagaatataagaccacgttgaaaataatcaagcaagctattttagctacagacctagcactgtacattaagcggttcggagaattttttgaacttataagaaaaaatcaattcaatttggaagatcctcatcaaaaggagttgtttttggcaatgctgatgacagcttgtgatctttctgcaattacaaaaccctggcctattcaacaacggatagcagaacttgtagcaactgaattttttgatcaaggagacagagagagaaaagaactcaacatagaacccactgatctaatgaacagggagaagaaaaacaaaatcccaagtatgcaagttgggttcatagatgccatctgcttgcaactgtatgaggccctgacccacgtgtca

SEQ ID NO: 175 - DNA, 741 bp, Artificial Sequence
  source: /note="Description of Artificial Sequence: Synthetic Destabilizing Domain (DD)"
atgaaacatgaggttctttgcagatggattttaagtgttaagaagaattatcggaagaatgttgcctatcataattggagacatgcctttaatacagctcagtgcatgtttgctgctctaaaagcaggcaaaattcagaacaagctgactgacctggagatacttgcattgctgattgctgcactaagccacgatttggatcaccgtggtgtgaataactcttacatacagcgaagtgaacatccacttgcccagctttactgccattcaatcatggaacaccatcattttgaccagtgcctgatgattcttaatagtccaggcaatcagattctcagtggcctctccattgaagaatataagaccacgttgaaaataatcaagcaagctattttagctacagacctagcactgtacattaagcggtggggagaattttttgaacttataagaaaaaatcaattcaatttggaagatcctcatcaaaaggagttgtttttggcaatgctgatgacagcttgtgatctttctgcaattacaaaaccctggcctattcaacaacggatagcagaacttgtagcaactgaattttttgatcaaggagacagagagagaaaagaactcaacatagaacccactgatctaatgaacagggagaagaaaaacaaaatcccaagtatgcaagttgggttcatagatgccatctgcttgcaactgtatgaggccctgacccacgtgtca

SEQ ID NO: 176 - DNA, 741 bp, Artificial Sequence
  source: /note="Description of Artificial Sequence: Synthetic Destabilizing Domain (DD)"
atgaaacatgaggttctttgcagatggattttaagtgttaagaagaattatcggaagaatgttgcctatcataattggagacatgcctttaatacagctcagtgcatgtttgctgctctaaaagcaggcaaaattcagaacaagctgactgacctggagatacttgcattgctgattgctgcactaagccacgatttggatcaccgtggtgtgaataactcttacatacagcgaagtgaacatccacttgcccagctttactgccattcaatcatggaacaccatcattttgaccagtgcctgatgattcttaatagtccaggcaatcagattctcagtggcctctccattgaagaatataagaccacgttgaaaataatcaagcaagctattttagctacagacctagcactgtacattaagcggtacggagaattttttgaacttataagaaaaaatcaattcaatttggaagatcctcatcaaaaggagttgtttttggcaatgctgatgacagcttgtgatctttctgcaattacaaaaccctggcctattcaacaacggatagcagaacttgtagcaactgaattttttgatcaaggagacagagagagaaaagaactcaacatagaacccactgatctaatgaacagggagaagaaaaacaaaatcccaagtatgcaagttgggttcatagatgccatctgcttgcaactgtatgaggccctgacccacgtgtca

SEQ ID NO: 177 - DNA, 741 bp, Artificial Sequence
  source: /note="Description of Artificial Sequence: Synthetic Destabilizing Domain (DD)"
atgaaacatgaggttctttgcagatggattttaagtgttaagaagaattatcggaagaatgttgcctatcataattggagacatgcctttaatacagctcagtgcatgtttgctgctctaaaagcaggcaaaattcagaacaagctgactgacctggagatacttgcattgctgattgctgcactaagccacgatttggatcaccgtggtgtgaataactcttacatacagcgaagtgaacatccacttgcccagctttactgccattcaatcatggaacaccatcattttgaccagtgcctgatgattcttaatagtccaggcaatcagattctcagtggcctctccattgaagaatataagaccacgttgaaaataatcaagcaagctattttagctacagacctagcactgtacattaagcggcacggagaattttttgaacttataagaaaaaatcaattcaatttggaagatcctcatcaaaaggagttgtttttggcaatgctgatgacagcttgtgatctttctgcaattacaaaaccctggcctattcaacaacggatagcagaacttgtagcaactgaattttttgatcaaggagacagagagagaaaagaactcaacatagaacccactgatctaatgaacagggagaagaaaaacaaaatcccaagtatgcaagttgggttcatagatgccatctgcttgcaactgtatgaggccctgacccacgtgtca

SEQ ID NO: 178 - DNA, 741 bp, Artificial Sequence
  source: /note="Description of Artificial Sequence: Synthetic Destabilizing Domain (DD)"
atgaaacatgaggttctttgcagatggattttaagtgttaagaagaattatcggaagaatgttgcctatcataattggagacatgcctttaatacagctcagtgcatgtttgctgctctaaaagcaggcaaaattcagaacaagctgactgacctggagatacttgcattgctgattgctgcactaagccacgatttggatcaccgtggtgtgaataactcttacatacagcgaagtgaacatccacttgcccagctttactgccattcaatcatggaacaccatcattttgaccagtgcctgatgattcttaatagtccaggcaatcagattctcagtggcctctccattgaagaatataagaccacgttgaaaataatcaagcaagctattttagctacagacctagcactgtacattaagcggagcggagaattttttgaacttataagaaaaaatcaattcaatttggaagatcctcatcaaaaggagttgtttttggcaatgctgatgacagcttgtgatctttctgcaattacaaaaccctggcctattcaacaacggatagcagaacttgtagcaactgaattttttgatcaaggagacagagagagaaaagaactcaacatagaacccactgatctaatgaacagggagaagaaaaacaaaatcccaagtatgcaagttgggttcatagatgccatctgcttgcaactgtatgaggccctgacccacgtgtca

SEQ ID NO: 179 - DNA, 741 bp, Artificial Sequence
  source: /note="Description of Artificial Sequence: Synthetic Destabilizing Domain (DD)"
atgaaacatgaggttctttgcagatggattttaagtgttaagaagaattatcggaagaatgttgcctatcataattggagacatgcctttaatacagctcagtgcatgtttgctgctctaaaagcaggcaaaattcagaacaagctgactgacctggagatacttgcattgctgattgctgcactaagccacgatttggatcaccgtggtgtgaataactcttacatacagcgaagtgaacatccacttgcccagctttactgccattcaatcatggaacaccatcattttgaccagtgcctgatgattcttaatagtccaggcaatcagattctcagtggcctctccattgaagaatataagaccacgttgaaaataatcaagcaagctattttagctacagacctagcactgtacattaagcggaccggagaattttttgaacttataagaaaaaatcaattcaatttggaagatcctcatcaaaaggagttgtttttggcaatgctgatgacagcttgtgatctttctgcaattacaaaaccctggcctattcaacaacggatagcagaacttgtagcaactgaattttttgatcaaggagacagagagagaaaagaactcaacatagaacccactgatctaatgaacagggagaagaaaaacaaaatcccaagtatgcaagttgggttcatagatgccatctgcttgcaactgtatgaggccctgacccacgtgtca

SEQ ID NO: 180 - DNA, 741 bp, Artificial Sequence
  source: /note="Description of Artificial Sequence: Synthetic Destabilizing Domain (DD)"
atgaaacatgaggttctttgcagatggattttaagtgttaagaagaattatcggaagaatgttgcctatcataattggagacatgcctttaatacagctcagtgcatgtttgctgctctaaaagcaggcaaaattcagaacaagctgactgacctggagatacttgcattgctgattgctgcactaagccacgatttggatcaccgtggtgtgaataactcttacatacagcgaagtgaacatccacttgcccagctttactgccattcaatcatggaacaccatcattttgaccagtgcctgatgattcttaatagtccaggcaatcagattctcagtggcctctccattgaagaatataagaccacgttgaaaataatcaagcaagctattttagctacagacctagcactgtacattaagcgggacggagaattttttgaacttataagaaaaaatcaattcaatttggaagatcctcatcaaaaggagttgtttttggcaatgctgatgacagcttgtgatctttctgcaattacaaaaccctggcctattcaacaacggatagcagaacttgtagcaactgaattttttgatcaaggagacagagagagaaaagaactcaacatagaacccactgatctaatgaacagggagaagaaaaacaaaatcccaagtatgcaagttgggttcatagatgccatctgcttgcaactgtatgaggccctgacccacgtgtca

SEQ ID NO: 181 - DNA, 741 bp, Artificial Sequence
  source: /note="Description of Artificial Sequence: Synthetic Destabilizing Domain (DD)"
atgaaacatgaggttctttgcagatggattttaagtgttaagaagaattatcggaagaatgttgcctatcataattggagacatgcctttaatacagctcagtgcatgtttgctgctctaaaagcaggcaaaattcagaacaagctgactgacctggagatacttgcattgctgattgctgcactaagccacgatttggatcaccgtggtgtgaataactcttacatacagcgaagtgaacatccacttgcccagctttactgccattcaatcatggaacaccatcattttgaccagtgcctgatgattcttaatagtccaggcaatcagattctcagtggcctctccattgaagaatataagaccacgttgaaaataatcaagcaagctattttagctacagacctagcactgtacattaagcgggagggagaattttttgaacttataagaaaaaatcaattcaatttggaagatcctcatcaaaaggagttgtttttggcaatgctgatgacagcttgtgatctttctgcaattacaaaaccctggcctattcaacaacggatagcagaacttgtagcaactgaattttttgatcaaggagacagagagagaaaagaactcaacatagaacccactgatctaatgaacagggagaagaaaaacaaaatcccaagtatgcaagttgggttcatagatgccatctgcttgcaactgtatgaggccctgacccacgtgtca

SEQ ID NO: 182 - DNA, 741 bp, Artificial Sequence
  source: /note="Description of Artificial Sequence: Synthetic Destabilizing Domain (DD)"
atgaaacatgaggttctttgcagatggattttaagtgttaagaagaattatcggaagaatgttgcctatcataattggagacatgcctttaatacagctcagtgcatgtttgctgctctaaaagcaggcaaaattcagaacaagctgactgacctggagatacttgcattgctgattgctgcactaagccacgatttggatcaccgtggtgtgaataactcttacatacagcgaagtgaacatccacttgcccagctttactgccattcaatcatggaacaccatcattttgaccagtgcctgatgattcttaatagtccaggcaatcagattctcagtggcctctccattgaagaatataagaccacgttgaaaataatcaagcaagctattttagctacagacctagcactgtacattaagcggcagggagaattttttgaacttataagaaaaaatcaattcaatttggaagatcctcatcaaaaggagttgtttttggcaatgctgatgacagcttgtgatctttctgcaattacaaaaccctggcctattcaacaacggatagcagaacttgtagcaactgaattttttgatcaaggagacagagagagaaaagaactcaacatagaacccactgatctaatgaacagggagaagaaaaacaaaatcccaagtatgcaagttgggttcatagatgccatctgcttgcaactgtatgaggccctgacccacgtgtca

SEQ ID NO: 183 - DNA, 741 bp, Artificial Sequence
  source: /note="Description of Artificial Sequence: Synthetic Destabilizing Domain (DD)"
atgaaacatgaggttctttgcagatggattttaagtgttaagaagaattatcggaagaatgttgcctatcataattggagacatgcctttaatacagctcagtgcatgtttgctgctctaaaagcaggcaaaattcagaacaagctgactgacctggagatacttgcattgctgattgctgcactaagccacgatttggatcaccgtggtgtgaataactcttacatacagcgaagtgaacatccacttgcccagctttactgccattcaatcatggaacaccatcattttgaccagtgcctgatgattcttaatagtccaggcaatcagattctcagtggcctctccattgaagaatataagaccacgttgaaaataatcaagcaagctattttagctacagacctagcactgtacattaagcggaacggagaattttttgaacttataagaaaaaatcaattcaatttggaagatcctcatcaaaaggagttgtttttggcaatgctgatgacagcttgtgatctttctgcaattacaaaaccctggcctattcaacaacggatagcagaacttgtagcaactgaattttttgatcaaggagacagagagagaaaagaactcaacatagaacccactgatctaatgaacagggagaagaaaaacaaaatcccaagtatgcaagttgggttcatagatgccatctgcttgcaactgtatgaggccctgacccacgtgtca

SEQ ID NO: 184 - DNA, 741 bp, Artificial Sequence
  source: /note="Description of Artificial Sequence: Synthetic Destabilizing Domain (DD)"
atgaaacatgaggttctttgcagatggattttaagtgttaagaagaattatcggaagaatgttgcctatcataattggagacatgcctttaatacagctcagtgcatgtttgctgctctaaaagcaggcaaaattcagaacaagctgactgacctggagatacttgcattgctgattgctgcactaagccacgatttggatcaccgtggtgtgaataactcttacatacagcgaagtgaacatccacttgcccagctttactgccattcaatcatggaacaccatcattttgaccagtgcctgatgattcttaatagtccaggcaatcagattctcagtggcctctccattgaagaatataagaccacgttgaaaataatcaagcaagctattttagctacagacctagcactgtacattaagcggatgggagaattttttgaacttataagaaaaaatcaattcaatttggaagatcctcatcaaaaggagttgtttttggcaatgctgatgacagcttgtgatctttctgcaattacaaaaccctggcctattcaacaacggatagcagaacttgtagcaactgaattttttgatcaaggagacagagagagaaaagaactcaacatagaacccactgatctaatgaacagggagaagaaaaacaaaatcccaagtatgcaagttgggttcatagatgccatctgcttgcaactgtatgaggccctgacccacgtgtca

SEQ ID NO: 185 - DNA, 741 bp, Artificial Sequence
  source: /note="Description of Artificial Sequence: Synthetic Destabilizing Domain (DD)"
atgaaacatgaggttctttgcagatggattttaagtgttaagaagaattatcggaagaatgttgcctatcataattggagacatgcctttaatacagctcagtgcatgtttgctgctctaaaagcaggcaaaattcagaacaagctgactgacctggagatacttgcattgctgattgctgcactaagccacgatttggatcaccgtggtgtgaataactcttacatacagcgaagtgaacatccacttgcccagctttactgccattcaatcatggaacaccatcattttgaccagtgcctgatgattcttaatagtccaggcaatcagattctcagtggcctctccattgaagaatataagaccacgttgaaaataatcaagcaagctattttagctacagacctagcactgtacattaagcggtgcggagaattttttgaacttataagaaaaaatcaattcaatttggaagatcctcatcaaaaggagttgtttttggcaatgctgatgacagcttgtgatctttctgcaattacaaaaccctggcctattcaacaacggatagcagaacttgtagcaactgaattttttgatcaaggagacagagagagaaaagaactcaacatagaacccactgatctaatgaacagggagaagaaaaacaaaatcccaagtatgcaagttgggttcatagatgccatctgcttgcaactgtatgaggccctgacccacgtgtca

SEQ ID NO: 186 - DNA, 741 bp, Artificial Sequence
  source: /note="Description of Artificial Sequence: Synthetic Destabilizing Domain (DD)"
atgaaacatgaggttctttgcagatggattttaagtgttaagaagaattatcggaagaatgttgcctatcataattggagacatgcctttaatacagctcagtgcatgtttgctgctctaaaagcaggcaaaattcagaacaagctgactgacctggagatacttgcattgctgattgctgcactaagccacgatttggatcaccgtggtgtgaataactcttacatacagcgaagtgaacatccacttgcccagctttactgccattcaatcatggaacaccatcattttgaccagtgcctgatgattcttaatagtccaggcaatcagattctcagtggcctctccattgaagaatataagaccacgttgaaaataatcaagcaagctattttagctacagacctagcactgtacattaagcggaagggagaattttttgaacttataagaaaaaatcaattcaatttggaagatcctcatcaaaaggagttgtttttggcaatgctgatgacagcttgtgatctttctgcaattacaaaaccctggcctattcaacaacggatagcagaacttgtagcaactgaattttttgatcaaggagacagagagagaaaagaactcaacatagaacccactgatctaatgaacagggagaagaaaaacaaaatcccaagtatgcaagttgggttcatagatgccatctgcttgcaactgtatgaggccctgacccacgtgtca

SEQ ID NO: 187 - protein, 487 aa, Artificial Sequence
  source: /note="Description of Artificial Sequence: Synthetic polypeptide"
MKHEVLCRWILSVKKNYRKNVAYHNWRHAFNTAQCMFAALKAGKIQNKLTDLEILALLIAALSHDLDHRGVNNSYIQRSEHPLAQLYCHSIMEHHHFDQCLMILNSPGNQILSGLSIEEYKTTLKIIKQAILATDLALYIKRGGEFFELIRKNQFNLEDPHQKELFLAMLMTACDLSAITKPWPIQQRIAELVATEFFDQGDRERKELNIEPTDLMNREKKNKIPSMQVGFIDAICLQLYEALTHVSSGVSKGAELFTGIVPILIELNGDVNGHKFSVSGEGEGDATYGKLTLKFICTTGKLPVPWPTLVTTLSYGVQCFSRYPDHMKQHDFFKSAMPEGYIQERTIFFEDDGNYKSRAEVKFEGDTLVNRIELTGTDFKEDGNILGNKMEYNYNAHNVYIMTDKAKNGIKVNFKIRHNIEDGSVQLADHYQQNTPIGDGPVLLPDNHYLSTQSALSKDPNEKRDHMIYFGFVTAAAITHGMDELYK

SEQ ID NO: 188 - protein, 487 aa, Artificial Sequence
  source: /note="Description of Artificial Sequence: Synthetic polypeptide"
MKHEVLCRWILSVKKNYRKNVAYHNWRHAFNTAQCMFAALKAGKIQNKLTDLEILALLIAALSHDLDHRGVNNSYIQRSEHPLAQLYCHSIMEHHHFDQCLMILNSPGNQILSGLSIEEYKTTLKIIKQAILATDLALYIKRAGEFFELIRKNQFNLEDPHQKELFLAMLMTACDLSAITKPWPIQQRIAELVATEFFDQGDRERKELNIEPTDLMNREKKNKIPSMQVGFIDAICLQLYEALTHVSSGVSKGAELFTGIVPILIELNGDVNGHKFSVSGEGEGDATYGKLTLKFICTTGKLPVPWPTLVTTLSYGVQCFSRYPDHMKQHDFFKSAMPEGYIQERTIFFEDDGNYKSRAEVKFEGDTLVNRIELTGTDFKEDGNILGNKMEYNYNAHNVYIMTDKAKNGIKVNFKIRHNIEDGSVQLADHYQQNTPIGDGPVLLPDNHYLSTQSALSKDPNEKRDHMIYFGFVTAAAITHGMDELYK

SEQ ID NO: 189 - protein, 487 aa, Artificial Sequence
  source: /note="Description of Artificial Sequence: Synthetic polypeptide"
MKHEVLCRWILSVKKNYRKNVAYHNWRHAFNTAQCMFAALKAGKIQNKLTDLEILALLIAALSHDLDHRGVNNSYIQRSEHPLAQLYCHSIMEHHHFDQCLMILNSPGNQILSGLSIEEYKTTLKIIKQAILATDLALYIKRVGEFFELIRKNQFNLEDPHQKELFLAMLMTACDLSAITKPWPIQQRIAELVATEFFDQGDRERKELNIEPTDLMNREKKNKIPSMQVGFIDAICLQLYEALTHVSSGVSKGAELFTGIVPILIELNGDVNGHKFSVSGEGEGDATYGKLTLKFICTTGKLPVPWPTLVTTLSYGVQCFSRYPDHMKQHDFFKSAMPEGYIQERTIFFEDDGNYKSRAEVKFEGDTLVNRIELTGTDFKEDGNILGNKMEYNYNAHNVYIMTDKAKNGIKVNFKIRHNIEDGSVQLADHYQQNTPIGDGPVLLPDNHYLSTQSALSKDPNEKRDHMIYFGFVTAAAITHGMDELYK

SEQ ID NO: 190 - protein, 487 aa, Artificial Sequence
  source: /note="Description of Artificial Sequence: Synthetic polypeptide"
MKHEVLCRWILSVKKNYRKNVAYHNWRHAFNTAQCMFAALKAGKIQNKLTDLEILALLIAALSHDLDHRGVNNSYIQRSEHPLAQLYCHSIMEHHHFDQCLMILNSPGNQILSGLSIEEYKTTLKIIKQAILATDLALYIKRIGEFFELIRKNQFNLEDPHQKELFLAMLMTACDLSAITKPWPIQQRIAELVATEFFDQGDRERKELNIEPTDLMNREKKNKIPSMQVGFIDAICLQLYEALTHVSSGVSKGAELFTGIVPILIELNGDVNGHKFSVSGEGEGDATYGKLTLKFICTTGKLPVPWPTLVTTLSYGVQCFSRYPDHMKQHDFFKSAMPEGYIQERTIFFEDDGNYKSRAEVKFEGDTLVNRIELTGTDFKEDGNILGNKMEYNYNAHNVYIMTDKAKNGIKVNFKIRHNIEDGSVQLADHYQQNTPIGDGPVLLPDNHYLSTQSALSKDPNEKRDHMIYFGFVTAAAITHGMDELYK

SEQ ID NO: 191 - protein, 487 aa, Artificial Sequence
  source: /note="Description of Artificial Sequence: Synthetic polypeptide"
MKHEVLCRWILSVKKNYRKNVAYHNWRHAFNTAQCMFAALKAGKIQNKLTDLEILALLIAALSHDLDHRGVNNSYIQRSEHPLAQLYCHSIMEHHHFDQCLMILNSPGNQILSGLSIEEYKTTLKIIKQAILATDLALYIKRPGEFFELIRKNQFNLEDPHQKELFLAMLMTACDLSAITKPWPIQQRIAELVATEFFDQGDRERKELNIEPTDLMNREKKNKIPSMQVGFIDAICLQLYEALTHVSSGVSKGAELFTGIVPILIELNGDVNGHKFSVSGEGEGDATYGKLTLKFICTTGKLPVPWPTLVTTLSYGVQCFSRYPDHMKQHDFFKSAMPEGYIQERTIFFEDDGNYKSRAEVKFEGDTLVNRIELTGTDFKEDGNILGNKMEYNYNAHNVYIMTDKAKNGIKVNFKIRHNIEDGSVQLADHYQQNTPIGDGPVLLPDNHYLSTQSALSKDPNEKRDHMIYFGFVTAAAITHGMDELYK

SEQ ID NO: 192 - protein, 487 aa, Artificial Sequence
  source: /note="Description of Artificial Sequence: Synthetic polypeptide"
MKHEVLCRWILSVKKNYRKNVAYHNWRHAFNTAQCMFAALKAGKIQNKLTDLEILALLIAALSHDLDHRGVNNSYIQRSEHPLAQLYCHSIMEHHHFDQCLMILNSPGNQILSGLSIEEYKTTLKIIKQAILATDLALYIKRFGEFFELIRKNQFNLEDPHQKELFLAMLMTACDLSAITKPWPIQQRIAELVATEFFDQGDRERKELNIEPTDLMNREKKNKIPSMQVGFIDAICLQLYEALTHVSSGVSKGAELFTGIVPILIELNGDVNGHKFSVSGEGEGDATYGKLTLKFICTTGKLPVPWPTLVTTLSYGVQCFSRYPDHMKQHDFFKSAMPEGYIQERTIFFEDDGNYKSRAEVKFEGDTLVNRIELTGTDFKEDGNILGNKMEYNYNAHNVYIMTDKAKNGIKVNFKIRHNIEDGSVQLADHYQQNTPIGDGPVLLPDNHYLSTQSALSKDPNEKRDHMIYFGFVTAAAITHGMDELYK

SEQ ID NO: 193 - protein, 487 aa, Artificial Sequence
  source: /note="Description of Artificial Sequence: Synthetic polypeptide"
MKHEVLCRWILSVKKNYRKNVAYHNWRHAFNTAQCMFAALKAGKIQNKLTDLEILALLIAALSHDLDHRGVNNSYIQRSEHPLAQLYCHSIMEHHHFDQCLMILNSPGNQILSGLSIEEYKTTLKIIKQAILATDLALYIKRWGEFFELIRKNQFNLEDPHQKELFLAMLMTACDLSAITKPWPIQQRIAELVATEFFDQGDRERKELNIEPTDLMNREKKNKIPSMQVGFIDAICLQLYEALTHVSSGVSKGAELFTGIVPILIELNGDVNGHKFSVSGEGEGDATYGKLTLKFICTTGKLPVPWPTLVTTLSYGVQCFSRYPDHMKQHDFFKSAMPEGYIQERTIFFEDDGNYKSRAEVKFEGDTLVNRIELTGTDFKEDGNILGNKMEYNYNAHNVYIMTDKAKNGIKVNFKIRHNIEDGSVQLADHYQQNTPIGDGPVLLPDNHYLSTQSALSKDPNEKRDHMIYFGFVTAAAITHGMDELYK

SEQ ID NO: 194 - protein, 487 aa, Artificial Sequence
  source: /note="Description of Artificial Sequence: Synthetic polypeptide"
MKHEVLCRWILSVKKNYRKNVAYHNWRHAFNTAQCMFAALKAGKIQNKLTDLEILALLIAALSHDLDHRGVNNSYIQRSEHPLAQLYCHSIMEHHHFDQCLMILNSPGNQILSGLSIEEYKTTLKIIKQAILATDLALYIKRYGEFFELIRKNQFNLEDPHQKELFLAMLMTACDLSAITKPWPIQQRIAELVATEFFDQGDRERKELNIEPTDLMNREKKNKIPSMQVGFIDAICLQLYEALTHVSSGVSKGAELFTGIVPILIELNGDVNGHKFSVSGEGEGDATYGKLTLKFICTTGKLPVPWPTLVTTLSYGVQCFSRYPDHMKQHDFFKSAMPEGYIQERTIFFEDDGNYKSRAEVKFEGDTLVNRIELTGTDFKEDGNILGNKMEYNYNAHNVYIMTDKAKNGIKVNFKIRHNIEDGSVQLADHYQQNTPIGDGPVLLPDNHYLSTQSALSKDPNEKRDHMIYFGFVTAAAITHGMDELYK

SEQ ID NO: 195 - protein, 487 aa, Artificial Sequence
  source: /note="Description of Artificial Sequence: Synthetic polypeptide"
MKHEVLCRWILSVKKNYRKNVAYHNWRHAFNTAQCMFAALKAGKIQNKLTDLEILALLIAALSHDLDHRGVNNSYIQRSEHPLAQLYCHSIMEHHHFDQCLMILNSPGNQILSGLSIEEYKTTLKIIKQAILATDLALYIKRHGEFFELIRKNQFNLEDPHQKELFLAMLMTACDLSAITKPWPIQQRIAELVATEFFDQGDRERKELNIEPTDLMNREKKNKIPSMQVGFIDAICLQLYEALTHVSSGVSKGAELFTGIVPILIELNGDVNGHKFSVSGEGEGDATYGKLTLKFICTTGKLPVPWPTLVTTLSYGVQCFSRYPDHMKQHDFFKSAMPEGYIQERTIFFEDDGNYKSRAEVKFEGDTLVNRIELTGTDFKEDGNILGNKMEYNYNAHNVYIMTDKAKNGIKVNFKIRHNIEDGSVQLADHYQQNTPIGDGPVLLPDNHYLSTQSALSKDPNEKRDHMIYFGFVTAAAITHGMDELYK

SEQ ID NO: 196 - protein, 487 aa, Artificial Sequence
  source: /note="Description of Artificial Sequence: Synthetic polypeptide"
MKHEVLCRWILSVKKNYRKNVAYHNWRHAFNTAQCMFAALKAGKIQNKLTDLEILALLIAALSHDLDHRGVNNSYIQRSEHPLAQLYCHSIMEHHHFDQCLMILNSPGNQILSGLSIEEYKTTLKIIKQAILATDLALYIKRSGEFFELIRKNQFNLEDPHQKELFLAMLMTACDLSAITKPWPIQQRIAELVATEFFDQGDRERKELNIEPTDLMNREKKNKIPSMQVGFIDAICLQLYEALTHVSSGVSKGAELFTGIVPILIELNGDVNGHKFSVSGEGEGDATYGKLTLKFICTTGKLPVPWPTLVTTLSYGVQCFSRYPDHMKQHDFFKSAMPEGYIQERTIFFEDDGNYKSRAEVKFEGDTLVNRIELTGTDFKEDGNILGNKMEYNYNAHNVYIMTDKAKNGIKVNFKIRHNIEDGSVQLADHYQQNTPIGDGPVLLPDNHYLSTQSALSKDPNEKRDHMIYFGFVTAAAITHGMDELYK

SEQ ID NO: 197 - protein, 487 aa, Artificial Sequence
  source: /note="Description of Artificial Sequence: Synthetic polypeptide"
MKHEVLCRWILSVKKNYRKNVAYHNWRHAFNTAQCMFAALKAGKIQNKLTDLEILALLIAALSHDLDHRGVNNSYIQRSEHPLAQLYCHSIMEHHHFDQCLMILNSPGNQILSGLSIEEYKTTLKIIKQAILATDLALYIKRTGEFFELIRKNQFNLEDPHQKELFLAMLMTACDLSAITKPWPIQQRIAELVATEFFDQGDRERKELNIEPTDLMNREKKNKIPSMQVGFIDAICLQLYEALTHVSSGVSKGAELFTGIVPILIELNGDVNGHKFSVSGEGEGDATYGKLTLKFICTTGKLPVPWPTLVTTLSYGVQCFSRYPDHMKQHDFFKSAMPEGYIQERTIFFEDDGNYKSRAEVKFEGDTLVNRIELTGTDFKEDGNILGNKMEYNYNAHNVYIMTDKAKNGIKVNFKIRHNIEDGSVQLADHYQQNTPIGDGPVLLPDNHYLSTQSALSKDPNEKRDHMIYFGFVTAAAITHGMDELYK

SEQ ID NO: 198 - protein, 487 aa, Artificial Sequence
  source: /note="Description of Artificial Sequence: Synthetic polypeptide"
MKHEVLCRWILSVKKNYRKNVAYHNWRHAFNTAQCMFAALKAGKIQNKLTDLEILALLIAALSHDLDHRGVNNSYIQRSEHPLAQLYCHSIMEHHHFDQCLMILNSPGNQILSGLSIEEYKTTLKIIKQAILATDLALYIKRDGEFFELIRKNQFNLEDPHQKELFLAMLMTACDLSAITKPWPIQQRIAELVATEFFDQGDRERKELNIEPTDLMNREKKNKIPSMQVGFIDAICLQLYEALTHVSSGVSKGAELFTGIVPILIELNGDVNGHKFSVSGEGEGDATYGKLTLKFICTTGKLPVPWPTLVTTLSYGVQCFSRYPDHMKQHDFFKSAMPEGYIQERTIFFEDDGNYKSRAEVKFEGDTLVNRIELTGTDFKEDGNILGNKMEYNYNAHNVYIMTDKAKNGIKVNFKIRHNIEDGSVQLADHYQQNTPIGDGPVLLPDNHYLSTQSALSKDPNEKRDHMIYFGFVTAAAITHGMDELYK

SEQ ID NO: 199 - protein, 487 aa, Artificial Sequence
  source: /note="Description of Artificial Sequence: Synthetic polypeptide"
MKHEVLCRWILSVKKNYRKNVAYHNWRHAFNTAQCMFAALKAGKIQNKLTDLEILALLIAALSHDLDHRGVNNSYIQRSEHPLAQLYCHSIMEHHHFDQCLMILNSPGNQILSGLSIEEYKTTLKIIKQAILATDLALYIKREGEFFELIRKNQFNLEDPHQKELFLAMLMTACDLSAITKPWPIQQRIAELVATEFFDQGDRERKELNIEPTDLMNREKKNKIPSMQVGFIDAICLQLYEALTHVSSGVSKGAELFTGIVPILIELNGDVNGHKFSVSGEGEGDATYGKLTLKFICTTGKLPVPWPTLVTTLSYGVQCFSRYPDHMKQHDFFKSAMPEGYIQERTIFFEDDGNYKSRAEVKFEGDTLVNRIELTGTDFKEDGNILGNKMEYNYNAHNVYIMTDKAKNGIKVNFKIRHNIEDGSVQLADHYQQNTPIGDGPVLLPDNHYLSTQSALSKDPNEKRDHMIYFGFVTAAAITHGMDELYK

SEQ ID NO: 200 - protein, 487 aa, Artificial Sequence
  source: /note="Description of Artificial Sequence: Synthetic polypeptide"
MKHEVLCRWILSVKKNYRKNVAYHNWRHAFNTAQCMFAALKAGKIQNKLTDLEILALLIAALSHDLDHRGVNNSYIQRSEHPLAQLYCHSIMEHHHFDQCLMILNSPGNQILSGLSIEEYKTTLKIIKQAILATDLALYIKRQGEFFELIRKNQFNLEDPHQKELFLAMLMTACDLSAITKPWPIQQRIAELVATEFFDQGDRERKELNIEPTDLMNREKKNKIPSMQVGFIDAICLQLYEALTHVSSGVSKGAELFTGIVPILIELNGDVNGHKFSVSGEGEGDATYGKLTLKFICTTGKLPVPWPTLVTTLSYGVQCFSRYPDHMKQHDFFKSAMPEGYIQERTIFFEDDGNYKSRAEVKFEGDTLVNRIELTGTDFKEDGNILGNKMEYNYNAHNVYIMTDKAKNGIKVNFKIRHNIEDGSVQLADHYQQNTPIGDGPVLLPDNHYLSTQSALSKDPNEKRDHMIYFGFVTAAAITHGMDELYK

SEQ ID NO: 201 - protein, 487 aa, Artificial Sequence
  source: /note="Description of Artificial Sequence: Synthetic polypeptide"
MKHEVLCRWILSVKKNYRKNVAYHNWRHAFNTAQCMFAALKAGKIQNKLTDLEILALLIAALSHDLDHRGVNNSYIQRSEHPLAQLYCHSIMEHHHFDQCLMILNSPGNQILSGLSIEEYKTTLKIIKQAILATDLALYIKRNGEFFELIRKNQFNLEDPHQKELFLAMLMTACDLSAITKPWPIQQRIAELVATEFFDQGDRERKELNIEPTDLMNREKKNKIPSMQVGFIDAICLQLYEALTHVSSGVSKGAELFTGIVPILIELNGDVNGHKFSVSGEGEGDATYGKLTLKFICTTGKLPVPWPTLVTTLSYGVQCFSRYPDHMKQHDFFKSAMPEGYIQERTIFFEDDGNYKSRAEVKFEGDTLVNRIELTGTDFKEDGNILGNKMEYNYNAHNVYIMTDKAKNGIKVNFKIRHNIEDGSVQLADHYQQNTPIGDGPVLLPDNHYLSTQSALSKDPNEKRDHMIYFGFVTAAAITHGMDELYK

SEQ ID NO: 202 - protein, 487 aa, Artificial Sequence
  source: /note="Description of Artificial Sequence: Synthetic polypeptide"
MKHEVLCRWILSVKKNYRKNVAYHNWRHAFNTAQCMFAALKAGKIQNKLTDLEILALLIAALSHDLDHRGVNNSYIQRSEHPLAQLYCHSIMEHHHFDQCLMILNSPGNQILSGLSIEEYKTTLKIIKQAILATDLALYIKRMGEFFELIRKNQFNLEDPHQKELFLAMLMTACDLSAITKPWPIQQRIAELVATEFFDQGDRERKELNIEPTDLMNREKKNKIPSMQVGFIDAICLQLYEALTHVSSGVSKGAELFTGIVPILIELNGDVNGHKFSVSGEGEGDATYGKLTLKFICTTGKLPVPWPTLVTTLSYGVQCFSRYPDHMKQHDFFKSAMPEGYIQERTIFFEDDGNYKSRAEVKFEGDTLVNRIELTGTDFKEDGNILGNKMEYNYNAHNVYIMTDKAKNGIKVNFKIRHNIEDGSVQLADHYQQNTPIGDGPVLLPDNHYLSTQSALSKDPNEKRDHMIYFGFVTAAAITHGMDELYK

SEQ ID NO: 203 - protein, 487 aa, Artificial Sequence
  source: /note="Description of Artificial Sequence: Synthetic polypeptide"
MKHEVLCRWILSVKKNYRKNVAYHNWRHAFNTAQCMFAALKAGKIQNKLTDLEILALLIAALSHDLDHRGVNNSYIQRSEHPLAQLYCHSIMEHHHFDQCLMILNSPGNQILSGLSIEEYKTTLKIIKQAILATDLALYIKRCGEFFELIRKNQFNLEDPHQKELFLAMLMTACDLSAITKPWPIQQRIAELVATEFFDQGDRERKELNIEPTDLMNREKKNKIPSMQVGFIDAICLQLYEALTHVSSGVSKGAELFTGIVPILIELNGDVNGHKFSVSGEGEGDATYGKLTLKFICTTGKLPVPWPTLVTTLSYGVQCFSRYPDHMKQHDFFKSAMPEGYIQERTIFFEDDGNYKSRAEVKFEGDTLVNRIELTGTDFKEDGNILGNKMEYNYNAHNVYIMTDKAKNGIKVNFKIRHNIEDGSVQLADHYQQNTPIGDGPVLLPDNHYLSTQSALSKDPNEKRDHMIYFGFVTAAAITHGMDELYK

SEQ ID NO: 204 - protein, 487 aa, Artificial Sequence
  source: /note="Description of Artificial Sequence: Synthetic polypeptide"
MKHEVLCRWILSVKKNYRKNVAYHNWRHAFNTAQCMFAALKAGKIQNKLTDLEILALLIAALSHDLDHRGVNNSYIQRSEHPLAQLYCHSIMEHHHFDQCLMILNSPGNQILSGLSIEEYKTTLKIIKQAILATDLALYIKRKGEFFELIRKNQFNLEDPHQKELFLAMLMTACDLSAITKPWPIQQRIAELVATEFFDQGDRERKELNIEPTDLMNREKKNKIPSMQVGFIDAICLQLYEALTHVSSGVSKGAELFTGIVPILIELNGDVNGHKFSVSGEGEGDATYGKLTLKFICTTGKLPVPWPTLVTTLSYGVQCFSRYPDHMKQHDFFKSAMPEGYIQERTIFFEDDGNYKSRAEVKFEGDTLVNRIELTGTDFKEDGNILGNKMEYNYNAHNVYIMTDKAKNGIKVNFKIRHNIEDGSVQLADHYQQNTPIGDGPVLLPDNHYLSTQSALSKDPNEKRDHMIYFGFVTAAAITHGMDELYK

SEQ ID NO: 205 - DNA, 1464 bp, Artificial Sequence
  source: /note="Description of Artificial Sequence: Synthetic polynucleotide"
atgaaacatgaggttctttgcagatggattttaagtgttaagaagaattatcggaagaatgttgcctatcataattggagacatgcctttaatacagctcagtgcatgtttgctgctctaaaagcaggcaaaattcagaacaagctgactgacctggagatacttgcattgctgattgctgcactaagccacgatttggatcaccgtggtgtgaataactcttacatacagcgaagtgaacatccacttgcccagctttactgccattcaatcatggaacaccatcattttgaccagtgcctgatgattcttaatagtccaggcaatcagattctcagtggcctctccattgaagaatataagaccacgttgaaaataatcaagcaagctattttagctacagacctagcactgtacattaagcggggcggagaattttttgaacttataagaaaaaatcaattcaatttggaagatcctcatcaaaaggagttgtttttggcaatgctgatgacagcttgtgatctttctgcaattacaaaaccctggcctattcaacaacggatagcagaacttgtagcaactgaattttttgatcaaggagacagagagagaaaagaactcaacatagaacccactgatctaatgaacagggagaagaaaaacaaaatcccaagtatgcaagttgggttcatagatgccatctgcttgcaactgtatgaggccctgacccacgtgtcaagtggtgtgagcaagggcgccgagctgttcaccggcatcgtgcccatcctgatcgagctgaatggcgatgtgaatggccacaagttcagcgtgagcggcgagggcgagggcgatgccacctacggcaagctgaccctgaagttcatctgcaccaccggcaagctgcctgtgccctggcccaccctggtgaccaccctgagctacggcgtgcagtgcttctcacgctaccccgatcacatgaagcagcacgacttcttcaagagcgccatgcctgagggctacatccaggagcgcaccatcttcttcgaggatgacggcaactacaagtcgcgcgccgaggtgaagttcgagggcgataccctggtgaatcgcatcgagctgaccggcaccgatttcaaggaggatggcaacatcctgggcaataagatggagtacaactacaacgcccacaatgtgtacatcatgaccgacaaggccaagaatggcatcaaggtgaacttcaagatccgccacaacatcgaggatggcagcgtgcagctggccgaccactaccagcagaatacccccatcggcgatggccctgtgctgctgcccgataaccactacctgtccacccagagcgccctgtccaaggaccccaacgagaagcgcgatcacatgatctacttcggcttcgtgaccgccgccgccatcacccacggcatggatgagctgtacaagtga

SEQ ID NO: 206 - DNA, 1464 bp, Artificial Sequence
  source: /note="Description of Artificial Sequence: Synthetic polynucleotide"
atgaaacatgaggttctttgcagatggattttaagtgttaagaagaattatcggaagaatgttgcctatcataattggagacatgcctttaatacagctcagtgcatgtttgctgctctaaaagcaggcaaaattcagaacaagctgactgacctggagatacttgcattgctgattgctgcactaagccacgatttggatcaccgtggtgtgaataactcttacatacagcgaagtgaacatccacttgcccagctttactgccattcaatcatggaacaccatcattttgaccagtgcctgatgattcttaatagtccaggcaatcagattctcagtggcctctccattgaagaatataagaccacgttgaaaataatcaagcaagctattttagctacagacctagcactgtacattaagcgggccggagaattttttgaacttataagaaaaaatcaattcaatttggaagatcctcatcaaaaggagttgtttttggcaatgctgatgacagcttgtgatctttctgcaattacaaaaccctggcctattcaacaacggatagcagaacttgtagcaactgaattttttgatcaaggagacagagagagaaaagaactcaacatagaacccactgatctaatgaacagggagaagaaaaacaaaatcccaagtatgcaagttgggttcatagatgccatctgcttgcaactgtatgaggccctgacccacgtgtcaagtggtgtgagcaagggcgccgagctgttcaccggcatcgtgcccatcctgatcgagctgaatggcgatgtgaatggccacaagttcagcgtgagcggcgagggcgagggcgatgccacctacggcaagctgaccctgaagttcatctgcaccaccggcaagctgcctgtgccctggcccaccctggtgaccaccctgagctacggcgtgcagtgcttctcacgctaccccgatcacatgaagcagcacgacttcttcaagagcgccatgcctgagggctacatccaggagcgcaccatcttcttcgaggatgacggcaactacaagtcgcgcgccgaggtgaagttcgagggcgataccctggtgaatcgcatcgagctgaccggcaccgatttcaaggaggatggcaacatcctgggcaataagatggagtacaactacaacgcccacaatgtgtacatcatgaccgacaaggccaagaatggcatcaaggtgaacttcaagatccgccacaacatcgaggatggcagcgtgcagctggccgaccactaccagcagaatacccccatcggcgatggccctgtgctgctgcccgataaccactacctgtccacccagagcgccctgtccaaggaccccaacgagaagcgcgatcacatgatctacttcggcttcgtgaccgccgccgccatcacccacggcatggatgagctgtacaagtga

SEQ ID NO: 207 - DNA, 1464 bp, Artificial Sequence
  source: /note="Description of Artificial Sequence: Synthetic polynucleotide"
atgaaacatgaggttctttgcagatggattttaagtgttaagaagaattatcggaagaatgttgcctatcataattggagacatgcctttaatacagctcagtgcatgtttgctgctctaaaagcaggcaaaattcagaacaagctgactgacctggagatacttgcattgctgattgctgcactaagccacgatttggatcaccgtggtgtgaataactcttacatacagcgaagtgaacatccacttgcccagctttactgccattcaatcatggaacaccatcattttgaccagtgcctgatgattcttaatagtccaggcaatcagattctcagtggcctctccattgaagaatataagaccacgttgaaaataatcaagcaagctattttagctacagacctagcactgtacattaagcgggtgggagaattttttgaacttataagaaaaaatcaattcaatttggaagatcctcatcaaaaggagttgtttttggcaatgctgatgacagcttgtgatctttctgcaattacaaaaccctggcctattcaacaacggatagcagaacttgtagcaactgaattttttgatcaaggagacagagagagaaaagaactcaacatagaacccactgatctaatgaacagggagaagaaaaacaaaatcccaagtatgcaagttgggttcatagatgccatctgcttgcaactgtatgaggccctgacccacgtgtcaagtggtgtgagcaagggcgccgagctgttcaccggcatcgtgcccatcctgatcgagctgaatggcgatgtgaatggccacaagttcagcgtgagcggcgagggcgagggcgatgccacctacggcaagctgaccctgaagttcatctgcaccaccggcaagctgcctgtgccctggcccaccctggtgaccaccctgagctacggcgtgcagtgcttctcacgctaccccgatcacatgaagcagcacgacttcttcaagagcgccatgcctgagggctacatccaggagcgcaccatcttcttcgaggatgacggcaactacaagtcgcgcgccgaggtgaagttcgagggcgataccctggtgaatcgcatcgagctgaccggcaccgatttcaaggaggatggcaacatcctgggcaataagatggagtacaactacaacgcccacaatgtgtacatcatgaccgacaaggccaagaatggcatcaaggtgaacttcaagatccgccacaacatcgaggatggcagcgtgcagctggccgaccactaccagcagaatacccccatcggcgatggccctgtgctgctgcccgataaccactacctgtccacccagagcgccctgtccaaggaccccaacgagaagcgcgatcacatgatctacttcggcttcgtgaccgccgccgccatcacccacggcatggatgagctgtacaagtga

SEQ ID NO: 208 - DNA, 1464 bp, Artificial Sequence
  source: /note="Description of Artificial Sequence: Synthetic polynucleotide"
atgaaacatgaggttctttgcagatggattttaagtgttaagaagaattatcggaagaatgttgcctatcataattggagacatgcctttaatacagctcagtgcatgtttgctgctctaaaagcaggcaaaattcagaacaagctgactgacctggagatacttgcattgctgattgctgcactaagccacgatttggatcaccgtggtgtgaataactcttacatacagcgaagtgaacatccacttgcccagctttactgccattcaatcatggaacaccatcattttgaccagtgcctgatgattcttaatagtccaggcaatcagattctcagtggcctctccattgaagaatataagaccacgttgaaaataatcaagcaagctattttagctacagacctagcactgtacattaagcggatcggagaattttttgaacttataagaaaaaatcaattcaatttggaagatcctcatcaaaaggagttgtttttggcaatgctgatgacagcttgtgatctttctgcaattacaaaaccctggcctattcaacaacggatagcagaacttgtagcaactgaattttttgatcaaggagacagagagagaaaagaactcaacatagaacccactgatctaatgaacagggagaagaaaaacaaaatcccaagtatgcaagttgggttcatagatgccatctgcttgcaactgtatgaggccctgacccacgtgtcaagtggtgtgagcaagggcgccgagctgttcaccggcatcgtgcccatcctgatcgagctgaatggcgatgtgaatggccacaagttcagcgtgagcggcgagggcgagggcgatgccacctacggcaagctgaccctgaagttcatctgcaccaccggcaagctgcctgtgccctggcccaccctggtgaccaccctgagctacggcgtgcagtgcttctcacgctaccccgatcacatgaagcagcacgacttcttcaagagcgccatgcctgagggctacatccaggagcgcaccatcttcttcgaggatgacggcaactacaagtcgcgcgccgaggtgaagttcgagggcgataccctggtgaatcgcatcgagctgaccggcaccgatttcaaggaggatggcaacatcctgggcaataagatggagtacaactacaacgcccacaatgtgtacatcatgaccgacaaggccaagaatggcatcaaggtgaacttcaagatccgccacaacatcgaggatggcagcgtgcagctggccgaccactaccagcagaatacccccatcggcgatggccctgtgctgctgcccgataaccactacctgtccacccagagcgccctgtccaaggaccccaacgagaagcgcgatcacatgatctacttcggcttcgtgaccgccgccgccatcacccacggcatggatgagctgtacaagtga

SEQ ID NO: 209 - DNA, 1464 bp, Artificial Sequence
  source: /note="Description of Artificial Sequence: Synthetic polynucleotide"
atgaaacatgaggttctttgcagatggattttaagtgttaagaagaattatcggaagaatgttgcctatcataattggagacatgcctttaatacagctcagtgcatgtttgctgctctaaaagcaggcaaaattcagaacaagctgactgacctggagatacttgcattgctgattgctgcactaagccacgatttggatcaccgtggtgtgaataactcttacatacagcgaagtgaacatccacttgcccagctttactgccattcaatcatggaacaccatcattttgaccagtgcctgatgattcttaatagtccaggcaatcagattctcagtggcctctccattgaagaatataagaccacgttgaaaataatcaagcaagctattttagctacagacctagcactgtacattaagcggcccggagaattttttgaacttataagaaaaaatcaattcaatttggaagatcctcatcaaaaggagttgtttttggcaatgctgatgacagcttgtgatctttctgcaattacaaaaccctggcctattcaacaacggatagcagaacttgtagcaactgaattttttgatcaaggagacagagagagaaaagaactcaacatagaacccactgatctaatgaacagggagaagaaaaacaaaatcccaagtatgcaagttgggttcatagatgccatctgcttgcaactgtatgaggccctgacccacgtgtcaagtggtgtgagcaagggcgccgagctgttcaccggcatcgtgcccatcctgatcgagctgaatggcgatgtgaatggccacaagttcagcgtgagcggcgagggcgagggcgatgccacctacggcaagctgaccctgaagttcatctgcaccaccggcaagctgcctgtgccctggcccaccctggtgaccaccctgagctacggcgtgcagtgcttctcacgctaccccgatcacatgaagcagcacgacttcttcaagagcgccatgcctgagggctacatccaggagcgcaccatcttcttcgaggatgacggcaactacaagtcgcgcgccgaggtgaagttcgagggcgataccctggtgaatcgcatcgagctgaccggcaccgatttcaaggaggatggcaacatcctgggcaataagatggagtacaactacaacgcccacaatgtgtacatcatgaccgacaaggccaagaatggcatcaaggtgaacttcaagatccgccacaacatcgaggatggcagcgtgcagctggccgaccactaccagcagaatacccccatcggcgatggccctgtgctgctgcccgataaccactacctgtccacccagagcgccctgtccaaggaccccaacgagaagcgcgatcacatgatctacttcggcttcgtgaccgccgccgccatcacccacggcatggatgagctgtacaagtga

SEQ ID NO: 210 - DNA, 1464 bp, Artificial Sequence
  source: /note="Description of Artificial Sequence: Synthetic polynucleotide"
atgaaacatgaggttctttgcagatggattttaagtgttaagaagaattatcggaagaatgttgcctatcataattggagacatgcctttaatacagctcagtgcatgtttgctgctctaaaagcaggcaaaattcagaacaagctgactgacctggagatacttgcattgctgattgctgcactaagccacgatttggatcaccgtggtgtgaataactcttacatacagcgaagtgaacatccacttgcccagctttactgccattcaatcatggaacaccatcattttgaccagtgcctgatgattcttaatagtccaggcaatcagattctcagtggcctctccattgaagaatataagaccacgttgaaaataatcaagcaagctattttagctacagacctagcactgtacattaagcggttcggagaattttttgaacttataagaaaaaatcaattcaatttggaagatcctcatcaaaaggagttgtttttggcaatgctgatgacagcttgtgatctttctgcaattacaaaaccctggcctattcaacaacggatagcagaacttgtagcaactgaattttttgatcaaggagacagagagagaaaagaactcaacatagaacccactgatctaatgaacagggagaagaaaaacaaaatcccaagtatgcaagttgggttcatagatgccatctgcttgcaactgtatgaggccctgacccacgtgtcaagtggtgtgagcaagggcgccgagctgttcaccggcatcgtgcccatcctgatcgagctgaatggcgatgtgaatggccacaagttcagcgtgagcggcgagggcgagggcgatgccacctacggcaagctgaccctgaagttcatctgcaccaccggcaagctgcctgtgccctggcccaccctggtgaccaccctgagctacggcgtgcagtgcttctcacgctaccccgatcacatgaagcagcacgacttcttcaagagcgccatgcctgagggctacatccaggagcgcaccatcttcttcgaggatgacggcaactacaagtcgcgcgccgaggtgaagttcgagggcgataccctggtgaatcgcatcgagctgaccggcaccgatttcaaggaggatggcaacatcctgggcaataagatggagtacaactacaacgcccacaatgtgtacatcatgaccgacaaggccaagaatggcatcaaggtgaacttcaagatccgccacaacatcgaggatggcagcgtgcagctggccgaccactaccagcagaatacccccatcggcgatggccctgtgctgctgcccgataaccactacctgtccacccagagcgccctgtccaaggaccccaacgagaagcgcgatcacatgatctacttcggcttcgtgaccgccgccgccatcacccacggcatggatgagctgtacaagtga

SEQ ID NO: 211 - DNA, 1464 bp, Artificial Sequence
  source: /note="Description of Artificial Sequence: Synthetic polynucleotide"
atgaaacatgaggttctttgcagatggattttaagtgttaagaagaattatcggaagaatgttgcctatcataattggagacatgcctttaatacagctcagtgcatgtttgctgctctaaaagcaggcaaaattcagaacaagctgactgacctggagatacttgcattgctgattgctgcactaagccacgatttggatcaccgtggtgtgaataactcttacatacagcgaagtgaacatccacttgcccagctttactgccattcaatcatggaacaccatcattttgaccagtgcctgatgattcttaatagtccaggcaatcagattctcagtggcctctccattgaagaatataagaccacgttgaaaataatcaagcaagctattttagctacagacctagcactgtacattaagcggtggggagaattttttgaacttataagaaaaaatcaattcaatttggaagatcctcatcaaaaggagttgtttttggcaatgctgatgacagcttgtgatctttctgcaattacaaaaccctggcctattcaacaacggatagcagaacttgtagcaactgaattttttgatcaaggagacagagagagaaaagaactcaacatagaacccactgatctaatgaacagggagaagaaaaacaaaatcccaagtatgcaagttgggttcatagatgccatctgcttgcaactgtatgaggccctgacccacgtgtcaagtggtgtgagcaagggcgccgagctgttcaccggcatcgtgcccatcctgatcgagctgaatggcgatgtgaatggccacaagttcagcgtgagcggcgagggcgagggcgatgccacctacggcaagctgaccctgaagttcatctgcaccaccggcaagctgcctgtgccctggcccaccctggtgaccaccctgagctacggcgtgcagtgcttctcacgctaccccgatcacatgaagcagcacgacttcttcaagagcgccatgcctgagggctacatccaggagcgcaccatcttcttcgaggatgacggcaactacaagtcgcgcgccgaggtgaagttcgagggcgataccctggtgaatcgcatcgagctgaccggcaccgatttcaaggaggatggcaacatcctgggcaataagatggagtacaactacaacgcccacaatgtgtacatcatgaccgacaaggccaagaatggcatcaaggtgaacttcaagatccgccacaacatcgaggatggcagcgtgcagctggccgaccactaccagcagaatacccccatcggcgatggccctgtgctgctgcccgataaccactacctgtccacccagagcgccctgtccaaggaccccaacgagaagcgcgatcacatgatctacttcggcttcgtgaccgccgccgccatcacccacggcatggatgagctgtacaagtga

SEQ ID NO: 212 - DNA, 1464 bp, Artificial Sequence
  source: /note="Description of Artificial Sequence: Synthetic polynucleotide"
atgaaacatgaggttctttgcagatggattttaagtgttaagaagaattatcggaagaatgttgcctatcataattggagacatgcctttaatacagctcagtgcatgtttgctgctctaaaagcaggcaaaattcagaacaagctgactgacctggagatacttgcattgctgattgctgcactaagccacgatttggatcaccgtggtgtgaataactcttacatacagcgaagtgaacatccacttgcccagctttactgccattcaatcatggaacaccatcattttgaccagtgcctgatgattcttaatagtccaggcaatcagattctcagtggcctctccattgaagaatataagaccacgttgaaaataatcaagcaagctattttagctacagacctagcactgtacattaagcggtacggagaattttttgaacttataagaaaaaatcaattcaatttggaagatcctcatcaaaaggagttgtttttggcaatgctgatgacagcttgtgatctttctgcaattacaaaaccctggcctattcaacaacggatagcagaacttgtagcaactgaattttttgatcaaggagacagagagagaaaagaactcaacatagaacccactgatctaatgaacagggagaagaaaaacaaaatcccaagtatgcaagttgggttcatagatgccatctgcttgcaactgtatgaggccctgacccacgtgtcaagtggtgtgagcaagggcgccgagctgttcaccggcatcgtgcccatcctgatcgagctgaatggcgatgtgaatggccacaagttcagcgtgagcggcgagggcgagggcgatgccacctacggcaagctgaccctgaagttcatctgcaccaccggcaagctgcctgtgccctggcccaccctggtgaccaccctgagctacggcgtgcagtgcttctcacgctaccccgatcacatgaagcagcacgacttcttcaagagcgccatgcctgagggctacatccaggagcgcaccatcttcttcgaggatgacggcaactacaagtcgcgcgccgaggtgaagttcgagggcgataccctggtgaatcgcatcgagctgaccggcaccgatttcaaggaggatggcaacatcctgggcaataagatggagtacaactacaacgcccacaatgtgtacatcatgaccgacaaggccaagaatggcatcaaggtgaacttcaagatccgccacaacatcgaggatggcagcgtgcagctggccgaccactaccagcagaatacccccatcggcgatggccctgtgctgctgcccgataaccactacctgtccacccagagcgccctgtccaaggaccccaacgagaagcgcgatcacatgatctacttcggcttcgtgaccgccgccgccatcacccacggcatggatgagctgtacaagtga

SEQ ID NO: 213 - DNA, 1464 bp, Artificial Sequence
  source: /note="Description of Artificial Sequence: Synthetic polynucleotide"
atgaaacatgaggttctttgcagatggattttaagtgttaagaagaattatcggaagaatgttgcctatcataattggagacatgcctttaatacagctcagtgcatgtttgctgctctaaaagcaggcaaaattcagaacaagctgactgacctggagatacttgcattgctgattgctgcactaagccacgatttggatcaccgtggtgtgaataactcttacatacagcgaagtgaacatccacttgcccagctttactgccattcaatcatggaacaccatcattttgaccagtgcctgatgattcttaatagtccaggcaatcagattctcagtggcctctccattgaagaatataagaccacgttgaaaataatcaagcaagctattttagctacagacctagcactgtacattaagcggcacggagaattttttgaacttataagaaaaaatcaattcaatttggaagatcctcatcaaaaggagttgtttttggcaatgctgatgacagcttgtgatctttctgcaattacaaaaccctggcctattcaacaacggatagcagaacttgtagcaactgaattttttgatcaaggagacagagagagaaaagaactcaacatagaacccactgatctaatgaacagggagaagaaaaacaaaatcccaagtatgcaagttgggttcatagatgccatctgcttgcaactgtatgaggccctgacccacgtgtcaagtggtgtgagcaagggcgccgagctgttcaccggcatcgtgcccatcctgatcgagctgaatggcgatgtgaatggccacaagttcagcgtgagcggcgagggcgagggcgatgccacctacggcaagctgaccctgaagttcatctgcaccaccggcaagctgcctgtgccctggcccaccctggtgaccaccctgagctacggcgtgcagtgcttctcacgctaccccgatcacatgaagcagcacgacttcttcaagagcgccatgcctgagggctacatccaggagcgcaccatcttcttcgaggatgacggcaactacaagtcgcgcgccgaggtgaagttcgagggcgataccctggtgaatcgcatcgagctgaccggcaccgatttcaaggaggatggcaacatcctgggcaataagatggagtacaactacaacgcccacaatgtgtacatcatgaccgacaaggccaagaatggcatcaaggtgaacttcaagatccgccacaacatcgaggatggcagcgtgcagctggccgaccactaccagcagaatacccccatcggcgatggccctgtgctgctgcccgataaccactacctgtccacccagagcgccctgtccaaggaccccaacgagaagcgcgatcacatgatctacttcggcttcgtgaccgccgccgccatcacccacggcatggatgagctgtacaagtga

SEQ ID NO: 214 - DNA, 1464 bp, Artificial Sequence
  source: /note="Description of Artificial Sequence: Synthetic polynucleotide"
atgaaacatgaggttctttgcagatggattttaagtgttaagaagaattatcggaagaatgttgcctatcataattggagacatgcctttaatacagctcagtgcatgtttgctgctctaaaagcaggcaaaattcagaacaagctgactgacctggagatacttgcattgctgattgctgcactaagccacgatttggatcaccgtggtgtgaataactcttacatacagcgaagtgaacatccacttgcccagctttactgccattcaatcatggaacaccatcattttgaccagtgcctgatgattcttaatagtccaggcaatcagattctcagtggcctctccattgaagaatataagaccacgttgaaaataatcaagcaagctattttagctacagacctagcactgtacattaagcggagcggagaattttttgaacttataagaaaaaatcaattcaatttggaagatcctcatcaaaaggagttgtttttggcaatgctgatgacagcttgtgatctttctgcaattacaaaaccctggcctattcaacaacggatagcagaacttgtagcaactgaattttttgatcaaggagacagagagagaaaagaactcaacatagaacccactgatctaatgaacagggagaagaaaaacaaaatcccaagtatgcaagttgggttcatagatgccatctgcttgcaactgtatgaggccctgacccacgtgtcaagtggtgtgagcaagggcgccgagctgttcaccggcatcgtgcccatcctgatcgagctgaatggcgatgtgaatggccacaagttcagcgtgagcggcgagggcgagggcgatgccacctacggcaagctgaccctgaagttcatctgcaccaccggcaagctgcctgtgccctggcccaccctggtgaccaccctgagctacggcgtgcagtgcttctcacgctaccccgatcacatgaagcagcacgacttcttcaagagcgccatgcctgagggctacatccaggagcgcaccatcttcttcgaggatgacggcaactacaagtcgcgcgccgaggtgaagttcgagggcgataccctggtgaatcgcatcgagctgaccggcaccgatttcaaggaggatggcaacatcctgggcaataagatggagtacaactacaacgcccacaatgtgtacatcatgaccgacaaggccaagaatggcatcaaggtgaacttcaagatccgccacaacatcgaggatggcagcgtgcagctggccgaccactaccagcagaatacccccatcggcgatggccctgtgctgctgcccgataaccactacctgtccacccagagcgccctgtccaaggaccccaacgagaagcgcgatcacatgatctacttcggcttcgtgaccgccgccgccatcacccacggcatggatgagctgtacaagtga

SEQ ID NO: 215 - DNA, 1464 bp, Artificial Sequence
  source: /note="Description of Artificial Sequence: Synthetic polynucleotide"
atgaaacatgaggttctttgcagatggattttaagtgttaagaagaattatcggaagaatgttgcctatcataattggagacatgcctttaatacagctcagtgcatgtttgctgctctaaaagcaggcaaaattcagaacaagctgactgacctggagatacttgcattgctgattgctgcactaagccacgatttggatcaccgtggtgtgaataactcttacatacagcgaagtgaacatccacttgcccagctttactgccattcaatcatggaacaccatcattttgaccagtgcctgatgattcttaatagtccaggcaatcagattctcagtggcctctccattgaagaatataagaccacgttgaaaataatcaagcaagctattttagctacagacctagcactgtacattaagcggaccggagaattttttgaacttataagaaaaaatcaattcaatttggaagatcctcatcaaaaggagttgtttttggcaatgctgatgacagcttgtgatctttctgcaattacaaaaccctggcctattcaacaacggatagcagaacttgtagcaactgaattttttgatcaaggagacagagagagaaaagaactcaacatagaacccactgatctaatgaacagggagaagaaaaacaaaatcccaagtatgcaagttgggttcatagatgccatctgcttgcaactgtatgaggccctgacccacgtgtcaagtggtgtgagcaagggcgccgagctgttcaccggcatcgtgcccatcctgatcgagctgaatggcgatgtgaatggccacaagttcagcgtgagcggcgagggcgagggcgatgccacctacggcaagctgaccctgaagttcatctgcaccaccggcaagctgcctgtgccctggcccaccctggtgaccaccctgagctacggcgtgcagtgcttctcacgctaccccgatcacatgaagcagcacgacttcttcaagagcgccatgcctgagggctacatccaggagcgcaccatcttcttcgaggatgacggcaactacaagtcgcgcgccgaggtgaagttcgagggcgataccctggtgaatcgcatcgagctgaccggcaccgatttcaaggaggatggcaacatcctgggcaataagatggagtacaactacaacgcccacaatgtgtacatcatgaccgacaaggccaagaatggcatcaaggtgaacttcaagatccgccacaacatcgaggatggcagcgtgcagctggccgaccactaccagcagaatacccccatcggcgatggccctgtgctgctgcccgataaccactacctgtccacccagagcgccctgtccaaggaccccaacgagaagcgcgatcacatgatctacttcggcttcgtgaccgccgccgccatcacccacggcatggatgagctgtacaagtga

SEQ ID NO: 216 - DNA, 1464 bp, Artificial Sequence
  source: /note="Description of Artificial Sequence: Synthetic polynucleotide"
atgaaacatgaggttctttgcagatggattttaagtgttaagaagaattatcggaagaatgttgcctatcataattggagacatgcctttaatacagctcagtgcatgtttgctgctctaaaagcaggcaaaattcagaacaagctgactgacctggagatacttgcattgctgattgctgcactaagccacgatttggatcaccgtggtgtgaataactcttacatacagcgaagtgaacatccacttgcccagctttactgccattcaatcatggaacaccatcattttgaccagtgcctgatgattcttaatagtccaggcaatcagattctcagtggcctctccattgaagaatataagaccacgttgaaaataatcaagcaagctattttagctacagacctagcactgtacattaagcgggacggagaattttttgaacttataagaaaaaatcaattcaatttggaagatcctcatcaaaaggagttgtttttggcaatgctgatgacagcttgtgatctttctgcaattacaaaaccctggcctattcaacaacggatagcagaacttgtagcaactgaattttttgatcaaggagacagagagagaaaagaactcaacatagaacccactgatctaatgaacagggagaagaaaaacaaaatcccaagtatgcaagttgggttcatagatgccatctgcttgcaactgtatgaggccctgacccacgtgtcaagtggtgtgagcaagggcgccgagctgttcaccggcatcgtgcccatcctgatcgagctgaatggcgatgtgaatggccacaagttcagcgtgagcggcgagggcgagggcgatgccacctacggcaagctgaccctgaagttcatctgcaccaccggcaagctgcctgtgccctggcccaccctggtgaccaccctgagctacggcgtgcagtgcttctcacgctaccccgatcacatgaagcagcacgacttcttcaagagcgccatgcctgagggctacatccaggagcgcaccatcttcttcgaggatgacggcaactacaagtcgcgcgccgaggtgaagttcgagggcgataccctggtgaatcgcatcgagctgaccggcaccgatttcaaggaggatggcaacatcctgggcaataagatggagtacaactacaacgcccacaatgtgtacatcatgaccgacaaggccaagaatggcatcaaggtgaacttcaagatccgccacaacatcgaggatggcagcgtgcagctggccgaccactaccagcagaatacccccatcggcgatggccctgtgctgctgcccgataaccactacctgtccacccagagcgccctgtccaaggaccccaacgagaagcgcgatcacatgatctacttcggcttcgtgaccgccgccgccatcacccacggcatggatgagctgtacaagtga

SEQ ID NO: 217 - DNA, 1464 bp, Artificial Sequence
  source: /note="Description of Artificial Sequence: Synthetic polynucleotide"
atgaaacatgaggttctttgcagatggattttaagtgttaagaagaattatcggaagaatgttgcctatcataattggagacatgcctttaatacagctcagtgcatgtttgctgctctaaaagcaggcaaaattcagaacaagctgactgacctggagatacttgcattgctgattgctgcactaagccacgatttggatcaccgtggtgtgaataactcttacatacagcgaagtgaacatccacttgcccagctttactgccattcaatcatggaacaccatcattttgaccagtgcctgatgattcttaatagtccaggcaatcagattctcagtggcctctccattgaagaatataagaccacgttgaaaataatcaagcaagctattttagctacagacctagcactgtacattaagcgggagggagaattttttgaacttataagaaaaaatcaattcaatttggaagatcctcatcaaaaggagttgtttttggcaatgctgatgacagcttgtgatctttctgcaattacaaaaccctggcctattcaacaacggatagcagaacttgtagcaactgaattttttgatcaaggagacagagagagaaaagaactcaacatagaacccactgatctaatgaacagggagaagaaaaacaaaatcccaagtatgcaagttgggttcatagatgccatctgcttgcaactgtatgaggccctgacccacgtgtcaagtggtgtgagcaagggcgccgagctgttcaccggcatcgtgcccatcctgatcgagctgaatggcgatgtgaatggccacaagttcagcgtgagcggcgagggcgagggcgatgccacctacggcaagctgaccctgaagttcatctgcaccaccggcaagctgcctgtgccctggcccaccctggtgaccaccctgagctacggcgtgcagtgcttctcacgctaccccgatcacatgaagcagcacgacttcttcaagagcgccatgcctgagggctacatccaggagcgcaccatcttcttcgaggatgacggcaactacaagtcgcgcgccgaggtgaagttcgagggcgataccctggtgaatcgcatcgagctgaccggcaccgatttcaaggaggatggcaacatcctgggcaataagatggagtacaactacaacgcccacaatgtgtacatcatgaccgacaaggccaagaatggcatcaaggtgaacttcaagatccgccacaacatcgaggatggcagcgtgcagctggccgaccactaccagcagaatacccccatcggcgatggccctgtgctgctgcccgataaccactacctgtccacccagagcgccctgtccaaggaccccaacgagaagcgcgatcacatgatctacttcggcttcgtgaccgccgccgccatcacccacggcatggatgagctgtacaagtga

SEQ ID NO: 218 - DNA, 1464 bp, Artificial Sequence
  source: /note="Description of Artificial Sequence: Synthetic polynucleotide"
atgaaacatgaggttctttgcagatggattttaagtgttaagaagaattatcggaagaatgttgcctatcataattggagacatgcctttaatacagctcagtgcatgtttgctgctctaaaagcaggcaaaattcagaacaagctgactgacctggagatacttgcattgctgattgctgcactaagccacgatttggatcaccgtggtgtgaataactcttacatacagcgaagtgaacatccacttgcccagctttactgccattcaatcatggaacaccatcattttgaccagtgcctgatgattcttaatagtccaggcaatcagattctcagtggcctctccattgaagaatataagaccacgttgaaaataatcaagcaagctattttagctacagacctagcactgtacattaagcggcagggagaattttttgaacttataagaaaaaatcaattcaatttggaagatcctcatcaaaaggagttgtttttggcaatgctgatgacagcttgtgatctttctgcaattacaaaaccctggcctattcaacaacggatagcagaacttgtagcaactgaattttttgatcaaggagacagagagagaaaagaactcaacatagaacccactgatctaatgaacagggagaagaaaaacaaaatcccaagtatgcaagttgggttcatagatgccatctgcttgcaactgtatgaggccctgacccacgtgtcaagtggtgtgagcaagggcgccgagctgttcaccggcatcgtgcccatcctgatcgagctgaatggcgatgtgaatggccacaagttcagcgtgagcggcgagggcgagggcgatgccacctacggcaagctgaccctgaagttcatctgcaccaccggcaagctgcctgtgccctggcccaccctggtgaccaccctgagctacggcgtgcagtgcttctcacgctaccccgatcacatgaagcagcacgacttcttcaagagcgccatgcctgagggctacatccaggagcgcaccatcttcttcgaggatgacggcaactacaagtcgcgcgccgaggtgaagttcgagggcgataccctggtgaatcgcatcgagctgaccggcaccgatttcaaggaggatggcaacatcctgggcaataagatggagtacaactacaacgcccacaatgtgtacatcatgaccgacaaggccaagaatggcatcaaggtgaacttcaagatccgccacaacatcgaggatggcagcgtgcagctggccgaccactaccagcagaatacccccatcggcgatggccctgtgctgctgcccgataaccactacctgtccacccagagcgccctgtccaaggaccccaacgagaagcgcgatcacatgatctacttcggcttcgtgaccgccgccgccatcacccacggcatggatgagctgtacaagtga

SEQ ID NO: 219 - DNA, 1464 bp, Artificial Sequence
  source: /note="Description of Artificial Sequence: Synthetic polynucleotide"
atgaaacatgaggttctttgcagatggattttaagtgttaagaagaattatcggaagaatgttgcctatcataattggagacatgcctttaatacagctcagtgcatgtttgctgctctaaaagcaggcaaaattcagaacaagctgactgacctggagatacttgcattgctgattgctgcactaagccacgatttggatcaccgtggtgtgaataactcttacatacagcgaagtgaacatccacttgcccagctttactgccattcaatcatggaacaccatcattttgaccagtgcctgatgattcttaatagtccaggcaatcagattctcagtggcctctccattgaagaatataagaccacgttgaaaataatcaagcaagctattttagctacagacctagcactgtacattaagcggaacggagaattttttgaacttataagaaaaaatcaattcaatttggaagatcctcatcaaaaggagttgtttttggcaatgctgatgacagcttgtgatctttctgcaattacaaaaccctggcctattcaacaacggatagcagaacttgtagcaactgaattttttgatcaaggagacagagagagaaaagaactcaacatagaacccactgatctaatgaacagggagaagaaaaacaaaatcccaagtatgcaagttgggttcatagatgccatctgcttgcaactgtatgaggccctgacccacgtgtcaagtggtgtgagcaagggcgccgagctgttcaccggcatcgtgcccatcctgatcgagctgaatggcgatgtgaatggccacaagttcagcgtgagcggcgagggcgagggcgatgccacctacggcaagctgaccctgaagttcatctgcaccaccggcaagctgcctgtgccctggcccaccctggtgaccaccctgagctacggcgtgcagtgcttctcacgctaccccgatcacatgaagcagcacgacttcttcaagagcgccatgcctgagggctacatccaggagcgcaccatcttcttcgaggatgacggcaactacaagtcgcgcgccgaggtgaagttcgagggcgataccctggtgaatcgcatcgagctgaccggcaccgatttcaaggaggatggcaacatcctgggcaataagatggagtacaactacaacgcccacaatgtgtacatcatgaccgacaaggccaagaatggcatcaaggtgaacttcaagatccgccacaacatcgaggatggcagcgtgcagctggccgaccactaccagcagaatacccccatcggcgatggccctgtgctgctgcccgataaccactacctgtccacccagagcgccctgtccaaggaccccaacgagaagcgcgatcacatgatctacttcggcttcgtgaccgccgccgccatcacccacggcatggatgagctgtacaagtga

SEQ ID NO: 220 - DNA, 1464 bp, Artificial Sequence
  source: /note="Description of Artificial Sequence: Synthetic polynucleotide"
atgaaacatgaggttctttgcagatggattttaagtgttaagaagaattatcggaagaatgttgcctatcataattggagacatgcctttaatacagctcagtgcatgtttgctgctctaaaagcaggcaaaattcagaacaagctgactgacctggagatacttgcattgctgattgctgcactaagccacgatttggatcaccgtggtgtgaataactcttacatacagcgaagtgaacatccacttgcccagctttactgccattcaatcatggaacaccatcattttgaccagtgcctgatgattcttaatagtccaggcaatcagattctcagtggcctctccattgaagaatataagaccacgttgaaaataatcaagcaagctattttagctacagacctagcactgtacattaagcggatgggagaattttttgaacttataagaaaaaatcaattcaatttggaagatcctcatcaaaaggagttgtttttggcaatgctgatgacagcttgtgatctttctgcaattacaaaaccctggcctattcaacaacggatagcagaacttgtagcaactgaattttttgatcaaggagacagagagagaaaagaactcaacatagaacccactgatctaatgaacagggagaagaaaaacaaaatcccaagtatgcaagttgggttcatagatgccatctgcttgcaactgtatgaggccctgacccacgtgtcaagtggtgtgagcaagggcgccgagctgttcaccggcatcgtgcccatcctgatcgagctgaatggcgatgtgaatggccacaagttcagcgtgagcggcgagggcgagggcgatgccacctacggcaagctgaccctgaagttcatctgcaccaccggcaagctgcctgtgccctggcccaccctggtgaccaccctgagctacggcgtgcagtgcttctcacgctaccccgatcacatgaagcagcacgacttcttcaagagcgccatgcctgagggctacatccaggagcgcaccatcttcttcgaggatgacggcaactacaagtcgcgcgccgaggtgaagttcgagggcgataccctggtgaatcgcatcgagctgaccggcaccgatttcaaggaggatggcaacatcctgggcaataagatggagtacaactacaacgcccacaatgtgtacatcatgaccgacaaggccaagaatggcatcaaggtgaacttcaagatccgccacaacatcgaggatggcagcgtgcagctggccgaccactaccagcagaatacccccatcggcgatggccctgtgctgctgcccgataaccactacctgtccacccagagcgccctgtccaaggaccccaacgagaagcgcgatcacatgatctacttcggcttcgtgaccgccgccgccatcacccacggcatggatgagctgtacaagtga

SEQ ID NO: 221 - DNA, 1464 bp, Artificial Sequence
  source: /note="Description of Artificial Sequence: Synthetic polynucleotide"
atgaaacatgaggttctttgcagatggattttaagtgttaagaagaattatcggaagaatgttgcctatcataattggagacatgcctttaatacagctcagtgcatgtttgctgctctaaaagcaggcaaaattcagaacaagctgactgacctggagatacttgcattgctgattgctgcactaagccacgatttggatcaccgtggtgtgaataactcttacatacagcgaagtgaacatccacttgcccagctttactgccattcaatcatggaacaccatcattttgaccagtgcctgatgattcttaatagtccaggcaatcagattctcagtggcctctccattgaagaatataagaccacgttgaaaataatcaagcaagctattttagctacagacctagcactgtacattaagcggtgcggagaattttttgaacttataagaaaaaatcaattcaatttggaagatcctcatcaaaaggagttgtttttggcaatgctgatgacagcttgtgatctttctgcaattacaaaaccctggcctattcaacaacggatagcagaacttgtagcaactgaattttttgatcaaggagacagagagagaaaagaactcaacatagaacccactgatctaatgaacagggagaagaaaaacaaaatcccaagtatgcaagttgggttcatagatgccatctgcttgcaactgtatgaggccctgacccacgtgtcaagtggtgtgagcaagggcgccgagctgttcaccggcatcgtgcccatcctgatcgagctgaatggcgatgtgaatggccacaagttcagcgtgagcggcgagggcgagggcgatgccacctacggcaagctgaccctgaagttcatctgcaccaccggcaagctgcctgtgccctggcccaccctggtgaccaccctgagctacggcgtgcagtgcttctcacgctaccccgatcacatgaagcagcacgacttcttcaagagcgccatgcctgagggctacatccaggagcgcaccatcttcttcgaggatgacggcaactacaagtcgcgcgccgaggtgaagttcgagggcgataccctggtgaatcgcatcgagctgaccggcaccgatttcaaggaggatggcaacatcctgggcaataagatggagtacaactacaacgcccacaatgtgtacatcatgaccgacaaggccaagaatggcatcaaggtgaacttcaagatccgccacaacatcgaggatggcagcgtgcagctggccgaccactaccagcagaatacccccatcggcgatggccctgtgctgctgcccgataaccactacctgtccacccagagcgccctgtccaaggaccccaacgagaagcgcgatcacatgatctacttcggcttcgtgaccgccgccgccatcacccacggcatggatgagctgtacaagtga

SEQ ID NO: 222 - DNA, 1464 bp, Artificial Sequence
  source: /note="Description of Artificial Sequence: Synthetic polynucleotide"
atgaaacatgaggttctttgcagatggattttaagtgttaagaagaattatcggaagaatgttgcctatcataattggagacatgcctttaatacagctcagtgcatgtttgctgctctaaaagcaggcaaaattcagaacaagctgactgacctggagatacttgcattgctgattgctgcactaagccacgatttggatcaccgtggtgtgaataactcttacatacagcgaagtgaacatccacttgcccagctttactgccattcaatcatggaacaccatcattttgaccagtgcctgatgattcttaatagtccaggcaatcagattctcagtggcctctccattgaagaatataagaccacgttgaaaataatcaagcaagctattttagctacagacctagcactgtacattaagcggaagggagaattttttgaacttataagaaaaaatcaattcaatttggaagatcctcatcaaaaggagttgtttttggcaatgctgatgacagcttgtgatctttctgcaattacaaaaccctggcctattcaacaacggatagcagaacttgtagcaactgaattttttgatcaaggagacagagagagaaaagaactcaacatagaacccactgatctaatgaacagggagaagaaaaacaaaatcccaagtatgcaagttgggttcatagatgccatctgcttgcaactgtatgaggccctgacccacgtgtcaagtggtgtgagcaagggcgccgagctgttcaccggcatcgtgcccatcctgatcgagctgaatggcgatgtgaatggccacaagttcagcgtgagcggcgagggcgagggcgatgccacctacggcaagctgaccctgaagttcatctgcaccaccggcaagctgcctgtgccctggcccaccctggtgaccaccctgagctacggcgtgcagtgcttctcacgctaccccgatcacatgaagcagcacgacttcttcaagagcgccatgcctgagggctacatccaggagcgcaccatcttcttcgaggatgacggcaactacaagtcgcgcgccgaggtgaagttcgagggcgataccctggtgaatcgcatcgagctgaccggcaccgatttcaaggaggatggcaacatcctgggcaataagatggagtacaactacaacgcccacaatgtgtacatcatgaccgacaaggccaagaatggcatcaaggtgaacttcaagatccgccacaacatcgaggatggcagcgtgcagctggccgaccactaccagcagaatacccccatcggcgatggccctgtgctgctgcccgataaccactacctgtccacccagagcgccctgtccaaggaccccaacgagaagcgcgatcacatgatctacttcggcttcgtgaccgccgccgccatcacccacggcatggatgagctgtacaagtga

SEQ ID NO: 223 - protein, 550 aa, Artificial Sequence
  source: /note="Description of Artificial Sequence: Synthetic polypeptide"
MEDAKNIKKGPAPFYPLEDGTAGEQLHKAMKRYALVPGTIAFTDAHIEVDITYAEYFEMSVRLAEAMKRYGLNTNHRIVVCSENSLQFFMPVLGALFIGVAVAPANDIYNERELLNSMGISQPTVVFVSKKGLQKILNVQKKLPIIQKIIIMDSKTDYQGFQSMYTFVTSHLPPGFNEYDFVPESFDRDKTIALIMNSSGSTGLPKGVALPHRTACVRFSHARDPIFGNQIIPDTAILSVVPFHHGFGMFTTLGYLICGFRVVLMYRFEEELFLRSLQDYKIQSALLVPTLFSFFAKSTLIDKYDLSNLHEIASGGAPLSKEVGEAVAKRFHLPGIRQGYGLTETTSAILITPEGDDKPGAVGKVVPFFEAKVVDLDTGKTLGVNQRGELCVRGPMIMSGYVNNPEATNALIDKDGWLHSGDIAYWDEDEHFFIVDRLKSLIKYKGYQVAPAELESILLQHPNIFDAGVAGLPDDDAGELPAAVVVLEHGKTMTEKEIVDYVASQVTTAKKLRGGVVFVDEVPKGLTGKLDARKIREILIKAKKGGKIAV

SEQ ID NO: 224 - DNA, 1650 bp, Artificial Sequence
  source: /note="Description of Artificial Sequence: Synthetic polynucleotide"
atggaagatgccaaaaacattaagaagggcccagcgccattctacccactcgaagacgggaccgccggcgagcagctgcacaaagccatgaagcgctacgccctggtgcccggcaccatcgcctttaccgacgcacatatcgaggtggacattacctacgccgagtacttcgagatgagcgttcggctggcagaagctatgaagcgctatgggctgaatacaaaccatcggatcgtggtgtgcagcgagaatagcttgcagttcttcatgcccgtgttgggtgccctgttcatcggtgtggctgtggccccagctaacgacatctacaacgagcgcgagctgctgaacagcatgggcatcagccagcccaccgtcgtattcgtgagcaagaaagggctgcaaaagatcctcaacgtgcaaaagaagctaccgatcatacaaaagatcatcatcatggatagcaagaccgactaccagggcttccaaagcatgtacaccttcgtgacttcccatttgccacccggcttcaacgagtacgacttcgtgcccgagagcttcgaccgggacaaaaccatcgccctgatcatgaacagtagtggcagtaccggattgcccaagggcgtagccctaccgcaccgcaccgcttgtgtccgattcagtcatgcccgcgaccccatcttcggcaaccagatcatccccgacaccgctatcctcagcgtggtgccatttcaccacggcttcggcatgttcaccacgctgggctacttgatctgcggctttcgggtcgtgctcatgtaccgcttcgaggaggagctattcttgcgcagcttgcaagactataagattcaatctgccctgctggtgcccacactatttagcttcttcgctaagagcactctcatcgacaagtacgacctaagcaacttgcacgagatcgccagcggcggggcgccgctcagcaaggaggtaggtgaggccgtggccaaacgcttccacctaccaggcatccgccagggctacggcctgacagaaacaaccagcgccattctgatcacccccgaaggggacgacaagcctggcgcagtaggcaaggtggtgcccttcttcgaggctaaggtggtggacttggacaccggtaagacactgggtgtgaaccagcgcggcgagctgtgcgtccgtggccccatgatcatgagcggctacgttaacaaccccgaggctacaaacgctctcatcgacaaggacggctggctgcacagcggcgacatcgcctactgggacgaggacgagcacttcttcatcgtggaccggctgaagagcctgatcaaatacaagggctaccaggtagccccagccgaactggagagcatcctgctgcaacaccccaacatcttcgacgccggggtcgccggcctgcccgacgacgatgccggcgagctgcccgccgcagtcgtcgtgctggaacacggtaaaaccatgaccgagaaggagatcgtggactatgtggccagccaggttacaaccgccaagaagctgcgcggtggtgttgtgttcgtggacgaggtgcctaaaggactgaccggcaagttggacgcccgcaagatccgcgagattctcattaaggccaagaagggcggcaagatcgccgtg

SEQ ID NO: 225 - protein, 327 aa, Artificial Sequence
  source: /note="Description of Artificial Sequence: Synthetic Destabilizing Domain (DD)"
MEETRELQSLAAAVVPSAQTLKITDFSFSDFELSDLETALCTIRMFTDLNLVQNFQMKHEVLCRWILSVKKNYRKNVAYHNWRHAFNTAQCMFAALKAGKIQNKLTDLEILALLIAALSHDLDHRGVNNSYIQRSEHPLAQLYCHSIMEHHHFDQCLMILNSPGNQILSGLSIEEYKTTLKIIKQAILATDLALYIKRRGEFAELIRKNQFNLEDPHQKELFLAMLMTACNLSAITKPWPIQQRIAELVATEFFDQGDRERKELNIEPTDLMNREKKNKIPSMQVGFIDAICLQLYEALTHVSEDCFPLLDGCRKNRQKWQALAEQQ

SEQ ID NO: 226 - protein, 327 aa, Artificial Sequence
  source: /note="Description of Artificial Sequence: Synthetic Destabilizing Domain (DD)"
MEETRELQSLAAAVVPSAQTLKITDFSFSDFELSDLETALCTIRMFTDLNLVQNFQMKHEVLCRWILSVKKNYRKNVAYHNWRHAFNTAQCMFAALKAGKIQNKLTDLEILALLIAALSHDLDHRGVNNSYIQRSEHPLAQLYCHSIMEHHHFDQCLMILNSPGNQILSGLSIEEYKTTLKIIKQAILATDLALYIKRLGEFFELIRKNQFNLEDPHQKELFLAMLMTACNLSAITKPWPIQQRIAELVATEFFDQGDRERKELNIEPTDLMNREKKNKIPSMQVGFIDAICLQLYEALTHVSEDCFPLLDGCRKNRQKWQALAEQQ

SEQ ID NO: 227 - protein, 326 aa, Artificial Sequence
  source: /note="Description of Artificial Sequence: Synthetic Destabilizing Domain (DD)"
EETRELQSLAAAVVPSAQTLKITDFSFSDFELSDLETALCTIRMFTDLNLVQNFQMKHEVLCRWILSVKKNYRKNVAYHNWRHAFNTAQCMFAALKAGKIQNKLTDLEILALLIAALSHDLDHRGVNNSYIQRSEHPLAQLYCHSIMEHHHFDQCLMILNSPGNQILSGLSIEEYKTTLKIIKQAILATDLALYIKRLGEFAELIRKNQFNLEDPHQKELFLAMLMTACDLSAITKPWPIQQRIAELVATEFFDQGDRERKELNIEPTDLMNREKKNKIPSMQVGFIDAICLQLYEALTHVSEDCFPLLDGCRKNRQKWQALAEQQ

SEQ ID NO: 228 - protein, 567 aa, Artificial Sequence
  source: /note="Description of Artificial Sequence: Synthetic polypeptide"
MEETRELQSLAAAVVPSAQTLKITDFSFSDFELSDLETALCTIRMFTDLNLVQNFQMKHEVLCRWILSVKKNYRKNVAYHNWRHAFNTAQCMFAALKAGKIQNKLTDLEILALLIAALSHDLDHRGVNNSYIQRSEHPLAQLYCHSIMEHHHFDQCLMILNSPGNQILSGLSIEEYKTTLKIIKQAILATDLALYIKRRGEFAELIRKNQFNLEDPHQKELFLAMLMTACNLSAITKPWPIQQRIAELVATEFFDQGDRERKELNIEPTDLMNREKKNKIPSMQVGFIDAICLQLYEALTHVSEDCFPLLDGCRKNRQKWQALAEQQSGVSKGAELFTGIVPILIELNGDVNGHKFSVSGEGEGDATYGKLTLKFICTTGKLPVPWPTLVTTLSYGVQCFSRYPDHMKQHDFFKSAMPEGYIQERTIFFEDDGNYKSRAEVKFEGDTLVNRIELTGTDFKEDGNILGNKMEYNYNAHNVYIMTDKAKNGIKVNFKIRHNIEDGSVQLADHYQQNTPIGDGPVLLPDNHYLSTQSALSKDPNEKRDHMIYFGFVTAAAITHGMDELYK

SEQ ID NO: 229 - protein, 567 aa, Artificial Sequence
  source: /note="Description of Artificial Sequence: Synthetic polypeptide"
MEETRELQSLAAAVVPSAQTLKITDFSFSDFELSDLETALCTIRMFTDLNLVQNFQMKHEVLCRWILSVKKNYRKNVAYHNWRHAFNTAQCMFAALKAGKIQNKLTDLEILALLIAALSHDLDHRGVNNSYIQRSEHPLAQLYCHSIMEHHHFDQCLMILNSPGNQILSGLSIEEYKTTLKIIKQAILATDLALYIKRLGEFFELIRKNQFNLEDPHQKELFLAMLMTACNLSAITKPWPIQQRIAELVATEFFDQGDRERKELNIEPTDLMNREKKNKIPSMQVGFIDAICLQLYEALTHVSEDCFPLLDGCRKNRQKWQALAEQQSGVSKGAELFTGIVPILIELNGDVNGHKFSVSGEGEGDATYGKLTLKFICTTGKLPVPWPTLVTTLSYGVQCFSRYPDHMKQHDFFKSAMPEGYIQERTIFFEDDGNYKSRAEVKFEGDTLVNRIELTGTDFKEDGNILGNKMEYNYNAHNVYIMTDKAKNGIKVNFKIRHNIEDGSVQLADHYQQNTPIGDGPVLLPDNHYLSTQSALSKDPNEKRDHMIYFGFVTAAAITHGMDELYK

SEQ ID NO: 230 - protein, 878 aa, Artificial Sequence
  source: /note="Description of Artificial Sequence: Synthetic polypeptide"
MEDAKNIKKGPAPFYPLEDGTAGEQLHKAMKRYALVPGTIAFTDAHIEVDITYAEYFEMSVRLAEAMKRYGLNTNHRIVVCSENSLQFFMPVLGALFIGVAVAPANDIYNERELLNSMGISQPTVVFVSKKGLQKILNVQKKLPIIQKIIIMDSKTDYQGFQSMYTFVTSHLPPGFNEYDFVPESFDRDKTIALIMNSSGSTGLPKGVALPHRTACVRFSHARDPIFGNQIIPDTAILSVVPFHHGFGMFTTLGYLICGFRVVLMYRFEEELFLRSLQDYKIQSALLVPTLFSFFAKSTLIDKYDLSNLHEIASGGAPLSKEVGEAVAKRFHLPGIRQGYGLTETTSAILITPEGDDKPGAVGKVVPFFEAKVVDLDTGKTLGVNQRGELCVRGPMIMSGYVNNPEATNALIDKDGWLHSGDIAYWDEDEHFFIVDRLKSLIKYKGYQVAPAELESILLQHPNIFDAGVAGLPDDDAGELPAAVVVLEHGKTMTEKEIVDYVASQVTTAKKLRGGVVFVDEVPKGLTGKLDARKIREILIKAKKGGKIAVSGEETRELQSLAAAVVPSAQTLKITDFSFSDFELSDLETALCTIRMFTDLNLVQNFQMKHEVLCRWILSVKKNYRKNVAYHNWRHAFNTAQCMFAALKAGKIQNKLTDLEILALLIAALSHDLDHRGVNNSYIQRSEHPLAQLYCHSIMEHHHFDQCLMILNSPGNQILSGLSIEEYKTTLKIIKQAILATDLALYIKRLGEFAELIRKNQFNLEDPHQKELFLAMLMTACDLSAITKPWPIQQRIAELVATEFFDQGDRERKELNIEPTDLMNREKKNKIPSMQVGFIDAICLQLYEALTHVSEDCFPLLDGCRKNRQKWQALAEQQ

SEQ ID NO: 231 - DNA, 981 bp, Artificial Sequence
  source: /note="Description of Artificial Sequence: Synthetic Destabilizing Domain (DD)"
atggaagaaacaagagagctacagtcgttagcggctgctgtggtgccatctgcccagacccttaaaattactgactttagcttcagtgactttgagctgtctgatctggaaacagcactgtgtacaattcggatgtttactgacctcaaccttgtgcagaacttccagatgaaacatgaggttctttgcagatggattttaagtgttaagaagaattatcggaagaatgttgcctatcataattggagacatgcctttaatacagctcagtgcatgtttgctgctctaaaagcaggcaaaattcagaacaagctgactgacctggagatacttgcattgctgattgctgcactaagccacgatttggatcaccgtggtgtgaataactcttacatacagcgaagtgaacatccacttgcccagctttactgccattcaatcatggaacaccatcattttgaccagtgcctgatgattcttaatagtccaggcaatcagattctcagtggcctctccattgaagaatataagaccacgttgaaaataatcaagcaagctattttagctacagacctagcactgtacattaagaggcgaggagaatttgctgaacttataagaaaaaatcaattcaatttggaagatcctcatcaaaaggagttgtttttggcaatgctgatgacagcttgtaatctttctgcaattacaaaaccctggcctattcaacaacggatagcagaacttgtagcaactgaattttttgatcaaggagacagagagagaaaagaactcaacatagaacccactgatctaatgaacagggagaagaaaaacaaaatcccaagtatgcaagttgggttcatagatgccatctgcttgcaactgtatgaggccctgacccacgtgtcagaggactgtttccctttgctagatggctgcagaaagaacaggcagaaatggcaggcccttgcagaacagcag

SEQ ID NO: 232 - DNA, 981 bp, Artificial Sequence
  source: /note="Description of Artificial Sequence: Synthetic Destabilizing Domain (DD)"
atggaagaaacaagagagctacagtcgttagcggctgctgtggtgccatctgcccagacccttaaaattactgactttagcttcagtgactttgagctgtctgatctggaaacagcactgtgtacaattcggatgtttactgacctcaaccttgtgcagaacttccagatgaaacatgaggttctttgcagatggattttaagtgttaagaagaattatcggaagaatgttgcctatcataattggagacatgcctttaatacagctcagtgcatgtttgctgctctaaaagcaggcaaaattcagaacaagctgactgacctggagatacttgcattgctgattgctgcactaagccacgatttggatcaccgtggtgtgaataactcttacatacagcgaagtgaacatccacttgcccagctttactgccattcaatcatggaacaccatcattttgaccagtgcctgatgattcttaatagtccaggcaatcagattctcagtggcctctccattgaagaatataagaccacgttgaaaataatcaagcaagctattttagctacagacctagcactgtacattaagaggctaggagaattttttgaacttataagaaaaaatcaattcaatttggaagatcctcatcaaaaggagttgtttttggcaatgctgatgacagcttgtaatctttctgcaattacaaaaccctggcctattcaacaacggatagcagaacttgtagcaactgaattttttgatcaaggagacagagagagaaaagaactcaacatagaacccactgatctaatgaacagggagaagaaaaacaaaatcccaagtatgcaagttgggttcatagatgccatctgcttgcaactgtatgaggccctgacccacgtgtcagaggactgtttccctttgctagatggctgcagaaagaacaggcagaaatggcaggcccttgcagaacagcag

SEQ ID NO: 233 - DNA, 978 bp, Artificial Sequence
  source: /note="Description of Artificial Sequence: Synthetic Destabilizing Domain (DD)"
gaagaaacaagagagctacagtcgttagcggctgctgtggtgccatctgcccagacccttaaaattactgactttagcttcagtgactttgagctgtctgatctggaaacagcactgtgtacaattcggatgtttactgacctcaaccttgtgcagaacttccagatgaaacatgaggttctttgcagatggattttaagtgttaagaagaattatcggaagaatgttgcctatcataattggagacatgcctttaatacagctcagtgcatgtttgctgctctaaaagcaggcaaaattcagaacaagctgactgacctggagatacttgcattgctgattgctgcactaagccacgatttggatcaccgtggtgtgaataactcttacatacagcgaagtgaacatccacttgcccagctttactgccattcaatcatggaacaccatcattttgaccagtgcctgatgattcttaatagtccaggcaatcagattctcagtggcctctccattgaagaatataagaccacgttgaaaataatcaagcaagctattttagctacagacctagcactgtacattaagaggctaggagaatttgctgaacttataagaaaaaatcaattcaatttggaagatcctcatcaaaaggagttgtttttggcaatgctgatgacagcttgtgatctttctgcaattacaaaaccctggcctattcaacaacggatagcagaacttgtagcaactgaattttttgatcaaggagacagagagagaaaagaactcaacatagaacccactgatctaatgaacagggagaagaaaaacaaaatcccaagtatgcaagttgggttcatagatgccatctgcttgcaactgtatgaggccctgacccacgtgtcagaggactgtttccctttgctagatggctgcagaaagaacaggcagaaatggcaggcccttgcagaacagcag

SEQ ID NO: 234 - DNA, 1704 bp, Artificial Sequence
  source: /note="Description of Artificial Sequence: Synthetic polynucleotide"
atggaagaaacaagagagctacagtcgttagcggctgctgtggtgccatctgcccagacccttaaaattactgactttagcttcagtgactttgagctgtctgatctggaaacagcactgtgtacaattcggatgtttactgacctcaaccttgtgcagaacttccagatgaaacatgaggttctttgcagatggattttaagtgttaagaagaattatcggaagaatgttgcctatcataattggagacatgcctttaatacagctcagtgcatgtttgctgctctaaaagcaggcaaaattcagaacaagctgactgacctggagatacttgcattgctgattgctgcactaagccacgatttggatcaccgtggtgtgaataactcttacatacagcgaagtgaacatccacttgcccagctttactgccattcaatcatggaacaccatcattttgaccagtgcctgatgattcttaatagtccaggcaatcagattctcagtggcctctccattgaagaatataagaccacgttgaaaataatcaagcaagctattttagctacagacctagcactgtacattaagaggcgaggagaatttgctgaacttataagaaaaaatcaattcaatttggaagatcctcatcaaaaggagttgtttttggcaatgctgatgacagcttgtaatctttctgcaattacaaaaccctggcctattcaacaacggatagcagaacttgtagcaactgaattttttgatcaaggagacagagagagaaaagaactcaacatagaacccactgatctaatgaacagggagaagaaaaacaaaatcccaagtatgcaagttgggttcatagatgccatctgcttgcaactgtatgaggccctgacccacgtgtcagaggactgtttccctttgctagatggctgcagaaagaacaggcagaaatggcaggcccttgcagaacagcagagtggtgtgagcaagggcgccgagctgttcaccggcatcgtgcccatcctgatcgagctgaatggcgatgtgaatggccacaagttcagcgtgagcggcgagggcgagggcgatgccacctacggcaagctgaccctgaagttcatctgcaccaccggcaagctgcctgtgccctggcccaccctggtgaccaccctgagctacggcgtgcagtgcttctcacgctaccccgatcacatgaagcagcacgacttcttcaagagcgccatgcctgagggctacatccaggagcgcaccatcttcttcgaggatgacggcaactacaagtcgcgcgccgaggtgaagttcgagggcgataccctggtgaatcgcatcgagctgaccggcaccgatttcaaggaggatggcaacatcctgggcaataagatggagtacaactacaacgcccacaatgtgtacatcatgaccgacaaggccaagaatggcatcaaggtgaacttcaagatccgccacaacatcgaggatggcagcgtgcagctggccgaccactaccagcagaatacccccatcggcgatggccctgtgctgctgcccgataaccactacctgtccacccagagcgccctgtccaaggaccccaacgagaagcgcgatcacatgatctacttcggcttcgtgaccgccgccgccatcacccacggcatggatgagctgtacaagtga

SEQ ID NO: 235 - DNA, 1704 bp, Artificial Sequence
  source: /note="Description of Artificial Sequence: Synthetic polynucleotide"
atggaagaaacaagagagctacagtcgttagcggctgctgtggtgccatctgcccagacccttaaaattactgactttagcttcagtgactttgagctgtctgatctggaaacagcactgtgtacaattcggatgtttactgacctcaaccttgtgcagaacttccagatgaaacatgaggttctttgcagatggattttaagtgttaagaagaattatcggaagaatgttgcctatcataattggagacatgcctttaatacagctcagtgcatgtttgctgctctaaaagcaggcaaaattcagaacaagctgactgacctggagatacttgcattgctgattgctgcactaagccacgatttggatcaccgtggtgtgaataactcttacatacagcgaagtgaacatccacttgcccagctttactgccattcaatcatggaacaccatcattttgaccagtgcctgatgattcttaatagtccaggcaatcagattctcagtggcctctccattgaagaatataagaccacgttgaaaataatcaagcaagctattttagctacagacctagcactgtacattaagaggctaggagaattttttgaacttataagaaaaaatcaattcaatttggaagatcctcatcaaaaggagttgtttttggcaatgctgatgacagcttgtaatctttctgcaattacaaaaccctggcctattcaacaacggatagcagaacttgtagcaactgaattttttgatcaaggagacagagagagaaaagaactcaacatagaacccactgatctaatgaacagggagaagaaaaacaaaatcccaagtatgcaagttgggttcatagatgccatctgcttgcaactgtatgaggccctgacccacgtgtcagaggactgtttccctttgctagatggctgcagaaagaacaggcagaaatggcaggcccttgcagaacagcagagtggtgtgagcaagggcgccgagctgttcaccggcatcgtgcccatcctgatcgagctgaatggcgatgtgaatggccacaagttcagcgtgagcggcgagggcgagggcgatgccacctacggcaagctgaccctgaagttcatctgcaccaccggcaagctgcctgtgccctggcccaccctggtgaccaccctgagctacggcgtgcagtgcttctcacgctaccccgatcacatgaagcagcacgacttcttcaagagcgccatgcctgagggctacatccaggagcgcaccatcttcttcgaggatgacggcaactacaagtcgcgcgccgaggtgaagttcgagggcgataccctggtgaatcgcatcgagctgaccggcaccgatttcaaggaggatggcaacatcctgggcaataagatggagtacaactacaacgcccacaatgtgtacatcatgaccgacaaggccaagaatggcatcaaggtgaacttcaagatccgccacaacatcgaggatggcagcgtgcagctggccgaccactaccagcagaatacccccatcggcgatggccctgtgctgctgcccgataaccactacctgtccacccagagcgccctgtccaaggaccccaacgagaagcgcgatcacatgatctacttcggcttcgtgaccgccgccgccatcacccacggcatggatgagctgtacaagtga

SEQ ID NO: 236 - DNA, 2637 bp, Artificial Sequence
  source: /note="Description of Artificial Sequence: Synthetic polynucleotide"
atggaagatgccaaaaacattaagaagggcccagcgccattctacccactcgaagacgggaccgccggcgagcagctgcacaaagccatgaagcgctacgccctggtgcccggcaccatcgcctttaccgacgcacatatcgaggtggacattacctacgccgagtacttcgagatgagcgttcggctggcagaagctatgaagcgctatgggctgaatacaaaccatcggatcgtggtgtgcagcgagaatagcttgcagttcttcatgcccgtgttgggtgccctgttcatcggtgtggctgtggccccagctaacgacatctacaacgagcgcgagctgctgaacagcatgggcatcagccagcccaccgtcgtattcgtgagcaagaaagggctgcaaaagatcctcaacgtgcaaaagaagctaccgatcatacaaaagatcatcatcatggatagcaagaccgactaccagggcttccaaagcatgtacaccttcgtgacttcccatttgccacccggcttcaacgagtacgacttcgtgcccgagagcttcgaccgggacaaaaccatcgccctgatcatgaacagtagtggcagtaccggattgcccaagggcgtagccctaccgcaccgcaccgcttgtgtccgattcagtcatgcccgcgaccccatcttcggcaaccagatcatccccgacaccgctatcctcagcgtggtgccatttcaccacggcttcggcatgttcaccacgctgggctacttgatctgcggctttcgggtcgtgctcatgtaccgcttcgaggaggagctattcttgcgcagcttgcaagactataagattcaatctgccctgctggtgcccacactatttagcttcttcgctaagagcactctcatcgacaagtacgacctaagcaacttgcacgagatcgccagcggcggggcgccgctcagcaaggaggtaggtgaggccgtggccaaacgcttccacctaccaggcatccgccagggctacggcctgacagaaacaaccagcgccattctgatcacccccgaaggggacgacaagcctggcgcagtaggcaaggtggtgcccttcttcgaggctaaggtggtggacttggacaccggtaagacactgggtgtgaaccagcgcggcgagctgtgcgtccgtggccccatgatcatgagcggctacgttaacaaccccgaggctacaaacgctctcatcgacaaggacggctggctgcacagcggcgacatcgcctactgggacgaggacgagcacttcttcatcgtggaccggctgaagagcctgatcaaatacaagggctaccaggtagccccagccgaactggagagcatcctgctgcaacaccccaacatcttcgacgccggggtcgccggcctgcccgacgacgatgccggcgagctgcccgccgcagtcgtcgtgctggaacacggtaaaaccatgaccgagaaggagatcgtggactatgtggccagccaggttacaaccgccaagaagctgcgcggtggtgttgtgttcgtggacgaggtgcctaaaggactgaccggcaagttggacgcccgcaagatccgcgagattctcattaaggccaagaagggcggcaagatcgccgtgagtggtgaagaaacaagagagctacagtcgttagcggctgctgtggtgccatctgcccagacccttaaaattactgactttagcttcagtgactttgagctgtctgatctggaaacagcactgtgtacaattcggatgtttactgacctcaaccttgtgcagaacttccagatgaaacatgaggttctttgcagatggattttaagtgttaagaagaattatcggaagaatgttgcctatcataattggagacatgcctttaatacagctcagtgcatgtttgctgctctaaaagcaggcaaaattcagaacaagctgactgacctggagatacttgcattgctgattgctgcactaagccacgatttggatcaccgtggtgtgaataactcttacatacagcgaagtgaacatccacttgcccagctttactgccattcaatcatggaacaccatcattttgaccagtgcctgatgattcttaatagtccaggcaatcagattctcagtggcctctccattgaagaatataagaccacgttgaaaataatcaagcaagctattttagctacagacctagcactgtacattaagaggctaggagaatttgctgaacttataagaaaaaatcaattcaatttggaagatcctcatcaaaaggagttgtttttggcaatgctgatgacagcttgtgatctttctgcaattacaaaaccctggcctattcaacaacggatagcagaacttgtagcaactgaattttttgatcaaggagacagagagagaaaagaactcaacatagaacccactgatctaatgaacagggagaagaaaaacaaaatcccaagtatgcaagttgggttcatagatgccatctgcttgcaactgtatgaggccctgacccacgtgtcagaggactgtttccctttgctagatggctgcagaaagaacaggcagaaatggcaggcccttgcagaacagcagtga

SEQ ID NO: 237 - protein, 327 aa, Artificial Sequence
  source: /note="Description of Artificial Sequence: Synthetic Destabilizing Domain (DD)"
MEETRELQSLAAAVVPSAQTLKITDFSFSDFELSDLETALCTIRMFTDLNLVQNFQMKHEVLCRWILSVKKNYRKNVAYHNWRHAFNTAQCMFAALKAGKIQNKLTDLEILALLIAALSHDLDHRGVNNSYIQRSEHPLAQLYCHSIMEHHHFDQCLMILNSPGNQILSGLSIEEYKTTLKIIKQAILATDLALYIKRRGEFFELIRKNQFNLEDPHQKELFLAMLMTACDLSAITKPWPIQQRIAELVATEFFDQGDRERKELNIEPTDLMNREKKNKIPSMQVGFIDAICLQLYEALTHVSEDCFPLLDGCRKNRQKWQALAEQQ

SEQ ID NO: 238 - protein, 327 aa, Artificial Sequence
  source: /note="Description of Artificial Sequence: Synthetic Destabilizing Domain (DD)"
MEETRELQSLAAAVVPSAQTLKITDFSFSDFELSDLETALCTIRMFTDLNLVQNFQMKHEVLCRWILSVKKNYRKNVAYHNWRHAFNTAQCMFAALKAGKIQNKLTDLEILALLIAALSHDLDHRGVNNSYIQRSEHPLAQLYCHSIMEHHHFDQCLMILNSPGNQILSGLSIEEYKTTLKIIKQAILATDLALYIKRLGEFFELIRKNQFNLEDPHQKELFLAMLMTACDLSAITKPWPIQQRIAELVATEFFDQGDRERKELNIEPTDLMNREKKNKIPSMQVGFIDAICLQLYEALTHVSEDCFPLLDGCRKNRQKWQALAEQQ

SEQ ID NO: 239 - protein, 303 aa, Artificial Sequence
  source: /note="Description of Artificial Sequence: Synthetic Destabilizing Domain (DD)"
MEETRELQSLAAAVVPSAQTLKITDFSFSDFELSDLETALCTIRMFTDLNLVQNFQMKHEVLCRWILSVKKNYRKNVAYHNWRHAFNTAQCMFAALKAGKIQNKLTDLEILALLIAALSHDLDHRGVNNSYIQRSEHPLAQLYCHSIMEHHHFDQCLMILNSPGNQILSGLSIEEYKTTLKIIKQAILATDLALYIKRLGEFFELIRKNQFNLEDPHQKELFLAMLMTACDLSAITKPWPIQQRIAELVATEFFDQGDRERKELNIEPTDLMNREKKNKIPSMQVGFIDAICLQLYEALTHVS

SEQ ID NO: 240 - protein, 295 aa, Artificial Sequence
  source: /note="Description of Artificial Sequence: Synthetic Destabilizing Domain (DD)"
MSDLETALCTIRMFTDLNLVQNFQMKHEVLCRWILSVKKNYRKNVAYHNWRHAFNTAQCMFAALKAGKIQNKLTDLEILALLIAALSHDLDHRGVNNSYIQRSEHPLAQLYCHSIMEHHHFDQCLMILNSPGNQILSGLSIEEYKTTLKIIKQAILATDLALYIKRLGEFFELIRKNQFNLEDPHQKELFLAMLMTACDLSAITKPWPIQQRIAELVATEFFDQGDRERKELNIEPTDLMNREKKNKIPSMQVGFIDAICLQLYEALTHVSEDCFPLLDGCRKNRQKWQALAEQQ

SEQ ID NO: 241 - protein, 271 aa, Artificial Sequence
  source: /note="Description of Artificial Sequence: Synthetic Destabilizing Domain (DD)"
MKHEVLCRWILSVKKNYRKNVAYHNWRHAFNTAQCMFAALKAGKIQNKLTDLEILALLIAALSHDLDHRGVNNSYIQRSEHPLAQLYCHSIMEHHHFDQCLMILNSPGNQILSGLSIEEYKTTLKIIKQAILATDLALYIKRLGEFFELIRKNQFNLEDPHQKELFLAMLMTACDLSAITKPWPIQQRIAELVATEFFDQGDRERKELNIEPTDLMNREKKNKIPSMQVGFIDAICLQLYEALTHVSEDCFPLLDGCRKNRQKWQALAEQQ

SEQ ID NO: 242 - protein, 247 aa, Artificial Sequence
  source: /note="Description of Artificial Sequence: Synthetic Destabilizing Domain (DD)"
MKHEVLCRWILSVKKNYRKNVAYHNWRHAFNTAQCMFAALKAGKIQNKLTDLEILALLIAALSHDLDHRGVNNSYIQRSEHPLAQLYCHSIMEHHHFDQCLMILNSPGNQILSGLSIEEYKTTLKIIKQAILATDLALYIKRLGEFFELIRKNQFNLEDPHQKELFLAMLMTACDLSAITKPWPIQQRIAELVATEFFDQGDRERKELNIEPTDLMNREKKNKIPSMQVGFIDAICLQLYEALTHVS

SEQ ID NO: 243 - protein, 567 aa, Artificial Sequence
  source: /note="Description of Artificial Sequence: Synthetic polypeptide"
MEETRELQSLAAAVVPSAQTLKITDFSFSDFELSDLETALCTIRMFTDLNLVQNFQMKHEVLCRWILSVKKNYRKNVAYHNWRHAFNTAQCMFAALKAGKIQNKLTDLEILALLIAALSHDLDHRGVNNSYIQRSEHPLAQLYCHSIMEHHHFDQCLMILNSPGNQILSGLSIEEYKTTLKIIKQAILATDLALYIKRRGEFFELIRKNQFNLEDPHQKELFLAMLMTACDLSAITKPWPIQQRIAELVATEFFDQGDRERKELNIEPTDLMNREKKNKIPSMQVGFIDAICLQLYEALTHVSEDCFPLLDGCRKNRQKWQALAEQQSGVSKGAELFTGIVPILIELNGDVNGHKFSVSGEGEGDATYGKLTLKFICTTGKLPVPWPTLVTTLSYGVQCFSRYPDHMKQHDFFKSAMPEGYIQERTIFFEDDGNYKSRAEVKFEGDTLVNRIELTGTDFKEDGNILGNKMEYNYNAHNVYIMTDKAKNGIKVNFKIRHNIEDGSVQLADHYQQNTPIGDGPVLLPDNHYLSTQSALSKDPNEKRDHMIYFGFVTAAAITHGMDELYK

SEQ ID NO: 244 - protein, 567 aa, Artificial Sequence
  source: /note="Description of Artificial Sequence: Synthetic polypeptide"
MEETRELQSLAAAVVPSAQTLKITDFSFSDFELSDLETALCTIRMFTDLNLVQNFQMKHEVLCRWILSVKKNYRKNVAYHNWRHAFNTAQCMFAALKAGKIQNKLTDLEILALLIAALSHDLDHRGVNNSYIQRSEHPLAQLYCHSIMEHHHFDQCLMILNSPGNQILSGLSIEEYKTTLKIIKQAILATDLALYIKRLGEFFELIRKNQFNLEDPHQKELFLAMLMTACDLSAITKPWPIQQRIAELVATEFFDQGDRERKELNIEPTDLMNREKKNKIPSMQVGFIDAICLQLYEALTHVSEDCFPLLDGCRKNRQKWQALAEQQSGVSKGAELFTGIVPILIELNGDVNGHKFSVSGEGEGDATYGKLTLKFICTTGKLPVPWPTLVTTLSYGVQCFSRYPDHMKQHDFFKSAMPEGYIQERTIFFEDDGNYKSRAEVKFEGDTLVNRIELTGTDFKEDGNILGNKMEYNYNAHNVYIMTDKAKNGIKVNFKIRHNIEDGSVQLADHYQQNTPIGDGPVLLPDNHYLSTQSALSKDPNEKRDHMIYFGFVTAAAITHGMDELYK

SEQ ID NO: 245 - protein, 543 aa, Artificial Sequence
  source: /note="Description of Artificial Sequence: Synthetic polypeptide"
MEETRELQSLAAAVVPSAQTLKITDFSFSDFELSDLETALCTIRMFTDLNLVQNFQMKHEVLCRWILSVKKNYRKNVAYHNWRHAFNTAQCMFAALKAGKIQNKLTDLEILALLIAALSHDLDHRGVNNSYIQRSEHPLAQLYCHSIMEHHHFDQCLMILNSPGNQILSGLSIEEYKTTLKIIKQAILATDLALYIKRLGEFFELIRKNQFNLEDPHQKELFLAMLMTACDLSAITKPWPIQQRIAELVATEFFDQGDRERKELNIEPTDLMNREKKNKIPSMQVGFIDAICLQLYEALTHVSSGVSKGAELFTGIVPILIELNGDVNGHKFSVSGEGEGDATYGKLTLKFICTTGKLPVPWPTLVTTLSYGVQCFSRYPDHMKQHDFFKSAMPEGYIQERTIFFEDDGNYKSRAEVKFEGDTLVNRIELTGTDFKEDGNILGNKMEYNYNAHNVYIMTDKAKNGIKVNFKIRHNIEDGSVQLADHYQQNTPIGDGPVLLPDNHYLSTQSALSKDPNEKRDHMIYFGFVTAAAITHGMDELYK

SEQ ID NO: 246 - protein, 535 aa, Artificial Sequence
  source: /note="Description of Artificial Sequence: Synthetic polypeptide"
MSDLETALCTIRMFTDLNLVQNFQMKHEVLCRWILSVKKNYRKNVAYHNWRHAFNTAQCMFAALKAGKIQNKLTDLEILALLIAALSHDLDHRGVNNSYIQRSEHPLAQLYCHSIMEHHHFDQCLMILNSPGNQILSGLSIEEYKTTLKIIKQAILATDLALYIKRLGEFFELIRKNQFNLEDPHQKELFLAMLMTACDLSAITKPWPIQQRIAELVATEFFDQGDRERKELNIEPTDLMNREKKNKIPSMQVGFIDAICLQLYEALTHVSEDCFPLLDGCRKNRQKWQALAEQQSGVSKGAELFTGIVPILIELNGDVNGHKFSVSGEGEGDATYGKLTLKFICTTGKLPVPWPTLVTTLSYGVQCFSRYPDHMKQHDFFKSAMPEGYIQERTIFFEDDGNYKSRAEVKFEGDTLVNRIELTGTDFKEDGNILGNKMEYNYNAHNVYIMTDKAKNGIKVNFKIRHNIEDGSVQLADHYQQNTPIGDGPVLLPDNHYLSTQSALSKDPNEKRDHMIYFGFVTAAAITHGMDELYK

SEQ ID NO: 247 - protein, 511 aa, Artificial Sequence
  source: /note="Description of Artificial Sequence: Synthetic polypeptide"
MKHEVLCRWILSVKKNYRKNVAYHNWRHAFNTAQCMFAALKAGKIQNKLTDLEILALLIAALSHDLDHRGVNNSYIQRSEHPLAQLYCHSIMEHHHFDQCLMILNSPGNQILSGLSIEEYKTTLKIIKQAILATDLALYIKRLGEFFELIRKNQFNLEDPHQKELFLAMLMTACDLSAITKPWPIQQRIAELVATEFFDQGDRERKELNIEPTDLMNREKKNKIPSMQVGFIDAICLQLYEALTHVSEDCFPLLDGCRKNRQKWQALAEQQSGVSKGAELFTGIVPILIELNGDVNGHKFSVSGEGEGDATYGKLTLKFICTTGKLPVPWPTLVTTLSYGVQCFSRYPDHMKQHDFFKSAMPEGYIQERTIFFEDDGNYKSRAEVKFEGDTLVNRIELTGTDFKEDGNILGNKMEYNYNAHNVYIMTDKAKNGIKVNFKIRHNIEDGSVQLADHYQQNTPIGDGPVLLPDNHYLSTQSALSKDPNEKRDHMIYFGFVTAAAITHGMDELYK

SEQ ID NO: 248 - protein, 487 aa, Artificial Sequence
  source: /note="Description of Artificial Sequence: Synthetic polypeptide"
MKHEVLCRWILSVKKNYRKNVAYHNWRHAFNTAQCMFAALKAGKIQNKLTDLEILALLIAALSHDLDHRGVNNSYIQRSEHPLAQLYCHSIMEHHHFDQCLMILNSPGNQILSGLSIEEYKTTLKIIKQAILATDLALYIKRLGEFFELIRKNQFNLEDPHQKELFLAMLMTACDLSAITKPWPIQQRIAELVATEFFDQGDRERKELNIEPTDLMNREKKNKIPSMQVGFIDAICLQLYEALTHVSSGVSKGAELFTGIVPILIELNGDVNGHKFSVSGEGEGDATYGKLTLKFICTTGKLPVPWPTLVTTLSYGVQCFSRYPDHMKQHDFFKSAMPEGYIQERTIFFEDDGNYKSRAEVKFEGDTLVNRIELTGTDFKEDGNILGNKMEYNYNAHNVYIMTDKAKNGIKVNFKIRHNIEDGSVQLADHYQQNTPIGDGPVLLPDNHYLSTQSALSKDPNEKRDHMIYFGFVTAAAITHGMDELYK

SEQ ID NO: 249 - skipped

SEQ ID NO: 250 - DNA, 981 bp, Artificial Sequence
  source: /note="Description of Artificial Sequence: Synthetic Destabilizing Domain (DD)"
atggaagaaacaagagagctacagtcgttagcggctgctgtggtgccatctgcccagacccttaaaattactgactttagcttcagtgactttgagctgtctgatctggaaacagcactgtgtacaattcggatgtttactgacctcaaccttgtgcagaacttccagatgaaacatgaggttctttgcagatggattttaagtgttaagaagaattatcggaagaatgttgcctatcataattggagacatgcctttaatacagctcagtgcatgtttgctgctctaaaagcaggcaaaattcagaacaagctgactgacctggagatacttgcattgctgattgctgcactaagccacgatttggatcaccgtggtgtgaataactcttacatacagcgaagtgaacatccacttgcccagctttactgccattcaatcatggaacaccatcattttgaccagtgcctgatgattcttaatagtccaggcaatcagattctcagtggcctctccattgaagaatataagaccacgttgaaaataatcaagcaagctattttagctacagacctagcactgtacattaagcggctaggagaattttttgaacttataagaaaaaatcaattcaatttggaagatcctcatcaaaaggagttgtttttggcaatgctgatgacagcttgtgatctttctgcaattacaaaaccctggcctattcaacaacggatagcagaacttgtagcaactgaattttttgatcaaggagacagagagagaaaagaactcaacatagaacccactgatctaatgaacagggagaagaaaaacaaaatcccaagtatgcaagttgggttcatagatgccatctgcttgcaactgtatgaggccctgacccacgtgtcagaggactgtttccctttgctagatggctgcagaaagaacaggcagaaatggcaggcccttgcagaacagcag

SEQ ID NO: 251 - DNA, 909 bp, Artificial Sequence
  source: /note="Description of Artificial Sequence: Synthetic Destabilizing Domain (DD)"
atggaagaaacaagagagctacagtcgttagcggctgctgtggtgccatctgcccagacccttaaaattactgactttagcttcagtgactttgagctgtctgatctggaaacagcactgtgtacaattcggatgtttactgacctcaaccttgtgcagaacttccagatgaaacatgaggttctttgcagatggattttaagtgttaagaagaattatcggaagaatgttgcctatcataattggagacatgcctttaatacagctcagtgcatgtttgctgctctaaaagcaggcaaaattcagaacaagctgactgacctggagatacttgcattgctgattgctgcactaagccacgatttggatcaccgtggtgtgaataactcttacatacagcgaagtgaacatccacttgcccagctttactgccattcaatcatggaacaccatcattttgaccagtgcctgatgattcttaatagtccaggcaatcagattctcagtggcctctccattgaagaatataagaccacgttgaaaataatcaagcaagctattttagctacagacctagcactgtacattaagcggctaggagaattttttgaacttataagaaaaaatcaattcaatttggaagatcctcatcaaaaggagttgtttttggcaatgctgatgacagcttgtgatctttctgcaattacaaaaccctggcctattcaacaacggatagcagaacttgtagcaactgaattttttgatcaaggagacagagagagaaaagaactcaacatagaacccactgatctaatgaacagggagaagaaaaacaaaatcccaagtatgcaagttgggttcatagatgccatctgcttgcaactgtatgaggccctgacccacgtgtca

SEQ ID NO: 252 - DNA, 885 bp, Artificial Sequence
  source: /note="Description of Artificial Sequence: Synthetic Destabilizing Domain (DD)"
atgagtgatctggaaacagcactgtgtacaattcggatgtttactgacctcaaccttgtgcagaacttccagatgaaacatgaggttctttgcagatggattttaagtgttaagaagaattatcggaagaatgttgcctatcataattggagacatgcctttaatacagctcagtgcatgtttgctgctctaaaagcaggcaaaattcagaacaagctgactgacctggagatacttgcattgctgattgctgcactaagccacgatttggatcaccgtggtgtgaataactcttacatacagcgaagtgaacatccacttgcccagctttactgccattcaatcatggaacaccatcattttgaccagtgcctgatgattcttaatagtccaggcaatcagattctcagtggcctctccattgaagaatataagaccacgttgaaaataatcaagcaagctattttagctacagacctagcactgtacattaagcggctaggagaattttttgaacttataagaaaaaatcaattcaatttggaagatcctcatcaaaaggagttgtttttggcaatgctgatgacagcttgtgatctttctgcaattacaaaaccctggcctattcaacaacggatagcagaacttgtagcaactgaattttttgatcaaggagacagagagagaaaagaactcaacatagaacccactgatctaatgaacagggagaagaaaaacaaaatcccaagtatgcaagttgggttcatagatgccatctgcttgcaactgtatgaggccctgacccacgtgtcagaggactgtttccctttgctagatggctgcagaaagaacaggcagaaatggcaggcccttgcagaacagcag

SEQ ID NO: 253 - DNA, 813 bp, Artificial Sequence
  source: /note="Description of Artificial Sequence: Synthetic Destabilizing Domain (DD)"
atgaaacatgaggttctttgcagatggattttaagtgttaagaagaattatcggaagaatgttgcctatcataattggagacatgcctttaatacagctcagtgcatgtttgctgctctaaaagcaggcaaaattcagaacaagctgactgacctggagatacttgcattgctgattgctgcactaagccacgatttggatcaccgtggtgtgaataactcttacatacagcgaagtgaacatccacttgcccagctttactgccattcaatcatggaacaccatcattttgaccagtgcctgatgattcttaatagtccaggcaatcagattctcagtggcctctccattgaagaatataagaccacgttgaaaataatcaagcaagctattttagctacagacctagcactgtacattaagcggctaggagaattttttgaacttataagaaaaaatcaattcaatttggaagatcctcatcaaaaggagttgtttttggcaatgctgatgacagcttgtgatctttctgcaattacaaaaccctggcctattcaacaacggatagcagaacttgtagcaactgaattttttgatcaaggagacagagagagaaaagaactcaacatagaacccactgatctaatgaacagggagaagaaaaacaaaatcccaagtatgcaagttgggttcatagatgccatctgcttgcaactgtatgaggccctgacccacgtgtcagaggactgtttccctttgctagatggctgcagaaagaacaggcagaaatggcaggcccttgcagaacagcag

SEQ ID NO: 254 - DNA, 741 bp, Artificial Sequence
  source: /note="Description of Artificial Sequence: Synthetic Destabilizing Domain (DD)"
atgaaacatgaggttctttgcagatggattttaagtgttaagaagaattatcggaagaatgttgcctatcataattggagacatgcctttaatacagctcagtgcatgtttgctgctctaaaagcaggcaaaattcagaacaagctgactgacctggagatacttgcattgctgattgctgcactaagccacgatttggatcaccgtggtgtgaataactcttacatacagcgaagtgaacatccacttgcccagctttactgccattcaatcatggaacaccatcattttgaccagtgcctgatgattcttaatagtccaggcaatcagattctcagtggcctctccattgaagaatataagaccacgttgaaaataatcaagcaagctattttagctacagacctagcactgtacattaagcggctaggagaattttttgaacttataagaaaaaatcaattcaatttggaagatcctcatcaaaaggagttgtttttggcaatgctgatgacagcttgtgatctttctgcaattacaaaaccctggcctattcaacaacggatagcagaacttgtagcaactgaattttttgatcaaggagacagagagagaaaagaactcaacatagaacccactgatctaatgaacagggagaagaaaaacaaaatcccaagtatgcaagttgggttcatagatgccatctgcttgcaactgtatgaggccctgacccacgtgtca

SEQ ID NO: 255 - DNA, 1704 bp, Artificial Sequence
  source: /note="Description of Artificial Sequence: Synthetic polynucleotide"
atggaagaaacaagagagctacagtcgttagcggctgctgtggtgccatctgcccagacccttaaaattactgactttagcttcagtgactttgagctgtctgatctggaaacagcactgtgtacaattcggatgtttactgacctcaaccttgtgcagaacttccagatgaaacatgaggttctttgcagatggattttaagtgttaagaagaattatcggaagaatgttgcctatcataattggagacatgcctttaatacagctcagtgcatgtttgctgctctaaaagcaggcaaaattcagaacaagctgactgacctggagatacttgcattgctgattgctgcactaagccacgatttggatcaccgtggtgtgaataactcttacatacagcgaagtgaacatccacttgcccagctttactgccattcaatcatggaacaccatcattttgaccagtgcctgatgattcttaatagtccaggcaatcagattctcagtggcctctccattgaagaatataagaccacgttgaaaataatcaagcaagctattttagctacagacctagcactgtacattaagaggcgaggagaattttttgaacttataagaaaaaatcaattcaatttggaagatcctcatcaaaaggagttgtttttggcaatgctgatgacagcttgtgatctttctgcaattacaaaaccctggcctattcaacaacggatagcagaacttgtagcaactgaattttttgatcaaggagacagagagagaaaagaactcaacatagaacccactgatctaatgaacagggagaagaaaaacaaaatcccaagtatgcaagttgggttcatagatgccatctgcttgcaactgtatgaggccctgacccacgtgtcagaggactgtttccctttgctagatggctgcagaaagaacaggcagaaatggcaggcccttgcagaacagcagagtggtgtgagcaagggcgccgagctgttcaccggcatcgtgcccatcctgatcgagctgaatggcgatgtgaatggccacaagttcagcgtgagcggcgagggcgagggcgatgccacctacggcaagctgaccctgaagttcatctgcaccaccggcaagctgcctgtgccctggcccaccctggtgaccaccctgagctacggcgtgcagtgcttctcacgctaccccgatcacatgaagcagcacgacttcttcaagagcgccatgcctgagggctacatccaggagcgcaccatcttcttcgaggatgacggcaactacaagtcgcgcgccgaggtgaagttcgagggcgataccctggtgaatcgcatcgagctgaccggcaccgatttcaaggaggatggcaacatcctgggcaataagatggagtacaactacaacgcccacaatgtgtacatcatgaccgacaaggccaagaatggcatcaaggtgaacttcaagatccgccacaacatcgaggatggcagcgtgcagctggccgaccactaccagcagaatacccccatcggcgatggccctgtgctgctgcccgataaccactacctgtccacccagagcgccctgtccaaggaccccaacgagaagcgcgatcacatgatctacttcggcttcgtgaccgccgccgccatcacccacggcatggatgagctgtacaagtga

SEQ ID NO: 256 - DNA, 1704 bp, Artificial Sequence
  source: /note="Description of Artificial Sequence: Synthetic polynucleotide"
atggaagaaacaagagagctacagtcgttagcggctgctgtggtgccatctgcccagacccttaaaattactgactttagcttcagtgactttgagctgtctgatctggaaacagcactgtgtacaattcggatgtttactgacctcaaccttgtgcagaacttccagatgaaacatgaggttctttgcagatggattttaagtgttaagaagaattatcggaagaatgttgcctatcataattggagacatgcctttaatacagctcagtgcatgtttgctgctctaaaagcaggcaaaattcagaacaagctgactgacctggagatacttgcattgctgattgctgcactaagccacgatttggatcaccgtggtgtgaataactcttacatacagcgaagtgaacatccacttgcccagctttactgccattcaatcatggaacaccatcattttgaccagtgcctgatgattcttaatagtccaggcaatcagattctcagtggcctctccattgaagaatataagaccacgttgaaaataatcaagcaagctattttagctacagacctagcactgtacattaagcggctaggagaattttttgaacttataagaaaaaatcaattcaatttggaagatcctcatcaaaaggagttgtttttggcaatgctgatgacagcttgtgatctttctgcaattacaaaaccctggcctattcaacaacggatagcagaacttgtagcaactgaattttttgatcaaggagacagagagagaaaagaactcaacatagaacccactgatctaatgaacagggagaagaaaaacaaaatcccaagtatgcaagttgggttcatagatgccatctgcttgcaactgtatgaggccctgacccacgtgtcagaggactgtttccctttgctagatggctgcagaaagaacaggcagaaatggcaggcccttgcagaacagcagagtggtgtgagcaagggcgccgagctgttcaccggcatcgtgcccatcctgatcgagctgaatggcgatgtgaatggccacaagttcagcgtgagcggcgagggcgagggcgatgccacctacggcaagctgaccctgaagttcatctgcaccaccggcaagctgcctgtgccctggcccaccctggtgaccaccctgagctacggcgtgcagtgcttctcacgctaccccgatcacatgaagcagcacgacttcttcaagagcgccatgcctgagggctacatccaggagcgcaccatcttcttcgaggatgacggcaactacaagtcgcgcgccgaggtgaagttcgagggcgataccctggtgaatcgcatcgagctgaccggcaccgatttcaaggaggatggcaacatcctgggcaataagatggagtacaactacaacgcccacaatgtgtacatcatgaccgacaaggccaagaatggcatcaaggtgaacttcaagatccgccacaacatcgaggatggcagcgtgcagctggccgaccactaccagcagaatacccccatcggcgatggccctgtgctgctgcccgataaccactacctgtccacccagagcgccctgtccaaggaccccaacgagaagcgcgatcacatgatctacttcggcttcgtgaccgccgccgccatcacccacggcatggatgagctgtacaagtga

SEQ ID NO: 257 - DNA, 1632 bp, Artificial Sequence
  source: /note="Description of Artificial Sequence: Synthetic polynucleotide"
atggaagaaacaagagagctacagtcgttagcggctgctgtggtgccatctgcccagacccttaaaattactgactttagcttcagtgactttgagctgtctgatctggaaacagcactgtgtacaattcggatgtttactgacctcaaccttgtgcagaacttccagatgaaacatgaggttctttgcagatggattttaagtgttaagaagaattatcggaagaatgttgcctatcataattggagacatgcctttaatacagctcagtgcatgtttgctgctctaaaagcaggcaaaattcagaacaagctgactgacctggagatacttgcattgctgattgctgcactaagccacgatttggatcaccgtggtgtgaataactcttacatacagcgaagtgaacatccacttgcccagctttactgccattcaatcatggaacaccatcattttgaccagtgcctgatgattcttaatagtccaggcaatcagattctcagtggcctctccattgaagaatataagaccacgttgaaaataatcaagcaagctattttagctacagacctagcactgtacattaagcggctaggagaattttttgaacttataagaaaaaatcaattcaatttggaagatcctcatcaaaaggagttgtttttggcaatgctgatgacagcttgtgatctttctgcaattacaaaaccctggcctattcaacaacggatagcagaacttgtagcaactgaattttttgatcaaggagacagagagagaaaagaactcaacatagaacccactgatctaatgaacagggagaagaaaaacaaaatcccaagtatgcaagttgggttcatagatgccatctgcttgcaactgtatgaggccctgacccacgtgtcaagtggtgtgagcaagggcgccgagctgttcaccggcatcgtgcccatcctgatcgagctgaatggcgatgtgaatggccacaagttcagcgtgagcggcgagggcgagggcgatgccacctacggcaagctgaccctgaagttcatctgcaccaccggcaagctgcctgtgccctggcccaccctggtgaccaccctgagctacggcgtgcagtgcttctcacgctaccccgatcacatgaagcagcacgacttcttcaagagcgccatgcctgagggctacatccaggagcgcaccatcttcttcgaggatgacggcaactacaagtcgcgcgccgaggtgaagttcgagggcgataccctggtgaatcgcatcgagctgaccggcaccgatttcaaggaggatggcaacatcctgggcaataagatggagtacaactacaacgcccacaatgtgtacatcatgaccgacaaggccaagaatggcatcaaggtgaacttcaagatccgccacaacatcgaggatggcagcgtgcagctggccgaccactaccagcagaatacccccatcggcgatggccctgtgctgctgcccgataaccactacctgtccacccagagcgccctgtccaaggaccccaacgagaagcgcgatcacatgatctacttcggcttcgtgaccgccgccgccatcacccacggcatggatgagctgtacaagtga

SEQ ID NO: 258 - DNA, 1608 bp, Artificial Sequence
  source: /note="Description of Artificial Sequence: Synthetic polynucleotide"
atgagtgatctggaaacagcactgtgtacaattcggatgtttactgacctcaaccttgtgcagaacttccagatgaaacatgaggttctttgcagatggattttaagtgttaagaagaattatcggaagaatgttgcctatcataattggagacatgcctttaatacagctcagtgcatgtttgctgctctaaaagcaggcaaaattcagaacaagctgactgacctggagatacttgcattgctgattgctgcactaagccacgatttggatcaccgtggtgtgaataactcttacatacagcgaagtgaacatccacttgcccagctttactgccattcaatcatggaacaccatcattttgaccagtgcctgatgattcttaatagtccaggcaatcagattctcagtggcctctccattgaagaatataagaccacgttgaaaataatcaagcaagctattttagctacagacctagcactgtacattaagcggctaggagaattttttgaacttataagaaaaaatcaattcaatttggaagatcctcatcaaaaggagttgtttttggcaatgctgatgacagcttgtgatctttctgcaattacaaaaccctggcctattcaacaacggatagcagaacttgtagcaactgaattttttgatcaaggagacagagagagaaaagaactcaacatagaacccactgatctaatgaacagggagaagaaaaacaaaatcccaagtatgcaagttgggttcatagatgccatctgcttgcaactgtatgaggccctgacccacgtgtcagaggactgtttccctttgctagatggctgcagaaagaacaggcagaaatggcaggcccttgcagaacagcagagtggtgtgagcaagggcgccgagctgttcaccggcatcgtgcccatcctgatcgagctgaatggcgatgtgaatggccacaagttcagcgtgagcggcgagggcgagggcgatgccacctacggcaagctgaccctgaagttcatctgcaccaccggcaagctgcctgtgccctggcccaccctggtgaccaccctgagctacggcgtgcagtgcttctcacgctaccccgatcacatgaagcagcacgacttcttcaagagcgccatgcctgagggctacatccaggagcgcaccatcttcttcgaggatgacggcaactacaagtcgcgcgccgaggtgaagttcgagggcgataccctggtgaatcgcatcgagctgaccggcaccgatttcaaggaggatggcaacatcctgggcaataagatggagtacaactacaacgcccacaatgtgtacatcatgaccgacaaggccaagaatggcatcaaggtgaacttcaagatccgccacaacatcgaggatggcagcgtgcagctggccgaccactaccagcagaatacccccatcggcgatggccctgtgctgctgcccgataaccactacctgtccacccagagcgccctgtccaaggaccccaacgagaagcgcgatcacatgatctacttcggcttcgtgaccgccgccgccatcacccacggcatggatgagctgtacaagtga

SEQ ID NO: 259 - DNA, 1536 bp, Artificial Sequence
  source: /note="Description of Artificial Sequence: Synthetic polynucleotide"
atgaaacatgaggttctttgcagatggattttaagtgttaagaagaattatcggaagaatgttgcctatcataattggagacatgcctttaatacagctcagtgcatgtttgctgctctaaaagcaggcaaaattcagaacaagctgactgacctggagatacttgcattgctgattgctgcactaagccacgatttggatcaccgtggtgtgaataactcttacatacagcgaagtgaacatccacttgcccagctttactgccattcaatcatggaacaccatcattttgaccagtgcctgatgattcttaatagtccaggcaatcagattctcagtggcctctccattgaagaatataagaccacgttgaaaataatcaagcaagctattttagctacagacctagcactgtacattaagcggctaggagaattttttgaacttataagaaaaaatcaattcaatttggaagatcctcatcaaaaggagttgtttttggcaatgctgatgacagcttgtgatctttctgcaattacaaaaccctggcctattcaacaacggatagcagaacttgtagcaactgaattttttgatcaaggagacagagagagaaaagaactcaacatagaacccactgatctaatgaacagggagaagaaaaacaaaatcccaagtatgcaagttgggttcatagatgccatctgcttgcaactgtatgaggccctgacccacgtgtcagaggactgtttccctttgctagatggctgcagaaagaacaggcagaaatggcaggcccttgcagaacagcagagtggtgtgagcaagggcgccgagctgttcaccggcatcgtgcccatcctgatcgagctgaatggcgatgtgaatggccacaagttcagcgtgagcggcgagggcgagggcgatgccacctacggcaagctgaccctgaagttcatctgcaccaccggcaagctgcctgtgccctggcccaccctggtgaccaccctgagctacggcgtgcagtgcttctcacgctaccccgatcacatgaagcagcacgacttcttcaagagcgccatgcctgagggctacatccaggagcgcaccatcttcttcgaggatgacggcaactacaagtcgcgcgccgaggtgaagttcgagggcgataccctggtgaatcgcatcgagctgaccggcaccgatttcaaggaggatggcaacatcctgggcaataagatggagtacaactacaacgcccacaatgtgtacatcatgaccgacaaggccaagaatggcatcaaggtgaacttcaagatccgccacaacatcgaggatggcagcgtgcagctggccgaccactaccagcagaatacccccatcggcgatggccctgtgctgctgcccgataaccactacctgtccacccagagcgccctgtccaaggaccccaacgagaagcgcgatcacatgatctacttcggcttcgtgaccgccgccgccatcacccacggcatggatgagctgtacaagtga

SEQ ID NO: 260 - DNA, 1464 bp, Artificial Sequence
  source: /note="Description of Artificial Sequence: Synthetic polynucleotide"
atgaaacatgaggttctttgcagatggattttaagtgttaagaagaattatcggaagaatgttgcctatcataattggagacatgcctttaatacagctcagtgcatgtttgctgctctaaaagcaggcaaaattcagaacaagctgactgacctggagatacttgcattgctgattgctgcactaagccacgatttggatcaccgtggtgtgaataactcttacatacagcgaagtgaacatccacttgcccagctttactgccattcaatcatggaacaccatcattttgaccagtgcctgatgattcttaatagtccaggcaatcagattctcagtggcctctccattgaagaatataagaccacgttgaaaataatcaagcaagctattttagctacagacctagcactgtacattaagcggctaggagaattttttgaacttataagaaaaaatcaattcaatttggaagatcctcatcaaaaggagttgtttttggcaatgctgatgacagcttgtgatctttctgcaattacaaaaccctggcctattcaacaacggatagcagaacttgtagcaactgaattttttgatcaaggagacagagagagaaaagaactcaacatagaacccactgatctaatgaacagggagaagaaaaacaaaatcccaagtatgcaagttgggttcatagatgccatctgcttgcaactgtatgaggccctgacccacgtgtcaagtggtgtgagcaagggcgccgagctgttcaccggcatcgtgcccatcctgatcgagctgaatggcgatgtgaatggccacaagttcagcgtgagcggcgagggcgagggcgatgccacctacggcaagctgaccctgaagttcatctgcaccaccggcaagctgcctgtgccctggcccaccctggtgaccaccctgagctacggcgtgcagtgcttctcacgctaccccgatcacatgaagcagcacgacttcttcaagagcgccatgcctgagggctacatccaggagcgcaccatcttcttcgaggatgacggcaactacaagtcgcgcgccgaggtgaagttcgagggcgataccctggtgaatcgcatcgagctgaccggcaccgatttcaaggaggatggcaacatcctgggcaataagatggagtacaactacaacgcccacaatgtgtacatcatgaccgacaaggccaagaatggcatcaaggtgaacttcaagatccgccacaacatcgaggatggcagcgtgcagctggccgaccactaccagcagaatacccccatcggcgatggccctgtgctgctgcccgataaccactacctgtccacccagagcgccctgtccaaggaccccaacgagaagcgcgatcacatgatctacttcggcttcgtgaccgccgccgccatcacccacggcatggatgagctgtacaagtga

SEQ ID NO: 261 - protein, 20 aa, Homo sapiens
MYRMQLLSCIALSLALVTNS

SEQ ID NO: 262 - DNA, 60 bp, Homo sapiens
atgtacaggatgcaactcctgtcttgcattgcactaagtcttgcacttgtcacaaacagt

SEQ ID NO: 263 - DNA, 60 bp, Artificial Sequence
  source: /note="Description of Artificial Sequence: Synthetic Signal Sequence"
atgtaccgaatgcaactgctgagctgcatcgccctgagcctggcactcgtgaccaacagc

SEQ ID NO: 264 - DNA, 60 bp, Artificial Sequence
  source: /note="Description of Artificial Sequence: Synthetic Signal Sequence"
atgtacaggatgcagctgctgagctgcatcgccctgagcctggccctggtgaccaacagc

SEQ ID NO: 265 - DNA, 60 bp, Artificial Sequence
  source: /note="Description of Artificial Sequence: Synthetic Signal Sequence"
atgtacagaatgcagctgctgagctgcatcgccctgtccctcgccctggtgaccaactcc

SEQ ID NO: 266 - protein, 22 aa, Homo sapiens
MCHQQLVISWFSLVFLASPLVA

SEQ ID NO: 267 - DNA, 66 bp, Homo sapiens
atgtgtcaccagcagttggtcatctcttggttttccctggtttttctggcatctcccctcgtggcc

SEQ ID NO: 268 - DNA, 66 bp, Artificial Sequence
  source: /note="Description of Artificial Sequence: Synthetic Signal Sequence"
atgtgccaccagcagctggtcatcagctggttctccctggtgtttctggcatcccctctggtggca

SEQ ID NO: 269 - DNA, 66 bp, Artificial Sequence
  source: /note="Description of Artificial Sequence: Synthetic Signal Sequence"
atgtgccaccagcagctggtcatcagctggttctccctggtgtttctggccagccctctggtggcc

SEQ ID NO: 270 - DNA, 66 bp, Artificial Sequence
  source: /note="Description of Artificial Sequence: Synthetic Signal Sequence"
atgtgccaccagcagctggtcatcagctggttctccctggtgtttctggcaagccctctggtggca

SEQ ID NO: 271 - DNA, 66 bp, Artificial Sequence
  source: /note="Description of Artificial Sequence: Synthetic Signal Sequence"
atgtgccaccagcagctggtcatcagctggttctccctggtgtttctggcatccccactggtggca

SEQ ID NO: 272 - DNA, 66 bp, Artificial Sequence
  source: /note="Description of Artificial Sequence: Synthetic Signal Sequence"
atgtgccaccaacagctcgtgatcagctggttctccctggtgttcctggctagccccctggtggcc

SEQ ID NO: 273 - DNA, 66 bp, Artificial Sequence
  source: /note="Description of Artificial Sequence: Synthetic Signal Sequence"
atgtgccaccagcagctggtcatctcttggttcagcctggtgtttctggcctcccccctggtggcc

SEQ ID NO: 274 - DNA, 66 bp, Artificial Sequence
  source: /note="Description of Artificial Sequence: Synthetic Signal Sequence"
atgtgccaccagcagctggtcatctcctggttctctctggtgtttctggcatctcctctggtggca

SEQ ID NO: 275 - DNA, 66 bp, Artificial Sequence
  source: /note="Description of Artificial Sequence: Synthetic Signal Sequence"
atgtgccaccagcagctggtcatctcttggttcagcctggtgtttctggcatccccactggtggca

SEQ ID NO: 276 - protein, 18 aa, Homo sapiens
MDWTWILFLVAAATRVHS

SEQ ID NO: 277 - DNA, 54 bp, Homo sapiens
atggactggacatggatactcttcctggtagcagccgccacacgagtgcacagc

SEQ ID NO: 278 - protein, 21 aa, Homo sapiens
MALPVTALLLPLALLLHAARP

SEQ ID NO: 279 - DNA, 63 bp, Homo sapiens
atggccttaccagtgaccgccttgctcctgccgctggccttgctgctccacgccgccaggccg

SEQ ID NO: 280 - DNA, 63 bp, Artificial Sequence
  source: /note="Description of Artificial Sequence: Synthetic Signal Sequence"
atggcactgcctgtgaccgccctgctgctgccactggccctgctgctgcacgcagccaggccc

SEQ ID NO: 281 - DNA, 63 bp, Artificial Sequence
  source: /note="Description of Artificial Sequence: Synthetic Signal Sequence"
atggcactgccagtgacagccctgctgctgcctctggccctgctgctgcacgcagccagacct

SEQ ID NO: 282 - DNA, 63 bp, Artificial Sequence
  source: /note="Description of Artificial Sequence: Synthetic Signal Sequence"
atggcactgcctgtgacagccctgctgctgccactggccctgctgctgcacgcagcccgccct

SEQ ID NO: 283 - DNA, 63 bp, Artificial Sequence
  source: /note="Description of Artificial Sequence: Synthetic Signal Sequence"
atggcactgcctgtgaccgccctgctgctgccactggccctgctgctgcacgcagcccgccct

SEQ ID NO: 284 - protein, 9 aa, Homo sapiens
SARNRQKRS

SEQ ID NO: 285 - DNA, 27 bp, Homo sapiens
agcgccaggaatcgccagaagcggtcc

SEQ ID NO: 286 - protein, 8 aa, Homo sapiens
ARNRQKRS

SEQ ID NO: 287 - DNA, 24 bp, Homo sapiens
gcccggaatagacagaagagatct

SEQ ID NO: 288 - protein, 12 aa, Artificial Sequence
  source: /note="Description of Artificial Sequence: Synthetic Cleavage site"
ESRRVRRNKRSK

SEQ ID NO: 289 - DNA, 36 bp, Artificial Sequence
  source: /note="Description of Artificial Sequence: Synthetic Cleavage site"
gagtctaggcgcgtgcggagaaataagcggagcaag

SEQ ID NO: 290 - DNA, 36 bp, Artificial Sequence
  source: /note="Description of Artificial Sequence: Synthetic Cleavage site"
gagtctcggagagtgaggcgcaataagaggagcaag

SEQ ID NO: 291 - DNA, 36 bp, Artificial Sequence
  source: /note="Description of Artificial Sequence: Synthetic Cleavage site"
gagtccaggagagtgcggcgcaacaagaggagcaag

SEQ ID NO: 292 - protein, 4 aa, Artificial Sequence
  source: /note="Description of Artificial Sequence: Synthetic Linker"
GGSG

SEQ ID NO: 293 - DNA, 12 bp, Artificial Sequence
  source: /note="Description of Artificial Sequence: Synthetic Linker"
ggaggatctgga

SEQ ID NO: 294 - protein, 5 aa, Artificial Sequence
  source: /note="Description of Artificial Sequence: Synthetic Linker"
GGSGG

SEQ ID NO: 295 - DNA, 15 bp, Artificial Sequence
  source: /note="Description of Artificial Sequence: Synthetic Linker"
ggaggcagcggagga

SEQ ID NO: 296 - DNA, 15 bp, Artificial Sequence
  source: /note="Description of Artificial Sequence: Synthetic Linker"
ggaggctctggagga

SEQ ID NO: 297 - DNA, 15 bp, Artificial Sequence
  source: /note="Description of Artificial Sequence: Synthetic Linker"
ggaggctccggcgga

SEQ ID NO: 298 - DNA, 15 bp, Artificial Sequence
  source: /note="Description of Artificial Sequence: Synthetic Linker"
ggaggatccggaggc

SEQ ID NO: 299 - DNA, 15 bp, Artificial Sequence
  source: /note="Description of Artificial Sequence: Synthetic Linker"
ggaggatctggagga

SEQ ID NO: 300 - DNA, 18 bp, Artificial Sequence
  source: /note="Description of Artificial Sequence: Synthetic Linker"
ggaggtagtggtggaggc

SEQ ID NO: 301 - protein, 5 aa, Artificial Sequence
  source: /note="Description of Artificial Sequence: Synthetic Linker"
SGGGS

SEQ ID NO: 302 - DNA, 15 bp, Artificial Sequence
  source: /note="Description of Artificial Sequence: Synthetic Linker"
tcaggtggcggtagt

SEQ ID NO: 303 - DNA, 15 bp, Artificial Sequence
  source: /note="Description of Artificial Sequence: Synthetic Linker"
agcggcggtggcagc

SEQ ID NO: 304 - protein, 5 aa, Artificial Sequence
  source: /note="Description of Artificial Sequence: Synthetic Linker"
GGGGG

SEQ ID NO: 305 - protein, 5 aa, Artificial Sequence
  source: /note="Description of Artificial Sequence: Synthetic Linker"
GGGGS

SEQ ID NO: 306 - protein, 10 aa, Artificial Sequence
  source: /note="Description of Artificial Sequence: Synthetic Linker"
GGGGSGGGGS

SEQ ID NO: 307 - protein, 15 aa, Artificial Sequence
  source: /note="Description of Artificial Sequence: Synthetic Linker"
GGGGSGGGGSGGGGS

SEQ ID NO: 308 - DNA, 45 bp, Artificial Sequence
  source: /note="Description of Artificial Sequence: Synthetic Linker"
ggaggaggaggatccggaggaggaggatctggcggcggcggcagc

SEQ ID NO: 309 - DNA, 45 bp, Artificial Sequence
  source: /note="Description of Artificial Sequence: Synthetic Linker"
ggaggaggaggatccggaggaggaggatctggcggaggaggcagc

SEQ ID NO: 310 - DNA, 45 bp, Artificial Sequence
  source: /note="Description of Artificial Sequence: Synthetic Linker"
ggaggaggaggaagcggaggaggaggatccggcggaggaggctct

SEQ ID NO: 311 - DNA, 45 bp, Artificial Sequence
  source: /note="Description of Artificial Sequence: Synthetic Linker"
ggaggaggaggcagcggaggaggaggttctggaggaggcggcagc

SEQ ID NO: 312 - DNA, 45 bp, Artificial Sequence
  source: /note="Description of Artificial Sequence: Synthetic Linker"
ggcggcggcggctctggaggaggaggcagcggcggaggaggctcc

SEQ ID NO: 313 - DNA, 45 bp, Artificial Sequence
  source: /note="Description of Artificial Sequence: Synthetic Linker"
ggaggaggaggcagcggcggaggaggctccggcggcggcggctct

SEQ ID NO: 314 - protein, 20 aa, Artificial Sequence
  source: /note="Description of Artificial Sequence: Synthetic Linker"
GGGGSGGGGSGGGGSGGGGS

SEQ ID NO: 315 - protein, 25 aa, Artificial Sequence
  source: /note="Description of Artificial Sequence: Synthetic Linker"
GGGGSGGGGSGGGGSGGGGSGGGGS

SEQ ID NO: 316 - protein, 30 aa, Artificial Sequence
  source: /note="Description of Artificial Sequence: Synthetic Linker"
GGGGSGGGGSGGGGSGGGGSGGGGSGGGGS

SEQ ID NO: 317 - protein, 5 aa, Artificial Sequence
  source: /note="Description of Artificial Sequence: Synthetic Linker"
SSSSG

SEQ ID NO: 318 - protein, 10 aa, Artificial Sequence
  source: /note="Description of Artificial Sequence: Synthetic Linker"
SSSSGSSSSG

SEQ ID NO: 319 - protein, 15 aa, Artificial Sequence
  source: /note="Description of Artificial Sequence: Synthetic Linker"
SSSSGSSSSGSSSSG

SEQ ID NO: 320 - protein, 20 aa, Artificial Sequence
  source: /note="Description of Artificial Sequence: Synthetic Linker"
SSSSGSSSSGSSSSGSSSSG

SEQ ID NO: 321 - protein, 25 aa, Artificial Sequence
  source: /note="Description of Artificial Sequence: Synthetic Linker"
SSSSGSSSSGSSSSGSSSSGSSSSG

SEQ ID NO: 322 - protein, 30 aa, Artificial Sequence
  source: /note="Description of Artificial Sequence: Synthetic Linker"
SSSSGSSSSGSSSSGSSSSGSSSSGSSSSG

SEQ ID NO: 323 - protein, 26 aa, Artificial Sequence
  source: /note="Description of Artificial Sequence: Synthetic Linker"
SGGGSGGGGSGGGGSGGGGSGGGSLQ

SEQ ID NO: 324 - DNA, 78 bp, Artificial Sequence
  source: /note="Description of Artificial Sequence: Synthetic Linker"
tcaggtggcggtagtggtgggggaggatctggaggcggaggaagcgggggtggaggttcaggaggagggagcttgcaa

SEQ ID NO: 325 - protein, 6 aa, Artificial Sequence
  source: /note="Description of Artificial Sequence: Synthetic Linker"
EFSTEF

SEQ ID NO: 326 - DNA, 18 bp, Artificial Sequence
  source: /note="Description of Artificial Sequence: Synthetic Linker"
gagttcagcaccgagttt

SEQ ID NO: 327 - DNA, 18 bp, Artificial Sequence
  source: /note="Description of Artificial Sequence: Synthetic Linker"
gagttctccaccgagttc

SEQ ID NO: 328 - protein, 12 aa, Artificial Sequence
  source: /note="Description of Artificial Sequence: Synthetic Linker"
GKSSGSGSESKS

SEQ ID NO: 329 - protein, 15 aa, Artificial Sequence
  source: /note="Description of Artificial Sequence: Synthetic Linker"
GGSTSGSGKSSEGKG

SEQ ID NO: 330 - protein, 19 aa, Artificial Sequence
  source: /note="Description of Artificial Sequence: Synthetic Linker"
GSTSGSGKSSSEGSGSTKG

SEQ ID NO: 331 - protein, 18 aa, Artificial Sequence
  source: /note="Description of Artificial Sequence: Synthetic Linker"
GSTSGSGKPGSGEGSTKG

SEQ ID NO: 332 - protein, 13 aa, Artificial Sequence
  source: /note="Description of Artificial Sequence: Synthetic Linker"
VDYPYDVPDYALD

SEQ ID NO: 333 - DNA, 39 bp, Artificial Sequence
  source: /note="Description of Artificial Sequence: Synthetic Linker"
gtcgactatccctacgatgttccggactacgcactggac

SEQ ID NO: 334 - protein, 14 aa, Artificial Sequence
  source: /note="Description of Artificial Sequence: Synthetic Linker"
EGKSSGSGSESKEF

SEQ ID NO: 335 - DNA, 603 bp, Artificial Sequence
  source: /note="Description of Artificial Sequence: Synthetic Promoter sequence"
aagcttgggagttccgcgttacataacttacggtaaatggcccgcctggctgaccgcccaacgacccccgcccattgacgtcaataatgacgtatgttcccatagtaacgccaatagggactttccattgacgtcaatgggtggagtatttacggtaaactgcccacttggcagtacatcaagtgtatcatatgccaagtacgccccctattgacgtcaatgacggtaaatggcccgcctggcattatgcccagtacatgaccttatgggactttcctacttggcagtacatctacgtattagtcatcgctattaccatggtgatgcggttttggcagtacatcaatgggcgtggatagcggtttgactcacggggatttccaagtctccaccccattgacgtcaatgggagtttgttttggcaccaaaatcaacgggactttccaaaatgtcgtaacaactccgccccattgacgcaaatgggcggtaggcgtgtacggtgggaggtctatataagcagagctcgtttagtgaaccgtcagatcgcctggagacgccatccacgctgttttgacctccatagaagacaccgactctactaga

SEQ ID NO: 336 - DNA, 1339 bp, Artificial Sequence
  source: /note="Description of Artificial Sequence: Synthetic Promoter sequence"
cgatagtaattcatacaaaaggactcgcccctgccttggggaatcccagggaccgtcgttaaactcccactaacgtagaacccagagatcgctgcgttcccgccccctcacccgcccgctctcgtcatcactgaggtggagaagagcatgcgtgaggctccggtgcccgtcagtgggcagagcgcacatcgcccacagtccccgagaagttggggggaggggtcggcaattgaaccggtgcctagagaaggtggcgcggggtaaactgggaaagtgatgtcgtgtactggctccgcctttttcccgagggtgggggagaaccgtatataagtgcagtagtcgccgtgaacgttctttttcgcaacgggtttgccgccagaacacaggtaagtgccgtgtgtggttcccgcgggcctggcctctttacgggttatggcccttgcgtgccttgaattacttccacgcccctggctgcagtacgtgattcttgatcccgagcttcgggttggaagtgggtgggagagttcgaggccttgcgcttaaggagccccttcgcctcgtgcttgagttgaggcctggcttgggcgctggggccgccgcgtgcgaatctggtggcaccttcgcgcctgtctcgctgctttcgataagtctctagccatttaaaatttttgatgacctgctgcgacgctttttttctggcaagatagtcttgtaaatgcgggccaagatctgcacactggtatttcggtttttggggccgcgggcggcgacggggcccgtgcgtcccagcgcacatgttcggcgaggcggggcctgcgagcgcggccaccgagaatcggacgggggtagtctcaagctggccggcctgctctggtgcctggcctcgcgccgccgtgtatcgccccgccctgggcggcaaggctggcccggtcggcaccagttgcgtgagcggaaagatggccgcttcccggccctgctgcagggagctcaaaatggaggacgcggcgctcgggagagcgggcgggtgagtcacccacacaaaggaaaagggcctttccgtcctcagccgtcgcttcatgtgactccacggagtaccgggcgccgtccaggcacctcgattagttctcgagcttttggagtacgtcgtctttaggttggggggaggggttttatgcgatggagtttccccacactgagtgggtggagactgaagttaggccagcttggcacttgatgtaattctccttggaatttgccctttttgagtttggatcttggttcattctcaagcctcagacagtggttcaaagtttttttcttccatttcaggtgtcgtgag

SEQ ID NO: 337 - DNA, 1335 bp, Artificial Sequence
  source: /note="Description of Artificial Sequence: Synthetic Promoter sequence"
gagtaattcatacaaaaggactcgcccctgccttggggaatcccagggaccgtcgttaaactcccactaacgtagaacccagagatcgctgcgttcccgccccctcacccgcccgctctcgtcatcactgaggtggagaagagcatgcgtgaggctccggtgcccgtcagtgggcagagcgcacatcgcccacagtccccgagaagttggggggaggggtcggcaattgaaccggtgcctagagaaggtggcgcggggtaaactgggaaagtgatgtcgtgtactggctccgcctttttcccgagggtgggggagaaccgtatataagtgcagtagtcgccgtgaacgttctttttcgcaacgggtttgccgccagaacacaggtaagtgccgtgtgtggttcccgcgggcctggcctctttacgggttatggcccttgcgtgccttgaattacttccacgcccctggctgcagtacgtgattcttgatcccgagcttcgggttggaagtgggtgggagagttcgaggccttgcgcttaaggagccccttcgcctcgtgcttgagttgaggcctggcttgggcgctggggccgccgcgtgcgaatctggtggcaccttcgcgcctgtctcgctgctttcgataagtctctagccatttaaaatttttgatgacctgctgcgacgctttttttctggcaagatagtcttgtaaatgcgggccaagatctgcacactggtatttcggtttttggggccgcgggcggcgacggggcccgtgcgtcccagcgcacatgttcggcgaggcggggcctgcgagcgcggccaccgagaatcggacgggggtagtctcaagctggccggcctgctctggtgcctggcctcgcgccgccgtgtatcgccccgccctgggcggcaaggctggcccggtcggcaccagttgcgtgagcggaaagatggccgcttcccggccctgctgcagggagctcaaaatggaggacgcggcgctcgggagagcgggcgggtgagtcacccacacaaaggaaaagggcctttccgtcctcagccgtcgcttcatgtgactccacggagtaccgggcgccgtccaggcacctcgattagttctcgagcttttggagtacgtcgtctttaggttggggggaggggttttatgcgatggagtttccccacactgagtgggtggagactgaagttaggccagcttggcacttgatgtaattctccttggaatttgccctttttgagtttggatcttggttcattctcaagcctcagacagtggttcaaagtttttttcttccatttcaggtgtcgtga

SEQ ID NO: 338 - DNA, 399 bp, Artificial Sequence
  source: /note="Description of Artificial Sequence: Synthetic Promoter sequence"
ccggtaggcgccaaccggctccgttctttggtggccccttcgcgccaccttctactcctcccctagtcaggaagttcccccccgccccgcagctcgcgtcgtgcaggacgtgacaaatggaagtagcacgtctcactagtctcgtgcagatggacagcaccgctgagcaatggaagcgggtaggcctttggggcagcggccaatagcagctttgctccttcgctttctgggctcagaggctgggaaggggtgggtccgggggcgggctcaggggcgggctcaggggcggggcgggcgcccgaaggtcctccggaggcccggcattctgcacgcttcaaaagcgcacgtctgccgcgctgttctcctcttcctcatctccgggcctttcgacctgcagcc

SEQ ID NO: 339 - DNA, 978 bp, Homo sapiens
gaagaaacaagagagctacagtcgttagcggctgctgtggtgccatctgcccagacccttaaaattactgactttagcttcagtgactttgagctgtctgatctggaaacagcactgtgtacaattcggatgtttactgacctcaaccttgtgcagaacttccagatgaaacatgaggttctttgcagatggattttaagtgttaagaagaattatcggaagaatgttgcctatcataattggagacatgcctttaatacagctcagtgcatgtttgctgctctaaaagcaggcaaaattcagaacaagctgactgacctggagatacttgcattgctgattgctgcactaagccacgatttggatcaccgtggtgtgaataactcttacatacagcgaagtgaacatccacttgcccagctttactgccattcaatcatggaacaccatcattttgaccagtgcctgatgattcttaatagtccaggcaatcagattctcagtggcctctccattgaagaatataagaccacgttgaaaataatcaagcaagctattttagctacagacctagcactgtacattaagaggcgaggagaattttttgaacttataagaaaaaatcaattcaatttggaagatcctcatcaaaaggagttgtttttggcaatgctgatgacagcttgtgatctttctgcaattacaaaaccctggcctattcaacaacggatagcagaacttgtagcaactgaattttttgatcaaggagacagagagagaaaagaactcaacatagaacccactgatctaatgaacagggagaagaaaaacaaaatcccaagtatgcaagttgggttcatagatgccatctgcttgcaactgtatgaggccctgacccacgtgtcagaggactgtttccctttgctagatggctgcagaaagaacaggcagaaatggcaggcccttgcagaacagcag

SEQ ID NO: 340 - protein, 327 aa, Artificial Sequence
  source: /note="Description of Artificial Sequence: Synthetic Destabilizing Domain (DD)"
MEETRELQSLAAAVVPSAQTLKITDFSFSDFELSDLETALCTIRMFTDLNLVQNFQMKHEVLCRWILSVKKNYRKNVAYHNWRHAFNTAQCMFAALKAGKIQNKLTDLEILALLIAALSHDLDHRGVNNSYIQRSEHPLAQLYCHSIMEHHHFDQCLMILNSPGNQILSGLSIEEYKTTLKIIKQAILATDLALYIKRRGEFFELIRKNQFNLEDPHQKELFLAMLMTACDLSAITKPWPIQQRIAELVATEFFDQGDRERKELNIEPTDLMNREKKNKIPSMQVGFIDAICLQLYEALTHVSEDCFPLLDGCRKNRQKFQALAEQQ

SEQ ID NO: 341 - protein, 327 aa, Artificial Sequence
  source: /note="Description of Artificial Sequence: Synthetic Destabilizing Domain (DD)"
MEETRELQSLAAAVVPSAQTLKITDFSFSDFELSDLETALCTIRMFTDLNLVQNFQMKHEVLCRWILSVKKNYRKNVAYHNWRHAFNTAQCMFAALKAGKIQNKLTDLEILALLIAALSHDLDHRGVNNSYIQRSEHPLAQLYCHSIMEHHHFDQCLMILNSPGNQILSGLSIEEYKTTLKIIKQAILATDLALYIKRRGEFFELIRKNQFNLEDPHQKELFLAMLMTACDLSAITKPWPIQQRIAELVATEFFDQGDRERKELNIEPTDLMNREKKNKIPSMQVGFADAICLQLYEALTHVSEDCFPLLDGCRKNRQKWQALAEQQ

SEQ ID NO: 342 - protein, 327 aa, Artificial Sequence
  source: /note="Description of Artificial Sequence: Synthetic Destabilizing Domain (DD)"
MEETRELQSLAAAVVPSAQTLKITDFSFSDFELSDLETALCTIRMFTDLNLVQNFQMKHEVLCRWILSVKKNYRKNVAYHNWRHAFNTAQCMFAALKAGKIQNKLTDLEILALLIAALSHDLDHRGVNNSYIQRSEHPLAQLYCHSIMEHHHFDQCLMILNSPGNQILSGLSIEEYKTTLKIIKQAILATDLALYIKRRGEFFELIRKNQFNLEDPHQKELFLAMLMTACDLSAITKPWPIQQRIAELVATEFFDQGDRERKELNIEPTDLMNREKKNKIPSMQVGFIDAICLQLAEALTHVSEDCFPLLDGCRKNRQKWQALAEQQ

SEQ ID NO: 343 - protein, 327 aa, Artificial Sequence
  source: /note="Description of Artificial Sequence: Synthetic Destabilizing Domain (DD)"
MEETRELQSLAAAVVPSAQTLKITDFSFSDFELSDLETALCTIRMFTDLNLVQNFQMKHEVLCRWILSVKKNYRKNVAYHNWRHAFNTAQCMFAALKAGKIQNKLTDLEILALLIAALSHDLDHRGVNNSYIQRSEHPLAQLYCHSIMEHHHFDQCLMILNSPGNQILSGLSIEEYKTTLKIIKQAILATDLALYIKRRGEFFELIRKNQFNLEDPHQKELFLAMLMTACDLSAITKPWPIQQRIAELVATEFADQGDRERKELNIEPTDLMNREKKNKIPSMQVGFIDAICLQLYEALTHVSEDCFPLLDGCRKNRQKWQALAEQQ

SEQ ID NO: 344 - protein, 327 aa, Artificial Sequence
  source: /note="Description of Artificial Sequence: Synthetic Destabilizing Domain (DD)"
MEETRELQSLAAAVVPSAQTLKITDFSFSDFELSDLETALCTIRMFTDLNLVQNFQMKHEVLCRWILSVKKNYRKNVAYHNWRHAFNTAQCMFAALKAGKIQNKLTDLEILALLIAALSHDLDHRGVNNSYIQRSEHPLAQLYCHSIMEHHHFDQCLMILNSPGNQILSGLSIEEYKTTLKIIKQAILATDLALYIKRRGEFAELIRKNQFNLEDPHQKELFLAMLMTACDLSAITKPWPIQQRIAELVATEFFDQGDRERKELNIEPTDLMNREKKNKIPSMQVGFIDAICLQLYEALTHVSEDCFPLLDGCRKNRQKWQALAEQQ

SEQ ID NO: 345 - protein, 327 aa, Artificial Sequence
  source: /note="Description of Artificial Sequence: Synthetic Destabilizing Domain (DD)"
MEETRELQSLAAAVVPSAQTLKITDFSFSDFELSDLETALCTIRMFTDLNLVQNFQMKHEVLCRWILSVKKNYRKNVAYHNWRHAFNTAQCMFAALKAGKIQNKLTDLEILALLIAALSHDLLHRGVNNSYIQRSEHPLAQLYCHSIMEHHHFDQCLMILNSPGNQILSGLSIEEYKTTLKIIKQAILATDLALYIKRRGEFFELIRKNQFNLEDPHQKELFLAMLMTACDLSAITKPWPIQQRIAELVATEFFDQGDRERKELNIEPTDLMNREKKNKIPSMQVGFIDAICLQLYEALTHVSEDCFPLLDGCRKNRQKWQALAEQQ

SEQ ID NO: 346 - protein, 327 aa, Artificial Sequence
  source: /note="Description of Artificial Sequence: Synthetic Destabilizing Domain (DD)"
MEETRELQSLAAAVVPSAQTLKITDFSFSDFELSDLETALCTIRMFTDLNLVQNFQMKHEVLCRWILSVKKNYRKNVAYHNWRHAFNTAQCMFAALKAGKIQNKLTDLEILALLIAALSHDLDHRGVNNSYIQRSEHPLAQLYCHSIMEHHHFDQCLMILNSPGNQILSGLSIEEYKTTLKIIKQAILATDLALLIKRRGEFFELIRKNQFNLEDPHQKELFLAMLMTACDLSAITKPWPIQQRIAELVATEFFDQGDRERKELNIEPTDLMNREKKNKIPSMQVGFIDAICLQLYEALTHVSEDCFPLLDGCRKNRQKWQALAEQQ

SEQ ID NO: 347 - protein, 327 aa, Artificial Sequence
  source: /note="Description of Artificial Sequence: Synthetic Destabilizing Domain (DD)"
MEETRELQSLAAAVVPSAQTLKITDFSFSDFELSDLETALCTIRMFTDLNLVQNFQMKHEVLCRWILSVKKNYRKNVAYHNWRHAFNTAQCIFAALKAGKIQNKLTDLEILALLIAALSHDLDHRGVNNSYIQRSEHPLAQLYCHSIMEHHHFDQCLMILNSPGNQILSGLSIEEYKTTLKIIKQAILATDLALYIKRRGEFFELIRKNQFNLEDPHQKELFLAMLMTACDLSAITKPWPIQQRIAELVATEFFDQGDRERKELNIEPTDLMNREKKNKIPSMQVGFIDAICLQLYEALTHVSEDCFPLLDGCRKNRQKWQALAEQQ

SEQ ID NO: 348 - protein, 326 aa, Artificial Sequence
  source: /note="Description of Artificial Sequence: Synthetic Destabilizing Domain (DD)"
EETRELQSLAAAVVPSAQTLKITDFSFSDFELSDLETALCTIRMFTDLNLVQNFQMKHEVLCRWILSVKKNYRKNVAYHNWRHAFNTAQCMFAALKAGKIQNKLTDLEILALLIAALSADLDHRGVNNSYIQRSEHPLAQLYCHSIMEHHHFDQCLMILNSPGNQILSGLSIEEYKTTLKIIKQAILATDLALYIKRRGEFFELIRKNQFNLEDPHQKELFLAMLMTACDLSAITKPWPIQQRIAELVATEFFDQGDRERKELNIEPTDLMNREKKNKIPSMQVGFIDAICLQLYEALTHVSEDCFPLLDGCRKNRQKWQALAEQQ

SEQ ID NO: 349 - protein, 326 aa, Artificial Sequence
  source: /note="Description of Artificial Sequence: Synthetic Destabilizing Domain (DD)"
EETRELQSLAAAVVPSAQTLKITDFSFSDFELSDLETALCTIRMFTDLNLVQNFQMKHEVLCRWILSVKKNYRKNVAYHNWRHAFNTAQCMFAALKAGKIQNKLTDLEILALLIAALSHDLDHRGVNNSYIQRSEHPLAQLYCHSIMEHHHFDQCLMILNSPGNQILSGLSIEEYKTTLKIIKQAILATDLALYIKRRGEFFELIRKNQFNLEDPHQKELFLAMLMTACALSAITKPWPIQQRIAELVATEFFDQGDRERKELNIEPTDLMNREKKNKIPSMQVGFIDAICLQLYEALTHVSEDCFPLLDGCRKNRQKWQALAEQQ

SEQ ID NO: 350 - DNA, 978 bp, Artificial Sequence
  source: /note="Description of Artificial Sequence: Synthetic Destabilizing Domain (DD)"
gaagaaacaagagagctacagtcgttagcggctgctgtggtgccatctgcccagacccttaaaattactgactttagcttcagtgactttgagctgtctgatctggaaacagcactgtgtacaattcggatgtttactgacctcaaccttgtgcagaacttccagatgaaacatgaggttctttgcagatggattttaagtgttaagaagaattatcggaagaatgttgcctatcataattggagacatgcctttaatacagctcagtgcatgtttgctgctctaaaagcaggcaaaattcagaacaagctgactgacctggagatacttgcattgctgattgctgcactaagccacgatttggatcaccgtggtgtgaataactcttacatacagcgaagtgaacatccacttgcccagctttactgccattcaatcatggaacaccatcattttgaccagtgcctgatgattcttaatagtccaggcaatcagattctcagtggcctctccattgaagaatataagaccacgttgaaaataatcaagcaagctattttagctacagacctagcactgtacattaagaggcgaggagaattttttgaacttataagaaaaaatcaattcaatttggaagatcctcatcaaaaggagttgtttttggcaatgctgatgacagcttgtgatctttctgcaattacaaaaccctggcctattcaacaacggatagcagaacttgtagcaactgaattttttgatcaaggagacagagagagaaaagaactcaacatagaacccactgatctaatgaacagggagaagaaaaacaaaatcccaagtatgcaagttgggttcatagatgccatctgcttgcaactgtatgaggccctgacccacgtgtcagaggactgtttccctttgctagatggctgcagaaagaacaggcagaaattccaggcccttgcagaacagcag

SEQ ID NO: 351 - DNA, 978 bp, Artificial Sequence
  source: /note="Description of Artificial Sequence: Synthetic Destabilizing Domain (DD)"
gaagaaacaagagagctacagtcgttagcggctgctgtggtgccatctgcccagacccttaaaattactgactttagcttcagtgactttgagctgtctgatctggaaacagcactgtgtacaattcggatgtttactgacctcaaccttgtgcagaacttccagatgaaacatgaggttctttgcagatggattttaagtgttaagaagaattatcggaagaatgttgcctatcataattggagacatgcctttaatacagctcagtgcatgtttgctgctctaaaagcaggcaaaattcagaacaagctgactgacctggagatacttgcattgctgattgctgcactaagccacgatttggatcaccgtggtgtgaataactcttacatacagcgaagtgaacatccacttgcccagctttactgccattcaatcatggaacaccatcattttgaccagtgcctgatgattcttaatagtccaggcaatcagattctcagtggcctctccattgaagaatataagaccacgttgaaaataatcaagcaagctattttagctacagacctagcactgtacattaagaggcgaggagaattttttgaacttataagaaaaaatcaattcaatttggaagatcctcatcaaaaggagttgtttttggcaatgctgatgacagcttgtgatctttctgcaattacaaaaccctggcctattcaacaacggatagcagaacttgtagcaactgaattttttgatcaaggagacagagagagaaaagaactcaacatagaacccactgatctaatgaacagggagaagaaaaacaaaatcccaagtatgcaagttgggttcgccgatgccatctgcttgcaactgtatgaggccctgacccacgtgtcagaggactgtttccctttgctagatggctgcagaaagaacaggcagaaatggcaggcccttgcagaacagcag

SEQ ID NO: 352 - DNA, 978 bp, Artificial Sequence
  source: /note="Description of Artificial Sequence: Synthetic Destabilizing Domain (DD)"
gaagaaacaagagagctacagtcgttagcggctgctgtggtgccatctgcccagacccttaaaattactgactttagcttcagtgactttgagctgtctgatctggaaacagcactgtgtacaattcggatgtttactgacctcaaccttgtgcagaacttccagatgaaacatgaggttctttgcagatggattttaagtgttaagaagaattatcggaagaatgttgcctatcataattggagacatgcctttaatacagctcagtgcatgtttgctgctctaaaagcaggcaaaattcagaacaagctgactgacctggagatacttgcattgctgattgctgcactaagccacgatttggatcaccgtggtgtgaataactcttacatacagcgaagtgaacatccacttgcccagctttactgccattcaatcatggaacaccatcattttgaccagtgcctgatgattcttaatagtccaggcaatcagattctcagtggcctctccattgaagaatataagaccacgttgaaaataatcaagcaagctattttagctacagacctagcactgtacattaagaggcgaggagaattttttgaacttataagaaaaaatcaattcaatttggaagatcctcatcaaaaggagttgtttttggcaatgctgatgacagcttgtgatctttctgcaattacaaaaccctggcctattcaacaacggatagcagaacttgtagcaactgaattttttgatcaaggagacagagagagaaaagaactcaacatagaacccactgatctaatgaacagggagaagaaaaacaaaatcccaagtatgcaagttgggttcatagatgccatctgcttgcaactggccgaggccctgacccacgtgtcagaggactgtttccctttgctagatggctgcagaaagaacaggcagaaatggcaggcccttgcagaacagcag

SEQ ID NO: 353 - DNA, 978 bp, Artificial Sequence
  source: /note="Description of Artificial Sequence: Synthetic Destabilizing Domain (DD)"
gaagaaacaagagagctacagtcgttagcggctgctgtggtgccatctgcccagacccttaaaattactgactttagcttcagtgactttgagctgtctgatctggaaacagcactgtgtacaattcggatgtttactgacctcaaccttgtgcagaacttccagatgaaacatgaggttctttgcagatggattttaagtgttaagaagaattatcggaagaatgttgcctatcataattggagacatgcctttaatacagctcagtgcatgtttgctgctctaaaagcaggcaaaattcagaacaagctgactgacctggagatacttgcattgctgattgctgcactaagccacgatttggatcaccgtggtgtgaataactcttacatacagcgaagtgaacatccacttgcccagctttactgccattcaatcatggaacaccatcattttgaccagtgcctgatgattcttaatagtccaggcaatcagattctcagtggcctctccattgaagaatataagaccacgttgaaaataatcaagcaagctattttagctacagacctagcactgtacattaagaggcgaggagaattttttgaacttataagaaaaaatcaattcaatttggaagatcctcatcaaaaggagttgtttttggcaatgctgatgacagcttgtgatctttctgcaattacaaaaccctggcctattcaacaacggatagcagaacttgtagcaactgaatttgccgatcaaggagacagagagagaaaagaactcaacatagaacccactgatctaatgaacagggagaagaaaaacaaaatcccaagtatgcaagttgggttcatagatgccatctgcttgcaactgtatgaggccctgacccacgtgtcagaggactgtttccctttgctagatggctgcagaaagaacaggcagaaatggcaggcccttgcagaacagcag

SEQ ID NO: 354 - DNA, 978 bp, Artificial Sequence
  source: /note="Description of Artificial Sequence: Synthetic Destabilizing Domain (DD)"
gaagaaacaagagagctacagtcgttagcggctgctgtggtgccatctgcccagacccttaaaattactgactttagcttcagtgactttgagctgtctgatctggaaacagcactgtgtacaattcggatgtttactgacctcaaccttgtgcagaacttccagatgaaacatgaggttctttgcagatggattttaagtgttaagaagaattatcggaagaatgttgcctatcataattggagacatgcctttaatacagctcagtgcatgtttgctgctctaaaagcaggcaaaattcagaacaagctgactgacctggagatacttgcattgctgattgctgcactaagccacgatttggatcaccgtggtgtgaataactcttacatacagcgaagtgaacatccacttgcccagctttactgccattcaatcatggaacaccatcattttgaccagtgcctgatgattcttaatagtccaggcaatcagattctcagtggcctctccattgaagaatataagaccacgttgaaaataatcaagcaagctattttagctacagacctagcactgtacattaagaggcgaggagaatttgccgaacttataagaaaaaatcaattcaatttggaagatcctcatcaaaaggagttgtttttggcaatgctgatgacagcttgtgatctttctgcaattacaaaaccctggcctattcaacaacggatagcagaacttgtagcaactgaattttttgatcaaggagacagagagagaaaagaactcaacatagaacccactgatctaatgaacagggagaagaaaaacaaaatcccaagtatgcaagttgggttcatagatgccatctgcttgcaactgtatgaggccctgacccacgtgtcagaggactgtttccctttgctagatggctgcagaaagaacaggcagaaatggcaggcccttgcagaacagcag

SEQ ID NO: 355 - DNA, 978 bp, Artificial Sequence
  source: /note="Description of Artificial Sequence: Synthetic Destabilizing Domain (DD)"
gaagaaacaagagagctacagtcgttagcggctgctgtggtgccatctgcccagacccttaaaattactgactttagcttcagtgactttgagctgtctgatctggaaacagcactgtgtacaattcggatgtttactgacctcaaccttgtgcagaacttccagatgaaacatgaggttctttgcagatggattttaagtgttaagaagaattatcggaagaatgttgcctatcataattggagacatgcctttaatacagctcagtgcatgtttgctgctctaaaagcaggcaaaattcagaacaagctgactgacctggagatacttgcattgctgattgctgcactaagccacgatttggatcaccgtggtgtgaataactcttacatacagcgaagtgaacatccacttgcccagctttactgccattcaatcatggaacaccatcattttgaccagtgcctgatgattcttaatagtccaggcaatcagattctcagtggcctctccattgaagaatataagaccacgttgaaaataatcaagcaagctattttagctacagacctagcactgtacattaagaggcgaggagaatttgctgaacttataagaaaaaatcaattcaatttggaagatcctcatcaaaaggagttgtttttggcaatgctgatgacagcttgtgatctttctgcaattacaaaaccctggcctattcaacaacggatagcagaacttgtagcaactgaattttttgatcaaggagacagagagagaaaagaactcaacatagaacccactgatctaatgaacagggagaagaaaaacaaaatcccaagtatgcaagttgggttcatagatgccatctgcttgcaactgtatgaggccctgacccacgtgtcagaggactgtttccctttgctagatggctgcagaaagaacaggcagaaatggcaggcccttgcagaacagcag

SEQ ID NO: 356 - DNA, 978 bp, Artificial Sequence
  source: /note="Description of Artificial Sequence: Synthetic Destabilizing Domain (DD)"
gaagaaacaagagagctacagtcgttagcggctgctgtggtgccatctgcccagacccttaaaattactgactttagcttcagtgactttgagctgtctgatctggaaacagcactgtgtacaattcggatgtttactgacctcaaccttgtgcagaacttccagatgaaacatgaggttctttgcagatggattttaagtgttaagaagaattatcggaagaatgttgcctatcataattggagacatgcctttaatacagctcagtgcatgtttgctgctctaaaagcaggcaaaattcagaacaagctgactgacctggagatacttgcattgctgattgctgcactaagccacgatttgctgcaccgtggtgtgaataactcttacatacagcgaagtgaacatccacttgcccagctttactgccattcaatcatggaacaccatcattttgaccagtgcctgatgattcttaatagtccaggcaatcagattctcagtggcctctccattgaagaatataagaccacgttgaaaataatcaagcaagctattttagctacagacctagcactgtacattaagaggcgaggagaattttttgaacttataagaaaaaatcaattcaatttggaagatcctcatcaaaaggagttgtttttggcaatgctgatgacagcttgtgatctttctgcaattacaaaaccctggcctattcaacaacggatagcagaacttgtagcaactgaattttttgatcaaggagacagagagagaaaagaactcaacatagaacccactgatctaatgaacagggagaagaaaaacaaaatcccaagtatgcaagttgggttcatagatgccatctgcttgcaactgtatgaggccctgacccacgtgtcagaggactgtttccctttgctagatggctgcagaaagaacaggcagaaatggcaggcccttgcagaacagcag

SEQ ID NO: 357 - DNA, 978 bp, Artificial Sequence
  source: /note="Description of Artificial Sequence: Synthetic Destabilizing Domain (DD)"
gaagaaacaagagagctacagtcgttagcggctgctgtggtgccatctgcccagacccttaaaattactgactttagcttcagtgactttgagctgtctgatctggaaacagcactgtgtacaattcggatgtttactgacctcaaccttgtgcagaacttccagatgaaacatgaggttctttgcagatggattttaagtgttaagaagaattatcggaagaatgttgcctatcataattggagacatgcctttaatacagctcagtgcatgtttgctgctctaaaagcaggcaaaattcagaacaagctgactgacctggagatacttgcattgctgattgctgcactaagccacgatttggatcaccgtggtgtgaataactcttacatacagcgaagtgaacatccacttgcccagctttactgccattcaatcatggaacaccatcattttgaccagtgcctgatgattcttaatagtccaggcaatcagattctcagtggcctctccattgaagaatataagaccacgttgaaaataatcaagcaagctattttagctacagacctagcactgctgattaagaggcgaggagaattttttgaacttataagaaaaaatcaattcaatttggaagatcctcatcaaaaggagttgtttttggcaatgctgatgacagcttgtgatctttctgcaattacaaaaccctggcctattcaacaacggatagcagaacttgtagcaactgaattttttgatcaaggagacagagagagaaaagaactcaacatagaacccactgatctaatgaacagggagaagaaaaacaaaatcccaagtatgcaagttgggttcatagatgccatctgcttgcaactgtatgaggccctgacccacgtgtcagaggactgtttccctttgctagatggctgcagaaagaacaggcagaaatggcaggcccttgcagaacagcag

SEQ ID NO: 358 - DNA, 978 bp, Artificial Sequence
  source: /note="Description of Artificial Sequence: Synthetic Destabilizing Domain (DD)"
gaagaaacaagagagctacagtcgttagcggctgctgtggtgccatctgcccagacccttaaaattactgactttagcttcagtgactttgagctgtctgatctggaaacagcactgtgtacaattcggatgtttactgacctcaaccttgtgcagaacttccagatgaaacatgaggttctttgcagatggattttaagtgttaagaagaattatcggaagaatgttgcctatcataattggagacatgcctttaatacagctcagtgcatgtttgctgctctaaaagcaggcaaaattcagaacaagctgactgacctggagatacttgcattgctgattgctgcactaagccacgatttggatcaccgtggtgtgaataactcttacatacagcgaagtgaacatccacttgcccagctttactgccattcaatcatggaacaccatcattttgaccagtgcctgatgattcttaatagtccaggcaatcagattctcagtggcctctccattgaagaatataagaccacgttgaaaataatcaagcaagctattttagctacagacctagcactgtacattaagaggctgggagaattttttgaacttataagaaaaaatcaattcaatttggaagatcctcatcaaaaggagttgtttttggcaatgctgatgacagcttgtgatctttctgcaattacaaaaccctggcctattcaacaacggatagcagaacttgtagcaactgaattttttgatcaaggagacagagagagaaaagaactcaacatagaacccactgatctaatgaacagggagaagaaaaacaaaatcccaagtatgcaagttgggttcatagatgccatctgcttgcaactgtatgaggccctgacccacgtgtcagaggactgtttccctttgctagatggctgcagaaagaacaggcagaaatggcaggcccttgcagaacagcag

SEQ ID NO: 359 - DNA, 978 bp, Artificial Sequence
  source: /note="Description of Artificial Sequence: Synthetic Destabilizing Domain (DD)"
gaagaaacaagagagctacagtcgttagcggctgctgtggtgccatctgcccagacccttaaaattactgactttagcttcagtgactttgagctgtctgatctggaaacagcactgtgtacaattcggatgtttactgacctcaaccttgtgcagaacttccagatgaaacatgaggttctttgcagatggattttaagtgttaagaagaattatcggaagaatgttgcctatcataattggagacatgcctttaatacagctcagtgcatgtttgctgctctaaaagcaggcaaaattcagaacaagctgactgacctggagatacttgcattgctgattgctgcactaagccacgatttggatcaccgtggtgtgaataactcttacatacagcgaagtgaacatccacttgcccagctttactgccattcaatcatggaacaccatcattttgaccagtgcctgatgattcttaatagtccaggcaatcagattctcagtggcctctccattgaagaatataagaccacgttgaaaataatcaagcaagctattttagctacagacctagcactgtacattaagaggctaggagaattttttgaacttataagaaaaaatcaattcaatttggaagatcctcatcaaaaggagttgtttttggcaatgctgatgacagcttgtgatctttctgcaattacaaaaccctggcctattcaacaacggatagcagaacttgtagcaactgaattttttgatcaaggagacagagagagaaaagaactcaacatagaacccactgatctaatgaacagggagaagaaaaacaaaatcccaagtatgcaagttgggttcatagatgccatctgcttgcaactgtatgaggccctgacccacgtgtcagaggactgtttccctttgctagatggctgcagaaagaacaggcagaaatggcaggcccttgcagaacagcag

SEQ ID NO: 360 - DNA, 978 bp, Artificial Sequence
  source: /note="Description of Artificial Sequence: Synthetic Destabilizing Domain (DD)"
gaagaaacaagagagctacagtcgttagcggctgctgtggtgccatctgcccagacccttaaaattactgactttagcttcagtgactttgagctgtctgatctggaaacagcactgtgtacaattcggatgtttactgacctcaaccttgtgcagaacttccagatgaaacatgaggttctttgcagatggattttaagtgttaagaagaattatcggaagaatgttgcctatcataattggagacatgcctttaatacagctcagtgcatctttgctgctctaaaagcaggcaaaattcagaacaagctgactgacctggagatacttgcattgctgattgctgcactaagccacgatttggatcaccgtggtgtgaataactcttacatacagcgaagtgaacatccacttgcccagctttactgccattcaatcatggaacaccatcattttgaccagtgcctgatgattcttaatagtccaggcaatcagattctcagtggcctctccattgaagaatataagaccacgttgaaaataatcaagcaagctattttagctacagacctagcactgtacattaagaggcgaggagaattttttgaacttataagaaaaaatcaattcaatttggaagatcctcatcaaaaggagttgtttttggcaatgctgatgacagcttgtgatctttctgcaattacaaaaccctggcctattcaacaacggatagcagaacttgtagcaactgaattttttgatcaaggagacagagagagaaaagaactcaacatagaacccactgatctaatgaacagggagaagaaaaacaaaatcccaagtatgcaagttgggttcatagatgccatctgcttgcaactgtatgaggccctgacccacgtgtcagaggactgtttccctttgctagatggctgcagaaagaacaggcagaaatggcaggcccttgcagaacagcag

SEQ ID NO: 361 - DNA, 978 bp, Artificial Sequence
  source: /note="Description of Artificial Sequence: Synthetic Destabilizing Domain (DD)"
gaagaaacaagagagctacagtcgttagcggctgctgtggtgccatctgcccagacccttaaaattactgactttagcttcagtgactttgagctgtctgatctggaaacagcactgtgtacaattcggatgtttactgacctcaaccttgtgcagaacttccagatgaaacatgaggttctttgcagatggattttaagtgttaagaagaattatcggaagaatgttgcctatcataattggagacatgcctttaatacagctcagtgcatgtttgctgctctaaaagcaggcaaaattcagaacaagctgactgacctggagatacttgcattgctgattgctgcactaagcgccgatttggatcaccgtggtgtgaataactcttacatacagcgaagtgaacatccacttgcccagctttactgccattcaatcatggaacaccatcattttgaccagtgcctgatgattcttaatagtccaggcaatcagattctcagtggcctctccattgaagaatataagaccacgttgaaaataatcaagcaagctattttagctacagacctagcactgtacattaagaggcgaggagaattttttgaacttataagaaaaaatcaattcaatttggaagatcctcatcaaaaggagttgtttttggcaatgctgatgacagcttgtgatctttctgcaattacaaaaccctggcctattcaacaacggatagcagaacttgtagcaactgaattttttgatcaaggagacagagagagaaaagaactcaacatagaacccactgatctaatgaacagggagaagaaaaacaaaatcccaagtatgcaagttgggttcatagatgccatctgcttgcaactgtatgaggccctgacccacgtgtcagaggactgtttccctttgctagatggctgcagaaagaacaggcagaaatggcaggcccttgcagaacagcag

SEQ ID NO: 362 - DNA, 978 bp, Artificial Sequence
  source: /note="Description of Artificial Sequence: Synthetic Destabilizing Domain (DD)"
gaagaaacaagagagctacagtcgttagcggctgctgtggtgccatctgcccagacccttaaaattactgactttagcttcagtgactttgagctgtctgatctggaaacagcactgtgtacaattcggatgtttactgacctcaaccttgtgcagaacttccagatgaaacatgaggttctttgcagatggattttaagtgttaagaagaattatcggaagaatgttgcctatcataattggagacatgcctttaatacagctcagtgcatgtttgctgctctaaaagcaggcaaaattcagaacaagctgactgacctggagatacttgcattgctgattgctgcactaagccacgatttggatcaccgtggtgtgaataactcttacatacagcgaagtgaacatccacttgcccagctttactgccattcaatcatggaacaccatcattttgaccagtgcctgatgattcttaatagtccaggcaatcagattctcagtggcctctccattgaagaatataagaccacgttgaaaataatcaagcaagctattttagctacagacctagcactgtacattaagaggcgaggagaattttttgaacttataagaaaaaatcaattcaatttggaagatcctcatcaaaaggagttgtttttggcaatgctgatgacagcttgtgccctttctgcaattacaaaaccctggcctattcaacaacggatagcagaacttgtagcaactgaattttttgatcaaggagacagagagagaaaagaactcaacatagaacccactgatctaatgaacagggagaagaaaaacaaaatcccaagtatgcaagttgggttcatagatgccatctgcttgcaactgtatgaggccctgacccacgtgtcagaggactgtttccctttgctagatggctgcagaaagaacaggcagaaatggcaggcccttgcagaacagcag

SEQ ID NO: 363 - protein, 427 aa, Aequorea coerulescens
MVSKGAELFTGIVPILIELNGDVNGHKFSVSGEGEGDATYGKLTLKFICTTGKLPVPWPTLVTTLSYGVQCFSRYPDHMKQHDFFKSAMPEGYIQERTIFFEDDGNYKSRAEVKFEGDTLVNRIELTGTDFKEDGNILGNKMEYNYNAHNVYIMTDKAKNGIKVNFKIRHNIEDGSVQLADHYQQNTPIGDGPVLLPDNHYLSTQSALSKDPNEKRDHMIYFGFVTAAAITHGMDELYKGSVGSLNCIVAVSQNMGIGKNGDLPWPPLRNEFRYFQRMTTTSSVEGKQNLVIMGKKTWFSIPEKNRPLKGRINLVLSRELKEPPQGAHFLSRSLDDALKLTEQPELANKVDMVWIVGGSSVIKEAMNHPGHLKLFVTRIMQDFESDTFFPEIDLEKYKLLPEYPGVLSDVQEEKGIKYKFEVYEKND

SEQ ID NO: 364 - protein, 550 aa, Photinus pyralis
MEDAKNIKKGPAPFYPLEDGTAGEQLHKAMKRYALVPGTIAFTDAHIEVNITYAEYFEMSVRLAEAMKRYGLNTNHRIVVCSENSLQFFMPVLGALFIGVAVAPANDIYNERELLNSMNISQPTVVFVSKKGLQKILNVQKKLPIIQKIIIMDSKTDYQGFQSMYTFVTSHLPPGFNEYDFVPESFDRDKTIALIMNSSGSTGLPKGVALPHRTACVRFSHARDPIFGNQIIPDTAILSVVPFHHGFGMFTTLGYLICGFRVVLMYRFEEELFLRSLQDYKIQSALLVPTLFSFFAKSTLIDKYDLSNLHEIASGGAPLSKEVGEAVAKRFHLPGIRQGYGLTETTSAILITPEGDDKPGAVGKVVPFFEAKVVDLDTGKTLGVNQRGELCVRGPMIMSGYVNNPEATNALIDKDGWLHSGDIAYWDEDEHFFIVDRLKSLIKYKGYQVAPAELESILLQHPNIFDAGVAGLPDDDAGELPAAVVVLEHGKTMTEKEIVDYVASQVTTAKKLRGGVVFVDEVPKGLTGKLDARKIREILIKAKKGGKSKL

SEQ ID NO: 365 - protein, 239 aa, Aequorea coerulescens
MVSKGAELFTGIVPILIELNGDVNGHKFSVSGEGEGDATYGKLTLKFICTTGKLPVPWPTLVTTLSYGVQCFSRYPDHMKQHDFFKSAMPEGYIQERTIFFEDDGNYKSRAEVKFEGDTLVNRIELTGTDFKEDGNILGNKMEYNYNAHNVYIMTDKAKNGIKVNFKIRHNIEDGSVQLADHYQQNTPIGDGPVLLPDNHYLSTQSALSKDPNEKRDHMIYFGFVTAAAITHGMDELYK

SEQ ID NO: 366 - protein, 549 aa, Artificial Sequence
  source: /note="Description of Artificial Sequence: Synthetic Payload sequence"
EDAKNIKKGPAPFYPLEDGTAGEQLHKAMKRYALVPGTIAFTDAHIEVDITYAEYFEMSVRLAEAMKRYGLNTNHRIVVCSENSLQFFMPVLGALFIGVAVAPANDIYNERELLNSMGISQPTVVFVSKKGLQKILNVQKKLPIIQKIIIMDSKTDYQGFQSMYTFVTSHLPPGFNEYDFVPESFDRDKTIALIMNSSGSTGLPKGVALPHRTACVRFSHARDPIFGNQIIPDTAILSVVPFHHGFGMFTTLGYLICGFRVVLMYRFEEELFLRSLQDYKIQSALLVPTLFSFFAKSTLIDKYDLSNLHEIASGGAPLSKEVGEAVAKRFHLPGIRQGYGLTETTSAILITPEGDDKPGAVGKVVPFFEAKVVDLDTGKTLGVNQRGELCVRGPMIMSGYVNNPEATNALIDKDGWLHSGDIAYWDEDEHFFIVDRLKSLIKYKGYQVAPAELESILLQHPNIFDAGVAGLPDDDAGELPAAVVVLEHGKTMTEKEIVDYVASQVTTAKKLRGGVVFVDEVPKGLTGKLDARKIREILIKAKKGGKIAV

SEQ ID NO: 367 - protein, 878 aa, Artificial Sequence
  source: /note="Description of Artificial Sequence: Synthetic polypeptide"
MEETRELQSLAAAVVPSAQTLKITDFSFSDFELSDLETALCTIRMFTDLNLVQNFQMKHEVLCRWILSVKKNYRKNVAYHNWRHAFNTAQCMFAALKAGKIQNKLTDLEILALLIAALSHDLDHRGVNNSYIQRSEHPLAQLYCHSIMEHHHFDQCLMILNSPGNQILSGLSIEEYKTTLKIIKQAILATDLALYIKRRGEFFELIRKNQFNLEDPHQKELFLAMLMTACDLSAITKPWPIQQRIAELVATEFFDQGDRERKELNIEPTDLMNREKKNKIPSMQVGFIDAICLQLYEALTHVSEDCFPLLDGCRKNRQKWQALAEQQSGEDAKNIKKGPAPFYPLEDGTAGEQLHKAMKRYALVPGTIAFTDAHIEVDITYAEYFEMSVRLAEAMKRYGLNTNHRIVVCSENSLQFFMPVLGALFIGVAVAPANDIYNERELLNSMGISQPTVVFVSKKGLQKILNVQKKLPIIQKIIIMDSKTDYQGFQSMYTFVTSHLPPGFNEYDFVPESFDRDKTIALIMNSSGSTGLPKGVALPHRTACVRFSHARDPIFGNQIIPDTAILSVVPFHHGFGMFTTLGYLICGFRVVLMYRFEEELFLRSLQDYKIQSALLVPTLFSFFAKSTLIDKYDLSNLHEIASGGAPLSKEVGEAVAKRFHLPGIRQGYGLTETTSAILITPEGDDKPGAVGKVVPFFEAKVVDLDTGKTLGVNQRGELCVRGPMIMSGYVNNPEATNALIDKDGWLHSGDIAYWDEDEHFFIVDRLKSLIKYKGYQVAPAELESILLQHPNIFDAGVAGLPDDDAGELPAAVVVLEHGKTMTEKEIVDYVASQVTTAKKLRGGVVFVDEVPKGLTGKLDARKIREILIKAKKGGKIAV

SEQ ID NO: 368 - protein, 878 aa, Artificial Sequence
  source: /note="Description of Artificial Sequence: Synthetic polypeptide"
MEETRELQSLAAAVVPSAQTLKITDFSFSDFELSDLETALCTIRMFTDLNLVQNFQMKHEVLCRWILSVKKNYRKNVAYHNWRHAFNTAQCMFAALKAGKIQNKLTDLEILALLIAALSHDLDHRGVNNSYIQRSEHPLAQLYCHSIMEHHHFDQCLMILNSPGNQILSGLSIEEYKTTLKIIKQAILATDLALYIKRRGEFAELIRKNQFNLEDPHQKELFLAMLMTACDLSAITKPWPIQQRIAELVATEFFDQGDRERKELNIEPTDLMNREKKNKIPSMQVGFIDAICLQLYEALTHVSEDCFPLLDGCRKNRQKWQALAEQQSGEDAKNIKKGPAPFYPLEDGTAGEQLHKAMKRYALVPGTIAFTDAHIEVDITYAEYFEMSVRLAEAMKRYGLNTNHRIVVCSENSLQFFMPVLGALFIGVAVAPANDIYNERELLNSMGISQPTVVFVSKKGLQKILNVQKKLPIIQKIIIMDSKTDYQGFQSMYTFVTSHLPPGFNEYDFVPESFDRDKTIALIMNSSGSTGLPKGVALPHRTACVRFSHARDPIFGNQIIPDTAILSVVPFHHGFGMFTTLGYLICGFRVVLMYRFEEELFLRSLQDYKIQSALLVPTLFSFFAKSTLIDKYDLSNLHEIASGGAPLSKEVGEAVAKRFHLPGIRQGYGLTETTSAILITPEGDDKPGAVGKVVPFFEAKVVDLDTGKTLGVNQRGELCVRGPMIMSGYVNNPEATNALIDKDGWLHSGDIAYWDEDEHFFIVDRLKSLIKYKGYQVAPAELESILLQHPNIFDAGVAGLPDDDAGELPAAVVVLEHGKTMTEKEIVDYVASQVTTAKKLRGGVVFVDEVPKGLTGKLDARKIREILIKAKKGGKIAV

SEQ ID NO: 369 - protein, 878 aa, Artificial Sequence
  source: /note="Description of Artificial Sequence: Synthetic polypeptide"
MEETRELQSLAAAVVPSAQTLKITDFSFSDFELSDLETALCTIRMFTDLNLVQNFQMKHEVLCRWILSVKKNYRKNVAYHNWRHAFNTAQCMFAALKAGKIQNKLTDLEILALLIAALSHDLDHRGVNNSYIQRSEHPLAQLYCHSIMEHHHFDQCLMILNSPGNQILSGLSIEEYKTTLKIIKQAILATDLALYIKRLGEFFELIRKNQFNLEDPHQKELFLAMLMTACDLSAITKPWPIQQRIAELVATEFFDQGDRERKELNIEPTDLMNREKKNKIPSMQVGFIDAICLQLYEALTHVSEDCFPLLDGCRKNRQKWQALAEQQSGEDAKNIKKGPAPFYPLEDGTAGEQLHKAMKRYALVPGTIAFTDAHIEVDITYAEYFEMSVRLAEAMKRYGLNTNHRIVVCSENSLQFFMPVLGALFIGVAVAPANDIYNERELLNSMGISQPTVVFVSKKGLQKILNVQKKLPIIQKIIIMDSKTDYQGFQSMYTFVTSHLPPGFNEYDFVPESFDRDKTIALIMNSSGSTGLPKGVALPHRTACVRFSHARDPIFGNQIIPDTAILSVVPFHHGFGMFTTLGYLICGFRVVLMYRFEEELFLRSLQDYKIQSALLVPTLFSFFAKSTLIDKYDLSNLHEIASGGAPLSKEVGEAVAKRFHLPGIRQGYGLTETTSAILITPEGDDKPGAVGKVVPFFEAKVVDLDTGKTLGVNQRGELCVRGPMIMSGYVNNPEATNALIDKDGWLHSGDIAYWDEDEHFFIVDRLKSLIKYKGYQVAPAELESILLQHPNIFDAGVAGLPDDDAGELPAAVVVLEHGKTMTEKEIVDYVASQVTTAKKLRGGVVFVDEVPKGLTGKLDARKIREILIKAKKGGKIAV

SEQ ID NO: 370 - protein, 567 aa, Artificial Sequence
  source: /note="Description of Artificial Sequence: Synthetic polypeptide"
MVSKGAELFTGIVPILIELNGDVNGHKFSVSGEGEGDATYGKLTLKFICTTGKLPVPWPTLVTTLSYGVQCFSRYPDHMKQHDFFKSAMPEGYIQERTIFFEDDGNYKSRAEVKFEGDTLVNRIELTGTDFKEDGNILGNKMEYNYNAHNVYIMTDKAKNGIKVNFKIRHNIEDGSVQLADHYQQNTPIGDGPVLLPDNHYLSTQSALSKDPNEKRDHMIYFGFVTAAAITHGMDELYKSGEETRELQSLAAAVVPSAQTLKITDFSFSDFELSDLETALCTIRMFTDLNLVQNFQMKHEVLCRWILSVKKNYRKNVAYHNWRHAFNTAQCMFAALKAGKIQNKLTDLEILALLIAALSADLDHRGVNNSYIQRSEHPLAQLYCHSIMEHHHFDQCLMILNSPGNQILSGLSIEEYKTTLKIIKQAILATDLALYIKRRGEFFELIRKNQFNLEDPHQKELFLAMLMTACDLSAITKPWPIQQRIAELVATEFFDQGDRERKELNIEPTDLMNREKKNKIPSMQVGFIDAICLQLYEALTHVSEDCFPLLDGCRKNRQKWQALAEQQ

SEQ ID NO: 371 - protein, 567 aa, Artificial Sequence
  source: /note="Description of Artificial Sequence: Synthetic polypeptide"
MVSKGAELFTGIVPILIELNGDVNGHKFSVSGEGEGDATYGKLTLKFICTTGKLPVPWPTLVTTLSYGVQCFSRYPDHMKQHDFFKSAMPEGYIQERTIFFEDDGNYKSRAEVKFEGDTLVNRIELTGTDFKEDGNILGNKMEYNYNAHNVYIMTDKAKNGIKVNFKIRHNIEDGSVQLADHYQQNTPIGDGPVLLPDNHYLSTQSALSKDPNEKRDHMIYFGFVTAAAITHGMDELYKSGEETRELQSLAAAVVPSAQTLKITDFSFSDFELSDLETALCTIRMFTDLNLVQNFQMKHEVLCRWILSVKKNYRKNVAYHNWRHAFNTAQCMFAALKAGKIQNKLTDLEILALLIAALSHDLDHRGVNNSYIQRSEHPLAQLYCHSIMEHHHFDQCLMILNSPGNQILSGLSIEEYKTTLKIIKQAILATDLALYIKRRGEFFELIRKNQFNLEDPHQKELFLAMLMTACALSAITKPWPIQQRIAELVATEFFDQGDRERKELNIEPTDLMNREKKNKIPSMQVGFIDAICLQLYEALTHVSEDCFPLLDGCRKNRQKWQALAEQQ

SEQ ID NO: 372 - DNA, 714 bp, Artificial Sequence
  source: /note="Description of Artificial Sequence: Synthetic Payload sequence"
gtgagcaagggcgccgagctgttcaccggcatcgtgcccatcctgatcgagctgaatggcgatgtgaatggccacaagttcagcgtgagcggcgagggcgagggcgatgccacctacggcaagctgaccctgaagttcatctgcaccaccggcaagctgcctgtgccctggcccaccctggtgaccaccctgagctacggcgtgcagtgcttctcacgctaccccgatcacatgaagcagcacgacttcttcaagagcgccatgcctgagggctacatccaggagcgcaccatcttcttcgaggatgacggcaactacaagtcgcgcgccgaggtgaagttcgagggcgataccctggtgaatcgcatcgagctgaccggcaccgatttcaaggaggatggcaacatcctgggcaataagatggagtacaactacaacgcccacaatgtgtacatcatgaccgacaaggccaagaatggcatcaaggtgaacttcaagatccgccacaacatcgaggatggcagcgtgcagctggccgaccactaccagcagaatacccccatcggcgatggccctgtgctgctgcccgataaccactacctgtccacccagagcgccctgtccaaggaccccaacgagaagcgcgatcacatgatctacttcggcttcgtgaccgccgccgccatcacccacggcatggatgagctgtacaag

SEQ ID NO: 373 - DNA, 717 bp, Artificial Sequence
  source: /note="Description of Artificial Sequence: Synthetic Payload sequence"
atggtgagcaagggcgccgagctgttcaccggcatcgtgcccatcctgatcgagctgaatggcgatgtgaatggccacaagttcagcgtgagcggcgagggcgagggcgatgccacctacggcaagctgaccctgaagttcatctgcaccaccggcaagctgcctgtgccctggcccaccctggtgaccaccctgagctacggcgtgcagtgcttctcacgctaccccgatcacatgaagcagcacgacttcttcaagagcgccatgcctgagggctacatccaggagcgcaccatcttcttcgaggatgacggcaactacaagtcgcgcgccgaggtgaagttcgagggcgataccctggtgaatcgcatcgagctgaccggcaccgatttcaaggaggatggcaacatcctgggcaataagatggagtacaactacaacgcccacaatgtgtacatcatgaccgacaaggccaagaatggcatcaaggtgaacttcaagatccgccacaacatcgaggatggcagcgtgcagctggccgaccactaccagcagaatacccccatcggcgatggccctgtgctgctgcccgataaccactacctgtccacccagagcgccctgtccaaggaccccaacgagaagcgcgatcacatgatctacttcggcttcgtgaccgccgccgccatcacccacggcatggatgagctgtacaag

SEQ ID NO: 374 - DNA, 1647 bp, Artificial Sequence
  source: /note="Description of Artificial Sequence: Synthetic Payload sequence"
gaagatgccaaaaacattaagaagggcccagcgccattctacccactcgaagacgggaccgccggcgagcagctgcacaaagccatgaagcgctacgccctggtgcccggcaccatcgcctttaccgacgcacatatcgaggtggacattacctacgccgagtacttcgagatgagcgttcggctggcagaagctatgaagcgctatgggctgaatacaaaccatcggatcgtggtgtgcagcgagaatagcttgcagttcttcatgcccgtgttgggtgccctgttcatcggtgtggctgtggccccagctaacgacatctacaacgagcgcgagctgctgaacagcatgggcatcagccagcccaccgtcgtattcgtgagcaagaaagggctgcaaaagatcctcaacgtgcaaaagaagctaccgatcatacaaaagatcatcatcatggatagcaagaccgactaccagggcttccaaagcatgtacaccttcgtgacttcccatttgccacccggcttcaacgagtacgacttcgtgcccgagagcttcgaccgggacaaaaccatcgccctgatcatgaacagtagtggcagtaccggattgcccaagggcgtagccctaccgcaccgcaccgcttgtgtccgattcagtcatgcccgcgaccccatcttcggcaaccagatcatccccgacaccgctatcctcagcgtggtgccatttcaccacggcttcggcatgttcaccacgctgggctacttgatctgcggctttcgggtcgtgctcatgtaccgcttcgaggaggagctattcttgcgcagcttgcaagactataagattcaatctgccctgctggtgcccacactatttagcttcttcgctaagagcactctcatcgacaagtacgacctaagcaacttgcacgagatcgccagcggcggggcgccgctcagcaaggaggtaggtgaggccgtggccaaacgcttccacctaccaggcatccgccagggctacggcctgacagaaacaaccagcgccattctgatcacccccgaaggggacgacaagcctggcgcagtaggcaaggtggtgcccttcttcgaggctaaggtggtggacttggacaccggtaagacactgggtgtgaaccagcgcggcgagctgtgcgtccgtggccccatgatcatgagcggctacgttaacaaccccgaggctacaaacgctctcatcgacaaggacggctggctgcacagcggcgacatcgcctactgggacgaggacgagcacttcttcatcgtggaccggctgaagagcctgatcaaatacaagggctaccaggtagccccagccgaactggagagcatcctgctgcaacaccccaacatcttcgacgccggggtcgccggcctgcccgacgacgatgccggcgagctgcccgccgcagtcgtcgtgctggaacacggtaaaaccatgaccgagaaggagatcgtggactatgtggccagccaggttacaaccgccaagaagctgcgcggtggtgttgtgttcgtggacgaggtgcctaaaggactgaccggcaagttggacgcccgcaagatccgcgagattctcattaaggccaagaagggcggcaagatcgccgtg

SEQ ID NO: 375 - DNA, 2637 bp, Artificial Sequence
  source: /note="Description of Artificial Sequence: Synthetic polynucleotide"
atggaagaaacaagagagctacagtcgttagcggctgctgtggtgccatctgcccagacccttaaaattactgactttagcttcagtgactttgagctgtctgatctggaaacagcactgtgtacaattcggatgtttactgacctcaaccttgtgcagaacttccagatgaaacatgaggttctttgcagatggattttaagtgttaagaagaattatcggaagaatgttgcctatcataattggagacatgcctttaatacagctcagtgcatgtttgctgctctaaaagcaggcaaaattcagaacaagctgactgacctggagatacttgcattgctgattgctgcactaagccacgatttggatcaccgtggtgtgaataactcttacatacagcgaagtgaacatccacttgcccagctttactgccattcaatcatggaacaccatcattttgaccagtgcctgatgattcttaatagtccaggcaatcagattctcagtggcctctccattgaagaatataagaccacgttgaaaataatcaagcaagctattttagctacagacctagcactgtacattaagaggcgaggagaattttttgaacttataagaaaaaatcaattcaatttggaagatcctcatcaaaaggagttgtttttggcaatgctgatgacagcttgtgatctttctgcaattacaaaaccctggcctattcaacaacggatagcagaacttgtagcaactgaattttttgatcaaggagacagagagagaaaagaactcaacatagaacccactgatctaatgaacagggagaagaaaaacaaaatcccaagtatgcaagttgggttcatagatgccatctgcttgcaactgtatgaggccctgacccacgtgtcagaggactgtttccctttgctagatggctgcagaaagaacaggcagaaatggcaggcccttgcagaacagcagagtggtgaagatgccaaaaacattaagaagggcccagcgccattctacccactcgaagacgggaccgccggcgagcagctgcacaaagccatgaagcgctacgccctggtgcccggcaccatcgcctttaccgacgcacatatcgaggtggacattacctacgccgagtacttcgagatgagcgttcggctggcagaagctatgaagcgctatgggctgaatacaaaccatcggatcgtggtgtgcagcgagaatagcttgcagttcttcatgcccgtgttgggtgccctgttcatcggtgtggctgtggccccagctaacgacatctacaacgagcgcgagctgctgaacagcatgggcatcagccagcccaccgtcgtattcgtgagcaagaaagggctgcaaaagatcctcaacgtgcaaaagaagctaccgatcatacaaaagatcatcatcatggatagcaagaccgactaccagggcttccaaagcatgtacaccttcgtgacttcccatttgccacccggcttcaacgagtacgacttcgtgcccgagagcttcgaccgggacaaaaccatcgccctgatcatgaacagtagtggcagtaccggattgcccaagggcgtagccctaccgcaccgcaccgcttgtgtccgattcagtcatgcccgcgaccccatcttcggcaaccagatcatccccgacaccgctatcctcagcgtggtgccatttcaccacggcttcggcatgttcaccacgctgggctacttgatctgcggctttcgggtcgtgctcatgtaccgcttcgaggaggagctattcttgcgcagcttgcaagactataagattcaatctgccctgctggtgcccacactatttagcttcttcgctaagagcactctcatcgacaagtacgacctaagcaacttgcacgagatcgccagcggcggggcgccgctcagcaaggaggtaggtgaggccgtggccaaacgcttccacctaccaggcatccgccagggctacggcctgacagaaacaaccagcgccattctgatcacccccgaaggggacgacaagcctggcgcagtaggcaaggtggtgcccttcttcgaggctaaggtggtggacttggacaccggtaagacactgggtgtgaaccagcgcggcgagctgtgcgtccgtggccccatgatcatgagcggctacgttaacaaccccgaggctacaaacgctctcatcgacaaggacggctggctgcacagcggcgacatcgcctactgggacgaggacgagcacttcttcatcgtggaccggctgaagagcctgatcaaatacaagggctaccaggtagccccagccgaactggagagcatcctgctgcaacaccccaacatcttcgacgccggggtcgccggcctgcccgacgacgatgccggcgagctgcccgccgcagtcgtcgtgctggaacacggtaaaaccatgaccgagaaggagatcgtggactatgtggccagccaggttacaaccgccaagaagctgcgcggtggtgttgtgttcgtggacgaggtgcctaaaggactgaccggcaagttggacgcccgcaagatccgcgagattctcattaaggccaagaagggcggcaagatcgccgtgtaa

SEQ ID NO: 376 - DNA, 2637 bp, Artificial Sequence
  source: /note="Description of Artificial Sequence: Synthetic polynucleotide"
atggaagaaacaagagagctacagtcgttagcggctgctgtggtgccatctgcccagacccttaaaattactgactttagcttcagtgactttgagctgtctgatctggaaacagcactgtgtacaattcggatgtttactgacctcaaccttgtgcagaacttccagatgaaacatgaggttctttgcagatggattttaagtgttaagaagaattatcggaagaatgttgcctatcataattggagacatgcctttaatacagctcagtgcatgtttgctgctctaaaagcaggcaaaattcagaacaagctgactgacctggagatacttgcattgctgattgctgcactaagccacgatttggatcaccgtggtgtgaataactcttacatacagcgaagtgaacatccacttgcccagctttactgccattcaatcatggaacaccatcattttgaccagtgcctgatgattcttaatagtccaggcaatcagattctcagtggcctctccattgaagaatataagaccacgttgaaaataatcaagcaagctattttagctacagacctagcactgtacattaagaggcgaggagaatttgctgaacttataagaaaaaatcaattcaatttggaagatcctcatcaaaaggagttgtttttggcaatgctgatgacagcttgtgatctttctgcaattacaaaaccctggcctattcaacaacggatagcagaacttgtagcaactgaattttttgatcaaggagacagagagagaaaagaactcaacatagaacccactgatctaatgaacagggagaagaaaaacaaaatcccaagtatgcaagttgggttcatagatgccatctgcttgcaactgtatgaggccctgacccacgtgtcagaggactgtttccctttgctagatggctgcagaaagaacaggcagaaatggcaggcccttgcagaacagcagagtggtgaagatgccaaaaacattaagaagggcccagcgccattctacccactcgaagacgggaccgccggcgagcagctgcacaaagccatgaagcgctacgccctggtgcccggcaccatcgcctttaccgacgcacatatcgaggtggacattacctacgccgagtacttcgagatgagcgttcggctggcagaagctatgaagcgctatgggctgaatacaaaccatcggatcgtggtgtgcagcgagaatagcttgcagttcttcatgcccgtgttgggtgccctgttcatcggtgtggctgtggccccagctaacgacatctacaacgagcgcgagctgctgaacagcatgggcatcagccagcccaccgtcgtattcgtgagcaagaaagggctgcaaaagatcctcaacgtgcaaaagaagctaccgatcatacaaaagatcatcatcatggatagcaagaccgactaccagggcttccaaagcatgtacaccttcgtgacttcccatttgccacccggcttcaacgagtacgacttcgtgcccgagagcttcgaccgggacaaaaccatcgccctgatcatgaacagtagtggcagtaccggattgcccaagggcgtagccctaccgcaccgcaccgcttgtgtccgattcagtcatgcccgcgaccccatcttcggcaaccagatcatccccgacaccgctatcctcagcgtggtgccatttcaccacggcttcggcatgttcaccacgctgggctacttgatctgcggctttcgggtcgtgctcatgtaccgcttcgaggaggagctattcttgcgcagcttgcaagactataagattcaatctgccctgctggtgcccacactatttagcttcttcgctaagagcactctcatcgacaagtacgacctaagcaacttgcacgagatcgccagcggcggggcgccgctcagcaaggaggtaggtgaggccgtggccaaacgcttccacctaccaggcatccgccagggctacggcctgacagaaacaaccagcgccattctgatcacccccgaaggggacgacaagcctggcgcagtaggcaaggtggtgcccttcttcgaggctaaggtggtggacttggacaccggtaagacactgggtgtgaaccagcgcggcgagctgtgcgtccgtggccccatgatcatgagcggctacgttaacaaccccgaggctacaaacgctctcatcgacaaggacggctggctgcacagcggcgacatcgcctactgggacgaggacgagcacttcttcatcgtggaccggctgaagagcctgatcaaatacaagggctaccaggtagccccagccgaactggagagcatcctgctgcaacaccccaacatcttcgacgccggggtcgccggcctgcccgacgacgatgccggcgagctgcccgccgcagtcgtcgtgctggaacacggtaaaaccatgaccgagaaggagatcgtggactatgtggccagccaggttacaaccgccaagaagctgcgcggtggtgttgtgttcgtggacgaggtgcctaaaggactgaccggcaagttggacgcccgcaagatccgcgagattctcattaaggccaagaagggcggcaagatcgccgtgtaa

SEQ ID NO: 377 - DNA, 2637 bp, Artificial Sequence
  source: /note="Description of Artificial Sequence: Synthetic polynucleotide"
atggaagaaacaagagagctacagtcgttagcggctgctgtggtgccatctgcccagacccttaaaattactgactttagcttcagtgactttgagctgtctgatctggaaacagcactgtgtacaattcggatgtttactgacctcaaccttgtgcagaacttccagatgaaacatgaggttctttgcagatggattttaagtgttaagaagaattatcggaagaatgttgcctatcataattggagacatgcctttaatacagctcagtgcatgtttgctgctctaaaagcaggcaaaattcagaacaagctgactgacctggagatacttgcattgctgattgctgcactaagccacgatttggatcaccgtggtgtgaataactcttacatacagcgaagtgaacatccacttgcccagctttactgccattcaatcatggaacaccatcattttgaccagtgcctgatgattcttaatagtccaggcaatcagattctcagtggcctctccattgaagaatataagaccacgttgaaaataatcaagcaagctattttagctacagacctagcactgtacattaagaggctaggagaattttttgaacttataagaaaaaatcaattcaatttggaagatcctcatcaaaaggagttgtttttggcaatgctgatgacagcttgtgatctttctgcaattacaaaaccctggcctattcaacaacggatagcagaacttgtagcaactgaattttttgatcaaggagacagagagagaaaagaactcaacatagaacccactgatctaatgaacagggagaagaaaaacaaaatcccaagtatgcaagttgggttcatagatgccatctgcttgcaactgtatgaggccctgacccacgtgtcagaggactgtttccctttgctagatggctgcagaaagaacaggcagaaatggcaggcccttgcagaacagcagagtggtgaagatgccaaaaacattaagaagggcccagcgccattctacccactcgaagacgggaccgccggcgagcagctgcacaaagccatgaagcgctacgccctggtgcccggcaccatcgcctttaccgacgcacatatcgaggtggacattacctacgccgagtacttcgagatgagcgttcggctggcagaagctatgaagcgctatgggctgaatacaaaccatcggatcgtggtgtgcagcgagaatagcttgcagttcttcatgcccgtgttgggtgccctgttcatcggtgtggctgtggccccagctaacgacatctacaacgagcgcgagctgctgaacagcatgggcatcagccagcccaccgtcgtattcgtgagcaagaaagggctgcaaaagatcctcaacgtgcaaaagaagctaccgatcatacaaaagatcatcatcatggatagcaagaccgactaccagggcttccaaagcatgtacaccttcgtgacttcccatttgccacccggcttcaacgagtacgacttcgtgcccgagagcttcgaccgggacaaaaccatcgccctgatcatgaacagtagtggcagtaccggattgcccaagggcgtagccctaccgcaccgcaccgcttgtgtccgattcagtcatgcccgcgaccccatcttcggcaaccagatcatccccgacaccgctatcctcagcgtggtgccatttcaccacggcttcggcatgttcaccacgctgggctacttgatctgcggctttcgggtcgtgctcatgtaccgcttcgaggaggagctattcttgcgcagcttgcaagactataagattcaatctgccctgctggtgcccacactatttagcttcttcgctaagagcactctcatcgacaagtacgacctaagcaacttgcacgagatcgccagcggcggggcgccgctcagcaaggaggtaggtgaggccgtggccaaacgcttccacctaccaggcatccgccagggctacggcctgacagaaacaaccagcgccattctgatcacccccgaaggggacgacaagcctggcgcagtaggcaaggtggtgcccttcttcgaggctaaggtggtggacttggacaccggtaagacactgggtgtgaaccagcgcggcgagctgtgcgtccgtggccccatgatcatgagcggctacgttaacaaccccgaggctacaaacgctctcatcgacaaggacggctggctgcacagcggcgacatcgcctactgggacgaggacgagcacttcttcatcgtggaccggctgaagagcctgatcaaatacaagggctaccaggtagccccagccgaactggagagcatcctgctgcaacaccccaacatcttcgacgccggggtcgccggcctgcccgacgacgatgccggcgagctgcccgccgcagtcgtcgtgctggaacacggtaaaaccatgaccgagaaggagatcgtggactatgtggccagccaggttacaaccgccaagaagctgcgcggtggtgttgtgttcgtggacgaggtgcctaaaggactgaccggcaagttggacgcccgcaagatccgcgagattctcattaaggccaagaagggcggcaagatcgccgtgtaa

SEQ ID NO: 378 - DNA, 1704 bp, Artificial Sequence
  source: /note="Description of Artificial Sequence: Synthetic polynucleotide"
atggtgagcaagggcgccgagctgttcaccggcatcgtgcccatcctgatcgagctgaatggcgatgtgaatggccacaagttcagcgtgagcggcgagggcgagggcgatgccacctacggcaagctgaccctgaagttcatctgcaccaccggcaagctgcctgtgccctggcccaccctggtgaccaccctgagctacggcgtgcagtgcttctcacgctaccccgatcacatgaagcagcacgacttcttcaagagcgccatgcctgagggctacatccaggagcgcaccatcttcttcgaggatgacggcaactacaagtcgcgcgccgaggtgaagttcgagggcgataccctggtgaatcgcatcgagctgaccggcaccgatttcaaggaggatggcaacatcctgggcaataagatggagtacaactacaacgcccacaatgtgtacatcatgaccgacaaggccaagaatggcatcaaggtgaacttcaagatccgccacaacatcgaggatggcagcgtgcagctggccgaccactaccagcagaatacccccatcggcgatggccctgtgctgctgcccgataaccactacctgtccacccagagcgccctgtccaaggaccccaacgagaagcgcgatcacatgatctacttcggcttcgtgaccgccgccgccatcacccacggcatggatgagctgtacaagagtggtgaagaaacaagagagctacagtcgttagcggctgctgtggtgccatctgcccagacccttaaaattactgactttagcttcagtgactttgagctgtctgatctggaaacagcactgtgtacaattcggatgtttactgacctcaaccttgtgcagaacttccagatgaaacatgaggttctttgcagatggattttaagtgttaagaagaattatcggaagaatgttgcctatcataattggagacatgcctttaatacagctcagtgcatgtttgctgctctaaaagcaggcaaaattcagaacaagctgactgacctggagatacttgcattgctgattgctgcactaagcgccgatttggatcaccgtggtgtgaataactcttacatacagcgaagtgaacatccacttgcccagctttactgccattcaatcatggaacaccatcattttgaccagtgcctgatgattcttaatagtccaggcaatcagattctcagtggcctctccattgaagaatataagaccacgttgaaaataatcaagcaagctattttagctacagacctagcactgtacattaagaggcgaggagaattttttgaacttataagaaaaaatcaattcaatttggaagatcctcatcaaaaggagttgtttttggcaatgctgatgacagcttgtgatctttctgcaattacaaaaccctggcctattcaacaacggatagcagaacttgtagcaactgaattttttgatcaaggagacagagagagaaaagaactcaacatagaacccactgatctaatgaacagggagaagaaaaacaaaatcccaagtatgcaagttgggttcatagatgccatctgcttgcaactgtatgaggccctgacccacgtgtcagaggactgtttccctttgctagatggctgcagaaagaacaggcagaaatggcaggcccttgcagaacagcagtga

SEQ ID NO: 379 - DNA, 1704 bp, Artificial Sequence
  source: /note="Description of Artificial Sequence: Synthetic polynucleotide"
atggtgagcaagggcgccgagctgttcaccggcatcgtgcccatcctgatcgagctgaatggcgatgtgaatggccacaagttcagcgtgagcggcgagggcgagggcgatgccacctacggcaagctgaccctgaagttcatctgcaccaccggcaagctgcctgtgccctggcccaccctggtgaccaccctgagctacggcgtgcagtgcttctcacgctaccccgatcacatgaagcagcacgacttcttcaagagcgccatgcctgagggctacatccaggagcgcaccatcttcttcgaggatgacggcaactacaagtcgcgcgccgaggtgaagttcgagggcgataccctggtgaatcgcatcgagctgaccggcaccgatttcaaggaggatggcaacatcctgggcaataagatggagtacaactacaacgcccacaatgtgtacatcatgaccgacaaggccaagaatggcatcaaggtgaacttcaagatccgccacaacatcgaggatggcagcgtgcagctggccgaccactaccagcagaatacccccatcggcgatggccctgtgctgctgcccgataaccactacctgtccacccagagcgccctgtccaaggaccccaacgagaagcgcgatcacatgatctacttcggcttcgtgaccgccgccgccatcacccacggcatggatgagctgtacaagagtggtgaagaaacaagagagctacagtcgttagcggctgctgtggtgccatctgcccagacccttaaaattactgactttagcttcagtgactttgagctgtctgatctggaaacagcactgtgtacaattcggatgtttactgacctcaaccttgtgcagaacttccagatgaaacatgaggttctttgcagatggattttaagtgttaagaagaattatcggaagaatgttgcctatcataattggagacatgcctttaatacagctcagtgcatgtttgctgctctaaaagcaggcaaaattcagaacaagctgactgacctggagatacttgcattgctgattgctgcactaagccacgatttggatcaccgtggtgtgaataactcttacatacagcgaagtgaacatccacttgcccagctttactgccattcaatcatggaacaccatcattttgaccagtgcctgatgattcttaatagtccaggcaatcagattctcagtggcctctccattgaagaatataagaccacgttgaaaataatcaagcaagctattttagctacagacctagcactgtacattaagaggcgaggagaattttttgaacttataagaaaaaatcaattcaatttggaagatcctcatcaaaaggagttgtttttggcaatgctgatgacagcttgtgccctttctgcaattacaaaaccctggcctattcaacaacggatagcagaacttgtagcaactgaattttttgatcaaggagacagagagagaaaagaactcaacatagaacccactgatctaatgaacagggagaagaaaaacaaaatcccaagtatgcaagttgggttcatagatgccatctgcttgcaactgtatgaggccctgacccacgtgtcagaggactgtttccctttgctagatggctgcagaaagaacaggcagaaatggcaggcccttgcagaacagcagtga

SEQ ID NO: 380 - DNA, 2499 bp, Homo sapiens
atgttgccctttggagacaaaacaagagaaatggtcaatgcatggtttgctgagagagttcacaccatccctgtgtgcaaggaaggtatcagaggccacaccgaatcttgctcttgtcccttgcagcagagtcctcgtgcagataacagtgcccctggaacaccaaccaggaaaatctctgcctctgaatttgaccggcctcttagacccattgttgtcaaggattctgagggaactgtgagcttcctctctgactcagaaaagaaggaacagatgcctctaacccctccaaggtttgatcatgatgaaggggaccagtgctcaagactcttggaattagtgaaggatatttctagtcatttggatgtcacagccttatgtcacaaaattttcttgcatatccatggactgatatctgctgaccgctattccctgttccttgtctgtgaagacagctccaatgacaagtttcttatcagccgcctctttgatgttgctgaaggttcaacactggaagaagtttcaaataactgtatccgcttagaatggaacaaaggcattgtgggacatgtggcagcgcttggtgagcccttgaacatcaaagatgcatatgaggatcctcggttcaatgcagaagttgaccaaattacaggctacaagacacaaagcattctttgtatgccaattaagaatcatagggaagaggttgttggtgtagcccaggccatcaacaagaaatcaggaaacggtgggacatttactgaaaaagatgaaaaggactttgctgcttatttggcattttgtggtattgttcttcataatgctcagctctatgagacttcactgctggagaacaagagaaatcaggtgctgcttgaccttgctagtttaatttttgaagaacaacaatcattagaagtaattttgaagaaaatagctgccactattatctctttcatgcaagtgcagaaatgcaccattttcatagtggatgaagattgctccgattctttttctagtgtgtttcacatggagtgtgaggaattagaaaaatcatctgatacattaacaagggaacatgatgcaaacaaaatcaattacatgtatgctcagtatgtcaaaaatactatggaaccacttaatatcccagatgtcagtaaggataaaagatttccctggacaactgaaaatacaggaaatgtaaaccagcagtgcattagaagtttgctttgtacacctataaaaaatggaaagaagaataaagttataggggtttgccaacttgttaataagatggaggagaatactggcaaggttaagcctttcaaccgaaatgacgaacagtttctggaagcttttgtcatcttttgtggcttggggatccagaacacgcagatgtatgaagcagtggagagagccatggccaagcaaatggtcacattggaggttctgtcgtatcatgcttcagcagcagaggaagaaacaagagagctacagtcgttagcggctgctgtggtgccatctgcccagacccttaaaattactgactttagcttcagtgactttgagctgtctgatctggaaacagcactgtgtacaattcggatgtttactgacctcaaccttgtgcagaacttccagatgaaacatgaggttctttgcagatggattttaagtgttaagaagaattatcggaagaatgttgcctatcataattggagacatgcctttaatacagctcagtgcatgtttgctgctctaaaagcaggcaaaattcagaacaagctgactgacctggagatacttgcattgctgattgctgcactaagccacgatttggatcaccgtggtgtgaataactcttacatacagcgaagtgaacatccacttgcccagctttactgccattcaatcatggaacaccatcattttgaccagtgcctgatgattcttaatagtccaggcaatcagattctcagtggcctctccattgaagaatataagaccacgttgaaaataatcaagcaagctattttagctacagacctagcactgtacattaagaggcgaggagaattttttgaacttataagaaaaaatcaattcaatttggaagatcctcatcaaaaggagttgtttttggcaatgctgatgacagcttgtgatctttctgcaattacaaaaccctggcctattcaacaacggatagcagaacttgtagcaactgaattttttgatcaaggagacagagagagaaaagaactcaacatagaacccactgatctaatgaacagggagaagaaaaacaaaatcccaagtatgcaagttgggttcatagatgccatctgcttgcaactgtatgaggccctgacccacgtgtcagaggactgtttccctttgctagatggctgcagaaagaacaggcagaaatggcaggcccttgcagaacagcaggagaagatgctgattaatggggaaagcggccaggccaagcggaac

SEQ ID NO: 381 - DNA, 2469 bp, Homo sapiens
atggtcaatgcatggtttgctgagagagttcacaccatccctgtgtgcaaggaaggtatcagaggccacaccgaatcttgctcttgtcccttgcagcagagtcctcgtgcagataacagtgcccctggaacaccaaccaggaaaatctctgcctctgaatttgaccggcctcttagacccattgttgtcaaggattctgagggaactgtgagcttcctctctgactcagaaaagaaggaacagatgcctctaacccctccaaggtttgatcatgatgaaggggaccagtgctcaagactcttggaattagtgaaggatatttctagtcatttggatgtcacagccttatgtcacaaaattttcttgcatatccatggactgatatctgctgaccgctattccctgttccttgtctgtgaagacagctccaatgacaagtttcttatcagccgcctctttgatgttgctgaaggttcaacactggaagaagtttcaaataactgtatccgcttagaatggaacaaaggcattgtgggacatgtggcagcgcttggtgagcccttgaacatcaaagatgcatatgaggatcctcggttcaatgcagaagttgaccaaattacaggctacaagacacaaagcattctttgtatgccaattaagaatcatagggaagaggttgttggtgtagcccaggccatcaacaagaaatcaggaaacggtgggacatttactgaaaaagatgaaaaggactttgctgcttatttggcattttgtggtattgttcttcataatgctcagctctatgagacttcactgctggagaacaagagaaatcaggtgctgcttgaccttgctagtttaatttttgaagaacaacaatcattagaagtaattttgaagaaaatagctgccactattatctctttcatgcaagtgcagaaatgcaccattttcatagtggatgaagattgctccgattctttttctagtgtgtttcacatggagtgtgaggaattagaaaaatcatctgatacattaacaagggaacatgatgcaaacaaaatcaattacatgtatgctcagtatgtcaaaaatactatggaaccacttaatatcccagatgtcagtaaggataaaagatttccctggacaactgaaaatacaggaaatgtaaaccagcagtgcattagaagtttgctttgtacacctataaaaaatggaaagaagaataaagttataggggtttgccaacttgttaataagatggaggagaatactggcaaggttaagcctttcaaccgaaatgacgaacagtttctggaagcttttgtcatcttttgtggcttggggatccagaacacgcagatgtatgaagcagtggagagagccatggccaagcaaatggtcacattggaggttctgtcgtatcatgcttcagcagcagaggaagaaacaagagagctacagtcgttagcggctgctgtggtgccatctgcccagacccttaaaattactgactttagcttcagtgactttgagctgtctgatctggaaacagcactgtgtacaattcggatgtttactgacctcaaccttgtgcagaacttccagatgaaacatgaggttctttgcagatggattttaagtgttaagaagaattatcggaagaatgttgcctatcataattggagacatgcctttaatacagctcagtgcatgtttgctgctctaaaagcaggcaaaattcagaacaagctgactgacctggagatacttgcattgctgattgctgcactaagccacgatttggatcaccgtggtgtgaataactcttacatacagcgaagtgaacatccacttgcccagctttactgccattcaatcatggaacaccatcattttgaccagtgcctgatgattcttaatagtccaggcaatcagattctcagtggcctctccattgaagaatataagaccacgttgaaaataatcaagcaagctattttagctacagacctagcactgtacattaagaggcgaggagaattttttgaacttataagaaaaaatcaattcaatttggaagatcctcatcaaaaggagttgtttttggcaatgctgatgacagcttgtgatctttctgcaattacaaaaccctggcctattcaacaacggatagcagaacttgtagcaactgaattttttgatcaaggagacagagagagaaaagaactcaacatagaacccactgatctaatgaacagggagaagaaaaacaaaatcccaagtatgcaagttgggttcatagatgccatctgcttgcaactgtatgaggccctgacccacgtgtcagaggactgtttccctttgctagatggctgcagaaagaacaggcagaaatggcaggcccttgcagaacagcaggagaagatgctgattaatggggaaagcggccaggccaagcggaac

SEQ ID NO: 382 - protein, 643 aa, Homo sapiens
MERAGPSFGQQRQQQQPQQQKQQQRDQDSVEAWLDDHWDFTFSYFVRKATREMVNAWFAERVHTIPVCKEGIRGHTESCSCPLQQSPRADNSAPGTPTRKISASEFDRPLRPIVVKDSEGTVSFLSDSEKKEQMPLTPPRFDHDEGDQCSRLLELVKDISSHLDVTALCHKIFLHIHGLISADRYSLFLVCEDSSNDKFLISRLFDVAEGSTLEEVSNNCIRLEWNKGIVGHVAALGEPLNIKDAYEDPRFNAEVDQITGYKTQSILCMPIKNHREEVVGVAQAINKKSGNGGTFTEKDEKDFAAYLAFCGIVLHNAQLYETSLLENKRNQVLLDLASLIFEEQQSLEVILKKIAATIISFMQVQKCTIFIVDEDCSDSFSSVFHMECEELEKSSDTLTREHDANKINYMYAQYVKNTMEPLNIPDVSKDKRFPWTTENTGNVNQQCIRSLLCTPIKNGKKNKVIGVCQLVNKMEENTGKVKPFNRNDEQFLEAFVIFCGLGIQNTQMYEAVERAMAKQMVTLEVLSYHASAAEEETRELQSLAAAVVPSAQTLKITDFSFSDFELSDLETALCTIRMFTDLNLVQNFQMKHEVLCRWILSVKKNYRKNVAYHNWRHAFNTAQCMFAALKAGKIQILTSVGID

SEQ ID NO: 383 - protein, 326 aa, Artificial Sequence
  source: /note="Description of Artificial Sequence: Synthetic Destabilizing Domain (DD)"
EETRELQSLAAAVVPSAQTLKITDFSFSDFELSDLETALCTIRMFTDLNLVQNFQMKHEVLCRWILSVKKNYRKNVAYHNWRHAFNTAQCMFAALKAGKIQNKLTDLEILALLIAALSHDLDHRGVNNSYIQRSEHPLAQLYCHSIMEHHHFDQCLMILNSPGNQILSGLSIEEYKTTLKIIKQAILATDLALYIKRGGEFFELIRKNQFNLEDPHQKELFLAMLMTACDLSAITKPWPIQQRIAELVATEFFDQGDRERKELNIEPTDLMNREKKNKIPSMQVGFIDAICLQLYEALTHVSEDCFPLLDGCRKNRQKWQALAEQQ

SEQ ID NO: 384 - protein, 326 aa, Artificial Sequence
  source: /note="Description of Artificial Sequence: Synthetic Destabilizing Domain (DD)"
EETRELQSLAAAVVPSAQTLKITDFSFSDFELSDLETALCTIRMFTDLNLVQNFQMKHEVLCRWILSVKKNYRKNVAYHNWRHAFNTAQCMFAALKAGKIQNKLTDLEILALLIAALSHDLDHRGVNNSYIQRSEHPLAQLYCHSIMEHHHFDQCLMILNSPGNQILSGLSIEEYKTTLKIIKQAILATDLALYIKRAGEFFELIRKNQFNLEDPHQKELFLAMLMTACDLSAITKPWPIQQRIAELVATEFFDQGDRERKELNIEPTDLMNREKKNKIPSMQVGFIDAICLQLYEALTHVSEDCFPLLDGCRKNRQKWQALAEQQ

SEQ ID NO: 385 - protein, 326 aa, Artificial Sequence
  source: /note="Description of Artificial Sequence: Synthetic Destabilizing Domain (DD)"
EETRELQSLAAAVVPSAQTLKITDFSFSDFELSDLETALCTIRMFTDLNLVQNFQMKHEVLCRWILSVKKNYRKNVAYHNWRHAFNTAQCMFAALKAGKIQNKLTDLEILALLIAALSHDLDHRGVNNSYIQRSEHPLAQLYCHSIMEHHHFDQCLMILNSPGNQILSGLSIEEYKTTLKIIKQAILATDLALYIKRVGEFFELIRKNQFNLEDPHQKELFLAMLMTACDLSAITKPWPIQQRIAELVATEFFDQGDRERKELNIEPTDLMNREKKNKIPSMQVGFIDAICLQLYEALTHVSEDCFPLLDGCRKNRQKWQALAEQQ

SEQ ID NO: 386 - protein, 326 aa, Artificial Sequence
  source: /note="Description of Artificial Sequence: Synthetic Destabilizing Domain (DD)"
EETRELQSLAAAVVPSAQTLKITDFSFSDFELSDLETALCTIRMFTDLNLVQNFQMKHEVLCRWILSVKKNYRKNVAYHNWRHAFNTAQCMFAALKAGKIQNKLTDLEILALLIAALSHDLDHRGVNNSYIQRSEHPLAQLYCHSIMEHHHFDQCLMILNSPGNQILSGLSIEEYKTTLKIIKQAILATDLALYIKRIGEFFELIRKNQFNLEDPHQKELFLAMLMTACDLSAITKPWPIQQRIAELVATEFFDQGDRERKELNIEPTDLMNREKKNKIPSMQVGFIDAICLQLYEALTHVSEDCFPLLDGCRKNRQKWQALAEQQ

SEQ ID NO: 387 - protein, 326 aa, Artificial Sequence
  source: /note="Description of Artificial Sequence: Synthetic Destabilizing Domain (DD)"
EETRELQSLAAAVVPSAQTLKITDFSFSDFELSDLETALCTIRMFTDLNLVQNFQMKHEVLCRWILSVKKNYRKNVAYHNWRHAFNTAQCMFAALKAGKIQNKLTDLEILALLIAALSHDLDHRGVNNSYIQRSEHPLAQLYCHSIMEHHHFDQCLMILNSPGNQILSGLSIEEYKTTLKIIKQAILATDLALYIKRPGEFFELIRKNQFNLEDPHQKELFLAMLMTACDLSAITKPWPIQQRIAELVATEFFDQGDRERKELNIEPTDLMNREKKNKIPSMQVGFIDAICLQLYEALTHVSEDCFPLLDGCRKNRQKWQALAEQQ

SEQ ID NO: 388 - protein, 326 aa, Artificial Sequence
  source: /note="Description of Artificial Sequence: Synthetic Destabilizing Domain (DD)"
EETRELQSLAAAVVPSAQTLKITDFSFSDFELSDLETALCTIRMFTDLNLVQNFQMKHEVLCRWILSVKKNYRKNVAYHNWRHAFNTAQCMFAALKAGKIQNKLTDLEILALLIAALSHDLDHRGVNNSYIQRSEHPLAQLYCHSIMEHHHFDQCLMILNSPGNQILSGLSIEEYKTTLKIIKQAILATDLALYIKRFGEFFELIRKNQFNLEDPHQKELFLAMLMTACDLSAITKPWPIQQRIAELVATEFFDQGDRERKELNIEPTDLMNREKKNKIPSMQVGFIDAICLQLYEALTHVSEDCFPLLDGCRKNRQKWQALAEQQ

SEQ ID NO: 389 - protein, 326 aa, Artificial Sequence
  source: /note="Description of Artificial Sequence: Synthetic Destabilizing Domain (DD)"
EETRELQSLAAAVVPSAQTLKITDFSFSDFELSDLETALCTIRMFTDLNLVQNFQMKHEVLCRWILSVKKNYRKNVAYHNWRHAFNTAQCMFAALKAGKIQNKLTDLEILALLIAALSHDLDHRGVNNSYIQRSEHPLAQLYCHSIMEHHHFDQCLMILNSPGNQILSGLSIEEYKTTLKIIKQAILATDLALYIKRWGEFFELIRKNQFNLEDPHQKELFLAMLMTACDLSAITKPWPIQQRIAELVATEFFDQGDRERKELNIEPTDLMNREKKNKIPSMQVGFIDAICLQLYEALTHVSEDCFPLLDGCRKNRQKWQALAEQQ

SEQ ID NO: 390 - protein, 326 aa, Artificial Sequence
  source: /note="Description of Artificial Sequence: Synthetic Destabilizing Domain (DD)"
EETRELQSLAAAVVPSAQTLKITDFSFSDFELSDLETALCTIRMFTDLNLVQNFQMKHEVLCRWILSVKKNYRKNVAYHNWRHAFNTAQCMFAALKAGKIQNKLTDLEILALLIAALSHDLDHRGVNNSYIQRSEHPLAQLYCHSIMEHHHFDQCLMILNSPGNQILSGLSIEEYKTTLKIIKQAILATDLALYIKRYGEFFELIRKNQFNLEDPHQKELFLAMLMTACDLSAITKPWPIQQRIAELVATEFFDQGDRERKELNIEPTDLMNREKKNKIPSMQVGFIDAICLQLYEALTHVSEDCFPLLDGCRKNRQKWQALAEQQ

SEQ ID NO: 391 - protein, 326 aa, Artificial Sequence
  source: /note="Description of Artificial Sequence: Synthetic Destabilizing Domain (DD)"
EETRELQSLAAAVVPSAQTLKITDFSFSDFELSDLETALCTIRMFTDLNLVQNFQMKHEVLCRWILSVKKNYRKNVAYHNWRHAFNTAQCMFAALKAGKIQNKLTDLEILALLIAALSHDLDHRGVNNSYIQRSEHPLAQLYCHSIMEHHHFDQCLMILNSPGNQILSGLSIEEYKTTLKIIKQAILATDLALYIKRHGEFFELIRKNQFNLEDPHQKELFLAMLMTACDLSAITKPWPIQQRIAELVATEFFDQGDRERKELNIEPTDLMNREKKNKIPSMQVGFIDAICLQLYEALTHVSEDCFPLLDGCRKNRQKWQALAEQQ

SEQ ID NO: 392 - protein, 326 aa, Artificial Sequence
  source: /note="Description of Artificial Sequence: Synthetic Destabilizing Domain (DD)"
EETRELQSLAAAVVPSAQTLKITDFSFSDFELSDLETALCTIRMFTDLNLVQNFQMKHEVLCRWILSVKKNYRKNVAYHNWRHAFNTAQCMFAALKAGKIQNKLTDLEILALLIAALSHDLDHRGVNNSYIQRSEHPLAQLYCHSIMEHHHFDQCLMILNSPGNQILSGLSIEEYKTTLKIIKQAILATDLALYIKRSGEFFELIRKNQFNLEDPHQKELFLAMLMTACDLSAITKPWPIQQRIAELVATEFFDQGDRERKELNIEPTDLMNREKKNKIPSMQVGFIDAICLQLYEALTHVSEDCFPLLDGCRKNRQKWQALAEQQ

SEQ ID NO: 393 - protein, 326 aa, Artificial Sequence
  source: /note="Description of Artificial Sequence: Synthetic Destabilizing Domain (DD)"
EETRELQSLAAAVVPSAQTLKITDFSFSDFELSDLETALCTIRMFTDLNLVQNFQMKHEVLCRWILSVKKNYRKNVAYHNWRHAFNTAQCMFAALKAGKIQNKLTDLEILALLIAALSHDLDHRGVNNSYIQRSEHPLAQLYCHSIMEHHHFDQCLMILNSPGNQILSGLSIEEYKTTLKIIKQAILATDLALYIKRTGEFFELIRKNQFNLEDPHQKELFLAMLMTACDLSAITKPWPIQQRIAELVATEFFDQGDRERKELNIEPTDLMNREKKNKIPSMQVGFIDAICLQLYEALTHVSEDCFPLLDGCRKNRQKWQALAEQQ

SEQ ID NO: 394 - protein, 326 aa, Artificial Sequence
  source: /note="Description of Artificial Sequence: Synthetic Destabilizing Domain (DD)"
EETRELQSLAAAVVPSAQTLKITDFSFSDFELSDLETALCTIRMFTDLNLVQNFQMKHEVLCRWILSVKKNYRKNVAYHNWRHAFNTAQCMFAALKAGKIQNKLTDLEILALLIAALSHDLDHRGVNNSYIQRSEHPLAQLYCHSIMEHHHFDQCLMILNSPGNQILSGLSIEEYKTTLKIIKQAILATDLALYIKRDGEFFELIRKNQFNLEDPHQKELFLAMLMTACDLSAITKPWPIQQRIAELVATEFFDQGDRERKELNIEPTDLMNREKKNKIPSMQVGFIDAICLQLYEALTHVSEDCFPLLDGCRKNRQKWQALAEQQ

SEQ ID NO: 395 - protein, 326 aa, Artificial Sequence
  source: /note="Description of Artificial Sequence: Synthetic Destabilizing Domain (DD)"
EETRELQSLAAAVVPSAQTLKITDFSFSDFELSDLETALCTIRMFTDLNLVQNFQMKHEVLCRWILSVKKNYRKNVAYHNWRHAFNTAQCMFAALKAGKIQNKLTDLEILALLIAALSHDLDHRGVNNSYIQRSEHPLAQLYCHSIMEHHHFDQCLMILNSPGNQILSGLSIEEYKTTLKIIKQAILATDLALYIKREGEFFELIRKNQFNLEDPHQKELFLAMLMTACDLSAITKPWPIQQRIAELVATEFFDQGDRERKELNIEPTDLMNREKKNKIPSMQVGFIDAICLQLYEALTHVSEDCFPLLDGCRKNRQKWQALAEQQ

SEQ ID NO: 396 - protein, 326 aa, Artificial Sequence
  source: /note="Description of Artificial Sequence: Synthetic Destabilizing Domain (DD)"
EETRELQSLAAAVVPSAQTLKITDFSFSDFELSDLETALCTIRMFTDLNLVQNFQMKHEVLCRWILSVKKNYRKNVAYHNWRHAFNTAQCMFAALKAGKIQNKLTDLEILALLIAALSHDLDHRGVNNSYIQRSEHPLAQLYCHSIMEHHHFDQCLMILNSPGNQILSGLSIEEYKTTLKIIKQAILATDLALYIKRQGEFFELIRKNQFNLEDPHQKELFLAMLMTACDLSAITKPWPIQQRIAELVATEFFDQGDRERKELNIEPTDLMNREKKNKIPSMQVGFIDAICLQLYEALTHVSEDCFPLLDGCRKNRQKWQALAEQQ

SEQ ID NO: 397 - protein, 326 aa, Artificial Sequence
  source: /note="Description of Artificial Sequence: Synthetic Destabilizing Domain (DD)"
EETRELQSLAAAVVPSAQTLKITDFSFSDFELSDLETALCTIRMFTDLNLVQNFQMKHEVLCRWILSVKKNYRKNVAYHNWRHAFNTAQCMFAALKAGKIQNKLTDLEILALLIAALSHDLDHRGVNNSYIQRSEHPLAQLYCHSIMEHHHFDQCLMILNSPGNQILSGLSIEEYKTTLKIIKQAILATDLALYIKRNGEFFELIRKNQFNLEDPHQKELFLAMLMTACDLSAITKPWPIQQRIAELVATEFFDQGDRERKELNIEPTDLMNREKKNKIPSMQVGFIDAICLQLYEALTHVSEDCFPLLDGCRKNRQKWQALAEQQ

SEQ ID NO: 398 - protein, 326 aa, Artificial Sequence
  source: /note="Description of Artificial Sequence: Synthetic Destabilizing Domain (DD)"
EETRELQSLAAAVVPSAQTLKITDFSFSDFELSDLETALCTIRMFTDLNLVQNFQMKHEVLCRWILSVKKNYRKNVAYHNWRHAFNTAQCMFAALKAGKIQNKLTDLEILALLIAALSHDLDHRGVNNSYIQRSEHPLAQLYCHSIMEHHHFDQCLMILNSPGNQILSGLSIEEYKTTLKIIKQAILATDLALYIKRMGEFFELIRKNQFNLEDPHQKELFLAMLMTACDLSAITKPWPIQQRIAELVATEFFDQGDRERKELNIEPTDLMNREKKNKIPSMQVGFIDAICLQLYEALTHVSEDCFPLLDGCRKNRQKWQALAEQQ

SEQ ID NO: 399 - protein, 326 aa, Artificial Sequence
  source: /note="Description of Artificial Sequence: Synthetic Destabilizing Domain (DD)"
EETRELQSLAAAVVPSAQTLKITDFSFSDFELSDLETALCTIRMFTDLNLVQNFQMKHEVLCRWILSVKKNYRKNVAYHNWRHAFNTAQCMFAALKAGKIQNKLTDLEILALLIAALSHDLDHRGVNNSYIQRSEHPLAQLYCHSIMEHHHFDQCLMILNSPGNQILSGLSIEEYKTTLKIIKQAILATDLALYIKRCGEFFELIRKNQFNLEDPHQKELFLAMLMTACDLSAITKPWPIQQRIAELVATEFFDQGDRERKELNIEPTDLMNREKKNKIPSMQVGFIDAICLQLYEALTHVSEDCFPLLDGCRKNRQKWQALAEQQ

SEQ ID NO: 400 - protein, 326 aa, Artificial Sequence
  source: /note="Description of Artificial Sequence: Synthetic Destabilizing Domain (DD)"
EETRELQSLAAAVVPSAQTLKITDFSFSDFELSDLETALCTIRMFTDLNLVQNFQMKHEVLCRWILSVKKNYRKNVAYHNWRHAFNTAQCMFAALKAGKIQNKLTDLEILALLIAALSHDLDHRGVNNSYIQRSEHPLAQLYCHSIMEHHHFDQCLMILNSPGNQILSGLSIEEYKTTLKIIKQAILATDLALYIKRKGEFFELIRKNQFNLEDPHQKELFLAMLMTACDLSAITKPWPIQQRIAELVATEFFDQGDRERKELNIEPTDLMNREKKNKIPSMQVGFIDAICLQLYEALTHVSEDCFPLLDGCRKNRQKWQALAEQQ

SEQ ID NO: 401 - DNA, 978 bp, Artificial Sequence
  source: /note="Description of Artificial Sequence: Synthetic Destabilizing Domain (DD)"
gaagaaacaagagagctacagtcgttagcggctgctgtggtgccatctgcccagacccttaaaattactgactttagcttcagtgactttgagctgtctgatctggaaacagcactgtgtacaattcggatgtttactgacctcaaccttgtgcagaacttccagatgaaacatgaggttctttgcagatggattttaagtgttaagaagaattatcggaagaatgttgcctatcataattggagacatgcctttaatacagctcagtgcatgtttgctgctctaaaagcaggcaaaattcagaacaagctgactgacctggagatacttgcattgctgattgctgcactaagccacgatttggatcaccgtggtgtgaataactcttacatacagcgaagtgaacatccacttgcccagctttactgccattcaatcatggaacaccatcattttgaccagtgcctgatgattcttaatagtccaggcaatcagattctcagtggcctctccattgaagaatataagaccacgttgaaaataatcaagcaagctattttagctacagacctagcactgtacattaagaggggcggagaattttttgaacttataagaaaaaatcaattcaatttggaagatcctcatcaaaaggagttgtttttggcaatgctgatgacagcttgtgatctttctgcaattacaaaaccctggcctattcaacaacggatagcagaacttgtagcaactgaattttttgatcaaggagacagagagagaaaagaactcaacatagaacccactgatctaatgaacagggagaagaaaaacaaaatcccaagtatgcaagttgggttcatagatgccatctgcttgcaactgtatgaggccctgacccacgtgtcagaggactgtttccctttgctagatggctgcagaaagaacaggcagaaatggcaggcccttgcagaacagcag

SEQ ID NO: 402 - DNA, 978 bp, Artificial Sequence
  source: /note="Description of Artificial Sequence: Synthetic Destabilizing Domain (DD)"
gaagaaacaagagagctacagtcgttagcggctgctgtggtgccatctgcccagacccttaaaattactgactttagcttcagtgactttgagctgtctgatctggaaacagcactgtgtacaattcggatgtttactgacctcaaccttgtgcagaacttccagatgaaacatgaggttctttgcagatggattttaagtgttaagaagaattatcggaagaatgttgcctatcataattggagacatgcctttaatacagctcagtgcatgtttgctgctctaaaagcaggcaaaattcagaacaagctgactgacctggagatacttgcattgctgattgctgcactaagccacgatttggatcaccgtggtgtgaataactcttacatacagcgaagtgaacatccacttgcccagctttactgccattcaatcatggaacaccatcattttgaccagtgcctgatgattcttaatagtccaggcaatcagattctcagtggcctctccattgaagaatataagaccacgttgaaaataatcaagcaagctattttagctacagacctagcactgtacattaagaggggaggagaattttttgaacttataagaaaaaatcaattcaatttggaagatcctcatcaaaaggagttgtttttggcaatgctgatgacagcttgtgatctttctgcaattacaaaaccctggcctattcaacaacggatagcagaacttgtagcaactgaattttttgatcaaggagacagagagagaaaagaactcaacatagaacccactgatctaatgaacagggagaagaaaaacaaaatcccaagtatgcaagttgggttcatagatgccatctgcttgcaactgtatgaggccctgacccacgtgtcagaggactgtttccctttgctagatggctgcagaaagaacaggcagaaatggcaggcccttgcagaacagcag

SEQ ID NO: 403 - DNA, 978 bp, Artificial Sequence
  source: /note="Description of Artificial Sequence: Synthetic Destabilizing Domain (DD)"
gaagaaacaagagagctacagtcgttagcggctgctgtggtgccatctgcccagacccttaaaattactgactttagcttcagtgactttgagctgtctgatctggaaacagcactgtgtacaattcggatgtttactgacctcaaccttgtgcagaacttccagatgaaacatgaggttctttgcagatggattttaagtgttaagaagaattatcggaagaatgttgcctatcataattggagacatgcctttaatacagctcagtgcatgtttgctgctctaaaagcaggcaaaattcagaacaagctgactgacctggagatacttgcattgctgattgctgcactaagccacgatttggatcaccgtggtgtgaataactcttacatacagcgaagtgaacatccacttgcccagctttactgccattcaatcatggaacaccatcattttgaccagtgcctgatgattcttaatagtccaggcaatcagattctcagtggcctctccattgaagaatataagaccacgttgaaaataatcaagcaagctattttagctacagacctagcactgtacattaagagggcgggagaattttttgaacttataagaaaaaatcaattcaatttggaagatcctcatcaaaaggagttgtttttggcaatgctgatgacagcttgtgatctttctgcaattacaaaaccctggcctattcaacaacggatagcagaacttgtagcaactgaattttttgatcaaggagacagagagagaaaagaactcaacatagaacccactgatctaatgaacagggagaagaaaaacaaaatcccaagtatgcaagttgggttcatagatgccatctgcttgcaactgtatgaggccctgacccacgtgtcagaggactgtttccctttgctagatggctgcagaaagaacaggcagaaatggcaggcccttgcagaacagcag

SEQ ID NO: 404 - DNA, 978 bp, Artificial Sequence
  source: /note="Description of Artificial Sequence: Synthetic Destabilizing Domain (DD)"
gaagaaacaagagagctacagtcgttagcggctgctgtggtgccatctgcccagacccttaaaattactgactttagcttcagtgactttgagctgtctgatctggaaacagcactgtgtacaattcggatgtttactgacctcaaccttgtgcagaacttccagatgaaacatgaggttctttgcagatggattttaagtgttaagaagaattatcggaagaatgttgcctatcataattggagacatgcctttaatacagctcagtgcatgtttgctgctctaaaagcaggcaaaattcagaacaagctgactgacctggagatacttgcattgctgattgctgcactaagccacgatttggatcaccgtggtgtgaataactcttacatacagcgaagtgaacatccacttgcccagctttactgccattcaatcatggaacaccatcattttgaccagtgcctgatgattcttaatagtccaggcaatcagattctcagtggcctctccattgaagaatataagaccacgttgaaaataatcaagcaagctattttagctacagacctagcactgtacattaagagggcaggagaattttttgaacttataagaaaaaatcaattcaatttggaagatcctcatcaaaaggagttgtttttggcaatgctgatgacagcttgtgatctttctgcaattacaaaaccctggcctattcaacaacggatagcagaacttgtagcaactgaattttttgatcaaggagacagagagagaaaagaactcaacatagaacccactgatctaatgaacagggagaagaaaaacaaaatcccaagtatgcaagttgggttcatagatgccatctgcttgcaactgtatgaggccctgacccacgtgtcagaggactgtttccctttgctagatggctgcagaaagaacaggcagaaatggcaggcccttgcagaacagcag

SEQ ID NO: 405 - DNA, 978 bp, Artificial Sequence
  source: /note="Description of Artificial Sequence: Synthetic Destabilizing Domain (DD)"
gaagaaacaagagagctacagtcgttagcggctgctgtggtgccatctgcccagacccttaaaattactgactttagcttcagtgactttgagctgtctgatctggaaacagcactgtgtacaattcggatgtttactgacctcaaccttgtgcagaacttccagatgaaacatgaggttctttgcagatggattttaagtgttaagaagaattatcggaagaatgttgcctatcataattggagacatgcctttaatacagctcagtgcatgtttgctgctctaaaagcaggcaaaattcagaacaagctgactgacctggagatacttgcattgctgattgctgcactaagccacgatttggatcaccgtggtgtgaataactcttacatacagcgaagtgaacatccacttgcccagctttactgccattcaatcatggaacaccatcattttgaccagtgcctgatgattcttaatagtccaggcaatcagattctcagtggcctctccattgaagaatataagaccacgttgaaaataatcaagcaagctattttagctacagacctagcactgtacattaagaggttaggagaattttttgaacttataagaaaaaatcaattcaatttggaagatcctcatcaaaaggagttgtttttggcaatgctgatgacagcttgtgatctttctgcaattacaaaaccctggcctattcaacaacggatagcagaacttgtagcaactgaattttttgatcaaggagacagagagagaaaagaactcaacatagaacccactgatctaatgaacagggagaagaaaaacaaaatcccaagtatgcaagttgggttcatagatgccatctgcttgcaactgtatgaggccctgacccacgtgtcagaggactgtttccctttgctagatggctgcagaaagaacaggcagaaatggcaggcccttgcagaacagcag

SEQ ID NO: 406 - DNA, 978 bp, Artificial Sequence
  source: /note="Description of Artificial Sequence: Synthetic Destabilizing Domain (DD)"
gaagaaacaagagagctacagtcgttagcggctgctgtggtgccatctgcccagacccttaaaattactgactttagcttcagtgactttgagctgtctgatctggaaacagcactgtgtacaattcggatgtttactgacctcaaccttgtgcagaacttccagatgaaacatgaggttctttgcagatggattttaagtgttaagaagaattatcggaagaatgttgcctatcataattggagacatgcctttaatacagctcagtgcatgtttgctgctctaaaagcaggcaaaattcagaacaagctgactgacctggagatacttgcattgctgattgctgcactaagccacgatttggatcaccgtggtgtgaataactcttacatacagcgaagtgaacatccacttgcccagctttactgccattcaatcatggaacaccatcattttgaccagtgcctgatgattcttaatagtccaggcaatcagattctcagtggcctctccattgaagaatataagaccacgttgaaaataatcaagcaagctattttagctacagacctagcactgtacattaagagggtgggagaattttttgaacttataagaaaaaatcaattcaatttggaagatcctcatcaaaaggagttgtttttggcaatgctgatgacagcttgtgatctttctgcaattacaaaaccctggcctattcaacaacggatagcagaacttgtagcaactgaattttttgatcaaggagacagagagagaaaagaactcaacatagaacccactgatctaatgaacagggagaagaaaaacaaaatcccaagtatgcaagttgggttcatagatgccatctgcttgcaactgtatgaggccctgacccacgtgtcagaggactgtttccctttgctagatggctgcagaaagaacaggcagaaatggcaggcccttgcagaacagcag

SEQ ID NO: 407 - DNA, 978 bp, Artificial Sequence
  source: /note="Description of Artificial Sequence: Synthetic Destabilizing Domain (DD)"
gaagaaacaagagagctacagtcgttagcggctgctgtggtgccatctgcccagacccttaaaattactgactttagcttcagtgactttgagctgtctgatctggaaacagcactgtgtacaattcggatgtttactgacctcaaccttgtgcagaacttccagatgaaacatgaggttctttgcagatggattttaagtgttaagaagaattatcggaagaatgttgcctatcataattggagacatgcctttaatacagctcagtgcatgtttgctgctctaaaagcaggcaaaattcagaacaagctgactgacctggagatacttgcattgctgattgctgcactaagccacgatttggatcaccgtggtgtgaataactcttacatacagcgaagtgaacatccacttgcccagctttactgccattcaatcatggaacaccatcattttgaccagtgcctgatgattcttaatagtccaggcaatcagattctcagtggcctctccattgaagaatataagaccacgttgaaaataatcaagcaagctattttagctacagacctagcactgtacattaagagggtaggagaattttttgaacttataagaaaaaatcaattcaatttggaagatcctcatcaaaaggagttgtttttggcaatgctgatgacagcttgtgatctttctgcaattacaaaaccctggcctattcaacaacggatagcagaacttgtagcaactgaattttttgatcaaggagacagagagagaaaagaactcaacatagaacccactgatctaatgaacagggagaagaaaaacaaaatcccaagtatgcaagttgggttcatagatgccatctgcttgcaactgtatgaggccctgacccacgtgtcagaggactgtttccctttgctagatggctgcagaaagaacaggcagaaatggcaggcccttgcagaacagcag

SEQ ID NO: 408 - DNA, 978 bp, Artificial Sequence
  source: /note="Description of Artificial Sequence: Synthetic Destabilizing Domain (DD)"
gaagaaacaagagagctacagtcgttagcggctgctgtggtgccatctgcccagacccttaaaattactgactttagcttcagtgactttgagctgtctgatctggaaacagcactgtgtacaattcggatgtttactgacctcaaccttgtgcagaacttccagatgaaacatgaggttctttgcagatggattttaagtgttaagaagaattatcggaagaatgttgcctatcataattggagacatgcctttaatacagctcagtgcatgtttgctgctctaaaagcaggcaaaattcagaacaagctgactgacctggagatacttgcattgctgattgctgcactaagccacgatttggatcaccgtggtgtgaataactcttacatacagcgaagtgaacatccacttgcccagctttactgccattcaatcatggaacaccatcattttgaccagtgcctgatgattcttaatagtccaggcaatcagattctcagtggcctctccattgaagaatataagaccacgttgaaaataatcaagcaagctattttagctacagacctagcactgtacattaagaggattggagaattttttgaacttataagaaaaaatcaattcaatttggaagatcctcatcaaaaggagttgtttttggcaatgctgatgacagcttgtgatctttctgcaattacaaaaccctggcctattcaacaacggatagcagaacttgtagcaactgaattttttgatcaaggagacagagagagaaaagaactcaacatagaacccactgatctaatgaacagggagaagaaaaacaaaatcccaagtatgcaagttgggttcatagatgccatctgcttgcaactgtatgaggccctgacccacgtgtcagaggactgtttccctttgctagatggctgcagaaagaacaggcagaaatggcaggcccttgcagaacagcag

SEQ ID NO: 409 - DNA, 978 bp, Artificial Sequence
  source: /note="Description of Artificial Sequence: Synthetic Destabilizing Domain (DD)"
gaagaaacaagagagctacagtcgttagcggctgctgtggtgccatctgcccagacccttaaaattactgactttagcttcagtgactttgagctgtctgatctggaaacagcactgtgtacaattcggatgtttactgacctcaaccttgtgcagaacttccagatgaaacatgaggttctttgcagatggattttaagtgttaagaagaattatcggaagaatgttgcctatcataattggagacatgcctttaatacagctcagtgcatgtttgctgctctaaaagcaggcaaaattcagaacaagctgactgacctggagatacttgcattgctgattgctgcactaagccacgatttggatcaccgtggtgtgaataactcttacatacagcgaagtgaacatccacttgcccagctttactgccattcaatcatggaacaccatcattttgaccagtgcctgatgattcttaatagtccaggcaatcagattctcagtggcctctccattgaagaatataagaccacgttgaaaataatcaagcaagctattttagctacagacctagcactgtacattaagaggccgggagaattttttgaacttataagaaaaaatcaattcaatttggaagatcctcatcaaaaggagttgtttttggcaatgctgatgacagcttgtgatctttctgcaattacaaaaccctggcctattcaacaacggatagcagaacttgtagcaactgaattttttgatcaaggagacagagagagaaaagaactcaacatagaacccactgatctaatgaacagggagaagaaaaacaaaatcccaagtatgcaagttgggttcatagatgccatctgcttgcaactgtatgaggccctgacccacgtgtcagaggactgtttccctttgctagatggctgcagaaagaacaggcagaaatggcaggcccttgcagaacagcag

SEQ ID NO: 410 - DNA, 978 bp, Artificial Sequence
  source: /note="Description of Artificial Sequence: Synthetic Destabilizing Domain (DD)"
gaagaaacaagagagctacagtcgttagcggctgctgtggtgccatctgcccagacccttaaaattactgactttagcttcagtgactttgagctgtctgatctggaaacagcactgtgtacaattcggatgtttactgacctcaaccttgtgcagaacttccagatgaaacatgaggttctttgcagatggattttaagtgttaagaagaattatcggaagaatgttgcctatcataattggagacatgcctttaatacagctcagtgcatgtttgctgctctaaaagcaggcaaaattcagaacaagctgactgacctggagatacttgcattgctgattgctgcactaagccacgatttggatcaccgtggtgtgaataactcttacatacagcgaagtgaacatccacttgcccagctttactgccattcaatcatggaacaccatcattttgaccagtgcctgatgattcttaatagtccaggcaatcagattctcagtggcctctccattgaagaatataagaccacgttgaaaataatcaagcaagctattttagctacagacctagcactgtacattaagaggccaggagaattttttgaacttataagaaaaaatcaattcaatttggaagatcctcatcaaaaggagttgtttttggcaatgctgatgacagcttgtgatctttctgcaattacaaaaccctggcctattcaacaacggatagcagaacttgtagcaactgaattttttgatcaaggagacagagagagaaaagaactcaacatagaacccactgatctaatgaacagggagaagaaaaacaaaatcccaagtatgcaagttgggttcatagatgccatctgcttgcaactgtatgaggccctgacccacgtgtcagaggactgtttccctttgctagatggctgcagaaagaacaggcagaaatggcaggcccttgcagaacagcag

SEQ ID NO: 411 - DNA, 978 bp, Artificial Sequence
  source: /note="Description of Artificial Sequence: Synthetic Destabilizing Domain (DD)"
gaagaaacaagagagctacagtcgttagcggctgctgtggtgccatctgcccagacccttaaaattactgactttagcttcagtgactttgagctgtctgatctggaaacagcactgtgtacaattcggatgtttactgacctcaaccttgtgcagaacttccagatgaaacatgaggttctttgcagatggattttaagtgttaagaagaattatcggaagaatgttgcctatcataattggagacatgcctttaatacagctcagtgcatgtttgctgctctaaaagcaggcaaaattcagaacaagctgactgacctggagatacttgcattgctgattgctgcactaagccacgatttggatcaccgtggtgtgaataactcttacatacagcgaagtgaacatccacttgcccagctttactgccattcaatcatggaacaccatcattttgaccagtgcctgatgattcttaatagtccaggcaatcagattctcagtggcctctccattgaagaatataagaccacgttgaaaataatcaagcaagctattttagctacagacctagcactgtacattaagaggtttggagaattttttgaacttataagaaaaaatcaattcaatttggaagatcctcatcaaaaggagttgtttttggcaatgctgatgacagcttgtgatctttctgcaattacaaaaccctggcctattcaacaacggatagcagaacttgtagcaactgaattttttgatcaaggagacagagagagaaaagaactcaacatagaacccactgatctaatgaacagggagaagaaaaacaaaatcccaagtatgcaagttgggttcatagatgccatctgcttgcaactgtatgaggccctgacccacgtgtcagaggactgtttccctttgctagatggctgcagaaagaacaggcagaaatggcaggcccttgcagaacagcag

SEQ ID NO: 412 - DNA, 978 bp, Artificial Sequence
  source: /note="Description of Artificial Sequence: Synthetic Destabilizing Domain (DD)"
gaagaaacaagagagctacagtcgttagcggctgctgtggtgccatctgcccagacccttaaaattactgactttagcttcagtgactttgagctgtctgatctggaaacagcactgtgtacaattcggatgtttactgacctcaaccttgtgcagaacttccagatgaaacatgaggttctttgcagatggattttaagtgttaagaagaattatcggaagaatgttgcctatcataattggagacatgcctttaatacagctcagtgcatgtttgctgctctaaaagcaggcaaaattcagaacaagctgactgacctggagatacttgcattgctgattgctgcactaagccacgatttggatcaccgtggtgtgaataactcttacatacagcgaagtgaacatccacttgcccagctttactgccattcaatcatggaacaccatcattttgaccagtgcctgatgattcttaatagtccaggcaatcagattctcagtggcctctccattgaagaatataagaccacgttgaaaataatcaagcaagctattttagctacagacctagcactgtacattaagaggtggggagaattttttgaacttataagaaaaaatcaattcaatttggaagatcctcatcaaaaggagttgtttttggcaatgctgatgacagcttgtgatctttctgcaattacaaaaccctggcctattcaacaacggatagcagaacttgtagcaactgaattttttgatcaaggagacagagagagaaaagaactcaacatagaacccactgatctaatgaacagggagaagaaaaacaaaatcccaagtatgcaagttgggttcatagatgccatctgcttgcaactgtatgaggccctgacccacgtgtcagaggactgtttccctttgctagatggctgcagaaagaacaggcagaaatggcaggcccttgcagaacagcag

SEQ ID NO: 413 - DNA, 978 bp, Artificial Sequence
  source: /note="Description of Artificial Sequence: Synthetic Destabilizing Domain (DD)"
gaagaaacaagagagctacagtcgttagcggctgctgtggtgccatctgcccagacccttaaaattactgactttagcttcagtgactttgagctgtctgatctggaaacagcactgtgtacaattcggatgtttactgacctcaaccttgtgcagaacttccagatgaaacatgaggttctttgcagatggattttaagtgttaagaagaattatcggaagaatgttgcctatcataattggagacatgcctttaatacagctcagtgcatgtttgctgctctaaaagcaggcaaaattcagaacaagctgactgacctggagatacttgcattgctgattgctgcactaagccacgatttggatcaccgtggtgtgaataactcttacatacagcgaagtgaacatccacttgcccagctttactgccattcaatcatggaacaccatcattttgaccagtgcctgatgattcttaatagtccaggcaatcagattctcagtggcctctccattgaagaatataagaccacgttgaaaataatcaagcaagctattttagctacagacctagcactgtacattaagaggtatggagaattttttgaacttataagaaaaaatcaattcaatttggaagatcctcatcaaaaggagttgtttttggcaatgctgatgacagcttgtgatctttctgcaattacaaaaccctggcctattcaacaacggatagcagaacttgtagcaactgaattttttgatcaaggagacagagagagaaaagaactcaacatagaacccactgatctaatgaacagggagaagaaaaacaaaatcccaagtatgcaagttgggttcatagatgccatctgcttgcaactgtatgaggccctgacccacgtgtcagaggactgtttccctttgctagatggctgcagaaagaacaggcagaaatggcaggcccttgcagaacagcag

SEQ ID NO: 414 - DNA, 978 bp, Artificial Sequence
  source: /note="Description of Artificial Sequence: Synthetic Destabilizing Domain (DD)"
gaagaaacaagagagctacagtcgttagcggctgctgtggtgccatctgcccagacccttaaaattactgactttagcttcagtgactttgagctgtctgatctggaaacagcactgtgtacaattcggatgtttactgacctcaaccttgtgcagaacttccagatgaaacatgaggttctttgcagatggattttaagtgttaagaagaattatcggaagaatgttgcctatcataattggagacatgcctttaatacagctcagtgcatgtttgctgctctaaaagcaggcaaaattcagaacaagctgactgacctggagatacttgcattgctgattgctgcactaagccacgatttggatcaccgtggtgtgaataactcttacatacagcgaagtgaacatccacttgcccagctttactgccattcaatcatggaacaccatcattttgaccagtgcctgatgattcttaatagtccaggcaatcagattctcagtggcctctccattgaagaatataagaccacgttgaaaataatcaagcaagctattttagctacagacctagcactgtacattaagaggtacggagaattttttgaacttataagaaaaaatcaattcaatttggaagatcctcatcaaaaggagttgtttttggcaatgctgatgacagcttgtgatctttctgcaattacaaaaccctggcctattcaacaacggatagcagaacttgtagcaactgaattttttgatcaaggagacagagagagaaaagaactcaacatagaacccactgatctaatgaacagggagaagaaaaacaaaatcccaagtatgcaagttgggttcatagatgccatctgcttgcaactgtatgaggccctgacccacgtgtcagaggactgtttccctttgctagatggctgcagaaagaacaggcagaaatggcaggcccttgcagaacagcag

SEQ ID NO: 415 - DNA, 978 bp, Artificial Sequence
  source: /note="Description of Artificial Sequence: Synthetic Destabilizing Domain (DD)"
gaagaaacaagagagctacagtcgttagcggctgctgtggtgccatctgcccagacccttaaaattactgactttagcttcagtgactttgagctgtctgatctggaaacagcactgtgtacaattcggatgtttactgacctcaaccttgtgcagaacttccagatgaaacatgaggttctttgcagatggattttaagtgttaagaagaattatcggaagaatgttgcctatcataattggagacatgcctttaatacagctcagtgcatgtttgctgctctaaaagcaggcaaaattcagaacaagctgactgacctggagatacttgcattgctgattgctgcactaagccacgatttggatcaccgtggtgtgaataactcttacatacagcgaagtgaacatccacttgcccagctttactgccattcaatcatggaacaccatcattttgaccagtgcctgatgattcttaatagtccaggcaatcagattctcagtggcctctccattgaagaatataagaccacgttgaaaataatcaagcaagctattttagctacagacctagcactgtacattaagaggcatggagaattttttgaacttataagaaaaaatcaattcaatttggaagatcctcatcaaaaggagttgtttttggcaatgctgatgacagcttgtgatctttctgcaattacaaaaccctggcctattcaacaacggatagcagaacttgtagcaactgaattttttgatcaaggagacagagagagaaaagaactcaacatagaacccactgatctaatgaacagggagaagaaaaacaaaatcccaagtatgcaagttgggttcatagatgccatctgcttgcaactgtatgaggccctgacccacgtgtcagaggactgtttccctttgctagatggctgcagaaagaacaggcagaaatggcaggcccttgcagaacagcag

SEQ ID NO: 416 - DNA, 978 bp, Artificial Sequence; identical to SEQ ID NO: 415
  source: /note="Description of Artificial Sequence: Synthetic Destabilizing Domain (DD)"

SEQ ID NO: 417 - DNA, 978 bp, Artificial Sequence
  source: /note="Description of Artificial Sequence: Synthetic Destabilizing Domain (DD)"
gaagaaacaagagagctacagtcgttagcggctgctgtggtgccatctgcccagacccttaaaattactgactttagcttcagtgactttgagctgtctgatctggaaacagcactgtgtacaattcggatgtttactgacctcaaccttgtgcagaacttccagatgaaacatgaggttctttgcagatggattttaagtgttaagaagaattatcggaagaatgttgcctatcataattggagacatgcctttaatacagctcagtgcatgtttgctgctctaaaagcaggcaaaattcagaacaagctgactgacctggagatacttgcattgctgattgctgcactaagccacgatttggatcaccgtggtgtgaataactcttacatacagcgaagtgaacatccacttgcccagctttactgccattcaatcatggaacaccatcattttgaccagtgcctgatgattcttaatagtccaggcaatcagattctcagtggcctctccattgaagaatataagaccacgttgaaaataatcaagcaagctattttagctacagacctagcactgtacattaagaggagcggagaattttttgaacttataagaaaaaatcaattcaatttggaagatcctcatcaaaaggagttgtttttggcaatgctgatgacagcttgtgatctttctgcaattacaaaaccctggcctattcaacaacggatagcagaacttgtagcaactgaattttttgatcaaggagacagagagagaaaagaactcaacatagaacccactgatctaatgaacagggagaagaaaaacaaaatcccaagtatgcaagttgggttcatagatgccatctgcttgcaactgtatgaggccctgacccacgtgtcagaggactgtttccctttgctagatggctgcagaaagaacaggcagaaatggcaggcccttgcagaacagcag

SEQ ID NO: 418 - DNA, 978 bp, Artificial Sequence
  source: /note="Description of Artificial Sequence: Synthetic Destabilizing Domain (DD)"
gaagaaacaagagagctacagtcgttagcggctgctgtggtgccatctgcccagacccttaaaattactgactttagcttcagtgactttgagctgtctgatctggaaacagcactgtgtacaattcggatgtttactgacctcaaccttgtgcagaacttccagatgaaacatgaggttctttgcagatggattttaagtgttaagaagaattatcggaagaatgttgcctatcataattggagacatgcctttaatacagctcagtgcatgtttgctgctctaaaagcaggcaaaattcagaacaagctgactgacctggagatacttgcattgctgattgctgcactaagccacgatttggatcaccgtggtgtgaataactcttacatacagcgaagtgaacatccacttgcccagctttactgccattcaatcatggaacaccatcattttgaccagtgcctgatgattcttaatagtccaggcaatcagattctcagtggcctctccattgaagaatataagaccacgttgaaaataatcaagcaagctattttagctacagacctagcactgtacattaagaggtcaggagaattttttgaacttataagaaaaaatcaattcaatttggaagatcctcatcaaaaggagttgtttttggcaatgctgatgacagcttgtgatctttctgcaattacaaaaccctggcctattcaacaacggatagcagaacttgtagcaactgaattttttgatcaaggagacagagagagaaaagaactcaacatagaacccactgatctaatgaacagggagaagaaaaacaaaatcccaagtatgcaagttgggttcatagatgccatctgcttgcaactgtatgaggccctgacccacgtgtcagaggactgtttccctttgctagatggctgcagaaagaacaggcagaaatggcaggcccttgcagaacagcag

SEQ ID NO: 419 - DNA, 978 bp, Artificial Sequence
  source: /note="Description of Artificial Sequence: Synthetic Destabilizing Domain (DD)"
gaagaaacaagagagctacagtcgttagcggctgctgtggtgccatctgcccagacccttaaaattactgactttagcttcagtgactttgagctgtctgatctggaaacagcactgtgtacaattcggatgtttactgacctcaaccttgtgcagaacttccagatgaaacatgaggttctttgcagatggattttaagtgttaagaagaattatcggaagaatgttgcctatcataattggagacatgcctttaatacagctcagtgcatgtttgctgctctaaaagcaggcaaaattcagaacaagctgactgacctggagatacttgcattgctgattgctgcactaagccacgatttggatcaccgtggtgtgaataactcttacatacagcgaagtgaacatccacttgcccagctttactgccattcaatcatggaacaccatcattttgaccagtgcctgatgattcttaatagtccaggcaatcagattctcagtggcctctccattgaagaatataagaccacgttgaaaataatcaagcaagctattttagctacagacctagcactgtacattaagaggaccggagaattttttgaacttataagaaaaaatcaattcaatttggaagatcctcatcaaaaggagttgtttttggcaatgctgatgacagcttgtgatctttctgcaattacaaaaccctggcctattcaacaacggatagcagaacttgtagcaactgaattttttgatcaaggagacagagagagaaaagaactcaacatagaacccactgatctaatgaacagggagaagaaaaacaaaatcccaagtatgcaagttgggttcatagatgccatctgcttgcaactgtatgaggccctgacccacgtgtcagaggactgtttccctttgctagatggctgcagaaagaacaggcagaaatggcaggcccttgcagaacagcag

SEQ ID NO: 420 - DNA, 978 bp, Artificial Sequence
  source: /note="Description of Artificial Sequence: Synthetic Destabilizing Domain (DD)"
gaagaaacaagagagctacagtcgttagcggctgctgtggtgccatctgcccagacccttaaaattactgactttagcttcagtgactttgagctgtctgatctggaaacagcactgtgtacaattcggatgtttactgacctcaaccttgtgcagaacttccagatgaaacatgaggttctttgcagatggattttaagtgttaagaagaattatcggaagaatgttgcctatcataattggagacatgcctttaatacagctcagtgcatgtttgctgctctaaaagcaggcaaaattcagaacaagctgactgacctggagatacttgcattgctgattgctgcactaagccacgatttggatcaccgtggtgtgaataactcttacatacagcgaagtgaacatccacttgcccagctttactgccattcaatcatggaacaccatcattttgaccagtgcctgatgattcttaatagtccaggcaatcagattctcagtggcctctccattgaagaatataagaccacgttgaaaataatcaagcaagctattttagctacagacctagcactgtacattaagagggatggagaattttttgaacttataagaaaaaatcaattcaatttggaagatcctcatcaaaaggagttgtttttggcaatgctgatgacagcttgtgatctttctgcaattacaaaaccctggcctattcaacaacggatagcagaacttgtagcaactgaattttttgatcaaggagacagagagagaaaagaactcaacatagaacccactgatctaatgaacagggagaagaaaaacaaaatcccaagtatgcaagttgggttcatagatgccatctgcttgcaactgtatgaggccctgacccacgtgtcagaggactgtttccctttgctagatggctgcagaaagaacaggcagaaatggcaggcccttgcagaacagcag

SEQ ID NO: 421 - DNA, 978 bp, Artificial Sequence
  source: /note="Description of Artificial Sequence: Synthetic Destabilizing Domain (DD)"
gaagaaacaagagagctacagtcgttagcggctgctgtggtgccatctgcccagacccttaaaattactgactttagcttcagtgactttgagctgtctgatctggaaacagcactgtgtacaattcggatgtttactgacctcaaccttgtgcagaacttccagatgaaacatgaggttctttgcagatggattttaagtgttaagaagaattatcggaagaatgttgcctatcataattggagacatgcctttaatacagctcagtgcatgtttgctgctctaaaagcaggcaaaattcagaacaagctgactgacctggagatacttgcattgctgattgctgcactaagccacgatttggatcaccgtggtgtgaataactcttacatacagcgaagtgaacatccacttgcccagctttactgccattcaatcatggaacaccatcattttgaccagtgcctgatgattcttaatagtccaggcaatcagattctcagtggcctctccattgaagaatataagaccacgttgaaaataatcaagcaagctattttagctacagacctagcactgtacattaagagggacggagaattttttgaacttataagaaaaaatcaattcaatttggaagatcctcatcaaaaggagttgtttttggcaatgctgatgacagcttgtgatctttctgcaattacaaaaccctggcctattcaacaacggatagcagaacttgtagcaactgaattttttgatcaaggagacagagagagaaaagaactcaacatagaacccactgatctaatgaacagggagaagaaaaacaaaatcccaagtatgcaagttgggttcatagatgccatctgcttgcaactgtatgaggccctgacccacgtgtcagaggactgtttccctttgctagatggctgcagaaagaacaggcagaaatggcaggcccttgcagaacagcag

SEQ ID NO: 422 - DNA, 978 bp, Artificial Sequence
  source: /note="Description of Artificial Sequence: Synthetic Destabilizing Domain (DD)"
gaagaaacaagagagctacagtcgttagcggctgctgtggtgccatctgcccagacccttaaaattactgactttagcttcagtgactttgagctgtctgatctggaaacagcactgtgtacaattcggatgtttactgacctcaaccttgtgcagaacttccagatgaaacatgaggttctttgcagatggattttaagtgttaagaagaattatcggaagaatgttgcctatcataattggagacatgcctttaatacagctcagtgcatgtttgctgctctaaaagcaggcaaaattcagaacaagctgactgacctggagatacttgcattgctgattgctgcactaagccacgatttggatcaccgtggtgtgaataactcttacatacagcgaagtgaacatccacttgcccagctttactgccattcaatcatggaacaccatcattttgaccagtgcctgatgattcttaatagtccaggcaatcagattctcagtggcctctccattgaagaatataagaccacgttgaaaataatcaagcaagctattttagctacagacctagcactgtacattaagagggaaggagaattttttgaacttataagaaaaaatcaattcaatttggaagatcctcatcaaaaggagttgtttttggcaatgctgatgacagcttgtgatctttctgcaattacaaaaccctggcctattcaacaacggatagcagaacttgtagcaactgaattttttgatcaaggagacagagagagaaaagaactcaacatagaacccactgatctaatgaacagggagaagaaaaacaaaatcccaagtatgcaagttgggttcatagatgccatctgcttgcaactgtatgaggccctgacccacgtgtcagaggactgtttccctttgctagatggctgcagaaagaacaggcagaaatggcaggcccttgcagaacagcag

SEQ ID NO: 423 - DNA, 978 bp, Artificial Sequence
  source: /note="Description of Artificial Sequence: Synthetic Destabilizing Domain (DD)"
gaagaaacaagagagctacagtcgttagcggctgctgtggtgccatctgcccagacccttaaaattactgactttagcttcagtgactttgagctgtctgatctggaaacagcactgtgtacaattcggatgtttactgacctcaaccttgtgcagaacttccagatgaaacatgaggttctttgcagatggattttaagtgttaagaagaattatcggaagaatgttgcctatcataattggagacatgcctttaatacagctcagtgcatgtttgctgctctaaaagcaggcaaaattcagaacaagctgactgacctggagatacttgcattgctgattgctgcactaagccacgatttggatcaccgtggtgtgaataactcttacatacagcgaagtgaacatccacttgcccagctttactgccattcaatcatggaacaccatcattttgaccagtgcctgatgattcttaatagtccaggcaatcagattctcagtggcctctccattgaagaatataagaccacgttgaaaataatcaagcaagctattttagctacagacctagcactgtacattaagagggagggagaattttttgaacttataagaaaaaatcaattcaatttggaagatcctcatcaaaaggagttgtttttggcaatgctgatgacagcttgtgatctttctgcaattacaaaaccctggcctattcaacaacggatagcagaacttgtagcaactgaattttttgatcaaggagacagagagagaaaagaactcaacatagaacccactgatctaatgaacagggagaagaaaaacaaaatcccaagtatgcaagttgggttcatagatgccatctgcttgcaactgtatgaggccctgacccacgtgtcagaggactgtttccctttgctagatggctgcagaaagaacaggcagaaatggcaggcccttgcagaacagcag

SEQ ID NO: 424 - DNA, 978 bp, Artificial Sequence
  source: /note="Description of Artificial Sequence: Synthetic Destabilizing Domain (DD)"
gaagaaacaagagagctacagtcgttagcggctgctgtggtgccatctgcccagacccttaaaattactgactttagcttcagtgactttgagctgtctgatctggaaacagcactgtgtacaattcggatgtttactgacctcaaccttgtgcagaacttccagatgaaacatgaggttctttgcagatggattttaagtgttaagaagaattatcggaagaatgttgcctatcataattggagacatgcctttaatacagctcagtgcatgtttgctgctctaaaagcaggcaaaattcagaacaagctgactgacctggagatacttgcattgctgattgctgcactaagccacgatttggatcaccgtggtgtgaataactcttacatacagcgaagtgaacatccacttgcccagctttactgccattcaatcatggaacaccatcattttgaccagtgcctgatgattcttaatagtccaggcaatcagattctcagtggcctctccattgaagaatataagaccacgttgaaaataatcaagcaagctattttagctacagacctagcactgtacattaagaggcagggagaattttttgaacttataagaaaaaatcaattcaatttggaagatcctcatcaaaaggagttgtttttggcaatgctgatgacagcttgtgatctttctgcaattacaaaaccctggcctattcaacaacggatagcagaacttgtagcaactgaattttttgatcaaggagacagagagagaaaagaactcaacatagaacccactgatctaatgaacagggagaagaaaaacaaaatcccaagtatgcaagttgggttcatagatgccatctgcttgcaactgtatgaggccctgacccacgtgtcagaggactgtttccctttgctagatggctgcagaaagaacaggcagaaatggcaggcccttgcagaacagcag

SEQ ID NO: 425 - DNA, 978 bp, Artificial Sequence
  source: /note="Description of Artificial Sequence: Synthetic Destabilizing Domain (DD)"
gaagaaacaagagagctacagtcgttagcggctgctgtggtgccatctgcccagacccttaaaattactgactttagcttcagtgactttgagctgtctgatctggaaacagcactgtgtacaattcggatgtttactgacctcaaccttgtgcagaacttccagatgaaacatgaggttctttgcagatggattttaagtgttaagaagaattatcggaagaatgttgcctatcataattggagacatgcctttaatacagctcagtgcatgtttgctgctctaaaagcaggcaaaattcagaacaagctgactgacctggagatacttgcattgctgattgctgcactaagccacgatttggatcaccgtggtgtgaataactcttacatacagcgaagtgaacatccacttgcccagctttactgccattcaatcatggaacaccatcattttgaccagtgcctgatgattcttaatagtccaggcaatcagattctcagtggcctctccattgaagaatataagaccacgttgaaaataatcaagcaagctattttagctacagacctagcactgtacattaagaggcaaggagaattttttgaacttataagaaaaaatcaattcaatttggaagatcctcatcaaaaggagttgtttttggcaatgctgatgacagcttgtgatctttctgcaattacaaaaccctggcctattcaacaacggatagcagaacttgtagcaactgaattttttgatcaaggagacagagagagaaaagaactcaacatagaacccactgatctaatgaacagggagaagaaaaacaaaatcccaagtatgcaagttgggttcatagatgccatctgcttgcaactgtatgaggccctgacccacgtgtcagaggactgtttccctttgctagatggctgcagaaagaacaggcagaaatggcaggcccttgcagaacagcag

SEQ ID NO: 426 - DNA, 978 bp, Artificial Sequence
  source: /note="Description of Artificial Sequence: Synthetic Destabilizing Domain (DD)"
gaagaaacaagagagctacagtcgttagcggctgctgtggtgccatctgcccagacccttaaaattactgactttagcttcagtgactttgagctgtctgatctggaaacagcactgtgtacaattcggatgtttactgacctcaaccttgtgcagaacttccagatgaaacatgaggttctttgcagatggattttaagtgttaagaagaattatcggaagaatgttgcctatcataattggagacatgcctttaatacagctcagtgcatgtttgctgctctaaaagcaggcaaaattcagaacaagctgactgacctggagatacttgcattgctgattgctgcactaagccacgatttggatcaccgtggtgtgaataactcttacatacagcgaagtgaacatccacttgcccagctttactgccattcaatcatggaacaccatcattttgaccagtgcctgatgattcttaatagtccaggcaatcagattctcagtggcctctccattgaagaatataagaccacgttgaaaataatcaagcaagctattttagctacagacctagcactgtacattaagaggaacggagaattttttgaacttataagaaaaaatcaattcaatttggaagatcctcatcaaaaggagttgtttttggcaatgctgatgacagcttgtgatctttctgcaattacaaaaccctggcctattcaacaacggatagcagaacttgtagcaactgaattttttgatcaaggagacagagagagaaaagaactcaacatagaacccactgatctaatgaacagggagaagaaaaacaaaatcccaagtatgcaagttgggttcatagatgccatctgcttgcaactgtatgaggccctgacccacgtgtcagaggactgtttccctttgctagatggctgcagaaagaacaggcagaaatggcaggcccttgcagaacagcag

SEQ ID NO: 427 - DNA, 978 bp, Artificial Sequence
  source: /note="Description of Artificial Sequence: Synthetic Destabilizing Domain (DD)"
gaagaaacaagagagctacagtcgttagcggctgctgtggtgccatctgcccagacccttaaaattactgactttagcttcagtgactttgagctgtctgatctggaaacagcactgtgtacaattcggatgtttactgacctcaaccttgtgcagaacttccagatgaaacatgaggttctttgcagatggattttaagtgttaagaagaattatcggaagaatgttgcctatcataattggagacatgcctttaatacagctcagtgcatgtttgctgctctaaaagcaggcaaaattcagaacaagctgactgacctggagatacttgcattgctgattgctgcactaagccacgatttggatcaccgtggtgtgaataactcttacatacagcgaagtgaacatccacttgcccagctttactgccattcaatcatggaacaccatcattttgaccagtgcctgatgattcttaatagtccaggcaatcagattctcagtggcctctccattgaagaatataagaccacgttgaaaataatcaagcaagctattttagctacagacctagcactgtacattaagaggatgggagaattttttgaacttataagaaaaaatcaattcaatttggaagatcctcatcaaaaggagttgtttttggcaatgctgatgacagcttgtgatctttctgcaattacaaaaccctggcctattcaacaacggatagcagaacttgtagcaactgaattttttgatcaaggagacagagagagaaaagaactcaacatagaacccactgatctaatgaacagggagaagaaaaacaaaatcccaagtatgcaagttgggttcatagatgccatctgcttgcaactgtatgaggccctgacccacgtgtcagaggactgtttccctttgctagatggctgcagaaagaacaggcagaaatggcaggcccttgcagaacagcag

SEQ ID NO: 428 - DNA, 978 bp, Artificial Sequence
  source: /note="Description of Artificial Sequence: Synthetic Destabilizing Domain (DD)"
gaagaaacaagagagctacagtcgttagcggctgctgtggtgccatctgcccagacccttaaaattactgactttagcttcagtgactttgagctgtctgatctggaaacagcactgtgtacaattcggatgtttactgacctcaaccttgtgcagaacttccagatgaaacatgaggttctttgcagatggattttaagtgttaagaagaattatcggaagaatgttgcctatcataattggagacatgcctttaatacagctcagtgcatgtttgctgctctaaaagcaggcaaaattcagaacaagctgactgacctggagatacttgcattgctgattgctgcactaagccacgatttggatcaccgtggtgtgaataactcttacatacagcgaagtgaacatccacttgcccagctttactgccattcaatcatggaacaccatcattttgaccagtgcctgatgattcttaatagtccaggcaatcagattctcagtggcctctccattgaagaatataagaccacgttgaaaataatcaagcaagctattttagctacagacctagcactgtacattaagaggtgcggagaattttttgaacttataagaaaaaatcaattcaatttggaagatcctcatcaaaaggagttgtttttggcaatgctgatgacagcttgtgatctttctgcaattacaaaaccctggcctattcaacaacggatagcagaacttgtagcaactgaattttttgatcaaggagacagagagagaaaagaactcaacatagaacccactgatctaatgaacagggagaagaaaaacaaaatcccaagtatgcaagttgggttcatagatgccatctgcttgcaactgtatgaggccctgacccacgtgtcagaggactgtttccctttgctagatggctgcagaaagaacaggcagaaatggcaggcccttgcagaacagcag

SEQ ID NO: 429 - DNA, 978 bp, Artificial Sequence
  source: /note="Description of Artificial Sequence: Synthetic Destabilizing Domain (DD)"
gaagaaacaagagagctacagtcgttagcggctgctgtggtgccatctgcccagacccttaaaattactgactttagcttcagtgactttgagctgtctgatctggaaacagcactgtgtacaattcggatgtttactgacctcaaccttgtgcagaacttccagatgaaacatgaggttctttgcagatggattttaagtgttaagaagaattatcggaagaatgttgcctatcataattggagacatgcctttaatacagctcagtgcatgtttgctgctctaaaagcaggcaaaattcagaacaagctgactgacctggagatacttgcattgctgattgctgcactaagccacgatttggatcaccgtggtgtgaataactcttacatacagcgaagtgaacatccacttgcccagctttactgccattcaatcatggaacaccatcattttgaccagtgcctgatgattcttaatagtccaggcaatcagattctcagtggcctctccattgaagaatataagaccacgttgaaaataatcaagcaagctattttagctacagacctagcactgtacattaagaggaaaggagaattttttgaacttataagaaaaaatcaattcaatttggaagatcctcatcaaaaggagttgtttttggcaatgctgatgacagcttgtgatctttctgcaattacaaaaccctggcctattcaacaacggatagcagaacttgtagcaactgaattttttgatcaaggagacagagagagaaaagaactcaacatagaacccactgatctaatgaacagggagaagaaaaacaaaatcccaagtatgcaagttgggttcatagatgccatctgcttgcaactgtatgaggccctgacccacgtgtcagaggactgtttccctttgctagatggctgcagaaagaacaggcagaaatggcaggcccttgcagaacagcag

SEQ ID NO: 430 - protein, 567 aa, Artificial Sequence
  source: /note="Description of Artificial Sequence: Synthetic polypeptide"
MEETRELQSLAAAVVPSAQTLKITDFSFSDFELSDLETALCTIRMFTDLNLVQNFQMKHEVLCRWILSVKKNYRKNVAYHNWRHAFNTAQCMFAALKAGKIQNKLTDLEILALLIAALSHDLDHRGVNNSYIQRSEHPLAQLYCHSIMEHHHFDQCLMILNSPGNQILSGLSIEEYKTTLKIIKQAILATDLALYIKRGGEFFELIRKNQFNLEDPHQKELFLAMLMTACDLSAITKPWPIQQRIAELVATEFFDQGDRERKELNIEPTDLMNREKKNKIPSMQVGFIDAICLQLYEALTHVSEDCFPLLDGCRKNRQKWQALAEQQSGVSKGAELFTGIVPILIELNGDVNGHKFSVSGEGEGDATYGKLTLKFICTTGKLPVPWPTLVTTLSYGVQCFSRYPDHMKQHDFFKSAMPEGYIQERTIFFEDDGNYKSRAEVKFEGDTLVNRIELTGTDFKEDGNILGNKMEYNYNAHNVYIMTDKAKNGIKVNFKIRHNIEDGSVQLADHYQQNTPIGDGPVLLPDNHYLSTQSALSKDPNEKRDHMIYFGFVTAAAITHGMDELYK

SEQ ID NO: 431 - protein, 567 aa, Artificial Sequence
  source: /note="Description of Artificial Sequence: Synthetic polypeptide"
MEETRELQSLAAAVVPSAQTLKITDFSFSDFELSDLETALCTIRMFTDLNLVQNFQMKHEVLCRWILSVKKNYRKNVAYHNWRHAFNTAQCMFAALKAGKIQNKLTDLEILALLIAALSHDLDHRGVNNSYIQRSEHPLAQLYCHSIMEHHHFDQCLMILNSPGNQILSGLSIEEYKTTLKIIKQAILATDLALYIKRAGEFFELIRKNQFNLEDPHQKELFLAMLMTACDLSAITKPWPIQQRIAELVATEFFDQGDRERKELNIEPTDLMNREKKNKIPSMQVGFIDAICLQLYEALTHVSEDCFPLLDGCRKNRQKWQALAEQQSGVSKGAELFTGIVPILIELNGDVNGHKFSVSGEGEGDATYGKLTLKFICTTGKLPVPWPTLVTTLSYGVQCFSRYPDHMKQHDFFKSAMPEGYIQERTIFFEDDGNYKSRAEVKFEGDTLVNRIELTGTDFKEDGNILGNKMEYNYNAHNVYIMTDKAKNGIKVNFKIRHNIEDGSVQLADHYQQNTPIGDGPVLLPDNHYLSTQSALSKDPNEKRDHMIYFGFVTAAAITHGMDELYK

SEQ ID NO: 432 - protein, 567 aa, Artificial Sequence
  source: /note="Description of Artificial Sequence: Synthetic polypeptide"
MEETRELQSLAAAVVPSAQTLKITDFSFSDFELSDLETALCTIRMFTDLNLVQNFQMKHEVLCRWILSVKKNYRKNVAYHNWRHAFNTAQCMFAALKAGKIQNKLTDLEILALLIAALSHDLDHRGVNNSYIQRSEHPLAQLYCHSIMEHHHFDQCLMILNSPGNQILSGLSIEEYKTTLKIIKQAILATDLALYIKRVGEFFELIRKNQFNLEDPHQKELFLAMLMTACDLSAITKPWPIQQRIAELVATEFFDQGDRERKELNIEPTDLMNREKKNKIPSMQVGFIDAICLQLYEALTHVSEDCFPLLDGCRKNRQKWQALAEQQSGVSKGAELFTGIVPILIELNGDVNGHKFSVSGEGEGDATYGKLTLKFICTTGKLPVPWPTLVTTLSYGVQCFSRYPDHMKQHDFFKSAMPEGYIQERTIFFEDDGNYKSRAEVKFEGDTLVNRIELTGTDFKEDGNILGNKMEYNYNAHNVYIMTDKAKNGIKVNFKIRHNIEDGSVQLADHYQQNTPIGDGPVLLPDNHYLSTQSALSKDPNEKRDHMIYFGFVTAAAITHGMDELYK

SEQ ID NO: 433 - protein, 567 aa, Artificial Sequence
  source: /note="Description of Artificial Sequence: Synthetic polypeptide"
MEETRELQSLAAAVVPSAQTLKITDFSFSDFELSDLETALCTIRMFTDLNLVQNFQMKHEVLCRWILSVKKNYRKNVAYHNWRHAFNTAQCMFAALKAGKIQNKLTDLEILALLIAALSHDLDHRGVNNSYIQRSEHPLAQLYCHSIMEHHHFDQCLMILNSPGNQILSGLSIEEYKTTLKIIKQAILATDLALYIKRIGEFFELIRKNQFNLEDPHQKELFLAMLMTACDLSAITKPWPIQQRIAELVATEFFDQGDRERKELNIEPTDLMNREKKNKIPSMQVGFIDAICLQLYEALTHVSEDCFPLLDGCRKNRQKWQALAEQQSGVSKGAELFTGIVPILIELNGDVNGHKFSVSGEGEGDATYGKLTLKFICTTGKLPVPWPTLVTTLSYGVQCFSRYPDHMKQHDFFKSAMPEGYIQERTIFFEDDGNYKSRAEVKFEGDTLVNRIELTGTDFKEDGNILGNKMEYNYNAHNVYIMTDKAKNGIKVNFKIRHNIEDGSVQLADHYQQNTPIGDGPVLLPDNHYLSTQSALSKDPNEKRDHMIYFGFVTAAAITHGMDELYK

SEQ ID NO: 434 - protein, 567 aa, Artificial Sequence
  source: /note="Description of Artificial Sequence: Synthetic polypeptide"
MEETRELQSLAAAVVPSAQTLKITDFSFSDFELSDLETALCTIRMFTDLNLVQNFQMKHEVLCRWILSVKKNYRKNVAYHNWRHAFNTAQCMFAALKAGKIQNKLTDLEILALLIAALSHDLDHRGVNNSYIQRSEHPLAQLYCHSIMEHHHFDQCLMILNSPGNQILSGLSIEEYKTTLKIIKQAILATDLALYIKRPGEFFELIRKNQFNLEDPHQKELFLAMLMTACDLSAITKPWPIQQRIAELVATEFFDQGDRERKELNIEPTDLMNREKKNKIPSMQVGFIDAICLQLYEALTHVSEDCFPLLDGCRKNRQKWQALAEQQSGVSKGAELFTGIVPILIELNGDVNGHKFSVSGEGEGDATYGKLTLKFICTTGKLPVPWPTLVTTLSYGVQCFSRYPDHMKQHDFFKSAMPEGYIQERTIFFEDDGNYKSRAEVKFEGDTLVNRIELTGTDFKEDGNILGNKMEYNYNAHNVYIMTDKAKNGIKVNFKIRHNIEDGSVQLADHYQQNTPIGDGPVLLPDNHYLSTQSALSKDPNEKRDHMIYFGFVTAAAITHGMDELYK

SEQ ID NO: 435 - protein, 567 aa, Artificial Sequence
  source: /note="Description of Artificial Sequence: Synthetic polypeptide"
MEETRELQSLAAAVVPSAQTLKITDFSFSDFELSDLETALCTIRMFTDLNLVQNFQMKHEVLCRWILSVKKNYRKNVAYHNWRHAFNTAQCMFAALKAGKIQNKLTDLEILALLIAALSHDLDHRGVNNSYIQRSEHPLAQLYCHSIMEHHHFDQCLMILNSPGNQILSGLSIEEYKTTLKIIKQAILATDLALYIKRFGEFFELIRKNQFNLEDPHQKELFLAMLMTACDLSAITKPWPIQQRIAELVATEFFDQGDRERKELNIEPTDLMNREKKNKIPSMQVGFIDAICLQLYEALTHVSEDCFPLLDGCRKNRQKWQALAEQQSGVSKGAELFTGIVPILIELNGDVNGHKFSVSGEGEGDATYGKLTLKFICTTGKLPVPWPTLVTTLSYGVQCFSRYPDHMKQHDFFKSAMPEGYIQERTIFFEDDGNYKSRAEVKFEGDTLVNRIELTGTDFKEDGNILGNKMEYNYNAHNVYIMTDKAKNGIKVNFKIRHNIEDGSVQLADHYQQNTPIGDGPVLLPDNHYLSTQSALSKDPNEKRDHMIYFGFVTAAAITHGMDELYK

SEQ ID NO: 436 - protein, 567 aa, Artificial Sequence
  source: /note="Description of Artificial Sequence: Synthetic polypeptide"
MEETRELQSLAAAVVPSAQTLKITDFSFSDFELSDLETALCTIRMFTDLNLVQNFQMKHEVLCRWILSVKKNYRKNVAYHNWRHAFNTAQCMFAALKAGKIQNKLTDLEILALLIAALSHDLDHRGVNNSYIQRSEHPLAQLYCHSIMEHHHFDQCLMILNSPGNQILSGLSIEEYKTTLKIIKQAILATDLALYIKRWGEFFELIRKNQFNLEDPHQKELFLAMLMTACDLSAITKPWPIQQRIAELVATEFFDQGDRERKELNIEPTDLMNREKKNKIPSMQVGFIDAICLQLYEALTHVSEDCFPLLDGCRKNRQKWQALAEQQSGVSKGAELFTGIVPILIELNGDVNGHKFSVSGEGEGDATYGKLTLKFICTTGKLPVPWPTLVTTLSYGVQCFSRYPDHMKQHDFFKSAMPEGYIQERTIFFEDDGNYKSRAEVKFEGDTLVNRIELTGTDFKEDGNILGNKMEYNYNAHNVYIMTDKAKNGIKVNFKIRHNIEDGSVQLADHYQQNTPIGDGPVLLPDNHYLSTQSALSKDPNEKRDHMIYFGFVTAAAITHGMDELYK

SEQ ID NO: 437 - protein, 567 aa, Artificial Sequence
  source: /note="Description of Artificial Sequence: Synthetic polypeptide"
MEETRELQSLAAAVVPSAQTLKITDFSFSDFELSDLETALCTIRMFTDLNLVQNFQMKHEVLCRWILSVKKNYRKNVAYHNWRHAFNTAQCMFAALKAGKIQNKLTDLEILALLIAALSHDLDHRGVNNSYIQRSEHPLAQLYCHSIMEHHHFDQCLMILNSPGNQILSGLSIEEYKTTLKIIKQAILATDLALYIKRYGEFFELIRKNQFNLEDPHQKELFLAMLMTACDLSAITKPWPIQQRIAELVATEFFDQGDRERKELNIEPTDLMNREKKNKIPSMQVGFIDAICLQLYEALTHVSEDCFPLLDGCRKNRQKWQALAEQQSGVSKGAELFTGIVPILIELNGDVNGHKFSVSGEGEGDATYGKLTLKFICTTGKLPVPWPTLVTTLSYGVQCFSRYPDHMKQHDFFKSAMPEGYIQERTIFFEDDGNYKSRAEVKFEGDTLVNRIELTGTDFKEDGNILGNKMEYNYNAHNVYIMTDKAKNGIKVNFKIRHNIEDGSVQLADHYQQNTPIGDGPVLLPDNHYLSTQSALSKDPNEKRDHMIYFGFVTAAAITHGMDELYK

SEQ ID NO: 438 - protein, 567 aa, Artificial Sequence
  source: /note="Description of Artificial Sequence: Synthetic polypeptide"
MEETRELQSLAAAVVPSAQTLKITDFSFSDFELSDLETALCTIRMFTDLNLVQNFQMKHEVLCRWILSVKKNYRKNVAYHNWRHAFNTAQCMFAALKAGKIQNKLTDLEILALLIAALSHDLDHRGVNNSYIQRSEHPLAQLYCHSIMEHHHFDQCLMILNSPGNQILSGLSIEEYKTTLKIIKQAILATDLALYIKRHGEFFELIRKNQFNLEDPHQKELFLAMLMTACDLSAITKPWPIQQRIAELVATEFFDQGDRERKELNIEPTDLMNREKKNKIPSMQVGFIDAICLQLYEALTHVSEDCFPLLDGCRKNRQKWQALAEQQSGVSKGAELFTGIVPILIELNGDVNGHKFSVSGEGEGDATYGKLTLKFICTTGKLPVPWPTLVTTLSYGVQCFSRYPDHMKQHDFFKSAMPEGYIQERTIFFEDDGNYKSRAEVKFEGDTLVNRIELTGTDFKEDGNILGNKMEYNYNAHNVYIMTDKAKNGIKVNFKIRHNIEDGSVQLADHYQQNTPIGDGPVLLPDNHYLSTQSALSKDPNEKRDHMIYFGFVTAAAITHGMDELYK

SEQ ID NO: 439 - protein, 567 aa, Artificial Sequence
  source: /note="Description of Artificial Sequence: Synthetic polypeptide"
MEETRELQSLAAAVVPSAQTLKITDFSFSDFELSDLETALCTIRMFTDLNLVQNFQMKHEVLCRWILSVKKNYRKNVAYHNWRHAFNTAQCMFAALKAGKIQNKLTDLEILALLIAALSHDLDHRGVNNSYIQRSEHPLAQLYCHSIMEHHHFDQCLMILNSPGNQILSGLSIEEYKTTLKIIKQAILATDLALYIKRSGEFFELIRKNQFNLEDPHQKELFLAMLMTACDLSAITKPWPIQQRIAELVATEFFDQGDRERKELNIEPTDLMNREKKNKIPSMQVGFIDAICLQLYEALTHVSEDCFPLLDGCRKNRQKWQALAEQQSGVSKGAELFTGIVPILIELNGDVNGHKFSVSGEGEGDATYGKLTLKFICTTGKLPVPWPTLVTTLSYGVQCFSRYPDHMKQHDFFKSAMPEGYIQERTIFFEDDGNYKSRAEVKFEGDTLVNRIELTGTDFKEDGNILGNKMEYNYNAHNVYIMTDKAKNGIKVNFKIRHNIEDGSVQLADHYQQNTPIGDGPVLLPDNHYLSTQSALSKDPNEKRDHMIYFGFVTAAAITHGMDELYK

SEQ ID NO: 440 - protein, 567 aa, Artificial Sequence
  source: /note="Description of Artificial Sequence: Synthetic polypeptide"
MEETRELQSLAAAVVPSAQTLKITDFSFSDFELSDLETALCTIRMFTDLNLVQNFQMKHEVLCRWILSVKKNYRKNVAYHNWRHAFNTAQCMFAALKAGKIQNKLTDLEILALLIAALSHDLDHRGVNNSYIQRSEHPLAQLYCHSIMEHHHFDQCLMILNSPGNQILSGLSIEEYKTTLKIIKQAILATDLALYIKRTGEFFELIRKNQFNLEDPHQKELFLAMLMTACDLSAITKPWPIQQRIAELVATEFFDQGDRERKELNIEPTDLMNREKKNKIPSMQVGFIDAICLQLYEALTHVSEDCFPLLDGCRKNRQKWQALAEQQSGVSKGAELFTGIVPILIELNGDVNGHKFSVSGEGEGDATYGKLTLKFICTTGKLPVPWPTLVTTLSYGVQCFSRYPDHMKQHDFFKSAMPEGYIQERTIFFEDDGNYKSRAEVKFEGDTLVNRIELTGTDFKEDGNILGNKMEYNYNAHNVYIMTDKAKNGIKVNFKIRHNIEDGSVQLADHYQQNTPIGDGPVLLPDNHYLSTQSALSKDPNEKRDHMIYFGFVTAAAITHGMDELYK

SEQ ID NO: 441 - protein, 567 aa, Artificial Sequence
  source: /note="Description of Artificial Sequence: Synthetic polypeptide"
MEETRELQSLAAAVVPSAQTLKITDFSFSDFELSDLETALCTIRMFTDLNLVQNFQMKHEVLCRWILSVKKNYRKNVAYHNWRHAFNTAQCMFAALKAGKIQNKLTDLEILALLIAALSHDLDHRGVNNSYIQRSEHPLAQLYCHSIMEHHHFDQCLMILNSPGNQILSGLSIEEYKTTLKIIKQAILATDLALYIKRDGEFFELIRKNQFNLEDPHQKELFLAMLMTACDLSAITKPWPIQQRIAELVATEFFDQGDRERKELNIEPTDLMNREKKNKIPSMQVGFIDAICLQLYEALTHVSEDCFPLLDGCRKNRQKWQALAEQQSGVSKGAELFTGIVPILIELNGDVNGHKFSVSGEGEGDATYGKLTLKFICTTGKLPVPWPTLVTTLSYGVQCFSRYPDHMKQHDFFKSAMPEGYIQERTIFFEDDGNYKSRAEVKFEGDTLVNRIELTGTDFKEDGNILGNKMEYNYNAHNVYIMTDKAKNGIKVNFKIRHNIEDGSVQLADHYQQNTPIGDGPVLLPDNHYLSTQSALSKDPNEKRDHMIYFGFVTAAAITHGMDELYK

SEQ ID NO: 442 - protein, 567 aa, Artificial Sequence
  source: /note="Description of Artificial Sequence: Synthetic polypeptide"
MEETRELQSLAAAVVPSAQTLKITDFSFSDFELSDLETALCTIRMFTDLNLVQNFQMKHEVLCRWILSVKKNYRKNVAYHNWRHAFNTAQCMFAALKAGKIQNKLTDLEILALLIAALSHDLDHRGVNNSYIQRSEHPLAQLYCHSIMEHHHFDQCLMILNSPGNQILSGLSIEEYKTTLKIIKQAILATDLALYIKREGEFFELIRKNQFNLEDPHQKELFLAMLMTACDLSAITKPWPIQQRIAELVATEFFDQGDRERKELNIEPTDLMNREKKNKIPSMQVGFIDAICLQLYEALTHVSEDCFPLLDGCRKNRQKWQALAEQQSGVSKGAELFTGIVPILIELNGDVNGHKFSVSGEGEGDATYGKLTLKFICTTGKLPVPWPTLVTTLSYGVQCFSRYPDHMKQHDFFKSAMPEGYIQERTIFFEDDGNYKSRAEVKFEGDTLVNRIELTGTDFKEDGNILGNKMEYNYNAHNVYIMTDKAKNGIKVNFKIRHNIEDGSVQLADHYQQNTPIGDGPVLLPDNHYLSTQSALSKDPNEKRDHMIYFGFVTAAAITHGMDELYK

SEQ ID NO: 443 - protein, 567 aa, Artificial Sequence
  source: /note="Description of Artificial Sequence: Synthetic polypeptide"
MEETRELQSLAAAVVPSAQTLKITDFSFSDFELSDLETALCTIRMFTDLNLVQNFQMKHEVLCRWILSVKKNYRKNVAYHNWRHAFNTAQCMFAALKAGKIQNKLTDLEILALLIAALSHDLDHRGVNNSYIQRSEHPLAQLYCHSIMEHHHFDQCLMILNSPGNQILSGLSIEEYKTTLKIIKQAILATDLALYIKRQGEFFELIRKNQFNLEDPHQKELFLAMLMTACDLSAITKPWPIQQRIAELVATEFFDQGDRERKELNIEPTDLMNREKKNKIPSMQVGFIDAICLQLYEALTHVSEDCFPLLDGCRKNRQKWQALAEQQSGVSKGAELFTGIVPILIELNGDVNGHKFSVSGEGEGDATYGKLTLKFICTTGKLPVPWPTLVTTLSYGVQCFSRYPDHMKQHDFFKSAMPEGYIQERTIFFEDDGNYKSRAEVKFEGDTLVNRIELTGTDFKEDGNILGNKMEYNYNAHNVYIMTDKAKNGIKVNFKIRHNIEDGSVQLADHYQQNTPIGDGPVLLPDNHYLSTQSALSKDPNEKRDHMIYFGFVTAAAITHGMDELYK

SEQ ID NO: 444 - protein, 567 aa, Artificial Sequence
  source: /note="Description of Artificial Sequence: Synthetic polypeptide"
MEETRELQSLAAAVVPSAQTLKITDFSFSDFELSDLETALCTIRMFTDLNLVQNFQMKHEVLCRWILSVKKNYRKNVAYHNWRHAFNTAQCMFAALKAGKIQNKLTDLEILALLIAALSHDLDHRGVNNSYIQRSEHPLAQLYCHSIMEHHHFDQCLMILNSPGNQILSGLSIEEYKTTLKIIKQAILATDLALYIKRNGEFFELIRKNQFNLEDPHQKELFLAMLMTACDLSAITKPWPIQQRIAELVATEFFDQGDRERKELNIEPTDLMNREKKNKIPSMQVGFIDAICLQLYEALTHVSEDCFPLLDGCRKNRQKWQALAEQQSGVSKGAELFTGIVPILIELNGDVNGHKFSVSGEGEGDATYGKLTLKFICTTGKLPVPWPTLVTTLSYGVQCFSRYPDHMKQHDFFKSAMPEGYIQERTIFFEDDGNYKSRAEVKFEGDTLVNRIELTGTDFKEDGNILGNKMEYNYNAHNVYIMTDKAKNGIKVNFKIRHNIEDGSVQLADHYQQNTPIGDGPVLLPDNHYLSTQSALSKDPNEKRDHMIYFGFVTAAAITHGMDELYK

SEQ ID NO: 445 - protein, 567 aa, Artificial Sequence
  source: /note="Description of Artificial Sequence: Synthetic polypeptide"
MEETRELQSLAAAVVPSAQTLKITDFSFSDFELSDLETALCTIRMFTDLNLVQNFQMKHEVLCRWILSVKKNYRKNVAYHNWRHAFNTAQCMFAALKAGKIQNKLTDLEILALLIAALSHDLDHRGVNNSYIQRSEHPLAQLYCHSIMEHHHFDQCLMILNSPGNQILSGLSIEEYKTTLKIIKQAILATDLALYIKRMGEFFELIRKNQFNLEDPHQKELFLAMLMTACDLSAITKPWPIQQRIAELVATEFFDQGDRERKELNIEPTDLMNREKKNKIPSMQVGFIDAICLQLYEALTHVSEDCFPLLDGCRKNRQKWQALAEQQSGVSKGAELFTGIVPILIELNGDVNGHKFSVSGEGEGDATYGKLTLKFICTTGKLPVPWPTLVTTLSYGVQCFSRYPDHMKQHDFFKSAMPEGYIQERTIFFEDDGNYKSRAEVKFEGDTLVNRIELTGTDFKEDGNILGNKMEYNYNAHNVYIMTDKAKNGIKVNFKIRHNIEDGSVQLADHYQQNTPIGDGPVLLPDNHYLSTQSALSKDPNEKRDHMIYFGFVTAAAITHGMDELYK

SEQ ID NO: 446 - protein, 567 aa, Artificial Sequence
  source: /note="Description of Artificial Sequence: Synthetic polypeptide"
MEETRELQSLAAAVVPSAQTLKITDFSFSDFELSDLETALCTIRMFTDLNLVQNFQMKHEVLCRWILSVKKNYRKNVAYHNWRHAFNTAQCMFAALKAGKIQNKLTDLEILALLIAALSHDLDHRGVNNSYIQRSEHPLAQLYCHSIMEHHHFDQCLMILNSPGNQILSGLSIEEYKTTLKIIKQAILATDLALYIKRCGEFFELIRKNQFNLEDPHQKELFLAMLMTACDLSAITKPWPIQQRIAELVATEFFDQGDRERKELNIEPTDLMNREKKNKIPSMQVGFIDAICLQLYEALTHVSEDCFPLLDGCRKNRQKWQALAEQQSGVSKGAELFTGIVPILIELNGDVNGHKFSVSGEGEGDATYGKLTLKFICTTGKLPVPWPTLVTTLSYGVQCFSRYPDHMKQHDFFKSAMPEGYIQERTIFFEDDGNYKSRAEVKFEGDTLVNRIELTGTDFKEDGNILGNKMEYNYNAHNVYIMTDKAKNGIKVNFKIRHNIEDGSVQLADHYQQNTPIGDGPVLLPDNHYLSTQSALSKDPNEKRDHMIYFGFVTAAAITHGMDELYK

SEQ ID NO: 447 - protein, 567 aa, Artificial Sequence
  source: /note="Description of Artificial Sequence: Synthetic polypeptide"
MEETRELQSLAAAVVPSAQTLKITDFSFSDFELSDLETALCTIRMFTDLNLVQNFQMKHEVLCRWILSVKKNYRKNVAYHNWRHAFNTAQCMFAALKAGKIQNKLTDLEILALLIAALSHDLDHRGVNNSYIQRSEHPLAQLYCHSIMEHHHFDQCLMILNSPGNQILSGLSIEEYKTTLKIIKQAILATDLALYIKRKGEFFELIRKNQFNLEDPHQKELFLAMLMTACDLSAITKPWPIQQRIAELVATEFFDQGDRERKELNIEPTDLMNREKKNKIPSMQVGFIDAICLQLYEALTHVSEDCFPLLDGCRKNRQKWQALAEQQSGVSKGAELFTGIVPILIELNGDVNGHKFSVSGEGEGDATYGKLTLKFICTTGKLPVPWPTLVTTLSYGVQCFSRYPDHMKQHDFFKSAMPEGYIQERTIFFEDDGNYKSRAEVKFEGDTLVNRIELTGTDFKEDGNILGNKMEYNYNAHNVYIMTDKAKNGIKVNFKIRHNIEDGSVQLADHYQQNTPIGDGPVLLPDNHYLSTQSALSKDPNEKRDHMIYFGFVTAAAITHGMDELYK

SEQ ID NO: 448 - protein, 569 aa, Artificial Sequence
  source: /note="Description of Artificial Sequence: Synthetic polypeptide"
MVSKGAELFTGIVPILIELNGDVNGHKFSVSGEGEGDATYGKLTLKFICTTGKLPVPWPTLVTTLSYGVQCFSRYPDHMKQHDFFKSAMPEGYIQERTIFFEDDGNYKSRAEVKFEGDTLVNRIELTGTDFKEDGNILGNKMEYNYNAHNVYIMTDKAKNGIKVNFKIRHNIEDGSVQLADHYQQNTPIGDGPVLLPDNHYLSTQSALSKDPNEKRDHMIYFGFVTAAAITHGMDELYKGSEETRELQSLAAAVVPSAQTLKITDFSFSDFELSDLETALCTIRMFTDLNLVQNFQMKHEVLCRWILSVKKNYRKNVAYHNWRHAFNTAQCMFAALKAGKIQNKLTDLEILALLIAALSHDLDHRGVNNSYIQRSEHPLAQLYCHSIMEHHHFDQCLMILNSPGNQILSGLSIEEYKTTLKIIKQAILATDLALYIKRGGEFFELIRKNQFNLEDPHQKELFLAMLMTACDLSAITKPWPIQQRIAELVATEFFDQGDRERKELNIEPTDLMNREKKNKIPSMQVGFIDAICLQLYEALTHVSEDCFPLLDGCRKNRQKWQALAEQQSR

SEQ ID NO: 449 - protein, 569 aa, Artificial Sequence
  source: /note="Description of Artificial Sequence: Synthetic polypeptide"
MVSKGAELFTGIVPILIELNGDVNGHKFSVSGEGEGDATYGKLTLKFICTTGKLPVPWPTLVTTLSYGVQCFSRYPDHMKQHDFFKSAMPEGYIQERTIFFEDDGNYKSRAEVKFEGDTLVNRIELTGTDFKEDGNILGNKMEYNYNAHNVYIMTDKAKNGIKVNFKIRHNIEDGSVQLADHYQQNTPIGDGPVLLPDNHYLSTQSALSKDPNEKRDHMIYFGFVTAAAITHGMDELYKGSEETRELQSLAAAVVPSAQTLKITDFSFSDFELSDLETALCTIRMFTDLNLVQNFQMKHEVLCRWILSVKKNYRKNVAYHNWRHAFNTAQCMFAALKAGKIQNKLTDLEILALLIAALSHDLDHRGVNNSYIQRSEHPLAQLYCHSIMEHHHFDQCLMILNSPGNQILSGLSIEEYKTTLKIIKQAILATDLALYIKRAGEFFELIRKNQFNLEDPHQKELFLAMLMTACDLSAITKPWPIQQRIAELVATEFFDQGDRERKELNIEPTDLMNREKKNKIPSMQVGFIDAICLQLYEALTHVSEDCFPLLDGCRKNRQKWQALAEQQSR

SEQ ID NO: 450 - protein, 569 aa, Artificial Sequence
  source: /note="Description of Artificial Sequence: Synthetic polypeptide"
MVSKGAELFTGIVPILIELNGDVNGHKFSVSGEGEGDATYGKLTLKFICTTGKLPVPWPTLVTTLSYGVQCFSRYPDHMKQHDFFKSAMPEGYIQERTIFFEDDGNYKSRAEVKFEGDTLVNRIELTGTDFKEDGNILGNKMEYNYNAHNVYIMTDKAKNGIKVNFKIRHNIEDGSVQLADHYQQNTPIGDGPVLLPDNHYLSTQSALSKDPNEKRDHMIYFGFVTAAAITHGMDELYKGSEETRELQSLAAAVVPSAQTLKITDFSFSDFELSDLETALCTIRMFTDLNLVQNFQMKHEVLCRWILSVKKNYRKNVAYHNWRHAFNTAQCMFAALKAGKIQNKLTDLEILALLIAALSHDLDHRGVNNSYIQRSEHPLAQLYCHSIMEHHHFDQCLMILNSPGNQILSGLSIEEYKTTLKIIKQAILATDLALYIKRLGEFFELIRKNQFNLEDPHQKELFLAMLMTACDLSAITKPWPIQQRIAELVATEFFDQGDRERKELNIEPTDLMNREKKNKIPSMQVGFIDAICLQLYEALTHVSEDCFPLLDGCRKNRQKWQALAEQQSR

SEQ ID NO: 451 - protein, 569 aa, Artificial Sequence
  source: /note="Description of Artificial Sequence: Synthetic polypeptide"
MVSKGAELFTGIVPILIELNGDVNGHKFSVSGEGEGDATYGKLTLKFICTTGKLPVPWPTLVTTLSYGVQCFSRYPDHMKQHDFFKSAMPEGYIQERTIFFEDDGNYKSRAEVKFEGDTLVNRIELTGTDFKEDGNILGNKMEYNYNAHNVYIMTDKAKNGIKVNFKIRHNIEDGSVQLADHYQQNTPIGDGPVLLPDNHYLSTQSALSKDPNEKRDHMIYFGFVTAAAITHGMDELYKGSEETRELQSLAAAVVPSAQTLKITDFSFSDFELSDLETALCTIRMFTDLNLVQNFQMKHEVLCRWILSVKKNYRKNVAYHNWRHAFNTAQCMFAALKAGKIQNKLTDLEILALLIAALSHDLDHRGVNNSYIQRSEHPLAQLYCHSIMEHHHFDQCLMILNSPGNQILSGLSIEEYKTTLKIIKQAILATDLALYIKRMGEFFELIRKNQFNLEDPHQKELFLAMLMTACDLSAITKPWPIQQRIAELVATEFFDQGDRERKELNIEPTDLMNREKKNKIPSMQVGFIDAICLQLYEALTHVSEDCFPLLDGCRKNRQKWQALAEQQSR

SEQ ID NO: 452 - protein, 569 aa, Artificial Sequence
  source: /note="Description of Artificial Sequence: Synthetic polypeptide"
MVSKGAELFTGIVPILIELNGDVNGHKFSVSGEGEGDATYGKLTLKFICTTGKLPVPWPTLVTTLSYGVQCFSRYPDHMKQHDFFKSAMPEGYIQERTIFFEDDGNYKSRAEVKFEGDTLVNRIELTGTDFKEDGNILGNKMEYNYNAHNVYIMTDKAKNGIKVNFKIRHNIEDGSVQLADHYQQNTPIGDGPVLLPDNHYLSTQSALSKDPNEKRDHMIYFGFVTAAAITHGMDELYKGSEETRELQSLAAAVVPSAQTLKITDFSFSDFELSDLETALCTIRMFTDLNLVQNFQMKHEVLCRWILSVKKNYRKNVAYHNWRHAFNTAQCMFAALKAGKIQNKLTDLEILALLIAALSHDLDHRGVNNSYIQRSEHPLAQLYCHSIMEHHHFDQCLMILNSPGNQILSGLSIEEYKTTLKIIKQAILATDLALYIKRFGEFFELIRKNQFNLEDPHQKELFLAMLMTACDLSAITKPWPIQQRIAELVATEFFDQGDRERKELNIEPTDLMNREKKNKIPSMQVGFIDAICLQLYEALTHVSEDCFPLLDGCRKNRQKWQALAEQQSR

SEQ ID NO: 453 - protein, 569 aa, Artificial Sequence
  source: /note="Description of Artificial Sequence: Synthetic polypeptide"
MVSKGAELFTGIVPILIELNGDVNGHKFSVSGEGEGDATYGKLTLKFICTTGKLPVPWPTLVTTLSYGVQCFSRYPDHMKQHDFFKSAMPEGYIQERTIFFEDDGNYKSRAEVKFEGDTLVNRIELTGTDFKEDGNILGNKMEYNYNAHNVYIMTDKAKNGIKVNFKIRHNIEDGSVQLADHYQQNTPIGDGPVLLPDNHYLSTQSALSKDPNEKRDHMIYFGFVTAAAITHGMDELYKGSEETRELQSLAAAVVPSAQTLKITDFSFSDFELSDLETALCTIRMFTDLNLVQNFQMKHEVLCRWILSVKKNYRKNVAYHNWRHAFNTAQCMFAALKAGKIQNKLTDLEILALLIAALSHDLDHRGVNNSYIQRSEHPLAQLYCHSIMEHHHFDQCLMILNSPGNQILSGLSIEEYKTTLKIIKQAILATDLALYIKRWGEFFELIRKNQFNLEDPHQKELFLAMLMTACDLSAITKPWPIQQRIAELVATEFFDQGDRERKELNIEPTDLMNREKKNKIPSMQVGFIDAICLQLYEALTHVSEDCFPLLDGCRKNRQKWQALAEQQSR

SEQ ID NO: 454 - protein, 569 aa, Artificial Sequence
  source: /note="Description of Artificial Sequence: Synthetic polypeptide"
MVSKGAELFTGIVPILIELNGDVNGHKFSVSGEGEGDATYGKLTLKFICTTGKLPVPWPTLVTTLSYGVQCFSRYPDHMKQHDFFKSAMPEGYIQERTIFFEDDGNYKSRAEVKFEGDTLVNRIELTGTDFKEDGNILGNKMEYNYNAHNVYIMTDKAKNGIKVNFKIRHNIEDGSVQLADHYQQNTPIGDGPVLLPDNHYLSTQSALSKDPNEKRDHMIYFGFVTAAAITHGMDELYKGSEETRELQSLAAAVVPSAQTLKITDFSFSDFELSDLETALCTIRMFTDLNLVQNFQMKHEVLCRWILSVKKNYRKNVAYHNWRHAFNTAQCMFAALKAGKIQNKLTDLEILALLIAALSHDLDHRGVNNSYIQRSEHPLAQLYCHSIMEHHHFDQCLMILNSPGNQILSGLSIEEYKTTLKIIKQAILATDLALYIKRKGEFFELIRKNQFNLEDPHQKELFLAMLMTACDLSAITKPWPIQQRIAELVATEFFDQGDRERKELNIEPTDLMNREKKNKIPSMQVGFIDAICLQLYEALTHVSEDCFPLLDGCRKNRQKWQALAEQQSR

SEQ ID NO: 455 - protein, 569 aa, Artificial Sequence
  source: /note="Description of Artificial Sequence: Synthetic polypeptide"
MVSKGAELFTGIVPILIELNGDVNGHKFSVSGEGEGDATYGKLTLKFICTTGKLPVPWPTLVTTLSYGVQCFSRYPDHMKQHDFFKSAMPEGYIQERTIFFEDDGNYKSRAEVKFEGDTLVNRIELTGTDFKEDGNILGNKMEYNYNAHNVYIMTDKAKNGIKVNFKIRHNIEDGSVQLADHYQQNTPIGDGPVLLPDNHYLSTQSALSKDPNEKRDHMIYFGFVTAAAITHGMDELYKGSEETRELQSLAAAVVPSAQTLKITDFSFSDFELSDLETALCTIRMFTDLNLVQNFQMKHEVLCRWILSVKKNYRKNVAYHNWRHAFNTAQCMFAALKAGKIQNKLTDLEILALLIAALSHDLDHRGVNNSYIQRSEHPLAQLYCHSIMEHHHFDQCLMILNSPGNQILSGLSIEEYKTTLKIIKQAILATDLALYIKRQGEFFELIRKNQFNLEDPHQKELFLAMLMTACDLSAITKPWPIQQRIAELVATEFFDQGDRERKELNIEPTDLMNREKKNKIPSMQVGFIDAICLQLYEALTHVSEDCFPLLDGCRKNRQKWQALAEQQSR

SEQ ID NO: 456 - protein, 569 aa, Artificial Sequence
  source: /note="Description of Artificial Sequence: Synthetic polypeptide"
MVSKGAELFTGIVPILIELNGDVNGHKFSVSGEGEGDATYGKLTLKFICTTGKLPVPWPTLVTTLSYGVQCFSRYPDHMKQHDFFKSAMPEGYIQERTIFFEDDGNYKSRAEVKFEGDTLVNRIELTGTDFKEDGNILGNKMEYNYNAHNVYIMTDKAKNGIKVNFKIRHNIEDGSVQLADHYQQNTPIGDGPVLLPDNHYLSTQSALSKDPNEKRDHMIYFGFVTAAAITHGMDELYKGSEETRELQSLAAAVVPSAQTLKITDFSFSDFELSDLETALCTIRMFTDLNLVQNFQMKHEVLCRWILSVKKNYRKNVAYHNWRHAFNTAQCMFAALKAGKIQNKLTDLEILALLIAALSHDLDHRGVNNSYIQRSEHPLAQLYCHSIMEHHHFDQCLMILNSPGNQILSGLSIEEYKTTLKIIKQAILATDLALYIKREGEFFELIRKNQFNLEDPHQKELFLAMLMTACDLSAITKPWPIQQRIAELVATEFFDQGDRERKELNIEPTDLMNREKKNKIPSMQVGFIDAICLQLYEALTHVSEDCFPLLDGCRKNRQKWQALAEQQSR

SEQ ID NO: 457 - protein, 569 aa, Artificial Sequence
  source: /note="Description of Artificial Sequence: Synthetic polypeptide"
MVSKGAELFTGIVPILIELNGDVNGHKFSVSGEGEGDATYGKLTLKFICTTGKLPVPWPTLVTTLSYGVQCFSRYPDHMKQHDFFKSAMPEGYIQERTIFFEDDGNYKSRAEVKFEGDTLVNRIELTGTDFKEDGNILGNKMEYNYNAHNVYIMTDKAKNGIKVNFKIRHNIEDGSVQLADHYQQNTPIGDGPVLLPDNHYLSTQSALSKDPNEKRDHMIYFGFVTAAAITHGMDELYKGSEETRELQSLAAAVVPSAQTLKITDFSFSDFELSDLETALCTIRMFTDLNLVQNFQMKHEVLCRWILSVKKNYRKNVAYHNWRHAFNTAQCMFAALKAGKIQNKLTDLEILALLIAALSHDLDHRGVNNSYIQRSEHPLAQLYCHSIMEHHHFDQCLMILNSPGNQILSGLSIEEYKTTLKIIKQAILATDLALYIKRSGEFFELIRKNQFNLEDPHQKELFLAMLMTACDLSAITKPWPIQQRIAELVATEFFDQGDRERKELNIEPTDLMNREKKNKIPSMQVGFIDAICLQLYEALTHVSEDCFPLLDGCRKNRQKWQALAEQQSR

SEQ ID NO: 458 - protein, 569 aa, Artificial Sequence
  source: /note="Description of Artificial Sequence: Synthetic polypeptide"
MVSKGAELFTGIVPILIELNGDVNGHKFSVSGEGEGDATYGKLTLKFICTTGKLPVPWPTLVTTLSYGVQCFSRYPDHMKQHDFFKSAMPEGYIQERTIFFEDDGNYKSRAEVKFEGDTLVNRIELTGTDFKEDGNILGNKMEYNYNAHNVYIMTDKAKNGIKVNFKIRHNIEDGSVQLADHYQQNTPIGDGPVLLPDNHYLSTQSALSKDPNEKRDHMIYFGFVTAAAITHGMDELYKGSEETRELQSLAAAVVPSAQTLKITDFSFSDFELSDLETALCTIRMFTDLNLVQNFQMKHEVLCRWILSVKKNYRKNVAYHNWRHAFNTAQCMFAALKAGKIQNKLTDLEILALLIAALSHDLDHRGVNNSYIQRSEHPLAQLYCHSIMEHHHFDQCLMILNSPGNQILSGLSIEEYKTTLKIIKQAILATDLALYIKRPGEFFELIRKNQFNLEDPHQKELFLAMLMTACDLSAITKPWPIQQRIAELVATEFFDQGDRERKELNIEPTDLMNREKKNKIPSMQVGFIDAICLQLYEALTHVSEDCFPLLDGCRKNRQKWQALAEQQSR

SEQ ID NO: 459 - protein, 569 aa, Artificial Sequence
  source: /note="Description of Artificial Sequence: Synthetic polypeptide"
MVSKGAELFTGIVPILIELNGDVNGHKFSVSGEGEGDATYGKLTLKFICTTGKLPVPWPTLVTTLSYGVQCFSRYPDHMKQHDFFKSAMPEGYIQERTIFFEDDGNYKSRAEVKFEGDTLVNRIELTGTDFKEDGNILGNKMEYNYNAHNVYIMTDKAKNGIKVNFKIRHNIEDGSVQLADHYQQNTPIGDGPVLLPDNHYLSTQSALSKDPNEKRDHMIYFGFVTAAAITHGMDELYKGSEETRELQSLAAAVVPSAQTLKITDFSFSDFELSDLETALCTIRMFTDLNLVQNFQMKHEVLCRWILSVKKNYRKNVAYHNWRHAFNTAQCMFAALKAGKIQNKLTDLEILALLIAALSHDLDHRGVNNSYIQRSEHPLAQLYCHSIMEHHHFDQCLMILNSPGNQILSGLSIEEYKTTLKIIKQAILATDLALYIKRVGEFFELIRKNQFNLEDPHQKELFLAMLMTACDLSAITKPWPIQQRIAELVATEFFDQGDRERKELNIEPTDLMNREKKNKIPSMQVGFIDAICLQLYEALTHVSEDCFPLLDGCRKNRQKWQALAEQQSR

SEQ ID NO: 460 - protein, 569 aa, Artificial Sequence
  source: /note="Description of Artificial Sequence: Synthetic polypeptide"
MVSKGAELFTGIVPILIELNGDVNGHKFSVSGEGEGDATYGKLTLKFICTTGKLPVPWPTLVTTLSYGVQCFSRYPDHMKQHDFFKSAMPEGYIQERTIFFEDDGNYKSRAEVKFEGDTLVNRIELTGTDFKEDGNILGNKMEYNYNAHNVYIMTDKAKNGIKVNFKIRHNIEDGSVQLADHYQQNTPIGDGPVLLPDNHYLSTQSALSKDPNEKRDHMIYFGFVTAAAITHGMDELYKGSEETRELQSLAAAVVPSAQTLKITDFSFSDFELSDLETALCTIRMFTDLNLVQNFQMKHEVLCRWILSVKKNYRKNVAYHNWRHAFNTAQCMFAALKAGKIQNKLTDLEILALLIAALSHDLDHRGVNNSYIQRSEHPLAQLYCHSIMEHHHFDQCLMILNSPGNQILSGLSIEEYKTTLKIIKQAILATDLALYIKRIGEFFELIRKNQFNLEDPHQKELFLAMLMTACDLSAITKPWPIQQRIAELVATEFFDQGDRERKELNIEPTDLMNREKKNKIPSMQVGFIDAICLQLYEALTHVSEDCFPLLDGCRKNRQKWQALAEQQSR

SEQ ID NO: 461 - protein, 569 aa, Artificial Sequence
  source: /note="Description of Artificial Sequence: Synthetic polypeptide"
MVSKGAELFTGIVPILIELNGDVNGHKFSVSGEGEGDATYGKLTLKFICTTGKLPVPWPTLVTTLSYGVQCFSRYPDHMKQHDFFKSAMPEGYIQERTIFFEDDGNYKSRAEVKFEGDTLVNRIELTGTDFKEDGNILGNKMEYNYNAHNVYIMTDKAKNGIKVNFKIRHNIEDGSVQLADHYQQNTPIGDGPVLLPDNHYLSTQSALSKDPNEKRDHMIYFGFVTAAAITHGMDELYKGSEETRELQSLAAAVVPSAQTLKITDFSFSDFELSDLETALCTIRMFTDLNLVQNFQMKHEVLCRWILSVKKNYRKNVAYHNWRHAFNTAQCMFAALKAGKIQNKLTDLEILALLIAALSHDLDHRGVNNSYIQRSEHPLAQLYCHSIMEHHHFDQCLMILNSPGNQILSGLSIEEYKTTLKIIKQAILATDLALYIKRCGEFFELIRKNQFNLEDPHQKELFLAMLMTACDLSAITKPWPIQQRIAELVATEFFDQGDRERKELNIEPTDLMNREKKNKIPSMQVGFIDAICLQLYEALTHVSEDCFPLLDGCRKNRQKWQALAEQQSR

SEQ ID NO: 462 - protein, 569 aa, Artificial Sequence
  source: /note="Description of Artificial Sequence: Synthetic polypeptide"
MVSKGAELFTGIVPILIELNGDVNGHKFSVSGEGEGDATYGKLTLKFICTTGKLPVPWPTLVTTLSYGVQCFSRYPDHMKQHDFFKSAMPEGYIQERTIFFEDDGNYKSRAEVKFEGDTLVNRIELTGTDFKEDGNILGNKMEYNYNAHNVYIMTDKAKNGIKVNFKIRHNIEDGSVQLADHYQQNTPIGDGPVLLPDNHYLSTQSALSKDPNEKRDHMIYFGFVTAAAITHGMDELYKGSEETRELQSLAAAVVPSAQTLKITDFSFSDFELSDLETALCTIRMFTDLNLVQNFQMKHEVLCRWILSVKKNYRKNVAYHNWRHAFNTAQCMFAALKAGKIQNKLTDLEILALLIAALSHDLDHRGVNNSYIQRSEHPLAQLYCHSIMEHHHFDQCLMILNSPGNQILSGLSIEEYKTTLKIIKQAILATDLALYIKRYGEFFELIRKNQFNLEDPHQKELFLAMLMTACDLSAITKPWPIQQRIAELVATEFFDQGDRERKELNIEPTDLMNREKKNKIPSMQVGFIDAICLQLYEALTHVSEDCFPLLDGCRKNRQKWQALAEQQSR

SEQ ID NO: 463 - protein, 569 aa, Artificial Sequence
  source: /note="Description of Artificial Sequence: Synthetic polypeptide"
MVSKGAELFTGIVPILIELNGDVNGHKFSVSGEGEGDATYGKLTLKFICTTGKLPVPWPTLVTTLSYGVQCFSRYPDHMKQHDFFKSAMPEGYIQERTIFFEDDGNYKSRAEVKFEGDTLVNRIELTGTDFKEDGNILGNKMEYNYNAHNVYIMTDKAKNGIKVNFKIRHNIEDGSVQLADHYQQNTPIGDGPVLLPDNHYLSTQSALSKDPNEKRDHMIYFGFVTAAAITHGMDELYKGSEETRELQSLAAAVVPSAQTLKITDFSFSDFELSDLETALCTIRMFTDLNLVQNFQMKHEVLCRWILSVKKNYRKNVAYHNWRHAFNTAQCMFAALKAGKIQNKLTDLEILALLIAALSHDLDHRGVNNSYIQRSEHPLAQLYCHSIMEHHHFDQCLMILNSPGNQILSGLSIEEYKTTLKIIKQAILATDLALYIKRHGEFFELIRKNQFNLEDPHQKELFLAMLMTACDLSAITKPWPIQQRIAELVATEFFDQGDRERKELNIEPTDLMNREKKNKIPSMQVGFIDAICLQLYEALTHVSEDCFPLLDGCRKNRQKWQALAEQQSR

SEQ ID NO: 464 - protein, 569 aa, Artificial Sequence
  source: /note="Description of Artificial Sequence: Synthetic polypeptide"
MVSKGAELFTGIVPILIELNGDVNGHKFSVSGEGEGDATYGKLTLKFICTTGKLPVPWPTLVTTLSYGVQCFSRYPDHMKQHDFFKSAMPEGYIQERTIFFEDDGNYKSRAEVKFEGDTLVNRIELTGTDFKEDGNILGNKMEYNYNAHNVYIMTDKAKNGIKVNFKIRHNIEDGSVQLADHYQQNTPIGDGPVLLPDNHYLSTQSALSKDPNEKRDHMIYFGFVTAAAITHGMDELYKGSEETRELQSLAAAVVPSAQTLKITDFSFSDFELSDLETALCTIRMFTDLNLVQNFQMKHEVLCRWILSVKKNYRKNVAYHNWRHAFNTAQCMFAALKAGKIQNKLTDLEILALLIAALSHDLDHRGVNNSYIQRSEHPLAQLYCHSIMEHHHFDQCLMILNSPGNQILSGLSIEEYKTTLKIIKQAILATDLALYIKRNGEFFELIRKNQFNLEDPHQKELFLAMLMTACDLSAITKPWPIQQRIAELVATEFFDQGDRERKELNIEPTDLMNREKKNKIPSMQVGFIDAICLQLYEALTHVSEDCFPLLDGCRKNRQKWQALAEQQSR

SEQ ID NO: 465 - protein, 569 aa, Artificial Sequence
  source: /note="Description of Artificial Sequence: Synthetic polypeptide"
MVSKGAELFTGIVPILIELNGDVNGHKFSVSGEGEGDATYGKLTLKFICTTGKLPVPWPTLVTTLSYGVQCFSRYPDHMKQHDFFKSAMPEGYIQERTIFFEDDGNYKSRAEVKFEGDTLVNRIELTGTDFKEDGNILGNKMEYNYNAHNVYIMTDKAKNGIKVNFKIRHNIEDGSVQLADHYQQNTPIGDGPVLLPDNHYLSTQSALSKDPNEKRDHMIYFGFVTAAAITHGMDELYKGSEETRELQSLAAAVVPSAQTLKITDFSFSDFELSDLETALCTIRMFTDLNLVQNFQMKHEVLCRWILSVKKNYRKNVAYHNWRHAFNTAQCMFAALKAGKIQNKLTDLEILALLIAALSHDLDHRGVNNSYIQRSEHPLAQLYCHSIMEHHHFDQCLMILNSPGNQILSGLSIEEYKTTLKIIKQAILATDLALYIKRDGEFFELIRKNQFNLEDPHQKELFLAMLMTACDLSAITKPWPIQQRIAELVATEFFDQGDRERKELNIEPTDLMNREKKNKIPSMQVGFIDAICLQLYEALTHVSEDCFPLLDGCRKNRQKWQALAEQQSR

SEQ ID NO: 466 - protein, 569 aa, Artificial Sequence
  source: /note="Description of Artificial Sequence: Synthetic polypeptide"
MVSKGAELFTGIVPILIELNGDVNGHKFSVSGEGEGDATYGKLTLKFICTTGKLPVPWPTLVTTLSYGVQCFSRYPDHMKQHDFFKSAMPEGYIQERTIFFEDDGNYKSRAEVKFEGDTLVNRIELTGTDFKEDGNILGNKMEYNYNAHNVYIMTDKAKNGIKVNFKIRHNIEDGSVQLADHYQQNTPIGDGPVLLPDNHYLSTQSALSKDPNEKRDHMIYFGFVTAAAITHGMDELYKGSEETRELQSLAAAVVPSAQTLKITDFSFSDFELSDLETALCTIRMFTDLNLVQNFQMKHEVLCRWILSVKKNYRKNVAYHNWRHAFNTAQCMFAALKAGKIQNKLTDLEILALLIAALSHDLDHRGVNNSYIQRSEHPLAQLYCHSIMEHHHFDQCLMILNSPGNQILSGLSIEEYKTTLKIIKQAILATDLALYIKRTGEFFELIRKNQFNLEDPHQKELFLAMLMTACDLSAITKPWPIQQRIAELVATEFFDQGDRERKELNIEPTDLMNREKKNKIPSMQVGFIDAICLQLYEALTHVSEDCFPLLDGCRKNRQKWQALAEQQSR

SEQ ID NO: 467 - DNA, 1704 bp, Artificial Sequence
  source: /note="Description of Artificial Sequence: Synthetic polynucleotide"
atggaagaaacaagagagctacagtcgttagcggctgctgtggtgccatctgcccagacccttaaaattactgactttagcttcagtgactttgagctgtctgatctggaaacagcactgtgtacaattcggatgtttactgacctcaaccttgtgcagaacttccagatgaaacatgaggttctttgcagatggattttaagtgttaagaagaattatcggaagaatgttgcctatcataattggagacatgcctttaatacagctcagtgcatgtttgctgctctaaaagcaggcaaaattcagaacaagctgactgacctggagatacttgcattgctgattgctgcactaagccacgatttggatcaccgtggtgtgaataactcttacatacagcgaagtgaacatccacttgcccagctttactgccattcaatcatggaacaccatcattttgaccagtgcctgatgattcttaatagtccaggcaatcagattctcagtggcctctccattgaagaatataagaccacgttgaaaataatcaagcaagctattttagctacagacctagcactgtacattaagaggggcggagaattttttgaacttataagaaaaaatcaattcaatttggaagatcctcatcaaaaggagttgtttttggcaatgctgatgacagcttgtgatctttctgcaattacaaaaccctggcctattcaacaacggatagcagaacttgtagcaactgaattttttgatcaaggagacagagagagaaaagaactcaacatagaacccactgatctaatgaacagggagaagaaaaacaaaatcccaagtatgcaagttgggttcatagatgccatctgcttgcaactgtatgaggccctgacccacgtgtcagaggactgtttccctttgctagatggctgcagaaagaacaggcagaaatggcaggcccttgcagaacagcagagtggtgtgagcaagggcgccgagctgttcaccggcatcgtgcccatcctgatcgagctgaatggcgatgtgaatggccacaagttcagcgtgagcggcgagggcgagggcgatgccacctacggcaagctgaccctgaagttcatctgcaccaccggcaagctgcctgtgccctggcccaccctggtgaccaccctgagctacggcgtgcagtgcttctcacgctaccccgatcacatgaagcagcacgacttcttcaagagcgccatgcctgagggctacatccaggagcgcaccatcttcttcgaggatgacggcaactacaagtcgcgcgccgaggtgaagttcgagggcgataccctggtgaatcgcatcgagctgaccggcaccgatttcaaggaggatggcaacatcctgggcaataagatggagtacaactacaacgcccacaatgtgtacatcatgaccgacaaggccaagaatggcatcaaggtgaacttcaagatccgccacaacatcgaggatggcagcgtgcagctggccgaccactaccagcagaatacccccatcggcgatggccctgtgctgctgcccgataaccactacctgtccacccagagcgccctgtccaaggaccccaacgagaagcgcgatcacatgatctacttcggcttcgtgaccgccgccgccatcacccacggcatggatgagctgtacaagtga

SEQ ID NO: 468 - DNA, 1704 bp, Artificial Sequence
  source: /note="Description of Artificial Sequence: Synthetic polynucleotide"
atggaagaaacaagagagctacagtcgttagcggctgctgtggtgccatctgcccagacccttaaaattactgactttagcttcagtgactttgagctgtctgatctggaaacagcactgtgtacaattcggatgtttactgacctcaaccttgtgcagaacttccagatgaaacatgaggttctttgcagatggattttaagtgttaagaagaattatcggaagaatgttgcctatcataattggagacatgcctttaatacagctcagtgcatgtttgctgctctaaaagcaggcaaaattcagaacaagctgactgacctggagatacttgcattgctgattgctgcactaagccacgatttggatcaccgtggtgtgaataactcttacatacagcgaagtgaacatccacttgcccagctttactgccattcaatcatggaacaccatcattttgaccagtgcctgatgattcttaatagtccaggcaatcagattctcagtggcctctccattgaagaatataagaccacgttgaaaataatcaagcaagctattttagctacagacctagcactgtacattaagagggcgggagaattttttgaacttataagaaaaaatcaattcaatttggaagatcctcatcaaaaggagttgtttttggcaatgctgatgacagcttgtgatctttctgcaattacaaaaccctggcctattcaacaacggatagcagaacttgtagcaactgaattttttgatcaaggagacagagagagaaaagaactcaacatagaacccactgatctaatgaacagggagaagaaaaacaaaatcccaagtatgcaagttgggttcatagatgccatctgcttgcaactgtatgaggccctgacccacgtgtcagaggactgtttccctttgctagatggctgcagaaagaacaggcagaaatggcaggcccttgcagaacagcagagtggtgtgagcaagggcgccgagctgttcaccggcatcgtgcccatcctgatcgagctgaatggcgatgtgaatggccacaagttcagcgtgagcggcgagggcgagggcgatgccacctacggcaagctgaccctgaagttcatctgcaccaccggcaagctgcctgtgccctggcccaccctggtgaccaccctgagctacggcgtgcagtgcttctcacgctaccccgatcacatgaagcagcacgacttcttcaagagcgccatgcctgagggctacatccaggagcgcaccatcttcttcgaggatgacggcaactacaagtcgcgcgccgaggtgaagttcgagggcgataccctggtgaatcgcatcgagctgaccggcaccgatttcaaggaggatggcaacatcctgggcaataagatggagtacaactacaacgcccacaatgtgtacatcatgaccgacaaggccaagaatggcatcaaggtgaacttcaagatccgccacaacatcgaggatggcagcgtgcagctggccgaccactaccagcagaatacccccatcggcgatggccctgtgctgctgcccgataaccactacctgtccacccagagcgccctgtccaaggaccccaacgagaagcgcgatcacatgatctacttcggcttcgtgaccgccgccgccatcacccacggcatggatgagctgtacaagtga

SEQ ID NO: 469 - DNA, 1704 bp, Artificial Sequence
  source: /note="Description of Artificial Sequence: Synthetic polynucleotide"
atggaagaaacaagagagctacagtcgttagcggctgctgtggtgccatctgcccagacccttaaaattactgactttagcttcagtgactttgagctgtctgatctggaaacagcactgtgtacaattcggatgtttactgacctcaaccttgtgcagaacttccagatgaaacatgaggttctttgcagatggattttaagtgttaagaagaattatcggaagaatgttgcctatcataattggagacatgcctttaatacagctcagtgcatgtttgctgctctaaaagcaggcaaaattcagaacaagctgactgacctggagatacttgcattgctgattgctgcactaagccacgatttggatcaccgtggtgtgaataactcttacatacagcgaagtgaacatccacttgcccagctttactgccattcaatcatggaacaccatcattttgaccagtgcctgatgattcttaatagtccaggcaatcagattctcagtggcctctccattgaagaatataagaccacgttgaaaataatcaagcaagctattttagctacagacctagcactgtacattaagagggtgggagaattttttgaacttataagaaaaaatcaattcaatttggaagatcctcatcaaaaggagttgtttttggcaatgctgatgacagcttgtgatctttctgcaattacaaaaccctggcctattcaacaacggatagcagaacttgtagcaactgaattttttgatcaaggagacagagagagaaaagaactcaacatagaacccactgatctaatgaacagggagaagaaaaacaaaatcccaagtatgcaagttgggttcatagatgccatctgcttgcaactgtatgaggccctgacccacgtgtcagaggactgtttccctttgctagatggctgcagaaagaacaggcagaaatggcaggcccttgcagaacagcagagtggtgtgagcaagggcgccgagctgttcaccggcatcgtgcccatcctgatcgagctgaatggcgatgtgaatggccacaagttcagcgtgagcggcgagggcgagggcgatgccacctacggcaagctgaccctgaagttcatctgcaccaccggcaagctgcctgtgccctggcccaccctggtgaccaccctgagctacggcgtgcagtgcttctcacgctaccccgatcacatgaagcagcacgacttcttcaagagcgccatgcctgagggctacatccaggagcgcaccatcttcttcgaggatgacggcaactacaagtcgcgcgccgaggtgaagttcgagggcgataccctggtgaatcgcatcgagctgaccggcaccgatttcaaggaggatggcaacatcctgggcaataagatggagtacaactacaacgcccacaatgtgtacatcatgaccgacaaggccaagaatggcatcaaggtgaacttcaagatccgccacaacatcgaggatggcagcgtgcagctggccgaccactaccagcagaatacccccatcggcgatggccctgtgctgctgcccgataaccactacctgtccacccagagcgccctgtccaaggaccccaacgagaagcgcgatcacatgatctacttcggcttcgtgaccgccgccgccatcacccacggcatggatgagctgtacaagtga

SEQ ID NO: 470 - DNA, 1704 bp, Artificial Sequence
  source: /note="Description of Artificial Sequence: Synthetic polynucleotide"
atggaagaaacaagagagctacagtcgttagcggctgctgtggtgccatctgcccagacccttaaaattactgactttagcttcagtgactttgagctgtctgatctggaaacagcactgtgtacaattcggatgtttactgacctcaaccttgtgcagaacttccagatgaaacatgaggttctttgcagatggattttaagtgttaagaagaattatcggaagaatgttgcctatcataattggagacatgcctttaatacagctcagtgcatgtttgctgctctaaaagcaggcaaaattcagaacaagctgactgacctggagatacttgcattgctgattgctgcactaagccacgatttggatcaccgtggtgtgaataactcttacatacagcgaagtgaacatccacttgcccagctttactgccattcaatcatggaacaccatcattttgaccagtgcctgatgattcttaatagtccaggcaatcagattctcagtggcctctccattgaagaatataagaccacgttgaaaataatcaagcaagctattttagctacagacctagcactgtacattaagaggattggagaattttttgaacttataagaaaaaatcaattcaatttggaagatcctcatcaaaaggagttgtttttggcaatgctgatgacagcttgtgatctttctgcaattacaaaaccctggcctattcaacaacggatagcagaacttgtagcaactgaattttttgatcaaggagacagagagagaaaagaactcaacatagaacccactgatctaatgaacagggagaagaaaaacaaaatcccaagtatgcaagttgggttcatagatgccatctgcttgcaactgtatgaggccctgacccacgtgtcagaggactgtttccctttgctagatggctgcagaaagaacaggcagaaatggcaggcccttgcagaacagcagagtggtgtgagcaagggcgccgagctgttcaccggcatcgtgcccatcctgatcgagctgaatggcgatgtgaatggccacaagttcagcgtgagcggcgagggcgagggcgatgccacctacggcaagctgaccctgaagttcatctgcaccaccggcaagctgcctgtgccctggcccaccctggtgaccaccctgagctacggcgtgcagtgcttctcacgctaccccgatcacatgaagcagcacgacttcttcaagagcgccatgcctgagggctacatccaggagcgcaccatcttcttcgaggatgacggcaactacaagtcgcgcgccgaggtgaagttcgagggcgataccctggtgaatcgcatcgagctgaccggcaccgatttcaaggaggatggcaacatcctgggcaataagatggagtacaactacaacgcccacaatgtgtacatcatgaccgacaaggccaagaatggcatcaaggtgaacttcaagatccgccacaacatcgaggatggcagcgtgcagctggccgaccactaccagcagaatacccccatcggcgatggccctgtgctgctgcccgataaccactacctgtccacccagagcgccctgtccaaggaccccaacgagaagcgcgatcacatgatctacttcggcttcgtgaccgccgccgccatcacccacggcatggatgagctgtacaagtga

SEQ ID NO: 471 - DNA, 1704 bp, Artificial Sequence
  source: /note="Description of Artificial Sequence: Synthetic polynucleotide"
atggaagaaacaagagagctacagtcgttagcggctgctgtggtgccatctgcccagacccttaaaattactgactttagcttcagtgactttgagctgtctgatctggaaacagcactgtgtacaattcggatgtttactgacctcaaccttgtgcagaacttccagatgaaacatgaggttctttgcagatggattttaagtgttaagaagaattatcggaagaatgttgcctatcataattggagacatgcctttaatacagctcagtgcatgtttgctgctctaaaagcaggcaaaattcagaacaagctgactgacctggagatacttgcattgctgattgctgcactaagccacgatttggatcaccgtggtgtgaataactcttacatacagcgaagtgaacatccacttgcccagctttactgccattcaatcatggaacaccatcattttgaccagtgcctgatgattcttaatagtccaggcaatcagattctcagtggcctctccattgaagaatataagaccacgttgaaaataatcaagcaagctattttagctacagacctagcactgtacattaagaggccgggagaattttttgaacttataagaaaaaatcaattcaatttggaagatcctcatcaaaaggagttgtttttggcaatgctgatgacagcttgtgatctttctgcaattacaaaaccctggcctattcaacaacggatagcagaacttgtagcaactgaattttttgatcaaggagacagagagagaaaagaactcaacatagaacccactgatctaatgaacagggagaagaaaaacaaaatcccaagtatgcaagttgggttcatagatgccatctgcttgcaactgtatgaggccctgacccacgtgtcagaggactgtttccctttgctagatggctgcagaaagaacaggcagaaatggcaggcccttgcagaacagcagagtggtgtgagcaagggcgccgagctgttcaccggcatcgtgcccatcctgatcgagctgaatggcgatgtgaatggccacaagttcagcgtgagcggcgagggcgagggcgatgccacctacggcaagctgaccctgaagttcatctgcaccaccggcaagctgcctgtgccctggcccaccctggtgaccaccctgagctacggcgtgcagtgcttctcacgctaccccgatcacatgaagcagcacgacttcttcaagagcgccatgcctgagggctacatccaggagcgcaccatcttcttcgaggatgacggcaactacaagtcgcgcgccgaggtgaagttcgagggcgataccctggtgaatcgcatcgagctgaccggcaccgatttcaaggaggatggcaacatcctgggcaataagatggagtacaactacaacgcccacaatgtgtacatcatgaccgacaaggccaagaatggcatcaaggtgaacttcaagatccgccacaacatcgaggatggcagcgtgcagctggccgaccactaccagcagaatacccccatcggcgatggccctgtgctgctgcccgataaccactacctgtccacccagagcgccctgtccaaggaccccaacgagaagcgcgatcacatgatctacttcggcttcgtgaccgccgccgccatcacccacggcatggatgagctgtacaagtga

SEQ ID NO: 472 - DNA, 1704 bp, Artificial Sequence
  source: /note="Description of Artificial Sequence: Synthetic polynucleotide"
atggaagaaacaagagagctacagtcgttagcggctgctgtggtgccatctgcccagacccttaaaattactgactttagcttcagtgactttgagctgtctgatctggaaacagcactgtgtacaattcggatgtttactgacctcaaccttgtgcagaacttccagatgaaacatgaggttctttgcagatggattttaagtgttaagaagaattatcggaagaatgttgcctatcataattggagacatgcctttaatacagctcagtgcatgtttgctgctctaaaagcaggcaaaattcagaacaagctgactgacctggagatacttgcattgctgattgctgcactaagccacgatttggatcaccgtggtgtgaataactcttacatacagcgaagtgaacatccacttgcccagctttactgccattcaatcatggaacaccatcattttgaccagtgcctgatgattcttaatagtccaggcaatcagattctcagtggcctctccattgaagaatataagaccacgttgaaaataatcaagcaagctattttagctacagacctagcactgtacattaagaggtttggagaattttttgaacttataagaaaaaatcaattcaatttggaagatcctcatcaaaaggagttgtttttggcaatgctgatgacagcttgtgatctttctgcaattacaaaaccctggcctattcaacaacggatagcagaacttgtagcaactgaattttttgatcaaggagacagagagagaaaagaactcaacatagaacccactgatctaatgaacagggagaagaaaaacaaaatcccaagtatgcaagttgggttcatagatgccatctgcttgcaactgtatgaggccctgacccacgtgtcagaggactgtttccctttgctagatggctgcagaaagaacaggcagaaatggcaggcccttgcagaacagcagagtggtgtgagcaagggcgccgagctgttcaccggcatcgtgcccatcctgatcgagctgaatggcgatgtgaatggccacaagttcagcgtgagcggcgagggcgagggcgatgccacctacggcaagctgaccctgaagttcatctgcaccaccggcaagctgcctgtgccctggcccaccctggtgaccaccctgagctacggcgtgcagtgcttctcacgctaccccgatcacatgaagcagcacgacttcttcaagagcgccatgcctgagggctacatccaggagcgcaccatcttcttcgaggatgacggcaactacaagtcgcgcgccgaggtgaagttcgagggcgataccctggtgaatcgcatcgagctgaccggcaccgatttcaaggaggatggcaacatcctgggcaataagatggagtacaactacaacgcccacaatgtgtacatcatgaccgacaaggccaagaatggcatcaaggtgaacttcaagatccgccacaacatcgaggatggcagcgtgcagctggccgaccactaccagcagaatacccccatcggcgatggccctgtgctgctgcccgataaccactacctgtccacccagagcgccctgtccaaggaccccaacgagaagcgcgatcacatgatctacttcggcttcgtgaccgccgccgccatcacccacggcatggatgagctgtacaagtga

SEQ ID NO: 473 - DNA, 1704 bp, Artificial Sequence
  source: /note="Description of Artificial Sequence: Synthetic polynucleotide"
atggaagaaacaagagagctacagtcgttagcggctgctgtggtgccatctgcccagacccttaaaattactgactttagcttcagtgactttgagctgtctgatctggaaacagcactgtgtacaattcggatgtttactgacctcaaccttgtgcagaacttccagatgaaacatgaggttctttgcagatggattttaagtgttaagaagaattatcggaagaatgttgcctatcataattggagacatgcctttaatacagctcagtgcatgtttgctgctctaaaagcaggcaaaattcagaacaagctgactgacctggagatacttgcattgctgattgctgcactaagccacgatttggatcaccgtggtgtgaataactcttacatacagcgaagtgaacatccacttgcccagctttactgccattcaatcatggaacaccatcattttgaccagtgcctgatgattcttaatagtccaggcaatcagattctcagtggcctctccattgaagaatataagaccacgttgaaaataatcaagcaagctattttagctacagacctagcactgtacattaagaggtggggagaattttttgaacttataagaaaaaatcaattcaatttggaagatcctcatcaaaaggagttgtttttggcaatgctgatgacagcttgtgatctttctgcaattacaaaaccctggcctattcaacaacggatagcagaacttgtagcaactgaattttttgatcaaggagacagagagagaaaagaactcaacatagaacccactgatctaatgaacagggagaagaaaaacaaaatcccaagtatgcaagttgggttcatagatgccatctgcttgcaactgtatgaggccctgacccacgtgtcagaggactgtttccctttgctagatggctgcagaaagaacaggcagaaatggcaggcccttgcagaacagcagagtggtgtgagcaagggcgccgagctgttcaccggcatcgtgcccatcctgatcgagctgaatggcgatgtgaatggccacaagttcagcgtgagcggcgagggcgagggcgatgccacctacggcaagctgaccctgaagttcatctgcaccaccggcaagctgcctgtgccctggcccaccctggtgaccaccctgagctacggcgtgcagtgcttctcacgctaccccgatcacatgaagcagcacgacttcttcaagagcgccatgcctgagggctacatccaggagcgcaccatcttcttcgaggatgacggcaactacaagtcgcgcgccgaggtgaagttcgagggcgataccctggtgaatcgcatcgagctgaccggcaccgatttcaaggaggatggcaacatcctgggcaataagatggagtacaactacaacgcccacaatgtgtacatcatgaccgacaaggccaagaatggcatcaaggtgaacttcaagatccgccacaacatcgaggatggcagcgtgcagctggccgaccactaccagcagaatacccccatcggcgatggccctgtgctgctgcccgataaccactacctgtccacccagagcgccctgtccaaggaccccaacgagaagcgcgatcacatgatctacttcggcttcgtgaccgccgccgccatcacccacggcatggatgagctgtacaagtga

SEQ ID NO: 474 - DNA, 1704 bp, Artificial Sequence
  source: /note="Description of Artificial Sequence: Synthetic polynucleotide"
atggaagaaacaagagagctacagtcgttagcggctgctgtggtgccatctgcccagacccttaaaattactgactttagcttcagtgactttgagctgtctgatctggaaacagcactgtgtacaattcggatgtttactgacctcaaccttgtgcagaacttccagatgaaacatgaggttctttgcagatggattttaagtgttaagaagaattatcggaagaatgttgcctatcataattggagacatgcctttaatacagctcagtgcatgtttgctgctctaaaagcaggcaaaattcagaacaagctgactgacctggagatacttgcattgctgattgctgcactaagccacgatttggatcaccgtggtgtgaataactcttacatacagcgaagtgaacatccacttgcccagctttactgccattcaatcatggaacaccatcattttgaccagtgcctgatgattcttaatagtccaggcaatcagattctcagtggcctctccattgaagaatataagaccacgttgaaaataatcaagcaagctattttagctacagacctagcactgtacattaagaggtatggagaattttttgaacttataagaaaaaatcaattcaatttggaagatcctcatcaaaaggagttgtttttggcaatgctgatgacagcttgtgatctttctgcaattacaaaaccctggcctattcaacaacggatagcagaacttgtagcaactgaattttttgatcaaggagacagagagagaaaagaactcaacatagaacccactgatctaatgaacagggagaagaaaaacaaaatcccaagtatgcaagttgggttcatagatgccatctgcttgcaactgtatgaggccctgacccacgtgtcagaggactgtttccctttgctagatggctgcagaaagaacaggcagaaatggcaggcccttgcagaacagcagagtggtgtgagcaagggcgccgagctgttcaccggcatcgtgcccatcctgatcgagctgaatggcgatgtgaatggccacaagttcagcgtgagcggcgagggcgagggcgatgccacctacggcaagctgaccctgaagttcatctgcaccaccggcaagctgcctgtgccctggcccaccctggtgaccaccctgagctacggcgtgcagtgcttctcacgctaccccgatcacatgaagcagcacgacttcttcaagagcgccatgcctgagggctacatccaggagcgcaccatcttcttcgaggatgacggcaactacaagtcgcgcgccgaggtgaagttcgagggcgataccctggtgaatcgcatcgagctgaccggcaccgatttcaaggaggatggcaacatcctgggcaataagatggagtacaactacaacgcccacaatgtgtacatcatgaccgacaaggccaagaatggcatcaaggtgaacttcaagatccgccacaacatcgaggatggcagcgtgcagctggccgaccactaccagcagaatacccccatcggcgatggccctgtgctgctgcccgataaccactacctgtccacccagagcgccctgtccaaggaccccaacgagaagcgcgatcacatgatctacttcggcttcgtgaccgccgccgccatcacccacggcatggatgagctgtacaagtga

SEQ ID NO: 475 - DNA, 1704 bp, Artificial Sequence
  source: /note="Description of Artificial Sequence: Synthetic polynucleotide"
atggaagaaacaagagagctacagtcgttagcggctgctgtggtgccatctgcccagacccttaaaattactgactttagcttcagtgactttgagctgtctgatctggaaacagcactgtgtacaattcggatgtttactgacctcaaccttgtgcagaacttccagatgaaacatgaggttctttgcagatggattttaagtgttaagaagaattatcggaagaatgttgcctatcataattggagacatgcctttaatacagctcagtgcatgtttgctgctctaaaagcaggcaaaattcagaacaagctgactgacctggagatacttgcattgctgattgctgcactaagccacgatttggatcaccgtggtgtgaataactcttacatacagcgaagtgaacatccacttgcccagctttactgccattcaatcatggaacaccatcattttgaccagtgcctgatgattcttaatagtccaggcaatcagattctcagtggcctctccattgaagaatataagaccacgttgaaaataatcaagcaagctattttagctacagacctagcactgtacattaagaggcatggagaattttttgaacttataagaaaaaatcaattcaatttggaagatcctcatcaaaaggagttgtttttggcaatgctgatgacagcttgtgatctttctgcaattacaaaaccctggcctattcaacaacggatagcagaacttgtagcaactgaattttttgatcaaggagacagagagagaaaagaactcaacatagaacccactgatctaatgaacagggagaagaaaaacaaaatcccaagtatgcaagttgggttcatagatgccatctgcttgcaactgtatgaggccctgacccacgtgtcagaggactgtttccctttgctagatggctgcagaaagaacaggcagaaatggcaggcccttgcagaacagcagagtggtgtgagcaagggcgccgagctgttcaccggcatcgtgcccatcctgatcgagctgaatggcgatgtgaatggccacaagttcagcgtgagcggcgagggcgagggcgatgccacctacggcaagctgaccctgaagttcatctgcaccaccggcaagctgcctgtgccctggcccaccctggtgaccaccctgagctacggcgtgcagtgcttctcacgctaccccgatcacatgaagcagcacgacttcttcaagagcgccatgcctgagggctacatccaggagcgcaccatcttcttcgaggatgacggcaactacaagtcgcgcgccgaggtgaagttcgagggcgataccctggtgaatcgcatcgagctgaccggcaccgatttcaaggaggatggcaacatcctgggcaataagatggagtacaactacaacgcccacaatgtgtacatcatgaccgacaaggccaagaatggcatcaaggtgaacttcaagatccgccacaacatcgaggatggcagcgtgcagctggccgaccactaccagcagaatacccccatcggcgatggccctgtgctgctgcccgataaccactacctgtccacccagagcgccctgtccaaggaccccaacgagaagcgcgatcacatgatctacttcggcttcgtgaccgccgccgccatcacccacggcatggatgagctgtacaagtga

SEQ ID NO: 476 - DNA, 1704 bp, Artificial Sequence
  source: /note="Description of Artificial Sequence: Synthetic polynucleotide"
atggaagaaacaagagagctacagtcgttagcggctgctgtggtgccatctgcccagacccttaaaattactgactttagcttcagtgactttgagctgtctgatctggaaacagcactgtgtacaattcggatgtttactgacctcaaccttgtgcagaacttccagatgaaacatgaggttctttgcagatggattttaagtgttaagaagaattatcggaagaatgttgcctatcataattggagacatgcctttaatacagctcagtgcatgtttgctgctctaaaagcaggcaaaattcagaacaagctgactgacctggagatacttgcattgctgattgctgcactaagccacgatttggatcaccgtggtgtgaataactcttacatacagcgaagtgaacatccacttgcccagctttactgccattcaatcatggaacaccatcattttgaccagtgcctgatgattcttaatagtccaggcaatcagattctcagtggcctctccattgaagaatataagaccacgttgaaaataatcaagcaagctattttagctacagacctagcactgtacattaagaggagcggagaattttttgaacttataagaaaaaatcaattcaatttggaagatcctcatcaaaaggagttgtttttggcaatgctgatgacagcttgtgatctttctgcaattacaaaaccctggcctattcaacaacggatagcagaacttgtagcaactgaattttttgatcaaggagacagagagagaaaagaactcaacatagaacccactgatctaatgaacagggagaagaaaaacaaaatcccaagtatgcaagttgggttcatagatgccatctgcttgcaactgtatgaggccctgacccacgtgtcagaggactgtttccctttgctagatggctgcagaaagaacaggcagaaatggcaggcccttgcagaacagcagagtggtgtgagcaagggcgccgagctgttcaccggcatcgtgcccatcctgatcgagctgaatggcgatgtgaatggccacaagttcagcgtgagcggcgagggcgagggcgatgccacctacggcaagctgaccctgaagttcatctgcaccaccggcaagctgcctgtgccctggcccaccctggtgaccaccctgagctacggcgtgcagtgcttctcacgctaccccgatcacatgaagcagcacgacttcttcaagagcgccatgcctgagggctacatccaggagcgcaccatcttcttcgaggatgacggcaactacaagtcgcgcgccgaggtgaagttcgagggcgataccctggtgaatcgcatcgagctgaccggcaccgatttcaaggaggatggcaacatcctgggcaataagatggagtacaactacaacgcccacaatgtgtacatcatgaccgacaaggccaagaatggcatcaaggtgaacttcaagatccgccacaacatcgaggatggcagcgtgcagctggccgaccactaccagcagaatacccccatcggcgatggccctgtgctgctgcccgataaccactacctgtccacccagagcgccctgtccaaggaccccaacgagaagcgcgatcacatgatctacttcggcttcgtgaccgccgccgccatcacccacggcatggatgagctgtacaagtga

SEQ ID NO: 477 - DNA, 1704 bp, Artificial Sequence
  source: /note="Description of Artificial Sequence: Synthetic polynucleotide"
atggaagaaacaagagagctacagtcgttagcggctgctgtggtgccatctgcccagacccttaaaattactgactttagcttcagtgactttgagctgtctgatctggaaacagcactgtgtacaattcggatgtttactgacctcaaccttgtgcagaacttccagatgaaacatgaggttctttgcagatggattttaagtgttaagaagaattatcggaagaatgttgcctatcataattggagacatgcctttaatacagctcagtgcatgtttgctgctctaaaagcaggcaaaattcagaacaagctgactgacctggagatacttgcattgctgattgctgcactaagccacgatttggatcaccgtggtgtgaataactcttacatacagcgaagtgaacatccacttgcccagctttactgccattcaatcatggaacaccatcattttgaccagtgcctgatgattcttaatagtccaggcaatcagattctcagtggcctctccattgaagaatataagaccacgttgaaaataatcaagcaagctattttagctacagacctagcactgtacattaagaggaccggagaattttttgaacttataagaaaaaatcaattcaatttggaagatcctcatcaaaaggagttgtttttggcaatgctgatgacagcttgtgatctttctgcaattacaaaaccctggcctattcaacaacggatagcagaacttgtagcaactgaattttttgatcaaggagacagagagagaaaagaactcaacatagaacccactgatctaatgaacagggagaagaaaaacaaaatcccaagtatgcaagttgggttcatagatgccatctgcttgcaactgtatgaggccctgacccacgtgtcagaggactgtttccctttgctagatggctgcagaaagaacaggcagaaatggcaggcccttgcagaacagcagagtggtgtgagcaagggcgccgagctgttcaccggcatcgtgcccatcctgatcgagctgaatggcgatgtgaatggccacaagttcagcgtgagcggcgagggcgagggcgatgccacctacggcaagctgaccctgaagttcatctgcaccaccggcaagctgcctgtgccctggcccaccctggtgaccaccctgagctacggcgtgcagtgcttctcacgctaccccgatcacatgaagcagcacgacttcttcaagagcgccatgcctgagggctacatccaggagcgcaccatcttcttcgaggatgacggcaactacaagtcgcgcgccgaggtgaagttcgagggcgataccctggtgaatcgcatcgagctgaccggcaccgatttcaaggaggatggcaacatcctgggcaataagatggagtacaactacaacgcccacaatgtgtacatcatgaccgacaaggccaagaatggcatcaaggtgaacttcaagatccgccacaacatcgaggatggcagcgtgcagctggccgaccactaccagcagaatacccccatcggcgatggccctgtgctgctgcccgataaccactacctgtccacccagagcgccctgtccaaggaccccaacgagaagcgcgatcacatgatctacttcggcttcgtgaccgccgccgccatcacccacggcatggatgagctgtacaagtga

SEQ ID NO: 478 - DNA, 1704 bp, Artificial Sequence
  source: /note="Description of Artificial Sequence: Synthetic polynucleotide"
atggaagaaacaagagagctacagtcgttagcggctgctgtggtgccatctgcccagacccttaaaattactgactttagcttcagtgactttgagctgtctgatctggaaacagcactgtgtacaattcggatgtttactgacctcaaccttgtgcagaacttccagatgaaacatgaggttctttgcagatggattttaagtgttaagaagaattatcggaagaatgttgcctatcataattggagacatgcctttaatacagctcagtgcatgtttgctgctctaaaagcaggcaaaattcagaacaagctgactgacctggagatacttgcattgctgattgctgcactaagccacgatttggatcaccgtggtgtgaataactcttacatacagcgaagtgaacatccacttgcccagctttactgccattcaatcatggaacaccatcattttgaccagtgcctgatgattcttaatagtccaggcaatcagattctcagtggcctctccattgaagaatataagaccacgttgaaaataatcaagcaagctattttagctacagacctagcactgtacattaagagggatggagaattttttgaacttataagaaaaaatcaattcaatttggaagatcctcatcaaaaggagttgtttttggcaatgctgatgacagcttgtgatctttctgcaattacaaaaccctggcctattcaacaacggatagcagaacttgtagcaactgaattttttgatcaaggagacagagagagaaaagaactcaacatagaacccactgatctaatgaacagggagaagaaaaacaaaatcccaagtatgcaagttgggttcatagatgccatctgcttgcaactgtatgaggccctgacccacgtgtcagaggactgtttccctttgctagatggctgcagaaagaacaggcagaaatggcaggcccttgcagaacagcagagtggtgtgagcaagggcgccgagctgttcaccggcatcgtgcccatcctgatcgagctgaatggcgatgtgaatggccacaagttcagcgtgagcggcgagggcgagggcgatgccacctacggcaagctgaccctgaagttcatctgcaccaccggcaagctgcctgtgccctggcccaccctggtgaccaccctgagctacggcgtgcagtgcttctcacgctaccccgatcacatgaagcagcacgacttcttcaagagcgccatgcctgagggctacatccaggagcgcaccatcttcttcgaggatgacggcaactacaagtcgcgcgccgaggtgaagttcgagggcgataccctggtgaatcgcatcgagctgaccggcaccgatttcaaggaggatggcaacatcctgggcaataagatggagtacaactacaacgcccacaatgtgtacatcatgaccgacaaggccaagaatggcatcaaggtgaacttcaagatccgccacaacatcgaggatggcagcgtgcagctggccgaccactaccagcagaatacccccatcggcgatggccctgtgctgctgcccgataaccactacctgtccacccagagcgccctgtccaaggaccccaacgagaagcgcgatcacatgatctacttcggcttcgtgaccgccgccgccatcacccacggcatggatgagctgtacaagtga

SEQ ID NO: 479 - DNA, 1704 bp, Artificial Sequence
  source: /note="Description of Artificial Sequence: Synthetic polynucleotide"
atggaagaaacaagagagctacagtcgttagcggctgctgtggtgccatctgcccagacccttaaaattactgactttagcttcagtgactttgagctgtctgatctggaaacagcactgtgtacaattcggatgtttactgacctcaaccttgtgcagaacttccagatgaaacatgaggttctttgcagatggattttaagtgttaagaagaattatcggaagaatgttgcctatcataattggagacatgcctttaatacagctcagtgcatgtttgctgctctaaaagcaggcaaaattcagaacaagctgactgacctggagatacttgcattgctgattgctgcactaagccacgatttggatcaccgtggtgtgaataactcttacatacagcgaagtgaacatccacttgcccagctttactgccattcaatcatggaacaccatcattttgaccagtgcctgatgattcttaatagtccaggcaatcagattctcagtggcctctccattgaagaatataagaccacgttgaaaataatcaagcaagctattttagctacagacctagcactgtacattaagagggaaggagaattttttgaacttataagaaaaaatcaattcaatttggaagatcctcatcaaaaggagttgtttttggcaatgctgatgacagcttgtgatctttctgcaattacaaaaccctggcctattcaacaacggatagcagaacttgtagcaactgaattttttgatcaaggagacagagagagaaaagaactcaacatagaacccactgatctaatgaacagggagaagaaaaacaaaatcccaagtatgcaagttgggttcatagatgccatctgcttgcaactgtatgaggccctgacccacgtgtcagaggactgtttccctttgctagatggctgcagaaagaacaggcagaaatggcaggcccttgcagaacagcagagtggtgtgagcaagggcgccgagctgttcaccggcatcgtgcccatcctgatcgagctgaatggcgatgtgaatggccacaagttcagcgtgagcggcgagggcgagggcgatgccacctacggcaagctgaccctgaagttcatctgcaccaccggcaagctgcctgtgccctggcccaccctggtgaccaccctgagctacggcgtgcagtgcttctcacgctaccccgatcacatgaagcagcacgacttcttcaagagcgccatgcctgagggctacatccaggagcgcaccatcttcttcgaggatgacggcaactacaagtcgcgcgccgaggtgaagttcgagggcgataccctggtgaatcgcatcgagctgaccggcaccgatttcaaggaggatggcaacatcctgggcaataagatggagtacaactacaacgcccacaatgtgtacatcatgaccgacaaggccaagaatggcatcaaggtgaacttcaagatccgccacaacatcgaggatggcagcgtgcagctggccgaccactaccagcagaatacccccatcggcgatggccctgtgctgctgcccgataaccactacctgtccacccagagcgccctgtccaaggaccccaacgagaagcgcgatcacatgatctacttcggcttcgtgaccgccgccgccatcacccacggcatggatgagctgtacaagtga

SEQ ID NO: 480 - DNA, 1704 bp, Artificial Sequence
  source: /note="Description of Artificial Sequence: Synthetic polynucleotide"
atggaagaaacaagagagctacagtcgttagcggctgctgtggtgccatctgcccagacccttaaaattactgactttagcttcagtgactttgagctgtctgatctggaaacagcactgtgtacaattcggatgtttactgacctcaaccttgtgcagaacttccagatgaaacatgaggttctttgcagatggattttaagtgttaagaagaattatcggaagaatgttgcctatcataattggagacatgcctttaatacagctcagtgcatgtttgctgctctaaaagcaggcaaaattcagaacaagctgactgacctggagatacttgcattgctgattgctgcactaagccacgatttggatcaccgtggtgtgaataactcttacatacagcgaagtgaacatccacttgcccagctttactgccattcaatcatggaacaccatcattttgaccagtgcctgatgattcttaatagtccaggcaatcagattctcagtggcctctccattgaagaatataagaccacgttgaaaataatcaagcaagctattttagctacagacctagcactgtacattaagaggcagggagaattttttgaacttataagaaaaaatcaattcaatttggaagatcctcatcaaaaggagttgtttttggcaatgctgatgacagcttgtgatctttctgcaattacaaaaccctggcctattcaacaacggatagcagaacttgtagcaactgaattttttgatcaaggagacagagagagaaaagaactcaacatagaacccactgatctaatgaacagggagaagaaaaacaaaatcccaagtatgcaagttgggttcatagatgccatctgcttgcaactgtatgaggccctgacccacgtgtcagaggactgtttccctttgctagatggctgcagaaagaacaggcagaaatggcaggcccttgcagaacagcagagtggtgtgagcaagggcgccgagctgttcaccggcatcgtgcccatcctgatcgagctgaatggcgatgtgaatggccacaagttcagcgtgagcggcgagggcgagggcgatgccacctacggcaagctgaccctgaagttcatctgcaccaccggcaagctgcctgtgccctggcccaccctggtgaccaccctgagctacggcgtgcagtgcttctcacgctaccccgatcacatgaagcagcacgacttcttcaagagcgccatgcctgagggctacatccaggagcgcaccatcttcttcgaggatgacggcaactacaagtcgcgcgccgaggtgaagttcgagggcgataccctggtgaatcgcatcgagctgaccggcaccgatttcaaggaggatggcaacatcctgggcaataagatggagtacaactacaacgcccacaatgtgtacatcatgaccgacaaggccaagaatggcatcaaggtgaacttcaagatccgccacaacatcgaggatggcagcgtgcagctggccgaccactaccagcagaatacccccatcggcgatggccctgtgctgctgcccgataaccactacctgtccacccagagcgccctgtccaaggaccccaacgagaagcgcgatcacatgatctacttcggcttcgtgaccgccgccgccatcacccacggcatggatgagctgtacaagtga

SEQ ID NO: 481 - DNA, 1704 bp, Artificial Sequence
  source: /note="Description of Artificial Sequence: Synthetic polynucleotide"
atggaagaaacaagagagctacagtcgttagcggctgctgtggtgccatctgcccagacccttaaaattactgactttagcttcagtgactttgagctgtctgatctggaaacagcactgtgtacaattcggatgtttactgacctcaaccttgtgcagaacttccagatgaaacatgaggttctttgcagatggattttaagtgttaagaagaattatcggaagaatgttgcctatcataattggagacatgcctttaatacagctcagtgcatgtttgctgctctaaaagcaggcaaaattcagaacaagctgactgacctggagatacttgcattgctgattgctgcactaagccacgatttggatcaccgtggtgtgaataactcttacatacagcgaagtgaacatccacttgcccagctttactgccattcaatcatggaacaccatcattttgaccagtgcctgatgattcttaatagtccaggcaatcagattctcagtggcctctccattgaagaatataagaccacgttgaaaataatcaagcaagctattttagctacagacctagcactgtacattaagaggaacggagaattttttgaacttataagaaaaaatcaattcaatttggaagatcctcatcaaaaggagttgtttttggcaatgctgatgacagcttgtgatctttctgcaattacaaaaccctggcctattcaacaacggatagcagaacttgtagcaactgaattttttgatcaaggagacagagagagaaaagaactcaacatagaacccactgatctaatgaacagggagaagaaaaacaaaatcccaagtatgcaagttgggttcatagatgccatctgcttgcaactgtatgaggccctgacccacgtgtcagaggactgtttccctttgctagatggctgcagaaagaacaggcagaaatggcaggcccttgcagaacagcagagtggtgtgagcaagggcgccgagctgttcaccggcatcgtgcccatcctgatcgagctgaatggcgatgtgaatggccacaagttcagcgtgagcggcgagggcgagggcgatgccacctacggcaagctgaccctgaagttcatctgcaccaccggcaagctgcctgtgccctggcccaccctggtgaccaccctgagctacggcgtgcagtgcttctcacgctaccccgatcacatgaagcagcacgacttcttcaagagcgccatgcctgagggctacatccaggagcgcaccatcttcttcgaggatgacggcaactacaagtcgcgcgccgaggtgaagttcgagggcgataccctggtgaatcgcatcgagctgaccggcaccgatttcaaggaggatggcaacatcctgggcaataagatggagtacaactacaacgcccacaatgtgtacatcatgaccgacaaggccaagaatggcatcaaggtgaacttcaagatccgccacaacatcgaggatggcagcgtgcagctggccgaccactaccagcagaatacccccatcggcgatggccctgtgctgctgcccgataaccactacctgtccacccagagcgccctgtccaaggaccccaacgagaagcgcgatcacatgatctacttcggcttcgtgaccgccgccgccatcacccacggcatggatgagctgtacaagtga

SEQ ID NO: 482 - DNA, 1704 bp, Artificial Sequence
  source: /note="Description of Artificial Sequence: Synthetic polynucleotide"
atggaagaaacaagagagctacagtcgttagcggctgctgtggtgccatctgcccagacccttaaaattactgactttagcttcagtgactttgagctgtctgatctggaaacagcactgtgtacaattcggatgtttactgacctcaaccttgtgcagaacttccagatgaaacatgaggttctttgcagatggattttaagtgttaagaagaattatcggaagaatgttgcctatcataattggagacatgcctttaatacagctcagtgcatgtttgctgctctaaaagcaggcaaaattcagaacaagctgactgacctggagatacttgcattgctgattgctgcactaagccacgatttggatcaccgtggtgtgaataactcttacatacagcgaagtgaacatccacttgcccagctttactgccattcaatcatggaacaccatcattttgaccagtgcctgatgattcttaatagtccaggcaatcagattctcagtggcctctccattgaagaatataagaccacgttgaaaataatcaagcaagctattttagctacagacctagcactgtacattaagaggatgggagaattttttgaacttataagaaaaaatcaattcaatttggaagatcctcatcaaaaggagttgtttttggcaatgctgatgacagcttgtgatctttctgcaattacaaaaccctggcctattcaacaacggatagcagaacttgtagcaactgaattttttgatcaaggagacagagagagaaaagaactcaacatagaacccactgatctaatgaacagggagaagaaaaacaaaatcccaagtatgcaagttgggttcatagatgccatctgcttgcaactgtatgaggccctgacccacgtgtcagaggactgtttccctttgctagatggctgcagaaagaacaggcagaaatggcaggcccttgcagaacagcagagtggtgtgagcaagggcgccgagctgttcaccggcatcgtgcccatcctgatcgagctgaatggcgatgtgaatggccacaagttcagcgtgagcggcgagggcgagggcgatgccacctacggcaagctgaccctgaagttcatctgcaccaccggcaagctgcctgtgccctggcccaccctggtgaccaccctgagctacggcgtgcagtgcttctcacgctaccccgatcacatgaagcagcacgacttcttcaagagcgccatgcctgagggctacatccaggagcgcaccatcttcttcgaggatgacggcaactacaagtcgcgcgccgaggtgaagttcgagggcgataccctggtgaatcgcatcgagctgaccggcaccgatttcaaggaggatggcaacatcctgggcaataagatggagtacaactacaacgcccacaatgtgtacatcatgaccgacaaggccaagaatggcatcaaggtgaacttcaagatccgccacaacatcgaggatggcagcgtgcagctggccgaccactaccagcagaatacccccatcggcgatggccctgtgctgctgcccgataaccactacctgtccacccagagcgccctgtccaaggaccccaacgagaagcgcgatcacatgatctacttcggcttcgtgaccgccgccgccatcacccacggcatggatgagctgtacaagtga

SEQ ID NO: 483 - DNA, 1704 bp, Artificial Sequence
  source: /note="Description of Artificial Sequence: Synthetic polynucleotide"
atggaagaaacaagagagctacagtcgttagcggctgctgtggtgccatctgcccagacccttaaaattactgactttagcttcagtgactttgagctgtctgatctggaaacagcactgtgtacaattcggatgtttactgacctcaaccttgtgcagaacttccagatgaaacatgaggttctttgcagatggattttaagtgttaagaagaattatcggaagaatgttgcctatcataattggagacatgcctttaatacagctcagtgcatgtttgctgctctaaaagcaggcaaaattcagaacaagctgactgacctggagatacttgcattgctgattgctgcactaagccacgatttggatcaccgtggtgtgaataactcttacatacagcgaagtgaacatccacttgcccagctttactgccattcaatcatggaacaccatcattttgaccagtgcctgatgattcttaatagtccaggcaatcagattctcagtggcctctccattgaagaatataagaccacgttgaaaataatcaagcaagctattttagctacagacctagcactgtacattaagaggtgcggagaattttttgaacttataagaaaaaatcaattcaatttggaagatcctcatcaaaaggagttgtttttggcaatgctgatgacagcttgtgatctttctgcaattacaaaaccctggcctattcaacaacggatagcagaacttgtagcaactgaattttttgatcaaggagacagagagagaaaagaactcaacatagaacccactgatctaatgaacagggagaagaaaaacaaaatcccaagtatgcaagttgggttcatagatgccatctgcttgcaactgtatgaggccctgacccacgtgtcagaggactgtttccctttgctagatggctgcagaaagaacaggcagaaatggcaggcccttgcagaacagcagagtggtgtgagcaagggcgccgagctgttcaccggcatcgtgcccatcctgatcgagctgaatggcgatgtgaatggccacaagttcagcgtgagcggcgagggcgagggcgatgccacctacggcaagctgaccctgaagttcatctgcaccaccggcaagctgcctgtgccctggcccaccctggtgaccaccctgagctacggcgtgcagtgcttctcacgctaccccgatcacatgaagcagcacgacttcttcaagagcgccatgcctgagggctacatccaggagcgcaccatcttcttcgaggatgacggcaactacaagtcgcgcgccgaggtgaagttcgagggcgataccctggtgaatcgcatcgagctgaccggcaccgatttcaaggaggatggcaacatcctgggcaataagatggagtacaactacaacgcccacaatgtgtacatcatgaccgacaaggccaagaatggcatcaaggtgaacttcaagatccgccacaacatcgaggatggcagcgtgcagctggccgaccactaccagcagaatacccccatcggcgatggccctgtgctgctgcccgataaccactacctgtccacccagagcgccctgtccaaggaccccaacgagaagcgcgatcacatgatctacttcggcttcgtgaccgccgccgccatcacccacggcatggatgagctgtacaagtga

SEQ ID NO: 484 - DNA, 1704 bp, Artificial Sequence
  source: /note="Description of Artificial Sequence: Synthetic polynucleotide"
atggaagaaacaagagagctacagtcgttagcggctgctgtggtgccatctgcccagacccttaaaattactgactttagcttcagtgactttgagctgtctgatctggaaacagcactgtgtacaattcggatgtttactgacctcaaccttgtgcagaacttccagatgaaacatgaggttctttgcagatggattttaagtgttaagaagaattatcggaagaatgttgcctatcataattggagacatgcctttaatacagctcagtgcatgtttgctgctctaaaagcaggcaaaattcagaacaagctgactgacctggagatacttgcattgctgattgctgcactaagccacgatttggatcaccgtggtgtgaataactcttacatacagcgaagtgaacatccacttgcccagctttactgccattcaatcatggaacaccatcattttgaccagtgcctgatgattcttaatagtccaggcaatcagattctcagtggcctctccattgaagaatataagaccacgttgaaaataatcaagcaagctattttagctacagacctagcactgtacattaagaggaaaggagaattttttgaacttataagaaaaaatcaattcaatttggaagatcctcatcaaaaggagttgtttttggcaatgctgatgacagcttgtgatctttctgcaattacaaaaccctggcctattcaacaacggatagcagaacttgtagcaactgaattttttgatcaaggagacagagagagaaaagaactcaacatagaacccactgatctaatgaacagggagaagaaaaacaaaatcccaagtatgcaagttgggttcatagatgccatctgcttgcaactgtatgaggccctgacccacgtgtcagaggactgtttccctttgctagatggctgcagaaagaacaggcagaaatggcaggcccttgcagaacagcagagtggtgtgagcaagggcgccgagctgttcaccggcatcgtgcccatcctgatcgagctgaatggcgatgtgaatggccacaagttcagcgtgagcggcgagggcgagggcgatgccacctacggcaagctgaccctgaagttcatctgcaccaccggcaagctgcctgtgccctggcccaccctggtgaccaccctgagctacggcgtgcagtgcttctcacgctaccccgatcacatgaagcagcacgacttcttcaagagcgccatgcctgagggctacatccaggagcgcaccatcttcttcgaggatgacggcaactacaagtcgcgcgccgaggtgaagttcgagggcgataccctggtgaatcgcatcgagctgaccggcaccgatttcaaggaggatggcaacatcctgggcaataagatggagtacaactacaacgcccacaatgtgtacatcatgaccgacaaggccaagaatggcatcaaggtgaacttcaagatccgccacaacatcgaggatggcagcgtgcagctggccgaccactaccagcagaatacccccatcggcgatggccctgtgctgctgcccgataaccactacctgtccacccagagcgccctgtccaaggaccccaacgagaagcgcgatcacatgatctacttcggcttcgtgaccgccgccgccatcacccacggcatggatgagctgtacaagtga

SEQ ID NO: 485 - DNA, 1710 bp, Artificial Sequence
  source: /note="Description of Artificial Sequence: Synthetic polynucleotide"
atggtgagcaagggcgccgagctgttcaccggcatcgtgcccatcctgatcgagctgaatggcgatgtgaatggccacaagttcagcgtgagcggcgagggcgagggcgatgccacctacggcaagctgaccctgaagttcatctgcaccaccggcaagctgcctgtgccctggcccaccctggtgaccaccctgagctacggcgtgcagtgcttctcacgctaccccgatcacatgaagcagcacgacttcttcaagagcgccatgcctgagggctacatccaggagcgcaccatcttcttcgaggatgacggcaactacaagtcgcgcgccgaggtgaagttcgagggcgataccctggtgaatcgcatcgagctgaccggcaccgatttcaaggaggatggcaacatcctgggcaataagatggagtacaactacaacgcccacaatgtgtacatcatgaccgacaaggccaagaatggcatcaaggtgaacttcaagatccgccacaacatcgaggatggcagcgtgcagctggccgaccactaccagcagaatacccccatcggcgatggccctgtgctgctgcccgataaccactacctgtccacccagagcgccctgtccaaggaccccaacgagaagcgcgatcacatgatctacttcggcttcgtgaccgccgccgccatcacccacggcatggatgagctgtacaagggatccgaagaaacaagagagctacagtcgttagcggctgctgtggtgccatctgcccagacccttaaaattactgactttagcttcagtgactttgagctgtctgatctggaaacagcactgtgtacaattcggatgtttactgacctcaaccttgtgcagaacttccagatgaaacatgaggttctttgcagatggattttaagtgttaagaagaattatcggaagaatgttgcctatcataattggagacatgcctttaatacagctcagtgcatgtttgctgctctaaaagcaggcaaaattcagaacaagctgactgacctggagatacttgcattgctgattgctgcactaagccacgatttggatcaccgtggtgtgaataactcttacatacagcgaagtgaacatccacttgcccagctttactgccattcaatcatggaacaccatcattttgaccagtgcctgatgattcttaatagtccaggcaatcagattctcagtggcctctccattgaagaatataagaccacgttgaaaataatcaagcaagctattttagctacagacctagcactgtacattaagaggggaggagaattttttgaacttataagaaaaaatcaattcaatttggaagatcctcatcaaaaggagttgtttttggcaatgctgatgacagcttgtgatctttctgcaattacaaaaccctggcctattcaacaacggatagcagaacttgtagcaactgaattttttgatcaaggagacagagagagaaaagaactcaacatagaacccactgatctaatgaacagggagaagaaaaacaaaatcccaagtatgcaagttgggttcatagatgccatctgcttgcaactgtatgaggccctgacccacgtgtcagaggactgtttccctttgctagatggctgcagaaagaacaggcagaaatggcaggcccttgcagaacagcagtctagataa

SEQ ID NO: 486 - DNA, 1710 bp, Artificial Sequence
  source: /note="Description of Artificial Sequence: Synthetic polynucleotide"
atggtgagcaagggcgccgagctgttcaccggcatcgtgcccatcctgatcgagctgaatggcgatgtgaatggccacaagttcagcgtgagcggcgagggcgagggcgatgccacctacggcaagctgaccctgaagttcatctgcaccaccggcaagctgcctgtgccctggcccaccctggtgaccaccctgagctacggcgtgcagtgcttctcacgctaccccgatcacatgaagcagcacgacttcttcaagagcgccatgcctgagggctacatccaggagcgcaccatcttcttcgaggatgacggcaactacaagtcgcgcgccgaggtgaagttcgagggcgataccctggtgaatcgcatcgagctgaccggcaccgatttcaaggaggatggcaacatcctgggcaataagatggagtacaactacaacgcccacaatgtgtacatcatgaccgacaaggccaagaatggcatcaaggtgaacttcaagatccgccacaacatcgaggatggcagcgtgcagctggccgaccactaccagcagaatacccccatcggcgatggccctgtgctgctgcccgataaccactacctgtccacccagagcgccctgtccaaggaccccaacgagaagcgcgatcacatgatctacttcggcttcgtgaccgccgccgccatcacccacggcatggatgagctgtacaagggatccgaagaaacaagagagctacagtcgttagcggctgctgtggtgccatctgcccagacccttaaaattactgactttagcttcagtgactttgagctgtctgatctggaaacagcactgtgtacaattcggatgtttactgacctcaaccttgtgcagaacttccagatgaaacatgaggttctttgcagatggattttaagtgttaagaagaattatcggaagaatgttgcctatcataattggagacatgcctttaatacagctcagtgcatgtttgctgctctaaaagcaggcaaaattcagaacaagctgactgacctggagatacttgcattgctgattgctgcactaagccacgatttggatcaccgtggtgtgaataactcttacatacagcgaagtgaacatccacttgcccagctttactgccattcaatcatggaacaccatcattttgaccagtgcctgatgattcttaatagtccaggcaatcagattctcagtggcctctccattgaagaatataagaccacgttgaaaataatcaagcaagctattttagctacagacctagcactgtacattaagagggcaggagaattttttgaacttataagaaaaaatcaattcaatttggaagatcctcatcaaaaggagttgtttttggcaatgctgatgacagcttgtgatctttctgcaattacaaaaccctggcctattcaacaacggatagcagaacttgtagcaactgaattttttgatcaaggagacagagagagaaaagaactcaacatagaacccactgatctaatgaacagggagaagaaaaacaaaatcccaagtatgcaagttgggttcatagatgccatctgcttgcaactgtatgaggccctgacccacgtgtcagaggactgtttccctttgctagatggctgcagaaagaacaggcagaaatggcaggcccttgcagaacagcagtctagataa

SEQ ID NO: 487 - DNA, 1710 bp, Artificial Sequence
  source: /note="Description of Artificial Sequence: Synthetic polynucleotide"
atggtgagcaagggcgccgagctgttcaccggcatcgtgcccatcctgatcgagctgaatggcgatgtgaatggccacaagttcagcgtgagcggcgagggcgagggcgatgccacctacggcaagctgaccctgaagttcatctgcaccaccggcaagctgcctgtgccctggcccaccctggtgaccaccctgagctacggcgtgcagtgcttctcacgctaccccgatcacatgaagcagcacgacttcttcaagagcgccatgcctgagggctacatccaggagcgcaccatcttcttcgaggatgacggcaactacaagtcgcgcgccgaggtgaagttcgagggcgataccctggtgaatcgcatcgagctgaccggcaccgatttcaaggaggatggcaacatcctgggcaataagatggagtacaactacaacgcccacaatgtgtacatcatgaccgacaaggccaagaatggcatcaaggtgaacttcaagatccgccacaacatcgaggatggcagcgtgcagctggccgaccactaccagcagaatacccccatcggcgatggccctgtgctgctgcccgataaccactacctgtccacccagagcgccctgtccaaggaccccaacgagaagcgcgatcacatgatctacttcggcttcgtgaccgccgccgccatcacccacggcatggatgagctgtacaagggatccgaagaaacaagagagctacagtcgttagcggctgctgtggtgccatctgcccagacccttaaaattactgactttagcttcagtgactttgagctgtctgatctggaaacagcactgtgtacaattcggatgtttactgacctcaaccttgtgcagaacttccagatgaaacatgaggttctttgcagatggattttaagtgttaagaagaattatcggaagaatgttgcctatcataattggagacatgcctttaatacagctcagtgcatgtttgctgctctaaaagcaggcaaaattcagaacaagctgactgacctggagatacttgcattgctgattgctgcactaagccacgatttggatcaccgtggtgtgaataactcttacatacagcgaagtgaacatccacttgcccagctttactgccattcaatcatggaacaccatcattttgaccagtgcctgatgattcttaatagtccaggcaatcagattctcagtggcctctccattgaagaatataagaccacgttgaaaataatcaagcaagctattttagctacagacctagcactgtacattaagaggttaggagaattttttgaacttataagaaaaaatcaattcaatttggaagatcctcatcaaaaggagttgtttttggcaatgctgatgacagcttgtgatctttctgcaattacaaaaccctggcctattcaacaacggatagcagaacttgtagcaactgaattttttgatcaaggagacagagagagaaaagaactcaacatagaacccactgatctaatgaacagggagaagaaaaacaaaatcccaagtatgcaagttgggttcatagatgccatctgcttgcaactgtatgaggccctgacccacgtgtcagaggactgtttccctttgctagatggctgcagaaagaacaggcagaaatggcaggcccttgcagaacagcagtctagataa

SEQ ID NO: 488 - DNA, 1710 bp, Artificial Sequence
  source: /note="Description of Artificial Sequence: Synthetic polynucleotide"
atggtgagcaagggcgccgagctgttcaccggcatcgtgcccatcctgatcgagctgaatggcgatgtgaatggccacaagttcagcgtgagcggcgagggcgagggcgatgccacctacggcaagctgaccctgaagttcatctgcaccaccggcaagctgcctgtgccctggcccaccctggtgaccaccctgagctacggcgtgcagtgcttctcacgctaccccgatcacatgaagcagcacgacttcttcaagagcgccatgcctgagggctacatccaggagcgcaccatcttcttcgaggatgacggcaactacaagtcgcgcgccgaggtgaagttcgagggcgataccctggtgaatcgcatcgagctgaccggcaccgatttcaaggaggatggcaacatcctgggcaataagatggagtacaactacaacgcccacaatgtgtacatcatgaccgacaaggccaagaatggcatcaaggtgaacttcaagatccgccacaacatcgaggatggcagcgtgcagctggccgaccactaccagcagaatacccccatcggcgatggccctgtgctgctgcccgataaccactacctgtccacccagagcgccctgtccaaggaccccaacgagaagcgcgatcacatgatctacttcggcttcgtgaccgccgccgccatcacccacggcatggatgagctgtacaagggatccgaagaaacaagagagctacagtcgttagcggctgctgtggtgccatctgcccagacccttaaaattactgactttagcttcagtgactttgagctgtctgatctggaaacagcactgtgtacaattcggatgtttactgacctcaaccttgtgcagaacttccagatgaaacatgaggttctttgcagatggattttaagtgttaagaagaattatcggaagaatgttgcctatcataattggagacatgcctttaatacagctcagtgcatgtttgctgctctaaaagcaggcaaaattcagaacaagctgactgacctggagatacttgcattgctgattgctgcactaagccacgatttggatcaccgtggtgtgaataactcttacatacagcgaagtgaacatccacttgcccagctttactgccattcaatcatggaacaccatcattttgaccagtgcctgatgattcttaatagtccaggcaatcagattctcagtggcctctccattgaagaatataagaccacgttgaaaataatcaagcaagctattttagctacagacctagcactgtacattaagaggatgggagaattttttgaacttataagaaaaaatcaattcaatttggaagatcctcatcaaaaggagttgtttttggcaatgctgatgacagcttgtgatctttctgcaattacaaaaccctggcctattcaacaacggatagcagaacttgtagcaactgaattttttgatcaaggagacagagagagaaaagaactcaacatagaacccactgatctaatgaacagggagaagaaaaacaaaatcccaagtatgcaagttgggttcatagatgccatctgcttgcaactgtatgaggccctgacccacgtgtcagaggactgtttccctttgctagatggctgcagaaagaacaggcagaaatggcaggcccttgcagaacagcagtctagataa

SEQ ID NO: 489 - DNA, 1710 bp, Artificial Sequence
  source: /note="Description of Artificial Sequence: Synthetic polynucleotide"
atggtgagcaagggcgccgagctgttcaccggcatcgtgcccatcctgatcgagctgaatggcgatgtgaatggccacaagttcagcgtgagcggcgagggcgagggcgatgccacctacggcaagctgaccctgaagttcatctgcaccaccggcaagctgcctgtgccctggcccaccctggtgaccaccctgagctacggcgtgcagtgcttctcacgctaccccgatcacatgaagcagcacgacttcttcaagagcgccatgcctgagggctacatccaggagcgcaccatcttcttcgaggatgacggcaactacaagtcgcgcgccgaggtgaagttcgagggcgataccctggtgaatcgcatcgagctgaccggcaccgatttcaaggaggatggcaacatcctgggcaataagatggagtacaactacaacgcccacaatgtgtacatcatgaccgacaaggccaagaatggcatcaaggtgaacttcaagatccgccacaacatcgaggatggcagcgtgcagctggccgaccactaccagcagaatacccccatcggcgatggccctgtgctgctgcccgataaccactacctgtccacccagagcgccctgtccaaggaccccaacgagaagcgcgatcacatgatctacttcggcttcgtgaccgccgccgccatcacccacggcatggatgagctgtacaagggatccgaagaaacaagagagctacagtcgttagcggctgctgtggtgccatctgcccagacccttaaaattactgactttagcttcagtgactttgagctgtctgatctggaaacagcactgtgtacaattcggatgtttactgacctcaaccttgtgcagaacttccagatgaaacatgaggttctttgcagatggattttaagtgttaagaagaattatcggaagaatgttgcctatcataattggagacatgcctttaatacagctcagtgcatgtttgctgctctaaaagcaggcaaaattcagaacaagctgactgacctggagatacttgcattgctgattgctgcactaagccacgatttggatcaccgtggtgtgaataactcttacatacagcgaagtgaacatccacttgcccagctttactgccattcaatcatggaacaccatcattttgaccagtgcctgatgattcttaatagtccaggcaatcagattctcagtggcctctccattgaagaatataagaccacgttgaaaataatcaagcaagctattttagctacagacctagcactgtacattaagaggtttggagaattttttgaacttataagaaaaaatcaattcaatttggaagatcctcatcaaaaggagttgtttttggcaatgctgatgacagcttgtgatctttctgcaattacaaaaccctggcctattcaacaacggatagcagaacttgtagcaactgaattttttgatcaaggagacagagagagaaaagaactcaacatagaacccactgatctaatgaacagggagaagaaaaacaaaatcccaagtatgcaagttgggttcatagatgccatctgcttgcaactgtatgaggccctgacccacgtgtcagaggactgtttccctttgctagatggctgcagaaagaacaggcagaaatggcaggcccttgcagaacagcagtctagataa

SEQ ID NO: 490 - DNA, 1710 bp, Artificial Sequence
  source: /note="Description of Artificial Sequence: Synthetic polynucleotide"
atggtgagcaagggcgccgagctgttcaccggcatcgtgcccatcctgatcgagctgaatggcgatgtgaatggccacaagttcagcgtgagcggcgagggcgagggcgatgccacctacggcaagctgaccctgaagttcatctgcaccaccggcaagctgcctgtgccctggcccaccctggtgaccaccctgagctacggcgtgcagtgcttctcacgctaccccgatcacatgaagcagcacgacttcttcaagagcgccatgcctgagggctacatccaggagcgcaccatcttcttcgaggatgacggcaactacaagtcgcgcgccgaggtgaagttcgagggcgataccctggtgaatcgcatcgagctgaccggcaccgatttcaaggaggatggcaacatcctgggcaataagatggagtacaactacaacgcccacaatgtgtacatcatgaccgacaaggccaagaatggcatcaaggtgaacttcaagatccgccacaacatcgaggatggcagcgtgcagctggccgaccactaccagcagaatacccccatcggcgatggccctgtgctgctgcccgataaccactacctgtccacccagagcgccctgtccaaggaccccaacgagaagcgcgatcacatgatctacttcggcttcgtgaccgccgccgccatcacccacggcatggatgagctgtacaagggatccgaagaaacaagagagctacagtcgttagcggctgctgtggtgccatctgcccagacccttaaaattactgactttagcttcagtgactttgagctgtctgatctggaaacagcactgtgtacaattcggatgtttactgacctcaaccttgtgcagaacttccagatgaaacatgaggttctttgcagatggattttaagtgttaagaagaattatcggaagaatgttgcctatcataattggagacatgcctttaatacagctcagtgcatgtttgctgctctaaaagcaggcaaaattcagaacaagctgactgacctggagatacttgcattgctgattgctgcactaagccacgatttggatcaccgtggtgtgaataactcttacatacagcgaagtgaacatccacttgcccagctttactgccattcaatcatggaacaccatcattttgaccagtgcctgatgattcttaatagtccaggcaatcagattctcagtggcctctccattgaagaatataagaccacgttgaaaataatcaagcaagctattttagctacagacctagcactgtacattaagaggtggggagaattttttgaacttataagaaaaaatcaattcaatttggaagatcctcatcaaaaggagttgtttttggcaatgctgatgacagcttgtgatctttctgcaattacaaaaccctggcctattcaacaacggatagcagaacttgtagcaactgaattttttgatcaaggagacagagagagaaaagaactcaacatagaacccactgatctaatgaacagggagaagaaaaacaaaatcccaagtatgcaagttgggttcatagatgccatctgcttgcaactgtatgaggccctgacccacgtgtcagaggactgtttccctttgctagatggctgcagaaagaacaggcagaaatggcaggcccttgcagaacagcagtctagataa

SEQ ID NO: 491 - DNA, 1710 bp, Artificial Sequence
  source: /note="Description of Artificial Sequence: Synthetic polynucleotide"
atggtgagcaagggcgccgagctgttcaccggcatcgtgcccatcctgatcgagctgaatggcgatgtgaatggccacaagttcagcgtgagcggcgagggcgagggcgatgccacctacggcaagctgaccctgaagttcatctgcaccaccggcaagctgcctgtgccctggcccaccctggtgaccaccctgagctacggcgtgcagtgcttctcacgctaccccgatcacatgaagcagcacgacttcttcaagagcgccatgcctgagggctacatccaggagcgcaccatcttcttcgaggatgacggcaactacaagtcgcgcgccgaggtgaagttcgagggcgataccctggtgaatcgcatcgagctgaccggcaccgatttcaaggaggatggcaacatcctgggcaataagatggagtacaactacaacgcccacaatgtgtacatcatgaccgacaaggccaagaatggcatcaaggtgaacttcaagatccgccacaacatcgaggatggcagcgtgcagctggccgaccactaccagcagaatacccccatcggcgatggccctgtgctgctgcccgataaccactacctgtccacccagagcgccctgtccaaggaccccaacgagaagcgcgatcacatgatctacttcggcttcgtgaccgccgccgccatcacccacggcatggatgagctgtacaagggatccgaagaaacaagagagctacagtcgttagcggctgctgtggtgccatctgcccagacccttaaaattactgactttagcttcagtgactttgagctgtctgatctggaaacagcactgtgtacaattcggatgtttactgacctcaaccttgtgcagaacttccagatgaaacatgaggttctttgcagatggattttaagtgttaagaagaattatcggaagaatgttgcctatcataattggagacatgcctttaatacagctcagtgcatgtttgctgctctaaaagcaggcaaaattcagaacaagctgactgacctggagatacttgcattgctgattgctgcactaagccacgatttggatcaccgtggtgtgaataactcttacatacagcgaagtgaacatccacttgcccagctttactgccattcaatcatggaacaccatcattttgaccagtgcctgatgattcttaatagtccaggcaatcagattctcagtggcctctccattgaagaatataagaccacgttgaaaataatcaagcaagctattttagctacagacctagcactgtacattaagaggaaaggagaattttttgaacttataagaaaaaatcaattcaatttggaagatcctcatcaaaaggagttgtttttggcaatgctgatgacagcttgtgatctttctgcaattacaaaaccctggcctattcaacaacggatagcagaacttgtagcaactgaattttttgatcaaggagacagagagagaaaagaactcaacatagaacccactgatctaatgaacagggagaagaaaaacaaaatcccaagtatgcaagttgggttcatagatgccatctgcttgcaactgtatgaggccctgacccacgtgtcagaggactgtttccctttgctagatggctgcagaaagaacaggcagaaatggcaggcccttgcagaacagcagtctagataa

SEQ ID NO: 492 - DNA, 1710 bp, Artificial Sequence
  source: /note="Description of Artificial Sequence: Synthetic polynucleotide"
atggtgagcaagggcgccgagctgttcaccggcatcgtgcccatcctgatcgagctgaatggcgatgtgaatggccacaagttcagcgtgagcggcgagggcgagggcgatgccacctacggcaagctgaccctgaagttcatctgcaccaccggcaagctgcctgtgccctggcccaccctggtgaccaccctgagctacggcgtgcagtgcttctcacgctaccccgatcacatgaagcagcacgacttcttcaagagcgccatgcctgagggctacatccaggagcgcaccatcttcttcgaggatgacggcaactacaagtcgcgcgccgaggtgaagttcgagggcgataccctggtgaatcgcatcgagctgaccggcaccgatttcaaggaggatggcaacatcctgggcaataagatggagtacaactacaacgcccacaatgtgtacatcatgaccgacaaggccaagaatggcatcaaggtgaacttcaagatccgccacaacatcgaggatggcagcgtgcagctggccgaccactaccagcagaatacccccatcggcgatggccctgtgctgctgcccgataaccactacctgtccacccagagcgccctgtccaaggaccccaacgagaagcgcgatcacatgatctacttcggcttcgtgaccgccgccgccatcacccacggcatggatgagctgtacaagggatccgaagaaacaagagagctacagtcgttagcggctgctgtggtgccatctgcccagacccttaaaattactgactttagcttcagtgactttgagctgtctgatctggaaacagcactgtgtacaattcggatgtttactgacctcaaccttgtgcagaacttccagatgaaacatgaggttctttgcagatggattttaagtgttaagaagaattatcggaagaatgttgcctatcataattggagacatgcctttaatacagctcagtgcatgtttgctgctctaaaagcaggcaaaattcagaacaagctgactgacctggagatacttgcattgctgattgctgcactaagccacgatttggatcaccgtggtgtgaataactcttacatacagcgaagtgaacatccacttgcccagctttactgccattcaatcatggaacaccatcattttgaccagtgcctgatgattcttaatagtccaggcaatcagattctcagtggcctctccattgaagaatataagaccacgttgaaaataatcaagcaagctattttagctacagacctagcactgtacattaagaggcaaggagaattttttgaacttataagaaaaaatcaattcaatttggaagatcctcatcaaaaggagttgtttttggcaatgctgatgacagcttgtgatctttctgcaattacaaaaccctggcctattcaacaacggatagcagaacttgtagcaactgaattttttgatcaaggagacagagagagaaaagaactcaacatagaacccactgatctaatgaacagggagaagaaaaacaaaatcccaagtatgcaagttgggttcatagatgccatctgcttgcaactgtatgaggccctgacccacgtgtcagaggactgtttccctttgctagatggctgcagaaagaacaggcagaaatggcaggcccttgcagaacagcagtctagataa

SEQ ID NO: 493 - DNA, 1710 bp, Artificial Sequence
  source: /note="Description of Artificial Sequence: Synthetic polynucleotide"
atggtgagcaagggcgccgagctgttcaccggcatcgtgcccatcctgatcgagctgaatggcgatgtgaatggccacaagttcagcgtgagcggcgagggcgagggcgatgccacctacggcaagctgaccctgaagttcatctgcaccaccggcaagctgcctgtgccctggcccaccctggtgaccaccctgagctacggcgtgcagtgcttctcacgctaccccgatcacatgaagcagcacgacttcttcaagagcgccatgcctgagggctacatccaggagcgcaccatcttcttcgaggatgacggcaactacaagtcgcgcgccgaggtgaagttcgagggcgataccctggtgaatcgcatcgagctgaccggcaccgatttcaaggaggatggcaacatcctgggcaataagatggagtacaactacaacgcccacaatgtgtacatcatgaccgacaaggccaagaatggcatcaaggtgaacttcaagatccgccacaacatcgaggatggcagcgtgcagctggccgaccactaccagcagaatacccccatcggcgatggccctgtgctgctgcccgataaccactacctgtccacccagagcgccctgtccaaggaccccaacgagaagcgcgatcacatgatctacttcggcttcgtgaccgccgccgccatcacccacggcatggatgagctgtacaagggatccgaagaaacaagagagctacagtcgttagcggctgctgtggtgccatctgcccagacccttaaaattactgactttagcttcagtgactttgagctgtctgatctggaaacagcactgtgtacaattcggatgtttactgacctcaaccttgtgcagaacttccagatgaaacatgaggttctttgcagatggattttaagtgttaagaagaattatcggaagaatgttgcctatcataattggagacatgcctttaatacagctcagtgcatgtttgctgctctaaaagcaggcaaaattcagaacaagctgactgacctggagatacttgcattgctgattgctgcactaagccacgatttggatcaccgtggtgtgaataactcttacatacagcgaagtgaacatccacttgcccagctttactgccattcaatcatggaacaccatcattttgaccagtgcctgatgattcttaatagtccaggcaatcagattctcagtggcctctccattgaagaatataagaccacgttgaaaataatcaagcaagctattttagctacagacctagcactgtacattaagagggagggagaattttttgaacttataagaaaaaatcaattcaatttggaagatcctcatcaaaaggagttgtttttggcaatgctgatgacagcttgtgatctttctgcaattacaaaaccctggcctattcaacaacggatagcagaacttgtagcaactgaattttttgatcaaggagacagagagagaaaagaactcaacatagaacccactgatctaatgaacagggagaagaaaaacaaaatcccaagtatgcaagttgggttcatagatgccatctgcttgcaactgtatgaggccctgacccacgtgtcagaggactgtttccctttgctagatggctgcagaaagaacaggcagaaatggcaggcccttgcagaacagcagtctagataa

SEQ ID NO: 494 - DNA, 1710 bp, Artificial Sequence
  source: /note="Description of Artificial Sequence: Synthetic polynucleotide"
atggtgagcaagggcgccgagctgttcaccggcatcgtgcccatcctgatcgagctgaatggcgatgtgaatggccacaagttcagcgtgagcggcgagggcgagggcgatgccacctacggcaagctgaccctgaagttcatctgcaccaccggcaagctgcctgtgccctggcccaccctggtgaccaccctgagctacggcgtgcagtgcttctcacgctaccccgatcacatgaagcagcacgacttcttcaagagcgccatgcctgagggctacatccaggagcgcaccatcttcttcgaggatgacggcaactacaagtcgcgcgccgaggtgaagttcgagggcgataccctggtgaatcgcatcgagctgaccggcaccgatttcaaggaggatggcaacatcctgggcaataagatggagtacaactacaacgcccacaatgtgtacatcatgaccgacaaggccaagaatggcatcaaggtgaacttcaagatccgccacaacatcgaggatggcagcgtgcagctggccgaccactaccagcagaatacccccatcggcgatggccctgtgctgctgcccgataaccactacctgtccacccagagcgccctgtccaaggaccccaacgagaagcgcgatcacatgatctacttcggcttcgtgaccgccgccgccatcacccacggcatggatgagctgtacaagggatccgaagaaacaagagagctacagtcgttagcggctgctgtggtgccatctgcccagacccttaaaattactgactttagcttcagtgactttgagctgtctgatctggaaacagcactgtgtacaattcggatgtttactgacctcaaccttgtgcagaacttccagatgaaacatgaggttctttgcagatggattttaagtgttaagaagaattatcggaagaatgttgcctatcataattggagacatgcctttaatacagctcagtgcatgtttgctgctctaaaagcaggcaaaattcagaacaagctgactgacctggagatacttgcattgctgattgctgcactaagccacgatttggatcaccgtggtgtgaataactcttacatacagcgaagtgaacatccacttgcccagctttactgccattcaatcatggaacaccatcattttgaccagtgcctgatgattcttaatagtccaggcaatcagattctcagtggcctctccattgaagaatataagaccacgttgaaaataatcaagcaagctattttagctacagacctagcactgtacattaagaggtcaggagaattttttgaacttataagaaaaaatcaattcaatttggaagatcctcatcaaaaggagttgtttttggcaatgctgatgacagcttgtgatctttctgcaattacaaaaccctggcctattcaacaacggatagcagaacttgtagcaactgaattttttgatcaaggagacagagagagaaaagaactcaacatagaacccactgatctaatgaacagggagaagaaaaacaaaatcccaagtatgcaagttgggttcatagatgccatctgcttgcaactgtatgaggccctgacccacgtgtcagaggactgtttccctttgctagatggctgcagaaagaacaggcagaaatggcaggcccttgcagaacagcagtctagataa

SEQ ID NO: 495 - DNA, 1710 bp, Artificial Sequence
  source: /note="Description of Artificial Sequence: Synthetic polynucleotide"
atggtgagcaagggcgccgagctgttcaccggcatcgtgcccatcctgatcgagctgaatggcgatgtgaatggccacaagttcagcgtgagcggcgagggcgagggcgatgccacctacggcaagctgaccctgaagttcatctgcaccaccggcaagctgcctgtgccctggcccaccctggtgaccaccctgagctacggcgtgcagtgcttctcacgctaccccgatcacatgaagcagcacgacttcttcaagagcgccatgcctgagggctacatccaggagcgcaccatcttcttcgaggatgacggcaactacaagtcgcgcgccgaggtgaagttcgagggcgataccctggtgaatcgcatcgagctgaccggcaccgatttcaaggaggatggcaacatcctgggcaataagatggagtacaactacaacgcccacaatgtgtacatcatgaccgacaaggccaagaatggcatcaaggtgaacttcaagatccgccacaacatcgaggatggcagcgtgcagctggccgaccactaccagcagaatacccccatcggcgatggccctgtgctgctgcccgataaccactacctgtccacccagagcgccctgtccaaggaccccaacgagaagcgcgatcacatgatctacttcggcttcgtgaccgccgccgccatcacccacggcatggatgagctgtacaagggatccgaagaaacaagagagctacagtcgttagcggctgctgtggtgccatctgcccagacccttaaaattactgactttagcttcagtgactttgagctgtctgatctggaaacagcactgtgtacaattcggatgtttactgacctcaaccttgtgcagaacttccagatgaaacatgaggttctttgcagatggattttaagtgttaagaagaattatcggaagaatgttgcctatcataattggagacatgcctttaatacagctcagtgcatgtttgctgctctaaaagcaggcaaaattcagaacaagctgactgacctggagatacttgcattgctgattgctgcactaagccacgatttggatcaccgtggtgtgaataactcttacatacagcgaagtgaacatccacttgcccagctttactgccattcaatcatggaacaccatcattttgaccagtgcctgatgattcttaatagtccaggcaatcagattctcagtggcctctccattgaagaatataagaccacgttgaaaataatcaagcaagctattttagctacagacctagcactgtacattaagaggccaggagaattttttgaacttataagaaaaaatcaattcaatttggaagatcctcatcaaaaggagttgtttttggcaatgctgatgacagcttgtgatctttctgcaattacaaaaccctggcctattcaacaacggatagcagaacttgtagcaactgaattttttgatcaaggagacagagagagaaaagaactcaacatagaacccactgatctaatgaacagggagaagaaaaacaaaatcccaagtatgcaagttgggttcatagatgccatctgcttgcaactgtatgaggccctgacccacgtgtcagaggactgtttccctttgctagatggctgcagaaagaacaggcagaaatggcaggcccttgcagaacagcagtctagataa

SEQ ID NO: 496 - DNA, 1710 bp, Artificial Sequence
  source: /note="Description of Artificial Sequence: Synthetic polynucleotide"
atggtgagcaagggcgccgagctgttcaccggcatcgtgcccatcctgatcgagctgaatggcgatgtgaatggccacaagttcagcgtgagcggcgagggcgagggcgatgccacctacggcaagctgaccctgaagttcatctgcaccaccggcaagctgcctgtgccctggcccaccctggtgaccaccctgagctacggcgtgcagtgcttctcacgctaccccgatcacatgaagcagcacgacttcttcaagagcgccatgcctgagggctacatccaggagcgcaccatcttcttcgaggatgacggcaactacaagtcgcgcgccgaggtgaagttcgagggcgataccctggtgaatcgcatcgagctgaccggcaccgatttcaaggaggatggcaacatcctgggcaataagatggagtacaactacaacgcccacaatgtgtacatcatgaccgacaaggccaagaatggcatcaaggtgaacttcaagatccgccacaacatcgaggatggcagcgtgcagctggccgaccactaccagcagaatacccccatcggcgatggccctgtgctgctgcccgataaccactacctgtccacccagagcgccctgtccaaggaccccaacgagaagcgcgatcacatgatctacttcggcttcgtgaccgccgccgccatcacccacggcatggatgagctgtacaagggatccgaagaaacaagagagctacagtcgttagcggctgctgtggtgccatctgcccagacccttaaaattactgactttagcttcagtgactttgagctgtctgatctggaaacagcactgtgtacaattcggatgtttactgacctcaaccttgtgcagaacttccagatgaaacatgaggttctttgcagatggattttaagtgttaagaagaattatcggaagaatgttgcctatcataattggagacatgcctttaatacagctcagtgcatgtttgctgctctaaaagcaggcaaaattcagaacaagctgactgacctggagatacttgcattgctgattgctgcactaagccacgatttggatcaccgtggtgtgaataactcttacatacagcgaagtgaacatccacttgcccagctttactgccattcaatcatggaacaccatcattttgaccagtgcctgatgattcttaatagtccaggcaatcagattctcagtggcctctccattgaagaatataagaccacgttgaaaataatcaagcaagctattttagctacagacctagcactgtacattaagagggtaggagaattttttgaacttataagaaaaaatcaattcaatttggaagatcctcatcaaaaggagttgtttttggcaatgctgatgacagcttgtgatctttctgcaattacaaaaccctggcctattcaacaacggatagcagaacttgtagcaactgaattttttgatcaaggagacagagagagaaaagaactcaacatagaacccactgatctaatgaacagggagaagaaaaacaaaatcccaagtatgcaagttgggttcatagatgccatctgcttgcaactgtatgaggccctgacccacgtgtcagaggactgtttccctttgctagatggctgcagaaagaacaggcagaaatggcaggcccttgcagaacagcagtctagataa

SEQ ID NO: 497 - DNA, 1710 bp, Artificial Sequence
  source: /note="Description of Artificial Sequence: Synthetic polynucleotide"
atggtgagcaagggcgccgagctgttcaccggcatcgtgcccatcctgatcgagctgaatggcgatgtgaatggccacaagttcagcgtgagcggcgagggcgagggcgatgccacctacggcaagctgaccctgaagttcatctgcaccaccggcaagctgcctgtgccctggcccaccctggtgaccaccctgagctacggcgtgcagtgcttctcacgctaccccgatcacatgaagcagcacgacttcttcaagagcgccatgcctgagggctacatccaggagcgcaccatcttcttcgaggatgacggcaactacaagtcgcgcgccgaggtgaagttcgagggcgataccctggtgaatcgcatcgagctgaccggcaccgatttcaaggaggatggcaacatcctgggcaataagatggagtacaactacaacgcccacaatgtgtacatcatgaccgacaaggccaagaatggcatcaaggtgaacttcaagatccgccacaacatcgaggatggcagcgtgcagctggccgaccactaccagcagaatacccccatcggcgatggccctgtgctgctgcccgataaccactacctgtccacccagagcgccctgtccaaggaccccaacgagaagcgcgatcacatgatctacttcggcttcgtgaccgccgccgccatcacccacggcatggatgagctgtacaagggatccgaagaaacaagagagctacagtcgttagcggctgctgtggtgccatctgcccagacccttaaaattactgactttagcttcagtgactttgagctgtctgatctggaaacagcactgtgtacaattcggatgtttactgacctcaaccttgtgcagaacttccagatgaaacatgaggttctttgcagatggattttaagtgttaagaagaattatcggaagaatgttgcctatcataattggagacatgcctttaatacagctcagtgcatgtttgctgctctaaaagcaggcaaaattcagaacaagctgactgacctggagatacttgcattgctgattgctgcactaagccacgatttggatcaccgtggtgtgaataactcttacatacagcgaagtgaacatccacttgcccagctttactgccattcaatcatggaacaccatcattttgaccagtgcctgatgattcttaatagtccaggcaatcagattctcagtggcctctccattgaagaatataagaccacgttgaaaataatcaagcaagctattttagctacagacctagcactgtacattaagaggattggagaattttttgaacttataagaaaaaatcaattcaatttggaagatcctcatcaaaaggagttgtttttggcaatgctgatgacagcttgtgatctttctgcaattacaaaaccctggcctattcaacaacggatagcagaacttgtagcaactgaattttttgatcaaggagacagagagagaaaagaactcaacatagaacccactgatctaatgaacagggagaagaaaaacaaaatcccaagtatgcaagttgggttcatagatgccatctgcttgcaactgtatgaggccctgacccacgtgtcagaggactgtttccctttgctagatggctgcagaaagaacaggcagaaatggcaggcccttgcagaacagcagtctagataa

SEQ ID NO: 498 - DNA, 1710 bp, Artificial Sequence
  source: /note="Description of Artificial Sequence: Synthetic polynucleotide"
atggtgagcaagggcgccgagctgttcaccggcatcgtgcccatcctgatcgagctgaatggcgatgtgaatggccacaagttcagcgtgagcggcgagggcgagggcgatgccacctacggcaagctgaccctgaagttcatctgcaccaccggcaagctgcctgtgccctggcccaccctggtgaccaccctgagctacggcgtgcagtgcttctcacgctaccccgatcacatgaagcagcacgacttcttcaagagcgccatgcctgagggctacatccaggagcgcaccatcttcttcgaggatgacggcaactacaagtcgcgcgccgaggtgaagttcgagggcgataccctggtgaatcgcatcgagctgaccggcaccgatttcaaggaggatggcaacatcctgggcaataagatggagtacaactacaacgcccacaatgtgtacatcatgaccgacaaggccaagaatggcatcaaggtgaacttcaagatccgccacaacatcgaggatggcagcgtgcagctggccgaccactaccagcagaatacccccatcggcgatggccctgtgctgctgcccgataaccactacctgtccacccagagcgccctgtccaaggaccccaacgagaagcgcgatcacatgatctacttcggcttcgtgaccgccgccgccatcacccacggcatggatgagctgtacaagggatccgaagaaacaagagagctacagtcgttagcggctgctgtggtgccatctgcccagacccttaaaattactgactttagcttcagtgactttgagctgtctgatctggaaacagcactgtgtacaattcggatgtttactgacctcaaccttgtgcagaacttccagatgaaacatgaggttctttgcagatggattttaagtgttaagaagaattatcggaagaatgttgcctatcataattggagacatgcctttaatacagctcagtgcatgtttgctgctctaaaagcaggcaaaattcagaacaagctgactgacctggagatacttgcattgctgattgctgcactaagccacgatttggatcaccgtggtgtgaataactcttacatacagcgaagtgaacatccacttgcccagctttactgccattcaatcatggaacaccatcattttgaccagtgcctgatgattcttaatagtccaggcaatcagattctcagtggcctctccattgaagaatataagaccacgttgaaaataatcaagcaagctattttagctacagacctagcactgtacattaagaggtgcggagaattttttgaacttataagaaaaaatcaattcaatttggaagatcctcatcaaaaggagttgtttttggcaatgctgatgacagcttgtgatctttctgcaattacaaaaccctggcctattcaacaacggatagcagaacttgtagcaactgaattttttgatcaaggagacagagagagaaaagaactcaacatagaacccactgatctaatgaacagggagaagaaaaacaaaatcccaagtatgcaagttgggttcatagatgccatctgcttgcaactgtatgaggccctgacccacgtgtcagaggactgtttccctttgctagatggctgcagaaagaacaggcagaaatggcaggcccttgcagaacagcagtctagataa

SEQ ID NO: 499 - DNA, 1710 bp, Artificial Sequence
  source: /note="Description of Artificial Sequence: Synthetic polynucleotide"
atggtgagcaagggcgccgagctgttcaccggcatcgtgcccatcctgatcgagctgaatggcgatgtgaatggccacaagttcagcgtgagcggcgagggcgagggcgatgccacctacggcaagctgaccctgaagttcatctgcaccaccggcaagctgcctgtgccctggcccaccctggtgaccaccctgagctacggcgtgcagtgcttctcacgctaccccgatcacatgaagcagcacgacttcttcaagagcgccatgcctgagggctacatccaggagcgcaccatcttcttcgaggatgacggcaactacaagtcgcgcgccgaggtgaagttcgagggcgataccctggtgaatcgcatcgagctgaccggcaccgatttcaaggaggatggcaacatcctgggcaataagatggagtacaactacaacgcccacaatgtgtacatcatgaccgacaaggccaagaatggcatcaaggtgaacttcaagatccgccacaacatcgaggatggcagcgtgcagctggccgaccactaccagcagaatacccccatcggcgatggccctgtgctgctgcccgataaccactacctgtccacccagagcgccctgtccaaggaccccaacgagaagcgcgatcacatgatctacttcggcttcgtgaccgccgccgccatcacccacggcatggatgagctgtacaagggatccgaagaaacaagagagctacagtcgttagcggctgctgtggtgccatctgcccagacccttaaaattactgactttagcttcagtgactttgagctgtctgatctggaaacagcactgtgtacaattcggatgtttactgacctcaaccttgtgcagaacttccagatgaaacatgaggttctttgcagatggattttaagtgttaagaagaattatcggaagaatgttgcctatcataattggagacatgcctttaatacagctcagtgcatgtttgctgctctaaaagcaggcaaaattcagaacaagctgactgacctggagatacttgcattgctgattgctgcactaagccacgatttggatcaccgtggtgtgaataactcttacatacagcgaagtgaacatccacttgcccagctttactgccattcaatcatggaacaccatcattttgaccagtgcctgatgattcttaatagtccaggcaatcagattctcagtggcctctccattgaagaatataagaccacgttgaaaataatcaagcaagctattttagctacagacctagcactgtacattaagaggtacggagaattttttgaacttataagaaaaaatcaattcaatttggaagatcctcatcaaaaggagttgtttttggcaatgctgatgacagcttgtgatctttctgcaattacaaaaccctggcctattcaacaacggatagcagaacttgtagcaactgaattttttgatcaaggagacagagagagaaaagaactcaacatagaacccactgatctaatgaacagggagaagaaaaacaaaatcccaagtatgcaagttgggttcatagatgccatctgcttgcaactgtatgaggccctgacccacgtgtcagaggactgtttccctttgctagatggctgcagaaagaacaggcagaaatggcaggcccttgcagaacagcagtctagataa

SEQ ID NO: 500 - DNA, 1710 bp, Artificial Sequence
  source: /note="Description of Artificial Sequence: Synthetic polynucleotide"
atggtgagcaagggcgccgagctgttcaccggcatcgtgcccatcctgatcgagctgaatggcgatgtgaatggccacaagttcagcgtgagcggcgagggcgagggcgatgccacctacggcaagctgaccctgaagttcatctgcaccaccggcaagctgcctgtgccctggcccaccctggtgaccaccctgagctacggcgtgcagtgcttctcacgctaccccgatcacatgaagcagcacgacttcttcaagagcgccatgcctgagggctacatccaggagcgcaccatcttcttcgaggatgacggcaactacaagtcgcgcgccgaggtgaagttcgagggcgataccctggtgaatcgcatcgagctgaccggcaccgatttcaaggaggatggcaacatcctgggcaataagatggagtacaactacaacgcccacaatgtgtacatcatgaccgacaaggccaagaatggcatcaaggtgaacttcaagatccgccacaacatcgaggatggcagcgtgcagctggccgaccactaccagcagaatacccccatcggcgatggccctgtgctgctgcccgataaccactacctgtccacccagagcgccctgtccaaggaccccaacgagaagcgcgatcacatgatctacttcggcttcgtgaccgccgccgccatcacccacggcatggatgagctgtacaagggatccgaagaaacaagagagctacagtcgttagcggctgctgtggtgccatctgcccagacccttaaaattactgactttagcttcagtgactttgagctgtctgatctggaaacagcactgtgtacaattcggatgtttactgacctcaaccttgtgcagaacttccagatgaaacatgaggttctttgcagatggattttaagtgttaagaagaattatcggaagaatgttgcctatcataattggagacatgcctttaatacagctcagtgcatgtttgctgctctaaaagcaggcaaaattcagaacaagctgactgacctggagatacttgcattgctgattgctgcactaagccacgatttggatcaccgtggtgtgaataactcttacatacagcgaagtgaacatccacttgcccagctttactgccattcaatcatggaacaccatcattttgaccagtgcctgatgattcttaatagtccaggcaatcagattctcagtggcctctccattgaagaatataagaccacgttgaaaataatcaagcaagctattttagctacagacctagcactgtacattaagaggcacggagaattttttgaacttataagaaaaaatcaattcaatttggaagatcctcatcaaaaggagttgtttttggcaatgctgatgacagcttgtgatctttctgcaattacaaaaccctggcctattcaacaacggatagcagaacttgtagcaactgaattttttgatcaaggagacagagagagaaaagaactcaacatagaacccactgatctaatgaacagggagaagaaaaacaaaatcccaagtatgcaagttgggttcatagatgccatctgcttgcaactgtatgaggccctgacccacgtgtcagaggactgtttccctttgctagatggctgcagaaagaacaggcagaaatggcaggcccttgcagaacagcagtctagataa

SEQ ID NO: 501 - DNA, 1710 bp, Artificial Sequence
  source: /note="Description of Artificial Sequence: Synthetic polynucleotide"
atggtgagcaagggcgccgagctgttcaccggcatcgtgcccatcctgatcgagctgaatggcgatgtgaatggccacaagttcagcgtgagcggcgagggcgagggcgatgccacctacggcaagctgaccctgaagttcatctgcaccaccggcaagctgcctgtgccctggcccaccctggtgaccaccctgagctacggcgtgcagtgcttctcacgctaccccgatcacatgaagcagcacgacttcttcaagagcgccatgcctgagggctacatccaggagcgcaccatcttcttcgaggatgacggcaactacaagtcgcgcgccgaggtgaagttcgagggcgataccctggtgaatcgcatcgagctgaccggcaccgatttcaaggaggatggcaacatcctgggcaataagatggagtacaactacaacgcccacaatgtgtacatcatgaccgacaaggccaagaatggcatcaaggtgaacttcaagatccgccacaacatcgaggatggcagcgtgcagctggccgaccactaccagcagaatacccccatcggcgatggccctgtgctgctgcccgataaccactacctgtccacccagagcgccctgtccaaggaccccaacgagaagcgcgatcacatgatctacttcggcttcgtgaccgccgccgccatcacccacggcatggatgagctgtacaagggatccgaagaaacaagagagctacagtcgttagcggctgctgtggtgccatctgcccagacccttaaaattactgactttagcttcagtgactttgagctgtctgatctggaaacagcactgtgtacaattcggatgtttactgacctcaaccttgtgcagaacttccagatgaaacatgaggttctttgcagatggattttaagtgttaagaagaattatcggaagaatgttgcctatcataattggagacatgcctttaatacagctcagtgcatgtttgctgctctaaaagcaggcaaaattcagaacaagctgactgacctggagatacttgcattgctgattgctgcactaagccacgatttggatcaccgtggtgtgaataactcttacatacagcgaagtgaacatccacttgcccagctttactgccattcaatcatggaacaccatcattttgaccagtgcctgatgattcttaatagtccaggcaatcagattctcagtggcctctccattgaagaatataagaccacgttgaaaataatcaagcaagctattttagctacagacctagcactgtacattaagaggaacggagaattttttgaacttataagaaaaaatcaattcaatttggaagatcctcatcaaaaggagttgtttttggcaatgctgatgacagcttgtgatctttctgcaattacaaaaccctggcctattcaacaacggatagcagaacttgtagcaactgaattttttgatcaaggagacagagagagaaaagaactcaacatagaacccactgatctaatgaacagggagaagaaaaacaaaatcccaagtatgcaagttgggttcatagatgccatctgcttgcaactgtatgaggccctgacccacgtgtcagaggactgtttccctttgctagatggctgcagaaagaacaggcagaaatggcaggcccttgcagaacagcagtctagataa

SEQ ID NO: 502 - DNA, 1710 bp, Artificial Sequence
  source: /note="Description of Artificial Sequence: Synthetic polynucleotide"
atggtgagcaagggcgccgagctgttcaccggcatcgtgcccatcctgatcgagctgaatggcgatgtgaatggccacaagttcagcgtgagcggcgagggcgagggcgatgccacctacggcaagctgaccctgaagttcatctgcaccaccggcaagctgcctgtgccctggcccaccctggtgaccaccctgagctacggcgtgcagtgcttctcacgctaccccgatcacatgaagcagcacgacttcttcaagagcgccatgcctgagggctacatccaggagcgcaccatcttcttcgaggatgacggcaactacaagtcgcgcgccgaggtgaagttcgagggcgataccctggtgaatcgcatcgagctgaccggcaccgatttcaaggaggatggcaacatcctgggcaataagatggagtacaactacaacgcccacaatgtgtacatcatgaccgacaaggccaagaatggcatcaaggtgaacttcaagatccgccacaacatcgaggatggcagcgtgcagctggccgaccactaccagcagaatacccccatcggcgatggccctgtgctgctgcccgataaccactacctgtccacccagagcgccctgtccaaggaccccaacgagaagcgcgatcacatgatctacttcggcttcgtgaccgccgccgccatcacccacggcatggatgagctgtacaagggatccgaagaaacaagagagctacagtcgttagcggctgctgtggtgccatctgcccagacccttaaaattactgactttagcttcagtgactttgagctgtctgatctggaaacagcactgtgtacaattcggatgtttactgacctcaaccttgtgcagaacttccagatgaaacatgaggttctttgcagatggattttaagtgttaagaagaattatcggaagaatgttgcctatcataattggagacatgcctttaatacagctcagtgcatgtttgctgctctaaaagcaggcaaaattcagaacaagctgactgacctggagatacttgcattgctgattgctgcactaagccacgatttggatcaccgtggtgtgaataactcttacatacagcgaagtgaacatccacttgcccagctttactgccattcaatcatggaacaccatcattttgaccagtgcctgatgattcttaatagtccaggcaatcagattctcagtggcctctccattgaagaatataagaccacgttgaaaataatcaagcaagctattttagctacagacctagcactgtacattaagagggacggagaattttttgaacttataagaaaaaatcaattcaatttggaagatcctcatcaaaaggagttgtttttggcaatgctgatgacagcttgtgatctttctgcaattacaaaaccctggcctattcaacaacggatagcagaacttgtagcaactgaattttttgatcaaggagacagagagagaaaagaactcaacatagaacccactgatctaatgaacagggagaagaaaaacaaaatcccaagtatgcaagttgggttcatagatgccatctgcttgcaactgtatgaggccctgacccacgtgtcagaggactgtttccctttgctagatggctgcagaaagaacaggcagaaatggcaggcccttgcagaacagcagtctagataa

SEQ ID NO: 503 - DNA, 1710 bp, Artificial Sequence
  source: /note="Description of Artificial Sequence: Synthetic polynucleotide"
atggtgagcaagggcgccgagctgttcaccggcatcgtgcccatcctgatcgagctgaatggcgatgtgaatggccacaagttcagcgtgagcggcgagggcgagggcgatgccacctacggcaagctgaccctgaagttcatctgcaccaccggcaagctgcctgtgccctggcccaccctggtgaccaccctgagctacggcgtgcagtgcttctcacgctaccccgatcacatgaagcagcacgacttcttcaagagcgccatgcctgagggctacatccaggagcgcaccatcttcttcgaggatgacggcaactacaagtcgcgcgccgaggtgaagttcgagggcgataccctggtgaatcgcatcgagctgaccggcaccgatttcaaggaggatggcaacatcctgggcaataagatggagtacaactacaacgcccacaatgtgtacatcatgaccgacaaggccaagaatggcatcaaggtgaacttcaagatccgccacaacatcgaggatggcagcgtgcagctggccgaccactaccagcagaatacccccatcggcgatggccctgtgctgctgcccgataaccactacctgtccacccagagcgccctgtccaaggaccccaacgagaagcgcgatcacatgatctacttcggcttcgtgaccgccgccgccatcacccacggcatggatgagctgtacaagggatccgaagaaacaagagagctacagtcgttagcggctgctgtggtgccatctgcccagacccttaaaattactgactttagcttcagtgactttgagctgtctgatctggaaacagcactgtgtacaattcggatgtttactgacctcaaccttgtgcagaacttccagatgaaacatgaggttctttgcagatggattttaagtgttaagaagaattatcggaagaatgttgcctatcataattggagacatgcctttaatacagctcagtgcatgtttgctgctctaaaagcaggcaaaattcagaacaagctgactgacctggagatacttgcattgctgattgctgcactaagccacgatttggatcaccgtggtgtgaataactcttacatacagcgaagtgaacatccacttgcccagctttactgccattcaatcatggaacaccatcattttgaccagtgcctgatgattcttaatagtccaggcaatcagattctcagtggcctctccattgaagaatataagaccacgttgaaaataatcaagcaagctattttagctacagacctagcactgtacattaagaggaccggagaattttttgaacttataagaaaaaatcaattcaatttggaagatcctcatcaaaaggagttgtttttggcaatgctgatgacagcttgtgatctttctgcaattacaaaaccctggcctattcaacaacggatagcagaacttgtagcaactgaattttttgatcaaggagacagagagagaaaagaactcaacatagaacccactgatctaatgaacagggagaagaaaaacaaaatcccaagtatgcaagttgggttcatagatgccatctgcttgcaactgtatgaggccctgacccacgtgtcagaggactgtttccctttgctagatggctgcagaaagaacaggcagaaatggcaggcccttgcagaacagcagtctagataa

SEQ ID NO: 504 - protein, 326 aa, Artificial Sequence
  source: /note="Description of Artificial Sequence: Synthetic Destabilizing Domain (DD)"
EETRELQSLAAAVVPSAQTLKITDFSFSDFELSDLETALCTIRMFTDLNLVQNFQMKHEVLCRWILSVKKNYRKNVAYHNWRHAFNTAQCMFAALKAGKIQNKLTDLEILALLIAALSHDLDHRGVNNSYIQRSEHPLAQLYCHSIMEHHHFDQCLMILNSPGNQILSGLSIEEYKTTLKIIKQAILATDLALYIKRRGEFAELIRKNQFNLEDPHQKELFLAMLMTACNLSAITKPWPIQQRIAELVATEFFDQGDRERKELNIEPTDLMNREKKNKIPSMQVGFIDAICLQLYEALTHVSEDCFPLLDGCRKNRQKWQALAEQQ

SEQ ID NO: 505 - protein, 326 aa, Artificial Sequence
  source: /note="Description of Artificial Sequence: Synthetic Destabilizing Domain (DD)"
EETRELQSLAAAVVPSAQTLKITDFSFSDFELSDLETALCTIRMFTDLNLVQNFQMKHEVLCRWILSVKKNYRKNVAYHNWRHAFNTAQCMFAALKAGKIQNKLTDLEILALLIAALSHDLDHRGVNNSYIQRSEHPLAQLYCHSIMEHHHFDQCLMILNSPGNQILSGLSIEEYKTTLKIIKQAILATDLALYIKRLGEFFELIRKNQFNLEDPHQKELFLAMLMTACNLSAITKPWPIQQRIAELVATEFFDQGDRERKELNIEPTDLMNREKKNKIPSMQVGFIDAICLQLYEALTHVSEDCFPLLDGCRKNRQKWQALAEQQ

SEQ ID NO: 506 - protein, 326 aa, Artificial Sequence
  source: /note="Description of Artificial Sequence: Synthetic Destabilizing Domain (DD)"
EETRELQSLAAAVVPSAQTLKITDFSFSDFELSDLETALCTIRMFTDLNLVQNFQMKHEVLCRWILSVKKNYRKNVAFHNWRHAFNTAQCMFAALKAGKIQNKLTDLEILALLIAALSHDLDHRGVNNSYIQRSEHPLAQLYCHSIMEHHHFDQCLMILNSPGNQILSGLSIEEYKTTLKIIKQAILATDLALYIKRLGEFFELIRKNQFNLEDPHQKELFLAMLMTACDLSAITKPWPIQQRIAELVATEFFDQGDRERKELNIEPTDLMNREKKNKIPSMQVGFIDAICLQLYEALTHVSEDCFPLLDGCRKNRQKWQALAEQQ

SEQ ID NO: 507 - protein, 326 aa, Artificial Sequence
  source: /note="Description of Artificial Sequence: Synthetic Destabilizing Domain (DD)"
EETRELQSLAAAVVPSAQTLKITDFSFSDFELSDLETALCTIRMFTDLNLVQNFQMKHEVLCRWILSVKKNYRKNVAWHNWRHAFNTAQCMFAALKAGKIQNKLTDLEILALLIAALSHDLDHRGVNNSYIQRSEHPLAQLYCHSIMEHHHFDQCLMILNSPGNQILSGLSIEEYKTTLKIIKQAILATDLALYIKRLGEFFELIRKNQFNLEDPHQKELFLAMLMTACDLSAITKPWPIQQRIAELVATEFFDQGDRERKELNIEPTDLMNREKKNKIPSMQVGFIDAICLQLYEALTHVSEDCFPLLDGCRKNRQKWQALAEQQ

SEQ ID NO: 508 - protein, 326 aa, Artificial Sequence
  source: /note="Description of Artificial Sequence: Synthetic Destabilizing Domain (DD)"
EETRELQSLAAAVVPSAQTLKITDFSFSDFELSDLETALCTIRMFTDLNLVQNFQMKHEVLCRWILSVKKNYRKNVAAHNWRHAFNTAQCMFAALKAGKIQNKLTDLEILALLIAALSHDLDHRGVNNSYIQRSEHPLAQLYCHSIMEHHHFDQCLMILNSPGNQILSGLSIEEYKTTLKIIKQAILATDLALYIKRLGEFFELIRKNQFNLEDPHQKELFLAMLMTACDLSAITKPWPIQQRIAELVATEFFDQGDRERKELNIEPTDLMNREKKNKIPSMQVGFIDAICLQLYEALTHVSEDCFPLLDGCRKNRQKWQALAEQQ

SEQ ID NO: 509 - protein, 326 aa, Artificial Sequence
  source: /note="Description of Artificial Sequence: Synthetic Destabilizing Domain (DD)"
EETRELQSLAAAVVPSAQTLKITDFSFSDFELSDLETALCTIRMFTDLNLVQNFQMKHEVLCRWILSVKKNYRKNVAYHNWRHAFNTAQCMFAALKAGKIQNKLTDLEILALLIAALSADLDHRGVNNSYIQRSEHPLAQLYCHSIMEHHHFDQCLMILNSPGNQILSGLSIEEYKTTLKIIKQAILATDLALYIKRLGEFFELIRKNQFNLEDPHQKELFLAMLMTACDLSAITKPWPIQQRIAELVATEFFDQGDRERKELNIEPTDLMNREKKNKIPSMQVGFIDAICLQLYEALTHVSEDCFPLLDGCRKNRQKWQALAEQQ

SEQ ID NO: 510 - protein, 326 aa, Artificial Sequence
  source: /note="Description of Artificial Sequence: Synthetic Destabilizing Domain (DD)"
EETRELQSLAAAVVPSAQTLKITDFSFSDFELSDLETALCTIRMFTDLNLVQNFQMKHEVLCRWILSVKKNYRKNVAYHNWRHAFNTAQCMFAALKAGKIQNKLTDLEILALLIAALSHDLDHRGVNNSYIQRSEHPLAQLYCHSIMEHHHFDQCLMILNSPGNQILSGLSIEEYKTTLKIIKQAILATDLALYIKRLGEFFELIRKNQFNLEDPHQKELFLAMLMTACALSAITKPWPIQQRIAELVATEFFDQGDRERKELNIEPTDLMNREKKNKIPSMQVGFIDAICLQLYEALTHVSEDCFPLLDGCRKNRQKWQALAEQQ

SEQ ID NO: 511 - protein, 567 aa, Artificial Sequence
  source: /note="Description of Artificial Sequence: Synthetic polypeptide"
MEETRELQSLAAAVVPSAQTLKITDFSFSDFELSDLETALCTIRMFTDLNLVQNFQMKHEVLCRWILSVKKNYRKNVAYHNWRHAFNTAQCMFAALKAGKIQNKLTDLEILALLIAALSHDLDHRGVNNSYIQRSEHPLAQLYCHSIMEHHHFDQCLMILNSPGNQILSGLSIEEYKTTLKIIKQAILATDLALYIKRLGEFAELIRKNQFNLEDPHQKELFLAMLMTACDLSAITKPWPIQQRIAELVATEFFDQGDRERKELNIEPTDLMNREKKNKIPSMQVGFIDAICLQLYEALTHVSEDCFPLLDGCRKNRQKWQALAEQQSGVSKGAELFTGIVPILIELNGDVNGHKFSVSGEGEGDATYGKLTLKFICTTGKLPVPWPTLVTTLSYGVQCFSRYPDHMKQHDFFKSAMPEGYIQERTIFFEDDGNYKSRAEVKFEGDTLVNRIELTGTDFKEDGNILGNKMEYNYNAHNVYIMTDKAKNGIKVNFKIRHNIEDGSVQLADHYQQNTPIGDGPVLLPDNHYLSTQSALSKDPNEKRDHMIYFGFVTAAAITHGMDELYK

SEQ ID NO: 512 - protein, 567 aa, Artificial Sequence
  source: /note="Description of Artificial Sequence: Synthetic polypeptide"
MVSKGAELFTGIVPILIELNGDVNGHKFSVSGEGEGDATYGKLTLKFICTTGKLPVPWPTLVTTLSYGVQCFSRYPDHMKQHDFFKSAMPEGYIQERTIFFEDDGNYKSRAEVKFEGDTLVNRIELTGTDFKEDGNILGNKMEYNYNAHNVYIMTDKAKNGIKVNFKIRHNIEDGSVQLADHYQQNTPIGDGPVLLPDNHYLSTQSALSKDPNEKRDHMIYFGFVTAAAITHGMDELYKSGEETRELQSLAAAVVPSAQTLKITDFSFSDFELSDLETALCTIRMFTDLNLVQNFQMKHEVLCRWILSVKKNYRKNVAYHNWRHAFNTAQCMFAALKAGKIQNKLTDLEILALLIAALSHDLDHRGVNNSYIQRSEHPLAQLYCHSIMEHHHFDQCLMILNSPGNQILSGLSIEEYKTTLKIIKQAILATDLALYIKRLGEFAELIRKNQFNLEDPHQKELFLAMLMTACDLSAITKPWPIQQRIAELVATEFFDQGDRERKELNIEPTDLMNREKKNKIPSMQVGFIDAICLQLYEALTHVSEDCFPLLDGCRKNRQKWQALAEQQ

SEQ ID NO: 513 - protein, 567 aa, Artificial Sequence
  source: /note="Description of Artificial Sequence: Synthetic polypeptide"
MVSKGAELFTGIVPILIELNGDVNGHKFSVSGEGEGDATYGKLTLKFICTTGKLPVPWPTLVTTLSYGVQCFSRYPDHMKQHDFFKSAMPEGYIQERTIFFEDDGNYKSRAEVKFEGDTLVNRIELTGTDFKEDGNILGNKMEYNYNAHNVYIMTDKAKNGIKVNFKIRHNIEDGSVQLADHYQQNTPIGDGPVLLPDNHYLSTQSALSKDPNEKRDHMIYFGFVTAAAITHGMDELYKSGEETRELQSLAAAVVPSAQTLKITDFSFSDFELSDLETALCTIRMFTDLNLVQNFQMKHEVLCRWILSVKKNYRKNVAFHNWRHAFNTAQCMFAALKAGKIQNKLTDLEILALLIAALSHDLDHRGVNNSYIQRSEHPLAQLYCHSIMEHHHFDQCLMILNSPGNQILSGLSIEEYKTTLKIIKQAILATDLALYIKRLGEFFELIRKNQFNLEDPHQKELFLAMLMTACDLSAITKPWPIQQRIAELVATEFFDQGDRERKELNIEPTDLMNREKKNKIPSMQVGFIDAICLQLYEALTHVSEDCFPLLDGCRKNRQKWQALAEQQ

SEQ ID NO: 514 - protein, 567 aa, Artificial Sequence
  source: /note="Description of Artificial Sequence: Synthetic polypeptide"
MVSKGAELFTGIVPILIELNGDVNGHKFSVSGEGEGDATYGKLTLKFICTTGKLPVPWPTLVTTLSYGVQCFSRYPDHMKQHDFFKSAMPEGYIQERTIFFEDDGNYKSRAEVKFEGDTLVNRIELTGTDFKEDGNILGNKMEYNYNAHNVYIMTDKAKNGIKVNFKIRHNIEDGSVQLADHYQQNTPIGDGPVLLPDNHYLSTQSALSKDPNEKRDHMIYFGFVTAAAITHGMDELYKSGEETRELQSLAAAVVPSAQTLKITDFSFSDFELSDLETALCTIRMFTDLNLVQNFQMKHEVLCRWILSVKKNYRKNVAWHNWRHAFNTAQCMFAALKAGKIQNKLTDLEILALLIAALSHDLDHRGVNNSYIQRSEHPLAQLYCHSIMEHHHFDQCLMILNSPGNQILSGLSIEEYKTTLKIIKQAILATDLALYIKRLGEFFELIRKNQFNLEDPHQKELFLAMLMTACDLSAITKPWPIQQRIAELVATEFFDQGDRERKELNIEPTDLMNREKKNKIPSMQVGFIDAICLQLYEALTHVSEDCFPLLDGCRKNRQKWQALAEQQ

SEQ ID NO: 515 - protein, 567 aa, Artificial Sequence
  source: /note="Description of Artificial Sequence: Synthetic polypeptide"
MVSKGAELFTGIVPILIELNGDVNGHKFSVSGEGEGDATYGKLTLKFICTTGKLPVPWPTLVTTLSYGVQCFSRYPDHMKQHDFFKSAMPEGYIQERTIFFEDDGNYKSRAEVKFEGDTLVNRIELTGTDFKEDGNILGNKMEYNYNAHNVYIMTDKAKNGIKVNFKIRHNIEDGSVQLADHYQQNTPIGDGPVLLPDNHYLSTQSALSKDPNEKRDHMIYFGFVTAAAITHGMDELYKSGEETRELQSLAAAVVPSAQTLKITDFSFSDFELSDLETALCTIRMFTDLNLVQNFQMKHEVLCRWILSVKKNYRKNVAAHNWRHAFNTAQCMFAALKAGKIQNKLTDLEILALLIAALSHDLDHRGVNNSYIQRSEHPLAQLYCHSIMEHHHFDQCLMILNSPGNQILSGLSIEEYKTTLKIIKQAILATDLALYIKRLGEFFELIRKNQFNLEDPHQKELFLAMLMTACDLSAITKPWPIQQRIAELVATEFFDQGDRERKELNIEPTDLMNREKKNKIPSMQVGFIDAICLQLYEALTHVSEDCFPLLDGCRKNRQKWQALAEQQ

SEQ ID NO: 516 - protein, 567 aa, Artificial Sequence
  source: /note="Description of Artificial Sequence: Synthetic polypeptide"
MVSKGAELFTGIVPILIELNGDVNGHKFSVSGEGEGDATYGKLTLKFICTTGKLPVPWPTLVTTLSYGVQCFSRYPDHMKQHDFFKSAMPEGYIQERTIFFEDDGNYKSRAEVKFEGDTLVNRIELTGTDFKEDGNILGNKMEYNYNAHNVYIMTDKAKNGIKVNFKIRHNIEDGSVQLADHYQQNTPIGDGPVLLPDNHYLSTQSALSKDPNEKRDHMIYFGFVTAAAITHGMDELYKSGEETRELQSLAAAVVPSAQTLKITDFSFSDFELSDLETALCTIRMFTDLNLVQNFQMKHEVLCRWILSVKKNYRKNVAYHNWRHAFNTAQCMFAALKAGKIQNKLTDLEILALLIAALSADLDHRGVNNSYIQRSEHPLAQLYCHSIMEHHHFDQCLMILNSPGNQILSGLSIEEYKTTLKIIKQAILATDLALYIKRLGEFFELIRKNQFNLEDPHQKELFLAMLMTACDLSAITKPWPIQQRIAELVATEFFDQGDRERKELNIEPTDLMNREKKNKIPSMQVGFIDAICLQLYEALTHVSEDCFPLLDGCRKNRQKWQALAEQQ

SEQ ID NO: 517 - protein, 567 aa, Artificial Sequence
  source: /note="Description of Artificial Sequence: Synthetic polypeptide"
MVSKGAELFTGIVPILIELNGDVNGHKFSVSGEGEGDATYGKLTLKFICTTGKLPVPWPTLVTTLSYGVQCFSRYPDHMKQHDFFKSAMPEGYIQERTIFFEDDGNYKSRAEVKFEGDTLVNRIELTGTDFKEDGNILGNKMEYNYNAHNVYIMTDKAKNGIKVNFKIRHNIEDGSVQLADHYQQNTPIGDGPVLLPDNHYLSTQSALSKDPNEKRDHMIYFGFVTAAAITHGMDELYKSGEETRELQSLAAAVVPSAQTLKITDFSFSDFELSDLETALCTIRMFTDLNLVQNFQMKHEVLCRWILSVKKNYRKNVAYHNWRHAFNTAQCMFAALKAGKIQNKLTDLEILALLIAALSHDLDHRGVNNSYIQRSEHPLAQLYCHSIMEHHHFDQCLMILNSPGNQILSGLSIEEYKTTLKIIKQAILATDLALYIKRLGEFFELIRKNQFNLEDPHQKELFLAMLMTACALSAITKPWPIQQRIAELVATEFFDQGDRERKELNIEPTDLMNREKKNKIPSMQVGFIDAICLQLYEALTHVSEDCFPLLDGCRKNRQKWQALAEQQ

SEQ ID NO: 518 - protein, 569 aa, Artificial Sequence
  source: /note="Description of Artificial Sequence: Synthetic polypeptide"
MVSKGAELFTGIVPILIELNGDVNGHKFSVSGEGEGDATYGKLTLKFICTTGKLPVPWPTLVTTLSYGVQCFSRYPDHMKQHDFFKSAMPEGYIQERTIFFEDDGNYKSRAEVKFEGDTLVNRIELTGTDFKEDGNILGNKMEYNYNAHNVYIMTDKAKNGIKVNFKIRHNIEDGSVQLADHYQQNTPIGDGPVLLPDNHYLSTQSALSKDPNEKRDHMIYFGFVTAAAITHGMDELYKSGEETRELQSLAAAVVPSAQTLKITDFSFSDFELSDLETALCTIRMFTDLNLVQNFQMKHEVLCRWILSVKKNYRKNVAYHNWRHAFNTAQCMFAALKAGKIQNKLTDLEILALLIAALSHDLDHRGVNNSYIQRSEHPLAQLYCHSIMEHHHFDQCLMILNSPGNQILSGLSIEEYKTTLKIIKQAILATDLALYIKRLGEFFELIRKNQFNLEDPHQKELFLAMLMTACDLSAITKPWPIQQRIAELVATEFFDQGDRERKELNIEPTDLMNREKKNKIPSMQVGFIDAICLQLYEALTHVSEDCFPLLDGCRKNRQKWQALAEQQSR

SEQ ID NO: 519 - DNA, 978 bp, Artificial Sequence
  source: /note="Description of Artificial Sequence: Synthetic Destabilizing Domain (DD)"
gaagaaacaagagagctacagtcgttagcggctgctgtggtgccatctgcccagacccttaaaattactgactttagcttcagtgactttgagctgtctgatctggaaacagcactgtgtacaattcggatgtttactgacctcaaccttgtgcagaacttccagatgaaacatgaggttctttgcagatggattttaagtgttaagaagaattatcggaagaatgttgcctatcataattggagacatgcctttaatacagctcagtgcatgtttgctgctctaaaagcaggcaaaattcagaacaagctgactgacctggagatacttgcattgctgattgctgcactaagccacgatttggatcaccgtggtgtgaataactcttacatacagcgaagtgaacatccacttgcccagctttactgccattcaatcatggaacaccatcattttgaccagtgcctgatgattcttaatagtccaggcaatcagattctcagtggcctctccattgaagaatataagaccacgttgaaaataatcaagcaagctattttagctacagacctagcactgtacattaagaggcgaggagaatttgctgaacttataagaaaaaatcaattcaatttggaagatcctcatcaaaaggagttgtttttggcaatgctgatgacagcttgtaatctttctgcaattacaaaaccctggcctattcaacaacggatagcagaacttgtagcaactgaattttttgatcaaggagacagagagagaaaagaactcaacatagaacccactgatctaatgaacagggagaagaaaaacaaaatcccaagtatgcaagttgggttcatagatgccatctgcttgcaactgtatgaggccctgacccacgtgtcagaggactgtttccctttgctagatggctgcagaaagaacaggcagaaatggcaggcccttgcagaacagcag

SEQ ID NO: 520 - DNA, 978 bp, Artificial Sequence
  source: /note="Description of Artificial Sequence: Synthetic Destabilizing Domain (DD)"
gaagaaacaagagagctacagtcgttagcggctgctgtggtgccatctgcccagacccttaaaattactgactttagcttcagtgactttgagctgtctgatctggaaacagcactgtgtacaattcggatgtttactgacctcaaccttgtgcagaacttccagatgaaacatgaggttctttgcagatggattttaagtgttaagaagaattatcggaagaatgttgcctatcataattggagacatgcctttaatacagctcagtgcatgtttgctgctctaaaagcaggcaaaattcagaacaagctgactgacctggagatacttgcattgctgattgctgcactaagccacgatttggatcaccgtggtgtgaataactcttacatacagcgaagtgaacatccacttgcccagctttactgccattcaatcatggaacaccatcattttgaccagtgcctgatgattcttaatagtccaggcaatcagattctcagtggcctctccattgaagaatataagaccacgttgaaaataatcaagcaagctattttagctacagacctagcactgtacattaagaggctaggagaattttttgaacttataagaaaaaatcaattcaatttggaagatcctcatcaaaaggagttgtttttggcaatgctgatgacagcttgtaatctttctgcaattacaaaaccctggcctattcaacaacggatagcagaacttgtagcaactgaattttttgatcaaggagacagagagagaaaagaactcaacatagaacccactgatctaatgaacagggagaagaaaaacaaaatcccaagtatgcaagttgggttcatagatgccatctgcttgcaactgtatgaggccctgacccacgtgtcagaggactgtttccctttgctagatggctgcagaaagaacaggcagaaatggcaggcccttgcagaacagcag

SEQ ID NO: 521 - DNA, 978 bp, Artificial Sequence
  source: /note="Description of Artificial Sequence: Synthetic Destabilizing Domain (DD)"
gaagaaacaagagagctacagtcgttagcggctgctgtggtgccatctgcccagacccttaaaattactgactttagcttcagtgactttgagctgtctgatctggaaacagcactgtgtacaattcggatgtttactgacctcaaccttgtgcagaacttccagatgaaacatgaggttctttgcagatggattttaagtgttaagaagaattatcggaagaatgttgcctttcataattggagacatgcctttaatacagctcagtgcatgtttgctgctctaaaagcaggcaaaattcagaacaagctgactgacctggagatacttgcattgctgattgctgcactaagccacgatttggatcaccgtggtgtgaataactcttacatacagcgaagtgaacatccacttgcccagctttactgccattcaatcatggaacaccatcattttgaccagtgcctgatgattcttaatagtccaggcaatcagattctcagtggcctctccattgaagaatataagaccacgttgaaaataatcaagcaagctattttagctacagacctagcactgtacattaagaggctaggagaattttttgaacttataagaaaaaatcaattcaatttggaagatcctcatcaaaaggagttgtttttggcaatgctgatgacagcttgtgatctttctgcaattacaaaaccctggcctattcaacaacggatagcagaacttgtagcaactgaattttttgatcaaggagacagagagagaaaagaactcaacatagaacccactgatctaatgaacagggagaagaaaaacaaaatcccaagtatgcaagttgggttcatagatgccatctgcttgcaactgtatgaggccctgacccacgtgtcagaggactgtttccctttgctagatggctgcagaaagaacaggcagaaatggcaggcccttgcagaacagcag

SEQ ID NO: 522 - DNA, 978 bp, Artificial Sequence
  source: /note="Description of Artificial Sequence: Synthetic Destabilizing Domain (DD)"
gaagaaacaagagagctacagtcgttagcggctgctgtggtgccatctgcccagacccttaaaattactgactttagcttcagtgactttgagctgtctgatctggaaacagcactgtgtacaattcggatgtttactgacctcaaccttgtgcagaacttccagatgaaacatgaggttctttgcagatggattttaagtgttaagaagaattatcggaagaatgttgcctggcataattggagacatgcctttaatacagctcagtgcatgtttgctgctctaaaagcaggcaaaattcagaacaagctgactgacctggagatacttgcattgctgattgctgcactaagccacgatttggatcaccgtggtgtgaataactcttacatacagcgaagtgaacatccacttgcccagctttactgccattcaatcatggaacaccatcattttgaccagtgcctgatgattcttaatagtccaggcaatcagattctcagtggcctctccattgaagaatataagaccacgttgaaaataatcaagcaagctattttagctacagacctagcactgtacattaagaggctaggagaattttttgaacttataagaaaaaatcaattcaatttggaagatcctcatcaaaaggagttgtttttggcaatgctgatgacagcttgtgatctttctgcaattacaaaaccctggcctattcaacaacggatagcagaacttgtagcaactgaattttttgatcaaggagacagagagagaaaagaactcaacatagaacccactgatctaatgaacagggagaagaaaaacaaaatcccaagtatgcaagttgggttcatagatgccatctgcttgcaactgtatgaggccctgacccacgtgtcagaggactgtttccctttgctagatggctgcagaaagaacaggcagaaatggcaggcccttgcagaacagcag

SEQ ID NO: 523 - DNA, 978 bp, Artificial Sequence
  source: /note="Description of Artificial Sequence: Synthetic Destabilizing Domain (DD)"
gaagaaacaagagagctacagtcgttagcggctgctgtggtgccatctgcccagacccttaaaattactgactttagcttcagtgactttgagctgtctgatctggaaacagcactgtgtacaattcggatgtttactgacctcaaccttgtgcagaacttccagatgaaacatgaggttctttgcagatggattttaagtgttaagaagaattatcggaagaatgttgccgctcataattggagacatgcctttaatacagctcagtgcatgtttgctgctctaaaagcaggcaaaattcagaacaagctgactgacctggagatacttgcattgctgattgctgcactaagccacgatttggatcaccgtggtgtgaataactcttacatacagcgaagtgaacatccacttgcccagctttactgccattcaatcatggaacaccatcattttgaccagtgcctgatgattcttaatagtccaggcaatcagattctcagtggcctctccattgaagaatataagaccacgttgaaaataatcaagcaagctattttagctacagacctagcactgtacattaagaggctaggagaattttttgaacttataagaaaaaatcaattcaatttggaagatcctcatcaaaaggagttgtttttggcaatgctgatgacagcttgtgatctttctgcaattacaaaaccctggcctattcaacaacggatagcagaacttgtagcaactgaattttttgatcaaggagacagagagagaaaagaactcaacatagaacccactgatctaatgaacagggagaagaaaaacaaaatcccaagtatgcaagttgggttcatagatgccatctgcttgcaactgtatgaggccctgacccacgtgtcagaggactgtttccctttgctagatggctgcagaaagaacaggcagaaatggcaggcccttgcagaacagcag

SEQ ID NO: 524 - DNA, 978 bp, Artificial Sequence
  source: /note="Description of Artificial Sequence: Synthetic Destabilizing Domain (DD)"
gaagaaacaagagagctacagtcgttagcggctgctgtggtgccatctgcccagacccttaaaattactgactttagcttcagtgactttgagctgtctgatctggaaacagcactgtgtacaattcggatgtttactgacctcaaccttgtgcagaacttccagatgaaacatgaggttctttgcagatggattttaagtgttaagaagaattatcggaagaatgttgcctatcataattggagacatgcctttaatacagctcagtgcatgtttgctgctctaaaagcaggcaaaattcagaacaagctgactgacctggagatacttgcattgctgattgctgcactaagcgccgatttggatcaccgtggtgtgaataactcttacatacagcgaagtgaacatccacttgcccagctttactgccattcaatcatggaacaccatcattttgaccagtgcctgatgattcttaatagtccaggcaatcagattctcagtggcctctccattgaagaatataagaccacgttgaaaataatcaagcaagctattttagctacagacctagcactgtacattaagaggctaggagaattttttgaacttataagaaaaaatcaattcaatttggaagatcctcatcaaaaggagttgtttttggcaatgctgatgacagcttgtgatctttctgcaattacaaaaccctggcctattcaacaacggatagcagaacttgtagcaactgaattttttgatcaaggagacagagagagaaaagaactcaacatagaacccactgatctaatgaacagggagaagaaaaacaaaatcccaagtatgcaagttgggttcatagatgccatctgcttgcaactgtatgaggccctgacccacgtgtcagaggactgtttccctttgctagatggctgcagaaagaacaggcagaaatggcaggcccttgcagaacagcag

SEQ ID NO: 525 - DNA, 978 bp, Artificial Sequence
  source: /note="Description of Artificial Sequence: Synthetic Destabilizing Domain (DD)"
gaagaaacaagagagctacagtcgttagcggctgctgtggtgccatctgcccagacccttaaaattactgactttagcttcagtgactttgagctgtctgatctggaaacagcactgtgtacaattcggatgtttactgacctcaaccttgtgcagaacttccagatgaaacatgaggttctttgcagatggattttaagtgttaagaagaattatcggaagaatgttgcctatcataattggagacatgcctttaatacagctcagtgcatgtttgctgctctaaaagcaggcaaaattcagaacaagctgactgacctggagatacttgcattgctgattgctgcactaagccacgatttggatcaccgtggtgtgaataactcttacatacagcgaagtgaacatccacttgcccagctttactgccattcaatcatggaacaccatcattttgaccagtgcctgatgattcttaatagtccaggcaatcagattctcagtggcctctccattgaagaatataagaccacgttgaaaataatcaagcaagctattttagctacagacctagcactgtacattaagaggctaggagaattttttgaacttataagaaaaaatcaattcaatttggaagatcctcatcaaaaggagttgtttttggcaatgctgatgacagcttgtgccctttctgcaattacaaaaccctggcctattcaacaacggatagcagaacttgtagcaactgaattttttgatcaaggagacagagagagaaaagaactcaacatagaacccactgatctaatgaacagggagaagaaaaacaaaatcccaagtatgcaagttgggttcatagatgccatctgcttgcaactgtatgaggccctgacccacgtgtcagaggactgtttccctttgctagatggctgcagaaagaacaggcagaaatggcaggcccttgcagaacagcag

SEQ ID NO: 526 - DNA, 1704 bp, Artificial Sequence
  source: /note="Description of Artificial Sequence: Synthetic polynucleotide"
atggaagaaacaagagagctacagtcgttagcggctgctgtggtgccatctgcccagacccttaaaattactgactttagcttcagtgactttgagctgtctgatctggaaacagcactgtgtacaattcggatgtttactgacctcaaccttgtgcagaacttccagatgaaacatgaggttctttgcagatggattttaagtgttaagaagaattatcggaagaatgttgcctatcataattggagacatgcctttaatacagctcagtgcatgtttgctgctctaaaagcaggcaaaattcagaacaagctgactgacctggagatacttgcattgctgattgctgcactaagccacgatttggatcaccgtggtgtgaataactcttacatacagcgaagtgaacatccacttgcccagctttactgccattcaatcatggaacaccatcattttgaccagtgcctgatgattcttaatagtccaggcaatcagattctcagtggcctctccattgaagaatataagaccacgttgaaaataatcaagcaagctattttagctacagacctagcactgtacattaagaggctaggagaatttgctgaacttataagaaaaaatcaattcaatttggaagatcctcatcaaaaggagttgtttttggcaatgctgatgacagcttgtgatctttctgcaattacaaaaccctggcctattcaacaacggatagcagaacttgtagcaactgaattttttgatcaaggagacagagagagaaaagaactcaacatagaacccactgatctaatgaacagggagaagaaaaacaaaatcccaagtatgcaagttgggttcatagatgccatctgcttgcaactgtatgaggccctgacccacgtgtcagaggactgtttccctttgctagatggctgcagaaagaacaggcagaaatggcaggcccttgcagaacagcagagtggtgtgagcaagggcgccgagctgttcaccggcatcgtgcccatcctgatcgagctgaatggcgatgtgaatggccacaagttcagcgtgagcggcgagggcgagggcgatgccacctacggcaagctgaccctgaagttcatctgcaccaccggcaagctgcctgtgccctggcccaccctggtgaccaccctgagctacggcgtgcagtgcttctcacgctaccccgatcacatgaagcagcacgacttcttcaagagcgccatgcctgagggctacatccaggagcgcaccatcttcttcgaggatgacggcaactacaagtcgcgcgccgaggtgaagttcgagggcgataccctggtgaatcgcatcgagctgaccggcaccgatttcaaggaggatggcaacatcctgggcaataagatggagtacaactacaacgcccacaatgtgtacatcatgaccgacaaggccaagaatggcatcaaggtgaacttcaagatccgccacaacatcgaggatggcagcgtgcagctggccgaccactaccagcagaatacccccatcggcgatggccctgtgctgctgcccgataaccactacctgtccacccagagcgccctgtccaaggaccccaacgagaagcgcgatcacatgatctacttcggcttcgtgaccgccgccgccatcacccacggcatggatgagctgtacaagtga

SEQ ID NO: 527 - DNA, 1704 bp, Artificial Sequence
  source: /note="Description of Artificial Sequence: Synthetic polynucleotide"
atggtgagcaagggcgccgagctgttcaccggcatcgtgcccatcctgatcgagctgaatggcgatgtgaatggccacaagttcagcgtgagcggcgagggcgagggcgatgccacctacggcaagctgaccctgaagttcatctgcaccaccggcaagctgcctgtgccctggcccaccctggtgaccaccctgagctacggcgtgcagtgcttctcacgctaccccgatcacatgaagcagcacgacttcttcaagagcgccatgcctgagggctacatccaggagcgcaccatcttcttcgaggatgacggcaactacaagtcgcgcgccgaggtgaagttcgagggcgataccctggtgaatcgcatcgagctgaccggcaccgatttcaaggaggatggcaacatcctgggcaataagatggagtacaactacaacgcccacaatgtgtacatcatgaccgacaaggccaagaatggcatcaaggtgaacttcaagatccgccacaacatcgaggatggcagcgtgcagctggccgaccactaccagcagaatacccccatcggcgatggccctgtgctgctgcccgataaccactacctgtccacccagagcgccctgtccaaggaccccaacgagaagcgcgatcacatgatctacttcggcttcgtgaccgccgccgccatcacccacggcatggatgagctgtacaagagtggtgaagaaacaagagagctacagtcgttagcggctgctgtggtgccatctgcccagacccttaaaattactgactttagcttcagtgactttgagctgtctgatctggaaacagcactgtgtacaattcggatgtttactgacctcaaccttgtgcagaacttccagatgaaacatgaggttctttgcagatggattttaagtgttaagaagaattatcggaagaatgttgcctatcataattggagacatgcctttaatacagctcagtgcatgtttgctgctctaaaagcaggcaaaattcagaacaagctgactgacctggagatacttgcattgctgattgctgcactaagccacgatttggatcaccgtggtgtgaataactcttacatacagcgaagtgaacatccacttgcccagctttactgccattcaatcatggaacaccatcattttgaccagtgcctgatgattcttaatagtccaggcaatcagattctcagtggcctctccattgaagaatataagaccacgttgaaaataatcaagcaagctattttagctacagacctagcactgtacattaagaggctaggagaatttgctgaacttataagaaaaaatcaattcaatttggaagatcctcatcaaaaggagttgtttttggcaatgctgatgacagcttgtgatctttctgcaattacaaaaccctggcctattcaacaacggatagcagaacttgtagcaactgaattttttgatcaaggagacagagagagaaaagaactcaacatagaacccactgatctaatgaacagggagaagaaaaacaaaatcccaagtatgcaagttgggttcatagatgccatctgcttgcaactgtatgaggccctgacccacgtgtcagaggactgtttccctttgctagatggctgcagaaagaacaggcagaaatggcaggcccttgcagaacagcagtga

SEQ ID NO: 528 - DNA, 1704 bp, Artificial Sequence
  source: /note="Description of Artificial Sequence: Synthetic polynucleotide"
atggtgagcaagggcgccgagctgttcaccggcatcgtgcccatcctgatcgagctgaatggcgatgtgaatggccacaagttcagcgtgagcggcgagggcgagggcgatgccacctacggcaagctgaccctgaagttcatctgcaccaccggcaagctgcctgtgccctggcccaccctggtgaccaccctgagctacggcgtgcagtgcttctcacgctaccccgatcacatgaagcagcacgacttcttcaagagcgccatgcctgagggctacatccaggagcgcaccatcttcttcgaggatgacggcaactacaagtcgcgcgccgaggtgaagttcgagggcgataccctggtgaatcgcatcgagctgaccggcaccgatttcaaggaggatggcaacatcctgggcaataagatggagtacaactacaacgcccacaatgtgtacatcatgaccgacaaggccaagaatggcatcaaggtgaacttcaagatccgccacaacatcgaggatggcagcgtgcagctggccgaccactaccagcagaatacccccatcggcgatggccctgtgctgctgcccgataaccactacctgtccacccagagcgccctgtccaaggaccccaacgagaagcgcgatcacatgatctacttcggcttcgtgaccgccgccgccatcacccacggcatggatgagctgtacaagagtggtgaagaaacaagagagctacagtcgttagcggctgctgtggtgccatctgcccagacccttaaaattactgactttagcttcagtgactttgagctgtctgatctggaaacagcactgtgtacaattcggatgtttactgacctcaaccttgtgcagaacttccagatgaaacatgaggttctttgcagatggattttaagtgttaagaagaattatcggaagaatgttgcctttcataattggagacatgcctttaatacagctcagtgcatgtttgctgctctaaaagcaggcaaaattcagaacaagctgactgacctggagatacttgcattgctgattgctgcactaagccacgatttggatcaccgtggtgtgaataactcttacatacagcgaagtgaacatccacttgcccagctttactgccattcaatcatggaacaccatcattttgaccagtgcctgatgattcttaatagtccaggcaatcagattctcagtggcctctccattgaagaatataagaccacgttgaaaataatcaagcaagctattttagctacagacctagcactgtacattaagaggctaggagaattttttgaacttataagaaaaaatcaattcaatttggaagatcctcatcaaaaggagttgtttttggcaatgctgatgacagcttgtgatctttctgcaattacaaaaccctggcctattcaacaacggatagcagaacttgtagcaactgaattttttgatcaaggagacagagagagaaaagaactcaacatagaacccactgatctaatgaacagggagaagaaaaacaaaatcccaagtatgcaagttgggttcatagatgccatctgcttgcaactgtatgaggccctgacccacgtgtcagaggactgtttccctttgctagatggctgcagaaagaacaggcagaaatggcaggcccttgcagaacagcagtga

SEQ ID NO: 529 - DNA, 1704 bp, Artificial Sequence
  source: /note="Description of Artificial Sequence: Synthetic polynucleotide"
atggtgagcaagggcgccgagctgttcaccggcatcgtgcccatcctgatcgagctgaatggcgatgtgaatggccacaagttcagcgtgagcggcgagggcgagggcgatgccacctacggcaagctgaccctgaagttcatctgcaccaccggcaagctgcctgtgccctggcccaccctggtgaccaccctgagctacggcgtgcagtgcttctcacgctaccccgatcacatgaagcagcacgacttcttcaagagcgccatgcctgagggctacatccaggagcgcaccatcttcttcgaggatgacggcaactacaagtcgcgcgccgaggtgaagttcgagggcgataccctggtgaatcgcatcgagctgaccggcaccgatttcaaggaggatggcaacatcctgggcaataagatggagtacaactacaacgcccacaatgtgtacatcatgaccgacaaggccaagaatggcatcaaggtgaacttcaagatccgccacaacatcgaggatggcagcgtgcagctggccgaccactaccagcagaatacccccatcggcgatggccctgtgctgctgcccgataaccactacctgtccacccagagcgccctgtccaaggaccccaacgagaagcgcgatcacatgatctacttcggcttcgtgaccgccgccgccatcacccacggcatggatgagctgtacaagagtggtgaagaaacaagagagctacagtcgttagcggctgctgtggtgccatctgcccagacccttaaaattactgactttagcttcagtgactttgagctgtctgatctggaaacagcactgtgtacaattcggatgtttactgacctcaaccttgtgcagaacttccagatgaaacatgaggttctttgcagatggattttaagtgttaagaagaattatcggaagaatgttgcctggcataattggagacatgcctttaatacagctcagtgcatgtttgctgctctaaaagcaggcaaaattcagaacaagctgactgacctggagatacttgcattgctgattgctgcactaagccacgatttggatcaccgtggtgtgaataactcttacatacagcgaagtgaacatccacttgcccagctttactgccattcaatcatggaacaccatcattttgaccagtgcctgatgattcttaatagtccaggcaatcagattctcagtggcctctccattgaagaatataagaccacgttgaaaataatcaagcaagctattttagctacagacctagcactgtacattaagaggctaggagaattttttgaacttataagaaaaaatcaattcaatttggaagatcctcatcaaaaggagttgtttttggcaatgctgatgacagcttgtgatctttctgcaattacaaaaccctggcctattcaacaacggatagcagaacttgtagcaactgaattttttgatcaaggagacagagagagaaaagaactcaacatagaacccactgatctaatgaacagggagaagaaaaacaaaatcccaagtatgcaagttgggttcatagatgccatctgcttgcaactgtatgaggccctgacccacgtgtcagaggactgtttccctttgctagatggctgcagaaagaacaggcagaaatggcaggcccttgcagaacagcagtga

SEQ ID NO: 530 - DNA, 1704 bp, Artificial Sequence
  source: /note="Description of Artificial Sequence: Synthetic polynucleotide"
atggtgagcaagggcgccgagctgttcaccggcatcgtgcccatcctgatcgagctgaatggcgatgtgaatggccacaagttcagcgtgagcggcgagggcgagggcgatgccacctacggcaagctgaccctgaagttcatctgcaccaccggcaagctgcctgtgccctggcccaccctggtgaccaccctgagctacggcgtgcagtgcttctcacgctaccccgatcacatgaagcagcacgacttcttcaagagcgccatgcctgagggctacatccaggagcgcaccatcttcttcgaggatgacggcaactacaagtcgcgcgccgaggtgaagttcgagggcgataccctggtgaatcgcatcgagctgaccggcaccgatttcaaggaggatggcaacatcctgggcaataagatggagtacaactacaacgcccacaatgtgtacatcatgaccgacaaggccaagaatggcatcaaggtgaacttcaagatccgccacaacatcgaggatggcagcgtgcagctggccgaccactaccagcagaatacccccatcggcgatggccctgtgctgctgcccgataaccactacctgtccacccagagcgccctgtccaaggaccccaacgagaagcgcgatcacatgatctacttcggcttcgtgaccgccgccgccatcacccacggcatggatgagctgtacaagagtggtgaagaaacaagagagctacagtcgttagcggctgctgtggtgccatctgcccagacccttaaaattactgactttagcttcagtgactttgagctgtctgatctggaaacagcactgtgtacaattcggatgtttactgacctcaaccttgtgcagaacttccagatgaaacatgaggttctttgcagatggattttaagtgttaagaagaattatcggaagaatgttgccgctcataattggagacatgcctttaatacagctcagtgcatgtttgctgctctaaaagcaggcaaaattcagaacaagctgactgacctggagatacttgcattgctgattgctgcactaagccacgatttggatcaccgtggtgtgaataactcttacatacagcgaagtgaacatccacttgcccagctttactgccattcaatcatggaacaccatcattttgaccagtgcctgatgattcttaatagtccaggcaatcagattctcagtggcctctccattgaagaatataagaccacgttgaaaataatcaagcaagctattttagctacagacctagcactgtacattaagaggctaggagaattttttgaacttataagaaaaaatcaattcaatttggaagatcctcatcaaaaggagttgtttttggcaatgctgatgacagcttgtgatctttctgcaattacaaaaccctggcctattcaacaacggatagcagaacttgtagcaactgaattttttgatcaaggagacagagagagaaaagaactcaacatagaacccactgatctaatgaacagggagaagaaaaacaaaatcccaagtatgcaagttgggttcatagatgccatctgcttgcaactgtatgaggccctgacccacgtgtcagaggactgtttccctttgctagatggctgcagaaagaacaggcagaaatggcaggcccttgcagaacagcagtga

SEQ ID NO: 531 - DNA, 1704 bp, Artificial Sequence
  source: /note="Description of Artificial Sequence: Synthetic polynucleotide"
atggtgagcaagggcgccgagctgttcaccggcatcgtgcccatcctgatcgagctgaatggcgatgtgaatggccacaagttcagcgtgagcggcgagggcgagggcgatgccacctacggcaagctgaccctgaagttcatctgcaccaccggcaagctgcctgtgccctggcccaccctggtgaccaccctgagctacggcgtgcagtgcttctcacgctaccccgatcacatgaagcagcacgacttcttcaagagcgccatgcctgagggctacatccaggagcgcaccatcttcttcgaggatgacggcaactacaagtcgcgcgccgaggtgaagttcgagggcgataccctggtgaatcgcatcgagctgaccggcaccgatttcaaggaggatggcaacatcctgggcaataagatggagtacaactacaacgcccacaatgtgtacatcatgaccgacaaggccaagaatggcatcaaggtgaacttcaagatccgccacaacatcgaggatggcagcgtgcagctggccgaccactaccagcagaatacccccatcggcgatggccctgtgctgctgcccgataaccactacctgtccacccagagcgccctgtccaaggaccccaacgagaagcgcgatcacatgatctacttcggcttcgtgaccgccgccgccatcacccacggcatggatgagctgtacaagagtggtgaagaaacaagagagctacagtcgttagcggctgctgtggtgccatctgcccagacccttaaaattactgactttagcttcagtgactttgagctgtctgatctggaaacagcactgtgtacaattcggatgtttactgacctcaaccttgtgcagaacttccagatgaaacatgaggttctttgcagatggattttaagtgttaagaagaattatcggaagaatgttgcctatcataattggagacatgcctttaatacagctcagtgcatgtttgctgctctaaaagcaggcaaaattcagaacaagctgactgacctggagatacttgcattgctgattgctgcactaagcgccgatttggatcaccgtggtgtgaataactcttacatacagcgaagtgaacatccacttgcccagctttactgccattcaatcatggaacaccatcattttgaccagtgcctgatgattcttaatagtccaggcaatcagattctcagtggcctctccattgaagaatataagaccacgttgaaaataatcaagcaagctattttagctacagacctagcactgtacattaagaggctaggagaattttttgaacttataagaaaaaatcaattcaatttggaagatcctcatcaaaaggagttgtttttggcaatgctgatgacagcttgtgatctttctgcaattacaaaaccctggcctattcaacaacggatagcagaacttgtagcaactgaattttttgatcaaggagacagagagagaaaagaactcaacatagaacccactgatctaatgaacagggagaagaaaaacaaaatcccaagtatgcaagttgggttcatagatgccatctgcttgcaactgtatgaggccctgacccacgtgtcagaggactgtttccctttgctagatggctgcagaaagaacaggcagaaatggcaggcccttgcagaacagcagtga

SEQ ID NO: 532 - DNA, 1704 bp, Artificial Sequence
  source: /note="Description of Artificial Sequence: Synthetic polynucleotide"
atggtgagcaagggcgccgagctgttcaccggcatcgtgcccatcctgatcgagctgaatggcgatgtgaatggccacaagttcagcgtgagcggcgagggcgagggcgatgccacctacggcaagctgaccctgaagttcatctgcaccaccggcaagctgcctgtgccctggcccaccctggtgaccaccctgagctacggcgtgcagtgcttctcacgctaccccgatcacatgaagcagcacgacttcttcaagagcgccatgcctgagggctacatccaggagcgcaccatcttcttcgaggatgacggcaactacaagtcgcgcgccgaggtgaagttcgagggcgataccctggtgaatcgcatcgagctgaccggcaccgatttcaaggaggatggcaacatcctgggcaataagatggagtacaactacaacgcccacaatgtgtacatcatgaccgacaaggccaagaatggcatcaaggtgaacttcaagatccgccacaacatcgaggatggcagcgtgcagctggccgaccactaccagcagaatacccccatcggcgatggccctgtgctgctgcccgataaccactacctgtccacccagagcgccctgtccaaggaccccaacgagaagcgcgatcacatgatctacttcggcttcgtgaccgccgccgccatcacccacggcatggatgagctgtacaagagtggtgaagaaacaagagagctacagtcgttagcggctgctgtggtgccatctgcccagacccttaaaattactgactttagcttcagtgactttgagctgtctgatctggaaacagcactgtgtacaattcggatgtttactgacctcaaccttgtgcagaacttccagatgaaacatgaggttctttgcagatggattttaagtgttaagaagaattatcggaagaatgttgcctatcataattggagacatgcctttaatacagctcagtgcatgtttgctgctctaaaagcaggcaaaattcagaacaagctgactgacctggagatacttgcattgctgattgctgcactaagccacgatttggatcaccgtggtgtgaataactcttacatacagcgaagtgaacatccacttgcccagctttactgccattcaatcatggaacaccatcattttgaccagtgcctgatgattcttaatagtccaggcaatcagattctcagtggcctctccattgaagaatataagaccacgttgaaaataatcaagcaagctattttagctacagacctagcactgtacattaagaggctaggagaattttttgaacttataagaaaaaatcaattcaatttggaagatcctcatcaaaaggagttgtttttggcaatgctgatgacagcttgtgccctttctgcaattacaaaaccctggcctattcaacaacggatagcagaacttgtagcaactgaattttttgatcaaggagacagagagagaaaagaactcaacatagaacccactgatctaatgaacagggagaagaaaaacaaaatcccaagtatgcaagttgggttcatagatgccatctgcttgcaactgtatgaggccctgacccacgtgtcagaggactgtttccctttgctagatggctgcagaaagaacaggcagaaatggcaggcccttgcagaacagcagtga

SEQ ID NO: 533 - DNA, 1710 bp, Artificial Sequence
  source: /note="Description of Artificial Sequence: Synthetic polynucleotide"
atggtgagcaagggcgccgagctgttcaccggcatcgtgcccatcctgatcgagctgaatggcgatgtgaatggccacaagttcagcgtgagcggcgagggcgagggcgatgccacctacggcaagctgaccctgaagttcatctgcaccaccggcaagctgcctgtgccctggcccaccctggtgaccaccctgagctacggcgtgcagtgcttctcacgctaccccgatcacatgaagcagcacgacttcttcaagagcgccatgcctgagggctacatccaggagcgcaccatcttcttcgaggatgacggcaactacaagtcgcgcgccgaggtgaagttcgagggcgataccctggtgaatcgcatcgagctgaccggcaccgatttcaaggaggatggcaacatcctgggcaataagatggagtacaactacaacgcccacaatgtgtacatcatgaccgacaaggccaagaatggcatcaaggtgaacttcaagatccgccacaacatcgaggatggcagcgtgcagctggccgaccactaccagcagaatacccccatcggcgatggccctgtgctgctgcccgataaccactacctgtccacccagagcgccctgtccaaggaccccaacgagaagcgcgatcacatgatctacttcggcttcgtgaccgccgccgccatcacccacggcatggatgagctgtacaagagtggtgaagaaacaagagagctacagtcgttagcggctgctgtggtgccatctgcccagacccttaaaattactgactttagcttcagtgactttgagctgtctgatctggaaacagcactgtgtacaattcggatgtttactgacctcaaccttgtgcagaacttccagatgaaacatgaggttctttgcagatggattttaagtgttaagaagaattatcggaagaatgttgcctatcataattggagacatgcctttaatacagctcagtgcatgtttgctgctctaaaagcaggcaaaattcagaacaagctgactgacctggagatacttgcattgctgattgctgcactaagccacgatttggatcaccgtggtgtgaataactcttacatacagcgaagtgaacatccacttgcccagctttactgccattcaatcatggaacaccatcattttgaccagtgcctgatgattcttaatagtccaggcaatcagattctcagtggcctctccattgaagaatataagaccacgttgaaaataatcaagcaagctattttagctacagacctagcactgtacattaagaggctaggagaattttttgaacttataagaaaaaatcaattcaatttggaagatcctcatcaaaaggagttgtttttggcaatgctgatgacagcttgtgatctttctgcaattacaaaaccctggcctattcaacaacggatagcagaacttgtagcaactgaattttttgatcaaggagacagagagagaaaagaactcaacatagaacccactgatctaatgaacagggagaagaaaaacaaaatcccaagtatgcaagttgggttcatagatgccatctgcttgcaactgtatgaggccctgacccacgtgtcagaggactgtttccctttgctagatggctgcagaaagaacaggcagaaatggcaggcccttgcagaacagcagtctagataa

SEQ ID NO: 534 - protein, 302 aa, Artificial Sequence
  source: /note="Description of Artificial Sequence: Synthetic Destabilizing Domain (DD)"
EETRELQSLAAAVVPSAQTLKITDFSFSDFELSDLETALCTIRMFTDLNLVQNFQMKHEVLCRWILSVKKNYRKNVAYHNWRHAFNTAQCMFAALKAGKIQNKLTDLEILALLIAALSHDLDHRGVNNSYIQRSEHPLAQLYCHSIMEHHHFDQCLMILNSPGNQILSGLSIEEYKTTLKIIKQAILATDLALYIKRLGEFFELIRKNQFNLEDPHQKELFLAMLMTACDLSAITKPWPIQQRIAELVATEFFDQGDRERKELNIEPTDLMNREKKNKIPSMQVGFIDAICLQLYEALTHVS

SEQ ID NO: 535 - protein, 294 aa, Artificial Sequence
  source: /note="Description of Artificial Sequence: Synthetic Destabilizing Domain (DD)"
SDLETALCTIRMFTDLNLVQNFQMKHEVLCRWILSVKKNYRKNVAYHNWRHAFNTAQCMFAALKAGKIQNKLTDLEILALLIAALSHDLDHRGVNNSYIQRSEHPLAQLYCHSIMEHHHFDQCLMILNSPGNQILSGLSIEEYKTTLKIIKQAILATDLALYIKRLGEFFELIRKNQFNLEDPHQKELFLAMLMTACDLSAITKPWPIQQRIAELVATEFFDQGDRERKELNIEPTDLMNREKKNKIPSMQVGFIDAICLQLYEALTHVSEDCFPLLDGCRKNRQKWQALAEQQ

SEQ ID NO: 536 - DNA, 978 bp, Artificial Sequence
  source: /note="Description of Artificial Sequence: Synthetic Destabilizing Domain (DD)"
gaagaaacaagagagctacagtcgttagcggctgctgtggtgccatctgcccagacccttaaaattactgactttagcttcagtgactttgagctgtctgatctggaaacagcactgtgtacaattcggatgtttactgacctcaaccttgtgcagaacttccagatgaaacatgaggttctttgcagatggattttaagtgttaagaagaattatcggaagaatgttgcctatcataattggagacatgcctttaatacagctcagtgcatgtttgctgctctaaaagcaggcaaaattcagaacaagctgactgacctggagatacttgcattgctgattgctgcactaagccacgatttggatcaccgtggtgtgaataactcttacatacagcgaagtgaacatccacttgcccagctttactgccattcaatcatggaacaccatcattttgaccagtgcctgatgattcttaatagtccaggcaatcagattctcagtggcctctccattgaagaatataagaccacgttgaaaataatcaagcaagctattttagctacagacctagcactgtacattaagcggctaggagaattttttgaacttataagaaaaaatcaattcaatttggaagatcctcatcaaaaggagttgtttttggcaatgctgatgacagcttgtgatctttctgcaattacaaaaccctggcctattcaacaacggatagcagaacttgtagcaactgaattttttgatcaaggagacagagagagaaaagaactcaacatagaacccactgatctaatgaacagggagaagaaaaacaaaatcccaagtatgcaagttgggttcatagatgccatctgcttgcaactgtatgaggccctgacccacgtgtcagaggactgtttccctttgctagatggctgcagaaagaacaggcagaaatggcaggcccttgcagaacagcag

SEQ ID NO: 537 - DNA, 906 bp, Artificial Sequence
  source: /note="Description of Artificial Sequence: Synthetic Destabilizing Domain (DD)"
gaagaaacaagagagctacagtcgttagcggctgctgtggtgccatctgcccagacccttaaaattactgactttagcttcagtgactttgagctgtctgatctggaaacagcactgtgtacaattcggatgtttactgacctcaaccttgtgcagaacttccagatgaaacatgaggttctttgcagatggattttaagtgttaagaagaattatcggaagaatgttgcctatcataattggagacatgcctttaatacagctcagtgcatgtttgctgctctaaaagcaggcaaaattcagaacaagctgactgacctggagatacttgcattgctgattgctgcactaagccacgatttggatcaccgtggtgtgaataactcttacatacagcgaagtgaacatccacttgcccagctttactgccattcaatcatggaacaccatcattttgaccagtgcctgatgattcttaatagtccaggcaatcagattctcagtggcctctccattgaagaatataagaccacgttgaaaataatcaagcaagctattttagctacagacctagcactgtacattaagcggctaggagaattttttgaacttataagaaaaaatcaattcaatttggaagatcctcatcaaaaggagttgtttttggcaatgctgatgacagcttgtgatctttctgcaattacaaaaccctggcctattcaacaacggatagcagaacttgtagcaactgaattttttgatcaaggagacagagagagaaaagaactcaacatagaacccactgatctaatgaacagggagaagaaaaacaaaatcccaagtatgcaagttgggttcatagatgccatctgcttgcaactgtatgaggccctgacccacgtgtca

SEQ ID NO: 538 - DNA, 882 bp, Artificial Sequence
  source: /note="Description of Artificial Sequence: Synthetic Destabilizing Domain (DD)"
agtgatctggaaacagcactgtgtacaattcggatgtttactgacctcaaccttgtgcagaacttccagatgaaacatgaggttctttgcagatggattttaagtgttaagaagaattatcggaagaatgttgcctatcataattggagacatgcctttaatacagctcagtgcatgtttgctgctctaaaagcaggcaaaattcagaacaagctgactgacctggagatacttgcattgctgattgctgcactaagccacgatttggatcaccgtggtgtgaataactcttacatacagcgaagtgaacatccacttgcccagctttactgccattcaatcatggaacaccatcattttgaccagtgcctgatgattcttaatagtccaggcaatcagattctcagtggcctctccattgaagaatataagaccacgttgaaaataatcaagcaagctattttagctacagacctagcactgtacattaagcggctaggagaattttttgaacttataagaaaaaatcaattcaatttggaagatcctcatcaaaaggagttgtttttggcaatgctgatgacagcttgtgatctttctgcaattacaaaaccctggcctattcaacaacggatagcagaacttgtagcaactgaattttttgatcaaggagacagagagagaaaagaactcaacatagaacccactgatctaatgaacagggagaagaaaaacaaaatcccaagtatgcaagttgggttcatagatgccatctgcttgcaactgtatgaggccctgacccacgtgtcagaggactgtttccctttgctagatggctgcagaaagaacaggcagaaatggcaggcccttgcagaacagcag

SEQ ID NO: 539 - protein, 121 aa, Artificial Sequence
  source: /note="Description of Artificial Sequence: Synthetic heavy chain variable domain"
EVQLVESGGGLVQPGGSLRLSCAASGFTFSSYWMSWVRQAPGKGLEWVSAISGSGGSTYYADSVKGRFTISRDNSKNTLYLQMNSLRAEDTAVYYCARDRYSNYVGWFDPWGQGTLVTVSS

SEQ ID NO: 540 - protein, 123 aa, Artificial Sequence
  source: /note="Description of Artificial Sequence: Synthetic heavy chain variable domain"
QVQLVQSGGGLVQPGGSLRLSCAASGFTFSSYEMNWVRQAPGKGLEWVSYISSSGSTIYYADSVKGRFTISRDNAKNSLYLQMNSLRAEDTAVYYCAREMQFGWELLGAFDIWGQGTMVTVSS

SEQ ID NO: 541 - protein, 139 aa, Artificial Sequence
  source: /note="Description of Artificial Sequence: Synthetic heavy chain variable domain"
MNFGLSLIFLVLILKGVQCEVMLVESGGGLVKPGGSLKLSCAASGFTFSSYTMSWVRQTPEKRLEWVASISSGGGNTYYADSVKGRFTMSRDNAKNNLYLQMSSLRSEDTALYYCARSYYYGISYDTYWGQGTLVTVSA

SEQ ID NO: 542 - protein, 136 aa, Artificial Sequence
  source: /note="Description of Artificial Sequence: Synthetic heavy chain variable domain"
MDWLWNLLFLMAAAQSIQAQIQLVQSGPELKKPGETVKISCKASGYTFTNYGMNWVKQAPGKGLKWMGWINTDTGKPTYTEEFKGRFAFSLATSASTAYLQINNLRNEDTATYFCGRVTADSMDYWGQGTSVTVSS

SEQ ID NO: 543 - protein, 119 aa, Artificial Sequence
  source: /note="Description of Artificial Sequence: Synthetic heavy chain variable domain"
QVQLQQSGAEVKKPGSSVKVSCKASGYAFSSYISWVRQAPGQGLEWMGGQIYPGDGDTNYAQKFQGRVTITADESTSTAYMELSSLRSEDTAVYYCVRYYYGSSGYFDYWWGQGTMVTV

SEQ ID NO: 544 - protein, 117 aa, Artificial Sequence
  source: /note="Description of Artificial Sequence: Synthetic heavy chain variable domain"
QVQLQQSGAEVKKPGSSVKVSCKASGYTFTDHFISWVRQAPGQGLEWMGGLNPYSGGTNYAQKFQGRVTITADESTSTAYMELSSLRSEDTAVYYCARHNWGAYFDYWWGQGTMVTV

SEQ ID NO: 545 - protein, 119 aa, Artificial Sequence
  source: /note="Description of Artificial Sequence: Synthetic heavy chain variable domain"
QVQLQQSGAEVKKPGSSVKVSCKASGYTFTDYEISWVRQAPGQGLEWMGGIDPETGGTNYAQKFQGRVTITADESTSTAYMELSSLRSEDTAVYYCARRRYYGSSSFDYWWGQGTMVTV

SEQ ID NO: 546 - protein, 120 aa, Artificial Sequence
  source: /note="Description of Artificial Sequence: Synthetic heavy chain variable domain"
ALQLQQSGAELVRPGASVTLSCKASGYTFTDYEMHWVKQTPVHGLEWIGAIDPETGGTAYNQKFEGKAILTADKSSSTAYMELRSLTSEDSPVYYCARRRYYGSSSFDYWGQGTTLTVSS

SEQ ID NO: 547 - protein, 119 aa, Artificial Sequence
  source: /note="Description of Artificial Sequence: Synthetic heavy chain variable domain"
QVQLQQSGAEVKKPGSSVKVSCKASGFSLTSYAISWVRQAPGQGLEWMGGIIWSGGATNYAQKFQGRVTITADESTSTAYMELSSLRSEDTAVYYCAREHYYGSSAMDYWWGQGTMVTV

SEQ ID NO: 548 - protein, 118 aa, Artificial Sequence
  source: /note="Description of Artificial Sequence: Synthetic heavy chain variable domain"
DVKLQESGPGLVAPSQSLSITCTVSGFSLTSYAVSWVRQPPGKGLEWLGIIWSGGATNYNSALKSRLSISKDNSKSQVFLKMNGLQTDDTARYYCAREHYYGSSAMDYWGQGASITSS

SEQ ID NO: 549 - protein, 119 aa, Artificial Sequence; identical to SEQ ID NO: 543
  source: /note="Description of Artificial Sequence: Synthetic heavy chain variable domain"

SEQ ID NO: 550 - protein, 117 aa, Artificial Sequence; identical to SEQ ID NO: 544
  source: /note="Description of Artificial Sequence: Synthetic heavy chain variable domain"

SEQ ID NO: 551 - protein, 119 aa, Artificial Sequence; identical to SEQ ID NO: 545
  source: /note="Description of Artificial Sequence: Synthetic heavy chain variable domain"

SEQ ID NO: 552 - protein, 120 aa, Artificial Sequence
  source: /note="Description of Artificial Sequence: Synthetic heavy chain variable domain"
QVQLQQSGAELVKPGASVKISCKASGYAFSSYWMNWVKQRPGKGLEWIGQIYPGDGDTTYNGKFKGKATLTADKSSSTVYMQLNSLTSEDSAVYFCVRYYYGSSGYFDYWGQGTTLTVSS

SEQ ID NO: 553 - protein, 118 aa, Artificial Sequence
  source: /note="Description of Artificial Sequence: Synthetic heavy chain variable domain"
DVQLQESGPVLVKTGASVKMSCTASGYTFTDHFMDWVKQSHGKSLEWIGSLNPYSGGTSYNQKFKGKATLTVDKSSSTAYMELNSLTSVDSAVYYCARHNWGAYFDYWGQGTTLTVSS

SEQ ID NO: 554 - protein, 120 aa, Artificial Sequence; identical to SEQ ID NO: 546
  source: /note="Description of Artificial Sequence: Synthetic heavy chain variable domain"

SEQ ID NO: 555 - protein, 119 aa, Artificial Sequence; identical to SEQ ID NO: 547
  source: /note="Description of Artificial Sequence: Synthetic heavy chain variable domain"

SEQ ID NO: 556 - protein, 119 aa, Artificial Sequence
  source: /note="Description of Artificial Sequence: Synthetic heavy chain variable domain"
DVKLQESGPGLVAPSQSLSITCTVSGFSLTSYAVSWVRQPPGKGLEWLGIIWSGGATNYNSALKSRLSISKDNSKSQVFLKMNGLQTDDTARYYCAREHYYGSSAMDYWGQGASITVSS

SEQ ID NO: 557 - protein, 120 aa, Artificial Sequence; identical to SEQ ID NO: 552
  source: /note="Description of Artificial Sequence: Synthetic heavy chain variable domain"

SEQ ID NO: 558 - protein, 118 aa, Artificial Sequence; identical to SEQ ID NO: 553
  source: /note="Description of Artificial Sequence: Synthetic heavy chain variable domain"

SEQ ID NO: 559 - protein, 121 aa, Artificial Sequence
  source: /note="Description of Artificial Sequence: Synthetic heavy chain variable domain"
EVQLVQSGAEVKKPGASVKVSCKASGYTFTSYGISWVRQAPGQGLEWMGWISAYNGNTNYAQKLQGRVTMTTDTSTSTAYMELRSLRSDDTAVYYCARYQDWWYLGQFDQWGQGTLVTVSS

SEQ ID NO: 560 - protein, 122 aa, Artificial Sequence
  source: /note="Description of Artificial Sequence: Synthetic heavy chain variable domain"
QVQLQQSGPGLVKPSQTLSLTCAISGDSVSSNSAAWNWIRQSPSRGLEWLGRTYYRSKWYNDYAVSVKSRITINPDTSKNQFSLQLNSVTPEDTAVYYCARGSYYSGRYDAWGQGTLVTVSS

SEQ ID NO: 561 - protein, 122 aa, Artificial Sequence
  source: /note="Description of Artificial Sequence: Synthetic heavy chain variable domain"
QVQLVQSGAEVKKPGSSVKVSCKASGGTFSSYAISWVRQAPGQGLEWMGGIIPIFGTANYAQKFQGRVTITADESTSTAYMELSSLRSEDTAVYYCAREIRGYYYYYGMDVWGQGTTVTVSS

SEQ ID NO: 562 - protein, 124 aa, Artificial Sequence
  source: /note="Description of Artificial Sequence: Synthetic heavy chain variable domain"
EVQLVESGGGLVQPGRSLRLSCAASGFTFDDYAMHWVRQAPGKGLEWVSGISWNSGRIGYADSVKGRFTISRDNAKNSLYLQMNSLRAEDTAVYYCARADDYGAPYYYYGMDVWGQGTTVTVSS

SEQ ID NO: 563 - protein, 117 aa, Artificial Sequence
  source: /note="Description of Artificial Sequence: Synthetic heavy chain variable domain"
QVQLQESGPGLVKPSGTLSLTCAVSGGSISSSNWWSWVRQPPGKGLEWIGEIYHSGSTNYNPSLKSRVTISVDKSKNQFSLKLSSVTAADTAVYYCATGYGGYFDYWGQGTLVTVSS

SEQ ID NO: 564 - protein, 120 aa, Artificial Sequence
  source: /note="Description of Artificial Sequence: Synthetic heavy chain variable domain"
EVQLVQSGAEVKKPGASVKVSCKASGYTFTSYGISWVRQAPGQGLEWMGWISAYNGNTNYAQKLQGRVTMTTDTSTSTAYMELRSLRSDDTAVYYCARDSYYYYYGMDVWGQGTTVTVSS

SEQ ID NO: 565 - protein, 117 aa, Artificial Sequence
  source: /note="Description of Artificial Sequence: Synthetic heavy chain variable domain"
EVQLVQSGAEVKKPGESLTISCKASGYSFPNYWITWVRQMSGGGLEWMGRIDPGDSYTTYNPSFQGHVTISIDKSTNTAYLHWNSLKASDTAMYYCARYYVSLVDIWGQGTLVTVSS

SEQ ID NO: 566 - protein, 124 aa, Artificial Sequence
  source: /note="Description of Artificial Sequence: Synthetic heavy chain variable domain"
EVQLVESGGGLVKPGGSLRLSCAASGFTFSNAWMSWVRQAPGKGLEWVGFIRSKAYGGTTEYAASVKGRFTISRDDSKSIAYLQMNNLKTEDTAVYYCARDGLYSSSWYDSDYWGQGTLVTVSS

SEQ ID NO: 567 - protein, 126 aa, Artificial Sequence
  source: /note="Description of Artificial Sequence: Synthetic heavy chain variable domain"
QMQLVQSGGGLVQPGRSLRLSCAASGFTFDDYAMHWVRQAPGKGLEWVSGISWNSGSIGYADSVKGRFTISRDNAKNSLYLQMNSLRAEDTALYYCAKDIHSGSYYGLLYYAMDVWGQGTTVTVSS

SEQ ID NO: 568 - protein, 121 aa, Artificial Sequence
  source: /note="Description of Artificial Sequence: Synthetic heavy chain variable domain"
EVQLVQSGAEVKKPGASVKVSCKASGYTFTSYGISWVRQAPGQGLEWMGWISAYNGNTNYAQKLQGRVTMTTDTSTSTAYMELRSLRSDDTAVYYCARFQDWWYLGQFDQWGQGTLVTVSS

SEQ ID NO: 569 - protein, 128 aa, Artificial Sequence
  source: /note="Description of Artificial Sequence: Synthetic heavy chain variable domain"
QVQLVQSGAEVKKPGASVKVSCKASGYTFTGYYMHWVRQAPGQGLEWMGWINPNSGGTNYAQKFQGRVTMTRDTSISTAYMELSRLRSDDTAVYYCARSPNPYYYDSSGYYYPGAFDIWGQGTMVTVS

SEQ ID NO: 570 - protein, 129 aa, Artificial Sequence
  source: /note="Description of Artificial Sequence: Synthetic heavy chain variable domain"
QVQLVESGAEVKKPGASVKVSCKASGYTFTGYYMHWVRQAPGQGLEWMGWINPNSGGTNYAQKFQGRVTMTRDTSISTAYMELSRLRSDDTAVYYCARSPNPYYYDSSGYYYPGAFDIWGQGTMVTVSS

SEQ ID NO: 571 - protein, 118 aa, Artificial Sequence
  source: /note="Description of Artificial Sequence: Synthetic heavy chain variable domain"
QVQLQQSAAELARPGASVKMSCKASGYTFTSVTMHWVKQRPGQGLEWIGYINPYTGYSEYNLRFKDKTTLTADKSSSTAVMQLRSLTSEDSAAYYCARENYKDAMDYWGQGTSVTVSS

SEQ ID NO: 572 - protein, 117 aa, Artificial Sequence
  source: /note="Description of Artificial Sequence: Synthetic heavy chain variable domain"
DVQLVESGGGLVQPGGSRKLSCAASGFTFSRFGMHWVRQAPEKGLEWVAYISSGSSTIYVADTVKGRFTISRDNPKNTLFLQMTSLRSEDTAMYVCARKDSYAMDYWGQGTSVTVSS

SEQ ID NO: 573 - protein, 139 aa, Artificial Sequence
  source: /note="Description of Artificial Sequence: Synthetic heavy chain variable domain"
MAVVTGVNSEVQLQQSGAELVRPGALVKLSCKASGFNFKQYFMHWVRQRPEQGLEWIGRIDPENGNTLYDPKFQDKASITADTSSNTAYLQLSSLTSADTAVYYCARIYGDYGAMDYWGQGTSVTVSSAKTTPPSVYPR

SEQ ID NO: 574 - protein, 117 aa, Artificial Sequence
  source: /note="Description of Artificial Sequence: Synthetic heavy chain variable domain"
QVQLQQSGAELAKPGASVKMSCKASGVTHSYWMHWIKQRPGQGLEWIGYINPTIGLTDYNQKFTDKATLTADKSSSTAYMQLTSLTSEDSAVYYCAREGYKDALDYWGQGNSVTVSS

SEQ ID NO: 575 - protein, 117 aa, Artificial Sequence
  source: /note="Description of Artificial Sequence: Synthetic heavy chain variable domain"
EVQLQQSGPELVKPGASVKMSCKASGYTFISDVLHWVKQKPGQGLEWIGYINPYNDATEYDEKFKGKATLTSDRSSSTAYMELSSLTSEDSAVYYCARRGLIGADYWGQGTTLTVSS

SEQ ID NO: 576 - protein, 118 aa, Artificial Sequence
  source: /note="Description of Artificial Sequence: Synthetic heavy chain variable domain"
EVRLQESGPSLVKPSQTLSLTCSVTGDSITSDYWNWIRKFPGNKLEYMGYISYSGNTYYNPSLKSRISITRDTSKNQYYLHLNSVTTEDAATYYCARSYLYDGYLDYWGQGTSLTVSS

SEQ ID NO: 577 - protein, 96 aa, Artificial Sequence
  source: /note="Description of Artificial Sequence: Synthetic heavy chain variable domain"
TGYTFSSYWIEWVKQRPGHGLEWIGQILPGSGTTYYNEKFKGKATFTADTSSNTAYMQLSSITSEDSAVYYCTIYGNYFYYTMDYWGQGTSVTVSS

SEQ ID NO: 578 - protein, 116 aa, Artificial Sequence
  source: /note="Description of Artificial Sequence: Synthetic heavy chain variable domain"
QVQLQQSGAELARPGASVKLSCKASGSTFTSYWMQWVKQRPGQGLEWIGAIYPGQGDTRYAQEFKGKATLTADKSSSTAYMQLNTLASEQSAVYYCAEGPYFFDCWGQGTTLTVSS

SEQ ID NO: 579 - protein, 118 aa, Artificial Sequence
  source: /note="Description of Artificial Sequence: Synthetic heavy chain variable domain"
EVQLQQSGAELVKPGASVKLSCTASGFNIKDTYMQWVKQRPEQGLEWIGRIDPANGNTKYQPKFQGKATITTDTSSNTAYLQLSSLTSEDTAVYYCARPFGSFAMDYWGQGTSVTVSS

SEQ ID NO: 580 - protein, 111 aa, Artificial Sequence
  source: /note="Description of Artificial Sequence: Synthetic heavy chain variable domain"
GGGLVKPGGSLKLSCAASGFAFSNYAMSWVRQTPEKRLEWVATIFSGVIYTYYPDSVKGRFTISRDNAKNTLYLQMSSLRSEDTAMYYCARYDALYVFDYWGQGTTLTVSS

SEQ ID NO: 581 - protein, 116 aa, Artificial Sequence
  source: /note="Description of Artificial Sequence: Synthetic heavy chain variable domain"
DVQLVESGGGLVQPGGSRKLSCMSGFTFSRFGMHWVRQAPEKGLEWVAYITSGSSTIYYADTVKGRFTISRDNPKNTLFLQMTSLRSEQTAMYYCAKYGNYAMDYWGQGTSVTVSS

SEQ ID NO: 582 - protein, 119 aa, Artificial Sequence
  source: /note="Description of Artificial Sequence: Synthetic heavy chain variable domain"
EVQLVESGGGLVKPGGSLKLSCAASGFTFSDYYMYWVRQTPEKRLEWVATISDGGSYTYYPDSVKGRFTISRDNAKNNLVLQMSSLKSEDAAMYYCARGVGYYWYFDVWGAGITVTVSS

SEQ ID NO: 583 - protein, 121 aa, Artificial Sequence
  source: /note="Description of Artificial Sequence: Synthetic heavy chain variable domain"
DVKVVESGGGLVKPGGSLKLSCAASGFTFSSYTMSWVRQTPEKRLEWVATISSGGGYTYYPDSVKGRFTISRDNAKNTLYLQMSGLKSEDTAMYYCTRDRHDGPGTWFAYWGQGTLVTVSA

SEQ ID NO: 584 - protein, 121 aa, Artificial Sequence
  source: /note="Description of Artificial Sequence: Synthetic heavy chain variable domain"
QVQLVQSGAEVKKPGASVKVSCKASGYTFTSYVMHWVRQAPGQRLEWMGYINPYNDAPKYNEKFKGRVTITRDTSASTAYMELSSLRSEDTAVYYCARGLGYALYYAMDYWGQGTTVTVSS

SEQ ID NO: 585 - protein, 121 aa, Artificial Sequence
  source: /note="Description of Artificial Sequence: Synthetic heavy chain variable domain"
QVQLVQSGAEVKKPGASVKVSCKASGYTFTSYVMHWVRQAPGQGLEWMGYINPYNDAPKYNEKFKGRVTMTRDTSISTAYMELSRLRSDDTAVYYCARGLGYALYYAMDYWGQGTTVTVSS

SEQ ID NO: 586 - protein, 121 aa, Artificial Sequence
  source: /note="Description of Artificial Sequence: Synthetic heavy chain variable domain"
QVQLVQSGAEVKKPGASVKVSCKASGYTFTSYVMHWVRQAPGQGLEWMGYINPYNDAPKYNEKFKGRVTMTRDTSTSTVYMELSSLRSEDTAVYYCARGLGYALYYAMDYWGQGTMVTVSS

SEQ ID NO: 587 - protein, 121 aa, Artificial Sequence
  source: /note="Description of Artificial Sequence: Synthetic heavy chain variable domain"
QVQLVQSGAEVKKPGASVKVSCKASGYTFTSYVMHWVRQAPGQGLEWMGYINPYNDAPKYNEKFKGRVTMTRDTSASTAYMELSSLRSDDTAVYYCARGLGYALYYAMDYWGQGTTVTVSS

SEQ ID NO: 588 - protein, 121 aa, Artificial Sequence
  source: /note="Description of Artificial Sequence: Synthetic heavy chain variable domain"
EVQLQQSGPELVKPGASVKMSCKASGYTFTSYVMHWVKQKPGQGLEWIGYINPYNDAPKYNEKFKGKATVTSDKSSGTAYMELSSLTSEDSAVYYCARGLGYALYYAMDYWGQGTSVTVSS

SEQ ID NO: 589 - protein, 121 aa, Artificial Sequence
  source: /note="Description of Artificial Sequence: Synthetic heavy chain variable domain"
QVQLVQSGAEVKKPGASVKVSCKASGYTFTSYVMHWVRQAPGQGLEWMGYINPYNDAPKYNEKFKGRVTMTSDTSASTAYMELSSLRSDDTAVYYCARGLGYALYYAMDYWGQGTTVTVSS

SEQ ID NO: 590 - protein, 121 aa, Artificial Sequence
  source: /note="Description of Artificial Sequence: Synthetic heavy chain variable domain"
QVQLVQSGAEVKKPGASVKVSCKASGYTFTSYVMHWVRQAPGQGLEWMGYINPYNDAPKYNEKFKGRVTITSDTSASTAYMELSSLRSDDTAVYYCARGLGYALYYAMDYWGQGTTVTVSS

SEQ ID NO: 591 - protein, 121 aa, Artificial Sequence
  source: /note="Description of Artificial Sequence: Synthetic heavy chain variable domain"
QVQLVQSGAEVKKPGASVKVSCKASGYTFTSYVMHWVRQAPGQGLEWMGYINPYNDAPKYNEKFKGRVTMTSDKSASTAYMELSSLRSDDTAVYYCARGLGYALYYAMDYWGQGTTVTVSS

SEQ ID NO: 592 - protein, 121 aa, Artificial Sequence
  source: /note="Description of Artificial Sequence: Synthetic heavy chain variable domain"
EVQLVQSGAEVKKPGASVKVSCKASGYTFTSYVMHWVRQAPGQGLEWMGYINPYNDAPKYNEKFKGRVTMTSDTSASTAYMELSSLRSDDTAVYYCARGLGYALYYAMDYWGQGTTVTVSS

SEQ ID NO: 593 - protein, 121 aa, Artificial Sequence
  source: /note="Description of Artificial Sequence: Synthetic heavy chain variable domain"
QVQLVQSGAEVKKPGASVKVSCKASGYTFTSYVMHWVRQAPGQGLEWMGYINPYNDAPKYNEKFKGKATMTSDTSASTAYMELSSLRSDDTAVYYCARGLGYALYYAMDYWGQGTTVTVSS

SEQ ID NO: 594 - protein, 448 aa, Artificial Sequence
  source: /note="Description of Artificial Sequence: Synthetic heavy chain variable domain"
QVQLVQSGAEVKKPGASVKVSCKASGYTFTSYVMHWVRQAPGQRLEWMGYINPYNDAPKYNEKFKGRVTITRDTSASTAYMELSSLRSEDTAVYYCARGLGYALYYAMDYWGQGTTVTVSSASTKGPSVFPLAPCSRSTSESTAALGCLVKDYFPEPVTVSWNSGALTSGVHTFPAVLQSSGLYSLSSVVTVPSSSLGTKTYTCNVDHKPSNTKVDKRVESKYGPPCPPCPAPEFLGGPSVFLFPPKPKDTLMISRTPEVTCVVVDVSQEDPEVQFNWYVDGVEVHNAKTKPREEQFNSTYRVVSVLTVLHQDWLNGKEYKCKVSNKGLPSSIEKTISKAKGQPREPQVYTLPPSQEEMTKNQVSLTCLVKGFYPSDIAVEWESNGQPENNYKTTPPVLDSDGSFFLYSRLTVDKSRWQEGNVFSCSVMHEALHNHYTQKSLSLSLGK

SEQ ID NO: 595 - protein, 448 aa, Artificial Sequence
  source: /note="Description of Artificial Sequence: Synthetic heavy chain variable domain"
QVQLVQSGAEVKKPGASVKVSCKASGYTFTSYVMHWVRQAPGQGLEWMGYINPYNDAPKYNEKFKGRVTMTRDTSISTAYMELSRLRSDDTAVYYCARGLGYALYYAMDYWGQGTTVTVSSASTKGPSVFPLAPCSRSTSESTAALGCLVKDYFPEPVTVSWNSGALTSGVHTFPAVLQSSGLYSLSSVVTVPSSSLGTKTYTCNVDHKPSNTKVDKRVESKYGPPCPPCPAPEFLGGPSVFLFPPKPKDTLMISRTPEVTCVVVDVSQEDPEVQFNWYVDGVEVHNAKTKPREEQFNSTYRVVSVLTVLHQDWLNGKEYKCKVSNKGLPSSIEKTISKAKGQPREPQVYTLPPSQEEMTKNQVSLTCLVKGFYPSDIAVEWESNGQPENNYKTTPPVLDSDGSFFLYSRLTVDKSRWQEGNVFSCSVMHEALHNHYTQKSLSLSLGK

SEQ ID NO: 596 - protein, 448 aa, Artificial Sequence
  source: /note="Description of Artificial Sequence: Synthetic heavy chain variable domain"
QVQLVQSGAEVKKPGASVKVSCKASGYTFTSYVMHWVRQAPGQGLEWMGYINPYNDAPKYNEKFKGRVTMTRDTSTSTVYMELSSLRSEDTAVYYCARGLGYALYYAMDYWGQGTMVTVSSASTKGPSVFPLAPCSRSTSESTAALGCLVKDYFPEPVTVSWNSGALTSGVHTFPAVLQSSGLYSLSSVVTVPSSSLGTKTYTCNVDHKPSNTKVDKRVESKYGPPCPPCPAPEFLGGPSVFLFPPKPKDTLMISRTPEVTCVVVDVSQEDPEVQFNWYVDGVEVHNAKTKPREEQFNSTYRVVSVLTVLHQDWLNGKEYKCKVSNKGLPSSIEKTISKAKGQPREPQVYTLPPSQEEMTKNQVSLTCLVKGFYPSDIAVEWESNGQPENNYKTTPPVLDSDGSFFLYSRLTVDKSRWQEGNVFSCSVMHEALHNHYTQKSLSLSLGK

SEQ ID NO: 597 - protein, 448 aa, Artificial Sequence
  source: /note="Description of Artificial Sequence: Synthetic heavy chain variable domain"
QVQLVQSGAEVKKPGASVKVSCKASGYTFTSYVMHWVRQAPGQGLEWMGYINPYNDAPKYNEKFKGRVTMTRDTSASTAYMELSSLRSDDTAVYYCARGLGYALYYAMDYWGQGTTVTVSSASTKGPSVFPLAPCSRSTSESTAALGCLVKDYFPEPVTVSWNSGALTSGVHTFPAVLQSSGLYSLSSVVTVPSSSLGTKTYTCNVDHKPSNTKVDKRVESKYGPPCPPCPAPEFLGGPSVFLFPPKPKDTLMISRTPEVTCVVVDVSQEDPEVQFNWYVDGVEVHNAKTKPREEQFNSTYRVVSVLTVLHQDWLNGKEYKCKVSNKGLPSSIEKTISKAKGQPREPQVYTLPPSQEEMTKNQVSLTCLVKGFYPSDIAVEWESNGQPENNYKTTPPVLDSDGSFFLYSRLTVDKSRWQEGNVFSCSVMHEALHNHYTQKSLSLSLGK

SEQ ID NO: 598 - protein, 448 aa, Artificial Sequence
  source: /note="Description of Artificial Sequence: Synthetic heavy chain variable domain"
QVQLVQSGAEVKKPGASVKVSCKASGYTFTSYVMHWVRQAPGQGLEWMGYINPYNDAPKYNEKFKGKATMTSDTSASTAYMELSSLRSDDTAVYYCARGLGYALYYAMDYWGQGTTVTVSSASTKGPSVFPLAPCSRSTSESTAALGCLVKDYFPEPVTVSWNSGALTSGVHTFPAVLQSSGLYSLSSVVTVPSSSLGTKTYTCNVDHKPSNTKVDKRVESKYGPPCPPCPAPEFLGGPSVFLFPPKPKDTLMISRTPEVTCVVVDVSQEDPEVQFNWYVDGVEVHNAKTKPREEQFNSTYRVVSVLTVLHQDWLNGKEYKCKVSNKGLPSSIEKTISKAKGQPREPQVYTLPPSQEEMTKNQVSLTCLVKGFYPSDIAVEWESNGQPENNYKTTPPVLDSDGSFFLYSRLTVDKSRWQEGNVFSCSVMHEALHNHYTQKSLSLSLGK

SEQ ID NO: 599 - protein, 118 aa, Artificial Sequence
  source: /note="Description of Artificial Sequence: Synthetic heavy chain variable domain"
QVQLQQSGAELVRPGASVKLSCKASGYSFTDFYINWVRQRPGQGLEWIARIFPGGDNTYYNEKFKGKATLTAEESSSTAYIQLSSLTSEDSAVYFCARRGLYYAMDYWGQGISVTVSS

SEQ ID NO: 600 - protein, 117 aa, Artificial Sequence
  source: /note="Description of Artificial Sequence: Synthetic heavy chain variable domain"
QVQLQQPGPELVKPGASVKISCKTSDYNFTRYYIHWVKQRPGQGLEWIGWIYPGTGDSKYNEKFKGRATLTADTSSSTAYQLSSQTSEDSAVYFCARNGNYWYFDVWGAGTAVTVSS

SEQ ID NO: 601 - protein, 118 aa, Artificial Sequence; identical to SEQ ID NO: 599
  source: /note="Description of Artificial Sequence: Synthetic heavy chain variable domain"

SEQ ID NO: 602 - protein, 119 aa, Artificial Sequence
  source: /note="Description of Artificial Sequence: Synthetic heavy chain variable domain"
EVQLQQSGAELVKPGASVKLSCTPSGFNVKDTYIHWVKQRPKQGLEWIGRIDPSDGDIKYDPKFQGKATITADTSSNTVSLQLSSLTSEDTAVYYCARWFGDYGAMNYWGQGTSVTVSS

SEQ ID NO: 603 - protein, 120 aa, Artificial Sequence
  source: /note="Description of Artificial Sequence: Synthetic heavy chain variable domain"
EVQLVESGGGLVQPGGSLRLSCAASGFTFSSYWMSWVRQAPGKGLEWVANIKQDGGEQYYVDSVKGRFTISRDNAKNSLYLQMNSLRAEDTAVYYCARDWNYGYYDMDVWGQGTTVTVSS

SEQ ID NO: 604 - protein, 121 aa, Artificial Sequence
  source: /note="Description of Artificial Sequence: Synthetic heavy chain variable domain"
EVQLLESGGGLVQPGGSLRLSCAASGFTFSNYAMSWVRQAPGKGLEWVSAIRGSGGSTYYADSVKGRFTISRDNSKNTLYLQMNSLRAEDTAVYYCAKDLHYDSSGYLDYWGQGTLVTVSS

SEQ ID NO: 605 - protein, 119 aa, Artificial Sequence
  source: /note="Description of Artificial Sequence: Synthetic heavy chain variable domain"
EVQLVESGGGLVQPGGSLRLSCAASGFTFSSYWMSWVRQAPGKGLEWVANIKQDGGEKYYVDSVKGRFTISRDNAKNSLFLQMNSLRAEDTAVYYCARVQLYSDYFDYWGQGTLVTVSS

SEQ ID NO: 606 - protein, 121 aa, Artificial Sequence
  source: /note="Description of Artificial Sequence: Synthetic heavy chain variable domain"
EVQLLESGGDLVQPGGSLRLSCAASGFTFNSYAMSWVRQAPGKGLEWVSTISGSGGFTFSADSVKGRFTISRDNSKNTLFLQMNSLRVEDSAVYSCAKVLVGFNNGCWDYWGQGTLVTVSS

SEQ ID NO: 607 - protein, 121 aa, Artificial Sequence
  source: /note="Description of Artificial Sequence: Synthetic heavy chain variable domain"
EVQLVESGGGLVQPGGSLRLSCAASGFTFSRYWMSWVRQAPGKGLEWVANIKQDGSEKYYVDSVKGRFTISRDNAKNSLYLQMNSLRAEDTAVYYCAREGGWFGELAFDYWGQGTLVTVSS

SEQ ID NO: 608 - protein, 120 aa, Artificial Sequence
  source: /note="Description of Artificial Sequence: Synthetic heavy chain variable domain"
EVQLVESGGGLVKPGGSLRLSCAASGFTFSTYSMNWVRQAPGKGLEWVSSISSSGDYIYYADSVKGRFTISRDNAKNSLFLQMNSLKAEDTAVYYCARDLVTSMVAFDYWGQGTLVTVSS

SEQ ID NO: 609 - protein, 120 aa, Artificial Sequence
  source: /note="Description of Artificial Sequence: Synthetic heavy chain variable domain"
EVQLVESGGGLVKPGGSLRLSCAASGFTFSTYSMNWVRQAPGKGLEWVSSISSSGDYIYYADSVKGRFTISRDNAKNSLYLQMNSLRAEDTAVYYCARDLVTSMVAFDYWGQGTLVTVSS

SEQ ID NO: 610 - protein, 448 aa, Artificial Sequence
  source: /note="Description of Artificial Sequence: Synthetic heavy chain variable domain"
QVQLVQSGAEVKKPGASVKLSCKASGYTFTNYDINWVRQAPGQGLEWIGWIFPGDGSTQYNEKFKGKATLTTDTSTSTAYMELSSLRSEDTAVYFCARQTTATWFAYWGQGTLVTVSSASTKGPSVFPLAPSSKSTSGGTAALGCLVKDYFPEPVTVSWNSGALTSGVHTFPAVLQSSGLYSLSSVVTVPSSSLGTQTYICNVNHKPSNTKVDKRVEPKSCDKTHTCPPCPAPELLGGPSVFLFPPKPKDTLMISRTPEVTCVVVDVSHEDPEVKFNWYVDGVEVHNAKTKPREEQYNSTYRVVSVLTVLHQDWLNGKEYKCKVSNKALPAPIEKTISKAKGQPREPQVYTLPPSRDELTKNQVSLTCLVKGFYPSDIAVEWESNGQPENNYKTTPPVLDSDGSFFLYSKLTVDKSRWQQGNVFSCSVMHEALHNHYTQKSLSLSPGK

SEQ ID NO: 611 - protein, 448 aa, Artificial Sequence
  source: /note="Description of Artificial Sequence: Synthetic heavy chain variable domain"
QVQLVQSGAEVVKPGASVKLSCKASGYTFTNYDINWVRQAPGQGLEWIGWIFPGDGSTQYNEKFKGKATLTTDTSTSTAYMELSRLTSEDTAVYFCARQTTATWFAYWGQGTLVTVSSASTKGPSVFPLAPSSKSTSGGTAALGCLVKDYFPEPVTVSWNSGALTSGVHTFPAVLQSSGLYSLSSVVTVPSSSLGTQTYICNVNHKPSNTKVDKRVEPKSCDKTHTCPPCPAPELLGGPSVFLFPPKPKDTLMISRTPEVTCVVVDVSHEDPEVKFNWYVDGVEVHNAKTKPREEQYNSTYRVVSVLTVLHQDWLNGKEYKCKVSNKALPAPIEKTISKAKGQPREPQVYTLPPSRDELTKNQVSLTCLVKGFYPSDIAVEWESNGQPENNYKTTPPVLDSDGSFFLYSKLTVDKSRWQQGNVFSCSVMHEALHNHYTQKSLSLSPGK

SEQ ID NO: 612 - protein, 448 aa, Artificial Sequence
  source: /note="Description of Artificial Sequence: Synthetic heavy chain variable domain"
QVQLVQSGAEVVKPGASVKLSCKASGYTFTNYDINWVRQRPEQGLEWIGWIFPGDGSTQYNEKFKGKATLTTDTSTSTAYMELSSLRSEDTAVYFCARQTTATWFAYWGQGTLVTVSSASTKGPSVFPLAPSSKSTSGGTAALGCLVKDYFPEPVTVSWNSGALTSGVHTFPAVLQSSGLYSLSSVVTVPSSSLGTQTYICNVNHKPSNTKVDKRVEPKSCDKTHTCPPCPAPELLGGPSVFLFPPKPKDTLMISRTPEVTCVVVDVSHEDPEVKFNWYVDGVEVHNAKTKPREEQYNSTYRVVSVLTVLHQDWLNGKEYKCKVSNKALPAPIEKTISKAKGQPREPQVYTLPPSRDELTKNQVSLTCLVKGFYPSDIAVEWESNGQPENNYKTTPPVLDSDGSFFLYSKLTVDKSRWQQGNVFSCSVMHEALHNHYTQKSLSLSPGK

SEQ ID NO: 613 - protein, 448 aa, Artificial Sequence
  source: /note="Description of Artificial Sequence: Synthetic heavy chain variable domain"
QVQLVQSGAEVVKPGASVKLSCKTSGYTFTNYDINWVRQRPGQGLEWIGWIFPGDDSTQYNEKFKGKATLTTDTSTSTAYMELSSLRSEDTAVYFCARQTTGTWFAYWGQGTLVTVSSASTKGPSVFPLAPSSKSTSGGTAALGCLVKDYFPEPVTVSWNSGALTSGVHTFPAVLQSSGLYSLSSVVTVPSSSLGTQTYICNVNHKPSNTKVDKRVEPKSCDKTHTCPPCPAPELLGGPSVFLFPPKPKDTLMISRTPEVTCVVVDVSHEDPEVKFNWYVDGVEVHNAKTKPREEQYNSTYRVVSVLTVLHQDWLNGKEYKCKVSNKALPAPIEKTISKAKGQPREPQVYTLPPSRDELTKNQVSLTCLVKGFYPSDIAVEWESNGQPENNYKTTPPVLDSDGSFFLYSKLTVDKSRWQQGNVFSCSVMHEALHNHYTQKSLSLSPGK

SEQ ID NO: 614 - protein, 448 aa, Artificial Sequence
  source: /note="Description of Artificial Sequence: Synthetic heavy chain variable domain"
QVQLVQSGAEVVKPGASVKVSCKASGYTFTNYDINWVRQRPEQGLEWIGWIFPGDGSTQYNEKFKGRVTMTTDTSTSTVYMELSSLRSEDTAVYFCARQTTATWFAYWGQGTLVTVSSASTKGPSVFPLAPSSKSTSGGTAALGCLVKDYFPEPVTVSWNSGALTSGVHTFPAVLQSSGLYSLSSVVTVPSSSLGTQTYICNVNHKPSNTKVDKRVEPKSCDKTHTCPPCPAPELLGGPSVFLFPPKPKDTLMISRTPEVTCVVVDVSHEDPEVKFNWYVDGVEVHNAKTKPREEQYNSTYRVVSVLTVLHQDWLNGKEYKCKVSNKALPAPIEKTISKAKGQPREPQVYTLPPSRDELTKNQVSLTCLVKGFYPSDIAVEWESNGQPENNYKTTPPVLDSDGSFFLYSKLTVDKSRWQQGNVFSCSVMHEALHNHYTQKSLSLSPGK

SEQ ID NO: 615 - protein, 448 aa, Artificial Sequence
  source: /note="Description of Artificial Sequence: Synthetic heavy chain variable domain"
QVQLVQSGAEVVKPGASVKVSCKTSGYTFTNYDINWVRQRPGQGLEWIGWIFPGDDSTQYNEKFKGRVTMTTDTSTSTVYMELSSLRSEDTAVYFCARQTTGTWFAYWGQGTLVTVSSASTKGPSVFPLAPSSKSTSGGTAALGCLVKDYFPEPVTVSWNSGALTSGVHTFPAVLQSSGLYSLSSVVTVPSSSLGTQTYICNVNHKPSNTKVDKRVEPKSCDKTHTCPPCPAPELLGGPSVFLFPPKPKDTLMISRTPEVTCVVVDVSHEDPEVKFNWYVDGVEVHNAKTKPREEQYNSTYRVVSVLTVLHQDWLNGKEYKCKVSNKALPAPIEKTISKAKGQPREPQVYTLPPSRDELTKNQVSLTCLVKGFYPSDIAVEWESNGQPENNYKTTPPVLDSDGSFFLYSKLTVDKSRWQQGNVFSCSVMHEALHNHYTQKSLSLSPGK

SEQ ID NO: 616 - protein, 448 aa, Artificial Sequence
  source: /note="Description of Artificial Sequence: Synthetic heavy chain variable domain"
QVQLQQSGAELVKPGASVKLSCKTSGYTFTNYDINWVRQRPGQGLEWIGWIFPGDDSTQYNEKFKGKATLTTDTSSSTAYMQLSRLTSEDSAVYFCARQTTGTWFAYWGQGTLVTVSAASTKGPSVFPLAPSSKSTSGGTAALGCLVKDYFPEPVTVSWNSGALTSGVHTFPAVLQSSGLYSLSSVVTVPSSSLGTQTYICNVNHKPSNTKVDKRVEPKSCDKTHTCPPCPAPELLGGPSVFLFPPKPKDTLMISRTPEVTCVVVDVSHEDPEVKFNWYVDGVEVHNAKTKPREEQYNSTYRVVSVLTVLHQDWLNGKEYKCKVSNKALPAPIEKTISKAKGQPREPQVYTLPPSRDELTKNQVSLTCLVKGFYPSDIAVEWESNGQPENNYKTTPPVLDSDGSFFLYSKLTVDKSRWQQGNVFSCSVMHEALHNHYTQKSLSLSPGK

SEQ ID NO: 617 - protein, 448 aa, Artificial Sequence
  source: /note="Description of Artificial Sequence: Synthetic heavy chain variable domain"
QVQLQQSGAELVKPGASVKLSCKASGYTFTNYDINWVRQRPEQGLEWIGWIFPGDGSTQYNEKFKGKATLTTDTSSSTAYMQLSRLTSEDSAVYFCARQTTATWFAYWGQGTLVTVSAASTKGPSVFPLAPSSKSTSGGTAALGCLVKDYFPEPVTVSWNSGALTSGVHTFPAVLQSSGLYSLSSVVTVPSSSLGTQTYICNVNHKPSNTKVDKRVEPKSCDKTHTCPPCPAPELLGGPSVFLFPPKPKDTLMISRTPEVTCVVVDVSHEDPEVKFNWYVDGVEVHNAKTKPREEQYNSTYRVVSVLTVLHQDWLNGKEYKCKVSNKALPAPIEKTISKAKGQPREPQVYTLPPSRDELTKNQVSLTCLVKGFYPSDIAVEWESNGQPENNYKTTPPVLDSDGSFFLYSKLTVDKSRWQQGNVFSCSVMHEALHNHYTQKSLSLSPGK

SEQ ID NO: 618 - protein, 119 aa, Artificial Sequence
  source: /note="Description of Artificial Sequence: Synthetic heavy chain variable domain"
QVQLQQSGAEVKKPGSSVKVSCKASGGTFSSYAISWVRQAPGQGLEWMGGIIPILGIANYAQKFQGRVTITADESTSTAYMELSSLRSEDTAVYYCATGGSGSYAFDIWGQGTMVTVSS

SEQ ID NO: 619 - protein, 119 aa, Artificial Sequence
  source: /note="Description of Artificial Sequence: Synthetic heavy chain variable domain"
QVQLQQSGAEVKKPGSSVKVSCKASGGTFSSYAISWVRQAPGQGLEWMGGIIPILGIANYAQKFQGRVTITADESTSTAYMELSSLRSEDTAVYYCARGGSGSYHMDVWGKGTTVTVSS

SEQ ID NO: 620 - protein, 120 aa, Artificial Sequence
  source: /note="Description of Artificial Sequence: Synthetic heavy chain variable domain"
QVQLQQSGAEVKKPGSSVKVSCKASGGTFSSYAISWVRQAPGQGLEWMGGIIPILGIANYAQKFQGRVTITADESTSTAYMELSSLRSEDTAVYYCARGRRSGSYYMGYWGQGTLVTVSS

SEQ ID NO: 621 - protein, 121 aa, Artificial Sequence
  source: /note="Description of Artificial Sequence: Synthetic heavy chain variable domain"
EVQLVQSGAEVKKPGASVKVSCKASGYTFTSYWIGWVRQAPGQGLEWIGDIYPGGGYTNYNEKFKGRVTLTADTSTSTAYLELSSLRSEDTAVYYCARLDGSSYRGAMDSWGQGTLVTVSS

SEQ ID NO: 622 - protein, 121 aa, Artificial Sequence
  source: /note="Description of Artificial Sequence: Synthetic heavy chain variable domain"
EVQLVQSGAEVKKPGASVKVSCKASGYTFTSYWIGWVRQAPGQGLEWIGDIYPGGGYTNYNEKFKGRATLTADTSTSTAYLELSSLRSEDTAVYYCARLDGSSYRGAMDSWGQGTLVTVSS

SEQ ID NO: 623 - protein, 121 aa, Artificial Sequence
  source: /note="Description of Artificial Sequence: Synthetic heavy chain variable domain"
EVQLVQSGAEVKKPGASVKVSCKASGYTFTSYWIGWVRQAPGQGLEWIGDIYPGGGYTNYNEKFKGRATLTADKSTSTAYLELSSLRSEDTAVYYCARLDGSSYRGAMDSWGQGTLVTVSS

SEQ ID NO: 624 - protein, 121 aa, Artificial Sequence
  source: /note="Description of Artificial Sequence: Synthetic heavy chain variable domain"
EVQLVQSGAEVKKPGASVKVSCKASGYTFTSYWIGWVRQAPGQGLEWIGDIYPGGGYTNYNEKFKGRATLTADKSSSTAYLELSSLRSEDTAVYYCARLDGSSYRGAMDSWGQGTLVTVSS

SEQ ID NO: 625 - protein, 116 aa, Artificial Sequence
  source: /note="Description of Artificial Sequence: Synthetic heavy chain variable domain"
EVQLVQSGAEVKKPGASVKVSCKASGYTFTNFWIHWVRQAPGQGLEWIGEIDPSDSYTNYNQKFKGRATLTVDTSTSTAYLELSSLRSEDTAVYYCAREITTVDYWGQGTLVTVSS

SEQ ID NO: 626 - protein, 116 aa, Artificial Sequence
  source: /note="Description of Artificial Sequence: Synthetic heavy chain variable domain"
EVQLVQSGAEVKKPGASVKVSCKASGYTFTNFWIHWVRQAPGQGLEWIGEIDPSDSYTNYNQKFKGRATLTRDTSTSTAYLELSSLRSEDTAVYYCSREITTVDYWGQGTLVTVSS

SEQ ID NO: 627 - protein, 116 aa, Artificial Sequence
  source: /note="Description of Artificial Sequence: Synthetic heavy chain variable domain"
EVQLVQSGAEVKKPGASVKVSCKASGYTFTNFWIHWVRQAPGQGLEWIGEIDPSDSYTNYNQKFKGRATITVDTSTSTAYLELSSLRSEDTAVYYCSREITTVDYWGQGTLVTVSS

SEQ ID NO: 628 - protein, 116 aa, Artificial Sequence
  source: /note="Description of Artificial Sequence: Synthetic heavy chain variable domain"
EVQLVQSGAEVKKPGASVKVSCKASGYTFTNFWIHWVRQAPGQGLEWIGEIDPSDSYTNYNQKFKGRVTLTVDTSTSTAYLELSSLRSEDTAVYYCSREITTVDYWGQGTLVTVSS

SEQ ID NO: 629 - protein, 116 aa, Artificial Sequence
  source: /note="Description of Artificial Sequence: Synthetic heavy chain variable domain"
EVQLVQSGAEVKKPGASVKVSCKASGYTFTNFWIHWVRQAPGQGLEWIGEIDPSDSYTNYNQKFKGRATLTVDTSTSTAYLELSSLRSEDTAVYYCSREITTVDYWGQGTLVTVSS

SEQ ID NO: 630 - protein, 116 aa, Artificial Sequence
  source: /note="Description of Artificial Sequence: Synthetic heavy chain variable domain"
EVQLVQSGAEVKKPGASVKVSCKASGYTFTNFWIHWVRQAPGQGLEWIGEIDPSDSYTNYNQKFKGRATLTVDKSTSTAYLELSSLRSEDTAVYYCSREITTVDYWGQGTLVTVSS

SEQ ID NO: 631 - protein, 116 aa, Artificial Sequence
  source: /note="Description of Artificial Sequence: Synthetic heavy chain variable domain"
EVQLVQSGAEVKKPGASVKVSCKASGYTFTNFWIHWVRQAPGQGLEWIGEIDPSDSYTNYNQKFKGRATLTVDKSTNTAYLELSSLRSEDTAVYYCSREITTVDYWGQGTLVTVSS

SEQ ID NO: 632 - protein, 116 aa, Artificial Sequence
  source: /note="Description of Artificial Sequence: Synthetic heavy chain variable domain"
EVQLVQSGAEVKKPGASVKVSCKASGYTFTNFWIHWVRQAPGQGLEWIGEIDPSDSYTNYNQKFKGRATLTVDKSSNTAYLELSSLRSEDTAVYYCSREITTVDYWGQGTLVTVSS

SEQ ID NO: 633 - protein, 120 aa, Artificial Sequence
  source: /note="Description of Artificial Sequence: Synthetic heavy chain variable domain"
EVQLQQSGPDLVKPGASVKISCKASGYSFTGYYIHWMKQSHGKSLEWIGRVNPNNGDPIYNQKFRGKAILTVDQSSNTAYMELRSLTSEASAVYYCARVLFYYGSPFAYWGQGTLVTVSA

SEQ ID NO: 634 - protein, 121 aa, Artificial Sequence
  source: /note="Description of Artificial Sequence: Synthetic heavy chain variable domain"
EVQLVQSGAEVKKPGASVKVSCKASGYTFTSYWIGWVRQAPGQGLEWIGDIYPGGGYTNYNEKFKGRVTITRDTSTSTAYLELSSLRSEDTAVYYCARLAGSSYRGAMDSWGQGTLVTVSS

SEQ ID NO: 635 - protein, 103 aa, Artificial Sequence
  source: /note="Description of Artificial Sequence: Synthetic heavy chain variable domain"
EVQLEESGGGLVQPGGSRKLSCAASGFTFSSFGMHWVRQAPEKGLEWVAYISSGSSTLHYADTVKGRFTISRDNPKNTLFLQMKLPSLCYGLLGSRNLSHRLL

SEQ ID NO: 636 - protein, 451 aa, Artificial Sequence
  source: /note="Description of Artificial Sequence: Synthetic heavy chain variable domain"
EVQLVQSGAEVKKPGASVKVSCKASGYTFTSYWIGWVRQAPGQGLEWIGDIYPGGGYTNYNEKFKGRVTITRDTSTSTAYLELSSLRSEDTAVYYCARLAGSSYRGAMDSWGQGTLVTVSSSSTKGPSVFPLAPSSKSTSGGTAALGCLVKDYFPEPVTVSWNSGALTSGVHTFPAVLQSSGLYSLSSVVTVPSSSLGTQTYICNVNHKPSNTKVDKKVEPKSCDKTHTCPPCPAPELLGGPSVFLFPPKPKDTLMISRTPEVTCVVVDVSHEDPEVKFNWYVDGVEVHNAKTKPREEQYNSTYRVVSVLTVLHQDWLNGKEYKCKVSNKALPAPIEKTISKAKGQPREPQVYTLPPSREEMTKNQVSLTCLVKGFYPSDIAVEWESNGQPENNYKTTPPVLDSDGSFFLYSKLTVDKSRWQQGNVFSCSVMHEALHNHYTQKSLSLSPGK

SEQ ID NO: 637 - protein, 451 aa, Artificial Sequence
  source: /note="Description of Artificial Sequence: Synthetic heavy chain variable domain"
EVQLVQSGAEVKKPGASVKVSCKASGYTFTSYWIGWVRQAPGQGLEWIGDIYPGGGYTNYNEKFKGRVTITRDTSTSTAYLELSSLRSEDTAVYYCARLDGSSYRGAMDSWGQGTLVTVSSSSTKGPSVFPLAPSSKSTSGGTAALGCLVKDYFPEPVTVSWNSGALTSGVHTFPAVLQSSGLYSLSSVVTVPSSSLGTQTYICNVNHKPSNTKVDKKVEPKSCDKTHTCPPCPAPELLGGPSVFLFPPKPKDTLMISRTPEVTCVVVDVSHEDPEVKFNWYVDGVEVHNAKTKPREEQYNSTYRVVSVLTVLHQDWLNGKEYKCKVSNKALPAPIEKTISKAKGQPREPQVYTLPPSREEMTKNQVSLTCLVKGFYPSDIAVEWESNGQPENNYKTTPPVLDSDGSFFLYSKLTVDKSRWQQGNVFSCSVMHEALHNHYTQKSLSLSPGK

SEQ ID NO: 638 - protein, 451 aa, Artificial Sequence
  source: /note="Description of Artificial Sequence: Synthetic heavy chain variable domain"
EVQLVQSGAEVKKPGASVKVSCKASGYTFTSYWIGWVRQAPGQGLEWIGDIYPGGGYTNYNEKFKGRVTITRDTSTSTAYLELSSLRSEDTAVYYCARLAGSSYRGAMDSWGQGTLVTVSSCSTKGPSVFPLAPSSKSTSGGTAALGCLVKDYFPEPVTVSWNSGALTSGVHTFPAVLQSSGLYSLSSVVTVPSSSLGTQTYICNVNHKPSNTKVDKKVEPKSCDKTHTCPPCPAPELLGGPSVFLFPPKPKDTLMISRTPEVTCVVVDVSHEDPEVKFNWYVDGVEVHNAKTKPREEQYNSTYRVVSVLTVLHQDWLNGKEYKCKVSNKALPAPIEKTISKAKGQPREPQVYTLPPSREEMTKNQVSLTCLVKGFYPSDIAVEWESNGQPENNYKTTPPVLDSDGSFFLYSKLTVDKSRWQQGNVFSCSVMHEALHNHYTQKSLSLSPGK

SEQ ID NO: 639 - protein, 451 aa, Artificial Sequence
  source: /note="Description of Artificial Sequence: Synthetic heavy chain variable domain"
EVQLVQSGAEVKKPGASVKVSCKASGYTFTSYWIGWVRQAPGQGLEWIGDIYPGGGYTNYNEKFKGRVTITRDTSTSTAYLELSSLRSEDTAVYYCARLDGSSYRGAMDSWGQGTLVTVSSCSTKGPSVFPLAPSSKSTSGGTAALGCLVKDYFPEPVTVSWNSGALTSGVHTFPAVLQSSGLYSLSSVVTVPSSSLGTQTYICNVNHKPSNTKVDKKVEPKSCDKTHTCPPCPAPELLGGPSVFLFPPKPKDTLMISRTPEVTCVVVDVSHEDPEVKFNWYVDGVEVHNAKTKPREEQYNSTYRVVSVLTVLHQDWLNGKEYKCKVSNKALPAPIEKTISKAKGQPREPQVYTLPPSREEMTKNQVSLTCLVKGFYPSDIAVEWESNGQPENNYKTTPPVLDSDGSFFLYSKLTVDKSRWQQGNVFSCSVMHEALHNHYTQKSLSLSPGK

SEQ ID NO: 640 - protein, 446 aa, Artificial Sequence
  source: /note="Description of Artificial Sequence: Synthetic heavy chain variable domain"
EVQLVQSGAEVKKPGASVKVSCKASGYTFTNFWIHWVRQAPGQGLEWIGEIDPSDSYTNYNQKFKGRVTITRDTSTSTAYLELSSLRSEDTAVYYCAREITTVDYWGQGTLVTVSSCSTKGPSVFPLAPSSKSTSGGTAALGCLVKDYFPEPVTVSWNSGALTSGVHTFPAVLQSSGLYSLSSVVTVPSSSLGTQTYICNVNHKPSNTKVDKKVEPKSCDKTHTCPPCPAPELLGGPSVFLFPPKPKDTLMISRTPEVTCVVVDVSHEDPEVKFNWYVDGVEVHNAKTKPREEQYNSTYRVVSVLTVLHQDWLNGKEYKCKVSNKALPAPIEKTISKAKGQPREPQVYTLPPSREEMTKNQVSLTCLVKGFYPSDIAVEWESNGQPENNYKTTPPVLDSDGSFFLYSKLTVDKSRWQQGNVFSCSVMHEALHNHYTQKSLSLSPGK

SEQ ID NO: 641 - protein, 112 aa, Artificial Sequence
  source: /note="Description of Artificial Sequence: Synthetic heavy chain variable domain"
EVQLVQSGAEVKKPGASVKVSCKASGYTFTSYYIHWVRQAPGQGLEWIGWINPGSGNTNYAQKFQGRVTITRDTSTSTAYLELSSLRSEDTAVYYCARFDYWGQGTLVTVSS

SEQ ID NO: 642 - protein, 121 aa, Artificial Sequence
  source: /note="Description of Artificial Sequence: Synthetic heavy chain variable domain"
QVQLQQSGAELMKPGASVKMSCKATGYTFSSYWIEWVKQRPGHGLEWIGEILPGTSITTYNAKFKVKATFTADTSSNTAYMQLSSLTSEDSAVYFCARYYFGSSSFYFDYWGQGTSLTVSS

SEQ ID NO: 643 - protein, 116 aa, Artificial Sequence
  source: /note="Description of Artificial Sequence: Synthetic heavy chain variable domain"
QVQLQQPGAELVKPGTSVKLSCKASGYTFTNFWIHWVIQRPGQGLEWIGEIDPSDSYTNYNQKFKGKATLTVDKSSNTAYMQLSSLTSEDSAVYYCSREITTVDYWGQGTTLTVSS

SEQ ID NO: 644 - protein, 121 aa, Artificial Sequence
  source: /note="Description of Artificial Sequence: Synthetic heavy chain variable domain"
EVQLVQSGAEVKKPGASVKVSCKASGYTFTSYWIGWVRQAPGQGLEWIGDIYPGGGYTNYNEKFKGRATLTRDTSTSTAYLELSSLRSEDTAVYYCARLDGSSYRGAMDSWGQGTLVTVSS

SEQ ID NO: 645 - protein, 121 aa, Artificial Sequence
  source: /note="Description of Artificial Sequence: Synthetic heavy chain variable domain"
EVQLVQSGAEVKKPGASVKVSCKASGYTFTSYWIGWVRQAPGQGLEWIGDIYPGGGYTNYNEKFKGRATITRDTSTSTAYLELSSLRSEDTAVYYCARLDGSSYRGAMDSWGQGTLVTVSS

SEQ ID NO: 646 - protein, 121 aa, Artificial Sequence
  source: /note="Description of Artificial Sequence: Synthetic heavy chain variable domain"
EVQLVQSGAEVKKPGASVKVSCKASGYTFTSYWIGWVRQAPGQGLEWIGDIYPGGGYTNYNEKFKGRVTITRDTSTSTAYLELSSLRSEDTAVYYCARLDGSSYRGAMDSWGQGTLVTVSS

SEQ ID NO: 647 - protein, 121 aa, Artificial Sequence
  source: /note="Description of Artificial Sequence: Synthetic heavy chain variable domain"
QVQLQQSGAELVRPGTSVKMSCKASGYTFTSYWIGWAKQRPGHGFEWIGDIYPGGGYTNYNEKFKGKATLTADKSSSTAYMQFSSLTSEDSAIYYCARLDGSSYRGAMDSWGQGTSITVSS

SEQ ID NO: 648 - protein, 116 aa, Artificial Sequence
  source: /note="Description of Artificial Sequence: Synthetic heavy chain variable domain"
EVQLVQSGAEVKKPGASVKVSCKASGYTFTNFWIHWVRQAPGQGLEWIGEIDPSDSYTNYNQKFKGRVTITRDTSTSTAYLELSSLRSEDTAVYYCAREITTVDYWGQGTLVTVSS

SEQ ID NO: 649 - protein, 121 aa, Artificial Sequence
  source: /note="Description of Artificial Sequence: Synthetic heavy chain variable domain"
EVQLVQSGAEVKKPGASVKVSCKASGYTFTSYWIGWVRQAPGQGLEWIGDIYPGGGYTNYNEKFKGRATITADTSTSTAYLELSSLRSEDTAVYYCARLDGSSYRGAMDSWGQGTLVTVSS

SEQ ID NO: 650 - protein, 446 aa, Artificial Sequence
  source: /note="Description of Artificial Sequence: Synthetic heavy chain variable domain"
EVQLVQSGAEVKKPGASVKVSCKASGYTFTNFWIHWVRQAPGQGLEWIGEIDPSDSYTNYNQKFKGRVTITRDTSTSTAYLELSSLRSEDTAVYYCAREITTVDYWGQGTLVTVSSSSTKGPSVFPLAPSSKSTSGGTAALGCLVKDYFPEPVTVSWNSGALTSGVHTFPAVLQSSGLYSLSSVVTVPSSSLGTQTYICNVNHKPSNTKVDKKVEPKSCDKTHTCPPCPAPELLGGPSVFLFPPKPKDTLMISRTPEVTCVVVDVSHEDPEVKFNWYVDGVEVHNAKTKPREEQYNSTYRVVSVLTVLHQDWLNGKEYKCKVSNKALPAPIEKTISKAKGQPREPQVYTLPPSREEMTKNQVSLTCLVKGFYPSDIAVEWESNGQPENNYKTTPPVLDSDGSFFLYSKLTVDKSRWQQGNVFSCSVMHEALHNHYTQKSLSLSPGK

SEQ ID NO: 651 - protein, 120 aa, Artificial Sequence
  source: /note="Description of Artificial Sequence: Synthetic heavy chain variable domain"
DVQLVESGGGLVQPGGSRKLSCAASGFTFSSYGIHWVRQVPEKGLEWVAFISSSNSTIYYADTVKGRFTISRDNAENTLFLQMTSLRSEDTAMYYCARPLYYYGSVMDYWGQGTSVTVSS

SEQ ID NO: 652 - protein, 117 aa, Artificial Sequence
  source: /note="Description of Artificial Sequence: Synthetic heavy chain variable domain"
VQLQQSGPELVKPGASVKISCKASGYTFTDYYMNWMKQSHGKSLEWIGDINPNNGGTSYNQKFKGKATLTVDKSSSTAYMELRSLTSEDSAVYYCARPYYYGSSYDYWGQGTTLTVS

SEQ ID NO: 653 - protein, 117 aa, Artificial Sequence
  source: /note="Description of Artificial Sequence: Synthetic heavy chain variable domain"
QVQLVQSGSELKKPGASVKISCKASGYTFTNYGMNWVRQAPGQGLQWMGWINTDSGESTYAEEFKGRFVFSLDTSVNTAYLQITSLTAEDTGMYFCVRVGYDALDYWGQGTLVTVSS

SEQ ID NO: 654 - protein, 117 aa, Artificial Sequence
  source: /note="Description of Artificial Sequence: Synthetic heavy chain variable domain"
QVQLVQSGSELKKPGASVKISCKASGYTFSNYGMNWVRQAPGQGLQWMGWINTDSGESTYAEEFKGRFVFSLDTSVSTAYLQITSLTAEDTGMYFCAKVGYDALDYWGQGTLVTVSS

SEQ ID NO: 655 - protein, 117 aa, Artificial Sequence
  source: /note="Description of Artificial Sequence: Synthetic heavy chain variable domain"
QVQLVQSGSELKKPGASVKISCKASGYTFTNYGMNWVRQAPGQGLQWMGWINTDSGESTYAEEFKGRFVFSLDTSVSTAYLQITSLTAEDTGMYFCAKVGYDALDYWGQGTLVTVSS

SEQ ID NO: 656 - protein, 117 aa, Artificial Sequence
  source: /note="Description of Artificial Sequence: Synthetic heavy chain variable domain"
QIQLVQSGSELKKPGASVKISCKASGYTFTNYGMNWVRQAPGQGLQWMGWINTDSGESTYAEEFKGRFVFSLDTSVNTAYLQITSLTAEDTGMYFCVRVGYDALDYWGQGTLVTVSS

SEQ ID NO: 657 - protein, 117 aa, Artificial Sequence
  source: /note="Description of Artificial Sequence: Synthetic heavy chain variable domain"
QIQLVQSGSELKKPGASVKISCKASGYTFTNYGMNWVRQAPGQGLQWMGWINTDSGESTYAEEFKGRFAFSLDTSVNTAYLQITSLTAEDTGMYFCVRVGYDALDYWGQGTLVTVSS

SEQ ID NO: 658 - protein, 224 aa, Artificial Sequence
  source: /note="Description of Artificial Sequence: Synthetic heavy chain variable domain"
EVQLVESGGGLVQPGGSLRLSCAASGFTFSNFDMAWVRQAPGKGLVWVSSITTGGGDTYYADSVKGRFTISRDNAKSTLYLQMDSLRSEDTAVYYCVRHGYYDGYHLFDYWGQGTLVTVSSASTKGPSVFPLAPSSKSTSGGTAALGCLVKDYFPEPVTVSWNSGALTSGVHTFPAVLQSSGLYSLSSVVTVPSSSLGTQTYICNVNHKPSNTKVDKKVEPKSC

SEQ ID NO: 659 - protein, 120 aa, Artificial Sequence
  source: /note="Description of Artificial Sequence: Synthetic heavy chain variable domain"
QVQLVESGGGLVQPGRSLRLSCAASGFTFSNYAMSWVRQAPGKGLGWVSGISRSGENTYYADSVKGRFTISRDNSKNTLYLQMNSLRDEDTAVYYCARSPAHYYGGMDVWGQGTTVTVSS

SEQ ID NO: 660 - protein, 115 aa, Artificial Sequence
  source: /note="Description of Artificial Sequence: Synthetic heavy chain variable domain"
QVQLVESGGGLVQPGRSLRLSCAASGFTFDDYAMHWVRQAPGKGLEWVSGISWNSGSIGYADSVKGRFTISRDNAKNSLYLQMNSLRAEDTALYYCSVHSFLAYWGQGTLVTVSS

SEQ ID NO: 661 - protein, 115 aa, Artificial Sequence
  source: /note="Description of Artificial Sequence: Synthetic heavy chain variable domain"
EVQLLESGGGLVQPGGSLRLSCAVSGFALSNHGMSWVRRAPGKGLEWVSGIVYSGSTYYAASVKGRFTISRDNSRNTLYLQMNSLRPEDTAIYYCSAHGGESDVWGQGTTVTVSS

SEQ ID NO: 662 - protein, 120 aa, Artificial Sequence
  source: /note="Description of Artificial Sequence: Synthetic heavy chain variable domain"
QVQLVQSGAEVRKTGASVKVSCKASGYIFDNFGINWVRQAPGQGLEWMGWINPKNNNTNYAQKFQGRVTITADESTNTAYMEVSSLRSEDTAVYYCARGPYYYQSYMDVWGQGTMVTVSS

SEQ ID NO: 663 - protein, 123 aa, Artificial Sequence
  source: /note="Description of Artificial Sequence: Synthetic heavy chain variable domain"
QVQLQESGGGLVQPGGSLRLSCAASGFTFSSDAMTWVRQAPGKGLEWVSVISGSGGTTYYADSVKGRFTISRDNSKNTLYLQMNSLRAEDTAVYYCAKLDSSGYYYARGPRYWGQGTLVTVSS

SEQ ID NO: 664 - protein, 118 aa, Artificial Sequence
  source: /note="Description of Artificial Sequence: Synthetic heavy chain variable domain"
QVQLVQSGAEVKKPGASVKVSCKASGYTFSNYGITWVRQAPGQGLEWMGWISAYNGNTNYAQKFQGRVTMTRNTSISTAYMELSSLRSEDTAVYYCARGPYYYYMDVWGKGTMVTVSS

SEQ ID NO: 665 - protein, 115 aa, Artificial Sequence
  source: /note="Description of Artificial Sequence: Synthetic heavy chain variable domain"
EVQLLETGGGLVQPGGSLRLSCAVSGFALSNHGMSWVRRAPGKGLEWVSGIVYSGSTYYAASVKGRFTISRDNSRNTLYLQMNSLRPEDTAIYYCSAHGGESDVWGQGTTVTVSS

SEQ ID NO: 666 - protein, 115 aa, Artificial Sequence
  source: /note="Description of Artificial Sequence: Synthetic heavy chain variable domain"
EVQLVETGGGLVQPGGSLRLSCAVSGFALSNHGMSWVRRAPGKGLEWVSGIVYSGSTYYAASVKGRFTISRDNSRNTLYLQMNSLRPEDTAIYYCSAHGGESDVWGQGTTVTVSS

SEQ ID NO: 667 - protein, 115 aa, Artificial Sequence
  source: /note="Description of Artificial Sequence: Synthetic heavy chain variable domain"
EVQLVETGGGVVQPGGSLRLSCAVSGFALSNHGMSWVRRAPGKGLEWVSGIVYSGSTYYAASVKGRFTISRDNSRNTLYLQMNSLRPEDTAIYYCSAHGGESDVWGQGTTVTVSS

SEQ ID NO: 668 - protein, 117 aa, Artificial Sequence
  source: /note="Description of Artificial Sequence: Synthetic heavy chain variable domain"
QVQLVESGGGLVKPGGSLRLSCAASGFTFSDYYMSWIRQAPGKGLEWVSYISSSGSTIYYADSVKGRFTISRDNAKNSLYLQMNSLRAEDTAVYYCARESGDGMDVWGQGTTVTVSS

SEQ ID NO: 669 - protein, 114 aa, Artificial Sequence
  source: /note="Description of Artificial Sequence: Synthetic heavy chain variable domain"
EVQLVESGGGLVQPGGSLRLSCAVSGFALSNHGMSWVRRAPGKGLEWVSGIVYSGSTYYAASVKRFTISRDNSRNTLYLQMNSLRPEDTAIYYCSAHGGESDVWGQGTTVTVSS

SEQ ID NO: 670 - protein, 117 aa, Artificial Sequence
  source: /note="Description of Artificial Sequence: Synthetic heavy chain variable domain"
QVQLVQSGGGLVKPGGSLRLSCAASGFTFSDYYMSWIRQAPGKGLEWVSYISSSGNTIYYADSVKGRFTISRDNAKNSLYLQMNSLRAEDTAVYYCARSTMVREDYWGQGTLVTVSS

SEQ ID NO: 671 - protein, 115 aa, Artificial Sequence
  source: /note="Description of Artificial Sequence: Synthetic heavy chain variable domain"
QVQLVESGGGLVQPGGSLRLSCAVSGFALSNHGMSWVRRAPGKGLEWVSGIVYSGSTYYAASVKGRFTISRDNSRNTLYLQMNSLRPEDTAIYYCSAHGGESDVWGQGTTVTVSS

SEQ ID NO: 672 - protein, 115 aa, Artificial Sequence; identical to SEQ ID NO: 666
  source: /note="Description of Artificial Sequence: Synthetic heavy chain variable domain"

SEQ ID NO: 673 - protein, 115 aa, Artificial Sequence
  source: /note="Description of Artificial Sequence: Synthetic heavy chain variable domain"
EVQLVESGGGLVQPGGSLRLSCAVSGFALSNHGMSWVRRAPGKGLEWVSGIVYSGSTYYAASVKGRFTISRDNSRNTLYLQMNSLRPEDTAIYYCSAHGGESDVWGQGTTVTVSS

SEQ ID NO: 674 - protein, 121 aa, Artificial Sequence
  source: /note="Description of Artificial Sequence: Synthetic heavy chain variable domain"
QVQLQESGPGLVKPSETLSLTCTVSGGSISSSYYYWGWIRQPPGKGLEWIGSIYYSGSAYYNPSLKSRVTISVDTSKNQFSLRLSSVTAADTAVYYCARHWQEWPDAFDIWGQGTMVTVSS

SEQ ID NO: 675 - protein, 123 aa, Artificial Sequence
  source: /note="Description of Artificial Sequence: Synthetic heavy chain variable domain"
QVNLRESGPALVKPTQTLTLTCTFSGFSLRTSGMCVSWIRQPPGKALEWLARIDWDEDKFYSTSLKTRLTISKDTSDNQVVLRMTNMDPADTATYYCARSGAGGTSATAFDIWGPGTMVTVSS

SEQ ID NO: 676 - protein, 119 aa, Artificial Sequence
  source: /note="Description of Artificial Sequence: Synthetic heavy chain variable domain"
EVQLVESGGGLVKPGGSLRLSCAASGFTFSSYSMNWVRQAPGKGLEWVSSISSSSSYIYYADSVKGRFTISRDNAKNSLYLQMNSLRAEDTAVYYCAKTIAAVYAFDIWGQGTTVTVSS

SEQ ID NO: 677 - protein, 117 aa, Artificial Sequence
  source: /note="Description of Artificial Sequence: Synthetic heavy chain variable domain"
EVQLVESGGGLVKPGGSLRLSCAASGFTFSDYYMSWIRQAPGKGLEWVSYISSSGSTIYYADSVKGRFTISRDNAKNSLYLQMNSLRAEDTAVYYCARDLRGAFDIWGQGTMVTVSS

SEQ ID NO: 678 - protein, 120 aa, Artificial Sequence
  source: /note="Description of Artificial Sequence: Synthetic heavy chain variable domain"
QVQLVQSGAEVKKPGASVKVSCKPSGYTVTSHYIHWVRRAPGQGLEWMGMINPSGGVTAYSQTLQGRVTMTSDTSSSTVYMELSSLRSEDTAMYYCAREGSGSGWYFDFWGRGTLVTVSS

SEQ ID NO: 679 - protein, 123 aa, Artificial Sequence
  source: /note="Description of Artificial Sequence: Synthetic heavy chain variable domain"
QVQLQESGPGLVKPSQTLSLTCTVSGGSISSGGYYWSWIRQHPGKGLEWIGYIYYSGSTYYNPSLKSRVTISVDTSKNQFSLKLSSVTAADTAVYYCARAGIAARLRGAFDIWGQGTMVTVSS

SEQ ID NO: 680 - protein, 129 aa, Artificial Sequence
  source: /note="Description of Artificial Sequence: Synthetic heavy chain variable domain"
QVQLVQSGAEVKKPGSSVKVSCKASGGTFSSYAISWVRQAPGQGLEWMGGIIPIFGTANYAQKFQGRVTITADESTSTAYMELSSLRSEDTAVYYCARRGGYQLLRWDVGLLRSAFDIWGQGTMVTVSS

SEQ ID NO: 681 - protein, 125 aa, Artificial Sequence
  source: /note="Description of Artificial Sequence: Synthetic heavy chain variable domain"
EVQLQQSGPGLVKPSQTLSLTCAISGDSVSSNSAAWNWIRQSPSRGLEWLGRTYYRSKWYSFYAISLKSRIIINPDTSKNQFSLQLKSVTPEDTAVYYCARSSPEGLFLYWFDPWGQGTLVTVSS

SEQ ID NO: 682 - protein, 118 aa, Artificial Sequence
  source: /note="Description of Artificial Sequence: Synthetic heavy chain variable domain"
EVQLVESGGGLVQPGGSLRLSCAASGFTFSSYAMSWVRQAPGKGLEWVSAISGSGGSTYYADSVKGRFTISRDNSKNTLYLQMNSLRAEDTAVYYCAKVEGSGSLDYWGQGTLVTVSS

SEQ ID NO: 683 - protein, 118 aa, Artificial Sequence
  source: /note="Description of Artificial Sequence: Synthetic heavy chain variable domain"
EVQLVETGGGLVQPGGSLRLSCAASGITFSRYPMSWVRQAPGKGLEWVSGISDSGVSTYYADSAKGRFTISRDNSKNTLFLQMSSLRDEDTAVYYCVTRAGSEASDIWGQGTMVTVSS

SEQ ID NO: 684 - protein, 124 aa, Artificial Sequence
  source: /note="Description of Artificial Sequence: Synthetic heavy chain variable domain"
QVQLVESGGGLVQPGGSLRLSCAASGFTFSSYAMSWVRQAPGKGLEWVSAISGSGGSTYYADSVKGRFTISRDNAKNSLYLQMNSLRAEDTAIYYCARATYKRELRYYYGMDVWGQGTMVTVSS

SEQ ID NO: 685 - protein, 124 aa, Artificial Sequence
  source: /note="Description of Artificial Sequence: Synthetic heavy chain variable domain"
EVQLVETGGGLVQPGGSLRLSCAASGFTFSSYAMSWVRQAPGKGLEWVSAISGSGGSTYYADSVKGRFTISRDNSKNTLYLQMNTLKAEDTAVYYCARATYKRELRYYYGMDVWGQGTTVTVSS

SEQ ID NO: 686 - protein, 117 aa, Artificial Sequence
  source: /note="Description of Artificial Sequence: Synthetic heavy chain variable domain"
EVQLVETGGGLVQPGRSLRLSCAASGFTFDDYAMHWVRQAPGKGLEWVSGISWNSGSIGYADSVKGRFTISRDNAKNSLYLQMNSLRDEDTAVYYCARVGKAVPDVWGQGTTVTVSS

SEQ ID NO: 687 - protein, 122 aa, Artificial Sequence
  source: /note="Description of Artificial Sequence: Synthetic heavy chain variable domain"
EVQLVESGGGLVQPGRSLRLSCTASGFTFDDYAMHWVRQRPGKGLEWVASINWKGNSLAYGDSVKGRFAISRDNAKNTVFLQMNSLRTEDTAVYYCASHQGVAYYNYAMDVWGRGTLVTVSS

SEQ ID NO: 688 - protein, 117 aa, Artificial Sequence
  source: /note="Description of Artificial Sequence: Synthetic heavy chain variable domain"
EVQLVESGGGLVQPGGSLRLSCAASGFTFSSYAMSWVRQAPGKGLEWVSAISGSGGSTYYADSVKGRFTISRDNSKNTLYLQMNSLRAEDTAVYYCAKVVRDGMDVWGQGTTVTVSS

SEQ ID NO: 689 - protein, 118 aa, Artificial Sequence
  source: /note="Description of Artificial Sequence: Synthetic heavy chain variable domain"
EVQLLESGGGLVQPGGSLRLSCAASGFTFSSYAMSWVRQAPGKGLEWVSAISGSGGSTYYADSVKGRFTISRDNSKNTLYLQMNSLRAEDTAVYYCAKIPQTGTFDYWGQGTLVTVSS

SEQ ID NO: 690 - protein, 124 aa, Artificial Sequence
  source: /note="Description of Artificial Sequence: Synthetic heavy chain variable domain"
EVQLVETGGGLVQPGGSLRLSCAASGFTFSSYAMSWVRQAPGKGLEWVSAISGSGGSTYYADSVKGRFTMSRENDKNSVFLQMNSLRVEDTGVYYCARANYKRELRYYYGMDVWGQGTMVTVSS

SEQ ID NO: 691 - protein, 120 aa, Artificial Sequence
  source: /note="Description of Artificial Sequence: Synthetic heavy chain variable domain"
EVQLLETGGGLVQPGGSLRLSCAASGFSFSSYAMSWVRQAPGKGLEWVSAISGSGGSTYYADSVKGRFTISRDNSKNTLYLQMNSLRAEDTAVYYCAKALVGATGAFDIWGQGTLVTVSS

SEQ ID NO: 692 - protein, 117 aa, Artificial Sequence
  source: /note="Description of Artificial Sequence: Synthetic heavy chain variable domain"
EVQLLESGGGLVQPGGSLRLSCAASGFTFSSYAMSWVRQAPGKGLEWVSAISGSGGSTYYADSVKGRFTISRDNSKNTLYLQMNSLRAEDTAVYYCVLWFGEGFDPWGQGTLVTVSS

SEQ ID NO: 693 - protein, 126 aa, Artificial Sequence
  source: /note="Description of Artificial Sequence: Synthetic heavy chain variable domain"
QVQLVESGGGLVQPGGSLRLSCAASGFTFSSYAMSWVRQAPGKGLEWVSAISGSGGSTYYADSVKGRFTISRDNSKNTLYLQMNSLRAEDTAVYYCAKVGYDSSGYYRDYYGMDVWGQGTTVTVSS

SEQ ID NO: 694 - protein, 122 aa, Artificial Sequence
  source: /note="Description of Artificial Sequence: Synthetic heavy chain variable domain"
EVQLVESGGGLVQPGGSLRLSCAASGFTFSSYAMSWVRQAPGKGLEWVSAISGSGGSTYYADSVKGRFTISRDNSKNTLYLQMNSLRAEDTAVYYCAKMGWSSGYLGAFDIWGQGTTVTVSS

SEQ ID NO: 695 - protein, 117 aa, Artificial Sequence
  source: /note="Description of Artificial Sequence: Synthetic heavy chain variable domain"
QIQLVQSGPELKKPGETVKISCKASGYTFTDYSINWVKRAPGKGLKWMGWINTETREPAYAYDFRGRFAFSLETSASTAYLQINNLKYEDTATYFCALDYSYAMDYWGQGTSVTVSS

SEQ ID NO: 696 - protein, 121 aa, Artificial Sequence; identical to SEQ ID NO: 674
  source: /note="Description of Artificial Sequence: Synthetic heavy chain variable domain"

SEQ ID NO: 697 - protein, 123 aa, Artificial Sequence; identical to SEQ ID NO: 675
  source: /note="Description of Artificial Sequence: Synthetic heavy chain variable domain"

SEQ ID NO: 698 - protein, 119 aa, Artificial Sequence; identical to SEQ ID NO: 676
  source: /note="Description of Artificial Sequence: Synthetic heavy chain variable domain"

SEQ ID NO: 699 - protein, 117 aa, Artificial Sequence; identical to SEQ ID NO: 677
  source: /note="Description of Artificial Sequence: Synthetic heavy chain variable domain"

SEQ ID NO: 700 - protein, 120 aa, Artificial Sequence; identical to SEQ ID NO: 678
  source: /note="Description of Artificial Sequence: Synthetic heavy chain variable domain"

SEQ ID NO: 701 - protein, 123 aa, Artificial Sequence; identical to SEQ ID NO: 679
  source: /note="Description of Artificial Sequence: Synthetic heavy chain variable domain"

SEQ ID NO: 702 - protein, 129 aa, Artificial Sequence; identical to SEQ ID NO: 680
  source: /note="Description of Artificial Sequence: Synthetic heavy chain variable domain"

SEQ ID NO: 703 - protein, 125 aa, Artificial Sequence; identical to SEQ ID NO: 681
  source: /note="Description of Artificial Sequence: Synthetic heavy chain variable domain"

SEQ ID NO: 704 - protein, 118 aa, Artificial Sequence; identical to SEQ ID NO: 682
  source: /note="Description of Artificial Sequence: Synthetic heavy chain variable domain"

SEQ ID NO: 705 - protein, 118 aa, Artificial Sequence; identical to SEQ ID NO: 683
  source: /note="Description of Artificial Sequence: Synthetic heavy chain variable domain"

SEQ ID NO: 706 - protein, 124 aa, Artificial Sequence; identical to SEQ ID NO: 684
  source: /note="Description of Artificial Sequence: Synthetic heavy chain variable domain"

SEQ ID NO: 707 - protein, 124 aa, Artificial Sequence; identical to SEQ ID NO: 685
  source: /note="Description of Artificial Sequence: Synthetic heavy chain variable domain"

SEQ ID NO: 708 - protein, 117 aa, Artificial Sequence; identical to SEQ ID NO: 686
  source: /note="Description of Artificial Sequence: Synthetic heavy chain variable domain"

SEQ ID NO: 709 - protein, 122 aa, Artificial Sequence; identical to SEQ ID NO: 687
  source: /note="Description of Artificial Sequence: Synthetic heavy chain variable domain"

SEQ ID NO: 710 - protein, 117 aa, Artificial Sequence; identical to SEQ ID NO: 688
  source: /note="Description of Artificial Sequence: Synthetic heavy chain variable domain"

SEQ ID NO: 711 - protein, 118 aa, Artificial Sequence; identical to SEQ ID NO: 689
  source: /note="Description of Artificial Sequence: Synthetic heavy chain variable domain"

SEQ ID NO: 712 - protein, 124 aa, Artificial Sequence; identical to SEQ ID NO: 690
  source: /note="Description of Artificial Sequence: Synthetic heavy chain variable domain"

SEQ ID NO: 713 - protein, 126 aa, Artificial Sequence; identical to SEQ ID NO: 693
  source: /note="Description of Artificial Sequence: Synthetic heavy chain variable domain"

SEQ ID NO: 714 - protein, 121 aa, Artificial Sequence
  source: /note="Description of Artificial Sequence: Synthetic heavy chain variable domain"
QIQLVQSGPDLKKPGETVKLSCKASGYTFTNFGMNWVKQAPGKGFKWMAWINTYTGESYFADDFKGRFAFSVETSATTAYLQINLKTEDTATYFCARGEIYYGYDGGFAYWGQGTLVTVSA

SEQ ID NO: 715 - protein, 117 aa, Artificial Sequence
  source: /note="Description of Artificial Sequence: Synthetic heavy chain variable domain"
QIQLVQSGPELKKPGETVKISCKASGYTFRHYSMNWVKQAPGKGLKWMGRINTESGVPIYADDFKGRFAFSVETSASTAYLVINNLKDEDTASYFCSNDYLYSLDFWGQGTALTVSS

SEQ ID NO: 716 - protein, 115 aa, Artificial Sequence
  source: /note="Description of Artificial Sequence: Synthetic heavy chain variable domain"
QIQLVQSGPELKKPGETVKISCKASGYTTHYSMNWVKQAPGKGLKWMGRITETGEPLYADDFKGRFAFSLETSASTAYLVINNLKNEDTATFFCSNDYLYSCDYWGQGTTLTVSS

SEQ ID NO: 717 - protein, 120 aa, Artificial Sequence; identical to SEQ ID NO: 659
  source: /note="Description of Artificial Sequence: Synthetic heavy chain variable domain"

SEQ ID NO: 718 - protein, 115 aa, Artificial Sequence; identical to SEQ ID NO: 660
  source: /note="Description of Artificial Sequence: Synthetic heavy chain variable domain"

SEQ ID NO: 719 - protein, 115 aa, Artificial Sequence; identical to SEQ ID NO: 661
  source: /note="Description of Artificial Sequence: Synthetic heavy chain variable domain"

SEQ ID NO: 720 - protein, 120 aa, Artificial Sequence; identical to SEQ ID NO: 662
  source: /note="Description of Artificial Sequence: Synthetic heavy chain variable domain"

SEQ ID NO: 721 - protein, 123 aa, Artificial Sequence; identical to SEQ ID NO: 663
  source: /note="Description of Artificial Sequence: Synthetic heavy chain variable domain"

SEQ ID NO: 722 - protein, 118 aa, Artificial Sequence; identical to SEQ ID NO: 664
  source: /note="Description of Artificial Sequence: Synthetic heavy chain variable domain"

SEQ ID NO: 723 - protein, 115 aa, Artificial Sequence; identical to SEQ ID NO: 665
  source: /note="Description of Artificial Sequence: Synthetic heavy chain variable domain"

SEQ ID NO: 724 - protein, 115 aa, Artificial Sequence; identical to SEQ ID NO: 666
  source: /note="Description of Artificial Sequence: Synthetic heavy chain variable domain"

SEQ ID NO: 725 - protein, 115 aa, Artificial Sequence; identical to SEQ ID NO: 667
  source: /note="Description of Artificial Sequence: Synthetic heavy chain variable domain"

SEQ ID NO: 726 - protein, 117 aa, Artificial Sequence; identical to SEQ ID NO: 668
  source: /note="Description of Artificial Sequence: Synthetic heavy chain variable domain"

SEQ ID NO: 727 - protein, 115 aa, Artificial Sequence; identical to SEQ ID NO: 673
  source: /note="Description of Artificial Sequence: Synthetic heavy chain variable domain"

SEQ ID NO: 728 - protein, 117 aa, Artificial Sequence; identical to SEQ ID NO: 670
  source: /note="Description of Artificial Sequence: Synthetic heavy chain variable domain"

SEQ ID NO: 729 - protein, 115 aa, Artificial Sequence; identical to SEQ ID NO: 671
  source: /note="Description of Artificial Sequence: Synthetic heavy chain variable domain"

SEQ ID NO: 730 - protein, 450 aa, Artificial Sequence
  source: /note="Description of Artificial Sequence: Synthetic heavy chain variable domain"
EVQLVESGGGLVQPGGSLRLSCAASGFTFSNFDMAWVRQAPGKGLVWVSSITTGGGDTYYADSVKGRFTISRDNAKSTLYLQMDSLRSEDTAVYYCVRHGYYDGYHLFDYWGQGTLVTVSSASTKGPSVFPLAPSSKSTSGGTAALGCLVKDYFPEPVTVSWNSGALTSGVHTFPAVLQSSGLYSLSSVVTVPSSSLGTQTYICNVNHKPSNTKVDKKVEPKSCDKTHTCPPCPAPPVAGPSVFLFPPKPKDTLMISRTPEVTCVVVDVSHEDPEVKFNWYVDGVEVHNAKTKPREEQYNSTYRVVSVLTVLHQDWLNGKEYKCKVSNKGLPSSIEKTISKAKGQPREPQVYTLPPSRDELTKNQVSLTCLVKGFYPSDIAVEWESNGQPENNYKTTPPVLDSDGSFFLYSKLTVDKSRWQQGNVFSCSVMHEALHNHYTQKSLSLSPGK

SEQ ID NO: 731 - protein, 119 aa, Artificial Sequence
  source: /note="Description of Artificial Sequence: Synthetic heavy chain variable domain"
QVQLVQSGAEVKKPGASVKVSCKASGYSFPDYYINWVRQAPGQGLEWMGWIYFASGNSEYNQKFTGRVTMTRDTSSSTAYMELSSLRSEDTAVYFCASLYDYDWYFDVWGQGTMVTVSS

SEQ ID NO: 732 - protein, 123 aa, Artificial Sequence
  source: /note="Description of Artificial Sequence: Synthetic heavy chain variable domain"
QVQLQQSGPGLVKPSQTLSLTCAISGDSVSSNSAAWNWIRQSPSRGLEWLGRTYYRSKWYNDYAVSVKSRITINPDTSKNQFSLQLNSVTPEDTAVYYCARQGYSYYGYSDVWGQGTLVTVSS

SEQ ID NO: 733 - protein, 117 aa, Artificial Sequence
  source: /note="Description of Artificial Sequence: Synthetic heavy chain variable domain"
QVQLVQSGSELKKPGASVKVSCKASGYTFTDYSINWVRQAPGQGLEWMGWINTETREPAYAYDFRGRFVFSLDTSVSTAYLQISSLKAEDTAVYYCARDYSYAMDYWGQGTLVTVSS

SEQ ID NO: 734 - protein, 117 aa, Artificial Sequence
  source: /note="Description of Artificial Sequence: Synthetic heavy chain variable domain"
QIQLVQSGPELKKPGETVKISCKASGYTFTHYSMNWVKQAPGKGLKWMGRINTETGEPLYADDFKGRFAFSLETSASTAYLVINNLKNEDTATFFCSNDYLYSCDYWGRGTTLTVSS

SEQ ID NO: 735 - protein, 119 aa, Artificial Sequence
  source: /note="Description of Artificial Sequence: Synthetic heavy chain variable domain"
QVQLVQSGAEVKKPGASVKVSCKASGYSFPDYYINWVRQAPGQGLEWMGWIYFASGNSEYNQKFTGRVTMTRDTSINTAYMELSSLTSEDTAVYFCASLYDYDWYFDVWGQGTMVTVSS

SEQ ID NO: 736 - protein, 117 aa, Artificial Sequence
  source: /note="Description of Artificial Sequence: Synthetic heavy chain variable domain"
QVQLVQSGSELKKPGESVKVSCKASGYTFTDYSINWVRQAPGQGLEWMGWINTETREPAYAYDFRGRFVFSLDTSVSTAYLQISSLKAEDTAVYYCALDYSYAMDYWGQGTLVTVSS

SEQ ID NO: 737 - protein, 117 aa, Artificial Sequence
  source: /note="Description of Artificial Sequence: Synthetic heavy chain variable domain"
QVQLVQSGSELKKPGESVKISCKASGYTFTDYSINWVRQAPGQGLEWMGWINTETREPAYAYDFRGRFVFSLDTSASTAYLQISSLKAEDTAVYFCALDYSYAMDYWGQGTLVTVSS

SEQ ID NO: 738 - protein, 117 aa, Artificial Sequence
  source: /note="Description of Artificial Sequence: Synthetic heavy chain variable domain"
QVQLVQSGSELKKPGESVKISCKASGYTFTDYSINWVKQAPGQGLKWMGWINTETREPAYAYDFRGRFVFSLDTSASTAYLQISSLKAEDTAVYFCALDYSYAMDYWGQGTLVTVSS

SEQ ID NO: 739 - protein, 118 aa, Artificial Sequence
  source: /note="Description of Artificial Sequence: Synthetic heavy chain variable domain"
EVQLVQSGAEVKKPGASVKVSCKASGYTFTSYYMHWVRQAPGQGLEWMGIINPSGGSTSYAQKFQGRVTMTRDTSTSTVYMELSSLRSEDTAVYYCARSQWGGVLDYWGQGTLVTVSS

SEQ ID NO: 740 - protein, 117 aa, Artificial Sequence
  source: /note="Description of Artificial Sequence: Synthetic heavy chain variable domain"
QIQLVQSGSELKKPGESVKISCKASGYTFTDYSINWVKQAPGQGLKWMGWINTETREPAYAYDFRGRFVFSLDTSASTAYLQISSLKAEDTAVYFCALDYSYAMDYWGQGTLVTVSS

SEQ ID NO: 741 - protein, 117 aa, Artificial Sequence; identical to SEQ ID NO: 734
  source: /note="Description of Artificial Sequence: Synthetic heavy chain variable domain"

SEQ ID NO: 742 - protein, 123 aa, Artificial Sequence
  source: /note="Description of Artificial Sequence: Synthetic heavy chain variable domain"
QVQLVESGAEVKKPGSSVKVSCKASGGTFSSYAISWVRQAPGQGLEWMGRIIPILGIANYAQKFQGRVTITADESTSTAYMELSSLRSEDTAVYYCARTGYESWGSYEVIDRWGQGTLVTVSS

SEQ ID NO: 743 - protein, 113 aa, Artificial Sequence
  source: /note="Description of Artificial Sequence: Synthetic heavy chain variable domain"
EVQLLESGGGLVQPGGSLRLSCAASGFTFSSYAMNWVRQAPGKGLEWVSAILSSGGSTYYADSVKGRFTISRDNSKNTLYLQMNSLRAEDTAVYYCARYWPMDIWGQGTLVTV

SEQ ID NO: 744 - protein, 121 aa, Artificial Sequence
  source: /note="Description of Artificial Sequence: Synthetic heavy chain variable domain"
QVQLVQSGAEVKKPGSSVKVSCKASGGTFSSYAISWVRQAPGQGLEWMGRIIPILGIANYAQKFQGRVTITADKSTSTAYMELSSLRSEDTAVYYCARGGYYSHDMWSEDWGQGTLVTVSS

SEQ ID NO: 745 - protein, 125 aa, Artificial Sequence
  source: /note="Description of Artificial Sequence: Synthetic heavy chain variable domain"
QVQLQESGPGLVKPSGTLSLTCGVSGGSISNSNWWSWVRQPPGKGLEWIGEIYHSGSTKYNPSLRSRVTISVDKSKNQFSLKLSSVTAADTAVYYCARRDNWKTPTTKIDGFDIWGQGTMVTVSS

SEQ ID NO: 746 - protein, 118 aa, Artificial Sequence
  source: /note="Description of Artificial Sequence: Synthetic heavy chain variable domain"
QVQLVQSGAEVKKPGASVKVSCKASGYTFTGYYMHWVRQAPGQGLEWMGWINPNSGGTNYAQKFQGRVTMTRDTSISTAYMELSRLRSDDTAVYYCARSQWGSSWDYWGQGTLVTVSS

SEQ ID NO: 747 - protein, 119 aa, Artificial Sequence
  source: /note="Description of Artificial Sequence: Synthetic heavy chain variable domain"
EVQLVESGAEVKKPGASVKVSCKASGYTFTGYYMHWVRQAPGQGLEWMGWINPNSGGTNYAQKFQGRVTMTRDTSISTAYMELSRLRSDDTAVYYCARSSYHLYGYDSWGQGTLVTVSS

SEQ ID NO: 748 - protein, 120 aa, Artificial Sequence
  source: /note="Description of Artificial Sequence: Synthetic heavy chain variable domain"
QVQLVQSGAEVKKPGSSVKVSCKASGGTFSSYAISWVRQAPGQGLEWMGGIIPIFSTANYAQKFQGRVTMTTDTSTSTAYMELRSLRSDDTAVYYCARQPWTWYSPYDQWGQGTLVTVSS

SEQ ID NO: 749 - protein, 117 aa, Artificial Sequence
  source: /note="Description of Artificial Sequence: Synthetic heavy chain variable domain"
EVQLVETGGGLVQPGGSLRLSCAASGFTFSTYAMTWVRQAPGKGLEWVSAITPGGDRTYYADSVKGRFTISRDNSRNTLYLQMNSLRAEDTAVYYCARYYGYMIDMWGQGTLVTVSS

SEQ ID NO: 750 - protein, 118 aa, Artificial Sequence
  source: /note="Description of Artificial Sequence: Synthetic heavy chain variable domain"
QMQLVQSGAEVKKPGASVKVSCKASGYTFTGYYVHWLRQAPGQGLEWMGWINPNSGGTNNAQEFQGRITMTRDTSINTAYMELSRLRSDDTAVYYCARSQWGGTYDYWGQGTLVTVSS

SEQ ID NO: 751 - protein, 117 aa, Artificial Sequence
  source: /note="Description of Artificial Sequence: Synthetic heavy chain variable domain"
EVQLVQSGAEVKKPGESLKISCKGSGYDFTTYWIGWVRQMPGKGLEWMGIIYPGDSDTRYSPSVRGRVTISADKSINTAYLQWSSLEASDTAMYYCARMWTFSQDGWGQGTLVTVSS

SEQ ID NO: 752 - protein, 123 aa, Artificial Sequence
  source: /note="Description of Artificial Sequence: Synthetic heavy chain variable domain"
QVQLQQSGPGLVKPSQTLSLTCAISGDSVSSNSAAWNWIRQSPSRGLEWLGRTYYRSKWYNDYAVSVKSRITINPDTSKNQFSLQLNSVTPEDTAVYYCARYGFSGSRFYDTWGQGTLVTVSS

SEQ ID NO: 753 - protein, 118 aa, Artificial Sequence
  source: /note="Description of Artificial Sequence: Synthetic heavy chain variable domain"
EVQLVQSGAEMKKPGASLKLSCKASGYTFIDYYVYWMRQAPGQGLESMGWINPNSGGTNYAQKFQGRVTMTRDTSISTAYMELSRLRSDDTAMYYCARSQRDGYMDYWGQGTLVTVSS

SEQ ID NO: 754 - protein, 118 aa, Artificial Sequence
  source: /note="Description of Artificial Sequence: Synthetic heavy chain variable domain"
QVQLVQSGAEVKKPGASVKVSCKASGYTFTDYYMHWVRQAPGQRLEWMGWINPNSGGTNYAQKFQDRITVTRDTSSNTGYMELTRLRSDDTAVYYCARSPYSGVLDKWGQGTLVTVSS

SEQ ID NO: 755 - protein, 120 aa, Artificial Sequence
  source: /note="Description of Artificial Sequence: Synthetic heavy chain variable domain"
QVQLVQSGAEVKKPGSSVKVSCKASGGTFSSYAISWVRQAPGQGLEWMGRIIPILGTANYAQKFQGRVTITADESTSTAYMELSSLRSEDTAVYYCARSGYGSYRWEDSWGQGTLVTVSS

SEQ ID NO: 756 - protein, 116 aa, Artificial Sequence
  source: /note="Description of Artificial Sequence: Synthetic heavy chain variable domain"
EVQLVQSGAEVKKPGESLKISCKGSGYSFTSYWIGWVRQMPGKGLEWMGIIYPGDSDTRYSPSFQGHVTISADKSISTAYLQWSSLKASDTAMYYCARYSGSFDNWGQGTLVTVSS

SEQ ID NO: 757 - protein, 122 aa, Artificial Sequence
  source: /note="Description of Artificial Sequence: Synthetic heavy chain variable domain"
EVQLVQSGAEVKKPGSSVKVSCKASGGTFSSYAISWVRQAPGQGLEWMGRIIPILGIANYAQKFQGRVTMTEDTSTDTAYMELSSLRSEDTAVYYCARSGYSKSIVSYMDYWGQGTLVTVSS

SEQ ID NO: 758 - protein, 119 aa, Artificial Sequence; identical to SEQ ID NO: 735
  source: /note="Description of Artificial Sequence: Synthetic heavy chain variable domain"

SEQ ID NO: 759 - protein, 119 aa, Artificial Sequence; identical to SEQ ID NO: 731
  source: /note="Description of Artificial Sequence: Synthetic heavy chain variable domain"

SEQ ID NO: 760 - protein, 117 aa, Artificial Sequence; identical to SEQ ID NO: 695
  source: /note="Description of Artificial Sequence: Synthetic heavy chain variable domain"

SEQ ID NO: 761 - protein, 121 aa, Artificial Sequence
  source: /note="Description of Artificial Sequence: Synthetic heavy chain variable domain"
EVQLVESGGGLVQPGGSLRLSCAASGFTFSNFDMAWVRQAPGKGLVWVSSITTGGGDTYYADSVKGRFTISRDNAKSTLYLQMDSLRSEDTAVYYCVRHGYYDGYHLFDYWGQGTLVTVSS

SEQ ID NO: 762 - protein, 138 aa, Artificial Sequence
  source: /note="Description of Artificial Sequence: Synthetic heavy chain variable domain"
MEWSWIFLFLLSGTAGVLSEVQLQQSGPELVKPGTSVKISCKASGYSFTGYYMHWVKQSQVKSLEWIGRINPDNGGRTYNQIFKDKASLTVHKSSSTAYMELHSLTSDDSAVYYCTRERGQYGNYGGFSDWGQGTLVT

SEQ ID NO: 763 - protein, 222 aa, Artificial Sequence
  source: /note="Description of Artificial Sequence: Synthetic heavy chain variable domain"
EVQLVESGGGLVQPGGSLRLSCAASGFTFEAYAMHWVRQSPGKGLEWVASINWNSGRIAYADSVKGRFTISADTSKNTAYLQMNSLRAEDTAIYYCSRDIRRFSTGAEFEYWGQGTLVTVSSASTKGPSVFPLAPSSKSTSGGTAALGCLVKDYFPEPVTVSWNSGALTSGVHTFPAVLQSSGLYSLSSVVTVPSSSLGTQTYICNVNHKPSNTKVDKKVEP

SEQ ID NO: 764 - protein, 219 aa, Artificial Sequence
  source: /note="Description of Artificial Sequence: Synthetic heavy chain variable domain"
QVQLQESGGGLVRPSQTLSLTCTVSGFTFTDFYMNWVRQSPGRGLEWIGFIRDKAKGYTTEYNPSVKGRVTMLVDTSKNQFSLRLSSVTAADTAWYCAREGHTAAPFDYWGQGSLVTVSSASTKGPSVFPLAPSSKSTSGGTAALGCLVKDYFPEPVTVSWNSGALTSGVHTFPAVLQSSGLYSLSSVVTVPSSSLGTQTYICNVNHKPSNTKVDKKVE

SEQ ID NO: 765 - protein, 118 aa, Artificial Sequence
  source: /note="Description of Artificial Sequence: Synthetic heavy chain variable domain"
EVQLVESGGGLVKPGGSLRLSCAASGFTFSDAWMDWVRQAPGKGLEWVAEIRSKASNHATYYAESVKGRFTISRDDSKNTLYLQMNSLKTEDTAVYYCTRWRRFFDSWGQGTLVTVSS

SEQ ID NO: 766 - protein, 118 aa, Artificial Sequence
  source: /note="Description of Artificial Sequence: Synthetic heavy chain variable domain"
EVQLVESGGGLVKPGGSLRLSCAASGFTFSDAWMDWVRQAPGKGLEWVGEIRSQASNHATYYAESVKGRFTISRDDSKNTLYLQMNSLKTEDTAVYYCTRWRRFFDSWGQGTLVTVSS

SEQ ID NO: 767 - protein, 118 aa, Artificial Sequence
  source: /note="Description of Artificial Sequence: Synthetic heavy chain variable domain"
EVQLVESGGGLVKPGGSLRLSCAASGFTFSDAWMDWVRQAPGKGLEWVSEIRSKASNHATYYAESVKGRFTISRDDSKNTLYLQMNSLKTEDTAVYYCTRWRRFFDSWGQGTLVTVSS

SEQ ID NO: 768 - protein, 141 aa, Artificial Sequence
  source: /note="Description of Artificial Sequence: Synthetic heavy chain variable domain"
MGWSWIFLFLVSGTGGVLSEVQLQQSGPELVKPGASVKMSCKASGYTFTDYYMKWVKQSHGKSLEWIGDIIPSNGATFYNQKFKGKATLTVDRSSSTAYMHLNSLTSEDSAVYYCTRSHLLRASWFAYWGQGTLVTVSAAS

SEQ ID NO: 769 - protein, 141 aa, Artificial Sequence; identical to SEQ ID NO: 768
  source: /note="Description of Artificial Sequence: Synthetic heavy chain variable domain"

SEQ ID NO: 770 - protein, 140 aa, Artificial Sequence
  source: /note="Description of Artificial Sequence: Synthetic heavy chain variable domain"
WTWRFLFVVAAATGVQSQVQLLQSGAEVKKPGSSVKVSCKASGGTFSTYAISWVRQAPGQGLEWMGGIIPIFGIVNYAQKFQGRVTITADESTSTAYMELSSLRSEDTAVYYCARGGGSGPDVLDIWGQGTMVTVSSAST

SEQ ID NO: 771 - protein, 127 aa, Artificial Sequence
  source: /note="Description of Artificial Sequence: Synthetic heavy chain variable domain"
EVKLVESGGGLVQPGGSLSLSCAASGFTFTDYYMSWVRQPPGKALEWLALIRSKADGYTTEYSASVKGRFTLSRDDSQSILYLQMNALRPEDSATYYCARDAAYYSYYSPEGAMDYWGQGTSVTVSS

SEQ ID NO: 772 - protein, 140 aa, Artificial Sequence; identical to SEQ ID NO: 770
  source: /note="Description of Artificial Sequence: Synthetic heavy chain variable domain"

SEQ ID NO: 773 - protein, 132 aa, Artificial Sequence
  source: /note="Description of Artificial Sequence: Synthetic heavy chain variable domain"
MDMRVPAQLLGLLLLWLPGARCVIWMTQSPSLLSASTGDRVTISCRMSQGIRSYLAWYQQKPGKAPELLIYAASTLQSGVPSRFSGSGSGTDFTLTISSLQSEDFATYYCQQYYSFPYTFGQGTKLEIKRTV

SEQ ID NO: 774 - protein, 119 aa, Artificial Sequence
  source: /note="Description of Artificial Sequence: Synthetic heavy chain variable domain"
VQLQESGPGLVKPSQSLSLTCSVTDYSITSGYYWNWIRQFPGNKLEWMGYISYDGSNNYNPSLKNRISITRDTSKNQFFLKLSSVTTEDTATYYCSRGEGFYFDSWGQGTTLTVSSARS

SEQ ID NO: 775 - protein, 127 aa, Artificial Sequence
  source: /note="Description of Artificial Sequence: Synthetic heavy chain variable domain"
EVKLVESGGGLVQPGRSLRLSCTASGFTFTDYYMSWVRQAPGKGLEWVGLIRSKADGYTTEYSASVKGRFTISRDDSKSILYLQMNSLKTEDTAVYYCARDAAYYSYYSPEGAMDYWGQGTLVTVSS

SEQ ID NO: 776 - protein, 127 aa, Artificial Sequence
  source: /note="Description of Artificial Sequence: Synthetic heavy chain variable domain"
EVQLVESGGGLVQPGRSLRLSCTASGFTFTDYYMSWVRQAPGKGLEWVGLIRSKADGYTTEYSASVKGRFTISRDDSKSILYLQMNSLKTEDTAVYYCARDAAYYSYYSPEGAMDYWGQGTLVTVSS

SEQ ID NO: 777 - protein, 127 aa, Artificial Sequence
  source: /note="Description of Artificial Sequence: Synthetic heavy chain variable domain"
EVQLVESGGGLVQPGRSLRLSCTASGFTFTDYYMSWVRQAPGKGLEWVGLIRSKADGYTTEYSASVKGRFTISRDDSKSIAYLQMNSLKTEDTAVYYCARDAAYYSYYSPEGAMDYWGQGTLVTVSS

SEQ ID NO: 778 - protein, 127 aa, Artificial Sequence
  source: /note="Description of Artificial Sequence: Synthetic heavy chain variable domain"
EVQLVESGGGLVQPGRSLRLSCTASGFTFTDYYMSWVRQAPGKGLEWVGFIRSKADGYTTEYSASVKGRFTISRDDSKSIAYLQMNSLKTEDTAVYYCARDAAYYSYYSPEGAMDYWGQGTLVTVSS

SEQ ID NO: 779 - protein, 127 aa, Artificial Sequence
  source: /note="Description of Artificial Sequence: Synthetic heavy chain variable domain"
EVQLVESGGGLVQPGRSLRLSCTASGFTFTDYYMSWVRQAPGKGLEWVGFIRSKADGYTTEYAASVKGRFTISRDDSKSIAYLQMNSLKTEDTAVYYCARDAAYYSYYSPEGAMDYWGQGTLVTVSS

SEQ ID NO: 780 - protein, 127 aa, Artificial Sequence
  source: /note="Description of Artificial Sequence: Synthetic heavy chain variable domain"
EVQLVESGGGLVQPGRSLRLSCTASGFTFTDYYMSWVRQAPGKGLEWVGLIRSKADGYTTEYAASVKGRFTISRDDSKSIAYLQMNSLKTEDTAVYYCARDAAYYSYYSPEGAMDYWGQGTLVTVSS

SEQ ID NO: 781 - protein, 127 aa, Artificial Sequence
  source: /note="Description of Artificial Sequence: Synthetic heavy chain variable domain"
EVQLVESGGGLVQPGRSLRLSCTASGFTFTDYYMSWVRQAPGKGLEWVGFIRSKADGYTTEYAASVKGRFTISRDDSKSIAYLQMNSLKTEDTAVYYCTRDAAYYSYYSPEGAMDYWGQGTLVTVSS

SEQ ID NO: 782 - protein, 115 aa, Artificial Sequence
  source: /note="Description of Artificial Sequence: Synthetic heavy chain variable domain"
QVQLQQPGAELVRPGASVKLSCKASGYTFTSYWMNWVKQRPDQGLEWIGRIDPYDSETHYNQKFKDKAILTVDKSSSTAYMQLSSLTSEDSAVYYCARGNWDDYWGQGTTLTVSS

SEQ ID NO: 783 - protein, 118 aa, Artificial Sequence
  source: /note="Description of Artificial Sequence: Synthetic heavy chain variable domain"
QIQLVQSGPELKKPGETVKISCKASGYIFTNYGMNWVKQAPGKSFKWMGWINTYTGESTYSADFKGRFAFSLETSASTAYLHINDLKNEDTATYFCARSGGYDPMDYWGQGTSVTVSS

SEQ ID NO: 784 - protein, 119 aa, Artificial Sequence; identical to SEQ ID NO: 774
  source: /note="Description of Artificial Sequence: Synthetic heavy chain variable domain"

SEQ ID NO: 785 - protein, 121 aa, Artificial Sequence
  source: /note="Description of Artificial Sequence: Synthetic heavy chain variable domain"
QVQLVQSGAEVKKPGASVKVSCKASGYTFTGYYMHWVRQAPGQGLEWMGWINPNSGGTNYAQKFQGRVTMTRDTSISTAYMELSRLRSDDTAVYYCARDMNILATVPFDIWGQGTMVTVSS

SEQ ID NO: 786 - protein, 121 aa, Artificial Sequence
  source: /note="Description of Artificial Sequence: Synthetic heavy chain variable domain"
QVQLVQSGAEVKKPGASVKVSCKASGYTFTGYYMHWVRQAPGQGLEWMGWINPNSGGTNYAQKFQGRVTLTRDTSISTVYMELSRLRSDDTAVYYCARDMNILATVPFDIWGQGTMVTVSS

SEQ ID NO: 787 - protein, 121 aa, Artificial Sequence
  source: /note="Description of Artificial Sequence: Synthetic heavy chain variable domain"
QVQLVQSGAEVKKPGASVKVSCKASGYIFTGYYIHWVRQAPGQGLEWMGWINPNSGGTNYAQKFQGRVTMTRDTSISTAYMELSGLRSDDPAVYYCARDMNILATVPFDIWGQGTLVTVSS

SEQ ID NO: 788 - protein, 121 aa, Artificial Sequence
  source: /note="Description of Artificial Sequence: Synthetic heavy chain variable domain"
QVQLQQSGAEVKKSGASVKVSCKASGYTFTDYYMHWLRQAPGQGLEWMGWINPNSGDTNYAQKFQGRVTLTRDTSISTVYMELSRLRSDDTAVYYCARDMNILATVPFDIWGQGTMVTVSS

SEQ ID NO: 789 - protein, 115 aa, Artificial Sequence
  source: /note="Description of Artificial Sequence: Synthetic heavy chain variable domain"
EVQLVESGGGLVQPGGSLRLSCAASGYTFTSYWMNWVRQAPGKGLVWVSRIDPYDSETHYNQKFKDRFTISVDKAKSTAYLQMNSLRAEDTAVYYCARGNWDDYWGQGTTVTVSS

SEQ ID NO: 790 - protein, 126 aa, Artificial Sequence
  source: /note="Description of Artificial Sequence: Synthetic heavy chain variable domain"
EVKLVESGGGLVQPGRSLRLSCTASGFTFTDYYMSWVRQAPGKGLEWVGLIRSKADGYTTEYSASVKGRFTISRDDSQSIAYLQMNSLKTEDTAVYYCARDAAYYSYYSPEGAMDYGQGTLVTVSS

SEQ ID NO: 791 - protein, 125 aa, Artificial Sequence
  source: /note="Description of Artificial Sequence: Synthetic heavy chain variable domain"
EVQLVESGGGLVQPGRSLRLSCTASGFTFTDYYMSVRQAPGKGLEWVGLIRSKADGYTTEYSASVKGRFTISRDDSQSIAYLQMNSLKTEDTAVYYCARDAAYYSYYSPEGAMDYGQGTLVTVSS

SEQ ID NO: 792 - protein, 126 aa, Artificial Sequence
  source: /note="Description of Artificial Sequence: Synthetic heavy chain variable domain"
EVQLVESGGGLVQPGRSLRLSCTASGFTFTDYYMSWVRQAPGKGLEWVGLIRSKADGYTTEYAASVKGRFTISRDDSQSIAYLQMNSLKTEDTAVYYCARDAAYYSYYSPEGAMDYGQGTLVTVSS

SEQ ID NO: 793 - protein, 126 aa, Artificial Sequence
  source: /note="Description of Artificial Sequence: Synthetic heavy chain variable domain"
EVQLVESGGGLVQPGRSLRLSCTASGFTFTDYYMSVRQPPGKGLEWVGLIRSKADGYTTEYSASVKGRFTISRDDSQSIAYLQMNSLKTEDTAVYYCARDAAYYSYYSPEGAMDYWGQGTLVTVSS

SEQ ID NO: 794 - protein, 118 aa, Artificial Sequence
  source: /note="Description of Artificial Sequence: Synthetic heavy chain variable domain"
GVQLVQSGAEVKKPGASVKVSCKASGYTFTSYYMHWVRQAPGQGLEWMGIINPSGGSTSYAQKFQGRVTMTRDTSTSTVYMELSSLRSEDTAVYYCARRVISGAFDIWGQGTMVTVSS

SEQ ID NO: 795 - protein, 123 aa, Artificial Sequence
  source: /note="Description of Artificial Sequence: Synthetic heavy chain variable domain"
QVQLVQSGAEVKKPGASVKVSCKASGYTFTSYYMHWVRQAPGQGLEWMGIINPSDGSTRYVEKFQGRVTMTRDTSTSTVYMELSSLRSEDTAVYFCARGMGPGPHYHFYMDVWGKGTMVTVSS

SEQ ID NO: 796 - protein, 125 aa, Artificial Sequence
  source: /note="Description of Artificial Sequence: Synthetic heavy chain variable domain"
QVQLVQSGAEVKKPGASVKVSCKASGYTFTGQYIHWVRQAPGQGLEWMGWISAYNGYTDYAQKVQGRVTMTTDTSTSTAYMELRSLRSDDTAVYYCAREVWPVAAADTFSVFDIWGRGTLVTVSS

SEQ ID NO: 797 - protein, 120 aa, Artificial Sequence
  source: /note="Description of Artificial Sequence: Synthetic heavy chain variable domain"
EVQLLESGGGLVQPGGSLRLSCAASGFTFSSYAMSWVRQAPGKGLEWVSAISGSGGSTYYADSVKGRFTISRDNSKNTLYLQMNSLRAEDTAVYYCARGRTEVATPGAYWGQGTMVTVSS

SEQ ID NO: 798 - protein, 118 aa, Artificial Sequence
  source: /note="Description of Artificial Sequence: Synthetic heavy chain variable domain"
EVQLLESGGGLVQPGGSLRLSCAASGFTFSSYAMSWVRQAPGKGLEWVSAISGSGGSTYYADSVKGRFTISRDNSKNTLYLQMNSLRAEDTAVYYCARDGTTGLHDSWGQGTMVTVSS

SEQ ID NO: 799 - protein, 112 aa, Artificial Sequence
  source: /note="Description of Artificial Sequence: Synthetic heavy chain variable domain"
EVQLVQSGAEVKKPGESLKISCKGYGYDFSRDWIAWVRQMPGKGLEWMGIIYPGDSDTRYSPSFEGQVTISADKSISTAYLQWRSLKASDTAMYYCARQRRLGWFDPWGQGT

SEQ ID NO: 800 - protein, 123 aa, Artificial Sequence
  source: /note="Description of Artificial Sequence: Synthetic heavy chain variable domain"
EVQLLESGGGLVQPGGSLRLSCAASGFTFSSYAMSWVRQAPGKGLEWVSAISGSGGSTYYADSVKGRFTISRDNSKNTLYLQMNSLRAEDTAVYYCARHLPSGSSSSWAFDSWGRGTTVTVSS

SEQ ID NO: 801 - protein, 122 aa, Artificial Sequence
  source: /note="Description of Artificial Sequence: Synthetic heavy chain variable domain"
EVQLLESGGGLVQPGGSLRLSCAASGFTFSSYAMSWVRQAPGKGLEWVSAISGSGGSTYYADSVKGRFTISRDNSKNTLYLQMNSLRAEDTAVYYCARYRDYGGNSHLFDYWGQGTTVTVSS

SEQ ID NO: 802 - protein, 118 aa, Artificial Sequence
  source: /note="Description of Artificial Sequence: Synthetic heavy chain variable domain"
QVTLKESGPGILQPSQTLSLTCSFSGFSLRTSGMGVGWIRQPSGKGLEWLAHIWWDDDKRYNPALKSRLTISKDTSSNQVFLKIASVDTADTATYYCAQINPAWFAYWGQGTLVTVSS

SEQ ID NO: 803 - protein, 449 aa, Artificial Sequence
  source: /note="Description of Artificial Sequence: Synthetic heavy chain variable domain"
EVKLQESGPGLVAPSQSLSVTCTVSGVSLPDYGVSWIRQPPRKGLEWLGVIWGSETTYYNSALKSRLTIIKDNSKSQVFLKMNSLQTDDTAIYYCAKHYYYGGSYAMDYWGQGTSVTVSSASTKGPSVFPLAPSSKSTSGGTAALGCLVKDYFPEPVTVSWNSGALTSGVHTFPAVLQSSGLYSLSSVVTVPSSSLGTQTYICNVNHKPSNTKVDKKVEPKSCDKTHTCPPCPAPPVAGPSVFLFPPKPKDTLMISRTPEVTCVVVDVSHEDPEVKFNWYVDGVEVHNAKTKPREEQYNSTYRVVSVLTVLHQDWLNGKEYKCKVSNKGLPSSIEKTISKAKGQPREPQVYTLPPSRDELTKNQVSLTCLVKGFYPSDIAVEWESNGQPENNYKTTPPVLDSDGSFFLYSKLTVDKSRWQQGNVFSCSVMHEALHNHYTQKSLSLSPGK

SEQ ID NO: 804 - protein, 223 aa, Artificial Sequence
  source: /note="Description of Artificial Sequence: Synthetic heavy chain variable domain"
EVKLQESGPGLVAPSQSLSVTCTVSGVSLPDYGVSWIRQPPRKGLEWLGVIWGSETTYYNSALKSRLTIIKDNSKSQVFLKMNSLQTDDTAIYYCAKHYYYGGSYAMDYWGQGTSVTVSSASTKGPSVFPLAPSSKSTSGGTAALGCLVKDYFPEPVTVSWNSGALTSGVHTFPAVLQSSGLYSLSSVVTVPSSSLGTQTYICNVNHKPSNTKVDKKVEPKSC

SEQ ID NO: 805 - protein, 234 aa, Artificial Sequence
  source: /note="Description of Artificial Sequence: Synthetic heavy chain variable domain"
EVKLQESGPGLVAPSQSLSVTCTVSGVSLPDYGVSWIRQPPRKGLEWLGVIWGSETTYYNSALKSRLTIIKDNSKSQVFLKMNSLQTDDTAIYYCAKHYYYGGSYAMDYWGQGTSVTVSSASTKGPSVFPLAPSSNYHLENEVARLKKLSGGTAALGCLVKDYFPEPVTVSWNSGALTSGVHTFPAVLQSSGLYSLSSVVTVPSSSLGTQTYICNVNHKPSNTKVDKKVEPKSC

SEQ ID NO: 806 - protein, 460 aa, Artificial Sequence
  source: /note="Description of Artificial Sequence: Synthetic heavy chain variable domain"
EVKLQESGPGLVAPSQSLSVTCTVSGVSLPDYGVSWIRQPPRKGLEWLGVIWGSETTYYNSALKSRLTIIKDNSKSQVFLKMNSLQTDDTAIYYCAKHYYYGGSYAMDYWGQGTSVTVSSASTKGPSVFPLAPSSNYHLENEVARLKKLSGGTAALGCLVKDYFPEPVTVSWNSGALTSGVHTFPAVLQSSGLYSLSSVVTVPSSSLGTQTYICNVNHKPSNTKVDKKVEPKSCDKTHTCPPCPAPPVAGPSVFLFPPKPKDTLMISRTPEVTCVVVDVSHEDPEVKFNWYVDGVEVHNAKTKPREEQYNSTYRVVSVLTVLHQDWLNGKEYKCKVSNKGLPSSIEKTISKAKGQPREPQVYTLPPSRDELTKNQVSLTCLVKGFYPSDIAVEWESNGQPENNYKTTPPVLDSDGSFFLYSKLTVDKSRWQQGNVFSCSVMHEALHNHYTQKSLSLSPGK

SEQ ID NO: 807 - protein, 241 aa, Artificial Sequence
  source: /note="Description of Artificial Sequence: Synthetic heavy chain variable domain"
EVKLQESGPGLVAPSQSLSVTCTVSGVSLPDYGVSWIRQPPRKGLEWLGVIWGSETTYYNSALKRLTIIKDNSKSQVFLKMNSLQTDDTAIYYCAKHYYYGGSYAMDYWGQGTSVTVSSASTKGPSVFPLAPSSKSTSGGTAALGCLVKDYFPEPVTVSWNSGALTSGVHTFPAVLQSSGLYSLSSVVTVPSSSLGTQTYICNVNHKPSNTKVDKKVEPKSCGGGGSNYHLENEVARLKKL

SEQ ID NO: 808 - protein, 471 aa, Artificial Sequence
  source: /note="Description of Artificial Sequence: Synthetic heavy chain variable domain"
EVKLQESGPGLVAPSQSLSVTCTVSGVSLPDYGVSWIRQPPRKGLEWLGVIWGSETTYYNSALKSRLTIIKDNSKSQVFLKMNSLQTDDTAIYYCAKHYYYGGSYAMDYWGQGTSVTVSSASTKGPSVFPLAPSSKSTSGGTAALGCLVKDYFPEPVTVSWNSGALTSGVHTFPAVLQSSGLYSLSSVVTVPSSSLGTQTYICNVNHKPSNTKVDKKVEPKSCGGGGSNYHLENEVARLKKLGGSDKTHTCPPCPAPPVAGPSVFLFPPKPKDTLMISRTPEVTCVVVDVSHEDPEVKFNWYVDGVEVHNAKTKPREEQYNSTYRVVSVLTVLHQDWLNGKEYKCKVSNKGLPSSIEKTISKAKGQPREPQVYTLPPSRDELTKNQVSLTCLVKGFYPSDIAVEWESNGQPENNYKTTPPVLDSDGSFFLYSKLTVDKSRWQQGNVFSCSVMHEALHNHYTQKSLSLSPGK

SEQ ID NO: 809 - protein, 120 aa, Artificial Sequence
  source: /note="Description of Artificial Sequence: Synthetic heavy chain variable domain"
EVKLQESGPGLVAPSQSLSVTCTVSGVSLPDYGVSWIRQPPRKGLEWLGVIWGSETTYYNSALKSRLTIIKDNSKSQVFLKMNSLQTDDTAIYYCAKHYYYGGSYAMDYWGQGTSVTVSS

SEQ ID NO: 810 - protein, 111 aa, Artificial Sequence
  source: /note="Description of Artificial Sequence: Synthetic heavy chain variable domain"
DIQLTQSPASLAVSLGQRATISCKASQSVDYDGDSYLNWYQQIPGQPPKLLIYDASNLVSGIPPRFSGSGSGTDFTLNIHPVEKVDAATYHCQQSTEDPWTFGGGTKLEIK

SEQ ID NO: 811 - protein, 464 aa, Artificial Sequence
  source: /note="Description of Artificial Sequence: Synthetic heavy chain variable domain"
MEWSWIFLFLLSGTAGVHSEVQLQQSGPELIKPGASVKMSCKASGYTFTSYVMHWVKQKPGQGLEWIGYINPYNDGTKYNEKFKGKATLTSDKSSSTAYMELSSLTSEDSAVYYCARGTYYYGSRVFDYWGQGTTLTVSSAKTTPPSVYPLAPGSAAQTNSMVTLGCLVKGYFPEPVTVTWNSGSLSSGVHTFPAVLQSDLYTLSSSVTVPSSTWPSETVTCNVAHPASSTKVDKKIVPRDCGCKPCICTVPEVSSVFIFPPKPKDVLTITLTPKVTCVVVDISKDDPEVQFSWFVDDVEVHTAQTQPREEQFNSTFRSVSELPIMHQDWLNGKEFKCRVNSAAFPAPIEKTISKTKGRPKAPQVYTIPPPKEQMAKDKVSLTCMITDFFPEDITVEWQWNGQPAENYKNTQPIMDTDGSYFVYSKLNVQKSNWEAGNTFTCSVLHEGLHNHHTEKSLSHSPGK

SEQ ID NO: 812 - protein, 137 aa, Artificial Sequence
  source: /note="Description of Artificial Sequence: Synthetic heavy chain variable domain"
DIVMTQAAPSIPVTPGESVSISCRSSKSLLNSNGNTYLYWFLQRPGQSPQLLIYRMSNLASGVPDRFSGSGSGTAFTLRISRVEAEDVGVYYCMQHLEYPFTFGAGTKLELKRSDPLINKERGGGGSGGGGSGGGGS

SEQ ID NO: 813 - protein, 124 aa, Artificial Sequence
  source: /note="Description of Artificial Sequence: Synthetic heavy chain variable domain"
QVQLQQSGAEVKKPGSSVKVSCKASGYAFSSYWMNWVRQRPGQGLEWIGQIWPGDGDTNYNGKFKGRATITADESTNTAYMELSSLRSEDTAFYSCARRETTTVGRYYYAMDYWGQGTTVTVSS

SEQ ID NO: 814 - protein, 130 aa, Artificial Sequence
  source: /note="Description of Artificial Sequence: Synthetic heavy chain variable domain"
QITLKESGPTLVKPTQTLTLTCTFSGFSLSTSGVGVGWIRQPPGKALEWLALIYWDDDKRYSPSLKSRLTITKDTSKNQVVLTMTNMDPVDTATYYCAHIDYGSGSYSPRTSYYYYMSVWGKGTTVTVSS

SEQ ID NO: 815 - protein, 125 aa, Artificial Sequence
  source: /note="Description of Artificial Sequence: Synthetic heavy chain variable domain"
QVQLVQSGGGVVQPGRSLRLSCAASGFTFDDYAMHWVRQAPGKGLEWVSGISWNSGSIGYADSVKGRFTISRDNAKNSLYLQMNSLRAEDTAVYYCARDQGYHYYDSAEHAFDIWGQGTVVTVSS

SEQ ID NO: 816 - protein, 125 aa, Artificial Sequence
  source: /note="Description of Artificial Sequence: Synthetic heavy chain variable domain"
EVQLVQSGGGLVQPGRSLRLSCAASGFTFDDYAMHWVRQAPGKGLEWVSGISWNSGSIGYADSVKGRFTISRDNAKNSLYLQMNSLRAEDTAVYYCARDQGYHYYDSAEHAFDIWGQGTVVTVSS

SEQ ID NO: 817 - protein, 228 aa, Artificial Sequence
  source: /note="Description of Artificial Sequence: Synthetic heavy chain variable domain"
EVKLQESGPGLVAPSQSLSVTCTVSGVSLPDYGVSWIRQPPRKGLEWLGVIWGSETTYYNSALKSRLTIIKDNSKSQVFLKMNSLQTDDTAIYYCAKHYYYGGSYAMDYWGQGTSVTVSSASTKGPSVFPLAPSSKSTSGGTAALGCLVKDYFPEPVTVSWNSGALTSGVHTFPAVLQSSGLYSLSSVVTVPSSSLGTQTYICNVNHKPSNTKVDKKVEPKSCDKTHT

SEQ ID NO: 818 - protein, 98 aa, Artificial Sequence
  source: /note="Description of Artificial Sequence: Synthetic heavy chain variable domain"
  MOD_RES (64)..(65): Any amino acid
  MOD_RES (68)..(69): Any amino acid
  MOD_RES (93)..(93): Any amino acid
  MOD_RES (98)..(98): Any amino acid
QVQLVESGGGLVQPGRSLRLSCAASGFTFDDYAMHWVRQAPGKGLEWVSGISWNSGRIGYADSXXGRXXISRDNAKNSLFLQMNSLRAEDTAXYYCAX

SEQ ID NO: 819 - protein, 125 aa, Artificial Sequence
  source: /note="Description of Artificial Sequence: Synthetic heavy chain variable domain"
  MOD_RES (76)..(76): Any amino acid
QVQLVESGGGLVQPGRSLRLSCAASGFTFDDYAMHWVRQAPGKGLEWVSGISWNSGRIGYADSVKGRFTISRDNAXNSLFLQMNSLRAEDTAVYYCARDQGYHYYDSAEHAFDIWGQGTVVTVSS

SEQ ID NO: 820 - protein, 125 aa, Artificial Sequence
  source: /note="Description of Artificial Sequence: Synthetic heavy chain variable domain"
QVQLVESGGGLVQPGRSLRLSCAASGFTFDDYAMHWVRQAPGKGLEWVSGISWNSGRIGYADSVKGRFTISRDNAKNSLFLQMNSLRAEDTAVYYCARDQGYHYYDSAEHAFDIWGQGTVVTVSS

SEQ ID NO: 821 - protein, 125 aa, Artificial Sequence
  source: /note="Description of Artificial Sequence: Synthetic heavy chain variable domain"
EVQLVESGGGLVQPGRSLRLSCAASGFTFDDYAMHWVRQAPGKGLEWVSGISWNSGRIGYADSVKGRFTISRDNAKNSLFLQMNSLRAEDTAVYYCARDQGYHYYDSAEHAFDIWGQGTMVTVSS

SEQ ID NO: 822 - protein, 125 aa, Artificial Sequence
  source: /note="Description of Artificial Sequence: Synthetic heavy chain variable domain"
QVQLVESGGGLVQPGRSLRLSCAASGFTFDDYAMHWVRQAPGKGLEWVSGISWNSGRIGYADSVKGRFTISRDNAKNSLFLQMNSLRAEDTAVYYCARDQGYHYYDSAEHAFDIWGQGTMVTVSS

SEQ ID NO: 823 - protein, 125 aa, Artificial Sequence
  source: /note="Description of Artificial Sequence: Synthetic heavy chain variable domain"
EVQLVESGGGLVQPGRSLRLSCAASGFTFDDYAMHWVRQAPGKGLEWVSGISWNSGRIGYADSVKGRFTISRDNAKNSLFLQMNSLRAEDTAVYYCARDQGYHYYDSAEHAFDIWGQGTVVTVSS

SEQ ID NO: 824 - protein, 125 aa, Artificial Sequence
  source: /note="Description of Artificial Sequence: Synthetic heavy chain variable domain"
EVQLVESGGGLVQPGRSLRLSCAASGFTFDDYAMHWVRLAPGKGLEWVSGISWNSGRIGYADSVKGRFTISRDNAKNSLFLQMNSLRAKDTAVYYCARDQGYHYYDSAEHAFDIWGQGTMVTVSS

SEQ ID NO: 825 - protein, 125 aa, Artificial Sequence
  source: /note="Description of Artificial Sequence: Synthetic heavy chain variable domain"
QMQLVQSGGGLVQPGRSLRLSCAASGFTFDDYAMHWVRQAPGKGLEWVSGISWNSGSIGYADSVKGRFTISRDNAKNSLYLQMNSLRAEDTAVYYCARDQGYHYYDSAEHAFDIWGQGTVVTVSS

SEQ ID NO: 826 - protein, 464 aa, Artificial Sequence; identical to SEQ ID NO: 811
  source: /note="Description of Artificial Sequence: Synthetic heavy chain variable domain"

SEQ ID NO: 827 - protein, 120 aa, Artificial Sequence; identical to SEQ ID NO: 809
  source: /note="Description of Artificial Sequence: Synthetic heavy chain variable domain"

SEQ ID NO: 828 - protein, 218 aa, Artificial Sequence
  source: /note="Description of Artificial Sequence: Synthetic heavy chain variable domain"
EVQLVESGGGLVQPGGSLRLSCAASGVSLPDYGVSWVRQSPGKGLEWVAVIWGSETTYYADSVKGRFTISADTSKNTYLQMNSLRAEDTAWYCSRHYYYGGSYAMDYWGQGTLVTVSSASTKGPSVFPLAPSSKSTSGGTAALGCLVKDYFPEPVTVSWNSGALTSGVHTFPAVLQSSGLYSLSSVVTVPSSSLGTQTYICNVNHKPSNTKVDKKVEP

SEQ ID NO: 829 - protein, 219 aa, Artificial Sequence
  source: /note="Description of Artificial Sequence: Synthetic heavy chain variable domain"
EVQLVESGGGLVQPGGSLRLSCAASGVSLPDYGVSWVRQSPGKGLEWVAVIWGSETTYYADSVKGRFTISADTSKNTYLQMNSLRAEDTAIYYCSRHYYYGGSYAMDYWGQGTLVTVSSASTKGPSVFPLAPSSKSTSGGTAALGCLVKDYFPEPVTVSWNSGALTSGVHTFPAVLQSSGLYSLSSVVTVPSSSLGTQTYICNVNHKPSNTKVDKKVEP

SEQ ID NO: 830 - protein, 460 aa, Artificial Sequence; identical to SEQ ID NO: 806
  source: /note="Description of Artificial Sequence: Synthetic heavy chain variable domain"

SEQ ID NO: 831 - protein, 242 aa, Artificial Sequence
  source: /note="Description of Artificial Sequence: Synthetic heavy chain variable domain"
EVKLQESGPGLVAPSQSLSVTCTVSGVSLPDYGVSWIRQPPRKGLEWLGVIWGSETTYYNSALKSRLTIIKDNSKSQVFLKMNSLQTDDTAIYYCAKHYYYGGSYAMDYWGQGTSVTVSSASTKGPSVFPLAPSSKSTSGGTAALGCLVKDYFPEPVTVSWNSGALTSGVHTFPAVLQSSGLYSLSSVVTVPSSSLGTQTYICNVNHKPSNTKVDKKVEPKSCGGGGSNYHLENEVARLKKL

SEQ ID NO: 832 - protein, 471 aa, Artificial Sequence; identical to SEQ ID NO: 808
  source: /note="Description of Artificial Sequence: Synthetic heavy chain variable domain"

SEQ ID NO: 833 - protein, 118 aa, Artificial Sequence
  source: /note="Description of Artificial Sequence: Synthetic heavy chain variable domain"
EVQLQQSGPELQRPGASVKLSCKASGYIFTEYYMYWVKQRPKQGLELVGRIDPEDGSIDYVEKFKKKATLTADTSSNTAYMQLSSLTSEDTATYFCARGKFNYRFAYWGQGTLVTVSS

SEQ ID NO: 834 - protein, 118 aa, Artificial Sequence
  source: /note="Description of Artificial Sequence: Synthetic heavy chain variable domain"
QVTLKESGPGILQPSQTLSLTCSFSGFSLRTSGMGVGWIRQPSGKGLEWLAHIWWDDDKRYNPALKSRLTISKDTSSNQVFLKIASVDTADTATYYCAQINPAWFAYWGQGTLVTVSA

SEQ ID NO: 835 - protein, 117 aa, Artificial Sequence
  source: /note="Description of Artificial Sequence: Synthetic heavy chain variable domain"
QVQLQQSGAELVRPGTSVKISCKASGYTFTNYWLGWVKQRPGHGLEWIGDIYPGGGYTNYNEKFKGKATVTADTSSRTAYVQVRSLTSEDSAVYFCARSASWYFDVWGARTTVTVSS

SEQ ID NO: 836 - protein, 122 aa, Artificial Sequence
  source: /note="Description of Artificial Sequence: Synthetic heavy chain variable domain"
EVQLVESGGGLVQPGRSLRLSCAASGFTFNDYAMHWVRQAPGKGLEWVSTISWNSGSIGYADSVKGRFTISRDNAKKSLYLQMNSLRAEDTALYYCAKDIQYGNYYYGMDVWGQGTTVTVSS

SEQ ID NO: 837 - protein, 112 aa, Artificial Sequence
  source: /note="Description of Artificial Sequence: Synthetic heavy chain variable domain"
GPELVKPGASVKISCKASGYAFSYSWMNWVKLRPGQGLEWIGRIFPGDGDTDYNGKFKGKATLTADKSSNTAYMQLTSLTSVDSAVYLCARNVFDGYWLVYWGQGTLVTVSA

SEQ ID NO: 838 - protein, 119 aa, Artificial Sequence
  source: /note="Description of Artificial Sequence: Synthetic heavy chain variable domain"
QVQLVQSGAEVKKPGSSVKVSCKASGYTFSYSWMSWVRQAPGQGLEWMGRIFPGDGDTDYAQKFQGRVTITADKSTSTAYMELSSLRSEDTAVYYCARNVFDGYWLVYWGQGTLVTVSS

SEQ ID NO: 839 - protein, 119 aa, Artificial Sequence
  source: /note="Description of Artificial Sequence: Synthetic heavy chain variable domain"
QVQLVQSGAEVKKPGSSVKVSCKASGYAFSYSWMNWVRQAPGQGLEWMGRIFPGDGDTDYNGKFKGRVTITADKSTSTAYMELSSLRSEDTAVYYCARNVFDGYWLVYWGQGTLVTVSS

SEQ ID NO: 840 - protein, 119 aa, Artificial Sequence
  source: /note="Description of Artificial Sequence: Synthetic heavy chain variable domain"
QVQLVQSGAEVKKPGSSVKVSCKASGYAFSYSWMNWVRQAPGQGLEWMGRIFPGDGDTDYNGKFKGRVTITADKSTSTAYMELSSLRSEDTAVYLCARNVFDGYWLVYWGQGTLVTVSS

SEQ ID NO: 841 - protein, 119 aa, Artificial Sequence
  source: /note="Description of Artificial Sequence: Synthetic heavy chain variable domain"
QVQLVQSGAEVKKPGASVKVSCKVSGYAFSYSWMNWVRQAPGQGLEWMGRIFPGDGDTDYNGKFKGRVTITADKSTSTAYMELSSLRSEDTAVYYCARNVFDGYWLVYWGQGTLVTVSS

SEQ ID NO: 842 - protein, 119 aa, Artificial Sequence
  source: /note="Description of Artificial Sequence: Synthetic heavy chain variable domain"
QVQLVQSGAEVKKPGSSVKVSCKASGYAFSYSWMSWVRQAPGQGLEWMGRIFPGDGDTDYNGKFKGRVTITADKSTSTAYMELSSLRSEDTAVYYCARNVFDGYWLVYWGQGTLVTVSS

SEQ ID NO: 843 - protein, 119 aa, Artificial Sequence
  source: /note="Description of Artificial Sequence: Synthetic heavy chain variable domain"
QVQLVQSGAEVKKPGSSVKVSCKASGYAFSYSWISWVRQAPGQGLEWMGRIFPGDGDTDYNGKFKGRVTITADKSTSTAYMELSSLRSEDTAVYYCARNVFDGYWLVYWGQGTLVTVSS

SEQ ID NO: 844 - protein, 119 aa, Artificial Sequence
  source: /note="Description of Artificial Sequence: Synthetic heavy chain variable domain"
QVQLVQSGAEVKKPGASVKVSCKASGYTFTYSWMNWVRQAPGQGLEWMGRIFPGDGDTDYNGKFKGRVTITADKSTSTAYMELSSLRSEDTAVYYCARNVFDGYWLVYWGQGTLVTVSS

SEQ ID NO: 845 - protein, 119 aa, Artificial Sequence
  source: /note="Description of Artificial Sequence: Synthetic heavy chain variable domain"
QVQLVQSGAEVKKPGASVKVSCKASGYTFSYSWMNWVRQAPGQGLEWMGRIFPGDGDTDYNGKFKGRVTITADKSTSTAYMELSSLRSEDTAVYYCARNVFDGYWLVYWGQGTLVTVSS

SEQ ID NO: 846 - protein, 119 aa, Artificial Sequence
  source: /note="Description of Artificial Sequence: Synthetic heavy chain variable domain"
QVQLVQSGAEVKKPGASVKVSCKASGYTFTYSWMHWVRQAPGQGLEWMGRIFPGDGDTDYAQKFQGRVTMTRDTSTSTVYMELSSLRSEDTAVYYCARNVFDGYWLVYWGQGTLVTVSS

SEQ ID NO: 847 - protein, 119 aa, Artificial Sequence
  source: /note="Description of Artificial Sequence: Synthetic heavy chain variable domain"
EVQLVQSGAEVKKPGATVKISCKVSGYTFTYSWMHWVQQAPGKGLEWMGRIFPGDGDTDYAEKFQGRVTITADTSTDTAYMELSSLRSEDTAVYYCATNVFDGYWLVYWGQGTLVTVSS

SEQ ID NO: 848 - protein, 119 aa, Artificial Sequence
  source: /note="Description of Artificial Sequence: Synthetic heavy chain variable domain"
EVQLVQSGAEVKKPGATVKISCKVSGYTFTYSWMNWVQQAPGKGLEWMGRIFPGDGDTDYNGKFKGRVTITADTSTDTAYMELSSLRSEDTAVYYCATNVFDGYWLVYWGQGTLVTVSS

SEQ ID NO: 849 - protein, 119 aa, Artificial Sequence
  source: /note="Description of Artificial Sequence: Synthetic heavy chain variable domain"
QMQLVQSGAEVKKTGSSVKVSCKASGYTFTYSWMSWVRQAPGQGLEWMGRIFPGDGDTDYAQKFQGRVTITADKSTSTAYMELSSLRSEDTAVYYCARNVFDGYWLVYWGQGTLVTVSS

SEQ ID NO: 850 - protein, 119 aa, Artificial Sequence
  source: /note="Description of Artificial Sequence: Synthetic heavy chain variable domain"
EVQLVESGGGLVKPGGSLRLSCAASGFTFSYSWMNWVRQAPGKGLEWVGRIFPGDGDTDYNGKFKGRVTITADKSTSTAYMELSSLRSEDTAVYYCARNVFDGYWLVYWGQGTLVTVSS

SEQ ID NO: 851 - protein, 119 aa, Artificial Sequence
  source: /note="Description of Artificial Sequence: Synthetic heavy chain variable domain"
EVQLVESGGGLVKPGGSLRLSCAASGFAFSYSWMNWVRQAPGKGLEWVGRIFPGDGDTDYNGKFKGRVTITADKSTSTAYMELSSLRSEDTAVYYCARNVFDGYWLVYWGQGTLVTVSS

SEQ ID NO: 852 - protein, 119 aa, Artificial Sequence
  source: /note="Description of Artificial Sequence: Synthetic heavy chain variable domain"
QVQLVESGGGLVKPGGSLRLSCAASGFTFSYSWMNWVRQAPGKGLEWVGRIFPGDGDTDYNGKFKGRVTITADKSTSTAYMELSSLRSEDTAVYYCARNVFDGYWLVYWGQGTLVTVSS

SEQ ID NO: 853 - protein, 119 aa, Artificial Sequence
  source: /note="Description of Artificial Sequence: Synthetic heavy chain variable domain"
EVQLVESGAGLVKPGGSLRLSCAASGFTFSYSWMNWVRQAPGKGLEWMGRIFPGDGDTDYNGKFKGRVTITADKSTSTAYMELSSLRSEDTAVYYCARNVFDGYWLVYWGQGTLVTVSS

SEQ ID NO: 854 - protein, 119 aa, Artificial Sequence
  source: /note="Description of Artificial Sequence: Synthetic heavy chain variable domain"
EVQLVESGGGVVKPGGSLRLSCAASGFTFSYSWMNWVRQAPGKGLEWMGRIFPGDGDTDYNGKFKGRVTITADKSTSTAYMELSSLRSEDTAVYYCARNVFDGYWLVYWGQGTLVTVSS

SEQ ID NO: 855 - protein, 119 aa, Artificial Sequence
  source: /note="Description of Artificial Sequence: Synthetic heavy chain variable domain"
EVQLVESGGGLKKPGGSLRLSCAASGFTFSYSWMNWVRQAPGKGLEWMGRIFPGDGDTDYNGKFKGRVTITADKSTSTAYMELSSLRSEDTAVYYCARNVFDGYWLVYWGQGTLVTVSS

SEQ ID NO: 856 - protein, 119 aa, Artificial Sequence
  source: /note="Description of Artificial Sequence: Synthetic heavy chain variable domain"
EVQLVESGGGLVKPGSSLRLSCAASGFTFSYSWMNWVRQAPGKGLEWMGRIFPGDGDTDYNGKFKGRVTITADKSTSTAYMELSSLRSEDTAVYYCARNVFDGYWLVYWGQGTLVTVSS

SEQ ID NO: 857 - protein, 119 aa, Artificial Sequence
  source: /note="Description of Artificial Sequence: Synthetic heavy chain variable domain"
EVQLVESGGGLVKPGGSLRVSCAASGFTFSYSWMNWVRQAPGKGLEWMGRIFPGDGDTDYNGKFKGRVTITADKSTSTAYMELSSLRSEDTAVYYCARNVFDGYWLVYWGQGTLVTVSS

SEQ ID NO: 858 - protein, 119 aa, Artificial Sequence
  source: /note="Description of Artificial Sequence: Synthetic heavy chain variable domain"
EVQLVESGGGLVKPGGSLRLSCAASGFTFSYSWMNWVRQAPGKGLEWMGRIFPGDGDTDYNGKFKGRVTITADKSTSTAYMELSSLRSEDTAVYYCARNVFDGYWLVYWGQGTLVTVSS

SEQ ID NO: 859 - protein, 119 aa, Artificial Sequence
  source: /note="Description of Artificial Sequence: Synthetic heavy chain variable domain"
QVQLVQSGAEVKKPGSSVKVSCKASGYAFSYSWINWVRQAPGQGLEWMGRIFPGDGDTDYNGKFKGRVTITADKSTSTAYMELSSLRSEDTAVYYCARNVFDGYWLVYWGQGTLVTVSS

SEQ ID NO: 860 - protein, 448 aa, Artificial Sequence
  source: /note="Description of Artificial Sequence: Synthetic heavy chain variable domain"
QVQLVQSGAEVKKPGSSVKVSCKASGYAFSYSWINWVRQAPGQGLEWMGRIFPGDGDTDYNGKFKGRVTITADKSTSTAYMELSSLRSEDTAVYYCARNVFDGYWLVYWGQGTLVTVSSASTKGPSVFPLAPSSKSTSGGTAALGCLVKDYFPEPVTVSWNSGALTSGVHTFPAVLQSSGLYSLSSVVTVPSSSLGTQTYICNVNHKPSNTKVDKKVEPKSCDKTHTCPPCPAPELLGGPSVFLFPPKPKDTLMISRTPEVTCVVVDVSHEDPEVKFNWYVDGVEVHNAKTKPREEQYNSTYRVVSVLTVLHQDWLNGKEYKCKVSNKALPAPIEKTISKAKGQPREPQVYTLPPSRDELTKNQVSLTCLVKGFYPSDIAVEWESNGQPENNYKTTPPVLDSDGSFFLYSKLTVDKSRWQQGNVFSCSVMHEALHNHYTQKSLSLSPG

SEQ ID NO: 861 - protein, 222 aa, Artificial Sequence
  source: /note="Description of Artificial Sequence: Synthetic heavy chain variable domain"
EVQLVESGGGLVQPGRSLRLSCAASGFTFNDYAMHWVRQSPGKGLEWVSTISWNSGSIGYADSVKGRFTISRDNAKKSLYLQMNSLRAEDTAIYYCAKDIQYGNYYYGMDVWGQGTTVTVSSASTKGPSVFPLAPGSSKSTSGTAALGCLVKDYFPEPVTVSWNSGALTSGVHTFPAVLQSSGLYSLSSVVTVPSSSLGTQTYICNVNHKPSNTKVDKKVEP

SEQ ID NO: 862 - protein, 116 aa, Artificial Sequence
  source: /note="Description of Artificial Sequence: Synthetic heavy chain variable domain"
QVQLQESGAELSKPGASVKMSCKASGYTFTSYWLHWIKQRPGQGLEWIGYIYPRNDYTEYNQNFKDKATLTADKSSSTAYMQLSSLTSEDSAVYYCARRDITTFYWGQGTTLTVSS

SEQ ID NO: 863 - protein, 56 aa, Artificial Sequence
  source: /note="Description of Artificial Sequence: Synthetic heavy chain variable domain"
NQNFKDKATITADESTNTAYMELSSLRSEDTAFYFCARRDITTFYWGQGTTVTVSS

SEQ ID NO: 864 - protein, 123 aa, Artificial Sequence
  source: /note="Description of Artificial Sequence: Synthetic heavy chain variable domain"
EVQLVESGGGLVKPGGSLKLSCAASGFAFSIYDMSWVRQTPEKRLEWVAYISSGGGTTYYPDTVKGRFTISRDNAKNTLYLQMSSLKSEDTAMYYCARHSGYGSSYGVLFAYWGQGTLVTVSA

SEQ ID NO: 865 - protein, 123 aa, Artificial Sequence
  source: /note="Description of Artificial Sequence: Synthetic heavy chain variable domain"
QVQLVQSGAEVKKPGSSVKVSCKASGFTFSIYDMSWVRQAPGQGLEWVAYISSGGGTTYYPDTVKGRFTITADESTNTAYMELSSLRSEDTAFYFCARHSGYGSSYGVLFAYWGQGTLVTVSS

SEQ ID NO: 866 - protein, 106 aa, Artificial Sequence
  source: /note="Description of Artificial Sequence: Synthetic heavy chain variable domain"
PVQLVQSGAEVKKPGSSVKVSCKASGGTFSRSAIIWVRQAPGQGLEWMGGIVPMFGPPNYAQKFQGRVTITADESTNTAYMELSSLRSEDTAFYFCAGGYGIYSPE

SEQ ID NO: 867 - protein, 124 aa, Artificial Sequence
  source: /note="Description of Artificial Sequence: Synthetic heavy chain variable domain"
QVQLQQSGPGLVKPSQTLSLTCAISGDSVSSNSAAWNWIRQSPSRGLEWLGRTYYRSKWYNDYAVSVKSRITINPDTSKNQFSLQLNSVTPEDTAVYYCAREVTGDLEDAFDIWGQGTMVTVSS

SEQ ID NO: 868 - protein, 235 aa, Artificial Sequence
  source: /note="Description of Artificial Sequence: Synthetic heavy chain variable domain"
QVQLQQSGPGLVKPSQTLSLTCAISGDSVSSNSAAWNWIRQSPSRGLEWLGRTYYRSKWYNDYAVSVKSRITINPDTSKNQFSLQLNSVTPEDTAVYYCAREVTGDLEDAFDIWGQGTMVTVSSASTKGPSVFPLAPSSKSTSGGTAALGCLVKDYFPEPVTVSWNSGALTSGVHTFPAVLQSSGLYSLSSVVTVPSSSLGTQTYICNVSHKPSNTKVDKKVEPKSCDKTSGQAG

SEQ ID NO: 869 - protein, 127 aa, Artificial Sequence
  source: /note="Description of Artificial Sequence: Synthetic heavy chain variable domain"
EVQLQQSGPGLVKPSQTLSLTCAISGDSVSSNSAAWNWIRQSPSRGLEWLGRTYYRSKWYSDYAVSVKSRITINPDTSKNQFSLQLNSVTPEDTAVYYCARDPYDFWSGYPDAFDIWGQGTMVTVSS

SEQ ID NO: 870 - protein, 124 aa, Artificial Sequence
  source: /note="Description of Artificial Sequence: Synthetic heavy chain variable domain"
EVQLQQSGPGLVKPSQTLSLTCAISGDSVSNNNAAWNWIRQSPSRGLEWLGRTYHRSTWYNDYVGSVKSRITINPDTSKNQFSLQLNSVTPEDTAVYYCARETDYGDYGAFDIWGQGTTVTVSS

SEQ ID NO: 871 - protein, 121 aa, Artificial Sequence
  source: /note="Description of Artificial Sequence: Synthetic heavy chain variable domain"
EVQLQQSGPGLVNPSQTLSITCAISGDSVSSNSAAWNWIRQSPSRGLEWLGRTFYRSKWYNDYAVSVKGRITISPDTSKNQFSLQLNSVTPEDTAVYYCAGGDYYYGLDVWGQGTTVTVSS

SEQ ID NO: 872 - protein, 127 aa, Artificial Sequence
  source: /note="Description of Artificial Sequence: Synthetic heavy chain variable domain"
QVQLQESGPGLVKPSQTLSLTCAISGDSVLSNSDTWNWIRQSPSRGLEWLGRTYHRSTWYDDYASSVRGRVSINVDTSKNQYSLQLNAVTPEDTGVYYCARDRLQDGNSWSDAFDVWGQGTMVTVSS

SEQ ID NO: 873 - protein, 127 aa, Artificial Sequence
  source: /note="Description of Artificial Sequence: Synthetic heavy chain variable domain"
EVQLQQSGPGLVKPSQTLSLTCAISGDSVLSNSDTWNWIRQSPSRGLEWLGRTYHRSTWYDDYASSVRGRVSINVDTSKNQYSLQLNAVTPEDTGVYYCARDRLQDGNSWSDAFDVWGQGTMVTVSS

SEQ ID NO: 874 - protein, 127 aa, Artificial Sequence
  source: /note="Description of Artificial Sequence: Synthetic heavy chain variable domain"
EVQLQQSGPGLVKPSQTLPLTCAISGDSVLSNSDTWNWIRQSPSRGLEWLGRTYHRSTWYDDYASSVRGRVSINVDTSKNQYSLQLNAVTPEDTGVYYCARVRLQDGNSWSDAFDVWGQGTMVTVSS

SEQ ID NO: 875 - protein, 127 aa, Artificial Sequence
  source: /note="Description of Artificial Sequence: Synthetic heavy chain variable domain"
EVQLQQSGPGLVKPSQTLSLTCAISGDSMLSNSDTWNWIRQSPSRGLEWLGRTYHRSTWYDDYASSVRGRVSINVDTSKNQYSLQLNAVTPEDTGVYYCARVRLQDGNSWSDAFDVWGQGTMVTVSS

SEQ ID NO: 876 - protein, 122 aa, Artificial Sequence
  source: /note="Description of Artificial Sequence: Synthetic heavy chain variable domain"
QVQLQQSGPGLVKPSQTLSLTCAISGDSVSSNSAAWNWIRQSPSRGLEWLGRTYYRSKWYNDYAVSVKSRITINPDTSKNQFSLQLNSVTPEDTAVYYCAREVTGDLEDAFDIWGQGTMVTV

SEQ ID NO: 877 - protein, 124 aa, Artificial Sequence
  source: /note="Description of Artificial Sequence: Synthetic heavy chain variable domain"
QVQLVQSGGGLIQPGGSLRLSCAASGFTVSSNYMSWVRQAPGKGLEWVSVIYSGGSTYYADSVKGRFTISRDNSKNTLYLQMNSLRAEDTAVYYCASQSTPYDSSGYYSGDAFDIWGQGTMVTV

SEQ ID NO: 878 - protein, 123 aa, Artificial Sequence
  source: /note="Description of Artificial Sequence: Synthetic heavy chain variable domain"
EVQLQQSGPGLVKPSQTLSLTCAISGDSVSSNSAAWNWIRQSPSRGLEWLGRTYYRSKWYNDYAVSVKSRITINPDTSKNQFSLQLNSVTPEDTAVYYCARDLGWIAVAGTFDYWGQGTLVTV

SEQ ID NO: 879 - protein, 125 aa, Artificial Sequence
  source: /note="Description of Artificial Sequence: Synthetic heavy chain variable domain"
EVQLQQSGPGLVKPSQTLSLTCAISGDSVLSNSDTWNWIRQSPSRGLEWLGRTYHRSTWYDDYASSVRGRVSINVDTSKNQYSLQLNAVTPEDTGAYYCARDRLQDGNSWSDAFDVWGQGTMVTV

SEQ ID NO: 880 - protein, 120 aa, Artificial Sequence
  source: /note="Description of Artificial Sequence: Synthetic heavy chain variable domain"
EVQLVESGGGLVQPGRSLRLSCAASGFTFDDYAMHWVRQAPGKGLEWVSGISWNSGSIGYADSVKGRFTISRDNAKNSLYLQMNSLRAEDTALYYCAKGLSSWHFHDALDIWGQGTMVTV

SEQ ID NO: 881 - protein, 122 aa, Artificial Sequence
  source: /note="Description of Artificial Sequence: Synthetic heavy chain variable domain"
EVQLVESGGGLVQPGRSLRLSCAASGFTFDDYAMHWVRQAPGKGLEWVSGISWNSGSIGYADSVKGRFTISRDNAKNSLYLQMNSLRAEDTALYYCAKDKGGGYYDFWSGSDYWGQGTLVTV

SEQ ID NO: 882 - protein, 119 aa, Artificial Sequence
  source: /note="Description of Artificial Sequence: Synthetic heavy chain variable domain"
EVQLQQSGPGLVKPSLTLSLTCAISGDSVSSNSATWTWIRQSPSRGLEWLGRTYYRSTWYNDYAVSVKSRITINPDTSKNQFSLQLNSVTPEDTAVYYCAREGSGSYYAYWGQGTLVTV

SEQ ID NO: 883 - protein, 120 aa, Artificial Sequence
  source: /note="Description of Artificial Sequence: Synthetic heavy chain variable domain"
QVQLVQSGAEVKKPGASVKVSCKASGYTFTGYYMHWVRQAPGQGLEWMGWINPNSGGTNYAQKFQGRVTMTRDTSISTAYMELSRLRSDDTAVYYCARDYWGYYGSGTLDYWGQGTLVTV

SEQ ID NO: 884 - protein, 126 aa, Artificial Sequence
  source: /note="Description of Artificial Sequence: Synthetic heavy chain variable domain"
QVQLVQSGAEVKKPGASVKVSCKASGYTFTSYGISWVRQAPGQGLEWMGWISAYNGNTNYAQKLQGRVTMTTDTSTSTAYMELRSLRSDDTAVYYCARAGLALYSNYVPYYYYGMDVWGQGTTVTV

SEQ ID NO: 885 - protein, 114 aa, Artificial Sequence
  source: /note="Description of Artificial Sequence: Synthetic heavy chain variable domain"
EVQLVESGGGLVKPGGSLRLSCVASGFTFSNAWMNWVRQAPGKGLEWVGRIKSKTDGGTADYAAPVKGRFTISRDDSKNTMYLQMNSLKTEDTGVYYCITGATDVWGQGTTVTV

SEQ ID NO: 886 - protein, 125 aa, Artificial Sequence
  source: /note="Description of Artificial Sequence: Synthetic heavy chain variable domain"
EVQLQQSGPGLVKPSQTLSLTCAISGDSVSSNSAAWNWIRQSPSRGLEWLGRTYYRSKWYNDYAVSVKSRITINPDTSKNQFSLQLNSVTPEDTAVYYCAREESSSGWYEGNWFDPWGQGTLVTV

SEQ ID NO: 887 - protein, 125 aa, Artificial Sequence
  source: /note="Description of Artificial Sequence: Synthetic heavy chain variable domain"
EVQLQQSGPGLVKPSQTLSLTCAISGDSVLSNSDTWNWIRQSPSRGLEWLGRTYHRSTWYDDYASSVRGRVSINVDTSKNQYSLQLNAVTPEDTGVYYCARDRLQDGNSWSDAFDVWGQGTMVTV

SEQ ID NO: 888 - protein, 118 aa, Artificial Sequence
  source: /note="Description of Artificial Sequence: Synthetic heavy chain variable domain"
QVQLQESGPGLVKPSETLSLTCTVSGGSISSSSYYWGWIRQPPGKGLEWIGSIYYSGSTYYNPSLKSRVTISVDTSKNQFSLKLSSVTAADTAVYYCARGRMDTAMAQIWGQGTMVTV

SEQ ID NO: 889 - protein, 115 aa, Artificial Sequence
  source: /note="Description of Artificial Sequence: Synthetic heavy chain variable domain"
QVQLVQSGAEVKKPGASVKVSCKASGYTFTSYYMHWVRQAPGQGLEWMGIINPSGGSTSYAQKFQGRVTMTRDTSTSTVYMELSSLRSEDTAVYYCARDLDVSLDIWGQGTMVTV

SEQ ID NO: 890 - protein, 121 aa, Artificial Sequence
  source: /note="Description of Artificial Sequence: Synthetic heavy chain variable domain"
EVQLVESGGGLVQPGGSLRLSCAASGFTFSSYAMHWVRQAPGKGLEYVSAISSNGGSTYYANSVKDRFTISRDNSKNTLYLQMGSLRAEDMAVYYCARVHSSGYYHPGPNDYWGQGTLVTV

SEQ ID NO: 891 - protein, 116 aa, Artificial Sequence
  source: /note="Description of Artificial Sequence: Synthetic heavy chain variable domain"
EVQLVESGAEVKKPGASVKVSCKASGYTFTSYYMHWVRQAPGQGLEWMGIINPSGGSTSYAQKFQGRVTMTRDTSTSTAYMELSSLRSEDTAVYYCAREAGVVAVDYWGQGTLVTV

SEQ ID NO: 892 - protein, 120 aa, Artificial Sequence
  source: /note="Description of Artificial Sequence: Synthetic heavy chain variable domain"
QVQLVQSGGGVVQPGRSLRLSCAASGFTFSSYAMSWVRQAPGKGLEWVSAISGSGGSTYYADSVKGRFTISRDNSKNTLYLQMNSLRAEDTAVYYCAKEPLFGVVEEDVDYWGQGTLVTV

SEQ ID NO: 893 - protein, 118 aa, Artificial Sequence
  source: /note="Description of Artificial Sequence: Synthetic heavy chain variable domain"
QVQLVQSGAEVKKPGASVKVSCKASGYTFTSYYMHWVRQAPGQGLEWMGIINPSGGSTSYAQKFQGRVTMTRDTSTSTVYMELSSLRSEDTAVYYCARGSGSLGDAFDIWGQGTMVTV

SEQ ID NO: 894 - protein, 119 aa, Artificial Sequence
  source: /note="Description of Artificial Sequence: Synthetic heavy chain variable domain"
QVQLVQSGAEVKKPGASVKVSCKASGYTFTSYYMHWVRQAPGQGLEWMGIINPSGGSTSYAQKFQGRVTMTRDTSTSTVYMELSSLRSEDTAVYYCARDGFGELSGAFDIWGQGTMVTV

SEQ ID NO: 895 - protein, 120 aa, Artificial Sequence
  source: /note="Description of Artificial Sequence: Synthetic heavy chain variable domain"
EVQLVESGAEVKKPGASVKVSCKASGYTFTSYYMHWVRQAPGQGLEWMGIINPSGGSTSYAQKFQGRVTMTRDTSTSTVYMELSSLRSEDTAVYYCARGPIGCSGGSCLDYWGQGTLVTV

SEQ ID NO: 896 - protein, 119 aa, Artificial Sequence
  source: /note="Description of Artificial Sequence: Synthetic heavy chain variable domain"
QVQLVQSGAEVKKPGASVKVSCKASGYTFTSYYMHWVRQAPGQGLEWMGIINPSGGSTSYAQKFQGRVTMTRDTSTSTVYMELSSLRSEDTAVYYCARGSYGDYGDAFDIWGQGTTVTV

SEQ ID NO: 897 - protein, 116 aa, Artificial Sequence
  source: /note="Description of Artificial Sequence: Synthetic heavy chain variable domain"
EVQLVESGAEVKKPGSSVKVSCKASGGTFSSYAISWVRQAPGQGLEWMGGIIPIFGTANYAQKFQGRVTITADESTSTAYMELSSLRSEDTAVYYCARDHKVVRFGYWGQGTLVTV

SEQ ID NO: 898 - protein, 114 aa, Artificial Sequence
  source: /note="Description of Artificial Sequence: Synthetic heavy chain variable domain"
QVQLVQSGAEVKKPGASVKVSCKASGYTFTSYYMHWVRQAPGQGLEWMGIINPSGGSTSYAQKFQGRVTMTRDTSTSTVYMELSSLRSEDTAVYYCARGDYYMDVWGKGTTVTV

SEQ ID NO: 899 - protein, 122 aa, Artificial Sequence
  source: /note="Description of Artificial Sequence: Synthetic heavy chain variable domain"
EVQLVESGGGLVQPGGSLRLSCAASGFTFSSYAMSWVRQAPGKGLEWVSYISSSSSTIYYADSVKGRFTISRDNAKNSLYLQMNSLRAEDTAVYYCARDGPIRYFDHSKAFDIWGQGTMVTV

SEQ ID NO: 900 - protein, 117 aa, Artificial Sequence
  source: /note="Description of Artificial Sequence: Synthetic heavy chain variable domain"
QVQLVQSGAEVKKPGASVKVSCKASGYTFTSYYMHWVRQAPGQGLEWMGIINPSGGSTSYAQKFQGRVTMTRDTSISTAYMELSRLRSDDTAVYYCAREMDDSSGPDYWGQGTLVTV

SEQ ID NO: 901 - protein, 121 aa, Artificial Sequence
  source: /note="Description of Artificial Sequence: Synthetic heavy chain variable domain"
EVQLVESGAEVKKPGESLKISCKGSGYSFTGSWIGWGRQMPGKGLEWMGIIYPGDSDTRYSPSFQGQVTISADKSISTAYLQWSSLKASDTAMYYCARGFLRGGDCCGALDIWGQGTMVTV

SEQ ID NO: 902 - protein, 119 aa, Artificial Sequence
  source: /note="Description of Artificial Sequence: Synthetic heavy chain variable domain"
QVQLQESGPGLVKPSETLSLTCSVSGGSINSYYWSWIRQAPGKGLEWIAFTSHSGNVKYNPSLTGRVTIAVDTSKNQFYLEVTSVTAADTAVYFCARGLDPLFAYDAFEIWGLGTMVTV

SEQ ID NO: 903 - protein, 117 aa, Artificial Sequence
  source: /note="Description of Artificial Sequence: Synthetic heavy chain variable domain"
EVQLVESGGGLVKPGGSLRLSCAASGFTFSDYYMSWIRQAPGKGLEWVSYISSSGSTIYYADSVKGRFTISRDNAKNSLYLQMNSLRAEDTAVYYCARDDFWSGSVDYWGQGTLVTV

SEQ ID NO: 904 - protein, 120 aa, Artificial Sequence
  source: /note="Description of Artificial Sequence: Synthetic heavy chain variable domain"
QVQLVQSGAEVKKPGASVKVSCKASGYTFTSYYMHWVRQAPGQGLEWMGIINPSGGSTSYAQKFQGRVTMTRDTSTSTVYMELSSLRSEDTAVYYCAREDDSSGYTSPFDYWGQGTLVTV

SEQ ID NO: 905 - protein, 123 aa, Artificial Sequence
  source: /note="Description of Artificial Sequence: Synthetic heavy chain variable domain"
EVQLVESGAEVKKPGASVKVSCKASGYTFTGYYMHWVRQAPGQGLEWMGWINPNSGGTNYAQKFQGRVTMTRDTSISTAYMELSRLRSDDTAVYYCAREPASSSWYGYYYYMDVWGKGTLVTV

SEQ ID NO: 906 - protein, 120 aa, Artificial Sequence
  source: /note="Description of Artificial Sequence: Synthetic heavy chain variable domain"
QVQLVQSGAEVKKPGASVKVSCKASGYTFTSYDINWVRQATGQGLEWMGWMNPNSGNTGYAQKFQGRVTMTRNTSISTAYMELSSLRSEDTAVYYCARGDSNYWSYYGMDVWGQGTLVTV

SEQ ID NO: 907 - protein, 116 aa, Artificial Sequence
  source: /note="Description of Artificial Sequence: Synthetic heavy chain variable domain"
QVQLVQSGAEVKKPGASVKVSCKASGYTFTSYGISWVRQAPGQGLEWMGWISAYNGNTNYAQKLQGRVTMTTDTSTSTAYMELRSLRSDDTAVYYCASFSSSDSYDYWGQGTLVTV

SEQ ID NO: 908 - protein, 125 aa, Artificial Sequence
  source: /note="Description of Artificial Sequence: Synthetic heavy chain variable domain"
QVNLRESGPALVKPTQTLTLTCTFSGFSLNTFGMSVSWIRQPPGKALEWLALIDWDDDKYYSTSLRTRLTISKDTAKNQVVLRMTNMDPMDTATYYCARIYGGDRTNTQAPYFFDLWGQGTLVTV

SEQ ID NO: 909 - protein, 120 aa, Artificial Sequence
  source: /note="Description of Artificial Sequence: Synthetic heavy chain variable domain"
QVQLQESGPGLVKPSGTLSLTCAVSGASITSRHWWNWVRHSPGKGLEWIGQIYHSGTTTYNPSLGSRVTISVDKSKNQISLELRSVTAADTATYYCVRDYLELATYYGMDVWGQGTTVTV

SEQ ID NO: 910 - protein, 122 aa, Artificial Sequence
  source: /note="Description of Artificial Sequence: Synthetic heavy chain variable domain"
QVQLVQSGAEVKKPGASVKVSCKASGYTFTSYYMHWVRQAPGQGLEWMGIINPSGGSTSYAQKFQGRVTMTRDTSTSTVYMELSSLRSEDTAVYYCARDLAAAGNYYYYGMDVWGQGTTVTV

SEQ ID NO: 911 - protein, 120 aa, Artificial Sequence
  source: /note="Description of Artificial Sequence: Synthetic heavy chain variable domain"
QVQLVQSGAEVKKPGASVKVSCKASGYTFTSYYMHWVRQAPGQGLEWMGIINPSGGSTSYAQKFQGRVTMTRDTSTSTVYMELSSLRSEDTAVYYCARDDDFWSGSGAFDIWGQGTTVTV

SEQ ID NO: 912 - protein, 121 aa, Artificial Sequence
  source: /note="Description of Artificial Sequence: Synthetic heavy chain variable domain"
QVQLVQSGAEVKKPGASVKVSCKASGYTFTSYYMHWVRQAPGQGLEWMGIINPSGGSTSYAQKFQGRVTMTRDTSTSTVYMELSSLRSEDTAVYYCARPEGVSYYDSSVLDYWGQGTLVTV

SEQ ID NO: 913 - protein, 119 aa, Artificial Sequence
  source: /note="Description of Artificial Sequence: Synthetic heavy chain variable domain"
QVQLVQSGAEVKKPGASVKVSCKASGYTFTSYYMHWVRQAPGQGLEWMGIINPSGGSTSYAQKFQGRVTMTRDTSTSTVYMELSSLRAEDTAVYYCARGGYGDYLDAFDIWGQGTTVTV

SEQ ID NO: 914 - protein, 122 aa, Artificial Sequence
  source: /note="Description of Artificial Sequence: Synthetic heavy chain variable domain"
QVQLQQSGAEVKKPGSSVKVSCKASGGTFSSYAISWVRQAPGQGLEWMGGIIPILGIANYAQKFQGRVTITADESTSTAYMELSSLRSEDTAVYYCARGGAGGSGSYYPLIWGQGTTVTVSS

SEQ ID NO: 915 - protein, 117 aa, Artificial Sequence
  source: /note="Description of Artificial Sequence: Synthetic heavy chain variable domain"
QVQLVQSGAEVKKPGSSVKVSCKASGGTFSSYAISWVRQAPGQGLEWMGGIIPILGTANYAQKFQGRVTITADESTSTAYMELSSLRSEDTAVYYCARWGGGAFDIWGQGTMVTVSS

SEQ ID NO: 916 - protein, 119 aa, Artificial Sequence
  source: /note="Description of Artificial Sequence: Synthetic heavy chain variable domain"
QVQLQQSGAEVKKPGSSVKVSCKASGGTFSSYAISWVRQAPGQGLEWMGGIIPILGIANYAQKFQGRVTITADESTSTAYMELSSLRSEDTAVYYCATGGSGRYALDIWGQGTMVTVSS

SEQ ID NO: 917 - protein, 125 aa, Artificial Sequence
  source: /note="Description of Artificial Sequence: Synthetic heavy chain variable domain"
EVQLVESGGGLVQPGGSLRLSCAASGFTFSTYAMNWVRQAPGKGLEWVGRIRSKYNNYATYYADSVKDRFTISRDDSKNSLYLQMNSLKTEDTAVYYCVRHGNFGNSYVSWFAYWGQGTLVTVSS

SEQ ID NO: 918 - protein, 125 aa, Artificial Sequence
  source: /note="Description of Artificial Sequence: Synthetic heavy chain variable domain"
EVQLVESGGGLVQPGGSLRLSCAASGFTFSTYAMNWVRQAPGKGLEWVGRIRSKYNNYATYYADSVKGRFTISRDDSKNSLYLQMNSLKTEDTAVYYCVRHGNFGNSYVSWFAYWGQGTLVTVSS

SEQ ID NO: 919 - protein, 192 aa, Artificial Sequence
  source: /note="Description of Artificial Sequence: Synthetic heavy chain variable domain"
QVQLQQSGAELARPGASVKMSCKASGYTFTRYTMHWVKQRPGQGLEWIGYINPSRGYTNYNQKFKDKATLTTDKSSSTAYMQLSSLTSEDSAVYYCARYYDDHYCLDYWGQGTTLTVSSAKTTAPSVYPLAPVCGDTTGSSVTLGCLVKGYFPEPVTLTWNSGSLSSGVHTFPAVLQSDLYTLSSSVTVTSS

SEQ ID NO: 920 - protein, 125 aa, Artificial Sequence
  source: /note="Description of Artificial Sequence: Synthetic heavy chain variable domain"
EVQLVESGGGLVQPGGSLKLSCAASGFTFNKYAMNWVRQAPGKGLEWVARIRSKYNNYATYYADSVKDRFTISRDDSKNTAYLQMNNLKTEDTAVYYCVRHGNFGNSYISYWAYWGQGTLVTVSS

SEQ ID NO: 921 - protein, 120 aa, Artificial Sequence
  source: /note="Description of Artificial Sequence: Synthetic heavy chain variable domain"
EVQLQQSGAELARPGASVKMSCKASGYTFTRYTMHWVKQRPGQGLEWIGYINPSRGYTNYNQKFKDKATLTTDKSSSTAYMQLSSLTSEDSAVYYCARYYDDHYCLDYWGQGTTLTVSSA

SEQ ID NO: 922 - protein, 119 aa, Artificial Sequence
  source: /note="Description of Artificial Sequence: Synthetic heavy chain variable domain"
VHQIQLVQSGAEVKKPGASVKVSCKASGYTFTDYYITWVRQAPGQGLEWMGWIYPGSGNTKYNEKFKGRVTMTRDTSISTAYMELSRLRSDDTAVYYCANYGNYWFAYWGQGTLVTVSS

SEQ ID NO: 923 - protein, 112 aa, Artificial Sequence
  source: /note="Description of Artificial Sequence: Synthetic heavy chain variable domain"
QVQLQQWGAGLLKPSETLSLTCAVYGGSFSAYYWSWIRQPPGKGLEWIGDINHGGGTNYNPSLKSRVTISVDTSKNQFSLKLNSVTAADTAVYYCASLTAYWGQGSLVTVSS

SEQ ID NO: 924 - protein, 116 aa, Artificial Sequence
  source: /note="Description of Artificial Sequence: Synthetic heavy chain variable domain"
DVQLQESGPGLVKPSQSLSLTCTVTGFSITSDYSWNWIRQFPGNKLEWMGYISYSGHTSYNPSLESRISITRDTSKNQFFLQLNSVTTEDTATYYCTRGNWDVVYWGQGTLVTVSA

SEQ ID NO: 925 - protein, 123 aa, Artificial Sequence
  source: /note="Description of Artificial Sequence: Synthetic heavy chain variable domain"
QVQLKESGPGLVAPSQSLSITCTVSGFSLSRYSVQWVRQPPGKGLEWLGMIWGGGSTDYNSGLKSRLTISKDNSKSQVFLKMNSLQTDDTAMYFCARTQFYYGHDGGYAMDFWGQGTSVTVSS

SEQ ID NO: 926 - protein, 120 aa, Artificial Sequence
  source: /note="Description of Artificial Sequence: Synthetic heavy chain variable domain"
DVQLVESGGGLVQPGGSRKLSCAASGFTFSSYGMHWVRQAPETGLEWVAYITTRSSTIYYAATVKGRFTISRDNARNTLFLQMTSLRSEDTAMYYCTREPLTGYYAMDYWGQGTSVTVSS

SEQ ID NO: 927 - protein, 123 aa, Artificial Sequence
  source: /note="Description of Artificial Sequence: Synthetic heavy chain variable domain"
QVQLKESGPGLVAPSQSLSITCTVSGFSLSRYSVHWVRQPPGKGLEWLGMIWGGGSIDYNSGLKSRLSISKDNSKSQVFLKMNSLQSDDTAMYHCVRAQFYYGYDGGYAMDYWGQGTSVTVSS

SEQ ID NO: 928 - protein, 118 aa, Artificial Sequence
  source: /note="Description of Artificial Sequence: Synthetic heavy chain variable domain"
SDVQLQESGPGLVKPSQSLSLTCTVTDYSITSDYAWNWIRQFPGNNLEWMGNIGYSGDTSYNPSLKSRISITRDTSKNQFFLQLNSVTTEDSATYYCARSSLGPFDYWGQGTALTVSS

SEQ ID NO: 929 - protein, 118 aa, Artificial Sequence
  source: /note="Description of Artificial Sequence: Synthetic heavy chain variable domain"
QVQLQQSGNELVRPGSAVKISCKASGYAFSSYWMNWVKQRPGQGLEWIGQIYPGDDDSNYNGKFKGKATLTADKSSSSAYMHLSSLTSEDSAVYFCARGFATPTMDYWGQGTSVTVSS

SEQ ID NO: 930 - protein, 119 aa, Artificial Sequence
  source: /note="Description of Artificial Sequence: Synthetic heavy chain variable domain"
QVQLQQSGAELMKTGASVKISCKATGYTFSSYWIEWVKQRPGHGLEWIGEILPGSGKTNYNENFKGKATFTADTSSNTAYMQLSSLTSEDSVVYYCARRGAYYGNFDYWGQGTTLTVSS

SEQ ID NO: 931 - protein, 123 aa, Artificial Sequence
  source: /note="Description of Artificial Sequence: Synthetic heavy chain variable domain"
QVQLKESGPGLVAPSQSLSITCTVTGFSLSRYSVHWIRQPPGKGLEWLGMIWGGGSTDYNSALKSRLSINKDNSKSQVFLKMNSLQTVDTAMYYCARTQFYYGHDGGYAMDYWGQGTSVTVSS

SEQ ID NO: 932 - protein, 116 aa, Artificial Sequence
  source: /note="Description of Artificial Sequence: Synthetic heavy chain variable domain"
EVQLQQSGPELLKPGASVKISCKASGYTFTDYNMHWVKQSHGKSLEWIGNIYPYNGGTGYNQKFKTKATLTVDNSSSTAYMELRSLTSEDSAVYYCAIGNYWFAFWGQGTLVTVSA

SEQ ID NO: 933 - protein, 120 aa, Artificial Sequence
  source: /note="Description of Artificial Sequence: Synthetic heavy chain variable domain"
EVQLQQSGPDLVKPGTSVKISCKASGYSFTACYIHWVKQSHGKSLEWIGRFSPNNDRTTYNQKFKDKAILTVDKSSSTAYMDLRSLTSEDSAVYYCARGEESWDAWFTYWGQGTLVTVSA

SEQ ID NO: 934 - protein, 119 aa, Artificial Sequence
  source: /note="Description of Artificial Sequence: Synthetic heavy chain variable domain"
QVTLKESGPGILQPSQTLSLTCSFSGFSLSTSGMGVGWIRQPSGKGLEWLAHIWWDDVKRYNPALKSRLTISKDTSSSQVFLKIASVDTADTATYHCARIAIGQPFAYWGQGTLVTVSA

SEQ ID NO: 935 - protein, 120 aa, Artificial Sequence
  source: /note="Description of Artificial Sequence: Synthetic heavy chain variable domain"
QVQLQQPGAELVKPGASVKLSCRTSGYSFTSYWIHWVKQRPGRGLEWIGRIVPNSGGTKYNENFKNKATLTVDKSSNTAYMQLSSLTSEDSAVYYCTREDSYGPFDLDYWGQGTSVTVSS

SEQ ID NO: 936 - protein, 121 aa, Artificial Sequence
  source: /note="Description of Artificial Sequence: Synthetic heavy chain variable domain"
EVQLQQSGPELVKPGASVKISCKASGYSFTGYFMNWVKQSHGKSLEWIGRINPYNGDNFYNQKFKGKATLTVDKSSSTAHMELLSLTSEDSAVYYCGRDYGSSYGWFFDVWGAGTTVTVSS

SEQ ID NO: 937 - protein, 123 aa, Artificial Sequence
  source: /note="Description of Artificial Sequence: Synthetic heavy chain variable domain"
EVQLQQSGPELVKPGASMKISCKASGYTFTDHTMHWVKQSHGKNLEWIGRINPYNGDTSHNQNFKGKATLTVDKSSNTAYMELLSLTSEDSAVYYCARYGGDYTSSYYTMDYWGQGTSSTVSS

SEQ ID NO: 938 - protein, 123 aa, Artificial Sequence
  source: /note="Description of Artificial Sequence: Synthetic heavy chain variable domain"
EVQLQQSGPELVKPGASMKISCKASGYTFTDYTMHWVRQSHGKNLEWIGRINPYNADTSHNQNFKGRATLTVDKSFNTAYMELLSLTSEDSAVYYCARYGGDFTSSYYTMDYWGQGTSVTVSS

SEQ ID NO: 939 - protein, 118 aa, Artificial Sequence
  source: /note="Description of Artificial Sequence: Synthetic heavy chain variable domain"
QVQLKESGPGLVAPSQSLSITCTVSGFSLTSYTISWVRQPPGKGLEWLGIIWTAGATNYNSALKSRLSISKDNSKSQVFLKMNSLQTDDTARYYCARYSKDYYAVDYWGQGTSVTVSS

SEQ ID NO: 940 - protein, 123 aa, Artificial Sequence
  source: /note="Description of Artificial Sequence: Synthetic heavy chain variable domain"
EVQLQQSGPELVKPGASMKISCKASGYTFTDYTMHWVKQSHGKNLEWIGRINPYNDDISHNQNFKDKATLTVDKSSNTAYMELLSLTSEDSAVYYCARYGGDYTSSYYTMDYWGQGTSVTVSS

SEQ ID NO: 941 - protein, 123 aa, Artificial Sequence
  source: /note="Description of Artificial Sequence: Synthetic heavy chain variable domain"
QVQLKESGPGLVAPSQSLSITCTVSGFSLSRYSVHWVRQPSGKGLEWLGMIWGGGSTDYNSALKSRLIISKDNSKSQVFLKMNSLQTDDTAMYYCARTQFYYGHDGGYAMDYWGQGTSVTVSS

SEQ ID NO: 942 - protein, 119 aa, Artificial Sequence
  source: /note="Description of Artificial Sequence: Synthetic heavy chain variable domain"
QVTLKESGPGILQPSQTLSLTCSFSGFSLSTSGMGVGWIRQPSGKGLEWLAHIWWDDVKRYNPALKSRLNISKDTSSSQVFLKIASVDTADTATYYCGRKSNSGYFDYWGQGTTLTVSS

SEQ ID NO: 943 - protein, 116 aa, Artificial Sequence
  source: /note="Description of Artificial Sequence: Synthetic heavy chain variable domain"
EVQLQQSGPDLVKPGASVKISCKASGYSFTGYFMNWVKQSHGKSLEWIGRINPYNGDTFYNQKFKGKATLTVDKSSSTAHMELLSLTSEDSAVYYCGRGNYYFDYWGQGTTLTVSS

SEQ ID NO: 944 - protein, 114 aa, Artificial Sequence
  source: /note="Description of Artificial Sequence: Synthetic heavy chain variable domain"
QVQLEQSGGDLVKPGGSLKLSCAASGFTFSSYGMSWVRQTPDKRLEWVATISSGGSYSYYPDSVKGRFTISRDNAKNTLYLQMSSLKSEDTAMYFCRPSFFPSWGQGTLVTVSA

SEQ ID NO: 945 - protein, 109 aa, Artificial Sequence
  source: /note="Description of Artificial Sequence: Synthetic heavy chain variable domain"
EVQLQQSGAELVRPGASVKLSCTASGFNINDDYFHWVKQRPEQGLEWIGRIDPANGNTKYGPKFQDKATITADTSSNTAYLQFTSLTSEDTAVYYCASGWAFACWGQGT

SEQ ID NO: 946 - protein, 123 aa, Artificial Sequence
  source: /note="Description of Artificial Sequence: Synthetic heavy chain variable domain"
EVQLQQSGPELVKPGTSMKISCKASGYTFTDYTMHWVKQSHGKNLEWIGRINPYTGSTSHNQNFKDKASLTVDKSSNTAYMDLLSLTSEDSAVYYCARFGGDYTSSYYTLDYWGQGTSVSVSS

SEQ ID NO: 947 - protein, 117 aa, Artificial Sequence
  source: /note="Description of Artificial Sequence: Synthetic heavy chain variable domain"
EVQLQQSGPELVKPGDSVKMSCKASGNTVTNYYMDWVKQSHGKSLEWIGYIYANNGGTSYNQKFKGKATLTVDKSSSTAYMEIHSLTSEDSAVYYCAIYYRYEFAYWGQGTLVTVSA

SEQ ID NO: 948 - protein, 121 aa, Artificial Sequence
  source: /note="Description of Artificial Sequence: Synthetic heavy chain variable domain"
SDVQLQESGPGLVKPSQSLSVTCTVTDYSLTSGYYWNWIRQFPGNKLEWMAYIHSSGSTHYNPSLKSRISVTRDTSKNQFFLQLNSVTTEDTATYYCARDGAYYSSWFPYWGQGTLVTVSA

SEQ ID NO: 949 - protein, 112 aa, Artificial Sequence
  source: /note="Description of Artificial Sequence: Synthetic heavy chain variable domain"
QILLVQSGPELKKPGETVKISCKANYTFTDYGMHWVKQAPGKGLKWMGWINPKTGVASYADDFKGRFAFSLETSASTAYLQINNLENEDTSIYFCARFFDYWGQGTTLTVSS

SEQ ID NO: 950 - protein, 116 aa, Artificial Sequence
  source: /note="Description of Artificial Sequence: Synthetic heavy chain variable domain"
EVKLEESGGGLVQPGGSMKLSCEASGFTFSDAWMDWVRQSPEKGLEWVAEIRNKAKNHATYYAESVIGRFTISRDDSKSSVYLQMNSLRAEDTGIYYCGALGLDYWGQGTTLTVSS

SEQ ID NO: 951 - protein, 115 aa, Artificial Sequence
  source: /note="Description of Artificial Sequence: Synthetic heavy chain variable domain"
EVQLQQSGPELVKPGASVKISCKASGYTFTDYNMHWVKQSHGKSLEWIGYIYPYNGGTGYNQKFKSKATLTVDNSSSTAYMDVRSLTSEDSAVYYCARGRPAMDYWGQGTSVTVS

SEQ ID NO: 952 - protein, 117 aa, Artificial Sequence
  source: /note="Description of Artificial Sequence: Synthetic heavy chain variable domain"
QVQLQQSGPELVRPGTFVKISCKASGYTFTNYDINWVNQRPGQGLEWIGWIYPGDGSTKYNEKFKAKATLTADKSSSTAYLQLNNLTSENSAVYFCASGYEDAMDYWGQGTSVTVSS

SEQ ID NO: 953 - protein, 120 aa, Artificial Sequence
  source: /note="Description of Artificial Sequence: Synthetic heavy chain variable domain"
EVKLQESGPELVKPGASVKMSCKASGYKFTDYVVHWLKQKPGQGLEWIGYINPYNDGTKYNEKFKGKATLTSDKSSSTAYMEVSSLTSEDSAVYYCARDYRYEVYGMDYWGQGTSVTVSS

SEQ ID NO: 954 - protein, 118 aa, Artificial Sequence
  source: /note="Description of Artificial Sequence: Synthetic heavy chain variable domain"
QVQLQQPGAEVVKPGASVKMSCKASGYTFTSYYIHWIKQTPGQGLEWVGVIYPGNDDISYNQKFKGKATLTADKSSTTAYMQLSSLTSEDSAVYYCAREVRLRYFDVWGAGTTVTVSS

SEQ ID NO: 955 - protein, 121 aa, Artificial Sequence
  source: /note="Description of Artificial Sequence: Synthetic heavy chain variable domain"
QVQLVQSGAEVKKPGESLKISCKGSGYSFTSYWIGWVRQMPGKGLEWMGIIYPGDSDTRYSPSFQGQVTISADKSISTAYLQWSSLKASDTAMYYCARLGGSLPDYGMDVWGQGTMVTVSS

SEQ ID NO: 956 - protein, 127 aa, Artificial Sequence
  source: /note="Description of Artificial Sequence: Synthetic heavy chain variable domain"
QVQLVQSGAEVKKPGASVRVSCKASGYIFTNYYVHWVRQAPGQGLEWMGIISPSGGSPTYAQRLQGRVTMTRDLSTSTVYMELSSLTSEDTAVYFCARESRLRGNRLGLQSSIFDHWGQGTLVTVSS

SEQ ID NO: 957 - protein, 125 aa, Artificial Sequence
  source: /note="Description of Artificial Sequence: Synthetic heavy chain variable domain"
QVQLVQSGGGLVQPGGSLRLSCAASGFTFSSYAMSWVRQAPGKGLEWVSAISGSGGSTYYADSVKGRFTISRDNSKNTLYLQMNSLRAEDTAVYYCAKEDTIRGPNYYYYGMDVWGQGTTVTVSS

SEQ ID NO: 958 - protein, 121 aa, Artificial Sequence
  source: /note="Description of Artificial Sequence: Synthetic heavy chain variable domain"
QVQLVQSGAEVKKPGESLKISCKGSGYSFTSYWIGWVRQMPGKGLEWMGIIYPGDSDTRYSPSFQGQVTISADKSITTAYLQWSSLRASDSAMYYCARGGYSDYDYYFDFWGQGTLVTVSS

SEQ ID NO: 959 - protein, 116 aa, Artificial Sequence
  source: /note="Description of Artificial Sequence: Synthetic heavy chain variable domain"
QVQLVQSGGDLAQPGRSLRLSCAASGFTFDDYAMHWVRQAPGKGLEWVAVIWPDGGQKYYGDSVKGRFTVSRDNPKNTLYLQMNSLRAEDTAIYYCVRHFNAWDYWGQGTLVTVSS

SEQ ID NO: 960 - protein, 120 aa, Artificial Sequence
  source: /note="Description of Artificial Sequence: Synthetic heavy chain variable domain"
QVQLVQSGGGVVQPGKSLRLSCAASGFTFSIFAMHWVRQAPGKGLEWVATISYDGSNAFYADSVEGRFTISRDNSKDSLYLQMDSLRPEDTAVYYCVKAGDGGYDVFDSWGQGTLVTVSS

SEQ ID NO: 961 - protein, 121 aa, Artificial Sequence
  source: /note="Description of Artificial Sequence: Synthetic heavy chain variable domain"
EVQLVESGGGLVQPGGSLRLSCAASGFTFSSYAMSWVRQAPGKGLEWVSAISGSGGSTYYADSVKGRFTISRDNSKNTLYLQMNSLRAEDTAVYYCAKETDYYGSGTFDYWGQGTLVTVSS

SEQ ID NO: 962 - protein, 121 aa, Artificial Sequence
  source: /note="Description of Artificial Sequence: Synthetic heavy chain variable domain"
QVQLVQSGAEVKKPGASVRVSCKASGYMFTDFFIHWVRQAPGQGLEWMGWINPNSGVTKYAQKFQGRVTMTRNTSISTAYMELSSLRSEDTAVYYCATWYSSGWYGIANIWGQGTMVTVSS

SEQ ID NO: 963 - protein, 120 aa, Artificial Sequence
  source: /note="Description of Artificial Sequence: Synthetic heavy chain variable domain"
QVQLVQSGAEVKKPGESLKISCKGSGYSFTNYWIGWVRQMPGKGLEWMGIIYPGDSDTRYSPSFQGQVTISADKSISTAYLQWSSLKASDTAMYYCARHGPSSWGEFDYWGQGTLVTVSS

SEQ ID NO: 964 - protein, 214 aa, Artificial Sequence
  source: /note="Description of Artificial Sequence: Synthetic heavy chain variable domain"
DIQMTQSTSSLSASLGDRVTISCSASQGINNYLNWYQQKPDGTVELLIYYTSTLQSGVPSRFSGSGSGTDYSLTISNLEPEDIGTYYCQQYSKLPRTFGGGTKLEIKRTVAAPSVFIFPPSDEQLKSGTASVVCLLNNFYPREAKVQWKVDNALQSGNSQESVTEQDSKDSTYSLSSTLTLSKADYEKHKVYACEVTHQGLSSPVTKSFNRGEC

SEQ ID NO: 965 - protein, 451 aa, Artificial Sequence
  source: /note="Description of Artificial Sequence: Synthetic heavy chain variable domain"
VQLLESGGGLVQPGGSLRLSCAVSGFTFNSFAMSWVRQAPGKGLEWVSAISGSGGGTYYADSVKGRFTISRDNSKNTLYLQMNSLRAEDTAVYFCAKDKILWFGEPVFDYWGQGTLVTVSSASTKGPSVFPLAPSSKSTSGGTAALGCLVKDYFPEPVTVSWNSGALTSGVHTFPAVLQSSGLYSLSSVVTVPSSSLGTQTYICNVNHKPSNTKVDKRVEPKSCDKTHTCPPCPAPELLGGPSVFLFPPKPKDTLMISRTPEVTCVVVDVSHEDPEVKFNWYVDGVEVHNAKTKPREEQYNSTYRVVSVLTVLHQDWLNGKEYKCKVSNKALPAPIEKTISKAKGQPREPQVYTLPPSREEMTKNQVSLTCLVKGFYPSDIAVEWESNGQPENNYKTTPPVLDSDGSFFLYSKLTVDKSRWQQGNVFSCSVMHEALHNHYTQKSLSLSPGK

SEQ ID NO: 966 - protein, 125 aa, Artificial Sequence
  source: /note="Description of Artificial Sequence: Synthetic heavy chain variable domain"
EVQLVESGGGLVQPGGSLKLSCAASGFTFNSYAMNWVRQAPGKGLEWVARIRSKYNNYATYYADSVKGRFTISRDDSKNTAYLQMNNLKTEDTAVYYCVRHGNFGNSYVSWWAYWGQGTLVTVSS

SEQ ID NO: 967 - protein, 444 aa, Artificial Sequence
  source: /note="Description of Artificial Sequence: Synthetic heavy chain variable domain"
EVQLVESGGGLVQPGGSLRLSCAASGYSFTGYYIHWVRQAPGKGLEWVARVIPNAGGTSYNQKFKGRFTLSVDNSKNTAYLQMNSLRAEDTAVYYCAREGIYWWGQGTLVTVSSASTKGPSVFPLAPSSKSTSGGTAALGCLVKDYFPEPVTVSWNSGALTSGVHTFPAVLQSSGLYSLSSVVTVPSSSLGTQTYICNVNHKPSNTKVDKKVEPKSCDKTHTCPPCPAPELLGGPSVFLFPPKPKDTLMISRTPEVTCVVVDVSHEDPEVKFNWYVDGVEVHNAKTKPREEQYNSTYRVVSVLTVLHQDWLNGKEYKCKVSNKALPAPIEKTISKAKGQPREPQVYTLPPSREEMTKNQVSLTCLVKGFYPSDIAVEWESNGQPENNYKTTPPVLDSDGSFFLYSKLTVDKSRWQQGNVFSCSVMHEALHNHYTQKSLSLSPGK

SEQ ID NO: 968 - protein, 126 aa, Artificial Sequence
  source: /note="Description of Artificial Sequence: Synthetic heavy chain variable domain"
QVQLVQSGAEVKKPGASVKVSCKASGYTFTGYYMHWVRQAPGQGLEWMGWINPDSGGTNYAQKFQGRVTMTRDTSISTAYMELNRLRSDDTAVYYCARDQPLGYCTNGVCSYFDYWGQGTLVTVSS

SEQ ID NO: 969 - protein, 113 aa, Artificial Sequence
  source: /note="Description of Artificial Sequence: Synthetic heavy chain variable domain"
EVQLVESGGGLVQPGGSLRLSCAASGYSFTGYYIHWVRQAPGKGLEWVARVIPNAGGTSYNQKFKGRFTLSVDNSKNTAYLQMNSLRAEDTAVYYCAREGIYWWGQGTLVTVS

SEQ ID NO: 970 - protein, 113 aa, Artificial Sequence
  source: /note="Description of Artificial Sequence: Synthetic heavy chain variable domain"
DIQMTQSPSSLSASVGDRVTITCRSSQSLVHSNGNTFLHWYQQKPGKAPKLLIYTVSNRFSGVPSRFSGSGSGTDFTLTISSLQPEDFATYFCSQTTHVPWTFGQGTKVEIKR

SEQ ID NO: 971 - protein, 120 aa, Artificial Sequence
  source: /note="Description of Artificial Sequence: Synthetic heavy chain variable domain"
QVQLVESGGGLVQPGGSLKLSCAASGFDFSRYWMSWVRQAPGKGLEWIGEINPTSSTINFTPSLKDKVFISRDNAKNTLYLQMSKVRSEDTALYYCARGNYYRYGDAMDYWGQGTSVTVS

SEQ ID NO: 972 - protein, 112 aa, Artificial Sequence
  source: /note="Description of Artificial Sequence: Synthetic heavy chain variable domain"
QIQLVQSGPELKKPGETVKISCKASGYAFTDFSMHWVKQAPGKGLRWMGWINTETGEPTYADDFKGRFAFSLETSASTAYLQIKNLKNEDTATYFCVRFAYWGQGTLVTVSA

SEQ ID NO: 973 - protein, 144 aa, Artificial Sequence
  source: /note="Description of Artificial Sequence: Synthetic heavy chain variable domain"
EVLLQQSGPELVKPGASVKIPCKASGYTFTDYNMDWVKQSHGKSLEWIGDINPNNGDTFYNQKFKGKATLTVHKSSSTAFMELRSLTSEDTAVYYCTRSKYDNYPWFAYWGQGTLVTVSAAKTTPPSVYPLAPGCGDTTGSSVT

SEQ ID NO: 974 - protein, 122 aa, Artificial Sequence
  source: /note="Description of Artificial Sequence: Synthetic heavy chain variable domain"
QIQLQQSGPELVKPGASVKISCKASGYTFTDYYINWVKQRPGQGLEWIGWIYPGSGNTRYNEKFKGKATLTVDTSSSTAVMQLSSLTSEDSAVYFCTRYYYAGRYDWYFDVWGARTTVTVSS

SEQ ID NO: 975 - protein, 122 aa, Artificial Sequence
  source: /note="Description of Artificial Sequence: Synthetic heavy chain variable domain"
EVQLQQSGAELVKPGASVKLSCTASGFNIKDTYMHWVKQRPEQGLEWIGRIDPANGNIKYDPKFQGKATITSDTSSNTAYLQLSSLTSEDTAVYYCAHPSYDYDRNYAMDVWGQGTSVTVSS

SEQ ID NO: 976 - protein, 130 aa, Artificial Sequence
  source: /note="Description of Artificial Sequence: Synthetic heavy chain variable domain"
EVQLVESGGGLVKPGGSLKLSCAASGFTFSDVYMYWVRQTPEKRLEWVATISDGGTYIYYPDSVKGRFTISRDNAKNNLYLQMSSLKSEDTAMVVCVRDIDYDTSVPWFAYWGQGTLVTVSAAKTTAPSV

SEQ ID NO: 977 - protein, 120 aa, Artificial Sequence
  source: /note="Description of Artificial Sequence: Synthetic heavy chain variable domain"
EVLLHQSGPELVKPGASVKIPCKASGYTFTDYNMDWVKQSHGKSLEWIGDINPNNGGTFYNQKFKGKATLTVHKSSSTAFMELRSLTSEDTAVYYCTRSKYDNYPWFAYWGQGTLVTVSA

SEQ ID NO: 978 - protein, 119 aa, Artificial Sequence
  source: /note="Description of Artificial Sequence: Synthetic heavy chain variable domain"
QVQLQQSGPELVKPGASVKLSCKASGYTFTNYDINWVKQRPGQGLEWIGWIYPRDGSFKYNEKFKGKATLTVDTSSSTAYMDLHSLTSEDSAVFFCAVSEDGYPWFPYWGQGTLVTVSA

SEQ ID NO: 979 - protein, 119 aa, Artificial Sequence
  source: /note="Description of Artificial Sequence: Synthetic heavy chain variable domain"
SQVQLKESGPGLVAPSQNLSITCTVSGFSLTSYDISWIRQPPGKGLEWLGVIWTDGGTNYNSAFMSRLSISKDNSKSQVFLKMNSLQTDDTAIYYCVRVYDGYPWFAYWGQGTLVTVSA

SEQ ID NO: 980 - protein, 112 aa, Artificial Sequence
  source: /note="Description of Artificial Sequence: Synthetic heavy chain variable domain"
QIQLVQSGPELKKPGETVKISCKASGYTFTDYSMHWVKQAPGKGLKWMGLINTETGEPAYADDFRGRLDFSLETSASTAYLQINNLKNEDTATYFCVRFAYWGHGTLVTVSA

SEQ ID NO: 981 - protein, 122 aa, Artificial Sequence
  source: /note="Description of Artificial Sequence: Synthetic heavy chain variable domain"
QVQLQQPGAELVRPGASVKLSCKASGYTFTAFWINWVKQRPGQGLEWIGNIYPSDSYTNYNQNFKDKATLTVDKSSSTAYMQLSSPTSEDSAVYYCARSDYYGSSYYALDYWGQGTSVTVSS

SEQ ID NO: 982 - protein, 119 aa, Artificial Sequence
  source: /note="Description of Artificial Sequence: Synthetic heavy chain variable domain"
EVQLQQFGAELVKPGASVKISCKASGYTFTDYNMDWVKQSPGKSLEWIGDIHPNYDTSTYNQKFKGKATLTVDKSSSTAYMELRSLTSEDTAVYYCAREVRRGYFFDFWGQGTTLTVSS

SEQ ID NO: 983 - protein, 115 aa, Artificial Sequence
  source: /note="Description of Artificial Sequence: Synthetic heavy chain variable domain"
QVQLQQPGAELVKPGASVKLSCQTSGVTFTSVWMHWVKQRPGQGLEWIGEINPSNGRTNVNEKFKTKATLTVDKSSTTAVIQLNSLTSEDSAVYYCARLRDYGGWGQGTLVTVSA

SEQ ID NO: 984 - protein, 120 aa, Artificial Sequence
  source: /note="Description of Artificial Sequence: Synthetic heavy chain variable domain"
EIQLQQTGPELVKPGASVKISCKASGYSFTDSIMLWVKQSHGKSLEWIGNINPYYGSTTYNLKFKGKATLTVDKSSSTAYMQLNSLTSEDSAVYYCARGLRGYGGYFDYWGQGTTLTVSS

SEQ ID NO: 985 - protein, 119 aa, Artificial Sequence
  source: /note="Description of Artificial Sequence: Synthetic heavy chain variable domain"
EVQLQQSGPVLVKPGASVRMSCKASGYTFTDYYMNWVKQSHGKSLEWIGVFNPYNGGTNYNQKFKGKATLTVDKSSSTAYMELNGLTSEDSAVYYCADGYYSYYAMDYWGQGTSLTVSS

SEQ ID NO: 986 - protein, 123 aa, Artificial Sequence
  source: /note="Description of Artificial Sequence: Synthetic heavy chain variable domain"
QIQLQQSGPELVKPGASVKISCKASGYTFTDYYINWVKQKPGQGLEWIGWIYPGSGNTKYNEKFKGKATLTVDTSSSTAYMQLSSLTSEDTAVYFCARLGYFYGSSSWYFDVWGAGTTVTVSS

SEQ ID NO: 987 - protein, 117 aa, Artificial Sequence
  source: /note="Description of Artificial Sequence: Synthetic heavy chain variable domain"
QVQLQQSGAELARPGASVKLSCKASDYTFTSYGISWVKQRTGQGLEWIGEIFPRSGNTYYNEKFKGKATLTADKSSSTAYMELRSLTSEDSAVYFCARGLGGAMDYWGQGTSVIVSS

SEQ ID NO: 988 - protein, 117 aa, Artificial Sequence
  source: /note="Description of Artificial Sequence: Synthetic heavy chain variable domain"
DVQLVESGGGLVQPGGSRKLSCAASGFTFSSFGMHWVRQAPEKGLEWVAYISSATSAIYYADTVKGRFTISRDNPTNTLFLQMTSLRSEDTAMYYCARKGNNYFDYWGQGTTLTVSS

SEQ ID NO: 989 - protein, 114 aa, Artificial Sequence
  source: /note="Description of Artificial Sequence: Synthetic heavy chain variable domain"
EVQLVESGGGLVKPGGSLKLSCAASGFTFSSFGMSWVRQTPEKRLEWVAAINNGGNTYYSDTVKGRFTISRDNAKNTLYLQMSSLRSADTALYYCARVVHFDVWGAGTTVTVSS

SEQ ID NO: 990 - protein, 116 aa, Artificial Sequence
  source: /note="Description of Artificial Sequence: Synthetic heavy chain variable domain"
QVQLVQSGGGVVQPGRSLRLACAASGLTVNNYAMHWVRQAPGKGLEWVAVISYDGNNKYYADSVKGRFTISRDNSKNTLYLQMNSLRAEDTAVYYCAKGGGYFDLWGRGTLVTVSS

SEQ ID NO: 991 - protein, 122 aa, Artificial Sequence
  source: /note="Description of Artificial Sequence: Synthetic heavy chain variable domain"
QVQLQESGGGLVQPGGSLRLSCAASGFTFSNYAMSWVRQAPGKGLEWVSTISGSGSSTFYVDSVKGRFTISRDNSKNTLYLQMNSLRAEDTAVYYCAQGLYSSGWANWFDPRGQGTLVTVSS

SEQ ID NO: 992 - protein, 121 aa, Artificial Sequence
  source: /note="Description of Artificial Sequence: Synthetic heavy chain variable domain"
QVQLQESGGGWQPGRSLRLSCAASGFTFSSYGMHWVRQAPGKGLEWVAVISYDGSNKYYADSVKGRFTISRDNSKNTLYLQMNSLRAEDTAVYYCAKVGLAAAGLDAFDIWGQGTTVTVSS

SEQ ID NO: 993 - protein, 115 aa, Artificial Sequence
  source: /note="Description of Artificial Sequence: Synthetic heavy chain variable domain"
QVQLVQSGGGWQPGRSLRLSCAASGFTFSSYAMHWVRQAPGKGLEWVAVISYDGSNKYYADSVKGRFTISRDTSTNTLYLQNSLRADDTAVYYCGRESSGSPGVWGQGTTVTVSS

SEQ ID NO: 994 - protein, 121 aa, Artificial Sequence
  source: /note="Description of Artificial Sequence: Synthetic heavy chain variable domain"
QVQLVESGGGLIQPGGSLRLSCAASGFTVSSNYMSWVRQAPGKGLEWVSVIYTDGSTYYADSVKGRFTISRDNSKNTLYLQNSLRAEDTAIYYCARDRGTSGYDWAWFDLWGQGTLVTVSS

SEQ ID NO: 995 - protein, 123 aa, Artificial Sequence
  source: /note="Description of Artificial Sequence: Synthetic heavy chain variable domain"
QVQLQESGGGLVQPGGSLRLSCAASGFTFSSYAMSWVRQAPGKGLEWVSAISGSGGSTYYADSVKGRFTISRDNSKNTLYMQMNSLRAEDTAVYYCAKDRYYYGSGKDAFDIWGRGTMVTVSS

SEQ ID NO: 996 - protein, 117 aa, Artificial Sequence
  source: /note="Description of Artificial Sequence: Synthetic heavy chain variable domain"
QVQLVESGGGLVQPGGSLGLSCAASGFTFSNYWMSWVRQAPGKGLEWVANVRQDGGQKYYVDSVKGRFTISRDNAKNSLYLQNSLRTEDTAVYFCVSQRNSGEHDYWGQGTLVTVSS

SEQ ID NO: 997 - protein, 121 aa, Artificial Sequence
  source: /note="Description of Artificial Sequence: Synthetic heavy chain variable domain"
EVQLVESGGGLVQPGGSLRLSCAASGFTFSDYYMSWIRQAPGKGLEWVSYISSSGSTIYYADSVKGRFTISRDNSKNTLYLQMNSLRAEDTAVYYCARDYGRIAAAGRHYWGQGTLVTVSS

SEQ ID NO: 998 - protein, 121 aa, Artificial Sequence
  source: /note="Description of Artificial Sequence: Synthetic heavy chain variable domain"
EVQLVESGGGLVQPGGSLRLSCAASGFTFSDYYMSWIRQAPGKGLEWVSYISSSGSTIYYADSVKGRFTISRDNSKNTLYLQMNSLRAEDTAVYYCARDYGRIAAAGRNYWGQGTLVTVSS

SEQ ID NO: 999 - protein, 116 aa, Artificial Sequence
  source: /note="Description of Artificial Sequence: Synthetic heavy chain variable domain"
QVQLVQSGGGVVQPGRSLRLACAASGFTVNNYAMHWVRQAPGKGLEWVAVISYDGNNKYYADSVKGRFTISRDNSKNTLYLQMNSLRAEDTAVYYCAKGGGYFDLWGRGTLVTVSS

SEQ ID NO: 1000 - protein, 120 aa, Artificial Sequence
  source: /note="Description of Artificial Sequence: Synthetic heavy chain variable domain"
QVQLEVSGGGVVQPGRSLRLSCAASGFTFSTYGMHWVRQAPGKGLEWLSFISYDGDEKYYADSVKGRFTISRDNSKNTLYLQMNSLRAEDTAVYWCAKASGYGMGILDYWGQGTLVTVSS

SEQ ID NO: 1001 - protein, 122 aa, Artificial Sequence
  source: /note="Description of Artificial Sequence: Synthetic heavy chain variable domain"
EVQLVESGGGLVQPGGSLRLSCAASGFTFSDYYMSWIRQAPGKGLEWVSYISSSGSTIYYADSVKGPRFTISRDNSKNTLYLQMNSLRAEDTAVYYCARDYGRIAAAGRRYWGQGTLVTVSS

SEQ ID NO: 1002 - protein, 121 aa, Artificial Sequence
  source: /note="Description of Artificial Sequence: Synthetic heavy chain variable domain"
QVQLQESGGGVVRPGGSLRLSCAASGFTFSDYYMSWIRQAPGKGLEWVSYISSSGSTIYYADSVKGRFTISRDNSKNTLYLQMNSLRAEDTAVYYCARDYGRIAAAGRHYWGQGTLVTVSS

SEQ ID NO: 1003 - protein, 127 aa, Artificial Sequence
  source: /note="Description of Artificial Sequence: Synthetic heavy chain variable domain"
QVQLQESGGGLVQPGGSLRLSCAASGFTFSSYWMSWVRQAPGKGLEWVADIKQDGSEKYYVDSVKGRFTISGDNAKNSLYLQMNSLRAEDTAVYYCAKDVGSTAINYVRAYTWFDPWGQGTLVTVSS

SEQ ID NO: 1004 - protein, 120 aa, Artificial Sequence
  source: /note="Description of Artificial Sequence: Synthetic heavy chain variable domain"
QVQLQESGGGWRPGGSLRLSCAASGFTFSDYYMSWIRQAPGKGLEWVSYISSSGSTIYYADSVKGRFTISRDNSKNTLYLQMNSLRAEDTAVYYCARDYGRIAAAGRHYWGQGTLVTVSS

SEQ ID NO: 1005 - protein, 120 aa, Artificial Sequence
  source: /note="Description of Artificial Sequence: Synthetic heavy chain variable domain"
EVQLVESGGGLVKPGGSLRLSCAASGFTFSDYYMSWIRQAPGKGLEWVSYISSSGSSIYYADSVKGRFTISRDNAKNSLYLQMNSLKAEDTAVYYCARDITDWGVSFDYWGQGTLVTVSS

SEQ ID NO: 1006 - protein, 122 aa, Artificial Sequence
  source: /note="Description of Artificial Sequence: Synthetic heavy chain variable domain"
EVQLVESGGGWQPGRSLRLSCAASGFTFSSYGMHWVRQAPGKGLEWVAVISYDGSNKYYADSVKGRFTISRDNSKNTLYLQMNSLRAEDTAEYYCAKVMGLAAAGLDAFDIWGQGTLVTVSS

SEQ ID NO: 1007 - protein, 117 aa, Artificial Sequence
  source: /note="Description of Artificial Sequence: Synthetic heavy chain variable domain"
EVQLVESGGGWQPGRSLRLSCAASGFTFSSFGMHWVRRAPGKGLEWVAVISYDGSNQYYADSVKGRFTISRDNSKNTLYLQAEDTAVYYCGSRPGGGYASGSTVAYWGQGTLVTVSS

SEQ ID NO: 1008 - protein, 125 aa, Artificial Sequence
  source: /note="Description of Artificial Sequence: Synthetic heavy chain variable domain"
GGAMDYWGQGTSVIVSSDIKMTQSPSSMYASLGERVTITCKASQDINSYLSWFHQKPGKSPKTLIYRANRLVDGVPSRFSGSGSGQDYSLTISSLEFEDMGIYYCLQYDDFPYTFGGGTKLEIKR

SEQ ID NO: 1009 - protein, 100 aa, Artificial Sequence
  source: /note="Description of Artificial Sequence: Synthetic heavy chain variable domain"
QVQLQQSGAELARPGASVKLSCKASDYTFTSYGISWVKQRTGQGLEWIGEIFPRSGNTYYNEKFKGKATLTADKSSSTAYMELRSLTSEDSAVVFCARGL

SEQ ID NO: 1010 - protein, 114 aa, Artificial Sequence; identical to SEQ ID NO: 989
  source: /note="Description of Artificial Sequence: Synthetic heavy chain variable domain"

SEQ ID NO: 1011 - protein, 151 aa, Artificial Sequence
  source: /note="Description of Artificial Sequence: Synthetic heavy chain variable domain"
MLLLVTSLLLCELPHPAFLLIPQVQLLQSGAAVTKPGASVRVSCEASGYNIRDYFIHWWRQAPGQGLQWVGWINPKTGQPNNPRQFQGRVSLTRHASWDFDTFSFYMDLKALRSDDTAVYFCARQRSDYWDFDVWGSGTQVTVSSASTKGP

SEQ ID NO: 1012 - protein, 143 aa, Artificial Sequence
  source: /note="Description of Artificial Sequence: Synthetic heavy chain variable domain"
MLLLVTSLLLCELPHPAFLLIPQVQLVQSGGQMKKPGESMRISCRASGYEFIDCTLNWIRLAPGKRPEWMGWLKPRGGAVNYARPLQGRVTMTRDVYSDTAFLELRSLTVDDTAVYFCTRGKNCDYNWDFEHWGRGTPVIVSS

SEQ ID NO: 1013 - protein, 150 aa, Artificial Sequence
  source: /note="Description of Artificial Sequence: Synthetic heavy chain variable domain"
MLLLVTSLLLCELPHPAFLLIPLEQSGAEVKKPGSSVQVSCKASGGTFSMYGFNWVRQAPGHGLEWMGGIIPIFGTSNYAQKFRGRVTFTADQATSTAYMELTNLRSDDTAVYYCARDFGPDWEDGDSYDGSGRGFFDFWGQGTLVTVSS

SEQ ID NO: 1014 - protein, 117 aa, Artificial Sequence
  source: /note="Description of Artificial Sequence: Synthetic heavy chain variable domain"
EVQLVESGGGLVQPGGSLRLSCAASGFTFSDYYMSWVRQAPGKGLEWVGFIRNKANGYTTEYSASVKGRFTISRDDSKNSLYLQMNSLKTEDTAVYYCARYIWFDYWGQGTTVTVSS

SEQ ID NO: 1015 - protein, 117 aa, Artificial Sequence
  source: /note="Description of Artificial Sequence: Synthetic heavy chain variable domain"
EVQLVESGGGLVQPGGSLRLSCAASGFTFTDYYMSWVRQAPGKGLEWVGFIRNKANGYTTEYNASVKGRFTISRDDSKNSLYLQMNSLKTEDTAVYYCTRYIFFDYWGQGTTVTVSS

SEQ ID NO: 1016 - protein, 116 aa, Artificial Sequence
  source: /note="Description of Artificial Sequence: Synthetic heavy chain variable domain"
EVQLVESGGGLVQPGGSLRLSCAASGFTFTDYYMSWVRQAPGKGLEWVGFIRNKANGYTTEYNASVKGRFTISRDDSKNSLYLQMNSLKTEDTAVYYCRYIFFDYWGQGTTVTVSS

SEQ ID NO: 1017 - protein, 118 aa, Artificial Sequence
  source: /note="Description of Artificial Sequence: Synthetic heavy chain variable domain"
QVQLVESGGGVVQPGRSLRLSCAASGFIFSGYGMHWVRQAPGKGLEWVTVIWYDGSNKYYADSVKGRFTISRDNSKNTLYLQMNSLRAEDTAVYYCARDTGDRFFDYWGQGTLVTVSS

SEQ ID NO: 1018 - protein, 117 aa, Artificial Sequence
  source: /note="Description of Artificial Sequence: Synthetic heavy chain variable domain"
EVQLVESGGGLVKPGGSLKLSCAASGLTFSSYAMSWVRQTPEKRLEWVASISSGGFTYYPDSVKGRFTISRDNARNILYLQMSSLRSEDTAMYYCARDEVRGYLDVWGAGTTVTVSS

SEQ ID NO: 1019 - protein, 123 aa, Artificial Sequence
  source: /note="Description of Artificial Sequence: Synthetic heavy chain variable domain"
QVQLQESGAELVKPGASVKLSCKASGYTFTSYWMHWVKQRPGQGLEWIGKINPSNGRTNYNEKFKSKATLTVDKSSSTAYMQLSSLTSEDSAVYYCARGGVYYDLYYYALDYWGQGTTVTVSS

SEQ ID NO: 1020 - protein, 122 aa, Artificial Sequence
  source: /note="Description of Artificial Sequence: Synthetic heavy chain variable domain"
QVQLVESGGGVVQPGRSLRLSCAASGFTFSNYGIHWVRQAPGKGLEWVAVIWYDGSNKYYADSVKGRFTISRDNSKNTLYLQMNSLRAEDTAVYYCARDGGYSGYDSGFDYWGQGTLVTVSS

SEQ ID NO: 1021 - protein, 122 aa, Artificial Sequence
  source: /note="Description of Artificial Sequence: Synthetic heavy chain variable domain"
QVQLVESGGGVVQPGRSLRLSCAASGFTFSSYGMHWVRQAPGKGLEWVAVIWYDGSDKYFADSVKGRFTISRDNSKNTLYLQMNSLRAEDTAVYYCARDGIAGARYVYFDYWGQGTLVTVSS

SEQ ID NO: 1022 - protein, 117 aa, Artificial Sequence
  source: /note="Description of Artificial Sequence: Synthetic heavy chain variable domain"
QIQLVQSGPEVKKPGETVKISCKASGYTFTNYGMNWVKQAPGKGLKWMGINTYTGEPTYADAFKGRFAFSLETSASTAYLQINNLKNEDTATYFCARDYGDYGMDYWGQGTSVTVSS

SEQ ID NO: 1023 - protein, 118 aa, Artificial Sequence
  source: /note="Description of Artificial Sequence: Synthetic heavy chain variable domain"
EVQLQESGTVLARPGASVKMSCKASGYTFTSYWMHWVKQRPGQGLEWIGAIYPGNSETGYNQNFKGKAKLTAVTSASTAYMDLSSLTNEDSAVYYCTRENWDPGFAFWGQGTLITVSA

SEQ ID NO: 1024 - protein, 118 aa, Artificial Sequence
  source: /note="Description of Artificial Sequence: Synthetic heavy chain variable domain"
QVQLVQSGAEVKKPGASVKVSCKASGYTFTSYWMHWVRQAPGQGLEWMGAIYPGNSETGYAQKFQGRVTMTRDTSTSTVYMELSSLRSEDTAVYYCARENWDPGFAFWGQGTLVTVSS

SEQ ID NO: 1025 - protein, 448 aa, Artificial Sequence
  source: /note="Description of Artificial Sequence: Synthetic heavy chain variable domain"
QVQLVQSGAEVKKPGASVKMSCKASGYTFTSYWMHWVRQAPGQGLEWIGAIYPGNSETGYAQKFQGRATLTADTSTSTAYMELSSLRSEDTAVYYCTRENWDPGFAFWGQGTLITVSSASTKGPSVFPLAPSSKSTSGGTAALGCLVKDYFPEPVTVSWNSGALTSGVHTFPAVLQSSGLYSLSSVVTVPSSSLGTQTYICNVNHKPSNTKVDKKVEPKSCDKTHTCPPCPAPELLGGPSVFLFPPKPKDTLMISRTPEVTCVVVDVSHEDPEVKFNWYVDGVEVHNAKTKPREEQYNSTYRVVSVLTVLHQDWLNGKEYKCKVSNKALPAPIEKTISKAKGQPREPQVYTLPPSREEMTKNQVSLTCLVKGFYPSDIAVEWESNGQPENNYKTTPPVLDSDGSFFLYSKLTVDKSRWQQGNVFSCSVMHEALHNHYTQKSLSLSPGK

SEQ ID NO: 1026 - protein, 118 aa, Artificial Sequence
  source: /note="Description of Artificial Sequence: Synthetic heavy chain variable domain"
QVQLVQSGAEVKKPGASVKMSCKASGYTFTSYWMHWVRQAPGQGLEWIGAIYPGNSETGYAQKFQGRATLTADTSTSTAYMELSSLRSEDTAVYYCTRENWDPGFAFWGQGTLVTVSS

SEQ ID NO: 1027 - protein, 118 aa, Artificial Sequence
  source: /note="Description of Artificial Sequence: Synthetic heavy chain variable domain"
QVQLVQSGAEVKKPGASVKMSCKASGYTFTSYWMHWVRQAPGQGLEWIGAIYPGNSETGYAQKFQGRATLTADTSTSTAYMELSSLRSEDTAVYYCTRENWDPGFAFWGQGTLITVSS

SEQ ID NO: 1028 - protein, 447 aa, Artificial Sequence
  source: /note="Description of Artificial Sequence: Synthetic heavy chain variable domain"
QVQLVQSGAEVKKPGASVKMSCKASGYTFTSYWMHWVRQAPGQGLEWIGAIYPGNSETGYAQKFQGRATLTADTSTSTAYMELSSLRSEDTAVYYCTRENWDPGFAFWGQGTLITVSSASTKGPSVFPLAPSSKSTSGGTAALGCLVKDYFPEPVTVSWNSGALTSGVHTFPAVLQSSGLYSLSSVVTVPSSSLGTQTYICNVNHKPSNTKVDKKVEPKSCDKTHTCPPCPAPELLGGPSVFLFPPKPKDTLMISRTPEVTCVVVDVSHEDPEVKFNWYVDGVEVHNAKTKPREEQYNSTYRVVSVLTVLHQDWLNGKEYKCKVSNKALPAPIEKTISKAKGQPREPQVYTLPPSREEMTKNQVSLTCLVKGFYPSDIAVEWESNGQPENNYKTTPPVLDSDGSFFLYSKLTVDKSRWQQGNVFSCSVMHEALHNHYTQKSLSLSPG

SEQ ID NO: 1029 - protein, 121 aa, Artificial Sequence
  source: /note="Description of Artificial Sequence: Synthetic heavy chain variable domain"
QVQLVESGGGVVQPGRSLRLSCAASGFTFSNYGMHWVRQAPGKGLEWVAVILYDGSNKYYPDSVKGRFTISRDNSKNTLYLQMNSLRAEDTAVYYCARGGSSWYPDSFDIWGQGTMVTVSS

SEQ ID NO: 1030 - protein, 121 aa, Artificial Sequence
  source: /note="Description of Artificial Sequence: Synthetic heavy chain variable domain"
QVQLVESGGGVVQPGRSLRLSCAASGFTFSNYGLHWVRQAPGKGLEWVAVIRYDGSNKYYADSVKGRFTISRDNSKNTLYLQMSSLRAEDTAVYYCARGGSSWYPDGLDVWGQGTTVTVSS

SEQ ID NO: 1031 - protein, 120 aa, Artificial Sequence
  source: /note="Description of Artificial Sequence: Synthetic heavy chain variable domain"
EFQLQQSGPELVKPGASVKVSCKASGYAFTSYNMYWVKQSHGKRLEWIGYIDPYNGGSSYNQKFKGKATLTVDKSSSTAYMHLNNLTSEDSAVYYCARGYNNYKAWFAYWGQGTLVTVSA

SEQ ID NO: 1032 - protein, 120 aa, Artificial Sequence
  source: /note="Description of Artificial Sequence: Synthetic heavy chain variable domain"
EIQLQQSGPELVKPGASVKVSCKASGYAFTSYNMYWVKQSHGKSLEWIGYIDPYNGGTSYNQKFKGKATLTVDKSSSTAYMHLNSLTSEDSAVYYCARGYGNYKAWFAYWGQGTLVTVSA

SEQ ID NO: 1033 - protein, 126 aa, Artificial Sequence
  source: /note="Description of Artificial Sequence: Synthetic heavy chain variable domain"
EVQLQQSGPELVKPGASVKVSCKASGYAFASYNMNWVKQSHGKSLDWIGYIDPYNGGSSYNLTFKGKATLTVDKSSTTAYMHLNSLTSEDSAVYYCARGYGNYKAWFAYWGQGTLVTVSAASTKGP

SEQ ID NO: 1034 - protein, 126 aa, Artificial Sequence
  source: /note="Description of Artificial Sequence: Synthetic heavy chain variable domain"
QIQLQQSGPELVKPGASVKVSCKASGYAFASYNMNWVKQSHGKSLDWIGYIDPYNGGSSYNLTFKGKATLTVDKSSTTAYMHLNSLTSEDSAVYYCARGYGNYKAWFAYWGQGTLVTVSAASTKGP

SEQ ID NO: 1035 - protein, 120 aa, Artificial Sequence
  source: /note="Description of Artificial Sequence: Synthetic heavy chain variable domain"
QIQLVQSGPELKKPGETVKVTCKTSGYTFTNYGVNWIKQTPGEGLQWMGWINPNTGEPTFDDDFKGRFAFSLESSASTAFLQISNLKNEDMGTYFCSRSRGKNEAWFAYWGQGTLVTVSE

SEQ ID NO: 1036 - protein, 120 aa, Artificial Sequence
  source: /note="Description of Artificial Sequence: Synthetic heavy chain variable domain"
QVQLQQSGPELKKPGETVKVTCKTSGYTFTNYGVNWIKQTPGEGLQWMGWINPNTGEPTFDDDFKGRFAFSLESSASTAFLQISNLKNEDMGTYFCSRSRGKNEAWFAYWGQGTLVTVSS

SEQ ID NO: 1037 - protein, 120 aa, Artificial Sequence
  source: /note="Description of Artificial Sequence: Synthetic heavy chain variable domain"
QVQLQQSGSELKKPGASVKVSCKASGYTFTNYGVNWIKQAPGQGLQWMGWINPNTGEPTFDDDFKGRFAFSLDTSVSTAYLQISSLKADDTAVYFCSRSRGKNEAWFAYWGQGTLVTVSS

SEQ ID NO: 1038 - protein, 120 aa, Artificial Sequence; identical to SEQ ID NO: 1036
  source: /note="Description of Artificial Sequence: Synthetic heavy chain variable domain"

SEQ ID NO: 1039 - protein, 120 aa, Artificial Sequence
  source: /note="Description of Artificial Sequence: Synthetic heavy chain variable domain"
QVQLQQSGPELKKPGETVKVTCKTSGYTFTNYGVNWIKQTPGEGLQWMGWINPNTGEPTFDDDFTGRFAFSLESSASTAFLQISNLKNEDMGTYFCSRSRGKNEAWFAYWGQGTLVTVSS

SEQ ID NO: 1040 - protein, 120 aa, Artificial Sequence
  source: /note="Description of Artificial Sequence: Synthetic heavy chain variable domain"
QVQLQQSGSELKKPGASVKVSCKASGYTFTNYGVNWIKQAPGQGLQWMGWINPNTGEPTFDDDFTGRFAFSLDTSVSTAYLQISSLKADDTAVYFCSRSRGKNEAWFAYWGQGSLVTVSS

SEQ ID NO: 1041 - protein, 120 aa, Artificial Sequence
  source: /note="Description of Artificial Sequence: Synthetic heavy chain variable domain"
QVQLVQSGSELKKPGASVKVSCKASGYTFTSYAMNWVRQAPGQGLEWMGWINTNTGNPTYAQGFTGRFVFSLDTSVSTAYLQISSLKADDTAVYYCAREDSNGYKIFDYWGQGSLVTVSS

SEQ ID NO: 1042 - protein, 113 aa, Artificial Sequence
  source: /note="Description of Artificial Sequence: Synthetic heavy chain variable domain"
QVQLQQPGVELVRPGASVKLSCKASGYTFTTYWMNWVRQRPGQGLDWIGMIDPSDSETHYNQMFKDKATLTVDKSSSTAYIQLNSLTSEDSAVYYCSRSLAFWGQGTLVTVSA

SEQ ID NO: 1043 - protein, 113 aa, Artificial Sequence
  source: /note="Description of Artificial Sequence: Synthetic heavy chain variable domain"
EVQLVQSGAEVKKPGASVKVSCKASGYTFTTYWMNWVRQAPGQGLEWIGMIDPSDSETHYNQMFKDRATLTVDTSTSTAYLELSSLRSEDTAVYYCSRSLAFWGQGTLVTVSS

SEQ ID NO: 1044 - protein, 113 aa, Artificial Sequence
  source: /note="Description of Artificial Sequence: Synthetic heavy chain variable domain"
EVQLVQSGAEVKKPGASVKVSCKASGYTFTTYYMNWVRQAPGQGLEWIGMIDPSDSETHYNQKFQGRATLTVDTSTSTAYLELSSLRSEDTAVYYCSRSLAFWGQGTLVTVSS

SEQ ID NO: 1045 - protein, 113 aa, Artificial Sequence
  source: /note="Description of Artificial Sequence: Synthetic heavy chain variable domain"
EVQLVQSGAEVKKPGASVKVSCKASGYTFTTYWMNWVRQAPGQGLEWIGMIDPSDSETHYNQMFKDRATLTVDKSTSTAYLELSSLRSEDTAVYYCSRSLAFWGQGTLVTVSS

SEQ ID NO: 1046 - protein, 113 aa, Artificial Sequence
  source: /note="Description of Artificial Sequence: Synthetic heavy chain variable domain"
EVQLVQSGAEVKKPGASVKVSCKASGYTFTTYWMNWVRQAPGQGLEWIGMIDPSDSETHYNQMFKDRATITVDTSTSTAYLELSSLRSEDTAVYYCSRSLAFWGQGTLVTVSS

SEQ ID NO: 1047 - protein, 113 aa, Artificial Sequence
  source: /note="Description of Artificial Sequence: Synthetic heavy chain variable domain"
EVQLVQSGAEVKKPGASVKVSCKASGYTFTTYWMNWVRQAPGQGLEWIGMIDPSDSETHYNQMFKDRVTLTVDTSTSTAYLELSSLRSEDTAVYYCSRSLAFWGQGTLVTVSS

SEQ ID NO: 1048 - protein, 117 aa, Artificial Sequence
  source: /note="Description of Artificial Sequence: Synthetic heavy chain variable domain"
EVQLVESGGGLVQPGGSLRLSCAASGYTFSSYWIEWVRQAPGKGLEWVGEILPGGGDTNYNEIFKGRFTISADTSKNTAYLQMNSLRAEDTAVYYCTRRVPIRLDYWGQGTLVTVSS

SEQ ID NO: 1049 - protein, 119 aa, Artificial Sequence
  source: /note="Description of Artificial Sequence: Synthetic heavy chain variable domain"
EVQLVQSGAEVKKPGASVKVSCKASGYTFTNYYIHWVRQAPGQGLEWIGWIYPGDGNTKYNEKFKGRATLTADTSTSTAYLELSSLRSEDTAVYYCARDSYSNYYFDYWGQGTLVTVSS

SEQ ID NO: 1050 - protein, 119 aa, Artificial Sequence
  source: /note="Description of Artificial Sequence: Synthetic heavy chain variable domain"
EVQLVQSGAEVKKPGASVKVSCKASGFTFTSYYIHWVRQAPGQGLEWIGWIYPENDNTKYNEKFKDRVTITADTSTSTAYLELSSLRSEDTAVYYCARDGYSRYYFDYWGQGTLVTVSS

SEQ ID NO: 1051 - protein, 122 aa, Artificial Sequence
  source: /note="Description of Artificial Sequence: Synthetic heavy chain variable domain"
EVQLVESGGGLVQPGGSLRLSCAASGYSFTGYTMNWVRQAPGKDLEWVALINPYKGVSTYNQKFKDRFTISVDKSKNTAYLQMNSLRAEDTAVYYCARSGYYGDSDWYFDVWGQGTLVTVSS

SEQ ID NO: 1052 - protein, 113 aa, Artificial Sequence
  source: /note="Description of Artificial Sequence: Synthetic heavy chain variable domain"
QVQLQQPGAELVRPGASVKLSCKASGYTFTSYWMNWVKQRPGQGLEWIGMVDPSDSETHYNQMFKDKATLTVDKSSSTAYMQLSSLTSEDSAVYYCARAMGYWGQGTSVTVSS

SEQ ID NO: 1053 - protein, 121 aa, Artificial Sequence
  source: /note="Description of Artificial Sequence: Synthetic heavy chain variable domain"
QVQLQQWGAGLLKPSETLSLTCAVYGGSFSGYYWSWIRQPPGKGLEWIGEINHSGSTNYNPSLKSRVTISVDTSKNQFSLKLSSVTAADTAVYYCARGRMAWGASVNFDYWGQGTLVTVSS

SEQ ID NO: 1054 - protein, 121 aa, Artificial Sequence
  source: /note="Description of Artificial Sequence: Synthetic heavy chain variable domain"
QVQLQQWGAGLLKPSETLSLTCAVYGGSFSGYYWSWIRQPPGKGLEWIGEINHSGSTNYNPSLKSRVTISVDTSKNQFSLKLSSVTAADTAVYYCARAGRAWGASVNFDYWGQGTLVTVSS

SEQ ID NO: 1055 - protein, 121 aa, Artificial Sequence
  source: /note="Description of Artificial Sequence: Synthetic heavy chain variable domain"
QVQLQQWGAGLLKPSETLSLTCAVYGGSFSGYYWSWIRQPPGKGLEWIGEINHSGSTNYNPSLKSRVTISVDTSKNQFSLKLSSVTAADTAVYYCARRGRAWGASVNFDYWGQGTLVTVSS

SEQ ID NO: 1056 - protein, 120 aa, Artificial Sequence
  source: /note="Description of Artificial Sequence: Synthetic heavy chain variable domain"
QVQLQQWGAGLLKPSETLSLTCAVYGGSFSGYYWSWIRQPPGKGLEWIGEINHSGSTNYNPSLKSRVTISVDTSKNQFSLKLSSVTAADTAVYYCARARTAWGSSIFDYWGQGTLVTVSS

SEQ ID NO: 1057 - protein, 120 aa, Artificial Sequence
  source: /note="Description of Artificial Sequence: Synthetic heavy chain variable domain"
QVQLQQWGAGLLKPSETLSLTCAVYGGSFSGYYWSWIRQPPGKGLEWIGEINHSGSTNYNPSLKSRVTISVDTSKNQFSLKLSSVTAADTAVYYCARARRAWGSSIFDYWGQGTLVTVSS

SEQ ID NO: 1058 - protein, 120 aa, Artificial Sequence
  source: /note="Description of Artificial Sequence: Synthetic heavy chain variable domain"
QVQLQQWGAGLLKPSETLSLTCAVYGGSFSGYYWSWIRQPPGKGLEWIGEINHSGSTNYNPSLKSRVTISVDTSKNQFSLKLSSVTAADTAVYYCARARTARGSSIFDYWGQGTLVTVSS

SEQ ID NO: 1059 - protein, 120 aa, Artificial Sequence
  source: /note="Description of Artificial Sequence: Synthetic heavy chain variable domain"
QVQLQQWGAGLLKPSETLSLTCAVYGGSFSGYYWSWIRQPPGKGLEWIGEINHSGSTNYNPSLKSRVTISVDTSKNQFSLKLSSVTAADTAVYYCARARRARGSSIFDYWGQGTLVTVSS

SEQ ID NO: 1060 - protein, 120 aa, Artificial Sequence
  source: /note="Description of Artificial Sequence: Synthetic heavy chain variable domain"
QVQLQQWGAGLLKPSETLSLTCAVYGGSFSGYYWSWIRQPPGKGLEWIGEINHSGSTNYNPSLKSRVTISVDTSKNQFSLKLSSVTAADTAVYYCARRATAWGSSIFDYWGQGTLVTVSS

SEQ ID NO: 1061 - protein, 120 aa, Artificial Sequence
  source: /note="Description of Artificial Sequence: Synthetic heavy chain variable domain"
QVQLQQWGAGLLKPSETLSLTCAVYGGSFSGYYWSWIRQPPGKGLEWIGEINHSGSTNYNPSLKSRVTISVDTSKNQFSLKLSSVTAADTAVYYCARRRTAWGSSIFDYWGQGTLVTVSS

SEQ ID NO: 1062 - protein, 120 aa, Artificial Sequence
  source: /note="Description of Artificial Sequence: Synthetic heavy chain variable domain"
QVQLQQWGAGLLKPSETLSLTCAVYGGSFSGYYWSWIRQPPGKGLEWIGEINHSGSTNYNPSLKSRVTISVDTSKNQFSLKLSSVTAADTAVYYCARRATARGSSIFDYWGQGTLVTVSS

SEQ ID NO: 1063 - protein, 120 aa, Artificial Sequence
  source: /note="Description of Artificial Sequence: Synthetic heavy chain variable domain"
QVQLQQWGAGLLKPSETLSLTCAVYGGSFSGYYWSWIRQPPGKGLEWIGEINHSGSTNYNPSLKSRVTISVDTSKNQFSLKLSSVTAADTAVYYCARRARARGSSIFDYWGQGTLVTVSS

SEQ ID NO: 1064 - protein, 121 aa, Artificial Sequence
  source: /note="Description of Artificial Sequence: Synthetic heavy chain variable domain"
QVQLQQWGAGLLKPSETLSLTCAVYGGSFSGYYWSWIRQPPGKGLEWIGEINHSGSTNYNPSLKSRVTISVDTSKNQFSLKLSSVTAADTAVYYCARGRRAWGASVNFDYWGQGTLVTVSS

SEQ ID NO: 1065 - protein, 120 aa, Artificial Sequence
  source: /note="Description of Artificial Sequence: Synthetic heavy chain variable domain"
QVQLQQWGAGLLKPSETLSLTCAVYGGSFSGYYWSWIRQPPGKGLEWIGEINHSGSTNYNPSLKSRVTISVDTSKNQFSLKLSSVTAADTAVYYCARRRTARGSSIFDYWGQGTLVTVSS

SEQ ID NO: 1066 - protein, 120 aa, Artificial Sequence
  source: /note="Description of Artificial Sequence: Synthetic heavy chain variable domain"
QVQLQQWGAGLLKPSETLSLTCAVYGGSFSGYYWSWIRQPPGKGLEWIGEINHSGSTNYNPSLKSRVTISVDTSKNQFSLKLSSVTAADTAVYYCARGARAWGSSIFDYWGQGTLVTVSS

SEQ ID NO: 1067 - protein, 120 aa, Artificial Sequence
  source: /note="Description of Artificial Sequence: Synthetic heavy chain variable domain"
QVQLQQWGAGLLKPSETLSLTCAVYGGSFSGYYWSWIRQPPGKGLEWIGEINHSGSTNYNPSLKSRVTISVDTSKNQFSLKLSSVTAADTAVYYCARRARAWGSSIFDYWGQGTLVTVSS

SEQ ID NO: 1068 - protein, 121 aa, Artificial Sequence
  source: /note="Description of Artificial Sequence: Synthetic heavy chain variable domain"
QVQLQQWGAGLLKPSETLSLTCAVYGGSFSGYYWSWIRQPPGKGLEWIGEINHSGSTNYNPSLKSRVTISVDTSKNQFSLKLSSVTAADTAVYYCARGRMARGASVNFDYWGQGTLVTVSS

SEQ ID NO: 1069 - protein, 121 aa, Artificial Sequence
  source: /note="Description of Artificial Sequence: Synthetic heavy chain variable domain"
QVQLQQWGAGLLKPSETLSLTCAVYGGSFSGYYWSWIRQPPGKGLEWIGEINHSGSTNYNPSLKSRVTISVDTSKNQFSLKLSSVTAADTAVYYCARGRRARGASVNFDYWGQGTLVTVSS

SEQ ID NO: 1070 - protein, 121 aa, Artificial Sequence
  source: /note="Description of Artificial Sequence: Synthetic heavy chain variable domain"
QVQLQQWGAGLLKPSETLSLTCAVYGGSFSGYYWSWIRQPPGKGLEWIGEINHSGSTNYNPSLKSRVTISVDTSKNQFSLKLSSVTAADTAVYYCARRGMAWGASVNFDYWGQGTLVTVSS

SEQ ID NO: 1071 - protein, 121 aa, Artificial Sequence
  source: /note="Description of Artificial Sequence: Synthetic heavy chain variable domain"
QVQLQQWGAGLLKPSETLSLTCAVYGGSFSGYYWSWIRQPPGKGLEWIGEINHSGSTNYNPSLKSRVTISVDTSKNQFSLKLSSVTAADTAVYYCARRRMAWGASVNFDYWGQGTLVTVSS

SEQ ID NO: 1072 - protein, 121 aa, Artificial Sequence
  source: /note="Description of Artificial Sequence: Synthetic heavy chain variable domain"
QVQLQQWGAGLLKPSETLSLTCAVYGGSFSGYYWSWIRQPPGKGLEWIGEINHSGSTNYNPSLKSRVTISVDTSKNQFSLKLSSVTAADTAVYYCARRGMARGASVNFDYWGQGTLVTVSS

SEQ ID NO: 1073 - protein, 121 aa, Artificial Sequence
  source: /note="Description of Artificial Sequence: Synthetic heavy chain variable domain"
QVQLQQWGAGLLKPSETLSLTCAVYGGSFSGYYWSWIRQPPGKGLEWIGEINHSGSTNYNPSLKSRVTISVDTSKNQFSLKLSSVTAADTAVYYCARRGRARGASVNFDYWGQGTLVTVSS

SEQ ID NO: 1074 - protein, 121 aa, Artificial Sequence
  source: /note="Description of Artificial Sequence: Synthetic heavy chain variable domain"
QVQLQQWGAGLLKPSETLSLTCAVYGGSFSGYYWSWIRQPPGKGLEWIGEINHSGSTNYNPSLKSRVTISVDTSKNQFSLKLSSVTAADTAVYYCARRRGARGASVNFDYWGQGTLVTVSS

SEQ ID NO: 1075 - protein, 121 aa, Artificial Sequence
  source: /note="Description of Artificial Sequence: Synthetic heavy chain variable domain"
QVQLVESGGGVVQPGRSLRLSCSSSGFALTDYYMSWVRQAPGKGLEWLGFIANKANGHTTDYSPSVKGRFTISRDNSKNTLFLQMDSLRPEDTGVYFCARDMGIRWNFDVWGQGTPVTVSS

SEQ ID NO: 1076 - protein, 112 aa, Artificial Sequence
  source: /note="Description of Artificial Sequence: Synthetic heavy chain variable domain"
EVQLLESGGGLVQPGGSLRLSCAASGFTFSRYWMSWVRQAPGKGLEWVSEINPDSSTIKYTPSLKARFTISRDNSKNTLYLQMNSLRAEDTAVYYCAGPAYWGQGTLVTVSS

SEQ ID NO: 1077 - protein, 112 aa, Artificial Sequence
  source: /note="Description of Artificial Sequence: Synthetic heavy chain variable domain"
EVQLLESGGGLVQPGGSLRLSCAASGFTFSRYWMSWVRQAPGKGLEWVSEINPDSSTIQYTPSLKARFTISRDNSKNTLYLQMNSLRAEDTAVYYCAGPAYWGQGTLVTVSS

SEQ ID NO: 1078 - protein, 112 aa, Artificial Sequence
  source: /note="Description of Artificial Sequence: Synthetic heavy chain variable domain"
EVQLLESGGGLVQPGGSLRLSCAASGFTFSRYWMSWVRQAPGKGLEWVSEINPDSSTINYNPSLKARFTISRDNSKNTLYLQMNSLRAEDTAVYYCAGPAYWGQGTLVTVSS

SEQ ID NO: 1079 - protein, 112 aa, Artificial Sequence
  source: /note="Description of Artificial Sequence: Synthetic heavy chain variable domain"
EVQLLESGGGLVQPGGSLRLSCAASGFDFSRYWMSWVRQAPGKGLEWVSEINPDSSTINYTPSLKARFTISRDNSKNTLYLQMNSLRAEDTAVYYCAGPAYWGQGTLVTVSS

SEQ ID NO: 1080 - protein, 112 aa, Artificial Sequence
  source: /note="Description of Artificial Sequence: Synthetic heavy chain variable domain"
EVQLLESGGGLVQPGGSLRLSCAASGFDFSRYWMSWVRQAPGKGLEWVSEINPDSSTIKYTPSLKARFTISRDNSKNTLYLQMNSLRAEDTAVYYCAGPAYWGQGTLVTVSS

SEQ ID NO: 1081 - protein, 112 aa, Artificial Sequence
  source: /note="Description of Artificial Sequence: Synthetic heavy chain variable domain"
EVQLLESGGGLVQPGGSLRLSCAASGFDFSRYWMSWVRQAPGKGLEWVSEINPDSSTIQYTPSLKARFTISRDNSKNTLYLQMNSLRAEDTAVYYCAGPAYWGQGTLVTVSS

SEQ ID NO: 1082 - protein, 112 aa, Artificial Sequence
  source: /note="Description of Artificial Sequence: Synthetic heavy chain variable domain"
EVQLLESGGGLVQPGGSLRLSCAASGFDFSRYWMSWVRQAPGKGLEWVSEINPDSSTINYNPSLKARFTISRDNSKNTLYLQMNSLRAEDTAVYYCAGPAYWGQGTLVTVSS

SEQ ID NO: 1083 - protein, 448 aa, Artificial Sequence
  source: /note="Description of Artificial Sequence: Synthetic heavy chain variable domain"
QVQLVQSGAEVKKPGASVKVSCKASGYTFTEYTLHWVRQAPGQRLEWMGGINPNNGDTIYNQKFKGRVTITRDTSASTAYMELSSLRSEDTAVYYCARRAITVYAMDYWGQGTLVTVSSASTKGPSVFPLAPSSKSTSGGTAALGCLVKDYFPEPVTVSWNSGALTSGVHTFPAVLQSSGLYSLSSVVTVPSSSLGTQTYICNVNHKPSNTKVDKKVEPKSSDKTHTCPPCPAPELLGGPSVFLFPPKPKDTLMISRTPEVTCVVVDVSHEDPEVKFNWYVDGVEVHNAKTKPREEQYNSTYRVVSVLTVLHQDWLNGKEYKCKVSNKALPAPIEKTISKAKGQPREPQVYTLPPSRDELTKNQVSLTCLVKGFYPSDIAVEWESNGQPENNYKTTPPVLDSDGSFFLYSKLTVDKSRWQQGNVFSCSVMHEALHNHYTQKSLSLSPG

SEQ ID NO: 1084 - protein, 451 aa, Artificial Sequence
  source: /note="Description of Artificial Sequence: Synthetic heavy chain variable domain"
QVQLVQSGAEVKKPGASVKVSCKASGYTFTSYWMNWVRQAPGQRLEWMGMIHPSDSEIRLNQKFKDRVTITRDTSASTAYMELSSLRSEDTAVYYCARIDSYYGYLFYFDYWGQGTTVTVSSASTKGPSVFPLAPSSKSTSGGTAALGCLVKDYFPEPVTVSWNSGALTSGVHTFPAVLQSSGLYSLSSVVTVPSSSLGTQTYICNVNHKPSNTKVDKKVEPKSCDKTHTCPPCPAPELLGGPSVFLFPPKPKDTLMISRTPEVTCVVVDVSHEDPEVKFNWYVDGVEVHNAKTKPREEQYNSTYRVVSVLTVLHQDWLNGKEYKCKVSNKALPAPIEKTISKAKGQPREPQVYTLPPSRDELTKNQVSLTCLVKGFYPSDIAVEWESNGQPENNYKTTPPVLDSDGSFFLYSKLTVDKSRWQQGNVFSCSVMHEALHNHYTQKSLSLSPG

SEQ ID NO: 1085 - protein, 455 aa, Artificial Sequence
  source: /note="Description of Artificial Sequence: Synthetic heavy chain variable domain"
QVQLVQSGAEVKKPGASVKVSCKASGYTFTNYLIEWVRQAPGQGLEWMGLINPGSGGTNYNEKFKGRVTMTTDTSTSTAYMELRSLRSDDTAVYYCARRSPLGSWIYYAYDGVAYWGQGTLVTVSSASTKGPSVFPLAPSSKSTSGGTAALGCLVKDYFPEPVTVSWNSGALTSGVHTFPAVLQSSGLYSLSSVVTVPSSSLGTQTYICNVNHKPSNTKVDKKVEPKSCDKTHTCPPCPAPELLGGPSVFLFPPKPKDTLMISRTPEVTCVVVDVSHEDPEVKFNWYVDGVEVHNAKTKPREEQYNSTYRVVSVLTVLHQDWLNGKEYKCKVSNKALPAPIEKTISKAKGQPREPQVYTLPPSRDELTKNQVSLTCLVKGFYPSDIAVEWESNGQPENNYKTTPPVLDSDGSFFLYSKLTVDKSRWQQGNVFSCSVMHEALHNHYTQKSLSLSPG

SEQ ID NO: 1086 - protein, 441 aa, Artificial Sequence
  source: /note="Description of Artificial Sequence: Synthetic heavy chain variable domain"
EVQLLESGGGLVQPGGSLRLSCAASGFTFSRYWMSWVRQAPGKGLEWVSEINPDSSTINYTPSLKARFTISRDNSKNTLYLQMNSLRAEDTAVYYCTGPAYWGQGTLVTVSSASTKGPSVFPLAPSSKSTSGGTAALGCLVKDYFPEPVTVSWNSGALTSGVHTFPAVLQSSGLYSLSSVVTVPSSSLGTQTYICNVNHKPSNTKVDKKVEPKSCDKTHTCPPCPAPELLGGPSVFLFPPKPKDTLMISRTPEVTCVVVDVSHEDPEVKFNWYVDGVEVHNAKTKPREEQYNSTYRVVSVLTVLHQDWLNGKEYKCKVSNKALPAPIEKTISKAKGQPREPQVYTLPPSRDELTKNQVSLTCLVKGFYPSDIAVEWESNGQPENNYKTTPPVLDSDGSFFLYSKLTVDKSRWQQGNVFSCSVMHEALHNHYTQKSLSLSPG

SEQ ID NO: 1087 - protein, 451 aa, Artificial Sequence
  source: /note="Description of Artificial Sequence: Synthetic heavy chain variable domain"
QVQLVQSGAEVKKPGASVKVSCKASGYTFTSYWMNWVRQAPGQRLEWMGMIHPSDSEIRLNQKFKDRVTITRDTSASTAYMELSSLRSEDTAVYYCARIDSYYGYLFYFDYWGQGTTVTVSSASTKGPSVFPLAPSSKSTSGGTAALGCLVKDYFPEPVTVSWNSGALTSGVHTFPAVLQSSGLYSLSSVVTVPSSSLGTQTYICNVNHKPSNTKVDKKVEPKSSDKTHTCPPCPAPELLGGPSVFLFPPKPKDTLMISRTPEVTCVVVDVSHEDPEVKFNWYVDGVEVHNAKTKPREEQYNSTYRVVSVLTVLHQDWLNGKEYKCKVSNKALPAPIEKTISKAKGQPREPQVYTLPPSRDELTKNQVSLTCLVKGFYPSDIAVEWESNGQPENNYKTTPPVLDSDGSFFLYSKLTVDKSRWQQGNVFSCSVMHEALHNHYTQKSLSLSPG

SEQ ID NO: 1088 - protein, 451 aa, Artificial Sequence
  source: /note="Description of Artificial Sequence: Synthetic heavy chain variable domain"
QVQLVQSGAEVKKPGASVKVSCKASGYTFTSYWMNWVRQATGQGLEWMGMIHPSDSEIRLNQKFKDRVTMTRNTSISTAYMELSSLRSEDTAVYYCARIDSYYGYLFYFDYWGQGTTVTVSSASTKGPSVFPLAPSSKSTSGGTAALGCLVKDYFPEPVTVSWNSGALTSGVHTFPAVLQSSGLYSLSSVVTVPSSSLGTQTYICNVNHKPSNTKVDKKVEPKSCDKTHTCPPCPAPELLGGPSVFLFPPKPKDTLMISRTPEVTCVVVDVSHEDPEVKFNWYVDGVEVHNAKTKPREEQYNSTYRVVSVLTVLHQDWLNGKEYKCKVSNKALPAPIEKTISKAKGQPREPQVYTLPPSRDELTKNQVSLTCLVKGFYPSDIAVEWESNGQPENNYKTTPPVLDSDGSFFLYSKLTVDKSRWQQGNVFSCSVMHEALHNHYTQKSLSLSPG

SEQ ID NO: 1089 - protein, 451 aa, Artificial Sequence
  source: /note="Description of Artificial Sequence: Synthetic heavy chain variable domain"
QVQLVQSGAEVKKPGASVKVSCKASGYTFTSYWMNWVRQAPGQGLEWMGMIHPSDSEIRLNQKFKDRVTMTRDTSTSTVYMELSSLRSEDTAVYYCARIDSYYGYLFYFDYWGQGTTVTVSSASTKGPSVFPLAPSSKSTSGGTAALGCLVKDYFPEPVTVSWNSGALTSGVHTFPAVLQSSGLYSLSSVVTVPSSSLGTQTYICNVNHKPSNTKVDKKVEPKSCDKTHTCPPCPAPELLGGPSVFLFPPKPKDTLMISRTPEVTCVVVDVSHEDPEVKFNWYVDGVEVHNAKTKPREEQYNSTYRVVSVLTVLHQDWLNGKEYKCKVSNKALPAPIEKTISKAKGQPREPQVYTLPPSRDELTKNQVSLTCLVKGFYPSDIAVEWESNGQPENNYKTTPPVLDSDGSFFLYSKLTVDKSRWQQGNVFSCSVMHEALHNHYTQKSLSLSPG

SEQ ID NO: 1090 - protein, 451 aa, Artificial Sequence
  source: /note="Description of Artificial Sequence: Synthetic heavy chain variable domain"
QVQLVQSGAEVKKPGSSVKVSCKASGGTFSSYWMNWVRQAPGQGLEWMGMIHPSDSEIRLNQKFKDRVTITADESTSTAYMELSSLRSEDTAVYYCARIDSYYGYLFYFDYWGQGTTVTVSSASTKGPSVFPLAPSSKSTSGGTAALGCLVKDYFPEPVTVSWNSGALTSGVHTFPAVLQSSGLYSLSSVVTVPSSSLGTQTYICNVNHKPSNTKVDKKVEPKSCDKTHTCPPCPAPELLGGPSVFLFPPKPKDTLMISRTPEVTCVVVDVSHEDPEVKFNWYVDGVEVHNAKTKPREEQYNSTYRVVSVLTVLHQDWLNGKEYKCKVSNKALPAPIEKTISKAKGQPREPQVYTLPPSRDELTKNQVSLTCLVKGFYPSDIAVEWESNGQPENNYKTTPPVLDSDGSFFLYSKLTVDKSRWQQGNVFSCSVMHEALHNHYTQKSLSLSPG

SEQ ID NO: 1091 - protein, 447 aa, Artificial Sequence
  source: /note="Description of Artificial Sequence: Synthetic heavy chain variable domain"
QVQLVQSGAEVKKPGASVKVSCKASGYTFTSYWMNWVRQAPGQRLEWMGMIHPSDSEIRLNQKFKDRVTITRDTSASTAYMELSSLRSEDTAVYYCARIDSYYGYLFYFDYWGQGTTVTVSSASTKGPSVFPLAPCSRSTSESTAALGCLVKDYFPEPVTVSWNSGALTSGVHTFPAVLQSSGLYSLSSVVTVPSSNFGTQTYTCNVDHKPSNTKVDKTVERKCCVECPPCPAPPVAGPSVFLFPPKPKDTLMISRTPEVTCVVVDVSHEDPEVQFNWYVDGVEVHNAKTKPREEQFNSTFRVVSVLTVVHQDWLNGKEYKCKVSNKGLPAPIEKTISKTKGQPREPQVYTLPPSREEMTKNQVSLTCLVKGFYPSDIAVEWESNGQPENNYKTTPPMLDSDGSFFLYSKLTVDKSRWQQGNVFSCSVMHEALHNHYTQKSLSLSPG

SEQ ID NO: 1092 - protein, 448 aa, Artificial Sequence
  source: /note="Description of Artificial Sequence: Synthetic heavy chain variable domain"
QVQLVQSGAEVKKPGASVKVSCKASGYTFTSYWMNWVRQAPGQRLEWMGMIHPSDSEIRLNQKFKDRVTITRDTSASTAYMELSSLRSEDTAVYYCARIDSYYGYLFYFDYWGQGTTVTVSSASTKGPSVFPLAPCSRSTSESTAALGCLVKDYFPEPVTVSWNSGALTSGVHTFPAVLQSSGLYSLSSVVTVPSSSLGTKTYTCNVDHKPSNTKVDKRVESKYGPPCPSCPAPEFLGGPSVFLFPPKPKDTLMISRTPEVTCVVVDVSQEDPEVQFNWYVDGVEVHNAKTKPREEQFNSTYRVVSVLTVLHQDWLNGKEYKCKVSNKGLPSSIEKTISKAKGQPREPQVYTLPPSQEEMTKNQVSLTCLVKGFYPSDIAVEWESNGQPENNYKTTPPVLDSDGSFFLYSKLTVDKSRWQEGNVFSCSVMHEALHNHYTQKSLSLSLG

SEQ ID NO: 1093 - protein, 448 aa, Artificial Sequence
  source: /note="Description of Artificial Sequence: Synthetic heavy chain variable domain"
QVQLVQSGAEVKKPGASVKVSCKASGYTFTSYWMNWVRQAPGQRLEWMGMIHPSDSEIRLNQKFKDRVTITRDTSASTAYMELSSLRSEDTAVYYCARIDSYYGYLFYFDYWGQGTTVTVSSASTKGPSVFPLAPCSRSTSESTAALGCLVKDYFPEPVTVSWNSGALTSGVHTFPAVLQSSGLYSLSSVVTVPSSSLGTKTYTCNVDHKPSNTKVDKRVESKYGPPCPPCPAPEFLGGPSVFLFPPKPKDTLMISRTPEVTCVVVDVSQEDPEVQFNWYVDGVEVHNAKTKPREEQFNSTYRVVSVLTVLHQDWLNGKEYKCKVSNKGLPSSIEKTISKAKGQPREPQVYTLPPSQEEMTKNQVSLTCLVKGFYPSDIAVEWESNGQPENNYKTTPPVLDSDGSFFLYSRLTVDKSRWQEGNVFSCSVMHEALHNHYTQKSLSLSLG

SEQ ID NO: 1094 - protein, 448 aa, Artificial Sequence
  source: /note="Description of Artificial Sequence: Synthetic heavy chain variable domain"
QVQLVQSGAEVKKPGASVKVSCKASGYTFTSYWMNWVRQAPGQRLEWMGMIHPSDSEIRLNQKFKDRVTITRDTSASTAYMELSSLRSEDTAVYYCARIDSYYGYLFYFDYWGQGTTVTVSSASTKGPSVFPLAPCSRSTSESTAALGCLVKDYFPEPVTVSWNSGALTSGVHTFPAVLQSSGLYSLSSVVTVPSSSLGTKTYTCNVDHKPSNTKVDKRVESKYGPPCPPCPAPEFLGGPSVFLFPPKPKDTLMISRTPEVTCVVVDVSQEDPEVQFNWYVDGVEVHNAKTKPREEQFNSTYRVVSVLTVLHQDWLNGKEYKCKVSNKGLPSSIEKTISKAKGQPREPQVYTLPPSQEEMTKNQVSLTCLVEGFYPSDIAVEWESNGQPENNYKTTPPVLDSDGSFFLYSKLTVDKSRWQEGNVFSCSVMHEALHNHYTQKSLSLSLG

SEQ ID NO: 1095 - protein, 448 aa, Artificial Sequence
  source: /note="Description of Artificial Sequence: Synthetic heavy chain variable domain"
QVQLVQSGAEVKKPGASVKVSCKASGYTFTSYWMNWVRQAPGQRLEWMGMIHPSDSEIRLNQKFKDRVTITRDTSASTAYMELSSLRSEDTAVYYCARIDSYYGYLFYFDYWGQGTTVTVSSASTKGPSVFPLAPCSRSTSESTAALGCLVKDYFPEPVTVSWNSGALTSGVHTFPAVLQSSGLYSLSSVVTVPSSSLGTKTYTCNVDHKPSNTKVDKRVESKYGPPCPSCPAPEFLGGPSVFLFPPKPKDTLMISRTPEVTCVVVDVSQEDPEVQFNWYVDGVEVHNAKTKPREEQFNSTYRVVSVLTVLHQDWLNGKEYKCKVSNKGLPSSIEKTISKAKGQPREPQVYTLPPSQEEMTKNQVSLTCLVEGFYPSDIAVEWESNGQPENNYKTTPPVLDSDGSFFLYSRLTVDKSRWQEGNVFSCSVMHEALHNHYTQKSLSLSLG

SEQ ID NO: 1096 - protein, 448 aa, Artificial Sequence
  source: /note="Description of Artificial Sequence: Synthetic heavy chain variable domain"
QVQLVQSGAEVKKPGASVKVSCKASGYTFTSYWMNWVRQAPGQRLEWMGMIHPSDSEIRLNQKFKDRVTITRDTSASTAYMELSSLRSEDTAVYYCARIDSYYGYLFYFDYWGQGTTVTVSSASTKGPSVFPLAPCSRSTSESTAALGCLVKDYFPEPVTVSWNSGALTSGVHTFPAVLQSSGLYSLSSVVTVPSSSLGTKTYTCNVDHKPSNTKVDKRVESKYGPPCPPCPAPEFLGGPSVFLFPPKPKDTLMISRTPEVTCVVVDVSQEDPEVQFNWYVDGVEVHNAKTKPREEQFNSTYRVVSVLTVLHQDWLNGKEYKCKVSNKGLPSSIEKTISKAKGQPREPQVYTLPPSQEEMTKNQVSLTCLVEGFYPSDIAVEWESNGQPENNYKTTPPVLDSDGSFFLYSRLTVDKSRWQEGNVFSCSVMHEALHNHYTQKSLSLSLG

SEQ ID NO: 1097 - protein, 448 aa, Artificial Sequence
  source: /note="Description of Artificial Sequence: Synthetic heavy chain variable domain"
QVQLVQSGAEVKKPGASVKVSCKASGYTFTSYWMNWVRQAPGQRLEWMGMIHPSDSEIRLNQKFKDRVTITRDTSASTAYMELSSLRSEDTAVYYCARIDSYYGYLFYFDYWGQGTTVTVSSASTKGPSVFPLAPSSRSTSESTAALGCLVKDYFPEPVTVSWNSGALTSGVHTFPAVLQSSGLYSLSSVVTVPSSSLGTKTYTCNVDHKPSNTKVDKRVESKYGPPCPPCPAPEFLGGPSVFLFPPKPKDTLMISRTPEVTCVVVDVSQEDPEVQFNWYVDGVEVHNAKTKPREEQFNSTYRVVSVLTVLHQDWLNGKEYKCKVSNKGLPSSIEKTISKAKGQPREPQVYTLPPSQEEMTKNQVSLTCLVKGFYPSDIAVEWESNGQPENNYKTTPPVLDSDGSFFLYSRLTVDKSRWQEGNVFSCSVMHEALHNHYTQKSLSLSLG

SEQ ID NO: 1098 - protein, 448 aa, Artificial Sequence
  source: /note="Description of Artificial Sequence: Synthetic heavy chain variable domain"
QVQLVQSGAEVKKPGASVKVSCKASGYTFTSYWMNWVRQAPGQRLEWMGMIHPSDSEIRLNQKFKDRVTITRDTSASTAYMELSSLRSEDTAVYYCARIDSYYGYLFYFDYWGQGTTVTVSSASTKGPSVFPLAPSSRSTSESTAALGCLVKDYFPEPVTVSWNSGALTSGVHTFPAVLQSSGLYSLSSVVTVPSSSLGTKTYTCNVDHKPSNTKVDKRVESKYGPPCPSCPAPEFLGGPSVFLFPPKPKDTLMISRTPEVTCVVVDVSQEDPEVQFNWYVDGVEVHNAKTKPREEQFNSTYRVVSVLTVLHQDWLNGKEYKCKVSNKGLPSSIEKTISKAKGQPREPQVYTLPPSQEEMTKNQVSLTCLVEGFYPSDIAVEWESNGQPENNYKTTPPVLDSDGSFFLYSRLTVDKSRWQEGNVFSCSVMHEALHNHYTQKSLSLSLG

SEQ ID NO: 1099 - protein, 448 aa, Artificial Sequence
  source: /note="Description of Artificial Sequence: Synthetic heavy chain variable domain"
QVQLVQSGAEVKKPGASVKVSCKASGYTFTSYWMNWVRQAPGQRLEWMGMIHPSDSEIRLNQKFKDRVTITRDTSASTAYMELSSLRSEDTAVYYCARIDSYYGYLFYFDYWGQGTTVTVSSASTKGPSVFPLAPSSRSTSESTAALGCLVKDYFPEPVTVSWNSGALTSGVHTFPAVLQSSGLYSLSSVVTVPSSSLGTKTYTCNVDHKPSNTKVDKRVESKYGPPCPPCPAPEFLGGPSVFLFPPKPKDTLMISRTPEVTCVVVDVSQEDPEVQFNWYVDGVEVHNAKTKPREEQFNSTYRVVSVLTVLHQDWLNGKEYKCKVSNKGLPSSIEKTISKAKGQPREPQVYTLPPSQEEMTKNQVSLTCLVEGFYPSDIAVEWESNGQPENNYKTTPPVLDSDGSFFLYSRLTVDKSRWQEGNVFSCSVMHEALHNHYTQKSLSLSLG

SEQ ID NO: 1100 - protein, 215 aa, Artificial Sequence
  source: /note="Description of Artificial Sequence: Synthetic heavy chain variable domain"
EIVLTQSPDFQSVTPKEKVTITCSVSSSISSSNLHWYQQKPDQSPKLWIYGTSNLASGVPSRFSGSGSGTDFTLTINSLEAEDAATYYCQQWSSYPHTFGGGTKVEIKRTVAAPSVFIFPPSDEQLKSGTASVVCLLNNFYPREAKVQWKVDNALQSGNSQESVTEQDSKDSTYSLSSTLTLSKADYEKHKVYACEVTHQGLSSPVTKSFNRGEC

SEQ ID NO: 1101 - protein, 441 aa, Artificial Sequence
  source: /note="Description of Artificial Sequence: Synthetic heavy chain variable domain"
EVQLLESGGGLVQPGGSLRLSCAASGFTFSRYWMSWVRQAPGKGLEWVSEINPDSSTIKYTPSLKARFTISRDNSKNTLYLQMNSLRAEDTAVYYCTGPAYWGQGTLVTVSSASTKGPSVFPLAPSSKSTSGGTAALGCLVKDYFPEPVTVSWNSGALTSGVHTFPAVLQSSGLYSLSSVVTVPSSSLGTQTYICNVNHKPSNTKVDKKVEPKSCDKTHTCPPCPAPELLGGPSVFLFPPKPKDTLMISRTPEVTCVVVDVSHEDPEVKFNWYVDGVEVHNAKTKPREEQYNSTYRVVSVLTVLHQDWLNGKEYKCKVSNKALPAPIEKTISKAKGQPREPQVYTLPPSRDELTKNQVSLTCLVKGFYPSDIAVEWESNGQPENNYKTTPPVLDSDGSFFLYSKLTVDKSRWQQGNVFSCSVMHEALHNHYTQKSLSLSPG

SEQ ID NO: 1102 - protein, 441 aa, Artificial Sequence
  source: /note="Description of Artificial Sequence: Synthetic heavy chain variable domain"
EVQLLESGGGLVQPGGSLRLSCAASGFTFSRYWMSWVRQAPGKGLEWVSEINPDSSTIQYTPSLKARFTISRDNSKNTLYLQMNSLRAEDTAVYYCTGPAYWGQGTLVTVSSASTKGPSVFPLAPSSKSTSGGTAALGCLVKDYFPEPVTVSWNSGALTSGVHTFPAVLQSSGLYSLSSVVTVPSSSLGTQTYICNVNHKPSNTKVDKKVEPKSCDKTHTCPPCPAPELLGGPSVFLFPPKPKDTLMISRTPEVTCVVVDVSHEDPEVKFNWYVDGVEVHNAKTKPREEQYNSTYRVVSVLTVLHQDWLNGKEYKCKVSNKALPAPIEKTISKAKGQPREPQVYTLPPSRDELTKNQVSLTCLVKGFYPSDIAVEWESNGQPENNYKTTPPVLDSDGSFFLYSKLTVDKSRWQQGNVFSCSVMHEALHNHYTQKSLSLSPG

SEQ ID NO: 1103 - protein, 441 aa, Artificial Sequence
  source: /note="Description of Artificial Sequence: Synthetic heavy chain variable domain"
EVQLLESGGGLVQPGGSLRLSCAASGFTFSRYWMSWVRQAPGKGLEWVSEINPDSSTINYNPSLKARFTISRDNSKNTLYLQMNSLRAEDTAVYYCTGPAYWGQGTLVTVSSASTKGPSVFPLAPSSKSTSGGTAALGCLVKDYFPEPVTVSWNSGALTSGVHTFPAVLQSSGLYSLSSVVTVPSSSLGTQTYICNVNHKPSNTKVDKKVEPKSCDKTHTCPPCPAPELLGGPSVFLFPPKPKDTLMISRTPEVTCVVVDVSHEDPEVKFNWYVDGVEVHNAKTKPREEQYNSTYRVVSVLTVLHQDWLNGKEYKCKVSNKALPAPIEKTISKAKGQPREPQVYTLPPSRDELTKNQVSLTCLVKGFYPSDIAVEWESNGQPENNYKTTPPVLDSDGSFFLYSKLTVDKSRWQQGNVFSCSVMHEALHNHYTQKSLSLSPG

SEQ ID NO: 1104 - protein, 441 aa, Artificial Sequence
  source: /note="Description of Artificial Sequence: Synthetic heavy chain variable domain"
EVQLLESGGGLVQPGGSLRLSCAASGFDFSRYWMSWVRQAPGKGLEWVSEINPDSSTINYTPSLKARFTISRDNSKNTLYLQMNSLRAEDTAVYYCTGPAYWGQGTLVTVSSASTKGPSVFPLAPSSKSTSGGTAALGCLVKDYFPEPVTVSWNSGALTSGVHTFPAVLQSSGLYSLSSVVTVPSSSLGTQTYICNVNHKPSNTKVDKKVEPKSCDKTHTCPPCPAPELLGGPSVFLFPPKPKDTLMISRTPEVTCVVVDVSHEDPEVKFNWYVDGVEVHNAKTKPREEQYNSTYRVVSVLTVLHQDWLNGKEYKCKVSNKALPAPIEKTISKAKGQPREPQVYTLPPSRDELTKNQVSLTCLVKGFYPSDIAVEWESNGQPENNYKTTPPVLDSDGSFFLYSKLTVDKSRWQQGNVFSCSVMHEALHNHYTQKSLSLSPG

SEQ ID NO: 1105 - protein, 441 aa, Artificial Sequence
  source: /note="Description of Artificial Sequence: Synthetic heavy chain variable domain"
EVQLLESGGGLVQPGGSLRLSCAASGFDFSRYWMSWVRQAPGKGLEWVSEINPDSSTIKYTPSLKARFTISRDNSKNTLYLQMNSLRAEDTAVYYCTGPAYWGQGTLVTVSSASTKGPSVFPLAPSSKSTSGGTAALGCLVKDYFPEPVTVSWNSGALTSGVHTFPAVLQSSGLYSLSSVVTVPSSSLGTQTYICNVNHKPSNTKVDKKVEPKSCDKTHTCPPCPAPELLGGPSVFLFPPKPKDTLMISRTPEVTCVVVDVSHEDPEVKFNWYVDGVEVHNAKTKPREEQYNSTYRVVSVLTVLHQDWLNGKEYKCKVSNKALPAPIEKTISKAKGQPREPQVYTLPPSRDELTKNQVSLTCLVKGFYPSDIAVEWESNGQPENNYKTTPPVLDSDGSFFLYSKLTVDKSRWQQGNVFSCSVMHEALHNHYTQKSLSLSPG

SEQ ID NO: 1106 - protein, 441 aa, Artificial Sequence
  source: /note="Description of Artificial Sequence: Synthetic heavy chain variable domain"
EVQLLESGGGLVQPGGSLRLSCAASGFDFSRYWMSWVRQAPGKGLEWVSEINPDSSTIQYTPSLKARFTISRDNSKNTLYLQMNSLRAEDTAVYYCTGPAYWGQGTLVTVSSASTKGPSVFPLAPSSKSTSGGTAALGCLVKDYFPEPVTVSWNSGALTSGVHTFPAVLQSSGLYSLSSVVTVPSSSLGTQTYICNVNHKPSNTKVDKKVEPKSCDKTHTCPPCPAPELLGGPSVFLFPPKPKDTLMISRTPEVTCVVVDVSHEDPEVKFNWYVDGVEVHNAKTKPREEQYNSTYRVVSVLTVLHQDWLNGKEYKCKVSNKALPAPIEKTISKAKGQPREPQVYTLPPSRDELTKNQVSLTCLVKGFYPSDIAVEWESNGQPENNYKTTPPVLDSDGSFFLYSKLTVDKSRWQQGNVFSCSVMHEALHNHYTQKSLSLSPG

SEQ ID NO: 1107 - protein, 441 aa, Artificial Sequence
  source: /note="Description of Artificial Sequence: Synthetic heavy chain variable domain"
EVQLLESGGGLVQPGGSLRLSCAASGFDFSRYWMSWVRQAPGKGLEWVSEINPDSSTINYNPSLKARFTISRDNSKNTLYLQMNSLRAEDTAVYYCTGPAYWGQGTLVTVSSASTKGPSVFPLAPSSKSTSGGTAALGCLVKDYFPEPVTVSWNSGALTSGVHTFPAVLQSSGLYSLSSVVTVPSSSLGTQTYICNVNHKPSNTKVDKKVEPKSCDKTHTCPPCPAPELLGGPSVFLFPPKPKDTLMISRTPEVTCVVVDVSHEDPEVKFNWYVDGVEVHNAKTKPREEQYNSTYRVVSVLTVLHQDWLNGKEYKCKVSNKALPAPIEKTISKAKGQPREPQVYTLPPSRDELTKNQVSLTCLVKGFYPSDIAVEWESNGQPENNYKTTPPVLDSDGSFFLYSKLTVDKSRWQQGNVFSCSVMHEALHNHYTQKSLSLSPG

SEQ ID NO: 1108 - protein, 441 aa, Artificial Sequence
  source: /note="Description of Artificial Sequence: Synthetic heavy chain variable domain"
EVQLLESGGGLVQPGGSLRLSCAASGFTFSRYWMSWVRQAPGKGLEWVSEINPDSSTINYTPSLKARFTISRDNSKNTLYLQMNSLRAEDTAVYYCAGPAYWGQGTLVTVSSASTKGPSVFPLAPSSKSTSGGTAALGCLVKDYFPEPVTVSWNSGALTSGVHTFPAVLQSSGLYSLSSVVTVPSSSLGTQTYICNVNHKPSNTKVDKKVEPKSCDKTHTCPPCPAPELLGGPSVFLFPPKPKDTLMISRTPEVTCVVVDVSHEDPEVKFNWYVDGVEVHNAKTKPREEQYNSTYRVVSVLTVLHQDWLNGKEYKCKVSNKALPAPIEKTISKAKGQPREPQVYTLPPSRDELTKNQVSLTCLVKGFYPSDIAVEWESNGQPENNYKTTPPVLDSDGSFFLYSKLTVDKSRWQQGNVFSCSVMHEALHNHYTQKSLSLSPG

SEQ ID NO: 1109 - protein, 441 aa, Artificial Sequence
  source: /note="Description of Artificial Sequence: Synthetic heavy chain variable domain"
EVQLLESGGGLVQPGGSLRLSCAASGFTFSRYWMSWVRQAPGKGLEWVSEINPDSSTIKYTPSLKARFTISRDNSKNTLYLQMNSLRAEDTAVYYCAGPAYWGQGTLVTVSSASTKGPSVFPLAPSSKSTSGGTAALGCLVKDYFPEPVTVSWNSGALTSGVHTFPAVLQSSGLYSLSSVVTVPSSSLGTQTYICNVNHKPSNTKVDKKVEPKSCDKTHTCPPCPAPELLGGPSVFLFPPKPKDTLMISRTPEVTCVVVDVSHEDPEVKFNWYVDGVEVHNAKTKPREEQYNSTYRVVSVLTVLHQDWLNGKEYKCKVSNKALPAPIEKTISKAKGQPREPQVYTLPPSRDELTKNQVSLTCLVKGFYPSDIAVEWESNGQPENNYKTTPPVLDSDGSFFLYSKLTVDKSRWQQGNVFSCSVMHEALHNHYTQKSLSLSPG

SEQ ID NO: 1110 - protein, 441 aa, Artificial Sequence
  source: /note="Description of Artificial Sequence: Synthetic heavy chain variable domain"
EVQLLESGGGLVQPGGSLRLSCAASGFTFSRYWMSWVRQAPGKGLEWVSEINPDSSTIQYTPSLKARFTISRDNSKNTLYLQMNSLRAEDTAVYYCAGPAYWGQGTLVTVSSASTKGPSVFPLAPSSKSTSGGTAALGCLVKDYFPEPVTVSWNSGALTSGVHTFPAVLQSSGLYSLSSVVTVPSSSLGTQTYICNVNHKPSNTKVDKKVEPKSCDKTHTCPPCPAPELLGGPSVFLFPPKPKDTLMISRTPEVTCVVVDVSHEDPEVKFNWYVDGVEVHNAKTKPREEQYNSTYRVVSVLTVLHQDWLNGKEYKCKVSNKALPAPIEKTISKAKGQPREPQVYTLPPSRDELTKNQVSLTCLVKGFYPSDIAVEWESNGQPENNYKTTPPVLDSDGSFFLYSKLTVDKSRWQQGNVFSCSVMHEALHNHYTQKSLSLSPG

SEQ ID NO: 1111 - protein, 441 aa, Artificial Sequence
  source: /note="Description of Artificial Sequence: Synthetic heavy chain variable domain"
EVQLLESGGGLVQPGGSLRLSCAASGFTFSRYWMSWVRQAPGKGLEWVSEINPDSSTINYNPSLKARFTISRDNSKNTLYLQMNSLRAEDTAVYYCAGPAYWGQGTLVTVSSASTKGPSVFPLAPSSKSTSGGTAALGCLVKDYFPEPVTVSWNSGALTSGVHTFPAVLQSSGLYSLSSVVTVPSSSLGTQTYICNVNHKPSNTKVDKKVEPKSCDKTHTCPPCPAPELLGGPSVFLFPPKPKDTLMISRTPEVTCVVVDVSHEDPEVKFNWYVDGVEVHNAKTKPREEQYNSTYRVVSVLTVLHQDWLNGKEYKCKVSNKALPAPIEKTISKAKGQPREPQVYTLPPSRDELTKNQVSLTCLVKGFYPSDIAVEWESNGQPENNYKTTPPVLDSDGSFFLYSKLTVDKSRWQQGNVFSCSVMHEALHNHYTQKSLSLSPG

SEQ ID NO: 1112 - protein, 441 aa, Artificial Sequence
  source: /note="Description of Artificial Sequence: Synthetic heavy chain variable domain"
EVQLLESGGGLVQPGGSLRLSCAASGFDFSRYWMSWVRQAPGKGLEWVSEINPDSSTINYTPSLKARFTISRDNSKNTLYLQMNSLRAEDTAVYYCAGPAYWGQGTLVTVSSASTKGPSVFPLAPSSKSTSGGTAALGCLVKDYFPEPVTVSWNSGALTSGVHTFPAVLQSSGLYSLSSVVTVPSSSLGTQTYICNVNHKPSNTKVDKKVEPKSCDKTHTCPPCPAPELLGGPSVFLFPPKPKDTLMISRTPEVTCVVVDVSHEDPEVKFNWYVDGVEVHNAKTKPREEQYNSTYRVVSVLTVLHQDWLNGKEYKCKVSNKALPAPIEKTISKAKGQPREPQVYTLPPSRDELTKNQVSLTCLVKGFYPSDIAVEWESNGQPENNYKTTPPVLDSDGSFFLYSKLTVDKSRWQQGNVFSCSVMHEALHNHYTQKSLSLSPG

SEQ ID NO: 1113 - protein, 441 aa, Artificial Sequence
  source: /note="Description of Artificial Sequence: Synthetic heavy chain variable domain"
EVQLLESGGGLVQPGGSLRLSCAASGFDFSRYWMSWVRQAPGKGLEWVSEINPDSSTIKYTPSLKARFTISRDNSKNTLYLQMNSLRAEDTAVYYCAGPAYWGQGTLVTVSSASTKGPSVFPLAPSSKSTSGGTAALGCLVKDYFPEPVTVSWNSGALTSGVHTFPAVLQSSGLYSLSSVVTVPSSSLGTQTYICNVNHKPSNTKVDKKVEPKSCDKTHTCPPCPAPELLGGPSVFLFPPKPKDTLMISRTPEVTCVVVDVSHEDPEVKFNWYVDGVEVHNAKTKPREEQYNSTYRVVSVLTVLHQDWLNGKEYKCKVSNKALPAPIEKTISKAKGQPREPQVYTLPPSRDELTKNQVSLTCLVKGFYPSDIAVEWESNGQPENNYKTTPPVLDSDGSFFLYSKLTVDKSRWQQGNVFSCSVMHEALHNHYTQKSLSLSPG

SEQ ID NO: 1114 - protein, 441 aa, Artificial Sequence
  source: /note="Description of Artificial Sequence: Synthetic heavy chain variable domain"
EVQLLESGGGLVQPGGSLRLSCAASGFDFSRYWMSWVRQAPGKGLEWVSEINPDSSTIQYTPSLKARFTISRDNSKNTLYLQMNSLRAEDTAVYYCAGPAYWGQGTLVTVSSASTKGPSVFPLAPSSKSTSGGTAALGCLVKDYFPEPVTVSWNSGALTSGVHTFPAVLQSSGLYSLSSVVTVPSSSLGTQTYICNVNHKPSNTKVDKKVEPKSCDKTHTCPPCPAPELLGGPSVFLFPPKPKDTLMISRTPEVTCVVVDVSHEDPEVKFNWYVDGVEVHNAKTKPREEQYNSTYRVVSVLTVLHQDWLNGKEYKCKVSNKALPAPIEKTISKAKGQPREPQVYTLPPSRDELTKNQVSLTCLVKGFYPSDIAVEWESNGQPENNYKTTPPVLDSDGSFFLYSKLTVDKSRWQQGNVFSCSVMHEALHNHYTQKSLSLSPG

SEQ ID NO: 1115 - protein, 441 aa, Artificial Sequence
  source: /note="Description of Artificial Sequence: Synthetic heavy chain variable domain"
EVQLLESGGGLVQPGGSLRLSCAASGFDFSRYWMSWVRQAPGKGLEWVSEINPDSSTINYNPSLKARFTISRDNSKNTLYLQMNSLRAEDTAVYYCAGPAYWGQGTLVTVSSASTKGPSVFPLAPSSKSTSGGTAALGCLVKDYFPEPVTVSWNSGALTSGVHTFPAVLQSSGLYSLSSVVTVPSSSLGTQTYICNVNHKPSNTKVDKKVEPKSCDKTHTCPPCPAPELLGGPSVFLFPPKPKDTLMISRTPEVTCVVVDVSHEDPEVKFNWYVDGVEVHNAKTKPREEQYNSTYRVVSVLTVLHQDWLNGKEYKCKVSNKALPAPIEKTISKAKGQPREPQVYTLPPSRDELTKNQVSLTCLVKGFYPSDIAVEWESNGQPENNYKTTPPVLDSDGSFFLYSKLTVDKSRWQQGNVFSCSVMHEALHNHYTQKSLSLSPG

SEQ ID NO: 1116 - protein, 119 aa, Artificial Sequence
  source: /note="Description of Artificial Sequence: Synthetic heavy chain variable domain"
EVQLQESRPELVKPGASVKISCKTSGYTFTEYTLHWVKQSHGKSLEWIGGINPNNGDTIYNQKFKGKATLTVDKSSSTAYMELRSLTSEYSAVYYCARRAITVYAMDYWGQGTSVTVSS

SEQ ID NO: 1117 - protein, 122 aa, Artificial Sequence
  source: /note="Description of Artificial Sequence: Synthetic heavy chain variable domain"
QVQLQQPGAELVRPGASVKLSCKASGYTFTSYWMNWVKQRPGQGLEWIAMIHPSDSEIRLNQKFKDKATLTVDRSSSTAYMQLSSPTSEDSAVYYCARIDSYYGYLFYFDYWGQGTTLTVSS

SEQ ID NO: 1118 - protein, 118 aa, Artificial Sequence
  source: /note="Description of Artificial Sequence: Synthetic heavy chain variable domain"
EVHLQQSGPELVKPGGSMKISCKASGYSFTGYTMNWVKQSHGKNLEWIGLFNPYNGGTSYNQKFKGKATLTVDKSSSTAYMELLSLTSEDSAVYYCARCYRYDGLDYWGQGTTLTVSS

SEQ ID NO: 1119 - protein, 118 aa, Artificial Sequence
  source: /note="Description of Artificial Sequence: Synthetic heavy chain variable domain"
EVQLQQSGPELVKPGASVKISCKTSGYTFTEYTVHWVKQSHGKSLEWIGGVYPKNGDTTYNQKFRGKATLTVDKSSNTAYMELRSLTSEDSAVYYCTGKDGYDGFAYWGQGTLVTVSA

SEQ ID NO: 1120 - protein, 123 aa, Artificial Sequence
  source: /note="Description of Artificial Sequence: Synthetic heavy chain variable domain"
EVQLQQSGPELVKPGASVKISCKASGYSFTGYYMNWVKQSPEKSLEWIGEINPSTGSTTYNQKFKAKATLTVDKSSSTAYMQLKSLTSEDSAVYYCARRDYYYGSGFYAMDYWGQGTSVTVSS

SEQ ID NO: 1121 - protein, 119 aa, Artificial Sequence
  source: /note="Description of Artificial Sequence: Synthetic heavy chain variable domain"
EVQLQQSGPELVKPGASVKISCKTSGYTFTEYTMHWVKQSHGKSLEWIGGINPNNGGTNYNQKFKGKATLTVDKSSSTAYMELRSLTSEDSAVYYCARRLITYYAMDYWGQGTSVTVSS

SEQ ID NO: 1122 - protein, 126 aa, Artificial Sequence
  source: /note="Description of Artificial Sequence: Synthetic heavy chain variable domain"
QVQMQQSGAELVRPGTSVKVSCKASGYAFTNYLIEWVKQRPGQGLEWIGLINPGSGGTNYNEKFKGKATLTADKSSTTAYMQLSSLTSDDSAVYFCARRSPLGSWIYYAYDGVAYWGQGTLVTVSA

SEQ ID NO: 1123 - protein, 120 aa, Artificial Sequence
  source: /note="Description of Artificial Sequence: Synthetic heavy chain variable domain"
EVQLQQSGPELVKPGASVKISCKTSGYTFTENIRHWVKQSRGKSLEWIGTINPNNGETRYNQKFKGKATLTVDKSSSTAYMELRSLTSEDSAVYYCTRGITKSPYGMDYWGQGTSITVSS

SEQ ID NO: 1124 - protein, 120 aa, Artificial Sequence
  source: /note="Description of Artificial Sequence: Synthetic heavy chain variable domain"
EVQLQQSGPELVKPGASVKISCKTSGYTFTENIIHWVKQSHGKSLEWIGGINPINGGTSYNQKFKGKATLTVDKSSSTAYMELRSLTSEDSAVYYCARGITTSPYAMDYWGQGTSVTVSS

SEQ ID NO: 1125 - protein, 112 aa, Artificial Sequence
  source: /note="Description of Artificial Sequence: Synthetic heavy chain variable domain"
EVKVLESGGGLVQPGGSLKLSCAASGFDFSRYWMSWVRQAPGKGLEWIGEINPDSSTINYTPSLKAKFIISRDNAKNTLYLQMSKVRSEDTALYYCTGPAYWGQGTLVTVSA

SEQ ID NO: 1126 - protein, 119 aa, Artificial Sequence
  source: /note="Description of Artificial Sequence: Synthetic heavy chain variable domain"
QVQLVQSGAEVKKPGASVKVSCKASGYTFTEYTLHWVRQAPGQRLEWMGGINPNNGDTIYNQKFKGRVTITRDTSASTAYMELSSLRSEDTAVYYCARRAITVYAMDYWGQGTLVTVSS

SEQ ID NO: 1127 - protein, 122 aa, Artificial Sequence
  source: /note="Description of Artificial Sequence: Synthetic heavy chain variable domain"
QVQLVQSGAEVKKPGASVKVSCKASGYTFTSYWMNWVRQAPGQRLEWMGMIHPSDSEIRLNQKFKDRVTITRDTSASTAYMELSSLRSEDTAVYYCARIDSYYGYLFYFDYWGQGTTVTVSS

SEQ ID NO: 1128 - protein, 126 aa, Artificial Sequence
  source: /note="Description of Artificial Sequence: Synthetic heavy chain variable domain"
QVQLVQSGAEVKKPGASVKVSCKASGYTFTNYLIEWVRQAPGQGLEWMGLINPGSGGTNYNEKFKGRVTMTTDTSTSTAYMELRSLRSDDTAVYYCARRSPLGSWIYYAYDGVAYWGQGTLVTVSS

SEQ ID NO: 1129 - protein, 112 aa, Artificial Sequence
  source: /note="Description of Artificial Sequence: Synthetic heavy chain variable domain"
EVQLLESGGGLVQPGGSLRLSCAASGFTFSRYWMSWVRQAPGKGLEWVSEINPDSSTINYTPSLKARFTISRDNSKNTLYLQMNSLRAEDTAVYYCTGPAYWGQGTLVTVSS

SEQ ID NO: 1130 - protein, 122 aa, Artificial Sequence
  source: /note="Description of Artificial Sequence: Synthetic heavy chain variable domain"
QVQLVQSGAEVKKPGASVKVSCKASGYTFTSYWMNWVRQATGQGLEWMGMIHPSDSEIRLNQKFKDRVTMTRNTSISTAYMELSSLRSEDTAVYYCARIDSYYGYLFYFDYWGQGTTVTVSS

SEQ ID NO: 1131 - protein, 122 aa, Artificial Sequence
  source: /note="Description of Artificial Sequence: Synthetic heavy chain variable domain"
QVQLVQSGAEVKKPGASVKVSCKASGYTFTSYWMNWVRQAPGQGLEWMGMIHPSDSEIRLNQKFKDRVTMTRDTSTSTVYMELSSLRSEDTAVYYCARIDSYYGYLFYFDYWGQGTTVTVSS

SEQ ID NO: 1132 - protein, 122 aa, Artificial Sequence
  source: /note="Description of Artificial Sequence: Synthetic heavy chain variable domain"
QVQLVQSGAEVKKPGSSVKVSCKASGGTFSSYWMNWVRQAPGQGLEWMGMIHPSDSEIRLNQKFKDRVTITADESTSTAYMELSSLRSEDTAVYYCARIDSYYGYLFYFDYWGQGTTVTVSS

SEQ ID NO: 1133 - protein, 112 aa, Artificial Sequence
  source: /note="Description of Artificial Sequence: Synthetic heavy chain variable domain"
EVQLLESGGGLVQPGGSLRLSCAASGFTFSRYWMSWVRQAPGKGLEWVSEINPDSSTIKYTPSLKARFTISRDNSKNTLYLQMNSLRAEDTAVYYCTGPAYWGQGTLVTVSS

SEQ ID NO: 1134 - protein, 112 aa, Artificial Sequence
  source: /note="Description of Artificial Sequence: Synthetic heavy chain variable domain"
EVQLLESGGGLVQPGGSLRLSCAASGFTFSRYWMSWVRQAPGKGLEWVSEINPDSSTIQYTPSLKARFTISRDNSKNTLYLQMNSLRAEDTAVYYCTGPAYWGQGTLVTVSS

SEQ ID NO: 1135 - protein, 112 aa, Artificial Sequence
  source: /note="Description of Artificial Sequence: Synthetic heavy chain variable domain"
EVQLLESGGGLVQPGGSLRLSCAASGFTFSRYWMSWVRQAPGKGLEWVSEINPDSSTINYNPSLKARFTISRDNSKNTLYLQMNSLRAEDTAVYYCTGPAYWGQGTLVTVSS

SEQ ID NO: 1136 - protein, 112 aa, Artificial Sequence
  source: /note="Description of Artificial Sequence: Synthetic heavy chain variable domain"
EVQLLESGGGLVQPGGSLRLSCAASGFDFSRYWMSWVRQAPGKGLEWVSEINPDSSTINYTPSLKARFTISRDNSKNTLYLQMNSLRAEDTAVYYCTGPAYWGQGTLVTVSS

SEQ ID NO: 1137 - protein, 112 aa, Artificial Sequence
  source: /note="Description of Artificial Sequence: Synthetic heavy chain variable domain"
EVQLLESGGGLVQPGGSLRLSCAASGFDFSRYWMSWVRQAPGKGLEWVSEINPDSSTIKYTPSLKARFTISRDNSKNTLYLQMNSLRAEDTAVYYCTGPAYWGQGTLVTVSS

SEQ ID NO: 1138 - protein, 112 aa, Artificial Sequence
  source: /note="Description of Artificial Sequence: Synthetic heavy chain variable domain"
EVQLLESGGGLVQPGGSLRLSCAASGFDFSRYWMSWVRQAPGKGLEWVSEINPDSSTIQYTPSLKARFTISRDNSKNTLYLQMNSLRAEDTAVYYCTGPAYWGQGTLVTVSS

SEQ ID NO: 1139 - protein, 112 aa, Artificial Sequence
  source: /note="Description of Artificial Sequence: Synthetic heavy chain variable domain"
EVQLLESGGGLVQPGGSLRLSCAASGFDFSRYWMSWVRQAPGKGLEWVSEINPDSSTINYNPSLKARFTISRDNSKNTLYLQMNSLRAEDTAVYYCTGPAYWGQGTLVTVSS

SEQ ID NO: 1140 - protein, 112 aa, Artificial Sequence
  source: /note="Description of Artificial Sequence: Synthetic heavy chain variable domain"
EVQLLESGGGLVQPGGSLRLSCAASGFTFSRYWMSWVRQAPGKGLEWVSEINPDSSTINYTPSLKARFTISRDNSKNTLYLQMNSLRAEDTAVYYCAGPAYWGQGTLVTVSS

SEQ ID NO: 1141 - protein, 115 aa, Artificial Sequence
  source: /note="Description of Artificial Sequence: Synthetic heavy chain variable domain"
QVQLQESGPGLVKPSETLSLTCVVSGGSISSSNWWSWVRQPPGKGLEWIGEIYHSGSPNYNPSLKSRVTISVDKSKNQFSLKLSSVTAADTAVYYSSSGGFFDYWGQGTLVTVSS

SEQ ID NO: 1142 - protein, 118 aa, Artificial Sequence
  source: /note="Description of Artificial Sequence: Synthetic heavy chain variable domain"
QVQLQESGPGLVKPSETLSLTCVVSGGSISSSNWWSWVRQPPGKGLEWIGEIYHSGSPNYNPSLKSRVTISVDKSKNQFSLKLSSVTAADTAVYYCARSSSGGFFDYWGQGTLVTVSS

SEQ ID NO: 1143 - protein, 118 aa, Artificial Sequence
  source: /note="Description of Artificial Sequence: Synthetic heavy chain variable domain"
QVQLQESGPGLVKPSETLSLTCVVSGGSISSSNWWSWVRQPPGKGLEWIGEIYHSGSPNYNPSLKSRVTISVDKSKNQFSLKLSSVTAADTAVYYCARQTTAGSFDYWGQGTLVTVSS

SEQ ID NO: 1144 - protein, 120 aa, Artificial Sequence
  source: /note="Description of Artificial Sequence: Synthetic heavy chain variable domain"
EVQLQQSGPELVKPGASVKMSCKASGYTFTSYFIHWVKQKPGQGLEWIGFINPYNDGSKYNEKFKGKATLTSDKSSSTAYMELSSLTSEDSAVYYCTRDDGYYGYAMDYWGQGTSVTVSS

SEQ ID NO: 1145 - protein, 120 aa, Artificial Sequence
  source: /note="Description of Artificial Sequence: Synthetic heavy chain variable domain"
EVQLQQSGPELVKPGASVKMSCKASGYTFTSYVMHWVKQKPGQGLEWIGYINPYNDGTKYNEKFKGKATLTSDTSSSTAYMELNSLTSEDSAVYFCARPIYFDNDYFDYWGQGTTLKVSS

SEQ ID NO: 1146 - protein, 122 aa, Artificial Sequence
  source: /note="Description of Artificial Sequence: Synthetic heavy chain variable domain"
EVQLVESGGGLVQPGGSLRLSCAASGFTFSSYEMNWVRQAPGKGLEWVSYISSSGSTIYYADSVKGRFTISRDNAKNSLYLQMNSLRAEDTAVYYCARDPYSSSWHDAFDIWGQGTMVTVSS

SEQ ID NO: 1147 - protein, 120 aa, Artificial Sequence
  source: /note="Description of Artificial Sequence: Synthetic heavy chain variable domain"
EVQLQQSGPELVKPGASMKISCKASGYSFTGYTMNWVKQSHEKNLEWIGPINPYNDGTIYNPNFKGKATLTVDKASSTAYMELLSLTSDDPAVYYCARTDDYDDYTMDYWGQGTSVTVSS

SEQ ID NO: 1148 - protein, 121 aa, Artificial Sequence
  source: /note="Description of Artificial Sequence: Synthetic heavy chain variable domain"
QVQLQQPGAELVKPGASVKLSCKASGYTFTRYWMHWVKQRPGQGLEWIGNIDPSDTETHYNQQFKDKATLTVDKSSSTAYMQLSSLTSEDSAVYYCAIYYGNPSYYAMDYWGQGTSVTVSS

SEQ ID NO: 1149 - protein, 119 aa, Artificial Sequence
  source: /note="Description of Artificial Sequence: Synthetic heavy chain variable domain"
EVQLQQSGPELVKPGASVKMSCKASGYIFTSYVMYWVKQKPGQGLEWIGYINPYNDGTKYNEKFKGKATLTSDKSSSTAYMELSSLTSEDSAVYYCARYYDYDYYFDYWGQGTTLTVSS

SEQ ID NO: 1150 - protein, 120 aa, Artificial Sequence
  source: /note="Description of Artificial Sequence: Synthetic heavy chain variable domain"
EVQLRQSGPELVKPGASVKMSCKASGYTFTSYFMHWVKQKPGQGLEWIGFINPYNDGTKYNEKFKGKATLTSDKSSSTAYMELNSLTSEDSAVYYCTRDDGYYDYAMDYWGQGTSVTVSS

SEQ ID NO: 1151 - protein, 115 aa, Artificial Sequence
  source: /note="Description of Artificial Sequence: Synthetic heavy chain variable domain"
EVQLQQSGAELVRPGASVKLSCTASGFNIKDDYIHWVKQRPEQGLEWIGWIDPEKGDTAYASKFQDKATITSDTSSNTAYLQLSSLTSEDTAVYYCTLTGRFDYWGQGTTLTVSS

SEQ ID NO: 1152 - protein, 117 aa, Artificial Sequence
  source: /note="Description of Artificial Sequence: Synthetic heavy chain variable domain"
QVQLQQPGAELVKPGASMKMSCKASGYTFPSSNIHWLKQTPGQGLEWIGVIYPGNGDTSYNQKFKDKATLTTDKSSSTAYMQLSSLTSEDSAIYFCARVYNWHFDVWGAGTTVTVSS

SEQ ID NO: 1153 - protein, 120 aa, Artificial Sequence
  source: /note="Description of Artificial Sequence: Synthetic heavy chain variable domain"
QVQLQQPGAELVKPGTSVKLSCKASGYTFTRYWMHWVKQRPGQGLEWIGMIHPSSGSTSYNEKVKNKATLTVDRSSTTAYMQLSSLTSEDSAVYYCARDGDYYYGTGDYWGQGTTLTVSS

SEQ ID NO: 1154 - protein, 123 aa, Artificial Sequence
  source: /note="Description of Artificial Sequence: Synthetic heavy chain variable domain"
DIQLQESGPGLVKPSQSLSLTCSVTGYSITSAYYWNWIRQFPGNKLEWMGYISYDGRNNYNPSLKNRISITRDTSKNQFFLKLNSVTTEDTATYYCAKEGDYDVGNYYAMDYWGQGTSVTVSS

SEQ ID NO: 1155 - protein, 120 aa, Artificial Sequence
  source: /note="Description of Artificial Sequence: Synthetic heavy chain variable domain"
EVQLQQSGAEVKKPGSSVKVSCKASGGTFSSYAISWVRQAPGQGLEWMGGIIPIFGTANYAQKFQGRVTITADESTSTAYMELSSLRSEDTAVYYCARDLEMATIMGGYWGQGTLVTVSS

SEQ ID NO: 1156 - protein, 118 aa, Artificial Sequence
  source: /note="Description of Artificial Sequence: Synthetic heavy chain variable domain"
EVQLVESGGGVVQPGGSLRLSCAASGFTFDDYAMHWVRQAPGKGLEWVSLISGDGGSTYYADSVKGRFTISRDNSKNTLYLQMNSLRVEDTAVYYCARVFDSYYMDVWGKGTTVTVSS

SEQ ID NO: 1157 - protein, 125 aa, Artificial Sequence
  source: /note="Description of Artificial Sequence: Synthetic heavy chain variable domain"
QVQLQESGPGLVKPSETLSLTCTVSGGSISSSSYYWGWIRQPPGKGLEWIGSIYYSGSTYYNPSLKSRVSISVDTSKNQFSLKLKYVTAADTAVYYCATPGTYYDFLSGYYPFYWGQGTLVTVSS

SEQ ID NO: 1158 - protein, 116 aa, Artificial Sequence
  source: /note="Description of Artificial Sequence: Synthetic heavy chain variable domain"
QVQLVESGGGLVQPGGSLRLSCAASGFTFSSYWMSWVRQAPGKGLEWVANINEDGSAKFYVDSVKGRFTISRDNAKNSLYLQMNSLRAEDTAVYFCARDLRSGRYWGQGTLVTVSS

SEQ ID NO: 1159 - protein, 123 aa, Artificial Sequence
  source: /note="Description of Artificial Sequence: Synthetic heavy chain variable domain"
EVQLQQSGPGLVRPSETLSLTCTVSGGPVRSGSHYWNWIRQPPGRGLEWIGYIYYSGSTNYNPSLENRVTISIDTSNNHFSLKLSSVTAADTALYFCARGTATFDWNFPFDSWGQGTLVTVSS

SEQ ID NO: 1160 - protein, 126 aa, Artificial Sequence
  source: /note="Description of Artificial Sequence: Synthetic heavy chain variable domain"
QVQLQESGAGLLKPSETLSLTCAVYGGSFSGYYWSWIRQPPGKGLEWVGEINHSGSTNYNPSLKSRVTISVDTSKNQFSLKLSSVTAADTAVYYCARGSGLVVYAIRVGSGWFDYWGQGTLVTVSS

SEQ ID NO: 1161 - protein, 129 aa, Artificial Sequence
  source: /note="Description of Artificial Sequence: Synthetic heavy chain variable domain"
EVQLVESGGGLVKPGGSLRLSCAASGFTFSSYSMNWVRQAPGKGLEWVSSISSSSSYIYYADSVKGRFTISRDNAKNSLYLQMNSLRAEDTAVYYCARDPSSSGSYYMEDSYYYGMDVWGQGTTVTVSS

SEQ ID NO: 1162 - protein, 117 aa, Artificial Sequence
  source: /note="Description of Artificial Sequence: Synthetic heavy chain variable domain"
QVNLRESGGGLVQPGGSLRLSCAASGFTFSSYEMNWVRQAPGKGLEWVSYISSSGSTIYYADSVKGRFTISRDNAKNSLYLQMNSLRAEDTAVYYCAREALGSSWEWGQGTTVTVSS

SEQ ID NO: 1163 - protein, 119 aa, Artificial Sequence
  source: /note="Description of Artificial Sequence: Synthetic heavy chain variable domain"
QVQLVQSGAEVKEPGASVKVSCKAPANTFSDHVMHWVRQAPGQRFEWMGYIHAANGGTHYSQKFQDRVTITRDTSANTVYMDLSSLRSEDTAVYYCARGGYNSDAFDIWGQGTMVTVSS

SEQ ID NO: 1164 - protein, 121 aa, Artificial Sequence
  source: /note="Description of Artificial Sequence: Synthetic heavy chain variable domain"
QVQLVQSGGGLVQPGGSLRLSCAASGFTFSSYSMNWVRQAPGKGLEWVSYISSSSSTIYYADSVKGRFTISRDNAKNSLYLQMNSLRAEDTAVYYCARDLSVRAIDAFDIWGQGTMVTVSS

SEQ ID NO: 1165 - protein, 119 aa, Artificial Sequence
  source: /note="Description of Artificial Sequence: Synthetic heavy chain variable domain"
EVQLVQSGGGVVRSGRSLRLSCAASGFTFNSYGLHWVRQAPGKGLEWVALIEYDGSNKYYGDSVKGRFTISRDKSKSTLYLQMDNLRAEDTAVYYCAREGNEDLAFDIWGQGTLVTVSS

SEQ ID NO: 1166 - protein, 127 aa, Artificial Sequence
  source: /note="Description of Artificial Sequence: Synthetic heavy chain variable domain"
QVQLVESGGGLVQPGGSLRLSCAASGFNVSSNYMTWVRQAPGKGLEWVSVIYSGGATYYGDSVKGRFTVSRDNSKNTVYLQMNRLTAEDTAVYYCARDRLYCGNNCYLYYYYGMDVWGQGTLVTVSS

SEQ ID NO: 1167 - protein, 120 aa, Artificial Sequence
  source: /note="Description of Artificial Sequence: Synthetic heavy chain variable domain"
QVQLVQSGAEVKKSGASVKVSCKASGYPFTGYYIQWVRQAPGQGLEWMGWIDPNSGNTGYAQKFQGRVTMTRNTSISTAYMELSSLRSEDTAVYYCASDSYGYYYGMDVWGQGTLVTVSS

SEQ ID NO: 1168 - protein, 122 aa, Artificial Sequence
  source: /note="Description of Artificial Sequence: Synthetic heavy chain variable domain"
QVQLQQSGPELVKPGASVKISCKASGYSFTDYYMHWVKQSHIKSLEWIGRINPYNGAAFYSQNFKDKASLTVDKSSSTAYMELHSLTSEDSAVYYCAIERGADLEGYAMDYWGQGTSVTVSS

SEQ ID NO: 1169 - protein, 122 aa, Artificial Sequence
  source: /note="Description of Artificial Sequence: Synthetic heavy chain variable domain"
EVQLVQSGAEVKKPGASVKVSCKASGYSFTDYYMHWVRQAPGQGLEWIGRINPYNGAAFYSQNFKDRVTLTVDTSTSTAYLELSSLRSEDTAVYYCAIERGADLEGYAMDYWGQGTLVTVSS

SEQ ID NO: 1170 - protein, 122 aa, Artificial Sequence
  source: /note="Description of Artificial Sequence: Synthetic heavy chain variable domain"
EVQLVQSGAEVKKPGASVKVSCKASGYSFTDYYMHWVRQAPGQGLEWIGRINPYAGAAFYSQNFKDRVTLTVDTSTSTAYLELSSLRSEDTAVYYCAIERGADLEGYAMDYWGQGTLVTVSS

SEQ ID NO: 1171 - protein, 119 aa, Artificial Sequence
  source: /note="Description of Artificial Sequence: Synthetic heavy chain variable domain"
EVQLQQSGPELVKPGALVKISCKASGYTFTSYDINWLKQRPGQGLEWIGWIYPGDGTTEYNERFKGKATLTADKSSSTAYLQLSSLTSENSAVYFCARSYDYDYAMDYWGQGTSVTVSS

SEQ ID NO: 1172 - protein, 120 aa, Artificial Sequence
  source: /note="Description of Artificial Sequence: Synthetic heavy chain variable domain"
EVQLQQSGPELVKPGASVKMSCKASGYTFTDYYLDWVKQSHGESFEWIGRVNPYNGGTIYNQKFKGKATLTVDKSSSTAYMDLNSLTSEDSAVYYCARDHYRYDPLLDYWGQGTTLTVSS

SEQ ID NO: 1173 - protein, 120 aa, Artificial Sequence
  source: /note="Description of Artificial Sequence: Synthetic heavy chain variable domain"
EVQLVQSGAEVKKPGASVKVSCKASGYTFTDYYLDWVRQAPGQGLEWIGRVNPYNGGTIYNQKFKGRVTLTRDTSTSTAYLELSSLRSEDTAVYYCARDHYRYDPLLDYWGQGTLVTVSS

SEQ ID NO: 1174 - protein, 119 aa, Artificial Sequence
  source: /note="Description of Artificial Sequence: Synthetic heavy chain variable domain"
QVQLQQSGAELVKPGASVKLSCTASGFNIKDTYMHWVKQRPEQGLEWIGRIDPANGDTDYDPKFQGKATVTADTSSNTAYLQLSSLTSEDTAVYYCTISGPPYYVMDYWGQGTSVTVSS

SEQ ID NO: 1175 - protein, 122 aa, Artificial Sequence
  source: /note="Description of Artificial Sequence: Synthetic heavy chain variable domain"
  MOD_RES (55)..(55): Any amino acid
EVQLVQSGAEVKKPGASVKVSCKASGYSFTDYYMHWVRQAPGQGLEWIGRINPYXGAAFYSQNFKDRVTLTVDTSTSTAYLELSSLRSEDTAVYYCAIERGADLEGYAMDYWGQGTLVTVSS

SEQ ID NO: 1176 - protein, 122 aa, Artificial Sequence
  source: /note="Description of Artificial Sequence: Synthetic heavy chain variable domain"
EVQLVQSGAEVKKPGASVKMSCKASGYTFTSYFIHWVRQAPGQGLEWIGFINPYNKGSKYAQKFQGRATLTSDKSTSTVYMELSSLRSEDTAVYYCTRDDGYYGYAMDYWGQGTLVTVSSAS

SEQ ID NO: 1177 - protein, 120 aa, Artificial Sequence; identical to SEQ ID NO: 1144
  source: /note="Description of Artificial Sequence: Synthetic heavy chain variable domain"

SEQ ID NO: 1178 - protein, 120 aa, Artificial Sequence; identical to SEQ ID NO: 1145
  source: /note="Description of Artificial Sequence: Synthetic heavy chain variable domain"

SEQ ID NO: 1179 - protein, 120 aa, Artificial Sequence; identical to SEQ ID NO: 1147
  source: /note="Description of Artificial Sequence: Synthetic heavy chain variable domain"

SEQ ID NO: 1180 - protein, 121 aa, Artificial Sequence; identical to SEQ ID NO: 1148
  source: /note="Description of Artificial Sequence: Synthetic heavy chain variable domain"

SEQ ID NO: 1181 - protein, 119 aa, Artificial Sequence; identical to SEQ ID NO: 1149
  source: /note="Description of Artificial Sequence: Synthetic heavy chain variable domain"

SEQ ID NO: 1182 - protein, 120 aa, Artificial Sequence; identical to SEQ ID NO: 1150
  source: /note="Description of Artificial Sequence: Synthetic heavy chain variable domain"

SEQ ID NO: 1183 - protein, 115 aa, Artificial Sequence; identical to SEQ ID NO: 1151
  source: /note="Description of Artificial Sequence: Synthetic heavy chain variable domain"

SEQ ID NO: 1184 - protein, 117 aa, Artificial Sequence; identical to SEQ ID NO: 1152
  source: /note="Description of Artificial Sequence: Synthetic heavy chain variable domain"

SEQ ID NO: 1185 - protein, 121 aa, Artificial Sequence
  source: /note="Description of Artificial Sequence: Synthetic heavy chain variable domain"
QVQLQQPGAELVKPGASVKMSCKASGYTFTNYNMHWVKQTPGQGLEWIGAIFPGNGGTSYNQKFKGKATLTADKSSSTAYMQLTSLTSGDSAVYYCARWGYGSGLYAMDYWGQGTSVTVSS

SEQ ID NO: 1186 - protein, 117 aa, Artificial Sequence
  source: /note="Description of Artificial Sequence: Synthetic heavy chain variable domain"
EVQLQQSGPELVKPGASVKMSCKASGYTFTSYVMHWVKQKPGQGLEWIGYINPYNDGTKYNEKFKGKATLTSDKSSSTAYMELSSLTSEDSAVYYCARLRSRAMDYWGQGTSVTVSS

SEQ ID NO: 1187 - protein, 123 aa, Artificial Sequence
  source: /note="Description of Artificial Sequence: Synthetic heavy chain variable domain"
QVQLQQSGAELMKPGASVKISCKANGYTFSSYWIEWLRQRPGHGLEWIGEILPGSDNSNYNEKFKGKATFTADTSSNTAYMQLSSLTSEESAVYYCTRGLRRDGSYYYVMEHWGQGTSVTVSS

SEQ ID NO: 1188 - protein, 119 aa, Artificial Sequence
  source: /note="Description of Artificial Sequence: Synthetic heavy chain variable domain"
EVKLVESGGGLVKPGGSLKLSCAASGFTFGRYVMSWVRQTPEKKLEWVASITSGGTTYYPDSVKGRFTISRDNARNILYLQMSSLRSEDTAMYYCARVYYHYDDIFAYWGQGTLVTVSA

SEQ ID NO: 1189 - protein, 116 aa, Artificial Sequence
  source: /note="Description of Artificial Sequence: Synthetic heavy chain variable domain"
EVQLQQSGPELVKPGASVKISCKTSGYTFTEYTMHWVKQSHGKSLEWIGGINPNNGGTSYNQKFKGKATLTVDKSSSTAYMELRSLTSEDSAVYYCARGPAWFAYWGQGTLVTVSA

SEQ ID NO: 1190 - protein, 117 aa, Artificial Sequence
  source: /note="Description of Artificial Sequence: Synthetic heavy chain variable domain"
EVQLQQSGPELVKPGGSKKISCKASGYSFTGYSMNWVKQSHGKNLEWIGLINPYSGGTIYNQKFKGKATLTVDKSSSTAYMELLSLTSEDSAVYYCARRSDYPLVYWGQGTLVTVSA

SEQ ID NO: 1191 - protein, 117 aa, Artificial Sequence
  source: /note="Description of Artificial Sequence: Synthetic heavy chain variable domain"
QVQLKESGPVLVAPSQSLSITCTVSGFSLTSYGVHWVRQPPGKGLEWLGVIWAGGSTNYNSALMSRLSISKDNSKSQVFLKMNSLQTDDTAMYYCAKQGNFYAMDYWGQGTSVTVSS

SEQ ID NO: 1192 - protein, 121 aa, Artificial Sequence
  source: /note="Description of Artificial Sequence: Synthetic heavy chain variable domain"
EVQLQQSGPELVKPGASMKISCKASGYSFTGYTMNWVKQSHGKNLEWIGLINPYNGGTTYNQKFKGKATLTVDKSSSTAYMELLSLTSEDSAVYYCALGYYGNYRRYFDVWGAGTTVTVSS

SEQ ID NO: 1193 - protein, 119 aa, Artificial Sequence
  source: /note="Description of Artificial Sequence: Synthetic heavy chain variable domain"
QVQLQQSGAELARPGASVKLSCKASGYTCTSYWMQWVKQRPGQGLEWIGAIYPGDGDTRYTQKFKGKATLTADKSSSTAYMQLSSLASEDSAVYYCARGRRTEAWFAYWGQGTLVTVSA

SEQ ID NO: 1194 - protein, 120 aa, Artificial Sequence
  source: /note="Description of Artificial Sequence: Synthetic heavy chain variable domain"
QVTLKESGPGILQPSQTLSLTCSFSGFSLSTSGMGVGWIRQPSGKGLEWLAHIWWDDVKRYNPALKSRLTISKDASSSQVFLKIASVDTAETATYYCAHILDRAYYFDYWGQGTTLTVTS

SEQ ID NO: 1195 - protein, 118 aa, Artificial Sequence
  source: /note="Description of Artificial Sequence: Synthetic heavy chain variable domain"
QVTLKESGPGILKPSQTLSLTCSFSGFSLSTSGMIGWIRQPSGKGLEWLAHIWWDDDKYYNPSLKSQLTISKDSSRNQVFLKITSVDTADTATYYCARRGTAYYFDYWGQGTTLTVSS

SEQ ID NO: 1196 - protein, 115 aa, Artificial Sequence
  source: /note="Description of Artificial Sequence: Synthetic heavy chain variable domain"
QVQLKESGPDLVQPSQTLSLTCTVSGFSLTFYGVHWVRQPPGKGLEWVGTMGWDDKKYYNSALKSRLSISRDTSKNQVFLKLSSLQTEDTAMYYCTRGGTGFDYWGQGTTLTVSS

SEQ ID NO: 1197 - protein, 121 aa, Artificial Sequence
  source: /note="Description of Artificial Sequence: Synthetic heavy chain variable domain"
QVQLQQPGAELVKPGASVKLSCKASGYTFTSYWMHWVKQRPGQGLEWIGVINPSNGRTNYNEKFKSKATLTVDKSSSTAYMQLSSLTSEDSAVYYCARRRELGTLYAMDYWGQGTSVTVSS

SEQ ID NO: 1198 - protein, 115 aa, Artificial Sequence
  source: /note="Description of Artificial Sequence: Synthetic heavy chain variable domain"
QVQLKQSGPGLVAPSQSLFITCTVSGFSLTSYEINWVRQPPGKGLEWLGVIWTGGSTNYNSALISRLSISKDNSKSLVFLKMNSLQTDDTAIYYCVRGVYAMDYWGQGTSVTVSS

SEQ ID NO: 1199 - protein, 119 aa, Artificial Sequence
  source: /note="Description of Artificial Sequence: Synthetic heavy chain variable domain"
EVQLQQSGPELVKPGASVKMSCKASGYTFTNYVMHWVKQKPGQGLEWIGYINPYNDGTKYNEKFKGKATLTSDKSSTTAYMALSSLTSEDSAVYYCAVAYYSNWGFAYWGQGTLVTVSA

SEQ ID NO: 1200 - protein, 120 aa, Artificial Sequence
  source: /note="Description of Artificial Sequence: Synthetic heavy chain variable domain"
QVQLEESGAELARPGASVKLSCKASGYSYWMQWIKQRPGQGLEWIGAIYPGNGDTRYTQKFKGKATLTADKSSSTAYMQLSSLASEDSAVYYCARSPAYYRYGEGYFDYWGQGTTLTVSS

SEQ ID NO: 1201 - protein, 118 aa, Artificial Sequence
  source: /note="Description of Artificial Sequence: Synthetic heavy chain variable domain"
QIQLVQSGPELKKPGETVKISCKASGYTFTNYGMNWVKQAPGKGLKWMGWINTYTGEPAYADDFKGRFAFSLETSASAAYLQINNLKNEDTATFFCANMRPTRGFAYWGQGTLGTVSA

SEQ ID NO: 1202 - protein, 118 aa, Artificial Sequence
  source: /note="Description of Artificial Sequence: Synthetic heavy chain variable domain"
EVQLQQSGPGLVRTGASVKISCKASGYSFTGYYMHWVKQSHGKSLEWIGYISCYNGATTYNQNFKGKATFIVDTSSSTAYMQFNSLTSEDSAVYYCARSDGGHAMDYWGQGTSVTVSS

SEQ ID NO: 1203 - protein, 117 aa, Artificial Sequence
  source: /note="Description of Artificial Sequence: Synthetic heavy chain variable domain"
EVQLQQSGPELEKPGASVKISCKASGYSFTGYNMNWVKQSNGKSLEWIGNIDPYYGGSSYKQKFEGKATLTVDKSSSTAYMQLKSLTSEDSAVYYCARGGSNFFDYWGQGTTLTVSS

SEQ ID NO: 1204 - protein, 117 aa, Artificial Sequence
  source: /note="Description of Artificial Sequence: Synthetic heavy chain variable domain"
DVKLVESGGGLVKPGGSLKLSCAASGFTFSSYTMSWVRQTPEKRLEWVATISSGGSYPYYPDSVKGRFTISRDNAKNTLYLQMSSLKSEDTAMYYCTRDVYDGYSYWGQGTTLTVSS

SEQ ID NO: 1205 - protein, 123 aa, Artificial Sequence
  source: /note="Description of Artificial Sequence: Synthetic heavy chain variable domain"
EVQLQQSGAELVKPGASVKLSCTASGFNIKDTYIHWVKQRPEQGLEWIGRIDPANGNTKYDPKFQGKATITPDTSSNTAYLQLSSLTSEDTAVYYCARSWRNYGSSFWYFDVWGAGTTVTVSS

SEQ ID NO: 1206 - protein, 119 aa, Artificial Sequence
  source: /note="Description of Artificial Sequence: Synthetic heavy chain variable domain"
QVQLKQSGPGRVQPSQSLSITCTVSGFSLTSNGVVHWVRQSPGKGLEWLGVLWSGGSTDYNAAFISRLSISKDNYKSQVFFKMNSLQANDTAIYYCARNNNRYGAMDYWGQGTSVTVSS

SEQ ID NO: 1207 - protein, 117 aa, Artificial Sequence
  source: /note="Description of Artificial Sequence: Synthetic heavy chain variable domain"
QVQLKESGPGLVAPSQSLSIPCTVSGFSLTNYGVHWVRQPPGKGLEWLGVIWAGGITNYNSALMSRLSISEDNSKSQVFLKMNSLQTDDTAMYYCARNLGPYAMDYWGQGTSVTVSS

SEQ ID NO: 1208 - protein, 117 aa, Artificial Sequence
  source: /note="Description of Artificial Sequence: Synthetic heavy chain variable domain"
EVQLQQSGPDLVKPGASVKISCKASGYSFTGYYMHWVKQSHGKSLEWIGRVNPNNGGTSYNQKFKGKAILTADKSSSTAYMELRSLTSEDSAVYYCARGSYDYAEGWGQGTLVTVSA

SEQ ID NO: 1209 - protein, 117 aa, Artificial Sequence
  source: /note="Description of Artificial Sequence: Synthetic heavy chain variable domain"
EIQLQQSGPELVKPGASVKVSCKASGYAFTSYNMYWVMQSHGKSLEWIGYVDPYNGGTSYNQKFKGKATLTVDKSSSTAYMHLNSLTSEDSAVYYCARENYRYFDYWGQGTTLTVSS

SEQ ID NO: 1210 - protein, 124 aa, Artificial Sequence
  source: /note="Description of Artificial Sequence: Synthetic heavy chain variable domain"
EVQLVESGGGLVQPKGSLKLSCAASGFTFNTYAMNWVRQAPGKGLEWVARIRIKSNNYATYYADSVKDRFTISRDDSQNMLYLQMNNLKTEDTAVYYCVRQGYSYDWGPWFAYWGQGTLVTVSA

SEQ ID NO: 1211 - protein, 118 aa, Artificial Sequence
  source: /note="Description of Artificial Sequence: Synthetic heavy chain variable domain"
EVQLVESGGGLVKPGGSLKLSCAASGFTFSDYYMFWVRQTPEKRLEWVATISDGGSYTYFPDSVKGRFTISRDNAQNNLYLQMSSLKSEDTAMYYCARAGTLYAMDYWGQGTSVTVSS

SEQ ID NO: 1212 - protein, 122 aa, Artificial Sequence
  source: /note="Description of Artificial Sequence: Synthetic heavy chain variable domain"
QVALKESGPGILQPSQTLSLTCSFSGFSLSTSGMGVGWIRQPSGKGLEWLAHIWWDDVKRYNPALKSRLTISKDTSSSQVFLKIASVDTADTATYYCARMEDYGSSSYFDFWGHGTTLTVSS

SEQ ID NO: 1213 - protein, 123 aa, Artificial Sequence
  source: /note="Description of Artificial Sequence: Synthetic heavy chain variable domain"
EVQLQQSGPELVKPGASVKMSCKASGYTFTSYVMHWVKQKPGQGLEWIGYINPYNDGTKYNEKFKGKATLTSDKSSSTAYMELSSLTSEDSAVYYCARGALYYGNYLGYFDVWGAGTTVTVSS

SEQ ID NO: 1214 - protein, 118 aa, Artificial Sequence
  source: /note="Description of Artificial Sequence: Synthetic heavy chain variable domain"
SDVQLQESGPDLVKPSQSLSLTCTVTGYSITSGYSWHWIRQFPGNKLEWMGYIHYSGSTNYNPSLKSRISITRDTSKNQFFLQFKSVTTEDSATYYCALEGNYDGFAYWGQGTLVTVS

SEQ ID NO: 1215 - protein, 116 aa, Artificial Sequence
  source: /note="Description of Artificial Sequence: Synthetic heavy chain variable domain"
QVQMKESGPGLVAPSQSLSITCTVSGSSLTNYGVHWVRQPPGKGLEWLGVIWAGGSTNYNSALMSRLSISKDNSKSQVFLKMNSLQTDDTAMYYCARDWEGWFAYWGQGTLVTVSA

SEQ ID NO: 1216 - protein, 117 aa, Artificial Sequence
  source: /note="Description of Artificial Sequence: Synthetic heavy chain variable domain"
QVQLKESGPGLVAPSQSLSITCTVSSGFSLTDYGVSWIRQPPGKGLEWLGVIWGGGSTYYNSALKSRLSISKDNSKSQVFLELNSLQTDDTAIYYCAKHYGHYAAYWGQGTLVTVSA

SEQ ID NO: 1217 - protein, 120 aa, Artificial Sequence
  source: /note="Description of Artificial Sequence: Synthetic heavy chain variable domain"
EVQLQQSGPELVKPGASVKMSCKASGYTFTSYVMHWVKQKPGQGLEWIGYINPYNDGTEYNEKFKGKATLTSDKSSSTAYMELSSLTSEDSAVYYCARGVYDGYSYFDYWGQGTTLTVSS

SEQ ID NO: 1218 - protein, 118 aa, Artificial Sequence
  source: /note="Description of Artificial Sequence: Synthetic heavy chain variable domain"
QVQLKESGPGLVAPSQSLSITCTVSGFSLTNYGVVHWVRQPPGKGLEWLGVIWAGGITNYNSALMSRLSISEDNSKSQVFLKMNSLQTDDTAMYYCARNLGPYAMDYWGQGTSVTVSS

SEQ ID NO: 1219 - protein, 116 aa, Artificial Sequence
  source: /note="Description of Artificial Sequence: Synthetic heavy chain variable domain"
QVQLKESGPGLVAPSQSLSITCTVSGFSLTDYGVSWIRQPPGKGLEWLGVVWGGGSTYYNSALKSRLSITKDNSKSQVFLKMNSLQTDDTAMYYCAKQRGQYGAYWGQGTLVTVSA

SEQ ID NO: 1220 - protein, 119 aa, Artificial Sequence
  source: /note="Description of Artificial Sequence: Synthetic heavy chain variable domain"
QVQLKESGPGLVAPSQSLSITCTVSGFSLTNYAVHWVRQSPGKGLEWLGVIWSDGSTDYNAAFISRLSISKDNSKSQVFFKMNSLQADDTAMYYCARKKGGWFPWFAYWGQGTLVTVSA

SEQ ID NO: 1221 - protein, 117 aa, Artificial Sequence
  source: /note="Description of Artificial Sequence: Synthetic heavy chain variable domain"
EVQLQQSGPDLVKPGASVKISCKASGYSFTGYYMHWVKQSHGKRLEWIGRVNPNNGGTNYNQKFKGKAILTVDKSSSTAYMELRSLTSEDSAVYYCARGSYDNAEGWGQGTLVTVSA

SEQ ID NO: 1222 - protein, 121 aa, Artificial Sequence
  source: /note="Description of Artificial Sequence: Synthetic heavy chain variable domain"
QVQLQQSGAELVRPGTSVKVSCKASGYAFTNYLIEWVKQRPGQGLEWIGVINPGSGGTNSNEKFKAKATLTADKSSSTAYMQLSSLTSADSAVYFCARSDYDYAFYAMDYWGQGTSVTVSS

SEQ ID NO: 1223 - protein, 122 aa, Artificial Sequence
  source: /note="Description of Artificial Sequence: Synthetic heavy chain variable domain"
EFQLQQSGPELVKPGASVKMSCKASGYTFTSYVMHWVKQKPGQGLEWIGYINPYNDGTKYNEKFKGKATLTSDKSSSTAYMELSSLTSEDSAVYYCARDRSGYEDYYGMDYWGQGTSVTVSS

SEQ ID NO: 1224 - protein, 117 aa, Artificial Sequence
  source: /note="Description of Artificial Sequence: Synthetic heavy chain variable domain"
EVQLVESGGDLVKPGGSLKLSCAASGFTFSSYGMSWVRQTPDKRLEWVATISSGGSYTYYPDSVKGRFTISRDNAKNTLYLQMSSLKSEDTAMYYCARRRADAMDYWGQGTSVTVSS

SEQ ID NO: 1225 - protein, 116 aa, Artificial Sequence
  source: /note="Description of Artificial Sequence: Synthetic heavy chain variable domain"
QVQLKESGPGLVAPSQSLSITCTVSGFSLTDYGVSWIRQPPGKGLEWLGVVWGGGSTYYNSALKSRLSISKDNSKSQVFLKMNSLQTDDTAMYYCAKQRGQYGAYWGQGTLVTVSA

SEQ ID NO: 1226 - protein, 118 aa, Artificial Sequence
  source: /note="Description of Artificial Sequence: Synthetic heavy chain variable domain"
EVQLQQSGPELVKPGASVKMSCKASGYTFTNYVMHWVKQKPGQGLEWIGYINPYNDGTKYNEKFKGKATLTSDKSSTTAYMALSSLTSEDSAVYYAVAYYSNWGFAYWGQGTLVTVSA

SEQ ID NO: 1227 - protein, 116 aa, Artificial Sequence
  source: /note="Description of Artificial Sequence: Synthetic heavy chain variable domain"
QVQLQQSGPELVRPGASVKMSCKASGYTFTSYWMHWVKQRPGQGLEWIGMIDPSNSETRLNQKFKDKATLNVDKSSNTAYMQLSSLTSEDSAVYYCAVMDYYFDYWGQGTTLTVSS

SEQ ID NO: 1228 - protein, 115 aa, Artificial Sequence
  source: /note="Description of Artificial Sequence: Synthetic heavy chain variable domain"
EVQLQQSGPELVKPGASVKISCKASGYTFTDYNMHWVKQSHGKSLEWIGFFYPYNGNTVYSQKFKSKATLTVDNSSSTAYMELRSLTSEDSAVYYCARLNWEGYWGQGTTLTVSS

SEQ ID NO: 1229 - protein, 119 aa, Artificial Sequence
  source: /note="Description of Artificial Sequence: Synthetic heavy chain variable domain"
QVQLQQSGPELVKPGASVRISCKASGYTFTSYYIHWVKQRPGQGLEWIGWIYPGNGNTKYNEKFKGKATLTADKSSSTAYMQISSLTSEDSAVYFCARERWLLLWFAYWGQGTLVTVSA

SEQ ID NO: 1230 - protein, 118 aa, Artificial Sequence
  source: /note="Description of Artificial Sequence: Synthetic heavy chain variable domain"
QIQLVQSGPELKKPGETVKISCKASGYTFTNYGMNWVKQAPGKGLKWVGWINTYTGEPTYADDFKGRFAFSLETSASTAYLQIDNLKNEDTATYFCARVGDYVGFDYWGQGTTLTVSS

SEQ ID NO: 1231 - protein, 117 aa, Artificial Sequence
  source: /note="Description of Artificial Sequence: Synthetic heavy chain variable domain"
QIQLVQSGPELTKPGETVKISCKASGYTFTDYSLHWVKQALGKGLKWMGWINTETGEPAYADDFKGRFAFSLETSASTAYLQINDLKNEDTTTYFCGIYDGYAMDYWGQGTSVTVSS

SEQ ID NO: 1232 - protein, 118 aa, Artificial Sequence
  source: /note="Description of Artificial Sequence: Synthetic heavy chain variable domain"
QIQLVQSGPELKKPGETVKISCKASGYTLTNYGMNWVKQAPGKGLKWMGWINTYTGEPTYADDFKGRFAFSLETSARIVYLQINNLKNEDTATYFCAKYEAHEGFVYWGQGTLVTVSA

SEQ ID NO: 1233 - protein, 116 aa, Artificial Sequence
  source: /note="Description of Artificial Sequence: Synthetic heavy chain variable domain"
QVQLKESGPGLVAPSQSLSITCAVSGFSLTSFGVHWVRQPPGKGLEWLGVIWAGGSTNYYSALMSRLSISIDNSKSQVFLKMNSLQTDDTAMYYCARDWEGWFAYWGQGTLVTVSA

SEQ ID NO: 1234 - protein, 117 aa, Artificial Sequence
  source: /note="Description of Artificial Sequence: Synthetic heavy chain variable domain"
EIQLQQSGPELVKPGASVKVSCKASGYAFTSYNMYWVSQSHGKSLEWIGYIDPYNGGTSYNQKFRGKATLTVDKSSSTAYMHLNSLTSEDSAVYYCARENYRYFDFWGQGTTLTVSS

SEQ ID NO: 1235 - protein, 124 aa, Artificial Sequence
  source: /note="Description of Artificial Sequence: Synthetic heavy chain variable domain"
QITLKESGPTLVKPTQTLTLTCTFSGFSLSTSGMGVGWIRQPPGKALEWLAHIWWDDVKRYSPSLKSRLTITKDTSKNQVVLTMTNMDPVDTATYYCARIVSFDNDVVSAMDYWGQGTLVTVSS

SEQ ID NO: 1236 - protein, 117 aa, Artificial Sequence
  source: /note="Description of Artificial Sequence: Synthetic heavy chain variable domain"
QVQLVQSGAEVKKPGASVKVSCKASGYTFTRYWIHWIRQAPGQGLEWMGYINPTTVYTEFNQNFKDRVTMTRDTSTSTVYMELSSLRSEDTAVYYCARGGSNFFDYWGQGTTVTVSS

SEQ ID NO: 1237 - protein, 125 aa, Artificial Sequence
  source: /note="Description of Artificial Sequence: Synthetic heavy chain variable domain"
QITLKESGPTLVKPTQTLTLTCTFSGFSLSTSGMGVGWIRQPPGKALEWLTDIWWDDNKYYNPSLKSRLTITKDTSKNQVVLTMTNMDPVDTATYYCARRVNYYYDPYYAMDYWGQGTTLVTVSS

SEQ ID NO: 1238 - protein, 123 aa, Artificial Sequence
  source: /note="Description of Artificial Sequence: Synthetic heavy chain variable domain"
QVTLKESGPGILQPSQTLSLTCSFSGFSLSTSGMGVGWIRQPSGKGLEWLAHIWWDDVKRYNPALKSRLTISKDTSSSQVFLKIASVDTADTATYYCARIADYGGDYYAMDYWGQGTSVTVSS

SEQ ID NO: 1239 - protein, 118 aa, Artificial Sequence
  source: /note="Description of Artificial Sequence: Synthetic heavy chain variable domain"
QVQLVQSGAEVKKPGASVKVSCKASGYTFTNYGMNWVRQAPGQRLEWMGWINTYTGDPTYADDFKGRVTITRDTSASTAYMELSSLRSEDTAVYYCARIGGNSPSDYWGQGTTVTVSS

SEQ ID NO: 1240 - protein, 118 aa, Artificial Sequence
  source: /note="Description of Artificial Sequence: Synthetic heavy chain variable domain"
QVQLVQSGAEVKKPGASVKVSCKASGYTFTNYGMNWVRQAPGQGLEWMGWINTYTGEPTYADDFKGRVTMTTDTSTSTAYMELRSLRSDDTAVYYCARIGDSSPSDYWGQGTLVTVSS

SEQ ID NO: 1241 - protein, 117 aa, Artificial Sequence
  source: /note="Description of Artificial Sequence: Synthetic heavy chain variable domain"
QIQLVQSGPELKKPGETVKISCKASGYTFTDYSMHWVKQAPGKGLKWMGWINTETGEPGYADDFKGRFAFSLETSASTAYLQINNLKNEDTATYFCARYDGYAMDYWGQGTSVTVSS

SEQ ID NO: 1242 - protein, 124 aa, Artificial Sequence
  source: /note="Description of Artificial Sequence: Synthetic heavy chain variable domain"
QVTLKESGPGILQPSQTLSLTCSFSGFSLSTSGMGVGWIRQPSGEGLEWLADIWWDDNKYYNPSLKSRLTISKDTSSNQVFLKITSVDTADTATYYCARRVNYVYDPYYAMDYWGQGTSVTVSS

SEQ ID NO: 1243 - protein, 119 aa, Artificial Sequence
  source: /note="Description of Artificial Sequence: Synthetic heavy chain variable domain"
EVQLQQSGPELVKPGASVKISCKASGYSFTGYKMHWVKQSHVKSLEWIGRINPYNGATSYNQNFKDKATLTVDKSSSTAYMDLHSLTSEDSAVYFCARGDYRYDWFAYWGQGTLVTVSA

SEQ ID NO: 1244 - protein, 121 aa, Artificial Sequence
  source: /note="Description of Artificial Sequence: Synthetic heavy chain variable domain"
QAQLQQSGAELVRPGTSVKVSCKASGYAFTNYLIEWVKQRPGQGLEWIGVINPGTGGTNYNENFKGKATLTADKSSSTAYMQLSSLTSDDSAVYFCARSPYDYHEGAMDYWGQGTSVTVSS

SEQ ID NO: 1245 - protein, 120 aa, Artificial Sequence
  source: /note="Description of Artificial Sequence: Synthetic heavy chain variable domain"
QVTLKESGPGILQSSQTLSLTCSFSGFSLSTSGMGVGWIRQPSGKGLEWLAHIWWDDVKRYNPVLKSRLTISKDTSSSQVFLKIASVDTADTATYYCARLVDDLYYFDYWGQGTTLTVSS

SEQ ID NO: 1246 - protein, 117 aa, Artificial Sequence
  source: /note="Description of Artificial Sequence: Synthetic heavy chain variable domain"
QIQLVQSGPELKKPGETVKISCKASGYTFTDYSMHWVKQAPGKGLKWMGWINTETVEPTYADDFMGRFAFSLETSASTAFLQINNLENEDTATYFCARFGSYAMDYWGQGTSVTVSS

SEQ ID NO: 1247 - protein, 124 aa, Artificial Sequence
  source: /note="Description of Artificial Sequence: Synthetic heavy chain variable domain"
QVTLKESGPGILQPSQTLSLTCSFSGFSLSTSGMGVGWIRQPSGKGLEWLAHIWWDDVKRYNPALKSRLTISKDTSSSQVFLKIASVDTADTATYYCARIVSFDNDVVSAMDYWGQGTSVTVSS

SEQ ID NO: 1248 - protein, 117 aa, Artificial Sequence
  source: /note="Description of Artificial Sequence: Synthetic heavy chain variable domain"
QVQLQQSGAELAKPGASVKMSCKASGYTFTRYWIHWIKQRPGQGLEWIGYINPTTVYTEFNQNFKDKATLTADKSSTTASMQLSSLTSEDSAVYYCARGGSNFFDYWGQGTTLTVSS

SEQ ID NO: 1249 - protein, 117 aa, Artificial Sequence
  source: /note="Description of Artificial Sequence: Synthetic heavy chain variable domain"
EVKLEESGGGLVQPGESMKLSCAASGFTFSDAWMDWVRQSPEKGLEWVAEIRNKANNHATYYAESVKGKFTISRDDSKSRVYLQMNNLRAADTGIYYCTAYSNFAYWGQGTLVTVST

SEQ ID NO: 1250 - protein, 118 aa, Artificial Sequence
  source: /note="Description of Artificial Sequence: Synthetic heavy chain variable domain"
EVQLQQSGAELVRPGASVKLSCTASGFNIKDSLLHWVKQRPEKGLEWIGWIDPEDGETKYAPNFQDKATITTDSSSNTAYLQLISLTSVDTAIYYCAYGNYVRHFDYWGQGTTLTVSS

SEQ ID NO: 1251 - protein, 121 aa, Artificial Sequence
  source: /note="Description of Artificial Sequence: Synthetic heavy chain variable domain"
QVQLQQSGTELVRPGTSVRVSCKASGYAFGNHLIEWVKQRPGQGLEWIGVINPGTGGTHYNEKFKDKARLTADKSSNTAYMHLNSLTSDDSAVYFCARSPYDYHEGAMDYWGQGTSVTVSS

SEQ ID NO: 1252 - protein, 124 aa, Artificial Sequence
  source: /note="Description of Artificial Sequence: Synthetic heavy chain variable domain"
QVQLQQSGPELVKPGASVKISCKASGYAFSSSWMNWVKQRPGKGLEWIGRIYPGDGDTNYNGKFKGKATLTADKSSSTAYMQLSSLTSEDSAVYFCAMGIYNYDGSRYYSMDYWGQGTSVTVSS

SEQ ID NO: 1253 - protein, 120 aa, Artificial Sequence
  source: /note="Description of Artificial Sequence: Synthetic heavy chain variable domain"
QVQLQQPGAELVKPGASVKLSCKASGYTFTTYWMHWVKQRPGQGLEWIGEIDPSDSYTYYNQKFKGKATLTVDKSSSTAYMQLSSLTSEDSAVYYCARGDYGNPYAMDYWGQGSSVTVSS

SEQ ID NO: 1254 - protein, 124 aa, Artificial Sequence
  source: /note="Description of Artificial Sequence: Synthetic heavy chain variable domain"
QVTLKESGPGILQPSQTLSLTCSFSGFSLSTSNTGIGWIRQPSGTGLEWLAHIWWNDDKYYNPSLKSRLTISKETSNNQVFLKITNVDTADTASYFCVQIGRDYSNYAWYFDVWGAGTTVTVSS

SEQ ID NO: 1255 - protein, 124 aa, Artificial Sequence
  source: /note="Description of Artificial Sequence: Synthetic heavy chain variable domain"
QVTLKESGPGILQPSQTLSLTCSFSGFSLSTSGMGVGWIRQPSGEGLEWLTDIWWDDNKYYNPSLKSRLTISKDTSSNQVFLNITSVDTADTATYYCARRVNYYYDPYYAMDYWGQGTSVTVSS

SEQ ID NO: 1256 - protein, 112 aa, Artificial Sequence
  source: /note="Description of Artificial Sequence: Synthetic heavy chain variable domain"
QIQLVQSGPELKKPGETVKISCKASGYSFTDYSMHWVKQAPGKGLKWMGWINTETVEPTYADDFMGRFAFSLETSASTAFLQINNLENEDTATYFCARFGSYAMDYWGQGTS

SEQ ID NO: 1257 - protein, 121 aa, Artificial Sequence
  source: /note="Description of Artificial Sequence: Synthetic heavy chain variable domain"
QVQLQQSGAELARPGASVKLSCKASGYTFTDQYINWVKQRTGQGLEWIGEIYPGRGNTYYNEKFKGKATLTADKSSSTAYMQLSSLTSEDSAVYFCAREDGGYDDAWFAYWGQGTLVTVSA

SEQ ID NO: 1258 - protein, 120 aa, Artificial Sequence
  source: /note="Description of Artificial Sequence: Synthetic heavy chain variable domain"
QVTLKESGPGILQPSQTLSLTCSFSGFSLSTSGMGVGWIRQPSGKGLEWLAHIWWDDVKRYKPALKSRLTVSKDTSSNQVFLKIATVDAADTGTYYCARIVDGHPPFAYWGQGTLVTVSA

SEQ ID NO: 1259 - protein, 119 aa, Artificial Sequence
  source: /note="Description of Artificial Sequence: Synthetic heavy chain variable domain"
EVQLQQSGPELVKPGASVKISCKASGYSFSRFYMHWVKQSPENSLEWGEINPSTGGTISYNQKFKGKATLTVDKSSSTAYMQLKSLTSEESAVYYCTRGYGSNWYFDVWGAGTTVTVST

SEQ ID NO: 1260 - protein, 118 aa, Artificial Sequence
  source: /note="Description of Artificial Sequence: Synthetic heavy chain variable domain"
QIQLVQSGPELKRPGETVKISCKASGYTFTNYGMNWVKQAPGKGLKWMGWINTYTGDPTYADDFKGRFAFSLETSASTAYLQINNLKNEDTATYFCARIGGNSPSDYWGQGTSLTVSS

SEQ ID NO: 1261 - protein, 121 aa, Artificial Sequence
  source: /note="Description of Artificial Sequence: Synthetic heavy chain variable domain"
SDVQLQESGPGLVKPSQSLSLTCTVTGYSITSDYAWNWIRQFPGNKLEWMGYISYSGSTSYNPSLKSRISITRDTSKNQFFLQLNSVTTEDTATYYCARFYYGSSYAMDYWGQGTSVTVSS

SEQ ID NO: 1262 - protein, 117 aa, Artificial Sequence
  source: /note="Description of Artificial Sequence: Synthetic heavy chain variable domain"
QVQLQQSGAELAKPGASVKMSCKASGYTFTTYWMHWVKQRPGQGLEWIGYINPSSGYTEYNQKFKDKATLTADKSSSTAYMQLSSLTSEDSSVYYCARKGSNRGFAYWGQGTLVTVS

SEQ ID NO: 1263 - protein, 116 aa, Artificial Sequence
  source: /note="Description of Artificial Sequence: Synthetic heavy chain variable domain"
EVQLQQSGAELVKPGASVKLSCTVSGFNIKDTYIHWVKQRPEQGLEWIGRIDPANGNTKYDPKFQGKATITADTSSNTAYLQLSSLTSEDTAVYYCARPTGYFEYWGQGTTLTVSS

SEQ ID NO: 1264 - protein, 117 aa, Artificial Sequence
  source: /note="Description of Artificial Sequence: Synthetic heavy chain variable domain"
EVKLEESGGGLVQFGGSMKLSCAASGFTFSDAWMDWVRQSPEKGLEWVAEIRNKANNHATYYPESVKGRFTISRDDSKSRVYLQMNNLRAEDTGIYYCTGYSSFAYWGQGTLVTVSA

SEQ ID NO: 1265 - protein, 118 aa, Artificial Sequence
  source: /note="Description of Artificial Sequence: Synthetic heavy chain variable domain"
QIQLVQSGPELKKPGETVKISCKASGYTFTTAGMQWVQKMPGKGFKWIGWINTHSGEPKYADDFKGRFAFSLETSASTAYLQISNLKDEDTATFFCAPLWSDSSFAYWGQGTLVTVSA

SEQ ID NO: 1266 - protein, 121 aa, Artificial Sequence
  source: /note="Description of Artificial Sequence: Synthetic heavy chain variable domain"
QVQLQQSGADLVRPGTSVKVSCKASGYSFTNYLIEWVKQRPGQGLEWIGVINPGSGGTHYNEKFKDKAVLTADKSSTTAHMQLSSLTSDDSAVYFCARSPYDYNDGAMDYWGQGTSVTVSS

SEQ ID NO: 1267 - protein, 119 aa, Artificial Sequence
  source: /note="Description of Artificial Sequence: Synthetic heavy chain variable domain"
EVQLQQSGPELVKPGASVKISCKASGYSFSRFYMHWVKQSPENSLEWIGEINPSTGGTSYNQKFKGKATLTVDKSSSTAYMQLKSLTSEESAVYYCTRGYGSNCYFDVWGAGTTVTVST

SEQ ID NO: 1268 - protein, 117 aa, Artificial Sequence
  source: /note="Description of Artificial Sequence: Synthetic heavy chain variable domain"
QVQLQQSGPELVKPGTLVKISCKASGYTFTSYDINWVKQRPGQGLEWIGWIYPGDGNTKYSEKFKGKATLTADKSSSTAYMQLTSLTSENSAVYFCARDYDYPFAYWGQGTLVTVSA

SEQ ID NO: 1269 - protein, 121 aa, Artificial Sequence
  source: /note="Description of Artificial Sequence: Synthetic heavy chain variable domain"
EVQLVECGGCLVKPGGYLKLSCAASGFTFSSYAMSWVRQSPEKRLEWVAEISIGGSYTYYPDTVTGRFTISRDNAKNTLYLEMSSLRSEDTAMYYCAREGYDYDVRAMDYWGQGTSVTVSS

SEQ ID NO: 1270 - protein, 119 aa, Artificial Sequence
  source: /note="Description of Artificial Sequence: Synthetic heavy chain variable domain"
QVQLKESGPGLVAPSQSLSITCAVSGFSLTSFAIHWFRKPPGKGLEWLGVIWTGGTTNYNSALMSRLSISKDNSKSQVFLKMNSLQTDDTAMYYCARDDYDNNYAMDYWGQGTSVTVSS

SEQ ID NO: 1271 - protein, 117 aa, Artificial Sequence
  source: /note="Description of Artificial Sequence: Synthetic heavy chain variable domain"
EVQLVESGGGLVQPKGSLKLSCAVSAFTFTTYAMNWVRQAPGKGLEWVARIRNKSNNYATYYADSVKDRFTISRDDSQSMLYLQMNNLKIEDTAMYYCVFYYDYVYWGQGTLVTVSA

SEQ ID NO: 1272 - protein, 118 aa, Artificial Sequence
  source: /note="Description of Artificial Sequence: Synthetic heavy chain variable domain"
QIQLVQSGPELKKPGETVKISCKASGYTFTNYGMNWVKQAPGKGLKWMAWINTYTGEPTYADDFKGRFAFSLETSASTASLQIINLKNEDTATYFCARIGDSSPSDYWGQGTTLTVSS

SEQ ID NO: 1273 - protein, 118 aa, Artificial Sequence
  source: /note="Description of Artificial Sequence: Synthetic heavy chain variable domain"
EVKLVESGGDLVKPGGSLKLSCAASGFAFSSYDMSWVRQTPEKRLEWVATISSGGSYTYYPDSVKGRFTISRDNVRDTLYLQMSSLRSEDTALYYCARQAIGTYFDYWGQGTTLTVSS

SEQ ID NO: 1274 - protein, 120 aa, Artificial Sequence
  source: /note="Description of Artificial Sequence: Synthetic heavy chain variable domain"
DVQLVESGGGLVQPGGSRKLSCAASGFTFSSFGMHWVRQAPEKGLEWVAYISSGSSNIYYADTVKGRFTISRDNPKNTLFLQMTSLRSEDTAMYYCARGYYGNYDAMDYWGQGTSVTVSS

SEQ ID NO: 1275 - protein, 120 aa, Artificial Sequence
  source: /note="Description of Artificial Sequence: Synthetic heavy chain variable domain"
EVLLQRSGPDLVKPGASVTIPCKASGYTFTDYNMDWVKQSHGKSLEWIGNINTYNGGTIYNQKFKGKATLTVDKPSSTAYMELRSLTSEDTAVYYCARRLRYGGHYFDYWGQGTALTVSS

SEQ ID NO: 1276 - protein, 117 aa, Artificial Sequence
  source: /note="Description of Artificial Sequence: Synthetic heavy chain variable domain"
EVMLVESGGDLVKPGGSLKLSCAASGFTFSSYAMSWVRQTPEKRLEWVAYISGGGDHIYYPDSVRGRFTISRDNAKDTLYLQMSSLRSEDTALYDCARVRDWYFDVWGAGTTVTVSS

SEQ ID NO: 1277 - protein, 114 aa, Artificial Sequence
  source: /note="Description of Artificial Sequence: Synthetic heavy chain variable domain"
QVQLQQSGTELLRPGASVKISCKATGYTFSSYWMEWVKQRPGHGLEWIGEILPGSGTTQYNEKFKGKATFTADTSSNTAYMHLSSLTSEDSAVYYCARGTNSLWGQGTLVTVSA

SEQ ID NO: 1278 - protein, 124 aa, Artificial Sequence
  source: /note="Description of Artificial Sequence: Synthetic heavy chain variable domain"
QVTLKESGPGILQPSQTLSLTCSFSGFSLSTSGMGVGWIRQPSGKGLEWLALIWWDDVKRYNPALKSRLTISKDASSSQVFLKIASVDTADTATYYCARIASYDYDVVYAMDYWGQGTSVSVSS

SEQ ID NO: 1279 - protein, 117 aa, Artificial Sequence
  source: /note="Description of Artificial Sequence: Synthetic heavy chain variable domain"
EVQLVETGGGLVQPKGSLKLSCAVSAFTFTTYAMNWVRQAPGKGLEWVARIRNKSNNYATYYADSVKDRFTISRDDSQSMLYLQMNNLKIEDTAMYYCVFYYDYVYWGQGTLVTVSA

SEQ ID NO: 1280 - protein, 120 aa, Artificial Sequence
  source: /note="Description of Artificial Sequence: Synthetic heavy chain variable domain"
EVQLVESGGGLVQPGGSLRLSCAASGFTFSRYWMTWVRQAPGKGLEWVAEINPDSSTANYTPYLKDRFTISRDNAKNSLYLQMNSLRAEDTAVYYCARPVDGYYDAMDPWGQGTTVTVSS

SEQ ID NO: 1281 - protein, 123 aa, Artificial Sequence
  source: /note="Description of Artificial Sequence: Synthetic heavy chain variable domain"
QVTLKESGPALVKPTQTLTLTCTFSGFSLSTSGMGVGWIRQPPGKALEWLADIWWDDNKYANPSLKSRLTISKDTSSNQVFLTMTNVDPVDTATYYCARRANYGNPYYAQDYWGQGTTVTVSS

SEQ ID NO: 1282 - protein, 120 aa, Artificial Sequence
  source: /note="Description of Artificial Sequence: Synthetic heavy chain variable domain"
EVKLLESGGGLVQPGGSLKLSCAASGFDFSRYWMSWVRQAPGKGLEWIGEINPDSSTINYTPSLKDKFIISRDNAKNTLYLQMSKVRSEDTALYYCARPVDGYYDAMDYWGQGTSVTVSS

SEQ ID NO: 1283 - protein, 111 aa, Artificial Sequence
  source: /note="Description of Artificial Sequence: Synthetic heavy chain variable domain"
  MOD_RES (99)..(99): Any amino acid
EVQLVESGGGLVQPGGSLRLSCAASGFTFSSYWMSWVRQAPGKGLEWVANIKQDGSEKYYVDSVKGRFTISRDNAKNSLYLQMNSLRAEDTAVYYCARXAAWGQGTTVTVS

SEQ ID NO: 1284 - protein, 120 aa, Artificial Sequence
  source: /note="Description of Artificial Sequence: Synthetic heavy chain variable domain"
EVQLVESGGGLVQPGGSLRLSCAASGFTFSRYWMSWVRQAPGKGLEWIGEINPDSSTINYTPSLKDRFTISRDNAKNSLYLQMSSVRAEDTAVYYCARPVDGYYDAMDPWGQGTTVTVSS

SEQ ID NO: 1285 - protein, 112 aa, Artificial Sequence
  source: /note="Description of Artificial Sequence: Synthetic heavy chain variable domain"
EVQLVESGGGLVQPGGSLRLSCAASGFTFSRYWMTWVRQAPGKGLEWIGEINPDSSTANYTPYLKDRFTISRDNAKNSLYLQMSSVRAEDTAVYYCARPVDGYYDAMDPWGQ

SEQ ID NO: 1286 - protein, 120 aa, Artificial Sequence
  source: /note="Description of Artificial Sequence: Synthetic heavy chain variable domain"
EVQLVESGGGLVQPGGSLRLSCAASGFTFSRYWMTWVRQAPGKGLEWVGEINPDSSTANYTPYLKDRFTISRDNAKNSLYLQMNSLRAEDTAVYYCARPVDGYYDAMDPWGQGTTVTVSS

SEQ ID NO: 1287 - protein, 123 aa, Artificial Sequence
  source: /note="Description of Artificial Sequence: Synthetic heavy chain variable domain"
QVTLKESGPALVKPTQTLTLTCTFSGFSLSTPGMGVWWIRQPPGKALEWLADIWWDDNKYTNPSLKSRLTISKDTSSNQVFLTMTNVDPVDTATYYCARRANYGNPYYAQDYWGQGTTVTVSS

SEQ ID NO: 1288 - protein, 123 aa, Artificial Sequence
  source: /note="Description of Artificial Sequence: Synthetic heavy chain variable domain"
QVTLKESGPALVKPTQTLTLTCTFSGFSLSTPGMGVWWIRQPPGKALEWLADIWWDDNKYTNPSLKSRLTISKDTSKNQVVLTMTNVDPVDTATYYCARRANYGNPYYAQDYWGQGTTVTVSS

SEQ ID NO: 1289 - protein, 125 aa, Artificial Sequence
  source: /note="Description of Artificial Sequence: Synthetic heavy chain variable domain"
QVTLKESGPALVKPTQTLTLTCTFSGFSLSTPGMGYALWWIRQPPGKALEWLADIWWDDNKYTNPSLKSRLTISKDTSKNQVVLTMTNMDPVDTATYYCARRANYGNPYYAQDYWGQGTTVTVSS

SEQ ID NO: 1290 - protein, 123 aa, Artificial Sequence
  source: /note="Description of Artificial Sequence: Synthetic heavy chain variable domain"
QVTLKETGPGILQPSQTLSLTCSFSGFSLSTSGMGVGWIRQPSGEGLEWLABIWWDDNKYYNPSLKSRLTISKDTSSNQVFLKITSVDTADTATYYCARRANYGNPYYAMDYWGQGTSVTVSS

SEQ ID NO: 1291 - protein, 123 aa, Artificial Sequence
  source: /note="Description of Artificial Sequence: Synthetic heavy chain variable domain"
QVTLKESGPALVKPTQTLTLTCTFSGFSLSTSGMRVSWIRQPPGKALEWLARIDWDDDKFYSTSLKTRLTISKDTSKNQVVLTMTNMDPVDTATYYCARRANYYYYYYAMDVWGQGTTVTVSS

SEQ ID NO: 1292 - protein, 123 aa, Artificial Sequence
  source: /note="Description of Artificial Sequence: Synthetic heavy chain variable domain"
QVTLKESGPALVKPTQTLTLTCTFSGFSLSTSGMGVGWIRQPPGKALEWLADIWWDDNKYYNPSLKSRLTISKDTSSNQVFLTMTNVDPVDTATYYCARRANYGNPYYAQDYWGQGTTVTVSS

SEQ ID NO: 1293 - protein, 222 aa, Artificial Sequence
  source: /note="Description of Artificial Sequence: Synthetic heavy chain variable domain"
EVQLVESGGGLVQPGGSLRLSCAASGFDFSRYWMSWVRQAPGKGLEWIGEINPDSSTINYAPSLKDKFIISRDNAKNSLYLQMNSLRAEDTAVYYCARPDGNYWYFDVWGQGTLVTVSSASTKGPSVFPLAPSSKSTSGGTAALGCLVKDYFPEPVTVSWNSGALTSGVHTFPAVLQSSGLYSLSSVVTVPSSSLGTQTYICNVNHKPSNTKVDKKVEPKSC

SEQ ID NO: 1294 - protein, 119 aa, Artificial Sequence
  source: /note="Description of Artificial Sequence: Synthetic heavy chain variable domain"
EVKLLESGGGLVQPGGSLKLSCAASGFDFSRYWMSWVRQAPGKGLEWIGEINPDSSTINYTPSLKDKFIISRDNAKNTLYLQMSKVRSEDTALYYCARPDGNYWYFDVWGAGTTVTVSS

SEQ ID NO: 1295 - protein, 120 aa, Artificial Sequence
  source: /note="Description of Artificial Sequence: Synthetic heavy chain variable domain"
QVQLQQPGAELVRPGASVKLSCKASGYSFTTYWMNWVKQRPGQGLEWIGMIHPSDSETRLNQKFKDKATLTVDKSSSTAYMQLSSPTSEDSAVYYCARSTMIATRAMDYWGQGTSVTVSS

SEQ ID NO: 1296 - protein, 121 aa, Artificial Sequence
  source: /note="Description of Artificial Sequence: Synthetic heavy chain variable domain"
QVQLQQSGAELARPGASVKLSCKASGYTFTSYWMQWVKQRPGQGLEWIGAIYPGDGDTRYTQKFKGKATLTADKSSSTAYMQLSSLASEDSAVYYCARGKVYYGSNPFAYWGQGTLVTVSA

SEQ ID NO: 1297 - protein, 120 aa, Artificial Sequence
  source: /note="Description of Artificial Sequence: Synthetic heavy chain variable domain"
QVQLQQSGPELVKPGASVKISCKASGYAFSSSWMNWVKQRPGQGLEWIGRIYPGDGDTKYNGKFKGKATLTADKSSSTAYMQLSSLTSVDSAVYFCARSTMIATGAMDYWGQGTSVTVSS

SEQ ID NO: 1298 - protein, 119 aa, Artificial Sequence; identical to SEQ ID NO: 1294
  source: /note="Description of Artificial Sequence: Synthetic heavy chain variable domain"

SEQ ID NO: 1299 - protein, 120 aa, Artificial Sequence; identical to SEQ ID NO: 1295
  source: /note="Description of Artificial Sequence: Synthetic heavy chain variable domain"

SEQ ID NO: 1300 - protein, 121 aa, Artificial Sequence; identical to SEQ ID NO: 1296
  source: /note="Description of Artificial Sequence: Synthetic heavy chain variable domain"

SEQ ID NO: 1301 - protein, 120 aa, Artificial Sequence; identical to SEQ ID NO: 1297
  source: /note="Description of Artificial Sequence: Synthetic heavy chain variable domain"

SEQ ID NO: 1302 - protein, 119 aa, Artificial Sequence; identical to SEQ ID NO: 1294
  source: /note="Description of Artificial Sequence: Synthetic heavy chain variable domain"

SEQ ID NO: 1303 - protein, 120 aa, Artificial Sequence; identical to SEQ ID NO: 1295
  source: /note="Description of Artificial Sequence: Synthetic heavy chain variable domain"

SEQ ID NO: 1304 - protein, 121 aa, Artificial Sequence; identical to SEQ ID NO: 1296
  source: /note="Description of Artificial Sequence: Synthetic heavy chain variable domain"

SEQ ID NO: 1305 - protein, 120 aa, Artificial Sequence; identical to SEQ ID NO: 1297
  source: /note="Description of Artificial Sequence: Synthetic heavy chain variable domain"

SEQ ID NO: 1306 - protein, 120 aa, Artificial Sequence; identical to SEQ ID NO: 1297
  source: /note="Description of Artificial Sequence: Synthetic heavy chain variable domain"

SEQ ID NO: 1307 - protein, 119 aa, Artificial Sequence
  source: /note="Description of Artificial Sequence: Synthetic heavy chain variable domain"
QVQLQQSGPELVKPGASVKISCKASGYAFSSSWMNWVKQRPGQGLEWIGRIYPGDGDTKYNGKFKGKATLTADKSSSTAYMQLSSLTSVDSAVYFCARSTMIATGAMDYWGQGTSVTVS

SEQ ID NO: 1308 - protein, 463 aa, Artificial Sequence
  source: /note="Description of Artificial Sequence: Synthetic heavy chain variable domain"
MEFGLRWIFLVAILKGVQCEVQLLESGGGLVQPGGSLRLSCAASGFTFSSYAMSWVRQAPGKGLEWVSAISGRGGRTYFADSVKGRFTISRDNSKNTLYLQMNSLRAEDTAVYFCAVEGYSGRYGFFDYWGQGTLVTVSSASTKGPSVFPLAPCSRSTSESTAALGCLVKDYFPEPVTVSWNSGALTSGVHTFPAVLQSSSLSSVVTVPSSNFGTQTYTCNVDHKPSNTKVDKTVERKCCVECPPCPAPPVAGPSVFLFPPKPKDTLMISRTPEVTCVVVDVSHEDPEVQFNWYVDGVEVHNAKTKPREEQFNSTFRVVSVLTVVHQDWLNGKEYKCKVSNKGLPAPIEKTISKTKGQPREPQVYTLPPSREEMTKNQVSLTCLVKGFYPSDIAVEWESNGQPENNYKTTPPMLDSDGSFFLYSKLTVDKSRWQQGNVFSCSVMHEALHNHYTQKSLSLSPGK

SEQ ID NO: 1309 - protein, 458 aa, Artificial Sequence
  source: /note="Description of Artificial Sequence: Synthetic heavy chain variable domain"
MEFGLSWVFLVAIIKGVQCQVQLVESGGGLVKPGGSLRLSCAASGFTFSDYYMSWIRQAPGKGLEWVSYISSSGSTIYYADSVKGRFTISRDNAKNSLYLQMNSLRAEDTAVYYCLTGDYWGQGTLVTVSSASTKGPSVFPLAPSSKSTSGGTAALGCLVKDYFPEPVTVSWNSGALTSGVHTFPAVLQSSSLSSVVTVPSSSLGTQTYICNVNHKPSNTKVDKKVEPKSCDKTHTCPPCPAPELLGGPSVFLFPPKPKDTLMISRTPEVTCVVVDVSHEDPEVKFNWYVDGVEVHNAKTKPREEQYNSTYRVVSVLTVLHQDWLNGKEYKCKVSNKALPAPIEKTISKAKGQPREPQVYTLPPSRDELTKNQVSLTCLVKGFYPSDIAVEWESNGQPENNYKTTPPVLDSDGSFFLYSKLTVDKSRWQQGNVFSCSVMHEALHNHYTQKSLSLSPGK

SEQ ID NO: 1310 - protein, 454 aa, Artificial Sequence
  source: /note="Description of Artificial Sequence: Synthetic heavy chain variable domain"
MEFGLSWVFLVAIIKGVQCQVQLVESGGGLVKPGGSLRLSCAASGFTFSDYYMSWIRQAPGKGLEWFSYISSSGSTIYYADSVKGRFTISRDNAKNSLSLQMNSLRAEDTAVYYCLTGDYWGQGTLVTVSSASTKGPSVFPLAPCSRSTSESTAALGCLVKDYFPEPVTVSWNSGALTSGVHTFPAVLQSSSLSSVVTVPSSNFGTQTYTCNVDHKPSNTKVDKTVERKCCVECPPCPAPPVAGPSVFLFPPKPKDTLMISRTPEVTCVVVDVSHEDPEVQFNWYVDGVEVHNAKTKPREEQFNSTFRVVSVLTVVHQDWLNGKEYKCKVSNKGLPAPIEKTISKTKGQPREPQVYTLPPSREEMTKNQVSLTCLVKGFYPSDIAVEWESNGQPENNYKTTPPMLDSDGSFFLYSKLTVDKSRWQQGNVFSCSVMHEALHNHYTQKSLSLSPGK

SEQ ID NO: 1311 - protein, 454 aa, Artificial Sequence
  source: /note="Description of Artificial Sequence: Synthetic heavy chain variable domain"
MEFGLSWVFLLRGCQCQVQLVESGGGVVQPGRSLRLSCAASGFTFSSYGMHWVRQAPGKGLEWVAFIWYDGSNKYYADSVKGRFTISRDNSKNTLYLQMNSLRAEDTAVYYCYRVYFDYWGQGTLVTVSSASTKGPSVFPLAPCSRSTSESTAALGCLVKDYFPEPVTVSWNSGALTSGVHTFPAVLQSSSLSSVVTVPSSSLGTKTYTCNVDHKPSNTKVDKRVESKYGPPCPSCPAPEFLGGPSVFLFPPKPKDTLMISRTPEVTCVVVDVSQEDPEVQFNWYVDGVEVHNAKTKPREEQFNSTYRVVSVLTVLHQDWLNGKEYKCKVSNKGLPSSIEKTISKAKGQPREPQVYTLPPSQEEMTKNQVSLTCLVKGFYPSDIAVEWESNGQPENNYKTTPPVLDSDGSFFLYSRLTVDKSRWQEGNVFSCSVMHEALHNHYTQKSLSLSPGK

SEQ ID NO: 1312 - protein, 458 aa, Artificial Sequence
  source: /note="Description of Artificial Sequence: Synthetic heavy chain variable domain"
MELGLCWIFLVAIIKGVQCQVQLVESGGGLVKPGGSLRLSCAASGFTFSDYYMSWIRQAPGKGLEWISYISGSGSTIYYADSVKGRFTISRDNAKNSLYLQMNSLRAEDTAVYHCARALGGMDVWGQGTTVTVSSASTKGPSVFPLAPCSRSTSESTAALGCLVKDYFPEPVTVSWNSGALTSGVHTFPAVLQSSSLSSVVTVPSSNFGTQTYTCNVDHKPSNTKVDKTVERKCCVECPPCPAPPVAGPSVFLFPPKPKDTLMISRTPEVTCVVVDVSHEDPEVQFNWYVDGVEVHNAKTKPREEQFNSTFRVVSVLTVVHQDWLNGKEYKCKVSNKGLPAPIEKTISKTKGQPREPQVYTLPPSREEMTKNQVSLTCLVKGFYPSDIAVEWESNGQPENNYKTTPPMLDSDGSFFLYSKLTVDKSRWQQGNVFSCSVMHEALHNHYTQKSLSLSPGK

SEQ ID NO: 1313 - protein, 461 aa, Artificial Sequence
  source: /note="Description of Artificial Sequence: Synthetic heavy chain variable domain"
MEWTWSFLFLVAAATGAHSQVQLVQSGAEVKKPGASVKVSCKASGYTFTSYGISWVRQAPGQGLEWMGWISAYNGNTNYAQKLQDRVTMTTDTSTTTAYMELRSLRSDDTAVYYCARRAYGANFFDYWGQGTLVTVSSASTKGPSVFPLAPCSRSTSESTAALGCLVKDYFPEPVTVSWNSGALTSGVHTFPAVLQSSSLSSVVTVPSSNFGTQTYTCNVDHKPSNTKVDKTVERKCCVECPPCPAPPVAGPSVFLFPPKPKDTLMISRTPEVTCVVVDVSHEDPEVQFNWYVDGVEVHNAKTKPREEQFNSTFRVVSVLTVVHQDWLNGKEYKCKVSNKGLPAPIEKTISKTKGQPREPQVYTLPPSREEMTKNQVSLTCLVKGFYPSDIAVEWESNGQPENNYKTTPPMLDSDGSFFLYSKLTVDKSRWQQGNVFSCSVMHEALHNHYTQKSLSLSPGK

SEQ ID NO: 1314 - protein, 454 aa, Artificial Sequence
  source: /note="Description of Artificial Sequence: Synthetic heavy chain variable domain"
MEFGLSWVFLVAIIKGVQCQVQLVESGGGLVKPGGSLRLSCAASGFTFSDYYMSWIRQAPGKGLEWVSYISSSGSTIYYADSVKGRFTISRDNAKNSLYLQMNSLRAEDTAVYYCLTGDYWGQGTLVTVSSASTKGPSVFPLAPCSRSTSESTAALGCLVKDYFPEPVTVSWNSGALTSGVHTFPAVLQSSSLSSVVTVPSSNFGTQTYTCNVDHKPSNTKVDKTVERKCCVECPPCPAPPVAGPSVFLFPPKPKDTLMISRTPEVTCVVVDVSHEDPEVQFNWYVDGVEVHNAKTKPREEQFNSTFRVVSVLTVVHQDWLNGKEYKCKVSNKGLPAPIEKTISKTKGQPREPQVYTLPPSREEMTKNQVSLTCLVKGFYPSDIAVEWESNGQPENNYKTTPPMLDSDGSFFLYSKLTVDKSRWQQGNVFSCSVMHEALHNHYTQKSLSLSPGK

SEQ ID NO: 1315 - protein, 463 aa, Artificial Sequence
  source: /note="Description of Artificial Sequence: Synthetic heavy chain variable domain"
MELGLCWVFLVAILEGVQCEVQLVESGGGLVQPGGSLRLSCAASGFTFSSFSMTWVRQAPGKGLEWVSYISSRSSTISYADSVKGRFTISRDNAKNSLYLQMNSLRDEDTAVYYCARDPLLAGATFFDYWGQGTLVTVSSASTKGPSVFPLAPCSRSTSESTAALGCLVKDYFPEPVTVSWNSGALTSGVHTFPAVLQSSSLSSVVTVPSSNFGTQTYTCNVDHKPSNTKVDKTVERKCCVECPPCPAPPVAGPSVFLFPPKPKDTLMISRTPEVTCVVVDVSHEDPEVQFNWYVDGVEVHNAKTKPREEQFNSTFRVVSVLTVVHQDWLNGKEYKCKVSNKGLPAPIEKTISKTKGQPREPQVYTLPPSREEMTKNQVSLTCLVKGFYPSDIAVEWESNGQPENNYKTTPPMLDSDGSFFLYSKLTVDKSRWQQGNVFSCSVMHEALHNHYTQKSLSLSPGK

SEQ ID NO: 1316 - protein, 458 aa, Artificial Sequence
  source: /note="Description of Artificial Sequence: Synthetic heavy chain variable domain"
MEFGLSWVFLVAIIKGVQCQVQLVESGGGLVKPGGSLRLSCAASGFTFSDYYMSWIRQAPGKGLEWVSYISSSGSTIYYADSVKGRFTISRDNAKNSLYLQMNSLRAEDTAVYYCARRIGGMDVWGQGTTVTVSSASTKGPSVFPLAPCSRSTSESTAALGCLVKDYFPEPVTVSWNSGALTSGVHTFPAVLQSSSLSSVVTVPSSNFGTQTYTCNVDHKPSNTKVDKTVERKCCVECPPCPAPPVAGPSVFLFPPKPKDTLMISRTPEVTCVVVDVSHEDPEVQFNWYVDGVEVHNAKTKPREEQFNSTFRVVSVLTVVHQDWLNGKEYKCKVSNKGLPAPIEKTISKTKGQPREPQVYTLPPSREEMTKNQVSLTCLVKGFYPSDIAVEWESNGQPENNYKTTPPMLDSDGSFFLYSKLTVDKSRWQQGNVFSCSVMHEALHNHYTQKSLSLSPGK

SEQ ID NO: 1317 - protein, 455 aa, Artificial Sequence
  source: /note="Description of Artificial Sequence: Synthetic heavy chain variable domain"
MEFGLSWVFLVAIIKGVQCQVQLVESGGGLVKPGGSLRLSCAASGFTFSDYYMSWIRQAPGKGLEWVSYISSSGSTIYYADSVKGRFTISRDNAKNSLYLQMNSLRAEDTAVYYCLTGDYWGQGTLVTVSSASTKGPSVFPLAPCSRSTSESTAALGCLVKDYFPEPVTVSWNSGALTSGVHTFPAVLQSSSLSSVVTVPSSSLGTKTYTCNVDHKPSNTKVDKRVESKYGPPCPSCPAPEFLGGPSVFLFPPKPKDTLMISRTPEVTCVVVDVSQEDPEVQFNWYVDGVEVHNAKTKPREEQFNSTYRVVSVLTVLHQDWLNGKEYKCKVSNKGLPSSIEKTISKAKGQPREPQVYTLPPSQEEMTKNQVSLTCLVKGFYPSDIAVEWESNGQPENNYKTTPPVLDSDGSFFLYSRLTVDKSRWQEGNVFSCSVMHEALHNHYTQKSLSLSPGK

SEQ ID NO: 1318 - protein, 459 aa, Artificial Sequence
  source: /note="Description of Artificial Sequence: Synthetic heavy chain variable domain"
MEFGLSWVFLVAIIKGVQCQVQLVESGGGLVKPGGSLRLSCAASGFTFSDYYMSWIRQAPGKGLEWVSYISSSGSTIYYADSVKGRFTISRDNAKNSLYLQMNSLRAEDTAVYYCARRIGGMDVWGQGTTVTVSSASTKGPSVFPLAPCSRSTSESTAALGCLVKDYFPEPVTVSWNSGALTSGVHTFPAVLQSSSLSSVVTVPSSSLGTKTYTCNVDHKPSNTKVDKRVESKYGPPCPSCPAPEFLGGPSVFLFPPKPKDTLMISRTPEVTCVVVDVSQEDPEVQFNWYVDGVEVHNAKTKPREEQFNSTYRVVSVLTVLHQDWLNGKEYKCKVSNKGLPSSIEKTISKAKGQPREPQVYTLPPSQEEMTKNQVSLTCLVKGFYPSDIAVEWESNGQPENNYKTTPPVLDSDGSFFLYSRLTVDKSRWQEGNVFSCSVMHEALHNHYTQKSLSLSPGK

SEQ ID NO: 1319 - protein, 459 aa, Artificial Sequence
  source: /note="Description of Artificial Sequence: Synthetic heavy chain variable domain"
MEFGLSWVFLVAIIKGVQCQVQLVESGGGLVKPGGSLRLSCAASGFTFSDYYMSWIRQAPGKGLEWVSYISSSGSTIYYADSVKGRFTISRDNAKNSLYLQMNSLRAEDTAVYYCAIRIGGMDVWGQGTTVTVSSASTKGPSVFPLAPCSRSTSESTAALGCLVKDYFPEPVTVSWNSGALTSGVHTFPAVLQSSSLSSVVTVPSSSLGTKTYTCNVDHKPSNTKVDKRVESKYGPPCPPCPAPEFLGGPSVFLFPPKPKDTLMISRTPEVTCVVVDVSQEDPEVQFNWYVDGVEVHNAKTKPREEQFNSTYRVVSVLTVLHQDWLNGKEYKCKVSNKGLPSSIEKTISKAKGQPREPQVYTLPPSQEEMTKNQVSLTCLVKGFYPSDIAVEWESNGQPENNYKTTPPVLDSDGSFFLYSRLTVDKSRWQEGNVFSCSVMHEALHNHYTQKSLSLSPGK

SEQ ID NO: 1320 - protein, 455 aa, Artificial Sequence
  source: /note="Description of Artificial Sequence: Synthetic heavy chain variable domain"
MEFGLSWVFLVAIIKGVQCQVQLVESGGGLVKPGGSLRLSCAASGFTFSDYYMSWIRQAPGKGLEWVSYISSSGSTIYYADSVKGRFTISRDNAKNSLYLQMNSLRAEDTAVYYCLTGDYWGQGTLVTVSSASTKGPSVFPLAPCSRSTSESTAALGCLVKDYFPEPVTVSWNSGALTSGVHTFPAVLQSSSLSSVVTVPSSSLGTKTYTCNVDHKPSNTKVDKRVESKYGPPCPPCPAPEFLGGPSVFLFPPKPKDTLMISRTPEVTCVVVDVSQEDPEVQFNWYVDGVEVHNAKTKPREEQFNSTYRVVSVLTVLHQDWLNGKEYKCKVSNKGLPSSIEKTISKAKGQPREPQVYTLPPSQEEMTKNQVSLTCLVKGFYPSDIAVEWESNGQPENNYKTTPPVLDSDGSFFLYSRLTVDKSRWQEGNVFSCSVMHEALHNHYTQKSLSLSPGK

SEQ ID NO: 1321 - protein, 464 aa, Artificial Sequence
  source: /note="Description of Artificial Sequence: Synthetic heavy chain variable domain"
MELGLCWVFLVAILEGVQCEVQLVESGGGLVQPGGSLRLSCAASGFTFSSFSMTWVRQAPGKGLEWVSYISSRSSTISYADSVKGRFTISRDNAKNSLYLQMNSLRDEDTAVYYCARDPLLAGATFFDYWGQGTLVTVSSASTKGPSVFPLAPCSRSTSESTAALGCLVKDYFPEPVTVSWNSGALTSGVHTFPAVLQSSSLSSVVTVPSSSLGTKTYTCNVDHKPSNTKVDKRVESKYGPPCPPCPAPEFLGGPSVFLFPPKPKDTLMISRTPEVTCVVVDVSQEDPEVQFNWYVDGVEVHNAKTKPREEQFNSTYRVVSVLTVLHQDWLNGKEYKCKVSNKGLPSSIEKTISKAKGQPREPQVYTLPPSQEEMTKNQVSLTCLVKGFYPSDIAVEWESNGQPENNYKTTPPVLDSDGSFFLYSRLTVDKSRWQEGNVFSCSVMHEALHNHYTQKSLSLSPGK

SEQ ID NO: 1322 - protein, 460 aa, Artificial Sequence
  source: /note="Description of Artificial Sequence: Synthetic heavy chain variable domain"
MEFGLCWVFLVAILEGVQCEVQLVESGGGLVQPGGSLRLSCAASGFTFSSYWMSWVRQAPGKGLEWVANIKQDGSEKYYVDSVKGRFTISRDNAKNSLYLQMNSLRAEDTAVYYCAPGIAAAGRAYWGQGTLVTVSSASTKGPSVFPLAPCSRSTSESTAALGCLVKDYFPEPVTVSWNSGALTSGVHTFPAVLQSSSLSSVVTVPSSNFGTQTYTCNVDHKPSNTKVDKTVERKCCVECPPCPAPPVAGPSVFLFPPKPKDTLMISRTPEVTCVVVDVSHEDPEVQFNWYVDGVEVHNAKTKPREEQFNSTFRVVSVLTVVHQDWLNGKEYKCKVSNKGLPAPIEKTISKTKGQPREPQVYTLPPSREEMTKNQVSLTCLVKGFYPSDIAVEWESNGQPENNYKTTPPMLDSDGSFFLYSKLTVDKSRWQQGNVFSCSVMHEALHNHYTQKSLSLSPGK

SEQ ID NO: 1323 - protein, 463 aa, Artificial Sequence; identical to SEQ ID NO: 1315
  source: /note="Description of Artificial Sequence: Synthetic heavy chain variable domain"

SEQ ID NO: 1324 - protein, 458 aa, Artificial Sequence
  source: /note="Description of Artificial Sequence: Synthetic heavy chain variable domain"
MEFGLSWVFLVAIIKGVQCQVQLVESGGGLVKPGGSLRLSCAASGFTFSDYYMSWIRQAPGKGLEWVSYISSSGSTIYYADSVKGRFTISRDNAKNSLYLQMNSLRAEDTAVYYCAIRIGGMDVWGQGTTVTVSSASTKGPSVFPLAPCSRSTSESTAALGCLVKDYFPEPVTVSWNSGALTSGVHTFPAVLQSSSLSSVVTVPSSNFGTQTYTCNVDHKPSNTKVDKTVERKCCVECPPCPAPPVAGPSVFLFPPKPKDTLMISRTPEVTCVVVDVSHEDPEVQFNWYVDGVEVHNAKTKPREEQFNSTFRVVSVLTVVHQDWLNGKEYKCKVSNKGLPAPIEKTISKTKGQPREPQVYTLPPSREEMTKNQVSLTCLVKGFYPSDIAVEWESNGQPENNYKTTPPMLDSDGSFFLYSKLTVDKSRWQQGNVFSCSVMHEALHNHYTQKSLSLSPGK

SEQ ID NO: 1325 - protein, 458 aa, Artificial Sequence
  source: /note="Description of Artificial Sequence: Synthetic heavy chain variable domain"
MEFGLSWVFLVAIIKGVQCQVQLVESGGGLVKPGGSLRLSCAASGFTFSDYYMSWIRQAPGKGLEWVSYISSSGSTIYYADSVKGRFTISRDNAKNSLYLQMNSLRAEDTAVYYCARIGGMDVWGQGTTVTVSSASTKGPSVFPLAPCSRSTSESTAALGCLVKDYFPEPVTVSWNSGALTSGVHTFPAVLQSSSLSSVVTVPSSSLGTKTYTCNVDHKPSNTKVDKRVESKYGPPCPSCPAPEFLGGPSVFLFPPKPKDTLMISRTPEVTCVVVDVSQEDPEVQFNWYVDGVEVHNAKTKPREEQFNSTYRVVSVLTVLHQDWLNGKEYKCKVSNKGLPSSIEKTISKAKGQPREPQVYTLPPSQEEMTKNQVSLTCLVKGFYPSDIAVEWESNGQPENNYKTTPPVLDSDGSFFLYSRLTVDKSRWQEGNVFSCSVMHEALHNHYTQKSLSLSPGK

SEQ ID NO: 1326 - protein, 454 aa, Artificial Sequence; identical to SEQ ID NO: 1314
  source: /note="Description of Artificial Sequence: Synthetic heavy chain variable domain"

SEQ ID NO: 1327 - protein, 455 aa, Artificial Sequence; identical to SEQ ID NO: 1317
  source: /note="Description of Artificial Sequence: Synthetic heavy chain variable domain"

SEQ ID NO: 1328 - protein, 455 aa, Artificial Sequence; identical to SEQ ID NO: 1320
  source: /note="Description of Artificial Sequence: Synthetic heavy chain variable domain"

SEQ ID NO: 1329 - protein, 459 aa, Artificial Sequence
  source: /note="Description of Artificial Sequence: Synthetic heavy chain variable domain"
MEFGLSWVFLVAIIKGVQCQVQLVESGGGLVKPGGSLRLSCAASGFTFSDYYMSWIRQAPGKGLEWVSYISSSGSTIYYADSVKGRFTISRDNAKNSLYLQMNSLRAEDTAVYYCARRIGGMDVWGQGTTVTVSSASTKGPSVFPLAPCSRSTSESTAALGCLVKDYFPEPVTVSWNSGALTSGVHTFPAVLQSSSLSSVVTVPSSSLGTKTYTCNVDHKPSNTKVDKRVESKYGPPCPPCPAPEFLGGPSVFLFPPKPKDTLMISRTPEVTCVVVDVSQEDPEVQFNWYVDGVEVHNAKTKPREEQFNSTYRVVSVLTVLHQDWLNGKEYKCKVSNKGLPSSIEKTISKAKGQPREPQVYTLPPSQEEMTKNQVSLTCLVKGFYPSDIAVEWESNGQPENNYKTTPPVLDSDGSFFLYSRLTVDKSRWQEGNVFSCSVMHEALHNHYTQKSLSLSPGK

SEQ ID NO: 1330 - protein, 464 aa, Artificial Sequence; identical to SEQ ID NO: 1321
  source: /note="Description of Artificial Sequence: Synthetic heavy chain variable domain"

SEQ ID NO: 1331 - protein, 464 aa, Artificial Sequence
  source: /note="Description of Artificial Sequence: Synthetic heavy chain variable domain"
MELGLCWVFLVAILEGVQCEVQLVESGGGLVQPGGSLRLSCAASGFTFSSFSMTWVRQAPGKGLEWVSYISSRSSTISYADSVKGRFTISRDNAKNSLYLQMNSLRDEDTAVYYCARDPLLAGATFFDYWGQGTLVTVSSASTKGPSVFPLAPCSRSTSESTAALGCLVKDYFPEPVTVSWNSGALTSGVHTFPAVLQSSSLSSVVTVPSSSLGTKTYTCNVDHKPSNTKVDKRVESKYGPPCPSCPAPEFLGGPSVFLFPPKPKDTLMISRTPEVTCVVVDVSQEDPEVQFNWYVDGVEVHNAKTKPREEQFNSTYRVVSVLTVLHQDWLNGKEYKCKVSNKGLPSSIEKTISKAKGQPREPQVYTLPPSQEEMTKNQVSLTCLVKGFYPSDIAVEWESNGQPENNYKTTPPVLDSDGSFFLYSRLTVDKSRWQEGNVFSCSVMHEALHNHYTQKSLSLSPGK

SEQ ID NO: 1332 - protein, 467 aa, Artificial Sequence
  source: /note="Description of Artificial Sequence: Synthetic heavy chain variable domain"
MELGLCWVFLVAILEGVQCEVQLVESGGGLVQPGGSLRLSCAASGFTFSSFSMTWVRQAPGKGLEWVSYISSRSSTISYADSVKGRFTISRDNAKNSLYLQMNSLRDEDTAVYYCARDPLLAGATFFDYWGQGTLVTVSSASTKGPSVFPLAPSSKSTSGGTAALGCLVKDYFPEPVTVSWNSGALTSGVHTFPAVLQSSSLSSVVTVPSSSLGTQTYICNVNHKPSNTKVDKKVEPKSCDKTHTCPPCPAPELLGGPSVFLFPPKPKDTLMISRTPEVTCVVVDVSHEDPEVKFNWYVDGVEVHNAKTKPREEQYNSTYRVVSVLTVLHQDWLNGKEYKCKVSNKALPAPIEKTISKAKGQPREPQVYTLPPSRDELTKNQVSLTCLVKGFYPSDIAVEWESNGQPENNYKTTPPVLDSDGSFFLYSKLTVDKSRWQQGNVFSCSVMHEALHNHYTQKSLSLSPGK

SEQ ID NO: 1333 - protein, 119 aa, Artificial Sequence
  source: /note="Description of Artificial Sequence: Synthetic heavy chain variable domain"
AEVQLVESGGGVVRPGGSLRLSCAASGFTFDDYGMSWVRQAPGKGLEWVSGINWNGGSTGYADSVKGRFTISRDNAKNSLYLQMNSLRAEDTAVYYCARGVLSRYFDYWGQGTLVTVSS

SEQ ID NO: 1334 - protein, 120 aa, Artificial Sequence
  source: /note="Description of Artificial Sequence: Synthetic heavy chain variable domain"
EVQLQQFGAELVKPGASVKMSCKASGYTFTDYNMDWVRQSHGKSLEWIGNINPNSESTSYNQKFKGKATLTVDKSSSTAYMELRSLTSDDTAVYYCTRDGNRYDAWFAYWGQGTLVTVSS

SEQ ID NO: 1335 - protein, 120 aa, Artificial Sequence
  source: /note="Description of Artificial Sequence: Synthetic heavy chain variable domain"
EVQLVQSGAELKKPGASVKMSCKASGYTFTDYNMDWVRQAHGKGLEWIGNINPNSESTSYNQKFKGRATLTVDKSSSTAYMELRSLRSDDTAVYYCTRDGNRYDAWFAYWGQGTLVTVSS

SEQ ID NO: 1336 - protein, 120 aa, Artificial Sequence
  source: /note="Description of Artificial Sequence: Synthetic heavy chain variable domain"
QVQLVQSGAELKKPGASVKMSCKASGYTFTDYNMDWVRQAPGKGLEWIGNINPNSESTSYNQKFKGRATLTVDKSSSTAYMELRSLRSDDTAVYYCTRDGNRYDAWFAYWGQGTLVTVSS

SEQ ID NO: 1337 - protein, 120 aa, Artificial Sequence
  source: /note="Description of Artificial Sequence: Synthetic heavy chain variable domain"
QVQLVQSGAELKKPGASVKVSCKASGYTFTDYNMDWVRQAPGKGLEWIGNINPNSESTSYNQKFKGRATITVDKSTSTAYMELRSLRSDDTAVYYCTRDGNRYDAWFAYWGQGTLVTVSS

SEQ ID NO: 1338 - protein, 120 aa, Artificial Sequence
  source: /note="Description of Artificial Sequence: Synthetic heavy chain variable domain"
QVQLVQSGAELKKPGASVKVSCKASGYTFTDYNMDWVRQAPGKGLEWIGNINPNSESTSYNQKFKGRVTITVDKSTSTAYMELRSLRSDDTAVYYCTRDGNRYDAWFAYWGQGTLVTVSS

SEQ ID NO: 1339 - protein, 120 aa, Artificial Sequence
  source: /note="Description of Artificial Sequence: Synthetic heavy chain variable domain"
QVQLVQSGAELKKPGASVKVSCKASGYTFTDYNMDWVRQAPGQGLEWIGNINPNSESTSYNQKFKGRVTITVDKSTSTAYMELRSLRSDDTAVYYCTRDGNRYDAWFAYWGQGTLVTVSS

SEQ ID NO: 1340 - protein, 123 aa, Artificial Sequence
  source: /note="Description of Artificial Sequence: Synthetic heavy chain variable domain"
EVKLVNSGGGLVQPGNSLRLSCATSGFTFTDFYMSWVRQPPGKALEWLGFVRNRANGYTTEYSVSVKGRFIISRDNFQSTLFLQMNTLRAEDSGTYYCVRGPGDTADYTMDYWGQGTSVTVSS

SEQ ID NO: 1341 - protein, 115 aa, Artificial Sequence
  source: /note="Description of Artificial Sequence: Synthetic heavy chain variable domain"
QVQLVQSGDELKKPGASVKLSCKASGYTFTSYWINWIKQAPGQGLEWIGRIAPGSGTTYYNEVFKGRATLTVDKSSSTAYIELSSLRSEDSAVYFCARGDYGSYWGQGTLVTVSS

SEQ ID NO: 1342 - protein, 115 aa, Artificial Sequence
  source: /note="Description of Artificial Sequence: Synthetic heavy chain variable domain"
QVQLVQSGDELKKPGASVKLSCKASGYTFTSYWINWIRQAPGQGLEWIGRIAPGSGTTYYNEVFKGRATLTVDKSSSTAYIELSSLRSEDTAVYFCARGDYGSYWGQGTLVTVSS

SEQ ID NO: 1343 - protein, 115 aa, Artificial Sequence
  source: /note="Description of Artificial Sequence: Synthetic heavy chain variable domain"
QVQLVQSGAELKKPGASVKLSCKASGYTFTSYWINWIRQAPGQGLEWIGRIAPGSGTTYYNEVFKGRATLTVDKSTSTAYIELSSLRSEDTAVYFCARGDYGSYWGQGTLVTVSS

SEQ ID NO: 1344 - protein, 115 aa, Artificial Sequence
  source: /note="Description of Artificial Sequence: Synthetic heavy chain variable domain"
QVQLVQSGAELKKPGASVKVSCKASGYTFTSYWINWIRQAPGQGLEWIGRIAPGSGTTYYNEVFKGRATITVDKSTSTAYMELSSLRSEDTAVYFCARGDYGSYWGQGTLVTVSS

SEQ ID NO: 1345 - protein, 115 aa, Artificial Sequence
  source: /note="Description of Artificial Sequence: Synthetic heavy chain variable domain"
QVQLVQSGAELKKPGASVKVSCKASGYTFTSYWINWIRQAPGQGLEWIGRIAPGSGTTYYNEVFKGRVTITVDKSTSTAYMELSSLRSEDTAVYFCARGDYGSYWGQGTLVTVSS

SEQ ID NO: 1346 - protein, 115 aa, Artificial Sequence
  source: /note="Description of Artificial Sequence: Synthetic heavy chain variable domain"
QVQLQQSGDDLVKPGASVKLSCKASGYTFTSYWINWIKQRPGQGLEWIGRIAPGSGTTYYNEVFKGKATLTVDKYSSTAYIQLSSLSSEDSAVYFCARGDYGSYWGQGTLVTVSS

SEQ ID NO: 1347 - protein, 118 aa, Artificial Sequence
  source: /note="Description of Artificial Sequence: Synthetic heavy chain variable domain"
QVQLVESGGGVVQPGRSLRLSCAASGFTFSSYTMHWVRQAPGKGLEWVTFISYDGNNKYYADSVKGRFTISRDNSKNTLYLQMNSLRAEDTAIYYCARTGWLGPFDYWGQGTLVTVSS

SEQ ID NO: 1348 - protein, 448 aa, Artificial Sequence
  source: /note="Description of Artificial Sequence: Synthetic heavy chain variable domain"
QVQLVESGGGVVQPGRSLRLSCAASGFTFSSYTMHWVRQAPGKGLEWVTFISYDGNNKYYADSVKGRFTISRDNSKNTLYLQMNSLRAEDTAIYYCARTGWLGPFDYWGQGTLVTVSSASTKGPSVFPLAPSSKSTSGGTAALGCLVKDYFPEPVTVSWNSGALTSGVHTFPAVLQSSGLYSLSSVVTVPSSSLGTQTYICNVNHKPSNTKVDKRVEPKSCDKTHTCPPCPAPELLGGPSVFLFPPKPKDTLMISRTPEVTCVVVDVSHEDPEVKFNWYVDGVEVHNAKTKPREEQYNSTYRVVSVLTVLHQDWLNGKEYKCKVSNKALPAPIEKTISKAKGQPREPQVYTLPPSRDELTKNQVSLTCLVKGFYPSDIAVEWESNGQPENNYKTTPPVLDSDGSFFLYSKLTVDKSRWQQGNVFSCSVMHEALHNHYTQKSLSLSPGK

SEQ ID NO: 1349 - protein, 120 aa, Artificial Sequence
  source: /note="Description of Artificial Sequence: Synthetic heavy chain variable domain"
EVQLVESGGGLVQPGRSLRLSCTASGFTFTDNYMSWVRQAPGKGLEWVGFIRNKANGYTTEYAASVKGRFTISRDDSKSIAYLQMNSLKTEDTAVYYCARDVGSNYFDYWGQGTLVTVSS

SEQ ID NO: 1350 - protein, 120 aa, Artificial Sequence
  source: /note="Description of Artificial Sequence: Synthetic heavy chain variable domain"
EVQLVESGGGLVQPGRSLRLSCTASGFTFTDNYMSWVRQAPGKGLEWVGFIRNKANGYTTEYAASVKGRFTISRDNSKSIAYLQMNSLKTEDTAVYYCARDVGSNYFDYWGQGTLVTVSS

SEQ ID NO: 1351 - protein, 120 aa, Artificial Sequence
  source: /note="Description of Artificial Sequence: Synthetic heavy chain variable domain"
EVQLVESGGGLVQPGRSLRLSCTASGFTFTDNYMSWVRQAPGKGLEWLGFIRNKANGYTTEYAASVKGRFTISRDNSKSIAYLQMNSLKTEDTAVYYCARDVGSNYFDYWGQGTLVTVSS

SEQ ID NO: 1352 - protein, 120 aa, Artificial Sequence
  source: /note="Description of Artificial Sequence: Synthetic heavy chain variable domain"
EVNLVESGGGLVQPGRSLRLSCTASGFTFTDNYMSWVRQAPGKGLEWLGFIRNKANGYTTDYAASVRGRFTISRDNSKSILYLQMNALRTEDTAVYYCARDVGSNYFDYWGQGTLVTVSS

SEQ ID NO: 1353 - protein, 450 aa, Artificial Sequence
  source: /note="Description of Artificial Sequence: Synthetic heavy chain variable domain"
EVQLVESGGGLVQPGRSLRLSCTASGFTFTDNYMSWVRQAPGKGLEWVGFIRNKANGYTTEYAASVKGRFTISRDNSKSIAYLQMNSLKTEDTAVYYCARDVGSNYFDYWGQGTLVTVSSASTKGPSVFPLAPSSKSTSGGTAALGCLVKDYFPEPVTVSWNSGALTSGVHTFPAVLQSSGLYSLSSVVTVPSSSLGTQTYICNVNHKPSNTKVDKRVEPKSCDKTHTCPPCPAPELLGGPSVFLFPPKPKDTLMISRTPEVTCVVVDVSHEDPEVKFNWYVDGVEVHNAKTKPREEQYNSTYRVVSVLTVLHQDWLNGKEYKCKVSNKALPAPIEKTISKAKGQPREPQVYTLPPSREEMTKNQVSLTCLVKGFYPSDIAVEWESNGQPENNYKTTPPVLDSDGSFFLYSKLTVDKSRWQQGNVFSCSVMHEALHNHYTQKSLSLSPGK

SEQ ID NO: 1354 - protein, 216 aa, Artificial Sequence
  source: /note="Description of Artificial Sequence: Synthetic heavy chain variable domain"
QVQLVQSGGEVKKPGSSVKVSCKASGYTFTSYRMHWVRQSPGQGLEWIGYINPSTGYTEYNQKFKDKATITADESTNTAYMELSSLRSEDTAIYYCARGGGVFDYWGQGTLVTVSSASTKGPSVFPLAPSSKSTSGGTAALGCLVKDYFPEPVTVSWNSGALTSGVHTFPAVLQSSGLYSLSSVVTVPSSSLGTQTYICNVNHKPSNTKVDKKVEP

SEQ ID NO: 1355 - protein, 216 aa, Artificial Sequence
  source: /note="Description of Artificial Sequence: Synthetic heavy chain variable domain"
QVQLVQSGGEVKKPGSSVKVSCKASGYTFTSYRMEIWVRQSPGQGLEWIGYINPSTGYTEYNQKFKDKATITADESTNTAYMELSSLRSEDTAIYYCARGGGVFDYWGQGTLVTVSSASTKGPSVFPLAPSSKSTSGGTAALGCLVKDYFPEPVTVSWNSGALTSGVHTFPAVLQSGLYSLSSVVTVPSSSLGTQTYICNVNHKPSNTKVDKKVEP

SEQ ID NO: 1356 - protein, 119 aa, Artificial Sequence
  source: /note="Description of Artificial Sequence: Synthetic heavy chain variable domain"
KVQLQQSGAELVKPGASVKLSCKASGYTFTEYILHWVKQKSGQGLEWIGWFYPGNNNIKYNEKFKDKATLTADKSSSTVYMELSRLTSEDSAVYFCARHEQGPGYFDYWGQGTTLTVSS

SEQ ID NO: 1357 - protein, 118 aa, Artificial Sequence
  source: /note="Description of Artificial Sequence: Synthetic heavy chain variable domain"
KVQLQQSGAELVKPGASVKLSCKASGYTFTDYTIHWVKQRSGQGLEWIGWFYPGGGYIKYNEKFKDRATLTADKSSNTVYMELSRLTSEGSAVYFCARHEEGIYFDYWGQGTTLTVSS

SEQ ID NO: 1358 - protein, 118 aa, Artificial Sequence
  source: /note="Description of Artificial Sequence: Synthetic heavy chain variable domain"
KVQLQQSGAELVKPGASVKLSCKASGYTFTDYTIHWVKQRSGQGLEWIGWFYPGGGYIKYNEKFKDRATLTADKSSNTVYMELSRLTSEDSAVYFCARHEEGIYFDYWGQGTTLTVSS

SEQ ID NO: 1359 - protein, 126 aa, Artificial Sequence
  source: /note="Description of Artificial Sequence: Synthetic heavy chain variable domain"
QVQLVQSGAEMKKPGASVKVSCKTSGYTFTNYKINWVRQAPGQGLEWMGWMNPDTDSTGYPQKFQGRVTMTRNTSISTAYMELSSLRSEDTAVYYCARSYGSGSYYRDYYYGMDVWGQGTTVTVSS

SEQ ID NO: 1360 - protein, 120 aa, Artificial Sequence
  source: /note="Description of Artificial Sequence: Synthetic heavy chain variable domain"
EVKFLESGGGLVQPGGSLKLSCVASGFDFSRYWMSWVRQAPGKGLEWIGEINPDSNTINYTPSLKDKFIISRDNAKNTLYLQMTKVRSEDTALYYCTRRAYYGNPAWFAYWGQGTLVTVS

SEQ ID NO: 1361 - protein, 120 aa, Artificial Sequence
  source: /note="Description of Artificial Sequence: Synthetic heavy chain variable domain"
QVQLQESGPGLVKPSQTLSLTCTVSGGSISSGDYFWSWIRQLPGKGLEWIGHIHNSGTTYYNPSLKSRVTISVDTSKKQFSLRLSSVTAADTAVYYCARDRGGDYYYGMDVWGQGTTVTV

SEQ ID NO: 1362 - protein, 120 aa, Artificial Sequence
  source: /note="Description of Artificial Sequence: Synthetic heavy chain variable domain"
EVQLVQSGGGVERPGGSLRLSCAASGFTFDDYAMSWVRQAPGKGLEWVSGINWQGGSTGYADSVKGRVTISRDNAKNSLYLQMNSLRAEDTAVYYCAKILGAGRGWYFDYWGKGTTVTVS

SEQ ID NO: 1363 - protein, 119 aa, Artificial Sequence [sequence omitted]

SEQ ID NO: 1364 - protein, 119 aa, Artificial Sequence
  source: /note="Description of Artificial Sequence: Synthetic heavy chain variable domain"
QVQLVQSGAEVKKPGASVKVSCKASGYTFIDYYIHWVRQAPGQGLEWMGWINPKSGGTKYAQKFQGRVTMTRDTSITTAYMELSSLTSDDTAVYYCARSYYYGGVKDYWGQGTLVTVSS

SEQ ID NO: 1365 - protein, 122 aa, Artificial Sequence
  source: /note="Description of Artificial Sequence: Synthetic heavy chain variable domain"
QVQLVQSGAEVKKPGSSVKVSCKASGGTFSSYAISWVRQAPGQGLEWMGGIIPIFGTANYAQKFQGRVTITADESTSTAYMELSSLRSEDTAVYYCARGVYGYSGSAPYDEWGQGTLVTVSS

SEQ ID NO: 1366 - protein, 119 aa, Artificial Sequence
  source: /note="Description of Artificial Sequence: Synthetic heavy chain variable domain"
EVQLVQSGAEVKKPGSSVKVSCKASGGTFSMAAISWVRQAPGQGLEWMGRIIPMIGIPDYAQEFQGRVTFTADRSTSTAYMELSSLRSDDTAVYYCARGPLYWWHSDSWGQGTLVTVSS

SEQ ID NO: 1367 - protein, 120 aa, Artificial Sequence
  source: /note="Description of Artificial Sequence: Synthetic heavy chain variable domain"
QVQLVQSGGGVVQPGRSLRLSCAASGFTFSSYAIHWVRQAPGKGLEWVAVISYDGTNKYYADSVKGRFTISRDNSKNTLYLQMNSLRAEDTAVYYCARMHGSYGSYFDKWGQGTLVTVSS

SEQ ID NO: 1368 - protein, 119 aa, Artificial Sequence
  source: /note="Description of Artificial Sequence: Synthetic heavy chain variable domain"
QVQLVQSGAEVKKPGSSVKVSCKASGGTFRSYAVSWVRQAPGQGLEWMGRIIPIFGTPDYAQKFQGRVTITADASTSTAHMELSGLRSEDTAVYYCARSSMYQYSHDDWGQGTLVTVSS

SEQ ID NO: 1369 - protein, 121 aa, Artificial Sequence
  source: /note="Description of Artificial Sequence: Synthetic heavy chain variable domain"
EVQLVQSGAEVKKPGASVKVSCKASGYTFANYGINWVRQAPGQGLEWMGWISASNGNTNYAQKLQGRVTMTTDTSTSTAYMELRSLRSDDTAVYYCARSYYAGYYMFMDFWGQGTLVTVSS

SEQ ID NO: 1370 - protein, 118 aa, Artificial Sequence
  source: /note="Description of Artificial Sequence: Synthetic heavy chain variable domain"
EVQLVESGGGLVQPGGSLRLSCAASGFTFSSYWMSWVRQAPGKGLEWVANINQDGSEKYYVDSVKGRFTISRDNAKNSLYLQMNSLRAEDTAVYYCARYSVWGMMDEWGQGTLVTVSS

SEQ ID NO: 1371 - protein, 118 aa, Artificial Sequence
  source: /note="Description of Artificial Sequence: Synthetic heavy chain variable domain"
QVQLVQSGGGVVQPGRSQRLSCAASGFPFSSYSMNWVRRAPGKGLEWVSYISSSSSTIYYADSVKGRFTISRDNAKNSLYLQMNSLRAEDTAVYYCARQNYYADYDYWGQGTLVTVSS

SEQ ID NO: 1372 - protein, 121 aa, Artificial Sequence
  source: /note="Description of Artificial Sequence: Synthetic heavy chain variable domain"
QVQLVQSGAEVKKPGASVKVSCKTSGYTFSDYGISWVRQAPGQGLEWLGWISTYNGNTDLAQKVRGRVTLTTDTSTSTAYMELRSLRSEDTAVYYCARGYTGSYYATGDEWGQGTLVTVSS

SEQ ID NO: 1373 - protein, 118 aa, Artificial Sequence
  source: /note="Description of Artificial Sequence: Synthetic heavy chain variable domain"
QVQLQQWGAGLLKPSETLSLTCAVYGGSFSGYYWSWIRQPPGKGLEWIGEINHSGSTNYNPSLKSRVTISVDTSKNQFSLKLSSVTAADTAVYYCARAPQSWYRGDVWGQGTLVTVSS

SEQ ID NO: 1374 - protein, 118 aa, Artificial Sequence
  source: /note="Description of Artificial Sequence: Synthetic heavy chain variable domain"
QVQLQQWGAGLLKPSETLSLTCAVYGGSFSGYYWSWIRQPPGKGLEWIGEINHSGSTNYNPSLKSRVTISVDTSKNQFSLKLSSVTAADTAVYYCLRAPQSWYVGDVWGQGTLVTVSS

SEQ ID NO: 1375 - protein, 118 aa, Artificial Sequence
  source: /note="Description of Artificial Sequence: Synthetic heavy chain variable domain"
QVQLQQWGAGLLKPSETMSLTCAVYGGSFSGYYWSWIRQPPGKGLEWIGEINHSGSTNYNPSLKSRVTISVDTSKNQFSLKLSSVTAADTAVYYCARAPQSWYRGDVWGQGTLVTVSS

SEQ ID NO: 1376 - protein, 118 aa, Artificial Sequence
  source: /note="Description of Artificial Sequence: Synthetic heavy chain variable domain"
QVQLQQWGAGLLKPSETLSLTCAVYGGSFSGYYWSWIRQPPGKGLEWIGEINHSGSTNYNPSLKSRVTMSVDTSKRQFSLKLSSVTAADTAVYYCARAPQSWYVGDVWGQGTLVTVSS

SEQ ID NO: 1377 - protein, 118 aa, Artificial Sequence
  source: /note="Description of Artificial Sequence: Synthetic heavy chain variable domain"
QVQLQQWGAGLLKPSETLSLTCAVYGGSFSGYYWSWIRQLPGKGLEWIGEINHSGSTNYNPYLKSRVTISVDTSKRQFSLKLSSVTAADTAVYYCARAPQSWYVGDVWGQGTLVTVSS

SEQ ID NO: 1378 - protein, 114 aa, Artificial Sequence
  source: /note="Description of Artificial Sequence: Synthetic heavy chain variable domain"
QVQLVQSGAEVKKPGASVKVSCKASGYTFTSYGISWVRQAPGQGLEWMGWISPYNGNTNYAQKLQGRVTMTTDTSTSTAYMELRSLRSDDTAVYYCARGYKDYWGQGTLVTVSS

SEQ ID NO: 1379 - protein, 120 aa, Artificial Sequence
  source: /note="Description of Artificial Sequence: Synthetic heavy chain variable domain"
QVQLVQSGAEVRKPGSSVKVSCKASGDIFRKFAVSWVRQAPGQGPEWMGRIIPNLDITDKPQKFQGRVTLSADKSTSTVYLELSSLRSEDTAVYYCARGSIYQWSGWDSWGQGTLVTVSS

SEQ ID NO: 1380 - protein, 118 aa, Artificial Sequence
  source: /note="Description of Artificial Sequence: Synthetic heavy chain variable domain"
EVQLVESGGGLVKPGGSLRLSCAASGFNFSDYYMTWIRQAPGKGLEWLSYISPGGTTYYAASVEGRFTISRDNAKNSLYLQMNSLRAEDTAVYYCARGHSFSYGEDYWGQGTLVTVSS

SEQ ID NO: 1381 - protein, 119 aa, Artificial Sequence
  source: /note="Description of Artificial Sequence: Synthetic heavy chain variable domain"
QVQLVQSGAEVKKPGASVKVSCKASGYTFTGYYMHWVRQAPGQGLEWMGWINPNSGGTNYAQKFQGRVTMTRDTSISTAYMELSRLRSDDTAVYYCARGWHQYGIMDYWGQGTLVTVSS

SEQ ID NO: 1382 - protein, 118 aa, Artificial Sequence
  source: /note="Description of Artificial Sequence: Synthetic heavy chain variable domain"
EVQLVESGGGLVQPGGSLRLSCAASGFTFSSYAMSWVRQAPGKGLEWVSAISGSGGSTYYADSVKGRFTISRDNSKNTLYLQMNSLRAEDTAVYYCARRSVWSAYDSWGQGTLVTVSS

SEQ ID NO: 1383 - protein, 118 aa, Artificial Sequence
  source: /note="Description of Artificial Sequence: Synthetic heavy chain variable domain"
QVQLVQSGGGLVQPGGSLRLSCAASGFTFSSYWMSWVRQAPGKGLEWVGNIKEDGSVKYYVDSVKGRFTISRDNAKNSVYLEMNNLRAEDTAVYYCARRGVWGHIDFWGQGTLVTVSS

SEQ ID NO: 1384 - protein, 118 aa, Artificial Sequence
  source: /note="Description of Artificial Sequence: Synthetic heavy chain variable domain"
EVQLVQSGAEVKKPGSSVKVSCKASGGTFSSYAISWVRQAPGQGLEWMGRIIPILGIANYAQKFQGRVTITADKSTSTAYMELSSLRSEDTAVYYCARGTYTWGSDTWGQGTLVTVSS

SEQ ID NO: 1385 - protein, 116 aa, Artificial Sequence
  source: /note="Description of Artificial Sequence: Synthetic heavy chain variable domain"
QVQLVESGGGLVQPGGSLRLSCAASGFSFSRHAMNWVRQAPGKGLEWVSAISGSGGNTYYSDSVEGRFTMSRDNSKNTLYLQMNSLRAEDTAVYYCARYWGSYDKWGQGTLVTVSS

SEQ ID NO: 1386 - protein, 120 aa, Artificial Sequence
  source: /note="Description of Artificial Sequence: Synthetic heavy chain variable domain"
EVQLVQSGAEVKKPGASVKVSCTASGYSFSDYYIYWLRQGPGQGLEWMGWINPNTGVTHYAQKYQGRVTMTRDTSINTVYMELSRLRSDDTAVYYCARNVYRYSMMHDSWGQGTLVTVSS

SEQ ID NO: 1387 - protein, 118 aa, Artificial Sequence
  source: /note="Description of Artificial Sequence: Synthetic heavy chain variable domain"
QAQLVQSGGGLVKPGGSLRLSCAASGFTFSSYSMNWVRQAPGKGLEWVSSISSSSSYIYYADSVRGRFTISRDNAKNSLFLQMNSLRAEDTAVYYCARRGVWGYFDSWGQGTLVTVSS

SEQ ID NO: 1388 - protein, 118 aa, Artificial Sequence
  source: /note="Description of Artificial Sequence: Synthetic heavy chain variable domain"
EVQLVQSGAEVKKPGSSVKVSCKASGGTFSSYGISWVRQAPGQGLEWMGGIIPIFGTTNYAQKFQGRVTITADESTRTAYMELSSLRSEDTAVYYCARVYGSYFYDDWGQGTLVTVSS

SEQ ID NO: 1389 - protein, 118 aa, Artificial Sequence
  source: /note="Description of Artificial Sequence: Synthetic heavy chain variable domain"
QVQLQQWGAGLLKPSETLSLTCAVYGGSFSGYYWSWIRQPPGKGLEWIGEINHSGSTNYNPSLKSRVTISVDTSKNQFSLKLSSVTAADTAVYYCARAPQSWYVGDVWGQGTLVTVSS

SEQ ID NO: 1390 - protein, 112 aa, Artificial Sequence
  source: /note="Description of Artificial Sequence: Synthetic heavy chain variable domain"
EVQLVESGGGLVQPGGSLRLSCAASGFTVTTYGVDWVRQAPGKGLEWLGVIWGGGSTNYNSALKSRFTISRDNSKNTLYLQMNSLRAEDTAVYYCASDWAYWGQGTLVTVSS

SEQ ID NO: 1391 - protein, 122 aa, Artificial Sequence
  source: /note="Description of Artificial Sequence: Synthetic heavy chain variable domain"
EVQLVESGGGLVKPGGSLRLSCAASGFTFSTYGMSWVRQAPGKGLEWVATISSGGTYTYYPDSVKGRFKISRDNAKNSLYLQMNSLRAEDTAVYYCTRHDPNDGYYFLFAYWGQGTLVTVSS

SEQ ID NO: 1392 - protein, 120 aa, Artificial Sequence
  source: /note="Description of Artificial Sequence: Synthetic heavy chain variable domain"
QVQLVQSGAEVKKPGASVKVSCKASGYTFTGYYIHWVRQAPGQGLEWMGWIYPGNFNTKYNERFKGRVTMTTDTSTSTAYMELRSLRSDDTAVYYCAREDGSPYYAMDYWGQGTSVTVSS

SEQ ID NO: 1393 - protein, 118 aa, Artificial Sequence
  source: /note="Description of Artificial Sequence: Synthetic heavy chain variable domain"
QVQLVQSGAEVKKPGASVKVSCKASGYTFTYFYMNWVRQAPGQGLEWVGQINPNNGGTAYAQKFQGRVTMTRDTSTSTVYMELSSLRSEDTAVYYCARWVGTHYFDYWGQGTTLTVSS

SEQ ID NO: 1394 - protein, 120 aa, Artificial Sequence; identical to SEQ ID NO: 1392
  source: /note="Description of Artificial Sequence: Synthetic heavy chain variable domain"

SEQ ID NO: 1395 - protein, 118 aa, Artificial Sequence; identical to SEQ ID NO: 1393
  source: /note="Description of Artificial Sequence: Synthetic heavy chain variable domain"

SEQ ID NO: 1396 - protein, 445 aa, Artificial Sequence
  source: /note="Description of Artificial Sequence: Synthetic heavy chain variable domain"
QVQLQESGPGLVKPSQTLSLTCTVSGYSISSDFAWNWIRQPPGKGLEWMGYISYSGNTRYQPSLKSRITISRDTSKNQFFLKLNSVTAADTATYYCVTAGRGFPYWGQGTLVTVSSASTKGPSVFPLAPSSKSTSGGTAALGCLVKDYFPEPVTVSWNSGALTSGVHTFPAVLQSSGLYSLSSVVTVPSSSLGTQTYICNVNHKPSNTKVDKKVEPKSCDKTHTCPPCPAPELLGGPSVFLFPPKPKDTLMISRTPEVTCVVVDVSHEDPEVKFNWYVDGVEVHNAKTKPREEQYNSTYRVVSVLTVLHQDWLNGKEYKCKVSNKALPAPIEKTISKAKGQPREPQVYTLPPSRDELTKNQVSLTCLVKGFYPSDIAVEWESNGQPENNYKTTPPVLDSDGSFFLYSKLTVDKSRWQQGNVFSCSVMHEALHNHYTQKSLSLSPG

SEQ ID NO: 1397 - protein, 116 aa, Artificial Sequence
  source: /note="Description of Artificial Sequence: Synthetic heavy chain variable domain"
EVQLQESGPGLVKPSQTLSLTCTVSGYSISSDFAWNWIRQPPGKGLEWMGYISYSGNTRYQPSLKSRITISRDTSKNQFFLKLNSVTAADTATYYCVTAGRGFPYWGQGTLVTVSS

SEQ ID NO: 1398 - protein, 116 aa, Artificial Sequence
  source: /note="Description of Artificial Sequence: Synthetic heavy chain variable domain"
EVQLQESGPGLVKPSQTLSLTCTVSGYSISRDFAWNWIRQPPGKGLEWMGYISYNGNTRYQPSLKSRITISRDTSKNQFFLKLNSVTAADTATYYCVTASRGFPYWGQGTLVTVSS

SEQ ID NO: 1399 - protein, 105 aa, Artificial Sequence
  source: /note="Description of Artificial Sequence: Synthetic heavy chain variable domain"
QSVLTQDPAVSGQTVKITCQGDSLRSYFASWYQQKPGQAPTLVMYARNDRPAGVPDRFSGSKSGTSASLAISGLQSEDEADYYCAAWDDSLNGYLFGAGTKLTVL

SEQ ID NO: 1400 - protein, 105 aa, Artificial Sequence
  source: /note="Description of Artificial Sequence: Synthetic heavy chain variable domain"
QSVLTQDPAVSGQTVKITCQGDSLRSYFASWYQQKPGQAPTLVMYARNDRPAGVPDRFSGSKSGTSASLAISGLQPEDEADYYCAAWDDSLNGYLFGAGTKLTVL

SEQ ID NO: 1401 - protein, 105 aa, Artificial Sequence
  source: /note="Description of Artificial Sequence: Synthetic heavy chain variable domain"
QSVLTQDPAASGQTVKITCQGDSLRSYFASWYQQKPGQAPTLVMYARNDRPAGVPDRFSGSKSGTSASLAISGLQSEDEADYYCAAWDDSLNGYLFGAGTKLTVL

SEQ ID NO: 1402 - protein, 105 aa, Artificial Sequence
  source: /note="Description of Artificial Sequence: Synthetic heavy chain variable domain"
QSVLTQDPAVSGQTVKITCQGDSLRSYLASWYQQKPGQAPTLVTYARNDRPAGVPDRFSGSKSGTSASLAISGLQSEDEADYYCAAWDDSLNGYLFGAGTKLTVL

SEQ ID NO: 1403 - DNA, 443 bp, Artificial Sequence
  source: /note="Description of Artificial Sequence: Synthetic heavy chain variable domain"
aagcttgccaccatgggctggtcatgtatcattctgttcctggtggccaccgcaaccggtgtccattcccaggtgcagctcgtgcagagcggggctgaagtggccaagccaggtgcttctgtcaaattgtcttgtaaggccagtgggtacaccttcacaagctactggatgcagtgggttaagcaacgcccaggccagggactggagtggatcggcaccatttatccaggggatggagataccacttatacacaaaagtttcaaggcaaagccaccctgaccgccgacaaatccagcagcacagcatacatgcagctttctagcctcaggtctgaagactccgccgtgtactattgtgcccgctacgacgcccccggctatgcaatggattactggggccagggtactctggtcacagtgtcctccgcctctacaaagggccc

SEQ ID NO: 1404 - DNA, 443 bp, Artificial Sequence
  source: /note="Description of Artificial Sequence: Synthetic heavy chain variable domain"
aagcttgccaccatggggtggagttgtatcatcctcttccttgtcgctaccgccactggagtgcattcccaggtgcagttggtgcaatctggcgccgaggtggccaagcccggtgcctccgtaaaattgagttgtaaagcctctggctatacatttacatcttattggatgcagtgggtcaagcagcgccctggtcaaggcctggagtggatcggagctctgtatcctggcgacggggacgcccgttacactcagaaatttcagggcaaagctaccctcaccgcagatacatccagcagcactgcttatatgcaacttagtagcctccgcagcgaggatagtgccgtgtactactgtgccagatatgacgccccaggttatgctatggactactggggtcaaggaaccctggtgacagtgtcaagcgctagcacaaagggccc

SEQ ID NO: 1405 - protein, 119 aa, Artificial Sequence
  source: /note="Description of Artificial Sequence: Synthetic heavy chain variable domain"
QVQLQQSGTELARPGASVKLSCKASGYTFTSYWMQWVKQRPGQGLECIGTIYPGDGDTRYIQKFKGKATLTADKSSSTAYMQLSSLASEDSAVYYCARYDAPGYAMDYWGQGTSVTVSS

SEQ ID NO: 1406 - protein, 119 aa, Artificial Sequence
  source: /note="Description of Artificial Sequence: Synthetic heavy chain variable domain"
QVQLQQSGAELARPGASVKLSCKASGYTFTSYWMQWVKQRPGQGLECIGALYPGDGDARYTQKFKGKATLTADRSSSTAYMQLSSLASEDSAVYYCARYDAPGYAMDYWGQGTSVTVAS

SEQ ID NO: 1407 - protein, 119 aa, Artificial Sequence
  source: /note="Description of Artificial Sequence: Synthetic heavy chain variable domain"
QVQLQQSGAELARPGASVKLSCKASGYTFTSYWMQWVKQRPGQGLECIGTIYPGDGDTTYTQKFKGKATLTADKSSSTAYMQLSSLASEDSAVYYCARYDAPGYAMDYWGQGTSVTVSS

SEQ ID NO: 1408 - protein, 119 aa, Artificial Sequence
  source: /note="Description of Artificial Sequence: Synthetic heavy chain variable domain"
QVQLVQSGAEVAKPGASVKLSCKASGYTFTSYWMQWVKQRPGQGLECIGALYPGDGDARYTQKFQGKATLTADTSSSTAYMQLSSLRSEDSAVYYCARYDAPGYAMDYWGQGTLVTVSS

SEQ ID NO: 1409 - protein, 119 aa, Artificial Sequence
  source: /note="Description of Artificial Sequence: Synthetic heavy chain variable domain"
QVQLVQSGAEVAKPGASVKLSCKASGYTFTSYWMQWVKQRPGQGLECIGTIYPGDGDTRYIQKFQGKATLTADKSSSTAYMQLSSLRSEDSAVYYCARYDAPGYAMDYWGQGTLVTVSS

SEQ ID NO: 1410 - protein, 119 aa, Artificial Sequence
  source: /note="Description of Artificial Sequence: Synthetic heavy chain variable domain"
QVQLVQSGAEVAKPGASVKLSCKASGYTFTSYWMQWVKQRPGQGLEWIGALYPGDGDARYTQKFQGKATLTADTSSSTAYMQLSSLRSEDSAVYYCARYDAPGYAMDYWGQGTLVTVSS

SEQ ID NO: 1411 - protein, 119 aa, Artificial Sequence
  source: /note="Description of Artificial Sequence: Synthetic heavy chain variable domain"
QVQLVQSGAEVAKPGASVKLSCKASGYTFTSYWMQWVKQRPGQGLEWIGTIYPGDGDTTYTQKFQGKATLTADKSSSTAYMQLSSLRSEDSAVYYCARYDAPGYAMDYWGQGTLVTVSS

SEQ ID NO: 1412 - protein, 119 aa, Artificial Sequence
  source: /note="Description of Artificial Sequence: Synthetic heavy chain variable domain"
QVQLVQSGAEVKKPGASVKVSCKASGYTFTSYWMQWVRQAPGQGLEWMGTIYPGDGDTTYTQKFKGRVTMTRDTSTSTVYMELSSLRSEDTAVYYCARYDAPGYAMDYWGQGTLVTVSS

SEQ ID NO: 1413 - protein, 119 aa, Artificial Sequence
  source: /note="Description of Artificial Sequence: Synthetic heavy chain variable domain"
QVQLQQSGPGLVKPSETLSLTCTVSGFSISNYGVHWIRQPPGKGLEWIGVIWSGGNTDYNTPFTSRVTINKDNSKSQVSFKMSSVTAADTAVYYCARALTYYDYEFAYWGQGTLVTVSA

SEQ ID NO: 1414 - protein, 119 aa, Artificial Sequence
  source: /note="Description of Artificial Sequence: Synthetic heavy chain variable domain"
QVQLQQSGPGLVKPSETLSLTCTVSGFSISNYGVHWIRQSPGKGLEWIGVIWSGGNTDYNTPFTSRVTINKDNSKSQFSLKLSSVTAADTAVYYCARALTYYDYEFAYWGQGTLVTVSA

SEQ ID NO: 1415 - protein, 119 aa, Artificial Sequence
  source: /note="Description of Artificial Sequence: Synthetic heavy chain variable domain"
QVQLQQSGPGLVKPSETLSLTCTVSGFSISNYGVHWIRQSPGKGLEWIGVIWSGGNTDYNTPFTSRVTINKDNSKSQVSFKMSSVTAADTAVYYCARALTYYDYEFAYWGQGTLVTVSA

SEQ ID NO: 1416 - protein, 119 aa, Artificial Sequence
  source: /note="Description of Artificial Sequence: Synthetic heavy chain variable domain"
QVQLQESGPGLVKPSETLSLTCTVSGFSISNYGVHWIRQSPGKGLEWIGVIWSGGNTDYNTPFTSRVTISVDTSKNQFSLKLSSVTAADTAVYYCARALTYYDYEFAYWGQGTLVTVSA

SEQ ID NO: 1417 - protein, 119 aa, Artificial Sequence
  source: /note="Description of Artificial Sequence: Synthetic heavy chain variable domain"
QVQLQESGPGLVKPSETLSLTCTVSGFSISNYGVHWIRQPPGKGLEWIGVIWSGGNTDYNTPFTSRVTISKDTSKNQVSLKLSSVTAADTAVYYCARALTYYDYEFAYWGQGTLVTVSA

SEQ ID NO: 1418 - protein, 119 aa, Artificial Sequence
  source: /note="Description of Artificial Sequence: Synthetic heavy chain variable domain"
QVQLQESGPGLVKPSETLSLTCTVSGGSISNYGVHWIRQPPGKGLEWIGVIWSGGNTDYNTPFTSRVTINKDNSKSQVSFKMSSVTAADTAVYYCARALTYYDYEFAYWGQGTLVTVSA

SEQ ID NO: 1419 - protein, 119 aa, Artificial Sequence
  source: /note="Description of Artificial Sequence: Synthetic heavy chain variable domain"
QVQLQESGPGLVKPSETLSLTCTVSGGSISNYGVHWIRQPPGKGLEWIGVIWSGGNTDYNTPFTSRVTISVDTSKNQFSLKLSSVTAADTAVYYCARALTYYDYEFAYWGQGTLVTVSA

SEQ ID NO: 1420 - protein, 119 aa, Artificial Sequence
  source: /note="Description of Artificial Sequence: Synthetic heavy chain variable domain"
  MOD_RES (6)..(6): Any amino acid
  MOD_RES (27)..(27): Any amino acid
  MOD_RES (40)..(40): Any amino acid
  MOD_RES (70)..(71): Any amino acid
  MOD_RES (73)..(73): Any amino acid
  MOD_RES (76)..(76): Any amino acid
  MOD_RES (78)..(78): Any amino acid
  MOD_RES (80)..(80): Any amino acid
  MOD_RES (82)..(82): Any amino acid
  MOD_RES (88)..(88): Any amino acid
QVQLQXSGPGLVKPSETLSLTCTVSGXSISNYGVHWIRQXPGKGLEWIGVIWSGGNTDYNTPFTSRVTIXXDXSKXQXSXKXSSVTAXDTAVYYCARALTYYDYEFAYWGQGTLVTVSA

SEQ ID NO: 1421 - protein, 122 aa, Artificial Sequence
  source: /note="Description of Artificial Sequence: Synthetic heavy chain variable domain"
EVQLVESGGGVVQPGGSLRLSCAASGFTFSDYDMSWIRQAPGKGLEWVSGILGGSERSYYRDSVKGRFTISRDNSRKTLYLQMNSLRAEDTAVYYCARHGSPGYTLYAWDYWGQGTTVTVSS

SEQ ID NO: 1422 - protein, 621 aa, Artificial Sequence
  source: /note="Description of Artificial Sequence: Synthetic heavy chain variable domain"
LEEKKVCQGTSNKLTQLGTFEDHFLSLQRMFNNCEVVLGNLEITYVQRNYDLSFLKTIQEVAGYVLIALNTVERIPLENLQIIRGNMYYENSYALAVLSNYDANKTGLKELPMRNLQEILHGAVRFSNNPALCNVESIQWRDIVSSDFLSNMSMDFQNHLGSCQKCDPSCPNGSCWGAGEENCQKLTKIICAQQCSGRCRGKSPSDCCHNQCAAGCTGPRESDCLVCRKFRDEATCKDTCPPLMLYNPTTYQMDVNPEGKYSFGATCVKKCPRNYVVTDHGSCVRACGADSYEMEEDGVRKCKKCEGPCRKVCNGIGIGEFKDSLSINATNIKHFKNCTSISGDLHILPVAFRGDSFTHTPPLDPQELDILKTVKEITGFLLIQAWPENRTDLHAFENLEIIRGRTKQHGQFSLAVVSLNITSLGLRSLKEISDGDVIISGNKNLCYANTINWKKLFGTSGQKTKIISNRGENSCKATGQVCHALCSPEGCWGPEPKDCVSCRNVSRGRECVDKCNLLEGEPREFVENSECIQCHPECLPQAMNITCTGRGPDNCIQCAHYIDGPHCVKTCPAGVMGENNTLVWKYADAGHVCHLCHPNCTYGCTGPGLEGCPTNGPKIPS

SEQ ID NO: 1423 - protein, 118 aa, Artificial Sequence
  source: /note="Description of Artificial Sequence: Synthetic heavy chain variable domain"
QVQLVQSGAEVKKPGASVKVSCKASGYTFTSHWMHWVRQAPGQGLEWMGWINPSSGRNNYAQKFQGRVTMTRDTSISTAYMELSRLTSDDTAVYYCARYYGYDEAMDYWGQGTSVTVS

SEQ ID NO: 1424 - protein, 122 aa, Artificial Sequence
  source: /note="Description of Artificial Sequence: Synthetic heavy chain variable domain"
QVQLVQSGAEVKKPGASVKVSCKASGYTFTSYWMHWVRQAPGQGLEWMGIIYPGSRSTSYAQKFQGRVTMTRDTSTSTVYMELSSLRSEDTAVYYCTRNGDYYVSSGDAMDYWGQGTLVTVS

SEQ ID NO: 1425 - protein, 124 aa, Artificial Sequence
  source: /note="Description of Artificial Sequence: Synthetic heavy chain variable domain"
RAEVQLQQPGSELVRPGASVKLSCKASGYTFTSYWMHWVKQRPGQGLEWIGNIYPGSRSTNYDEKFKSKATLTVDTSSSTAYMQLSSLTSEDSAVYYCTRNGDYYVSSGDAMDYWGQGTSVTVS

SEQ ID NO: 1426 - protein, 249 aa, Artificial Sequence
  source: /note="Description of Artificial Sequence: Synthetic heavy chain variable domain"
RAEVQLQQPGSELVRPGASVKLSCKASGYTFTSYWMHWVKQRPGQGLEWIGNIYPGSRSTNYDEKFKSKATLTVDTSSSTAYMQLSSLTSEDSAVYYCTRNGDYYVSSGDAMDYWGQGTSVTVSSASTKGPQVQLQQPGAELVEPGGSVKLSCKASGYTFTSHWMHWVKQRPGQGLEWIGEINPSSGRNNYNEKFKSKATLTVDKSSSTAYMQFSSLTSEDSAVYYCVRYYGYDEAMDYWGQGTSVTVS

SEQ ID NO: 1427 - protein, 125 aa, Artificial Sequence
  source: /note="Description of Artificial Sequence: Synthetic heavy chain variable domain"
RAEVQLQQSGAELVRPGSSVKISCKASGYAFSSYWMNWVRQRPGQGLEWIGQIYPGDGDTNYNGKFKGRATLTANKSSSTAYMQLSSLTSEDSAVYFCARRASSLYDVYPYYFDYWGQGTTLTVS

SEQ ID NO: 1428 - protein, 125 aa, Artificial Sequence
  source: /note="Description of Artificial Sequence: Synthetic heavy chain variable domain"
RAEVQLQQSGPELVKPGASVKIPCKTSGYTFTDYNMAWVKQSHGKSLEWIGDIIPNNGGAIYNQKFKGKATLTVDKSSSTASMELRSLTSEDTAVYFCARKNIYYRYDGAGALDYWGQGTSVTVS

SEQ ID NO: 1429 - protein, 118 aa, Artificial Sequence
  source: /note="Description of Artificial Sequence: Synthetic heavy chain variable domain"
RAEVQLVESGGGLVKPGESLKLSCAASGFAFSYSDMSWVRQTPEKRLEWVAYMSSAGDVTFYSDTVKGRFTISRDNAKNTLYLQVSSLKSEDTAIYYCVRHRDVAMDYWGQGTSVTVS

SEQ ID NO: 1430 - protein, 122 aa, Artificial Sequence
  source: /note="Description of Artificial Sequence: Synthetic heavy chain variable domain"
RAEVQLVESGGGLVKPGGSLKLSCAASGFAFSSYDMSWVRQTPEKRLEWVAYIGSGDDNTHYPDSVKGRFTISRHNAKNTLYLQMSSLKSEDTAMYYCARQKYGNYGDTMDYWGQGTSVTVS

SEQ ID NO: 1431 - protein, 122 aa, Artificial Sequence
  source: /note="Description of Artificial Sequence: Synthetic heavy chain variable domain"
RAEVQLVESGGGLVKPGGSLKLSCAASGFAYSTYDMSWVRQTPEKRLEWVAYISSGGDAAYYPDTVKGRFTISRDNAKNTLYLQMSSLKSEDTAMYYCARSRYGNYGDAMDYWGQGTSVTVS

SEQ ID NO: 1432 - protein, 120 aa, Artificial Sequence
  source: /note="Description of Artificial Sequence: Synthetic heavy chain variable domain"
RAEVQLVESGGGLVKPGGSLKLSCAASGFTFSSYALSWVRQTPERRLEWVASISGVGSTYFPDSVKGRFTMSRDNARNILYLQMSSLRSEDTAMYYCARGSDGYFYAMDYWGQGTSVTVS

SEQ ID NO: 1433 - protein, 124 aa, Artificial Sequence
  source: /note="Description of Artificial Sequence: Synthetic heavy chain variable domain"
RAEVQLVESGGGLVKPGGSLKLSCAVSGFTFSSYVMSWVRQTPEKRLEWVATITSGGRNIYYLDSVKGRFTISRDNAKNTLYLQMSSLRSEDTAMYYCARHEDYRYDGYYAMDYWGQGTSVTVS

SEQ ID NO: 1434 - protein, 122 aa, Artificial Sequence
  source: /note="Description of Artificial Sequence: Synthetic heavy chain variable domain"
RAQVQLKESGPGLVAPSQSLSITCSVSGFSLTIYGVHWVRQPPGKGLEWLGVMWAGGNTDYNSALMSRLNISKDNSKSQVFLKVNSLQTDDTAMYYCTRDPDGYYVGWFFDVWGAGTTVTVS

SEQ ID NO: 1435 - protein, 119 aa, Artificial Sequence
  source: /note="Description of Artificial Sequence: Synthetic heavy chain variable domain"
RAQVQLKESGPGLVAPSQSLSITCTVSGFSLTGHGVNWVRQPPGKGLEWLGMIWGDGSTDYNSTLKSRLSISKDNSKSQVFLKMNSLQTDDTARYYCARGYGYLYYFDYWGQGTTLTVS

SEQ ID NO: 1436 - protein, 117 aa, Artificial Sequence
  source: /note="Description of Artificial Sequence: Synthetic heavy chain variable domain"
RAQVQLKESGPGLVAPSQSLSITCTVSGFSLTIYGVHWVRQPPGKGLEWLGVIWAGGNTNYNSALMSRLSISKDNSKSQVFLKMNSLQTDDTAMYFCARGYGYNLDYWGQGTTLTVS

SEQ ID NO: 1437 - protein, 117 aa, Artificial Sequence
  source: /note="Description of Artificial Sequence: Synthetic heavy chain variable domain"
RAQVQLKESGPGLVAPSQSLSITCTVSGFSLTTYGVHWVRQPPGKGLEWLGVIWAGGSTNYNSALMSRLSIKKDNSKSQVFLKMNSLQTDDTAMYYCARAYGYNFDYWGQGTTLTVS

SEQ ID NO: 1438 - protein, 120 aa, Artificial Sequence
  source: /note="Description of Artificial Sequence: Synthetic heavy chain variable domain"
RAQVQLQQPGAELVEPGGSVKLSCKASGYTFTSHWMHWVKQRPGQGLEWIGEINPSSGRNNYNEKFKSKATLTVDKSSSTAYMQFSSLTSEDSAVYYCVRYYGYDEAMDYWGQGTSVTVS

SEQ ID NO: 1439 - protein, 249 aa, Artificial Sequence
  source: /note="Description of Artificial Sequence: Synthetic heavy chain variable domain"
RAQVQLQQPGAELVEPGGSVKLSCKASGYTFTSHWMHWVKQRPGQGLEWIGEINPSSGRNNYNEKFKSKATLTVDKSSSTAYMQFSSLTSEDSAVYYCVRYYGYDEAMDYWGQGTSVTVSSASTKGPEVQLQQPGSELVRPGASVKLSCKASGYTFTSYWMHWVKQRPGQGLEWIGNIYPGSRSTNYDEKFKSKATLTVDTSSSTAYMQLSSLTSEDSAVYYCTRNGDYYVSSGDAMDYWGQGTSVTVS

SEQ ID NO: 1440 - protein, 121 aa, Artificial Sequence
  source: /note="Description of Artificial Sequence: Synthetic heavy chain variable domain"
RAQVQLQQPGAELVKPGASMKLSCKASGYTFTNYWMHWVKQRPGQGLEWIGEINPSNGRTNYNEKFKSKATLTVDKSSSTAYMQLSSLTSEDSGVYYCAKGGNYYDYDWDYWGQGTTLTVS

SEQ ID NO: 1441 - protein, 119 aa, Artificial Sequence
  source: /note="Description of Artificial Sequence: Synthetic heavy chain variable domain"
RAQVQLQQPGAELVKPGASVKLSCKASGYTFTSDWMHWMKQRPGQGLEWIGEINPSNGRSSYNEKFKSKATLTVDKSSSTAYMQLSSLTSEDSAVYYCARIGGIYVETYWGQGTLVTVS

SEQ ID NO: 1442 - protein, 120 aa, Artificial Sequence
  source: /note="Description of Artificial Sequence: Synthetic heavy chain variable domain"
RAQVQLQQPGAELVKPGASVKLSCKASGYTFTSHWMHWVQQRPGQGLEWIGEIHPSNGRTNYNEKFKNKATLTVDKSPSTAYMQLSSLTSEDSAVYYCARYYGYDDAMDYWGQGTSVTVS

SEQ ID NO: 1443 - protein, 117 aa, Artificial Sequence
  source: /note="Description of Artificial Sequence: Synthetic heavy chain variable domain"
DVQLQESGPGLVKPSQSLSLTCTVTGYSITSDYAWNWIRLFPGNKLEWMGFINYSGNTSYNPSLKSRISITRDTSKNQFFLKLNSLTTDDTATYYCARGGLSRFPYWGQGTLVTVSA

SEQ ID NO: 1444 - protein, 119 aa, Artificial Sequence
  source: /note="Description of Artificial Sequence: Synthetic heavy chain variable domain"
EVQLVESGGGLVQPGGSLRLSCAVSGFSLTNYGVHWVRQATGKGLEWLGVIWSGGNTDYNTPFTSRLTISKENAKNSLYLQMNSLRAGDTAVYYCARALTYYDYEFAYWGQGTMVTVSS

SEQ ID NO: 1445 - protein, 119 aa, Artificial Sequence
  source: /note="Description of Artificial Sequence: Synthetic heavy chain variable domain"
EVQLVQSGAEVKKPGATVKISCKVSGFSLFNYGVHWIRQPPGKGLEWIGVIWSGGNTDYNTPFTSRFTISRDDSKNTAYLQMNSLKTEDTAVYYCARALTYYDEEFAYWGPGTLVTVSA

SEQ ID NO: 1446 - protein, 119 aa, Artificial Sequence
  source: /note="Description of Artificial Sequence: Synthetic heavy chain variable domain"
EVQLVQSGAEVKKPGATVKISCKVSGFSLFNYGVHWIRQPPGKGLEWIGVIWSGGNTDYNTPFTSRFTISRDDSKNTAYLQMNSLKTEDTAVYYCARALTYYDEEFAYWGPGTLVTVSS

SEQ ID NO: 1447 - protein, 119 aa, Artificial Sequence
  source: /note="Description of Artificial Sequence: Synthetic heavy chain variable domain"
EVQLVQSGAEVKKPGATVKISCKVSGFSLFNYGVHWIRQPPGKGLEWIGVIWSGGNTDYNTPFTSRFTISRDNSKNTLYLQMNSLRAEDTAVYYCARALTYYDEEFAYWGPGTLVTVSA

SEQ ID NO: 1448 - protein, 119 aa, Artificial Sequence
  source: /note="Description of Artificial Sequence: Synthetic heavy chain variable domain"
EVQLVQSGAEVKKPGATVKISCKVSGFSLFNYGVHWIRQPPGKGLEWIGVIWSGGNTDYNTPFTSRFTISRDNSKNTLYLQMNSLRAEDTAVYYCARALTYYDEEFAYWGPGTLVTVSS

SEQ ID NO: 1449 - protein, 119 aa, Artificial Sequence
  source: /note="Description of Artificial Sequence: Synthetic heavy chain variable domain"
EVQLVQSGAEVKKPGATVKISCKVSGFSLFNYGVHWIRQSPSRGLEWLGVIWSGGNTDYNTPFTSRFTISRDNSKNTLYLQMNSLRAEDTAVYYCARALTYYDEEFAYWGPGTLVTVSA

SEQ ID NO: 1450 - protein, 119 aa, Artificial Sequence
  source: /note="Description of Artificial Sequence: Synthetic heavy chain variable domain"
EVQLVQSGAEVKKPGATVKISCKVSGFSLFNYGVHWIRQSPSRGLEWLGVIWSGGNTDYNTPFTSRFTISRDNSKNTLYLQMNSLRAEDTAVYYCARALTYYDEEFAYWGPGTLVTVSS

SEQ ID NO: 1451 - protein, 119 aa, Artificial Sequence
  source: /note="Description of Artificial Sequence: Synthetic heavy chain variable domain"
EVQLVQSGAEVKKPGATVKISCKVSGFSLFNYGVHWVRQARGQRLEWIGVIWSGGNTDYNTPFTSRFTISRDDSKNTAYLQMNSLKTEDTAVYYCARALTYYDEEFAYWGPGTLVTVSA

SEQ ID NO: 1452 - protein, 119 aa, Artificial Sequence
  source: /note="Description of Artificial Sequence: Synthetic heavy chain variable domain"
EVQLVQSGAEVKKPGATVKISCKVSGFSLFNYGVHWVRQARGQRLEWIGVIWSGGNTDYNTPFTSRFTISRDDSKNTAYLQMNSLKTEDTAVYYCARALTYYDEEFAYWGPGTLVTVSS

SEQ ID NO: 1453 - protein, 119 aa, Artificial Sequence
  source: /note="Description of Artificial Sequence: Synthetic heavy chain variable domain"
EVQLVQSGAEVKKPGATVKISCKVSGFSLFNYGVHWVRQATGQGLEWMGVIWSGGNTDYNTPFTSRFTISRDDSKNTAYLQMNSLKTEDTAVYYCARALTYYDEEFAYWGPGTLVTVSA

SEQ ID NO: 1454 - protein, 119 aa, Artificial Sequence
  source: /note="Description of Artificial Sequence: Synthetic heavy chain variable domain"
EVQLVQSGAEVKKPGATVKISCKVSGFSLFNYGVHWVRQATGQGLEWMGVIWSGGNTDYNTPFTSRFTISRDDSKNTAYLQMNSLKTEDTAVYYCARALTYYDEEFAYWGPGTLVTVSS

SEQ ID NO: 1455 - protein, 119 aa, Artificial Sequence
  source: /note="Description of Artificial Sequence: Synthetic heavy chain variable domain"
EVQLVQSGAEVKKPGATVKISCKVSGFSLTNYGVHWIRQPPGKGLEWIGVIWSGGNTDYNTPFTSRFTISRDNAKNSLYLQMNSLRAEDTAVYYCARALTYYDEEFAYWGPGTLVTVSA

SEQ ID NO: 1456 - protein, 119 aa, Artificial Sequence
  source: /note="Description of Artificial Sequence: Synthetic heavy chain variable domain"
EVQLVQSGAEVKKPGATVKISCKVSGFSLTNYGVHWIRQPPGKGLEWIGVIWSGGNTDYNTPFTSRFTISRDNAKNSLYLQMNSLRAEDTAVYYCARALTYYDEEFAYWGPGTLVTVSS

SEQ ID NO: 1457 - protein, 119 aa, Artificial Sequence
  source: /note="Description of Artificial Sequence: Synthetic heavy chain variable domain"
EVQLVQSGAEVKKPGATVKISCKVSGFSLTNYGVHWIRQSPSRGLEWLGVIWSGGNTDYNTPFTSRLTISKDTSKNQVVLTMTNMDPVDTATYYCARALTYYDEEFAYWGPGTLVTVSA

SEQ ID NO: 1458 - protein, 119 aa, Artificial Sequence
  source: /note="Description of Artificial Sequence: Synthetic heavy chain variable domain"
EVQLVQSGAEVKKPGATVKISCKVSGFSLTNYGVHWIRQSPSRGLEWLGVIWSGGNTDYNTPFTSRLTISKDTSKNQVVLTMTNMDPVDTATYYCARALTYYDEEFAYWGPGTLVTVSS

SEQ ID NO: 1459 - protein, 119 aa, Artificial Sequence
  source: /note="Description of Artificial Sequence: Synthetic heavy chain variable domain"
EVQLVQSGAEVKKPGATVKISCKVSGFSLTNYGVHWVRQATGQGLEWMGVIWSGGNTDYNTPFTSRFTISRDDSKNTAYLQMNSLKTEDTAVYYCARALTYYDEEFAYWGPGTLVTVSA

SEQ ID NO: 1460 - protein, 119 aa, Artificial Sequence
  source: /note="Description of Artificial Sequence: Synthetic heavy chain variable domain"
EVQLVQSGAEVKKPGATVKISCKVSGFSLTNYGVHWVRQATGQGLEWMGVIWSGGNTDYNTPFTSRFTISRDDSKNTAYLQMNSLKTEDTAVYYCARALTYYDEEFAYWGPGTLVTVSS

SEQ ID NO: 1461 - protein, 119 aa, Artificial Sequence
  source: /note="Description of Artificial Sequence: Synthetic heavy chain variable domain"
EVQLVQSGAEVKKPGATVKISCKVSGFSLTNYGVHWVRQATGQGLEWMGVIWSGGNTDYNTPFTSRFTISRDDSKNTAYLQMNSLKTEDTAVYYCARALTYYDEEFAYWGQGTLVTVSA

SEQ ID NO: 1462 - protein, 119 aa, Artificial Sequence
  source: /note="Description of Artificial Sequence: Synthetic heavy chain variable domain"
EVQLVQSGAEVKKPGATVKISCKVSGFSLTNYGVHWVRQATGQGLEWMGVIWSGGNTDYNTPFTSRFTISRDDSKNTAYLQMNSLKTEDTAVYYCARALTYYDEEFAYWGQGTLVTVSS

SEQ ID NO: 1463 - protein, 119 aa, Artificial Sequence
  source: /note="Description of Artificial Sequence: Synthetic heavy chain variable domain"
QVQLKQSGPGLVQPSQSLSITCTVCGFSLTNYGVHWVRQSPGKGLEWLGVIWSGGNTDYNTPFTSRLSINKDNSKSQVFFKMNSLQSNDTAIYYCARALTYYDEEFAYWGQGTLVTVSA

SEQ ID NO: 1464 - protein, 119 aa, Artificial Sequence
  source: /note="Description of Artificial Sequence: Synthetic heavy chain variable domain"
QVQLKQSGPGLVQPSQSLSITCTVCGFSLTNYGVHWVRQSPGKGLEWLGVIWSGGNTDYNTPFTSRLSINKDNSKSQVFFKMNSLQSNDTAIYYCARALTYYDEEFAYWGQGTLVTVSS

SEQ ID NO: 1465 - protein, 119 aa, Artificial Sequence
  source: /note="Description of Artificial Sequence: Synthetic heavy chain variable domain"
QVQLKQSGPGLVQPSQSLSITCTVSGFSLFNYGVHWVRQSPGKGLEWLGVIWGGGNTDYNTPFTSRLSINKDNSKSQVFFKMNSLQSNDTAIYYCARALTYYDEEFAYWGPGTLVTVSA

SEQ ID NO: 1466 - protein, 119 aa, Artificial Sequence
  source: /note="Description of Artificial Sequence: Synthetic heavy chain variable domain"
QVQLKQSGPGLVQPSQSLSITCTVSGFSLFNYGVHWVRQSPGKGLEWLGVIWGGGNTDYNTPFTSRLSINKDNSKSQVFFKMNSLQSNDTAIYYCARALTYYDEEFAYWGPGTLVTVSS

SEQ ID NO: 1467 - protein, 119 aa, Artificial Sequence
  source: /note="Description of Artificial Sequence: Synthetic heavy chain variable domain"
QVQLKQSGPGLVQPSQSLSITCTVSGFSLFNYGVHWVRQSPGKGLEWLGVIWGGGNTDYNTPFTSRLSINKDNSKSQVFFKMNSLQSNDTAIYYCARALTYYDEEFAYWGQGTLVTVSA

SEQ ID NO: 1468 - protein, 119 aa, Artificial Sequence
  source: /note="Description of Artificial Sequence: Synthetic heavy chain variable domain"
QVQLKQSGPGLVQPSQSLSITCTVSGFSLFNYGVHWVRQSPGKGLEWLGVIWGGGNTDYNTPFTSRLSINKDNSKSQVFFKMNSLQSNDTAIYYCARALTYYDEEFAYWGQGTLVTVSS

SEQ ID NO: 1469 - protein, 119 aa, Artificial Sequence
  source: /note="Description of Artificial Sequence: Synthetic heavy chain variable domain"
QVQLKQSGPGLVQPSQSLSITCTVSGFSLFNYGVHWVRQSPGKGLEWLGVIWSGGNTDYNTPFTSRLSINKDNSKSQVFFKMNSLQSNDTAIYYCARALTYYDEEFAYWGPGTLVTVSA

SEQ ID NO: 1470 - protein, 119 aa, Artificial Sequence
  source: /note="Description of Artificial Sequence: Synthetic heavy chain variable domain"
QVQLKQSGPGLVQPSQSLSITCTVSGFSLFNYGVHWVRQSPGKGLEWLGVIWSGGNTDYNTPFTSRLSINKDNSKSQVFFKMNSLQSNDTAIYYCARALTYYDEEFAYWGPGTLVTVSS

SEQ ID NO: 1471 - protein, 119 aa, Artificial Sequence
  source: /note="Description of Artificial Sequence: Synthetic heavy chain variable domain"
QVQLKQSGPGLVQPSQSLSITCTVSGFSLFNYGVHWVRQSPGKGLEWLGVIWSGGNTDYNTPFTSRLSINKDNSKSQVFFKMNSLQSNDTAIYYCARALTYYDEEFAYWGQGTLVTVSA

SEQ ID NO: 1472 - protein, 119 aa, Artificial Sequence
  source: /note="Description of Artificial Sequence: Synthetic heavy chain variable domain"
QVQLKQSGPGLVQPSQSLSITCTVSGFSLFNYGVHWVRQSPGKGLEWLGVIWSGGNTDYNTPFTSRLSINKDNSKSQVFFKMNSLQSNDTAIYYCARALTYYDEEFAYWGQGTLVTVSS

SEQ ID NO: 1473 - protein, 119 aa, Artificial Sequence
  source: /note="Description of Artificial Sequence: Synthetic heavy chain variable domain"
QVQLKQSGPGLVQPSQSLSITCTVSGFSLTNYGVHWVRQSPGKGLEWLGVIWGGGNTDYNTPFTSRLSINKDNSKSQVFFKMNSLQSNDTAIYYCARALTYYDEEFAYWGPGTLVTVSA

SEQ ID NO: 1474 - protein, 119 aa, Artificial Sequence
  source: /note="Description of Artificial Sequence: Synthetic heavy chain variable domain"
QVQLKQSGPGLVQPSQSLSITCTVSGFSLTNYGVHWVRQSPGKGLEWLGVIWGGGNTDYNTPFTSRLSINKDNSKSQVFFKMNSLQSNDTAIYYCARALTYYDEEFAYWGPGTLVTVSS

SEQ ID NO: 1475 - protein, 119 aa, Artificial Sequence
  source: /note="Description of Artificial Sequence: Synthetic heavy chain variable domain"
QVQLKQSGPGLVQPSQSLSITCTVSGFSLTNYGVHWVRQSPGKGLEWLGVIWGGGNTDYNTPFTSRLSINKDNSKSQVFFKMNSLQSNDTAIYYCARALTYYDEEFAYWGQGTLVTVSA

SEQ ID NO: 1476 - protein, 119 aa, Artificial Sequence
  source: /note="Description of Artificial Sequence: Synthetic heavy chain variable domain"
QVQLKQSGPGLVQPSQSLSITCTVSGFSLTNYGVHWVRQSPGKGLEWLGVIWGGGNTDYNTPFTSRLSINKDNSKSQVFFKMNSLQSNDTAIYYCARALTYYDEEFAYWGQGTLVTVSS

SEQ ID NO: 1477 - protein, 119 aa, Artificial Sequence
  source: /note="Description of Artificial Sequence: Synthetic heavy chain variable domain"
QVQLKQSGPGLVQPSQSLSITCTVSGFSLTNYGVHWVRQSPGKGLEWLGVIWGGGNTDYNTPFTSRLSINKLNSKSQVFFKMNSLQSNDTAIYYCARALTYYDEEFAYWGPGTLVTVSA

SEQ ID NO: 1478 - protein, 119 aa, Artificial Sequence
  source: /note="Description of Artificial Sequence: Synthetic heavy chain variable domain"
QVQLKQSGPGLVQPSQSLSITCTVSGFSLTNYGVHWVRQSPGKGLEWLGVIWGGGNTDYNTPFTSRLSINKLNSKSQVFFKMNSLQSNDTAIYYCARALTYYDEEFAYWGPGTLVTVSS

SEQ ID NO: 1479 - protein, 119 aa, Artificial Sequence
  source: /note="Description of Artificial Sequence: Synthetic heavy chain variable domain"
QVQLKQSGPGLVQPSQSLSITCTVSGFSLTNYGVHWVRQSPGKGLEWLGVIWGGGNTDYNTPFTSRLSINKLNSKSQVFFKMNSLQSNDTAIYYCARALTYYDEEFAYWGQGTLVTVSA

SEQ ID NO: 1480 - protein, 119 aa, Artificial Sequence
  source: /note="Description of Artificial Sequence: Synthetic heavy chain variable domain"
QVQLKQSGPGLVQPSQSLSITCTVSGFSLTNYGVHWVRQSPGKGLEWLGVIWGGGNTDYNTPFTSRLSINKLNSKSQVFFKMNSLQSNDTAIYYCARALTYYDEEFAYWGQGTLVTVSS

SEQ ID NO: 1481 - protein, 119 aa, Artificial Sequence
  source: /note="Description of Artificial Sequence: Synthetic heavy chain variable domain"
QVQLKQSGPGLVQPSQSLSITCTVSGFSLTNYGVHWVRQSPGKGLEWLGVIWSGGNTDYNTPFTSRLSINKDNSKSQVFFKMNSLQSNDTAIYYCARALTYYDDEFAYWGQGTLVTVSS

SEQ ID NO: 1482 - protein, 119 aa, Artificial Sequence
  source: /note="Description of Artificial Sequence: Synthetic heavy chain variable domain"
QVQLKQSGPGLVQPSQSLSITCTVSGFSLTNYGVHWVRQSPGKGLEWLGVIWSGGNTDYNTPFTSRLSINKDNSKSQVFFKMNSLQSNDTAIYYCARALTYYDEEFAYWGQGTLVTVSA

SEQ ID NO: 1483 - protein, 119 aa, Artificial Sequence
  source: /note="Description of Artificial Sequence: Synthetic heavy chain variable domain"
QVQLKQSGPGLVQPSQSLSITCTVSGFSLTNYGVHWVRQSPGKGLEWLGVIWSGGNTDYNTPFTSRLSINKDNSKSQVFFKMNSLQSNDTAIYYCARALTYYDEEFAYWGQGTLVTVSS

SEQ ID NO: 1484 - protein, 119 aa, Artificial Sequence
  source: /note="Description of Artificial Sequence: Synthetic heavy chain variable domain"
QVQLKQSGPGLVQPSQSLSITCTVSGFSLTNYGVHWVRQSPGKGLEWLGVIWSGGNTDYNTPFTSRLSINKLNSKSQVFFKMNSLQSNDTAIYYCARALTYYDEEFAYWGPGTLVTVSA

SEQ ID NO: 1485 - protein, 119 aa, Artificial Sequence
  source: /note="Description of Artificial Sequence: Synthetic heavy chain variable domain"
QVQLKQSGPGLVQPSQSLSITCTVSGFSLTNYGVHWVRQSPGKGLEWLGVIWSGGNTDYNTPFTSRLSINKLNSKSQVFFKMNSLQSNDTAIYYCARALTYYDEEFAYWGPGTLVTVSS

SEQ ID NO: 1486 - protein, 119 aa, Artificial Sequence
  source: /note="Description of Artificial Sequence: Synthetic heavy chain variable domain"
QVQLKQSGPGLVQPSQSLSITCTVSGFSLTNYGVHWVRQSPGKGLEWLGVIWSGGNTDYNTPFTSRLSINKLNSKSQVFFKMNSLQSNDTAIYYCARALTYYDEEFAYWGQGTLVTVSA

SEQ ID NO: 1487 - protein, 119 aa, Artificial Sequence
  source: /note="Description of Artificial Sequence: Synthetic heavy chain variable domain"
QVQLKQSGPGLVQPSQSLSITCTVSGFSLTNYGVHWVRQSPGKGLEWLGVIWSGGNTDYNTPFTSRLSINKLNSKSQVFFKMNSLQSNDTAIYYCARALTYYDEEFAYWGQGTLVTVSS

SEQ ID NO: 1488 - protein, 119 aa, Artificial Sequence
  source: /note="Description of Artificial Sequence: Synthetic heavy chain variable domain"
QVQLKQSGPGLVQPSQSLSITCTVSGGSLTNYGVHWVRQSPGKGLEWLGVIWSGGNTDYNTPFTSRLSINKDNSKSQVFFKMNSLQSNDTAIYYCARALTYYDEEFAYWGPGTLVTVSA

SEQ ID NO: 1489 - protein, 119 aa, Artificial Sequence
  source: /note="Description of Artificial Sequence: Synthetic heavy chain variable domain"
QVQLKQSGPGLVQPSQSLSITCTVSGGSLTNYGVHWVRQSPGKGLEWLGVIWSGGNTDYNTPFTSRLSINKDNSKSQVFFKMNSLQSNDTAIYYCARALTYYDEEFAYWGPGTLVTVSS

SEQ ID NO: 1490 - protein, 119 aa, Artificial Sequence
  source: /note="Description of Artificial Sequence: Synthetic heavy chain variable domain"
QVQLKQSGPGLVQPSQSLSITCTVSGGSLTNYGVHWVRQSPGKGLEWLGVIWSGGNTDYNTPFTSRLSINKDNSKSQVFFKMNSLQSNDTAIYYCARALTYYDEEFAYWGQGTLVTVSA

SEQ ID NO: 1491 - protein, 119 aa, Artificial Sequence
  source: /note="Description of Artificial Sequence: Synthetic heavy chain variable domain"
QVQLKQSGPGLVQPSQSLSITCTVSGGSLTNYGVHWVRQSPGKGLEWLGVIWSGGNTDYNTPFTSRLSINKDNSKSQVFFKMNSLQSNDTAIYYCARALTYYDEEFAYWGQGTLVTVSS

SEQ ID NO: 1492 - protein, 119 aa, Artificial Sequence
  source: /note="Description of Artificial Sequence: Synthetic heavy chain variable domain"
QVQLKQSGPGLVQPSQSLSITCTVVGFSLTNYGVHWVRQSPGKGLEWLGVIWGGGNTDYNTPFTSRLSINKDNSKSQVFFKMNSLQSNDTAIYYCARALTYYDEEFAYWGQGTLVTVSA

SEQ ID NO: 1493 - protein, 119 aa, Artificial Sequence
  source: /note="Description of Artificial Sequence: Synthetic heavy chain variable domain"
QVQLKQSGPGLVQPSQSLSITCTVVGFSLTNYGVHWVRQSPGKGLEWLGVIWGGGNTDYNTPFTSRLSINKDNSKSQVFFKMNSLQSNDTAIYYCARALTYYDEEFAYWGQGTLVTVSS

SEQ ID NO: 1494 - protein, 119 aa, Artificial Sequence
  source: /note="Description of Artificial Sequence: Synthetic heavy chain variable domain"
QVQLKQSGPGLVQPSQSLSITCTVVGFSLTNYGVHWVRQSPGKGLEWLGVIWSGGNTDYNTPFTSRLSINKDNSKSQVFFKMNSLQSNDTAIYYCARALTYYDEEFAYWGPGTLVTVSA

SEQ ID NO: 1495 - protein, 119 aa, Artificial Sequence
  source: /note="Description of Artificial Sequence: Synthetic heavy chain variable domain"
QVQLKQSGPGLVQPSQSLSITCTVVGFSLTNYGVHWVRQSPGKGLEWLGVIWSGGNTDYNTPFTSRLSINKDNSKSQVFFKMNSLQSNDTAIYYCARALTYYDEEFAYWGPGTLVTVSS

SEQ ID NO: 1496 - protein, 119 aa, Artificial Sequence
  source: /note="Description of Artificial Sequence: Synthetic heavy chain variable domain"
QVQLKQSGPGLVQPSQSLSITCTVVGFSLTNYGVHWVRQSPGKGLEWLGVIWSGGNTDYNTPFTSRLSINKDNSKSQVFFKMNSLQSNDTAIYYCARALTYYDEEFAYWGQGTLVTVSA

SEQ ID NO: 1497 - protein, 119 aa, Artificial Sequence
  source: /note="Description of Artificial Sequence: Synthetic heavy chain variable domain"
QVQLKQSGPGLVQPSQSLSITCTVVGFSLTNYGVHWVRQSPGKGLEWLGVIWSGGNTDYNTPFTSRLSINKDNSKSQVFFKMNSLQSNDTAIYYCARALTYYDEEFAYWGQGTLVTVSS

SEQ ID NO: 1498 - protein, 119 aa, Artificial Sequence
  source: /note="Description of Artificial Sequence: Synthetic heavy chain variable domain"
QVQLQQSGPGLVKPSQTLSLTCAISGFSLTNYGVHWIRQPPGKGLEWIGVIWSGGNTDYNTPFTSRFTISRDDSKNTAYLQMNSLKTEDTAVYYCARALTYYDEEFAYWGPGTLVTVSA

SEQ ID NO: 1499 - protein, 119 aa, Artificial Sequence
  source: /note="Description of Artificial Sequence: Synthetic heavy chain variable domain"
QVQLQQSGPGLVKPSQTLSLTCAISGFSLFNYGVHWIRQSPSRGLEWLGVIWSGGNTDYNTPFTSRLTISKDTSKNQVVLTMTNMDPVDTATYYCARALTYYDEEFAYWGPGTLVTVSA

SEQ ID NO: 1500 - protein, 119 aa, Artificial Sequence
  source: /note="Description of Artificial Sequence: Synthetic heavy chain variable domain"
QVQLQQSGPGLVKPSQTLSLTCAISGFSLFNYGVHWIRQSPSRGLEWLGVIWSGGNTDYNTPFTSRLTISKDTSKNQVVLTMTNMDPVDTATYYCARALTYYDEEFAYWGPGTLVTVSS

SEQ ID NO: 1501 - protein, 119 aa, Artificial Sequence
  source: /note="Description of Artificial Sequence: Synthetic heavy chain variable domain"
QVQLQQSGPGLVKPSQTLSLTCAISGFSLTNYGVHWIRQPPGKGLEWIGVIWSGGNTDYNTPFTSRFTISRDDSKNTAYLQMNSLKTEDTAVYYCARALTYYDEEFAYWGPGTLVTVSS

SEQ ID NO: 1502 - protein, 118 aa, Artificial Sequence
  source: /note="Description of Artificial Sequence: Synthetic heavy chain variable domain"
VQLKQSGPGLVQPSQSLSITCTVSGFSLTNYGVHWVRQSPGKGLEWLGVIWSGGNTDYNTPFTSRLSINKDNSKSQVFFKMNSLQSNDTAIYYCARALTYYDEEFAYWGPGTLVTVSS

SEQ ID NO: 1503 - protein, 118 aa, Artificial Sequence
  source: /note="Description of Artificial Sequence: Synthetic heavy chain variable domain"
EVQLVESGGGLVQPGGSLRLSCAASGFTFSSYAMSWVRQAPGKGLEWVSAITGTGGETYYADSVKGRFTISRDNSKNTLYLQMNSLRAEDTAVYYCARGWSWTGVDPWGQGTLVTVSS

SEQ ID NO: 1504 - protein, 119 aa, Artificial Sequence
  source: /note="Description of Artificial Sequence: Synthetic heavy chain variable domain"
  MOD_RES (49)..(49): Any amino acid
  MOD_RES (54)..(54): Any amino acid
  MOD_RES (107)..(107): Any amino acid
EVQLVQSGAEVKKPGESLKISCKGSGYSFTSYWIGWVRQMPGKGLEWMXIIYPXDSDTRYSPSFQGQVTISADKSISTAYLQWSSLKASDTAMYYCARGIIYPSNVXVWGQGTLVTVSS

SEQ ID NO: 1505 - protein, 116 aa, Artificial Sequence
  source: /note="Description of Artificial Sequence: Synthetic heavy chain variable domain"
EVQLQESGPGLVKPSQTLSLTCTVSGYSIGKDFAWNWIRQPPGKGLEWMGYISYNGNTRYQPSLKSRITISRDTSKNQFFLKLNSVTAADTATYYCVTASRGFPYWGQGTLVTVSS

SEQ ID NO: 1506 - protein, 116 aa, Artificial Sequence
  source: /note="Description of Artificial Sequence: Synthetic heavy chain variable domain"
EVQLQESGPGLVKPSQTLSLTCTVSGYSIGKDFAWNWIRQPPGKGLEWMGYISYNGNTRYQPSLKSRITISRDTSKNQFFLKLNSVTAADTATYYCVTASRGLPYWGQGTLVTVSS

SEQ ID NO: 1507 - protein, 116 aa, Artificial Sequence
  source: /note="Description of Artificial Sequence: Synthetic heavy chain variable domain"
EVQLQESGPGLVKPSQTLSLTCTVSGYSIGKDFAWNWIRQPPGKGLEWMGYISYSGNTRYQPSLKSRITISRDTSKNQFFLKLNSVTAADTATYYCVTASRGLPYWGQGTLVTVSS

SEQ ID NO: 1508 - protein, 116 aa, Artificial Sequence
  source: /note="Description of Artificial Sequence: Synthetic heavy chain variable domain"
EVQLQESGPGLVKPSQTLSLTCTVSGYSIGRDFAWNWIRQPPGKGLEWMGYISYNGNTRYQPSLKSRITISRDTSKNQFFLKLNSVTAADTATYYCVTASRGFPYWGQGTLVTVSS

SEQ ID NO: 1509 - protein, 116 aa, Artificial Sequence
  source: /note="Description of Artificial Sequence: Synthetic heavy chain variable domain"
EVQLQESGPGLVKPSQTLSLTCTVSGYSIGRDFAWNWIRQPPGKGLEWMGYISYSGNTRYQPSLKSRITISRDTSKNQFFLKLNSVTAADTATYYCVTASRGFPYWGQGTLVTVSS

SEQ ID NO: 1510 - protein, 116 aa, Artificial Sequence
  source: /note="Description of Artificial Sequence: Synthetic heavy chain variable domain"
EVQLQESGPGLVKPSQTLSLTCTVSGYSISHDFAWNWIRQPPGKGLEWMGYISYNGNTRYQPSLKSRITISRDTSKNQFFLKLNSVTAADTATYYCVTASWGLPWWGQGTLVTVSS

SEQ ID NO: 1511 - protein, 116 aa, Artificial Sequence
  source: /note="Description of Artificial Sequence: Synthetic heavy chain variable domain"
EVQLQESGPGLVKPSQTLSLTCTVSGYSISHDFAWNWIRQPPGKGLEWMGYISYSGNTRYQPSLKSRITISRDTSKNQFFLKLNSVTAADTATYYCVTASWGLPWWGQGTLVTVSS

SEQ ID NO: 1512 - protein, 116 aa, Artificial Sequence
  source: /note="Description of Artificial Sequence: Synthetic heavy chain variable domain"
EVQLQESGPGLVKPSQTLSLTCTVSGYSISNDFAWNWIRQLPGKGLEWMGYISYKGNTRYQPSLKSRITISRDTSKNQFFLKLNSVTAADTATYYCVTASRGLPYWGQGTLVTVSS

SEQ ID NO: 1513 - protein, 116 aa, Artificial Sequence
  source: /note="Description of Artificial Sequence: Synthetic heavy chain variable domain"
EVQLQESGPGLVKPSQTLSLTCTVSGYSISNDFAWNWIRQPPGKGLEWMGYISYKGNTRYQPSLKSRITISRDTSKNQFFLKLNSVTAADTATYYCVTASRGFPWWGQGTLVTVSS

SEQ ID NO: 1514 - protein, 116 aa, Artificial Sequence
  source: /note="Description of Artificial Sequence: Synthetic heavy chain variable domain"
EVQLQESGPGLVKPSQTLSLTCTVSGYSISRDFAWNWIRQPPGKGLEWMGYISYNGNTRYQPSLKSRITISRDTSKNQFFLKLNSVTAADTATYYCVTASRGFPWWGQGTLVTVSS

SEQ ID NO: 1515 - protein, 116 aa, Artificial Sequence; identical to SEQ ID NO: 1398
  source: /note="Description of Artificial Sequence: Synthetic heavy chain variable domain"

SEQ ID NO: 1516 - protein, 116 aa, Artificial Sequence
  source: /note="Description of Artificial Sequence: Synthetic heavy chain variable domain"
EVQLQESGPGLVKPSQTLSLTCTVSGYSISRDFAWNWIRQPPGKGLEWMGYISYSGNTRYQPSLKSRITISRDTSKNQFFLKLNSVTAADTATYYCVTASRGFPYWGQGTLVTVSS

SEQ ID NO: 1517 - protein, 116 aa, Artificial Sequence; identical to SEQ ID NO: 1397
  source: /note="Description of Artificial Sequence: Synthetic heavy chain variable domain"

SEQ ID NO: 1518 - protein, 121 aa, Artificial Sequence
  source: /note="Description of Artificial Sequence: Synthetic heavy chain variable domain"
EVQLVESGGGLVQPGGSLRLSCAASGFTFSSYWMNWVRQAPGKGLEWVANIKKDGSEKYYVDSVKGRFTISRDNAKNSLYLQMNSLRAEDTAVYYCARDLGWGWGWYFDLWGRGTLVTVSS

SEQ ID NO: 1519 - protein, 117 aa, Artificial Sequence
  source: /note="Description of Artificial Sequence: Synthetic heavy chain variable domain"
EVQLVESGGGLVQPGGSLRLSCAASGFTFSSYWMSWVRQAPGKGLEWVANIKQDGSEENYVDSVKGRFTVSRDNAKNSLYLQMNSLRAEDTAVYYCARTYSGFEDYWGQGTLVTVSS

SEQ ID NO: 1520 - protein, 117 aa, Artificial Sequence
  source: /note="Description of Artificial Sequence: Synthetic heavy chain variable domain"
EVQLVESGGGLVQPGGSLRLSCAASGFTFSSYWMTWVRQAPGKGLEWVANIQQDGSEKNYLDSVKGRFTISRDNAKNSLSLQMNSLRAEDTAVYYCARTYSGFEDFWGQGTLVTVSS

SEQ ID NO: 1521 - protein, 117 aa, Artificial Sequence
  source: /note="Description of Artificial Sequence: Synthetic heavy chain variable domain"
EVQLVESGGGLVQPGGSLRLSCAASRFTFSDYWMTWVRQAPGKGLEWVAHIKQDGSEKYYVDSVKGRFTISRDNAKNSLYLQMNSLRAEDTALYYCARGFLIYFDYWGQGTLVTVSS

SEQ ID NO: 1522 - protein, 117 aa, Artificial Sequence
  source: /note="Description of Artificial Sequence: Synthetic heavy chain variable domain"
EVKLVESGGGLVQPGGSLRLSCATSGFTFTDYYMSWVRQPPGKGLEWLGFIRNKANGYTTEYSASVKGRFTISRDNSKSTLYLQMNSLRAEDSATYYCARDNWFAYWGQGTLVTVSS

SEQ ID NO: 1523 - protein, 117 aa, Artificial Sequence
  source: /note="Description of Artificial Sequence: Synthetic heavy chain variable domain"
EVKLVESGGGLVQPGGSLRLSCATSGFTFTDYYMSWVRQPPGKGLEWLGFIRNKANGYTTEYSASVKGRFTISRDNSKSTLYLQMNSLRAEDTATYYCARDNWFAYWGQGTLVTVSS

SEQ ID NO: 1524 - protein, 117 aa, Artificial Sequence
  source: /note="Description of Artificial Sequence: Synthetic heavy chain variable domain"
EVQLVESGGGLVQPGGSLRLSCATSGFTFTDYYMSWVRQPPGKGLEWLGFIRNKANGYTTEYSASVKGRFTISRDNSKNTLYLQMNSLRAEDTATYYCARDNWFAYWGQGTLVTVSS

SEQ ID NO: 1525 - protein, 117 aa, Artificial Sequence
  source: /note="Description of Artificial Sequence: Synthetic heavy chain variable domain"
EVQLVESGGGLVQPGGSLRLSCATSGFTFTDYYMSWVRQPPGKGLEWLGFIRNKANGYTTEYSASVKGRFTISRDNSKNTLYLQMNSLRAEDTAVYYCARDNWFAYWGQGTLVTVSS

SEQ ID NO: 1526 - protein, 117 aa, Artificial Sequence
  source: /note="Description of Artificial Sequence: Synthetic heavy chain variable domain"
EVQLVESGGGLVQPGGSLRLSCATSGFTFTDYYMSWVRQPPGKGLEWLGFIRNKANGYTTEYSASVKGRFTISRDNSKSTLYLQMNSLRAEDTATYYCARDNWFAYWGQGTLVTVSS

SEQ ID NO: 1527 - protein, 120 aa, Artificial Sequence
  source: /note="Description of Artificial Sequence: Synthetic heavy chain variable domain"
QVQLVQSGAEVKKPGSSVKVSCKASGFTFTDYKIHWVRQAPGQCLEWMGYINPNSGYSTYASKFQGRVTITADKSTSTAYMELSSLRSEDTAVYYCARLSPGGYYVMDAWGQGTTVTVSS

SEQ ID NO: 1528 - protein, 118 aa, Artificial Sequence
  source: /note="Description of Artificial Sequence: Synthetic heavy chain variable domain"
LVTLKVCGPGILQPSQTLSLTCSFSGFSLSTSGMGVGWLRQPSGKSLEWLAHIWWDDDKRYNPALKSRLTISKDTSSNQVFLKIASVDTTDTATYYCARMGMTGYFDFWGQGTTLTVS

SEQ ID NO: 1529 - protein, 119 aa, Artificial Sequence
  source: /note="Description of Artificial Sequence: Synthetic heavy chain variable domain"
QVQLKQSGPGLVQPSQSLSITCTVSGFSLTNYGVHWVRQSPGKGLEWLGVIWSGGNTDYNTPFTSRLGINKDNSKSQVFFKMNSLQSNDTAIYYCARALTYYDYEFAYWGQGTLVTVSA

SEQ ID NO: 1530 - protein, 119 aa, Artificial Sequence
  source: /note="Description of Artificial Sequence: Synthetic heavy chain variable domain"
QVQLKQSGPGLVQPSQSLSITCTVSGFSLTNYGVHWVRQSPGKGLEWLGVIWSGGNTDYNTPFTSRLTINKDNSKSQVFFKMNSLQSNDTAIYYCARALTYYDYEFAYWGQGTLVTVSA

SEQ ID NO: 1531 - protein, 119 aa, Artificial Sequence
  source: /note="Description of Artificial Sequence: Synthetic heavy chain variable domain"
QVQLKQSGPGLVQPSQSLSITCTVSGFSLTNYGVHWVRQSPGKGLEWLGVIWHGGNTDYNTPFTSRLSINKDNSKSQVFFKMNSLQSNDTAIYYCARALTYYDYEFAYWGQGTLVTVSA

SEQ ID NO: 1532 - protein, 119 aa, Artificial Sequence
  source: /note="Description of Artificial Sequence: Synthetic heavy chain variable domain"
QVQLKQSGPGLVQPSQSLSITCTVSGFSLTNYGVHWVRQSPGKGLEWLGVIWIGGNTDYNTPFTSRLSINKDNSKSQVFFKMNSLQSNDTAIYYCARALTYYDYEFAYWGQGTLVTVSA

SEQ ID NO: 1533 - protein, 119 aa, Artificial Sequence
  source: /note="Description of Artificial Sequence: Synthetic heavy chain variable domain"
QVQLKQSGPGLVQPSQSLSITCTVSGFSLTNYGVHWVRQSPGKGLEWLGVIWLGGNTDYNTPFTSRLSINKDNSKSQVFFKMNSLQSNDTAIYYCARALTYYDYEFAYWGQGTLVTVSA

SEQ ID NO: 1534 - protein, 119 aa, Artificial Sequence
  source: /note="Description of Artificial Sequence: Synthetic heavy chain variable domain"
QVQLKQSGPGLVQPSQSLSITCTVSGFSLTNYGVHWVRQSPGKGLEWLGVIWMGGNTDYNTPFTSRLSINKDNSKSQVFFKMNSLQSNDTAIYYCARALTYYDYEFAYWGQGTLVTVSA

SEQ ID NO: 1535 - protein, 119 aa, Artificial Sequence
  source: /note="Description of Artificial Sequence: Synthetic heavy chain variable domain"
QVQLKQSGPGLVQPSQSLSITCTVSGFSLTNYGVHWVRQSPGKGLEWLGVIWPGGNTDYNTPFTSRLSINKDNSKSQVFFKMNSLQSNDTAIYYCARALTYYDYEFAYWGQGTLVTVSA

SEQ ID NO: 1536 - protein, 119 aa, Artificial Sequence
  source: /note="Description of Artificial Sequence: Synthetic heavy chain variable domain"
QVQLKQSGPGLVQPSQSLSITCTVSGFSLTNYGVHWVRQSPGKGLEWLGVIWQGGNTDYNTPFTSRLSINKDNSKSQVFFKMNSLQSNDTAIYYCARALTYYDYEFAYWGQGTLVTVSA

SEQ ID NO: 1537 - protein, 119 aa, Artificial Sequence
  source: /note="Description of Artificial Sequence: Synthetic heavy chain variable domain"
QVQLKQSGPGLVQPSQSLSITCTVSGFSLTNYGVHWVRQSPGKGLEWLGVIWRGGNTDYNTPFTSRLSINKDNSKSQVFFKMNSLQSNDTAIYYCARALTYYDYEFAYWGQGTLVTVSA

SEQ ID NO: 1538 - protein, 119 aa, Artificial Sequence
  source: /note="Description of Artificial Sequence: Synthetic heavy chain variable domain"
QVQLKQSGPGLVQPSQSLSITCTVSGFSLTNYGVHWVRQSPGKGLEWLGVIWSAGNTDYNTPFTSRLSINKDNSKSQVFFKMNSLQSNDTAIYYCARALTYYDYEFAYWGQGTLVTVSA

SEQ ID NO: 1539 - protein, 119 aa, Artificial Sequence
  source: /note="Description of Artificial Sequence: Synthetic heavy chain variable domain"
QVQLKQSGPGLVQPSQSLSITCTVSGFSLTNYGVHWVRQSPGKGLEWLGVIWSCGNTDYNTPFTSRLSINKDNSKSQVFFKMNSLQSNDTAIYYCARALTYYDYEFAYWGQGTLVTVSA

SEQ ID NO: 1540 - protein, 119 aa, Artificial Sequence
  source: /note="Description of Artificial Sequence: Synthetic heavy chain variable domain"
QVQLKQSGPGLVQPSQSLSITCTVSGFSLTNYGVHWVRQSPGKGLEWLGVIWSDGNTDYNTPFTSRLSINKDNSKSQVFFKMNSLQSNDTAIYYCARALTYYDYEFAYWGQGTLVTVSA

SEQ ID NO: 1541 - protein, 119 aa, Artificial Sequence
  source: /note="Description of Artificial Sequence: Synthetic heavy chain variable domain"
QVQLKQSGPGLVQPSQSLSITCTVSGFSLTNYGVHWVRQSPGKGLEWLGVIWSGGATDYNTPFTSRLSINKDNSKSQVFFKMNSLQSNDTAIYYCARALTYYDYEFAYWGQGTLVTVSA

SEQ ID NO: 1542 - protein, 119 aa, Artificial Sequence
  source: /note="Description of Artificial Sequence: Synthetic heavy chain variable domain"
QVQLKQSGPGLVQPSQSLSITCTVSGFSLTNYGVHWVRQSPGKGLEWLGVIWSGGGTDYNTPFTSRLSINKDNSKSQVFFKMNSLQSNDTAIYYCARALTYYDYEFAYWGQGTLVTVSA

SEQ ID NO: 1543 - protein, 119 aa, Artificial Sequence
  source: /note="Description of Artificial Sequence: Synthetic heavy chain variable domain"
QVQLKQSGPGLVQPSQSLSITCTVSGFSLTNYGVHWVRQSPGKGLEWLGVIWSGGKTDYNTPFTSRLSINKDNSKSQVFFKMNSLQSNDTAIYYCARALTYYDYEFAYWGQGTLVTVSA

SEQ ID NO: 1544 - protein, 119 aa, Artificial Sequence
  source: /note="Description of Artificial Sequence: Synthetic heavy chain variable domain"
QVQLKQSGPGLVQPSQSLSITCTVSGFSLTNYGVHWVRQSPGKGLEWLGVIWSGGNADYNTPFTSRLSINKDNSKSQVFFKMNSLQSNDTAIYYCARALTYYDYEFAYWGQGTLVTVSA

SEQ ID NO: 1545 - protein, 119 aa, Artificial Sequence
  source: /note="Description of Artificial Sequence: Synthetic heavy chain variable domain"
QVQLKQSGPGLVQPSQSLSITCTVSGFSLTNYGVHWVRQSPGKGLEWLGVIWSGGNCDYNTPFTSRLSINKDNSKSQVFFKMNSLQSNDTAIYYCARALTYYDYEFAYWGQGTLVTVSA

SEQ ID NO: 1546 - protein, 119 aa, Artificial Sequence
  source: /note="Description of Artificial Sequence: Synthetic heavy chain variable domain"
QVQLKQSGPGLVQPSQSLSITCTVSGFSLTNYGVHWVRQSPGKGLEWLGVIWSGGNDDYNTPFTSRLSINKDNSKSQVFFKMNSLQSNDTAIYYCARALTYYDYEFAYWGQGTLVTVSA

SEQ ID NO: 1547 - protein, 119 aa, Artificial Sequence
  source: /note="Description of Artificial Sequence: Synthetic heavy chain variable domain"
QVQLKQSGPGLVQPSQSLSITCTVSGFSLTNYGVHWVRQSPGKGLEWLGVIWSGGNFDYNTPFTSRLSINKDNSKSQVFFKMNSLQSNDTAIYYCARALTYYDYEFAYWGQGTLVTVSA

SEQ ID NO: 1548 - protein, 119 aa, Artificial Sequence
  source: /note="Description of Artificial Sequence: Synthetic heavy chain variable domain"
QVQLKQSGPGLVQPSQSLSITCTVSGFSLTNYGVHWVRQSPGKGLEWLGVIWSGGNHDYNTPFTSRLSINKDNSKSQVFFKMNSLQSNDTAIYYCARALTYYDYEFAYWGQGTLVTVSA

SEQ ID NO: 1549 - protein, 119 aa, Artificial Sequence
  source: /note="Description of Artificial Sequence: Synthetic heavy chain variable domain"
QVQLKQSGPGLVQPSQSLSITCTVSGFSLTNYGVHWVRQSPGKGLEWLGVIWSGGNLDYNTPFTSRLSINKDNSKSQVFFKMNSLQSNDTAIYYCARALTYYDYEFAYWGQGTLVTVSA

SEQ ID NO: 1550 - protein, 119 aa, Artificial Sequence
  source: /note="Description of Artificial Sequence: Synthetic heavy chain variable domain"
QVQLKQSGPGLVQPSQSLSITCTVSGFSLTNYGVHWVRQSPGKGLEWLGVIWSGGNMDYNTPFTSRLSINKDNSKSQVFFKMNSLQSNDTAIYYCARALTYYDYEFAYWGQGTLVTVSA

SEQ ID NO: 1551 - protein, 119 aa, Artificial Sequence
  source: /note="Description of Artificial Sequence: Synthetic heavy chain variable domain"
QVQLKQSGPGLVQPSQSLSITCTVSGFSLTNYGVHWVRQSPGKGLEWLGVIWSGGNNDYNTPFTSRLSINKDNSKSQVFFKMNSLQSNDTAIYYCARALTYYDYEFAYWGQGTLVTVSA

SEQ ID NO: 1552 - protein, 119 aa, Artificial Sequence
  source: /note="Description of Artificial Sequence: Synthetic heavy chain variable domain"
QVQLKQSGPGLVQPSQSLSITCTVSGFSLTNYGVHWVRQSPGKGLEWLGVIWSGGNQDYNTPFTSRLSINKDNSKSQVFFKMNSLQSNDTAIYYCARALTYYDYEFAYWGQGTLVTVSA

SEQ ID NO: 1553 - protein, 119 aa, Artificial Sequence
  source: /note="Description of Artificial Sequence: Synthetic heavy chain variable domain"
QVQLKQSGPGLVQPSQSLSITCTVSGFSLTNYGVHWVRQSPGKGLEWLGVIWSGGNRDYNTPFTSRLSINKDNSKSQVFFKMNSLQSNDTAIYYCARALTYYDYEFAYWGQGTLVTVSA

SEQ ID NO: 1554 - protein, 119 aa, Artificial Sequence
  source: /note="Description of Artificial Sequence: Synthetic heavy chain variable domain"
QVQLKQSGPGLVQPSQSLSITCTVSGFSLTNYGVHWVRQSPGKGLEWLGVIWSGGNTDANTPFTSRLSINKDNSKSQVFFKMNSLQSNDTAIYYCARALTYYDYEFAYWGQGTLVTVSA

SEQ ID NO: 1555 - protein, 119 aa, Artificial Sequence
  source: /note="Description of Artificial Sequence: Synthetic heavy chain variable domain"
QVQLKQSGPGLVQPSQSLSITCTVSGFSLTNYGVHWVRQSPGKGLEWLGVIWSGGNTDCNTPFTSRLSINKDNSKSQVFFKMNSLQSNDTAIYYCARALTYYDYEFAYWGQGTLVTVSA

SEQ ID NO: 1556 - protein, 119 aa, Artificial Sequence
  source: /note="Description of Artificial Sequence: Synthetic heavy chain variable domain"
QVQLKQSGPGLVQPSQSLSITCTVSGFSLTNYGVHWVRQSPGKGLEWLGVIWSGGNTDDNTPFTSRLSINKDNSKSQVFFKMNSLQSNDTAIYYCARALTYYDYEFAYWGQGTLVTVSA

SEQ ID NO: 1557 - protein, 119 aa, Artificial Sequence
  source: /note="Description of Artificial Sequence: Synthetic heavy chain variable domain"
QVQLKQSGPGLVQPSQSLSITCTVSGFSLTNYGVHWVRQSPGKGLEWLGVIWSGGNTDENTPFTSRLSINKDNSKSQVFFKMNSLQSNDTAIYYCARALTYYDYEFAYWGQGTLVTVSA

SEQ ID NO: 1558 - protein, 119 aa, Artificial Sequence
  source: /note="Description of Artificial Sequence: Synthetic heavy chain variable domain"
QVQLKQSGPGLVQPSQSLSITCTVSGFSLTNYGVHWVRQSPGKGLEWLGVIWSGGNTDGNTPFTSRLSINKDNSKSQVFFKMNSLQSNDTAIYYCARALTYYDYEFAYWGQGTLVTVSA

SEQ ID NO: 1559 - protein, 119 aa, Artificial Sequence
  source: /note="Description of Artificial Sequence: Synthetic heavy chain variable domain"
QVQLKQSGPGLVQPSQSLSITCTVSGFSLTNYGVHWVRQSPGKGLEWLGVIWSGGNTDHNTPFTSRLSINKDNSKSQVFFKMNSLQSNDTAIYYCARALTYYDYEFAYWGQGTLVTVSA

SEQ ID NO: 1560 - protein, 119 aa, Artificial Sequence
  source: /note="Description of Artificial Sequence: Synthetic heavy chain variable domain"
QVQLKQSGPGLVQPSQSLSITCTVSGFSLTNYGVHWVRQSPGKGLEWLGVIWSGGNTDINTPFTSRLSINKDNSKSQVFFKMNSLQSNDTAIYYCARALTYYDYEFAYWGQGTLVTVSA

SEQ ID NO: 1561 - protein, 119 aa, Artificial Sequence
  source: /note="Description of Artificial Sequence: Synthetic heavy chain variable domain"
QVQLKQSGPGLVQPSQSLSITCTVSGFSLTNYGVHWVRQSPGKGLEWLGVIWSGGNTDPNTPFTSRLSINKDNSKSQVFFKMNSLQSNDTAIYYCARALTYYDYEFAYWGQGTLVTVSA

SEQ ID NO: 1562 - protein, 119 aa, Artificial Sequence
  source: /note="Description of Artificial Sequence: Synthetic heavy chain variable domain"
QVQLKQSGPGLVQPSQSLSITCTVSGFSLTNYGVHWVRQSPGKGLEWLGVIWSGGNTDQNTPFTSRLSINKDNSKSQVFFKMNSLQSNDTAIYYCARALTYYDYEFAYWGQGTLVTVSA

SEQ ID NO: 1563 - protein, 119 aa, Artificial Sequence
  source: /note="Description of Artificial Sequence: Synthetic heavy chain variable domain"
QVQLKQSGPGLVQPSQSLSITCTVSGFSLTNYGVHWVRQSPGKGLEWLGVIWSGGNTDRNTPFTSRLSINKDNSKSQVFFKMNSLQSNDTAIYYCARALTYYDYEFAYWGQGTLVTVSA

SEQ ID NO: 1564 - protein, 119 aa, Artificial Sequence
  source: /note="Description of Artificial Sequence: Synthetic heavy chain variable domain"
QVQLKQSGPGLVQPSQSLSITCTVSGFSLTNYGVHWVRQSPGKGLEWLGVIWSGGNTDSNTPFTSRLSINKDNSKSQVFFKMNSLQSNDTAIYYCARALTYYDYEFAYWGQGTLVTVSA

SEQ ID NO: 1565 - protein, 119 aa, Artificial Sequence
  source: /note="Description of Artificial Sequence: Synthetic heavy chain variable domain"
QVQLKQSGPGLVQPSQSLSITCTVSGFSLTNYGVHWVRQSPGKGLEWLGVIWSGGNTDTNTPFTSRLSINKDNSKSQVFFKMNSLQSNDTAIYYCARALTYYDYEFAYWGQGTLVTVSA

SEQ ID NO: 1566 - protein, 119 aa, Artificial Sequence
  source: /note="Description of Artificial Sequence: Synthetic heavy chain variable domain"
QVQLKQSGPGLVQPSQSLSITCTVSGFSLTNYGVHWVRQSPGKGLEWLGVIWSGGNTDVNTPFTSRLSINKDNSKSQVFFKMNSLQSNDTAIYYCARALTYYDYEFAYWGQGTLVTVSA

SEQ ID NO: 1567 - protein, 119 aa, Artificial Sequence
  source: /note="Description of Artificial Sequence: Synthetic heavy chain variable domain"
QVQLKQSGPGLVQPSQSLSITCTVSGFSLTNYGVHWVRQSPGKGLEWLGVIWSGGNTDWNTPFTSRLSINKDNSKSQVFFKMNSLQSNDTAIYYCARALTYYDYEFAYWGQGTLVTVSA

SEQ ID NO: 1568 - protein, 119 aa, Artificial Sequence
  source: /note="Description of Artificial Sequence: Synthetic heavy chain variable domain"
QVQLKQSGPGLVQPSQSLSITCTVSGFSLTNYGVHWVRQSPGKGLEWLGVIWSGGNTDYATPFTSRLSINKDNSKSQVFFKMNSLQSNDTAIYYCARALTYYDYEFAYWGQGTLVTVSA

SEQ ID NO: 1569 - protein, 119 aa, Artificial Sequence
  source: /note="Description of Artificial Sequence: Synthetic heavy chain variable domain"
QVQLKQSGPGLVQPSQSLSITCTVSGFSLTNYGVHWVRQSPGKGLEWLGVIWSGGNTDYCTPFTSRLSINKDNSKSQVFFKMNSLQSNDTAIYYCARALTYYDYEFAYWGQGTLVTVSA

SEQ ID NO: 1570 - protein, 119 aa, Artificial Sequence
  source: /note="Description of Artificial Sequence: Synthetic heavy chain variable domain"
QVQLKQSGPGLVQPSQSLSITCTVSGFSLTNYGVHWVRQSPGKGLEWLGVIWSGGNTDYDTPFTSRLSINKDNSKSQVFFKMNSLQSNDTAIYYCARALTYYDYEFAYWGQGTLVTVSA

SEQ ID NO: 1571 - protein, 119 aa, Artificial Sequence
  source: /note="Description of Artificial Sequence: Synthetic heavy chain variable domain"
QVQLKQSGPGLVQPSQSLSITCTVSGFSLTNYGVHWVRQSPGKGLEWLGVIWSGGNTDYFTPFTSRLSINKDNSKSQVFFKMNSLQSNDTAIYYCARALTYYDYEFAYWGQGTLVTVSA

SEQ ID NO: 1572 - protein, 119 aa, Artificial Sequence
  source: /note="Description of Artificial Sequence: Synthetic heavy chain variable domain"
QVQLKQSGPGLVQPSQSLSITCTVSGFSLTNYGVHWVRQSPGKGLEWLGVIWSGGNTDYGTPFTSRLSINKDNSKSQVFFKMNSLQSNDTAIYYCARALTYYDYEFAYWGQGTLVTVSA

SEQ ID NO: 1573 - protein, 119 aa, Artificial Sequence
  source: /note="Description of Artificial Sequence: Synthetic heavy chain variable domain"
QVQLKQSGPGLVQPSQSLSITCTVSGFSLTNYGVHWVRQSPGKGLEWLGVIWSGGNTDYKTPFTSRLSINKDNSKSQVFFKMNSLQSNDTAIYYCARALTYYDYEFAYWGQGTLVTVSA

SEQ ID NO: 1574 - protein, 119 aa, Artificial Sequence
  source: /note="Description of Artificial Sequence: Synthetic heavy chain variable domain"
QVQLKQSGPGLVQPSQSLSITCTVSGFSLTNYGVHWVRQSPGKGLEWLGVIWSGGNTDYNNPFTSRLSINKDNSKSQVFFKMNSLQSNDTAIYYCARALTYYDYEFAYWGQGTLVTVSA

SEQ ID NO: 1575 - protein, 119 aa, Artificial Sequence
  source: /note="Description of Artificial Sequence: Synthetic heavy chain variable domain"
QVQLKQSGPGLVQPSQSLSITCTVSGFSLTNYGVHWVRQSPGKGLEWLGVIWSGGNTDYNQPFTSRLSINKDNSKSQVFFKMNSLQSNDTAIYYCARALTYYDYEFAYWGQGTLVTVSA

SEQ ID NO: 1576 - protein, 119 aa, Artificial Sequence
  source: /note="Description of Artificial Sequence: Synthetic heavy chain variable domain"
QVQLKQSGPGLVQPSQSLSITCTVSGFSLTNYGVHWVRQSPGKGLEWLGVIWSGGNTDYNTGFTSRLSINKDNSKSQVFFKMNSLQSNDTAIYYCARALTYYDYEFAYWGQGTLVTVSA

SEQ ID NO: 1577 - protein, 119 aa, Artificial Sequence
  source: /note="Description of Artificial Sequence: Synthetic heavy chain variable domain"
QVQLKQSGPGLVQPSQSLSITCTVSGFSLTNYGVHWVRQSPGKGLEWLGVIWSGGNTDYNTPATSRLSINKDNSKSQVFFKMNSLQSNDTAIYYCARALTYYDYEFAYWGQGTLVTVSA

SEQ ID NO: 1578 - protein, 119 aa, Artificial Sequence
  source: /note="Description of Artificial Sequence: Synthetic heavy chain variable domain"
QVQLKQSGPGLVQPSQSLSITCTVSGFSLTNYGVHWVRQSPGKGLEWLGVIWSGGNTDYNTPCTSRLSINKDNSKSQVFFKMNSLQSNDTAIYYCARALTYYDYEFAYWGQGTLVTVSA

SEQ ID NO: 1579 - protein, 119 aa, Artificial Sequence
  source: /note="Description of Artificial Sequence: Synthetic heavy chain variable domain"
QVQLKQSGPGLVQPSQSLSITCTVSGFSLTNYGVHWVRQSPGKGLEWLGVIWSGGNTDYNTPDTSRLSINKDNSKSQVFFKMNSLQSNDTAIYYCARALTYYDYEFAYWGQGTLVTVSA

SEQ ID NO: 1580 - protein, 119 aa, Artificial Sequence
  source: /note="Description of Artificial Sequence: Synthetic heavy chain variable domain"
QVQLKQSGPGLVQPSQSLSITCTVSGFSLTNYGVHWVRQSPGKGLEWLGVIWSGGNTDYNTPFCSRLSINKDNSKSQVFFKMNSLQSNDTAIYYCARALTYYDYEFAYWGQGTLVTVSA

SEQ ID NO: 1581 - protein, 119 aa, Artificial Sequence
  source: /note="Description of Artificial Sequence: Synthetic heavy chain variable domain"
QVQLKQSGPGLVQPSQSLSITCTVSGFSLTNYGVHWVRQSPGKGLEWLGVIWSGGNTDYNTPFFSRLSINKDNSKSQVFFKMNSLQSNDTAIYYCARALTYYDYEFAYWGQGTLVTVSA

SEQ ID NO: 1582 - protein, 119 aa, Artificial Sequence
  source: /note="Description of Artificial Sequence: Synthetic heavy chain variable domain"
QVQLKQSGPGLVQPSQSLSITCTVSGFSLTNYGVHWVRQSPGKGLEWLGVIWSGGNTDYNTPFGSRLSINKDNSKSQVFFKMNSLQSNDTAIYYCARALTYYDYEFAYWGQGTLVTVSA

SEQ ID NO: 1583 - protein, 119 aa, Artificial Sequence
  source: /note="Description of Artificial Sequence: Synthetic heavy chain variable domain"
QVQLKQSGPGLVQPSQSLSITCTVSGFSLTNYGVHWVRQSPGKGLEWLGVIWSGGNTDYNTPFLSRLSINKDNSKSQVFFKMNSLQSNDTAIYYCARALTYYDYEFAYWGQGTLVTVSA

SEQ ID NO: 1584 - protein, 119 aa, Artificial Sequence
  source: /note="Description of Artificial Sequence: Synthetic heavy chain variable domain"
QVQLKQSGPGLVQPSQSLSITCTVSGFSLTNYGVHWVRQSPGKGLEWLGVIWSGGNTDYNTPFNSRLSINKDNSKSQVFFKMNSLQSNDTAIYYCARALTYYDYEFAYWGQGTLVTVSA

SEQ ID NO: 1585 - protein, 119 aa, Artificial Sequence
  source: /note="Description of Artificial Sequence: Synthetic heavy chain variable domain"
QVQLKQSGPGLVQPSQSLSITCTVSGFSLTNYGVHWVRQSPGKGLEWLGVIWSGGNTDYNTPFQSRLSINKDNSKSQVFFKMNSLQSNDTAIYYCARALTYYDYEFAYWGQGTLVTVSA

SEQ ID NO: 1586 - protein, 119 aa, Artificial Sequence
  source: /note="Description of Artificial Sequence: Synthetic heavy chain variable domain"
QVQLKQSGPGLVQPSQSLSITCTVSGFSLTNYGVHWVRQSPGKGLEWLGVIWSGGNTDYNTPFRSRLSINKDNSKSQVFFKMNSLQSNDTAIYYCARALTYYDYEFAYWGQGTLVTVSA

SEQ ID NO: 1587 - protein, 119 aa, Artificial Sequence
  source: /note="Description of Artificial Sequence: Synthetic heavy chain variable domain"
QVQLKQSGPGLVQPSQSLSITCTVSGFSLTNYGVHWVRQSPGKGLEWLGVIWSGGNTDYNTPFTCRLSINKDNSKSQVFFKMNSLQSNDTAIYYCARALTYYDYEFAYWGQGTLVTVSA

SEQ ID NO: 1588 - protein, 119 aa, Artificial Sequence
  source: /note="Description of Artificial Sequence: Synthetic heavy chain variable domain"
QVQLKQSGPGLVQPSQSLSITCTVSGFSLTNYGVHWVRQSPGKGLEWLGVIWSGGNTDYNTPFTERLSINKDNSKSQVFFKMNSLQSNDTAIYYCARALTYYDYEFAYWGQGTLVTVSA

SEQ ID NO: 1589 - protein, 119 aa, Artificial Sequence
  source: /note="Description of Artificial Sequence: Synthetic heavy chain variable domain"
QVQLKQSGPGLVQPSQSLSITCTVSGFSLTNYGVHWVRQSPGKGLEWLGVIWSGGNTDYNTPFTFRLSINKDNSKSQVFFKMNSLQSNDTAIYYCARALTYYDYEFAYWGQGTLVTVSA

SEQ ID NO: 1590 - protein, 119 aa, Artificial Sequence
  source: /note="Description of Artificial Sequence: Synthetic heavy chain variable domain"
QVQLKQSGPGLVQPSQSLSITCTVSGFSLTNYGVHWVRQSPGKGLEWLGVIWSGGNTDYNTPFTGRLSINKDNSKSQVFFKMNSLQSNDTAIYYCARALTYYDYEFAYWGQGTLVTVSA

SEQ ID NO: 1591 - protein, 119 aa, Artificial Sequence
  source: /note="Description of Artificial Sequence: Synthetic heavy chain variable domain"
QVQLKQSGPGLVQPSQSLSITCTVSGFSLTNYGVHWVRQSPGKGLEWLGVIWSGGNTDYNTPFTHRLSINKDNSKSQVFFKMNSLQSNDTAIYYCARALTYYDYEFAYWGQGTLVTVSA

SEQ ID NO: 1592 - protein, 119 aa, Artificial Sequence
  source: /note="Description of Artificial Sequence: Synthetic heavy chain variable domain"
QVQLKQSGPGLVQPSQSLSITCTVSGFSLTNYGVHWVRQSPGKGLEWLGVIWSGGNTDYNTPFTIRLSINKDNSKSQVFFKMNSLQSNDTAIYYCARALTYYDYEFAYWGQGTLVTVSA

SEQ ID NO: 1593 - protein, 119 aa, Artificial Sequence
  source: /note="Description of Artificial Sequence: Synthetic heavy chain variable domain"
QVQLKQSGPGLVQPSQSLSITCTVSGFSLTNYGVHWVRQSPGKGLEWLGVIWSGGNTDYNTPFTLRLSINKDNSKSQVFFKMNSLQSNDTAIYYCARALTYYDYEFAYWGQGTLVTVSA

SEQ ID NO: 1594 - protein, 119 aa, Artificial Sequence
  source: /note="Description of Artificial Sequence: Synthetic heavy chain variable domain"
QVQLKQSGPGLVQPSQSLSITCTVSGFSLTNYGVHWVRQSPGKGLEWLGVIWSGGNTDYNTPFTMRLSINKDNSKSQVFFKMNSLQSNDTAIYYCARALTYYDYEFAYWGQGTLVTVSA

SEQ ID NO: 1595 - protein, 119 aa, Artificial Sequence
  source: /note="Description of Artificial Sequence: Synthetic heavy chain variable domain"
QVQLKQSGPGLVQPSQSLSITCTVSGFSLTNYGVHWVRQSPGKGLEWLGVIWSGGNTDYNTPFTNRLSINKDNSKSQVFFKMNSLQSNDTAIYYCARALTYYDYEFAYWGQGTLVTVSA

SEQ ID NO: 1596 - protein, 119 aa, Artificial Sequence
  source: /note="Description of Artificial Sequence: Synthetic heavy chain variable domain"
QVQLKQSGPGLVQPSQSLSITCTVSGFSLTNYGVHWVRQSPGKGLEWLGVIWSGGNTDYNTPFTPRLSINKDNSKSQVFFKMNSLQSNDTAIYYCARALTYYDYEFAYWGQGTLVTVSA

SEQ ID NO: 1597 - protein, 119 aa, Artificial Sequence
  source: /note="Description of Artificial Sequence: Synthetic heavy chain variable domain"
QVQLKQSGPGLVQPSQSLSITCTVSGFSLTNYGVHWVRQSPGKGLEWLGVIWSGGNTDYNTPFTQRLSINKDNSKSQVFFKMNSLQSNDTAIYYCARALTYYDYEFAYWGQGTLVTVSA

SEQ ID NO: 1598 - protein, 119 aa, Artificial Sequence
  source: /note="Description of Artificial Sequence: Synthetic heavy chain variable domain"
QVQLKQSGPGLVQPSQSLSITCTVSGFSLTNYGVHWVRQSPGKGLEWLGVIWSGGNTDYNTPFTRRLSINKDNSKSQVFFKMNSLQSNDTAIYYCARALTYYDYEFAYWGQGTLVTVSA

SEQ ID NO: 1599 - protein, 119 aa, Artificial Sequence
  source: /note="Description of Artificial Sequence: Synthetic heavy chain variable domain"
QVQLKQSGPGLVQPSQSLSITCTVSGFSLTNYGVHWVRQSPGKGLEWLGVIWSGGNTDYNTPFTSALSINKDNSKSQVFFKMNSLQSNDTAIYYCARALTYYDYEFAYWGQGTLVTVSA

SEQ ID NO: 1600 - protein, 119 aa, Artificial Sequence
  source: /note="Description of Artificial Sequence: Synthetic heavy chain variable domain"
QVQLKQSGPGLVQPSQSLSITCTVSGFSLTNYGVHWVRQSPGKGLEWLGVIWSGGNTDYNTPFTSCLSINKDNSKSQVFFKMNSLQSNDTAIYYCARALTYYDYEFAYWGQGTLVTVSA

SEQ ID NO: 1601 - protein, 119 aa, Artificial Sequence
  source: /note="Description of Artificial Sequence: Synthetic heavy chain variable domain"
QVQLKQSGPGLVQPSQSLSITCTVSGFSLTNYGVHWVRQSPGKGLEWLGVIWSGGNTDYNTPFTSELSINKDNSKSQVFFKMNSLQSNDTAIYYCARALTYYDYEFAYWGQGTLVTVSA

SEQ ID NO: 1602 - protein, 119 aa, Artificial Sequence
  source: /note="Description of Artificial Sequence: Synthetic heavy chain variable domain"
QVQLKQSGPGLVQPSQSLSITCTVSGFSLTNYGVHWVRQSPGKGLEWLGVIWSGGNTDYNTPFTSFLSINKDNSKSQVFFKMNSLQSNDTAIYYCARALTYYDYEFAYWGQGTLVTVSA

SEQ ID NO: 1603 - protein, 119 aa, Artificial Sequence
  source: /note="Description of Artificial Sequence: Synthetic heavy chain variable domain"
QVQLKQSGPGLVQPSQSLSITCTVSGFSLTNYGVHWVRQSPGKGLEWLGVIWSGGNTDYNTPFTSGLSINKDNSKSQVFFKMNSLQSNDTAIYYCARALTYYDYEFAYWGQGTLVTVSA

SEQ ID NO: 1604 - protein, 119 aa, Artificial Sequence
  source: /note="Description of Artificial Sequence: Synthetic heavy chain variable domain"
QVQLKQSGPGLVQPSQSLSITCTVSGFSLTNYGVHWVRQSPGKGLEWLGVIWSGGNTDYNTPFTSLLSINKDNSKSQVFFKMNSLQSNDTAIYYCARALTYYDYEFAYWGQGTLVTVSA

SEQ ID NO: 1605 - protein, 119 aa, Artificial Sequence
  source: /note="Description of Artificial Sequence: Synthetic heavy chain variable domain"
QVQLKQSGPGLVQPSQSLSITCTVSGFSLTNYGVHWVRQSPGKGLEWLGVIWSGGNTDYNTPFTSNLSINKDNSKSQVFFKMNSLQSNDTAIYYCARALTYYDYEFAYWGQGTLVTVSA

SEQ ID NO: 1606 - protein, 119 aa, Artificial Sequence
  source: /note="Description of Artificial Sequence: Synthetic heavy chain variable domain"
QVQLKQSGPGLVQPSQSLSITCTVSGFSLTNYGVHWVRQSPGKGLEWLGVIWSGGNTDYNTPFTSPLSINKDNSKSQVFFKMNSLQSNDTAIYYCARALTYYDYEFAYWGQGTLVTVSA

SEQ ID NO: 1607 - protein, 119 aa, Artificial Sequence
  source: /note="Description of Artificial Sequence: Synthetic heavy chain variable domain"
QVQLKQSGPGLVQPSQSLSITCTVSGFSLTNYGVHWVRQSPGKGLEWLGVIWSGGNTDYNTPFTSQLSINKDNSKSQVFFKMNSLQSNDTAIYYCARALTYYDYEFAYWGQGTLVTVSA

SEQ ID NO: 1608 - protein, 119 aa, Artificial Sequence
  source: /note="Description of Artificial Sequence: Synthetic heavy chain variable domain"
QVQLKQSGPGLVQPSQSLSITCTVSGFSLTNYGVHWVRQSPGKGLEWLGVIWSGGNTDYNTPFTSRASINKDNSKSQVFFKMNSLQSNDTAIYYCARALTYYDYEFAYWGQGTLVTVSA

SEQ ID NO: 1609 - protein, 119 aa, Artificial Sequence
  source: /note="Description of Artificial Sequence: Synthetic heavy chain variable domain"
QVQLKQSGPGLVQPSQSLSITCTVSGFSLTNYGVHWVRQSPGKGLEWLGVIWSGGNTDYNTPFTSRCSINKDNSKSQVFFKMNSLQSNDTAIYYCARALTYYDYEFAYWGQGTLVTVSA

SEQ ID NO: 1610 - protein, 119 aa, Artificial Sequence
  source: /note="Description of Artificial Sequence: Synthetic heavy chain variable domain"
QVQLKQSGPGLVQPSQSLSITCTVSGFSLTNYGVHWVRQSPGKGLEWLGVIWSGGNTDYNTPFTSRDSINKDNSKSQVFFKMNSLQSNDTAIYYCARALTYYDYEFAYWGQGTLVTVSA

SEQ ID NO: 1611 - protein, 119 aa, Artificial Sequence
  source: /note="Description of Artificial Sequence: Synthetic heavy chain variable domain"
QVQLKQSGPGLVQPSQSLSITCTVSGFSLTNYGVHWVRQSPGKGLEWLGVIWSGGNTDYNTPFTSRESINKDNSKSQVFFKMNSLQSNDTAIYYCARALTYYDYEFAYWGQGTLVTVSA

SEQ ID NO: 1612 - protein, 119 aa, Artificial Sequence
  source: /note="Description of Artificial Sequence: Synthetic heavy chain variable domain"
QVQLKQSGPGLVQPSQSLSITCTVSGFSLTNYGVHWVRQSPGKGLEWLGVIWSGGNTDYNTPFTSRGSINKDNSKSQVFFKMNSLQSNDTAIYYCARALTYYDYEFAYWGQGTLVTVSA

SEQ ID NO: 1613 - protein, 119 aa, Artificial Sequence
  source: /note="Description of Artificial Sequence: Synthetic heavy chain variable domain"
QVQLKQSGPGLVQPSQSLSITCTVSGFSLTNYGVHWVRQSPGKGLEWLGVIWSGGNTDYNTPFTSRISINKDNSKSQVFFKMNSLQSNDTAIYYCARALTYYDYEFAYWGQGTLVTVSA

SEQ ID NO: 1614 - protein, 119 aa, Artificial Sequence
  source: /note="Description of Artificial Sequence: Synthetic heavy chain variable domain"
QVQLKQSGPGLVQPSQSLSITCTVSGFSLTNYGVHWVRQSPGKGLEWLGVIWSGGNTDYNTPFTSRLCINKDNSKSQVFFKMNSLQSNDTAIYYCARALTYYDYEFAYWGQGTLVTVSA

SEQ ID NO: 1615 - protein, 119 aa, Artificial Sequence
  source: /note="Description of Artificial Sequence: Synthetic heavy chain variable domain"
QVQLKQSGPGLVQPSQSLSITCTVSGFSLTNYGVHWVRQSPGKGLEWLGVIWSGGNTDYNTPFTSRLDINKDNSKSQVFFKMNSLQSNDTAIYYCARALTYYDYEFAYWGQGTLVTVSA

SEQ ID NO: 1616 - protein, 119 aa, Artificial Sequence
  source: /note="Description of Artificial Sequence: Synthetic heavy chain variable domain"
QVQLKQSGPGLVQPSQSLSITCTVSGFSLTNYGVHWVRQSPGKGLEWLGVIWSGGNTDYNTPFTSRLEINKDNSKSQVFFKMNSLQSNDTAIYYCARALTYYDYEFAYWGQGTLVTVSA

SEQ ID NO: 1617 - protein, 119 aa, Artificial Sequence
  source: /note="Description of Artificial Sequence: Synthetic heavy chain variable domain"
QVQLKQSGPGLVQPSQSLSITCTVSGFSLTNYGVHWVRQSPGKGLEWLGVIWSGGNTDYNTPFTSRLFINKDNSKSQVFFKMNSLQSNDTAIYYCARALTYYDYEFAYWGQGTLVTVSA

SEQ ID NO: 1618 - protein, 119 aa, Artificial Sequence
  source: /note="Description of Artificial Sequence: Synthetic heavy chain variable domain"
QVQLKQSGPGLVQPSQSLSITCTVSGFSLTNYGVHWVRQSPGKGLEWLGVIWSGGNTDYNTPFTSRLHINKDNSKSQVFFKMNSLQSNDTAIYYCARALTYYDYEFAYWGQGTLVTVSA

SEQ ID NO: 1619 - protein, 119 aa, Artificial Sequence
  source: /note="Description of Artificial Sequence: Synthetic heavy chain variable domain"
QVQLKQSGPGLVQPSQSLSITCTVSGFSLTNYGVHWVRQSPGKGLEWLGVIWSGGNTDYNTPFTSRLIINKDNSKSQVFFKMNSLQSNDTAIYYCARALTYYDYEFAYWGQGTLVTVSA

SEQ ID NO: 1620 - protein, 119 aa, Artificial Sequence
  source: /note="Description of Artificial Sequence: Synthetic heavy chain variable domain"
QVQLKQSGPGLVQPSQSLSITCTVSGFSLTNYGVHWVRQSPGKGLEWLGVIWSGGNTDYNTPFTSRLKINKDNSKSQVFFKMNSLQSNDTAIYYCARALTYYDYEFAYWGQGTLVTVSA

SEQ ID NO: 1621 - protein, 119 aa, Artificial Sequence
  source: /note="Description of Artificial Sequence: Synthetic heavy chain variable domain"
QVQLKQSGPGLVQPSQSLSITCTVSGFSLTNYGVHWVRQSPGKGLEWLGVIWSGGNTDYNTPFTSRLLINKDNSKSQVFFKMNSLQSNDTAIYYCARALTYYDYEFAYWGQGTLVTVSA

SEQ ID NO: 1622 - protein, 119 aa, Artificial Sequence
  source: /note="Description of Artificial Sequence: Synthetic heavy chain variable domain"
QVQLKQSGPGLVQPSQSLSITCTVSGFSLTNYGVHWVRQSPGKGLEWLGVIWSGGNTDYNTPFTSRLNINKDNSKSQVFFKMNSLQSNDTAIYYCARALTYYDYEFAYWGQGTLVTVSA

SEQ ID NO: 1623 - protein, 119 aa, Artificial Sequence
  source: /note="Description of Artificial Sequence: Synthetic heavy chain variable domain"
QVQLKQSGPGLVQPSQSLSITCTVSGFSLTNYGVHWVRQSPGKGLEWLGVIWSGGNTDYNTPFTSRLQINKDNSKSQVFFKMNSLQSNDTAIYYCARALTYYDYEFAYWGQGTLVTVSA

SEQ ID NO: 1624 - protein, 119 aa, Artificial Sequence
  source: /note="Description of Artificial Sequence: Synthetic heavy chain variable domain"
QVQLKQSGPGLVQPSQSLSITCTVSGFSLTNYGVHWVRQSPGKGLEWLGVIWSGGNTDYNTPFTSRLRINKDNSKSQVFFKMNSLQSNDTAIYYCARALTYYDYEFAYWGQGTLVTVSA

SEQ ID NO: 1625 - protein, 119 aa, Artificial Sequence
  source: /note="Description of Artificial Sequence: Synthetic heavy chain variable domain"
QVQLKQSGPGLVQPSQSLSITCTVSGFSLTNYGVHWVRQSPGKGLEWLGVIWSGGNTDYNTPFTSRLSANKDNSKSQVFFKMNSLQSNDTAIYYCARALTYYDYEFAYWGQGTLVTVSA

SEQ ID NO: 1626 - protein, 119 aa, Artificial Sequence
  source: /note="Description of Artificial Sequence: Synthetic heavy chain variable domain"
QVQLKQSGPGLVQPSQSLSITCTVSGFSLTNYGVHWVRQSPGKGLEWLGVIWSGGNTDYNTPFTSRLSCNKDNSKSQVFFKMNSLQSNDTAIYYCARALTYYDYEFAYWGQGTLVTVSA

SEQ ID NO: 1627 - protein, 119 aa, Artificial Sequence
  source: /note="Description of Artificial Sequence: Synthetic heavy chain variable domain"
QVQLKQSGPGLVQPSQSLSITCTVSGFSLTNYGVHWVRQSPGKGLEWLGVIWSGGNTDYNTPFTSRLSGNKDNSKSQVFFKMNSLQSNDTAIYYCARALTYYDYEFAYWGQGTLVTVSA

SEQ ID NO: 1628 - protein, 119 aa, Artificial Sequence
  source: /note="Description of Artificial Sequence: Synthetic heavy chain variable domain"
QVQLKQSGPGLVQPSQSLSITCTVSGFSLTNYGVHWVRQSPGKGLEWLGVIWSGGNTDYNTPFTSRLSIDKDNSKSQVFFKMNSLQSNDTAIYYCARALTYYDYEFAYWGQGTLVTVSA

SEQ ID NO: 1629 - protein, 119 aa, Artificial Sequence
  source: /note="Description of Artificial Sequence: Synthetic heavy chain variable domain"
QVQLKQSGPGLVQPSQSLSITCTVSGFSLTNYGVHWVRQSPGKGLEWLGVIWSGGNTDYNTPFTSRLSIEKDNSKSQVFFKMNSLQSNDTAIYYCARALTYYDYEFAYWGQGTLVTVSA

SEQ ID NO: 1630 - protein, 119 aa, Artificial Sequence
  source: /note="Description of Artificial Sequence: Synthetic heavy chain variable domain"
QVQLKQSGPGLVQPSQSLSITCTVSGFSLTNYGVHWVRQSPGKGLEWLGVIWSGGNTDYNTPFTSRLSIFKDNSKSQVFFKMNSLQSNDTAIYYCARALTYYDYEFAYWGQGTLVTVSA

SEQ ID NO: 1631 - protein, 119 aa, Artificial Sequence
  source: /note="Description of Artificial Sequence: Synthetic heavy chain variable domain"
QVQLKQSGPGLVQPSQSLSITCTVSGFSLTNYGVHWVRQSPGKGLEWLGVIWSGGNTDYNTPFTSRLSIGKDNSKSQVFFKMNSLQSNDTAIYYCARALTYYDYEFAYWGQGTLVTVSA

SEQ ID NO: 1632 - protein, 119 aa, Artificial Sequence
  source: /note="Description of Artificial Sequence: Synthetic heavy chain variable domain"
QVQLKQSGPGLVQPSQSLSITCTVSGFSLTNYGVHWVRQSPGKGLEWLGVIWSGGNTDYNTPFTSRLSIHKDNSKSQVFFKMNSLQSNDTAIYYCARALTYYDYEFAYWGQGTLVTVSA

SEQ ID NO: 1633 - protein, 119 aa, Artificial Sequence
  source: /note="Description of Artificial Sequence: Synthetic heavy chain variable domain"
QVQLKQSGPGLVQPSQSLSITCTVSGFSLTNYGVHWVRQSPGKGLEWLGVIWSGGNTDYNTPFTSRLSIIKDNSKSQVFFKMNSLQSNDTAIYYCARALTYYDYEFAYWGQGTLVTVSA

SEQ ID NO: 1634 - protein, 119 aa, Artificial Sequence
  source: /note="Description of Artificial Sequence: Synthetic heavy chain variable domain"
QVQLKQSGPGLVQPSQSLSITCTVSGFSLTNYGVHWVRQSPGKGLEWLGVIWSGGNTDYNTPFTSRLSILKDNSKSQVFFKMNSLQSNDTAIYYCARALTYYDYEFAYWGQGTLVTVSA

SEQ ID NO: 1635 - protein, 119 aa, Artificial Sequence
  source: /note="Description of Artificial Sequence: Synthetic heavy chain variable domain"
QVQLKQSGPGLVQPSQSLSITCTVSGFSLTNYGVHWVRQSPGKGLEWLGVIWSGGNTDYNTPFTSRLSINADNSKSQVFFKMNSLQSNDTAIYYCARALTYYDYEFAYWGQGTLVTVSA

SEQ ID NO: 1636 - protein, 119 aa, Artificial Sequence
  source: /note="Description of Artificial Sequence: Synthetic heavy chain variable domain"
QVQLKQSGPGLVQPSQSLSITCTVSGFSLTNYGVHWVRQSPGKGLEWLGVIWSGGNTDYNTPFTSRLSINCDNSKSQVFFKMNSLQSNDTAIYYCARALTYYDYEFAYWGQGTLVTVSA

SEQ ID NO: 1637 - protein, 119 aa, Artificial Sequence
  source: /note="Description of Artificial Sequence: Synthetic heavy chain variable domain"
QVQLKQSGPGLVQPSQSLSITCTVSGFSLTNYGVHWVRQSPGKGLEWLGVIWSGGNTDYNTPFTSRLSINFDNSKSQVFFKMNSLQSNDTAIYYCARALTYYDYEFAYWGQGTLVTVSA

SEQ ID NO: 1638 - protein, 119 aa, Artificial Sequence
  source: /note="Description of Artificial Sequence: Synthetic heavy chain variable domain"
QVQLKQSGPGLVQPSQSLSITCTVSGFSLTNYGVHWVRQSPGKGLEWLGVIWSGGNTDYNTPFTSRLSINGDNSKSQVFFKMNSLQSNDTAIYYCARALTYYDYEFAYWGQGTLVTVSA

SEQ ID NO: 1639 - protein, 119 aa, Artificial Sequence
  source: /note="Description of Artificial Sequence: Synthetic heavy chain variable domain"
QVQLKQSGPGLVQPSQSLSITCTVSGFSLTNYGVHWVRQSPGKGLEWLGVIWSGGNTDYNTPFTSRLSINHDNSKSQVFFKMNSLQSNDTAIYYCARALTYYDYEFAYWGQGTLVTVSA

SEQ ID NO: 1640 - protein, 119 aa, Artificial Sequence
  source: /note="Description of Artificial Sequence: Synthetic heavy chain variable domain"
QVQLKQSGPGLVQPSQSLSITCTVSGFSLTNYGVHWVRQSPGKGLEWLGVIWSGGNTDYNTPFTSRLSINKANSKSQVFFKMNSLQSNDTAIYYCARALTYYDYEFAYWGQGTLVTVSA

SEQ ID NO: 1641 - protein, 119 aa, Artificial Sequence
  source: /note="Description of Artificial Sequence: Synthetic heavy chain variable domain"
QVQLKQSGPGLVQPSQSLSITCTVSGFSLTNYGVHWVRQSPGKGLEWLGVIWSGGNTDYNTPFTSRLSINKDASKSQVFFKMNSLQSNDTAIYYCARALTYYDYEFAYWGQGTLVTVSA

SEQ ID NO: 1642 - protein, 119 aa, Artificial Sequence
  source: /note="Description of Artificial Sequence: Synthetic heavy chain variable domain"
QVQLKQSGPGLVQPSQSLSITCTVSGFSLTNYGVHWVRQSPGKGLEWLGVIWSGGNTDYNTPFTSRLSINKDCSKSQVFFKMNSLQSNDTAIYYCARALTYYDYEFAYWGQGTLVTVSA

SEQ ID NO: 1643 - protein, 119 aa, Artificial Sequence
  source: /note="Description of Artificial Sequence: Synthetic heavy chain variable domain"
QVQLKQSGPGLVQPSQSLSITCTVSGFSLTNYGVHWVRQSPGKGLEWLGVIWSGGNTDYNTPFTSRLSINKDGSKSQVFFKMNSLQSNDTAIYYCARALTYYDYEFAYWGQGTLVTVSA

SEQ ID NO: 1644 - protein, 119 aa, Artificial Sequence
  source: /note="Description of Artificial Sequence: Synthetic heavy chain variable domain"
QVQLKQSGPGLVQPSQSLSITCTVSGFSLTNYGVHWVRQSPGKGLEWLGVIWSGGNTDYNTPFTSRLSINKDHSKSQVFFKMNSLQSNDTAIYYCARALTYYDYEFAYWGQGTLVTVSA

SEQ ID NO: 1645 - protein, 119 aa, Artificial Sequence
  source: /note="Description of Artificial Sequence: Synthetic heavy chain variable domain"
QVQLKQSGPGLVQPSQSLSITCTVSGFSLTNYGVHWVRQSPGKGLEWLGVIWSGGNTDYNTPFTSRLSINKDISKSQVFFKMNSLQSNDTAIYYCARALTYYDYEFAYWGQGTLVTVSA

SEQ ID NO: 1646 - protein, 119 aa, Artificial Sequence
  source: /note="Description of Artificial Sequence: Synthetic heavy chain variable domain"
QVQLKQSGPGLVQPSQSLSITCTVSGFSLTNYGVHWVRQSPGKGLEWLGVIWSGGNTDYNTPFTSRLSINKDLSKSQVFFKMNSLQSNDTAIYYCARALTYYDYEFAYWGQGTLVTVSA

SEQ ID NO: 1647 - protein, 119 aa, Artificial Sequence
  source: /note="Description of Artificial Sequence: Synthetic heavy chain variable domain"
QVQLKQSGPGLVQPSQSLSITCTVSGFSLTNYGVHWVRQSPGKGLEWLGVIWSGGNTDYNTPFTSRLSINKDMSKSQVFFKMNSLQSNDTAIYYCARALTYYDYEFAYWGQGTLVTVSA

SEQ ID NO: 1648 - protein, 119 aa, Artificial Sequence
  source: /note="Description of Artificial Sequence: Synthetic heavy chain variable domain"
QVQLKQSGPGLVQPSQSLSITCTVSGFSLTNYGVHWVRQSPGKGLEWLGVIWSGGNTDYNTPFTSRLSINKDNAKSQVFFKMNSLQSNDTAIYYCARALTYYDYEFAYWGQGTLVTVSA

SEQ ID NO: 1649 - protein, 119 aa, Artificial Sequence
  source: /note="Description of Artificial Sequence: Synthetic heavy chain variable domain"
QVQLKQSGPGLVQPSQSLSITCTVSGFSLTNYGVHWVRQSPGKGLEWLGVIWSGGNTDYNTPFTSRLSINKDNCKSQVFFKMNSLQSNDTAIYYCARALTYYDYEFAYWGQGTLVTVSA

SEQ ID NO: 1650 - protein, 119 aa, Artificial Sequence
  source: /note="Description of Artificial Sequence: Synthetic heavy chain variable domain"
QVQLKQSGPGLVQPSQSLSITCTVSGFSLTNYGVHWVRQSPGKGLEWLGVIWSGGNTDYNTPFTSRLSINKDNDKSQVFFKMNSLQSNDTAIYYCARALTYYDYEFAYWGQGTLVTVSA

SEQ ID NO: 1651 - protein, 119 aa, Artificial Sequence
  source: /note="Description of Artificial Sequence: Synthetic heavy chain variable domain"
QVQLKQSGPGLVQPSQSLSITCTVSGFSLTNYGVHWVRQSPGKGLEWLGVIWSGGNTDYNTPFTSRLSINKDNEKSQVFFKMNSLQSNDTAIYYCARALTYYDYEFAYWGQGTLVTVSA

SEQ ID NO: 1652 - protein, 119 aa, Artificial Sequence
  source: /note="Description of Artificial Sequence: Synthetic heavy chain variable domain"
QVQLKQSGPGLVQPSQSLSITCTVSGFSLTNYGVHWVRQSPGKGLEWLGVIWSGGNTDYNTPFTSRLSINKDNGKSQVFFKMNSLQSNDTAIYYCARALTYYDYEFAYWGQGTLVTVSA

SEQ ID NO: 1653 - protein, 119 aa, Artificial Sequence
  source: /note="Description of Artificial Sequence: Synthetic heavy chain variable domain"
QVQLKQSGPGLVQPSQSLSITCTVSGFSLTNYGVHWVRQSPGKGLEWLGVIWSGGNTDYNTPFTSRLSINKDNHKSQVFFKMNSLQSNDTAIYYCARALTYYDYEFAYWGQGTLVTVSA

SEQ ID NO: 1654 - protein, 119 aa, Artificial Sequence
  source: /note="Description of Artificial Sequence: Synthetic heavy chain variable domain"
QVQLKQSGPGLVQPSQSLSITCTVSGFSLTNYGVHWVRQSPGKGLEWLGVIWSGGNTDYNTPFTSRLSINKDNIKSQVFFKMNSLQSNDTAIYYCARALTYYDYEFAYWGQGTLVTVSA

SEQ ID NO: 1655 - protein, 119 aa, Artificial Sequence
  source: /note="Description of Artificial Sequence: Synthetic heavy chain variable domain"
QVQLKQSGPGLVQPSQSLSITCTVSGFSLTNYGVHWVRQSPGKGLEWLGVIWSGGNTDYNTPFTSRLSINKDNKKSQVFFKMNSLQSNDTAIYYCARALTYYDYEFAYWGQGTLVTVSA

SEQ ID NO: 1656 - protein, 119 aa, Artificial Sequence
  source: /note="Description of Artificial Sequence: Synthetic heavy chain variable domain"
QVQLKQSGPGLVQPSQSLSITCTVSGFSLTNYGVHWVRQSPGKGLEWLGVIWSGGNTDYNTPFTSRLSINKDNLKSQVFFKMNSLQSNDTAIYYCARALTYYDYEFAYWGQGTLVTVSA

SEQ ID NO: 1657 - protein, 119 aa, Artificial Sequence
  source: /note="Description of Artificial Sequence: Synthetic heavy chain variable domain"
QVQLKQSGPGLVQPSQSLSITCTVSGFSLTNYGVHWVRQSPGKGLEWLGVIWSGGNTDYNTPFTSRLSINKDNMKSQVFFKMNSLQSNDTAIYYCARALTYYDYEFAYWGQGTLVTVSA

SEQ ID NO: 1658 - protein, 119 aa, Artificial Sequence
  source: /note="Description of Artificial Sequence: Synthetic heavy chain variable domain"
QVQLKQSGPGLVQPSQSLSITCTVSGFSLTNYGVHWVRQSPGKGLEWLGVIWSGGNTDYNTPFTSRLSINKDNPKSQVFFKMNSLQSNDTAIYYCARALTYYDYEFAYWGQGTLVTVSA

SEQ ID NO: 1659 - protein, 119 aa, Artificial Sequence
  source: /note="Description of Artificial Sequence: Synthetic heavy chain variable domain"
QVQLKQSGPGLVQPSQSLSITCTVSGFSLTNYGVHWVRQSPGKGLEWLGVIWSGGNTDYNTPFTSRLSINKDNRKSQVFFKMNSLQSNDTAIYYCARALTYYDYEFAYWGQGTLVTVSA

SEQ ID NO: 1660 - protein, 119 aa, Artificial Sequence
  source: /note="Description of Artificial Sequence: Synthetic heavy chain variable domain"
QVQLKQSGPGLVQPSQSLSITCTVSGFSLTNYGVHWVRQSPGKGLEWLGVIWSGGNTDYNTPFTSRLSINKDNSASQVFFKMNSLQSNDTAIYYCARALTYYDYEFAYWGQGTLVTVSA

SEQ ID NO: 1661 - protein, 119 aa, Artificial Sequence
  source: /note="Description of Artificial Sequence: Synthetic heavy chain variable domain"
QVQLKQSGPGLVQPSQSLSITCTVSGFSLTNYGVHWVRQSPGKGLEWLGVIWSGGNTDYNTPFTSRLSINKDNSCSQVFFKMNSLQSNDTAIYYCARALTYYDYEFAYWGQGTLVTVSA

SEQ ID NO: 1662 - protein, 119 aa, Artificial Sequence
  source: /note="Description of Artificial Sequence: Synthetic heavy chain variable domain"
QVQLKQSGPGLVQPSQSLSITCTVSGFSLTNYGVHWVRQSPGKGLEWLGVIWSGGNTDYNTPFTSRLSINKDNSESQVFFKMNSLQSNDTAIYYCARALTYYDYEFAYWGQGTLVTVSA

SEQ ID NO: 1663 - protein, 119 aa, Artificial Sequence
  source: /note="Description of Artificial Sequence: Synthetic heavy chain variable domain"
QVQLKQSGPGLVQPSQSLSITCTVSGFSLTNYGVHWVRQSPGKGLEWLGVIWSGGNTDYNTPFTSRLSINKDNSFSQVFFKMNSLQSNDTAIYYCARALTYYDYEFAYWGQGTLVTVSA

SEQ ID NO: 1664 - protein, 119 aa, Artificial Sequence
  source: /note="Description of Artificial Sequence: Synthetic heavy chain variable domain"
QVQLKQSGPGLVQPSQSLSITCTVSGFSLTNYGVHWVRQSPGKGLEWLGVIWSGGNTDYNTPFTSRLSINKDNSGSQVFFKMNSLQSNDTAIYYCARALTYYDYEFAYWGQGTLVTVSA

SEQ ID NO: 1665 - protein, 119 aa, Artificial Sequence
  source: /note="Description of Artificial Sequence: Synthetic heavy chain variable domain"
QVQLKQSGPGLVQPSQSLSITCTVSGFSLTNYGVHWVRQSPGKGLEWLGVIWSGGNTDYNTPFTSRLSINKDNSHSQVFFKMNSLQSNDTAIYYCARALTYYDYEFAYWGQGTLVTVSA

SEQ ID NO: 1666 - protein, 119 aa, Artificial Sequence
  source: /note="Description of Artificial Sequence: Synthetic heavy chain variable domain"
QVQLKQSGPGLVQPSQSLSITCTVSGFSLTNYGVHWVRQSPGKGLEWLGVIWSGGNTDYNTPFTSRLSINKDNSKAQVFFKMNSLQSNDTAIYYCARALTYYDYEFAYWGQGTLVTVSA

SEQ ID NO: 1667 - protein, 119 aa, Artificial Sequence
  source: /note="Description of Artificial Sequence: Synthetic heavy chain variable domain"
QVQLKQSGPGLVQPSQSLSITCTVSGFSLTNYGVHWVRQSPGKGLEWLGVIWSGGNTDYNTPFTSRLSINKDNSKCQVFFKMNSLQSNDTAIYYCARALTYYDYEFAYWGQGTLVTVSA

SEQ ID NO: 1668 - protein, 119 aa, Artificial Sequence
  source: /note="Description of Artificial Sequence: Synthetic heavy chain variable domain"
QVQLKQSGPGLVQPSQSLSITCTVSGFSLTNYGVHWVRQSPGKGLEWLGVIWSGGNTDYNTPFTSRLSINKDNSKDQVFFKMNSLQSNDTAIYYCARALTYYDYEFAYWGQGTLVTVSA

SEQ ID NO: 1669 - protein, 119 aa, Artificial Sequence
  source: /note="Description of Artificial Sequence: Synthetic heavy chain variable domain"
QVQLKQSGPGLVQPSQSLSITCTVSGFSLTNYGVHWVRQSPGKGLEWLGVIWSGGNTDYNTPFTSRLSINKDNSKEQVFFKMNSLQSNDTAIYYCARALTYYDYEFAYWGQGTLVTVSA

SEQ ID NO: 1670 - protein, 119 aa, Artificial Sequence
  source: /note="Description of Artificial Sequence: Synthetic heavy chain variable domain"
QVQLKQSGPGLVQPSQSLSITCTVSGFSLTNYGVHWVRQSPGKGLEWLGVIWSGGNTDYNTPFTSRLSINKDNSKFQVFFKMNSLQSNDTAIYYCARALTYYDYEFAYWGQGTLVTVSA

SEQ ID NO: 1671 - protein, 119 aa, Artificial Sequence
  source: /note="Description of Artificial Sequence: Synthetic heavy chain variable domain"
QVQLKQSGPGLVQPSQSLSITCTVSGFSLTNYGVHWVRQSPGKGLEWLGVIWSGGNTDYNTPFTSRLSINKDNSKHQVFFKMNSLQSNDTAIYYCARALTYYDYEFAYWGQGTLVTVSA

SEQ ID NO: 1672 - protein, 119 aa, Artificial Sequence
  source: /note="Description of Artificial Sequence: Synthetic heavy chain variable domain"
QVQLKQSGPGLVQPSQSLSITCTVSGFSLTNYGVHWVRQSPGKGLEWLGVIWSGGNTDYNTPFTSRLSINKDNSKIQVFFKMNSLQSNDTAIYYCARALTYYDYEFAYWGQGTLVTVSA

SEQ ID NO: 1673 - protein, 119 aa, Artificial Sequence
  source: /note="Description of Artificial Sequence: Synthetic heavy chain variable domain"
QVQLKQSGPGLVQPSQSLSITCTVSGFSLTNYGVHWVRQSPGKGLEWLGVIWSGGNTDYNTPFTSRLSINKDNSKLQVFFKMNSLQSNDTAIYYCARALTYYDYEFAYWGQGTLVTVSA

SEQ ID NO: 1674 - protein, 119 aa, Artificial Sequence
  source: /note="Description of Artificial Sequence: Synthetic heavy chain variable domain"
QVQLKQSGPGLVQPSQSLSITCTVSGFSLTNYGVHWVRQSPGKGLEWLGVIWSGGNTDYNTPFTSRLSINKDNSKMQVFFKMNSLQSNDTAIYYCARALTYYDYEFAYWGQGTLVTVSA

SEQ ID NO: 1675 - protein, 119 aa, Artificial Sequence
  source: /note="Description of Artificial Sequence: Synthetic heavy chain variable domain"
QVQLKQSGPGLVQPSQSLSITCTVSGFSLTNYGVHWVRQSPGKGLEWLGVIWSGGNTDYNTPFTSRLSINKDNSKPQVFFKMNSLQSNDTAIYYCARALTYYDYEFAYWGQGTLVTVSA

SEQ ID NO: 1676 - protein, 119 aa, Artificial Sequence
  source: /note="Description of Artificial Sequence: Synthetic heavy chain variable domain"
QVQLKQSGPGLVQPSQSLSITCTVSGFSLTNYGVHWVRQSPGKGLEWLGVIWSGGNTDYNTPFTSRLSINKDNSKQQVFFKMNSLQSNDTAIYYCARALTYYDYEFAYWGQGTLVTVSA

SEQ ID NO: 1677 - protein, 119 aa, Artificial Sequence
  source: /note="Description of Artificial Sequence: Synthetic heavy chain variable domain"
QVQLKQSGPGLVQPSQSLSITCTVSGFSLTNYGVHWVRQSPGKGLEWLGVIWSGGNTDYNTPFTSRLSINKDNSKRQVFFKMNSLQSNDTAIYYCARALTYYDYEFAYWGQGTLVTVSA

SEQ ID NO: 1678 - protein, 119 aa, Artificial Sequence
  source: /note="Description of Artificial Sequence: Synthetic heavy chain variable domain"
QVQLKQSGPGLVQPSQSLSITCTVSGFSLTNYGVHWVRQSPGKGLEWLGVIWSGGNTDYNTPFTSRLSINKDNSKSAVFFKMNSLQSNDTAIYYCARALTYYDYEFAYWGQGTLVTVSA

SEQ ID NO: 1679 - protein, 119 aa, Artificial Sequence
  source: /note="Description of Artificial Sequence: Synthetic heavy chain variable domain"
QVQLKQSGPGLVQPSQSLSITCTVSGFSLTNYGVHWVRQSPGKGLEWLGVIWSGGNTDYNTPFTSRLSINKDNSKSEVFFKMNSLQSNDTAIYYCARALTYYDYEFAYWGQGTLVTVSA

SEQ ID NO: 1680 - protein, 119 aa, Artificial Sequence
  source: /note="Description of Artificial Sequence: Synthetic heavy chain variable domain"
QVQLKQSGPGLVQPSQSLSITCTVSGFSLTNYGVHWVRQSPGKGLEWLGVIWSGGNTDYNTPFTSRLSINKDNSKSGVFFKMNSLQSNDTAIYYCARALTYYDYEFAYWGQGTLVTVSA

SEQ ID NO: 1681 - protein, 119 aa, Artificial Sequence
  source: /note="Description of Artificial Sequence: Synthetic heavy chain variable domain"
QVQLKQSGPGLVQPSQSLSITCTVSGFSLTNYGVHWVRQSPGKGLEWLGVIWSGGNTDYNTPFTSRLSINKDNSKSHVFFKMNSLQSNDTAIYYCARALTYYDYEFAYWGQGTLVTVSA

SEQ ID NO: 1682 - protein, 119 aa, Artificial Sequence
  source: /note="Description of Artificial Sequence: Synthetic heavy chain variable domain"
QVQLKQSGPGLVQPSQSLSITCTVSGFSLTNYGVHWVRQSPGKGLEWLGVIWSGGNTDYNTPFTSRLSINKDNSKSIVFFKMNSLQSNDTAIYYCARALTYYDYEFAYWGQGTLVTVSA

SEQ ID NO: 1683 - protein, 119 aa, Artificial Sequence
  source: /note="Description of Artificial Sequence: Synthetic heavy chain variable domain"
QVQLKQSGPGLVQPSQSLSITCTVSGFSLTNYGVHWVRQSPGKGLEWLGVIWSGGNTDYNTPFTSRLSINKDNSKSLVFFKMNSLQSNDTAIYYCARALTYYDYEFAYWGQGTLVTVSA

SEQ ID NO: 1684 - protein, 119 aa, Artificial Sequence
  source: /note="Description of Artificial Sequence: Synthetic heavy chain variable domain"
QVQLKQSGPGLVQPSQSLSITCTVSGFSLTNYGVHWVRQSPGKGLEWLGVIWSGGNTDYNTPFTSRLSINKDNSKSMVFFKMNSLQSNDTAIYYCARALTYYDYEFAYWGQGTLVTVSA

SEQ ID NO: 1685 - protein, 119 aa, Artificial Sequence
  source: /note="Description of Artificial Sequence: Synthetic heavy chain variable domain"
QVQLKQSGPGLVQPSQSLSITCTVSGFSLTNYGVHWVRQSPGKGLEWLGVIWSGGNTDYNTPFTSRLSINKDNSKSNVFFKMNSLQSNDTAIYYCARALTYYDYEFAYWGQGTLVTVSA

SEQ ID NO: 1686 - protein, 119 aa, Artificial Sequence
  source: /note="Description of Artificial Sequence: Synthetic heavy chain variable domain"
QVQLKQSGPGLVQPSQSLSITCTVSGFSLTNYGVHWVRQSPGKGLEWLGVIWSGGNTDYNTPFTSRLSINKDNSKSQVFFKMNSLQSNDTAIHYCARALTYYDYEFAYWGQGTLVTVSA

SEQ ID NO: 1687 - protein, 119 aa, Artificial Sequence
  source: /note="Description of Artificial Sequence: Synthetic heavy chain variable domain"
QVQLKQSGPGLVQPSQSLSITCTVSGFSLTNYGVHWVRQSPGKGLEWLGVIWSGGNTDYNTPFTSRLSINKDNSKSQVFFKMNSLQSNDTAIVYCARALTYYDYEFAYWGQGTLVTVSA

SEQ ID NO: 1688 - protein, 119 aa, Artificial Sequence
  source: /note="Description of Artificial Sequence: Synthetic heavy chain variable domain"
QVQLKQSGPGLVQPSQSLSITCTVSGFSLTNYGVHWVRQSPGKGLEWLGVIWSGGNTDYNTPFTSRLSINKDNSKSQVFFKMNSLQSNDTAIWYCARALTYYDYEFAYWGQGTLVTVSA

SEQ ID NO: 1689 - protein, 119 aa, Artificial Sequence
  source: /note="Description of Artificial Sequence: Synthetic heavy chain variable domain"
QVQLKQSGPGLVQPSQSLSITCTVSGFSLTNYGVHWVRQSPGKGLEWLGVIWSGGNTDYNTPFTSRLSINKDNSKSQVFFKMNSLQSNDTAIYLCARALTYYDYEFAYWGQGTLVTVSA

SEQ ID NO: 1690 - protein, 119 aa, Artificial Sequence
  source: /note="Description of Artificial Sequence: Synthetic heavy chain variable domain"
QVQLKQSGPGLVQPSQSLSITCTVSGFSLTNYGVHWVRQSPGKGLEWLGVIWSGGNTDYNTPFTSRLSINKDNSKSQVFFKMNSLQSNDTAIYRCARALTYYDYEFAYWGQGTLVTVSA

SEQ ID NO: 1691 - protein, 119 aa, Artificial Sequence
  source: /note="Description of Artificial Sequence: Synthetic heavy chain variable domain"
QVQLKQSGPGLVQPSQSLSITCTVSGFSLTNYGVHWVRQSPGKGLEWLGVIWSGGNTDYNTPFTSRLSINKDNSKSQVFFKMNSLQSNDTAIYYCAHALTYYDYEFAYWGQGTLVTVSA

SEQ ID NO: 1692 - protein, 119 aa, Artificial Sequence
  source: /note="Description of Artificial Sequence: Synthetic heavy chain variable domain"
QVQLKQSGPGLVQPSQSLSITCTVSGFSLTNYGVHWVRQSPGKGLEWLGVIWSGGNTDYNTPFTSRLSINKDNSKSQVFFKMNSLQSNDTAIYYCARALAYYDYEFAYWGQGTLVTVSA

SEQ ID NO: 1693 - protein, 119 aa, Artificial Sequence
  source: /note="Description of Artificial Sequence: Synthetic heavy chain variable domain"
QVQLKQSGPGLVQPSQSLSITCTVSGFSLTNYGVHWVRQSPGKGLEWLGVIWSGGNTDYNTPFTSRLSINKDNSKSQVFFKMNSLQSNDTAIYYCARALDYYDYEFAYWGQGTLVTVSA

SEQ ID NO: 1694 - protein, 119 aa, Artificial Sequence
  source: /note="Description of Artificial Sequence: Synthetic heavy chain variable domain"
QVQLKQSGPGLVQPSQSLSITCTVSGFSLTNYGVHWVRQSPGKGLEWLGVIWSGGNTDYNTPFTSRLSINKDNSKSQVFFKMNSLQSNDTAIYYCARALHYYDYEFAYWGQGTLVTVSA

SEQ ID NO: 1695 - protein, 119 aa, Artificial Sequence
  source: /note="Description of Artificial Sequence: Synthetic heavy chain variable domain"
QVQLKQSGPGLVQPSQSLSITCTVSGFSLTNYGVHWVRQSPGKGLEWLGVIWSGGNTDYNTPFTSRLSINKDNSKSQVFFKMNSLQSNDTAIYYCARALIYYDYEFAYWGQGTLVTVSA

SEQ ID NO: 1696 - protein, 119 aa, Artificial Sequence
  source: /note="Description of Artificial Sequence: Synthetic heavy chain variable domain"
QVQLKQSGPGLVQPSQSLSITCTVSGFSLTNYGVHWVRQSPGKGLEWLGVIWSGGNTDYNTPFTSRLSINKDNSKSQVFFKMNSLQSNDTAIYYCARALLYYDYEFAYWGQGTLVTVSA

SEQ ID NO: 1697 - protein, 119 aa, Artificial Sequence
  source: /note="Description of Artificial Sequence: Synthetic heavy chain variable domain"
QVQLKQSGPGLVQPSQSLSITCTVSGFSLTNYGVHWVRQSPGKGLEWLGVIWSGGNTDYNTPFTSRLSINKDNSKSQVFFKMNSLQSNDTAIYYCARALNYYDYEFAYWGQGTLVTVSA

SEQ ID NO: 1698 - protein, 119 aa, Artificial Sequence
  source: /note="Description of Artificial Sequence: Synthetic heavy chain variable domain"
QVQLKQSGPGLVQPSQSLSITCTVSGFSLTNYGVHWVRQSPGKGLEWLGVIWSGGNTDYNTPFTSRLSINKDNSKSQVFFKMNSLQSNDTAIYYCARALPYYDYEFAYWGQGTLVTVSA

SEQ ID NO: 1699 - protein, 119 aa, Artificial Sequence
  source: /note="Description of Artificial Sequence: Synthetic heavy chain variable domain"
QVQLKQSGPGLVQPSQSLSITCTVSGFSLTNYGVHWVRQSPGKGLEWLGVIWSGGNTDYNTPFTSRLSINKDNSKSQVFFKMNSLQSNDTAIYYCARALQYYDYEFAYWGQGTLVTVSA

SEQ ID NO: 1700 - protein, 119 aa, Artificial Sequence
  source: /note="Description of Artificial Sequence: Synthetic heavy chain variable domain"
QVQLKQSGPGLVQPSQSLSITCTVSGFSLTNYGVHWVRQSPGKGLEWLGVIWSGGNTDYNTPFTSRLSINKDNSKSQVFFKMNSLQSNDTAIYYCARALSYYDYEFAYWGQGTLVTVSA

SEQ ID NO: 1701 - protein, 119 aa, Artificial Sequence
  source: /note="Description of Artificial Sequence: Synthetic heavy chain variable domain"
QVQLKQSGPGLVQPSQSLSITCTVSGFSLTNYGVHWVRQSPGKGLEWLGVIWSGGNTDYNTPFTSRLSINKDNSKSQVFFKMNSLQSNDTAIYYCARALTEYDYEFAYWGQGTLVTVSA

SEQ ID NO: 1702 - protein, 119 aa, Artificial Sequence
  source: /note="Description of Artificial Sequence: Synthetic heavy chain variable domain"
QVQLKQSGPGLVQPSQSLSITCTVSGFSLTNYGVHWVRQSPGKGLEWLGVIWSGGNTDYNTPFTSRLSINKDNSKSQVFFKMNSLQSNDTAIYYCARALTFYDYEFAYWGQGTLVTVSA

SEQ ID NO: 1703 - protein, 119 aa, Artificial Sequence
  source: /note="Description of Artificial Sequence: Synthetic heavy chain variable domain"
QVQLKQSGPGLVQPSQSLSITCTVSGFSLTNYGVHWVRQSPGKGLEWLGVIWSGGNTDYNTPFTSRLSINKDNSKSQVFFKMNSLQSNDTAIYYCARALTHYDYEFAYWGQGTLVTVSA

SEQ ID NO: 1704 - protein, 119 aa, Artificial Sequence
  source: /note="Description of Artificial Sequence: Synthetic heavy chain variable domain"
QVQLKQSGPGLVQPSQSLSITCTVSGFSLTNYGVHWVRQSPGKGLEWLGVIWSGGNTDYNTPFTSRLSINKDNSKSQVFFKMNSLQSNDTAIYYCARALTMYDYEFAYWGQGTLVTVSA

SEQ ID NO: 1705 - protein, 119 aa, Artificial Sequence
  source: /note="Description of Artificial Sequence: Synthetic heavy chain variable domain"
QVQLKQSGPGLVQPSQSLSITCTVSGFSLTNYGVHWVRQSPGKGLEWLGVIWSGGNTDYNTPFTSRLSINKDNSKSQVFFKMNSLQSNDTAIYYCARALTWYDYEFAYWGQGTLVTVSA

SEQ ID NO: 1706 - protein, 119 aa, Artificial Sequence
  source: /note="Description of Artificial Sequence: Synthetic heavy chain variable domain"
QVQLKQSGPGLVQPSQSLSITCTVSGFSLTNYGVHWVRQSPGKGLEWLGVIWSGGNTDYNTPFTSRLSINKDNSKSQVFFKMNSLQSNDTAIYYCARALTYCDYEFAYWGQGTLVTVSA

SEQ ID NO: 1707 - protein, 119 aa, Artificial Sequence
  source: /note="Description of Artificial Sequence: Synthetic heavy chain variable domain"
QVQLKQSGPGLVQPSQSLSITCTVSGFSLTNYGVHWVRQSPGKGLEWLGVIWSGGNTDYNTPFTSRLSINKDNSKSQVFFKMNSLQSNDTAIYYCARALTYDDYEFAYWGQGTLVTVSA

SEQ ID NO: 1708 - protein, 119 aa, Artificial Sequence
  source: /note="Description of Artificial Sequence: Synthetic heavy chain variable domain"
QVQLKQSGPGLVQPSQSLSITCTVSGFSLTNYGVHWVRQSPGKGLEWLGVIWSGGNTDYNTPFTSRLSINKDNSKSQVFFKMNSLQSNDTAIYYCARALTYIDYEFAYWGQGTLVTVSA

SEQ ID NO: 1709 - protein, 119 aa, Artificial Sequence
  source: /note="Description of Artificial Sequence: Synthetic heavy chain variable domain"
QVQLKQSGPGLVQPSQSLSITCTVSGFSLTNYGVHWVRQSPGKGLEWLGVIWSGGNTDYNTPFTSRLSINKDNSKSQVFFKMNSLQSNDTAIYYCARALTYNDYEFAYWGQGTLVTVSA

SEQ ID NO: 1710 - protein, 119 aa, Artificial Sequence
  source: /note="Description of Artificial Sequence: Synthetic heavy chain variable domain"
QVQLKQSGPGLVQPSQSLSITCTVSGFSLTNYGVHWVRQSPGKGLEWLGVIWSGGNTDYNTPFTSRLSINKDNSKSQVFFKMNSLQSNDTAIYYCARALTYRDYEFAYWGQGTLVTVSA

SEQ ID NO: 1711 - protein, 119 aa, Artificial Sequence
  source: /note="Description of Artificial Sequence: Synthetic heavy chain variable domain"
QVQLKQSGPGLVQPSQSLSITCTVSGFSLTNYGVHWVRQSPGKGLEWLGVIWSGGNTDYNTPFTSRLSINKDNSKSQVFFKMNSLQSNDTAIYYCARALTYWDYEFAYWGQGTLVTVSA

SEQ ID NO: 1712 - protein, 119 aa, Artificial Sequence
  source: /note="Description of Artificial Sequence: Synthetic heavy chain variable domain"
QVQLKQSGPGLVQPSQSLSITCTVSGFSLTNYGVHWVRQSPGKGLEWLGVIWSGGNTDYNTPFTSRLSINKDNSKSQVFFKMNSLQSNDTAIYYCARALTYYAYEFAYWGQGTLVTVSA

SEQ ID NO: 1713 - protein, 119 aa, Artificial Sequence
  source: /note="Description of Artificial Sequence: Synthetic heavy chain variable domain"
QVQLKQSGPGLVQPSQSLSITCTVSGFSLTNYGVHWVRQSPGKGLEWLGVIWSGGNTDYNTPFTSRLSINKDNSKSQVFFKMNSLQSNDTAIYYCARALTYYCYEFAYWGQGTLVTVSA

SEQ ID NO: 1714 - protein, 119 aa, Artificial Sequence
  source: /note="Description of Artificial Sequence: Synthetic heavy chain variable domain"
QVQLKQSGPGLVQPSQSLSITCTVSGFSLTNYGVHWVRQSPGKGLEWLGVIWSGGNTDYNTPFTSRLSINKDNSKSQVFFKMNSLQSNDTAIYYCARALTYYDDEFAYWGPGTLVTVSA

SEQ ID NO: 1715 - protein, 119 aa, Artificial Sequence
  source: /note="Description of Artificial Sequence: Synthetic heavy chain variable domain"
QVQLKQSGPGLVQPSQSLSITCTVSGFSLGNYGVHWVRQSPGKGLEWLGVIWSGGNTDYNTPFTSRLSINKDNSKSQVFFKMNSLQSNDTAIYYCARALTYYDYEFAYWGQGTLVTVSA

SEQ ID NO: 1716 - protein, 119 aa, Artificial Sequence
  source: /note="Description of Artificial Sequence: Synthetic heavy chain variable domain"
QVQLKQSGPGLVQPSQSLSITCTVSGFSLHNYGVHWVRQSPGKGLEWLGVIWSGGNTDYNTPFTSRLSINKDNSKSQVFFKMNSLQSNDTAIYYCARALTYYDYEFAYWGQGTLVTVSA

SEQ ID NO: 1717 - protein, 119 aa, Artificial Sequence
  source: /note="Description of Artificial Sequence: Synthetic heavy chain variable domain"
QVQLKQSGPGLVQPSQSLSITCTVSGFSLINYGVHWVRQSPGKGLEWLGVIWSGGNTDYNTPFTSRLSINKDNSKSQVFFKMNSLQSNDTAIYYCARALTYYDYEFAYWGQGTLVTVSA

SEQ ID NO: 1718 - protein, 119 aa, Artificial Sequence
  source: /note="Description of Artificial Sequence: Synthetic heavy chain variable domain"
QVQLKQSGPGLVQPSQSLSITCTVSGFSLMNYGVHWVRQSPGKGLEWLGVIWSGGNTDYNTPFTSRLSINKDNSKSQVFFKMNSLQSNDTAIYYCARALTYYDYEFAYWGQGTLVTVSA

SEQ ID NO: 1719 - protein, 119 aa, Artificial Sequence
  source: /note="Description of Artificial Sequence: Synthetic heavy chain variable domain"
QVQLKQSGPGLVQPSQSLSITCTVSGFSLNNYGVHWVRQSPGKGLEWLGVIWSGGNTDYNTPFTSRLSINKDNSKSQVFFKMNSLQSNDTAIYYCARALTYYDYEFAYWGQGTLVTVSA

SEQ ID NO: 1720 - protein, 119 aa, Artificial Sequence
  source: /note="Description of Artificial Sequence: Synthetic heavy chain variable domain"
QVQLKQSGPGLVQPSQSLSITCTVSGFSLPNYGVHWVRQSPGKGLEWLGVIWSGGNTDYNTPFTSRLSINKDNSKSQVFFKMNSLQSNDTAIYYCARALTYYDYEFAYWGQGTLVTVSA

SEQ ID NO: 1721 - protein, 119 aa, Artificial Sequence
  source: /note="Description of Artificial Sequence: Synthetic heavy chain variable domain"
QVQLKQSGPGLVQPSQSLSITCTVSGFSLRNYGVHWVRQSPGKGLEWLGVIWSGGNTDYNTPFTSRLSINKDNSKSQVFFKMNSLQSNDTAIYYCARALTYYDYEFAYWGQGTLVTVSA

SEQ ID NO: 1722 - protein, 119 aa, Artificial Sequence
  source: /note="Description of Artificial Sequence: Synthetic heavy chain variable domain"
QVQLKQSGPGLVQPSQSLSITCTVSGFSLSNYGVHWVRQSPGKGLEWLGVIWSGGNTDYNTPFTSRLSINKDNSKSQVFFKMNSLQSNDTAIYYCARALTYYDYEFAYWGQGTLVTVSA

SEQ ID NO: 1723 - protein, 119 aa, Artificial Sequence
  source: /note="Description of Artificial Sequence: Synthetic heavy chain variable domain"
QVQLKQSGPGLVQPSQSLSITCTVSGFSLTDYGVHWVRQSPGKGLEWLGVIWSGGNTDYNTPFTSRLSINKDNSKSQVFFKMNSLQSNDTAIYYCARALTYYDYEFAYWGQGTLVTVSA

SEQ ID NO: 1724 - protein, 119 aa, Artificial Sequence
  source: /note="Description of Artificial Sequence: Synthetic heavy chain variable domain"
QVQLKQSGPGLVQPSQSLSITCTVSGFSLTEYGVHWVRQSPGKGLEWLGVIWSGGNTDYNTPFTSRLSINKDNSKSQVFFKMNSLQSNDTAIYYCARALTYYDYEFAYWGQGTLVTVSA

SEQ ID NO: 1725 - protein, 119 aa, Artificial Sequence
  source: /note="Description of Artificial Sequence: Synthetic heavy chain variable domain"
QVQLKQSGPGLVQPSQSLSITCTVSGFSLTGYGVHWVRQSPGKGLEWLGVIWSGGNTDYNTPFTSRLSINKDNSKSQVFFKMNSLQSNDTAIYYCARALTYYDYEFAYWGQGTLVTVSA

SEQ ID NO: 1726 - protein, 119 aa, Artificial Sequence
  source: /note="Description of Artificial Sequence: Synthetic heavy chain variable domain"
QVQLKQSGPGLVQPSQSLSITCTVSGFSLTHYGVHWVRQSPGKGLEWLGVIWSGGNTDYNTPFTSRLSINKDNSKSQVFFKMNSLQSNDTAIYYCARALTYYDYEFAYWGQGTLVTVSA

SEQ ID NO: 1727 - protein, 119 aa, Artificial Sequence
  source: /note="Description of Artificial Sequence: Synthetic heavy chain variable domain"
QVQLKQSGPGLVQPSQSLSITCTVSGFSLTIYGVHWVRQSPGKGLEWLGVIWSGGNTDYNTPFTSRLSINKDNSKSQVFFKMNSLQSNDTAIYYCARALTYYDYEFAYWGQGTLVTVSA

SEQ ID NO: 1728 - protein, 119 aa, Artificial Sequence
  source: /note="Description of Artificial Sequence: Synthetic heavy chain variable domain"
QVQLKQSGPGLVQPSQSLSITCTVSGFSLTKYGVHWVRQSPGKGLEWLGVIWSGGNTDYNTPFTSRLSINKDNSKSQVFFKMNSLQSNDTAIYYCARALTYYDYEFAYWGQGTLVTVSA

SEQ ID NO: 1729 - protein, 119 aa, Artificial Sequence
  source: /note="Description of Artificial Sequence: Synthetic heavy chain variable domain"
QVQLKQSGPGLVQPSQSLSITCTVSGFSLTLYGVHWVRQSPGKGLEWLGVIWSGGNTDYNTPFTSRLSINKDNSKSQVFFKMNSLQSNDTAIYYCARALTYYDYEFAYWGQGTLVTVSA

SEQ ID NO: 1730 - protein, 119 aa, Artificial Sequence
  source: /note="Description of Artificial Sequence: Synthetic heavy chain variable domain"
QVQLKQSGPGLVQPSQSLSITCTVSGFSLTNCGVHWVRQSPGKGLEWLGVIWSGGNTDYNTPFTSRLSINKDNSKSQVFFKMNSLQSNDTAIYYCARALTYYDYEFAYWGQGTLVTVSA

SEQ ID NO: 1731 - protein, 119 aa, Artificial Sequence
  source: /note="Description of Artificial Sequence: Synthetic heavy chain variable domain"
QVQLKQSGPGLVQPSQSLSITCTVSGFSLTNHGVHWVRQSPGKGLEWLGVIWSGGNTDYNTPFTSRLSINKDNSKSQVFFKMNSLQSNDTAIYYCARALTYYDYEFAYWGQGTLVTVSA

SEQ ID NO: 1732 - protein, 119 aa, Artificial Sequence
  source: /note="Description of Artificial Sequence: Synthetic heavy chain variable domain"
QVQLKQSGPGLVQPSQSLSITCTVSGFSLTNLGVHWVRQSPGKGLEWLGVIWSGGNTDYNTPFTSRLSINKDNSKSQVFFKMNSLQSNDTAIYYCARALTYYDYEFAYWGQGTLVTVSA

SEQ ID NO: 1733 - protein, 119 aa, Artificial Sequence
  source: /note="Description of Artificial Sequence: Synthetic heavy chain variable domain"
QVQLKQSGPGLVQPSQSLSITCTVSGFSLTNMGVHWVRQSPGKGLEWLGVIWSGGNTDYNTPFTSRLSINKDNSKSQVFFKMNSLQSNDTAIYYCARALTYYDYEFAYWGQGTLVTVSA

SEQ ID NO: 1734 - protein, 119 aa, Artificial Sequence
  source: /note="Description of Artificial Sequence: Synthetic heavy chain variable domain"
QVQLKQSGPGLVQPSQSLSITCTVSGFSLTNNGVHWVRQSPGKGLEWLGVIWSGGNTDYNTPFTSRLSINKDNSKSQVFFKMNSLQSNDTAIYYCARALTYYDYEFAYWGQGTLVTVSA

SEQ ID NO: 1735 - protein, 119 aa, Artificial Sequence
  source: /note="Description of Artificial Sequence: Synthetic heavy chain variable domain"
QVQLKQSGPGLVQPSQSLSITCTVSGFSLTNRGVHWVRQSPGKGLEWLGVIWSGGNTDYNTPFTSRLSINKDNSKSQVFFKMNSLQSNDTAIYYCARALTYYDYEFAYWGQGTLVTVSA

SEQ ID NO: 1736 - protein, 119 aa, Artificial Sequence
  source: /note="Description of Artificial Sequence: Synthetic heavy chain variable domain"
QVQLKQSGPGLVQPSQSLSITCTVSGFSLTNTGVHWVRQSPGKGLEWLGVIWSGGNTDYNTPFTSRLSINKDNSKSQVFFKMNSLQSNDTAIYYCARALTYYDYEFAYWGQGTLVTVSA

SEQ ID NO: 1737 - protein, 119 aa, Artificial Sequence
  source: /note="Description of Artificial Sequence: Synthetic heavy chain variable domain"
QVQLKQSGPGLVQPSQSLSITCTVSGFSLTNVGVHWVRQSPGKGLEWLGVIWSGGNTDYNTPFTSRLSINKDNSKSQVFFKMNSLQSNDTAIYYCARALTYYDYEFAYWGQGTLVTVSA

SEQ ID NO: 1738 - protein, 119 aa, Artificial Sequence
  source: /note="Description of Artificial Sequence: Synthetic heavy chain variable domain"
QVQLKQSGPGLVQPSQSLSITCTVSGFSLTNYEVHWVRQSPGKGLEWLGVIWSGGNTDYNTPFTSRLSINKDNSKSQVFFKMNSLQSNDTAIYYCARALTYYDYEFAYWGQGTLVTVSA

SEQ ID NO: 1739 - protein, 119 aa, Artificial Sequence
  source: /note="Description of Artificial Sequence: Synthetic heavy chain variable domain"
QVQLKQSGPGLVQPSQSLSITCTVSGFSLTNYGAHWVRQSPGKGLEWLGVIWSGGNTDYNTPFTSRLSINKDNSKSQVFFKMNSLQSNDTAIYYCARALTYYDYEFAYWGQGTLVTVSA

SEQ ID NO: 1740 - protein, 119 aa, Artificial Sequence
  source: /note="Description of Artificial Sequence: Synthetic heavy chain variable domain"
QVQLKQSGPGLVQPSQSLSITCTVSGFSLTNYGCHWVRQSPGKGLEWLGVIWSGGNTDYNTPFTSRLSINKDNSKSQVFFKMNSLQSNDTAIYYCARALTYYDYEFAYWGQGTLVTVSA

SEQ ID NO: 1741 - protein, 119 aa, Artificial Sequence
  source: /note="Description of Artificial Sequence: Synthetic heavy chain variable domain"
QVQLKQSGPGLVQPSQSLSITCTVSGFSLTNYGIHWVRQSPGKGLEWLGVIWSGGNTDYNTPFTSRLSINKDNSKSQVFFKMNSLQSNDTAIYYCARALTYYDYEFAYWGQGTLVTVSA

SEQ ID NO: 1742 - protein, 119 aa, Artificial Sequence
  source: /note="Description of Artificial Sequence: Synthetic heavy chain variable domain"
QVQLKQSGPGLVQPSQSLSITCTVSGFSLTNYGLHWVRQSPGKGLEWLGVIWSGGNTDYNTPFTSRLSINKDNSKSQVFFKMNSLQSNDTAIYYCARALTYYDYEFAYWGQGTLVTVSA

SEQ ID NO: 1743 - protein, 119 aa, Artificial Sequence
  source: /note="Description of Artificial Sequence: Synthetic heavy chain variable domain"
QVQLKQSGPGLVQPSQSLSITCTVSGFSLTNYGMHWVRQSPGKGLEWLGVIWSGGNTDYNTPFTSRLSINKDNSKSQVFFKMNSLQSNDTAIYYCARALTYYDYEFAYWGQGTLVTVSA

SEQ ID NO: 1744 - protein, 119 aa, Artificial Sequence
  source: /note="Description of Artificial Sequence: Synthetic heavy chain variable domain"
QVQLKQSGPGLVQPSQSLSITCTVSGFSLTNYGPHWVRQSPGKGLEWLGVIWSGGNTDYNTPFTSRLSINKDNSKSQVFFKMNSLQSNDTAIYYCARALTYYDYEFAYWGQGTLVTVSA

SEQ ID NO: 1745 - protein, 119 aa, Artificial Sequence
  source: /note="Description of Artificial Sequence: Synthetic heavy chain variable domain"
QVQLKQSGPGLVQPSQSLSITCTVSGFSLTNYGVHAVRQSPGKGLEWLGVIWSGGNTDYNTPFTSRLSINKDNSKSQVFFKMNSLQSNDTAIYYCARALTYYDYEFAYWGQGTLVTVSA

SEQ ID NO: 1746 - protein, 119 aa, Artificial Sequence
  source: /note="Description of Artificial Sequence: Synthetic heavy chain variable domain"
QVQLKQSGPGLVQPSQSLSITCTVSGFSLTNYGVHIVRQSPGKGLEWLGVIWSGGNTDYNTPFTSRLSINKDNSKSQVFFKMNSLQSNDTAIYYCARALTYYDYEFAYWGQGTLVTVSA

SEQ ID NO: 1747 - protein, 119 aa, Artificial Sequence
  source: /note="Description of Artificial Sequence: Synthetic heavy chain variable domain"
QVQLKQSGPGLVQPSQSLSITCTVSGFSLTNYGVHKVRQSPGKGLEWLGVIWSGGNTDYNTPFTSRLSINKDNSKSQVFFKMNSLQSNDTAIYYCARALTYYDYEFAYWGQGTLVTVSA

SEQ ID NO: 1748 - protein, 119 aa, Artificial Sequence
  source: /note="Description of Artificial Sequence: Synthetic heavy chain variable domain"
QVQLKQSGPGLVQPSQSLSITCTVSGFSLTNYGVHVVRQSPGKGLEWLGVIWSGGNTDYNTPFTSRLSINKDNSKSQVFFKMNSLQSNDTAIYYCARALTYYDYEFAYWGQGTLVTVSA

SEQ ID NO: 1749 - protein, 119 aa, Artificial Sequence
  source: /note="Description of Artificial Sequence: Synthetic heavy chain variable domain"
QVQLKQSGPGLVQPSQSLSITCTVSGFSLTNYGVHWIRQPPGKGLEWIGVIWSGGNTDYNTPFTSRLSINKDNSKSQVFFKMNSLQSNDTAIYYCARALTYYDYEFAYWGQGTLVTVSA

SEQ ID NO: 1750 - protein, 119 aa, Artificial Sequence
  source: /note="Description of Artificial Sequence: Synthetic heavy chain variable domain"
QVQLKQSGPGLVQPSQSLSITCTVSGFSLTNYGVHWVRQSPGKGLEWLGAIWSGGNTDYNTPFTSRLSINKDNSKSQVFFKMNSLQSNDTAIYYCARALTYYDYEFAYWGQGTLVTVSA

SEQ ID NO: 1751 - protein, 119 aa, Artificial Sequence
  source: /note="Description of Artificial Sequence: Synthetic heavy chain variable domain"
QVQLKQSGPGLVQPSQSLSITCTVSGFSLTNYGVHWVRQSPGKGLEWLGDIWSGGNTDYNTPFTSRLSINKDNSKSQVFFKMNSLQSNDTAIYYCARALTYYDYEFAYWGQGTLVTVSA

SEQ ID NO: 1752 - protein, 119 aa, Artificial Sequence
  source: /note="Description of Artificial Sequence: Synthetic heavy chain variable domain"
QVQLKQSGPGLVQPSQSLSITCTVSGFSLTNYGVHWVRQSPGKGLEWLGEIWSGGNTDYNTPFTSRLSINKDNSKSQVFFKMNSLQSNDTAIYYCARALTYYDYEFAYWGQGTLVTVSA

SEQ ID NO: 1753 - protein, 119 aa, Artificial Sequence
  source: /note="Description of Artificial Sequence: Synthetic heavy chain variable domain"
QVQLKQSGPGLVQPSQSLSITCTVSGFSLTNYGVHWVRQSPGKGLEWLGGIWSGGNTDYNTPFTSRLSINKDNSKSQVFFKMNSLQSNDTAIYYCARALTYYDYEFAYWGQGTLVTVSA

SEQ ID NO: 1754 - protein, 119 aa, Artificial Sequence
  source: /note="Description of Artificial Sequence: Synthetic heavy chain variable domain"
QVQLKQSGPGLVQPSQSLSITCTVSGFSLTNYGVHWVRQSPGKGLEWLGHIWSGGNTDYNTPFTSRLSINKDNSKSQVFFKMNSLQSNDTAIYYCARALTYYDYEFAYWGQGTLVTVSA

SEQ ID NO: 1755 - protein, 119 aa, Artificial Sequence
  source: /note="Description of Artificial Sequence: Synthetic heavy chain variable domain"
QVQLKQSGPGLVQPSQSLSITCTVSGFSLTNYGVHWVRQSPGKGLEWLGIIWSGGNTDYNTPFTSRLSINKDNSKSQVFFKMNSLQSNDTAIYYCARALTYYDYEFAYWGQGTLVTVSA

SEQ ID NO: 1756 - protein, 119 aa, Artificial Sequence
  source: /note="Description of Artificial Sequence: Synthetic heavy chain variable domain"
QVQLKQSGPGLVQPSQSLSITCTVSGFSLTNYGVHWVRQSPGKGLEWLGKIWSGGNTDYNTPFTSRLSINKDNSKSQVFFKMNSLQSNDTAIYYCARALTYYDYEFAYWGQGTLVTVSA

SEQ ID NO: 1757 - protein, 119 aa, Artificial Sequence
  source: /note="Description of Artificial Sequence: Synthetic heavy chain variable domain"
QVQLKQSGPGLVQPSQSLSITCTVSGFSLTNYGVHWVRQSPGKGLEWLGLIWSGGNTDYNTPFTSRLSINKDNSKSQVFFKMNSLQSNDTAIYYCARALTYYDYEFAYWGQGTLVTVSA

SEQ ID NO: 1758 - protein, 119 aa, Artificial Sequence
  source: /note="Description of Artificial Sequence: Synthetic heavy chain variable domain"
QVQLKQSGPGLVQPSQSLSITCTVSGFSLTNYGVHWVRQSPGKGLEWLGNIWSGGNTDYNTPFTSRLSINKDNSKSQVFFKMNSLQSNDTAIYYCARALTYYDYEFAYWGQGTLVTVSA

SEQ ID NO: 1759 - protein, 119 aa, Artificial Sequence
  source: /note="Description of Artificial Sequence: Synthetic heavy chain variable domain"
QVQLKQSGPGLVQPSQSLSITCTVSGFSLTNYGVHWVRQSPGKGLEWLGQIWSGGNTDYNTPFTSRLSINKDNSKSQVFFKMNSLQSNDTAIYYCARALTYYDYEFAYWGQGTLVTVSA

SEQ ID NO: 1760 - protein, 119 aa, Artificial Sequence
  source: /note="Description of Artificial Sequence: Synthetic heavy chain variable domain"
QVQLKQSGPGLVQPSQSLSITCTVSGFSLTNYGVHWVRQSPGKGLEWLGTIWSGGNTDYNTPFTSRLSINKDNSKSQVFFKMNSLQSNDTAIYYCARALTYYDYEFAYWGQGTLVTVSA

SEQ ID NO: 1761 - protein, 119 aa, Artificial Sequence
  source: /note="Description of Artificial Sequence: Synthetic heavy chain variable domain"
QVQLKQSGPGLVQPSQSLSITCTVSGFSLTNYGVHWVRQSPGKGLEWLGVAWSGGNTDYNTPFTSRLSINKDNSKSQVFFKMNSLQSNDTAIYYCARALTYYDYEFAYWGQGTLVTVSA

SEQ ID NO: 1762 - protein, 119 aa, Artificial Sequence
  source: /note="Description of Artificial Sequence: Synthetic heavy chain variable domain"
QVQLKQSGPGLVQPSQSLSITCTVSGFSLTNYGVHWVRQSPGKGLEWLGVCWSGGNTDYNTPFTSRLSINKDNSKSQVFFKMNSLQSNDTAIYYCARALTYYDYEFAYWGQGTLVTVSA

SEQ ID NO: 1763 - protein, 119 aa, Artificial Sequence
  source: /note="Description of Artificial Sequence: Synthetic heavy chain variable domain"
QVQLKQSGPGLVQPSQSLSITCTVSGFSLTNYGVHWVRQSPGKGLEWLGVEWSGGNTDYNTPFTSRLSINKDNSKSQVFFKMNSLQSNDTAIYYCARALTYYDYEFAYWGQGTLVTVSA

SEQ ID NO: 1764 - protein, 119 aa, Artificial Sequence
  source: /note="Description of Artificial Sequence: Synthetic heavy chain variable domain"
QVQLKQSGPGLVQPSQSLSITCTVSGFSLTNYGVHWVRQSPGKGLEWLGVGWSGGNTDYNTPFTSRLSINKDNSKSQVFFKMNSLQSNDTAIYYCARALTYYDYEFAYWGQGTLVTVSA

SEQ ID NO: 1765 - protein, 119 aa, Artificial Sequence
  source: /note="Description of Artificial Sequence: Synthetic heavy chain variable domain"
QVQLKQSGPGLVQPSQSLSITCTVSGFSLTNYGVHWVRQSPGKGLEWLGVHWSGGNTDYNTPFTSRLSINKDNSKSQVFFKMNSLQSNDTAIYYCARALTYYDYEFAYWGQGTLVTVSA

SEQ ID NO: 1766 - protein, 119 aa, Artificial Sequence
  source: /note="Description of Artificial Sequence: Synthetic heavy chain variable domain"
QVQLKQSGPGLVQPSQSLSITCTVSGFSLTNYGVHWVRQSPGKGLEWLGVIISGGNTDYNTPFTSRLSINKDNSKSQVFFKMNSLQSNDTAIYYCARALTYYDYEFAYWGQGTLVTVSA

SEQ ID NO: 1767 - protein, 119 aa, Artificial Sequence
  source: /note="Description of Artificial Sequence: Synthetic heavy chain variable domain"
QVQLKQSGPGLVQPSQSLSITCTVSGFSLTNYGVHWVRQSPGKGLEWLGVINSGGNTDYNTPFTSRLSINKDNSKSQVFFKMNSLQSNDTAIYYCARALTYYDYEFAYWGQGTLVTVSA

SEQ ID NO: 1768 - protein, 119 aa, Artificial Sequence
  source: /note="Description of Artificial Sequence: Synthetic heavy chain variable domain"
QVQLKQSGPGLVQPSQSLSITCTVSGFSLTNYGVHWVRQSPGKGLEWLGVIWAGGNTDYNTPFTSRLSINKDNSKSQVFFKMNSLQSNDTAIYYCARALTYYDYEFAYWGQGTLVTVSA

SEQ ID NO: 1769 - protein, 119 aa, Artificial Sequence
  source: /note="Description of Artificial Sequence: Synthetic heavy chain variable domain"
QVQLKQSGPGLVQPSQSLSITCTVSGFSLTNYGVHWVRQSPGKGLEWLGVIWCGGNTDYNTPFTSRLSINKDNSKSQVFFKMNSLQSNDTAIYYCARALTYYDYEFAYWGQGTLVTVSA

SEQ ID NO: 1770 - protein, 119 aa, Artificial Sequence
  source: /note="Description of Artificial Sequence: Synthetic heavy chain variable domain"
QVQLKQSGPGLVQPSQSLSITCTVSGFSLTNYGVHWVRQSPGKGLEWLGVIWGGGNTDYNTPFTSRLSINKDNSKSQVFFKMNSLQSNDTAIYYCARALTYYDDEFAYWGPGTLVTVSA

SEQ ID NO: 1771 - protein, 231 aa, Artificial Sequence
  source: /note="Description of Artificial Sequence: Synthetic heavy chain variable domain"
PKSCDKTHTCPPCPAPELLGGPSVFLFPPKPKDTLMISRTPEVTCVVVDVSHEDPEVKFNWYVDGVEVHNAKTKPREEQYNSTYRVVSVLTVLHQDWLNGKEYKCKVSNKALPAPIEKTISKAKGQPREPQVYTLPPSRDELTKNQVSLTCLVKGFYPSDIAVEWESNGQPENNYKTTPPVLDSDGSFFLYSKLTVDKSRWQQGNVFSCSVMHEALHNHYTQKSLSLSPGK

SEQ ID NO: 1772 - protein, 104 aa, Artificial Sequence
  source: /note="Description of Artificial Sequence: Synthetic heavy chain variable domain"
QPKAAPSVTLFPPSSEELQANKATLVCLISDFYPGAVTVAWKADSSPVKAGVETTTPSKQSNNKYAASSYLSLTPEQWKSHRSYSCQVTHEGSTVEKTVAPTEC

SEQ ID NO: 1773 - protein, 119 aa, Artificial Sequence
  source: /note="Description of Artificial Sequence: Synthetic heavy chain variable domain"
QVQLKQSGPGLVQPSQSLSITCAVSGFSLTNYGVHWVRQSPGKGLEWLGVIWSGGNTDYNTPFTSRLSINKDNSKSQVFFKMNSLQSNDTAIYYCARALTYYDYEFAYWGQGTLVTVSA

SEQ ID NO: 1774 - protein, 119 aa, Artificial Sequence
  source: /note="Description of Artificial Sequence: Synthetic heavy chain variable domain"
QVQLKQSGPGLVQPSQSLSITCCVSGFSLTNYGVHWVRQSPGKGLEWLGVIWSGGNTDYNTPFTSRLSINKDNSKSQVFFKMNSLQSNDTAIYYCARALTYYDYEFAYWGQGTLVTVSA

SEQ ID NO: 1775 - protein, 119 aa, Artificial Sequence
  source: /note="Description of Artificial Sequence: Synthetic heavy chain variable domain"
QVQLKQSGPGLVQPSQSLSITCEVSGFSLTNYGVHWVRQSPGKGLEWLGVIWSGGNTDYNTPFTSRLSINKDNSKSQVFFKMNSLQSNDTAIYYCARALTYYDYEFAYWGQGTLVTVSA

SEQ ID NO: 1776 - protein, 119 aa, Artificial Sequence
  source: /note="Description of Artificial Sequence: Synthetic heavy chain variable domain"
QVQLKQSGPGLVQPSQSLSITCGVSGFSLTNYGVHWVRQSPGKGLEWLGVIWSGGNTDYNTPFTSRLSINKDNSKSQVFFKMNSLQSNDTAIYYCARALTYYDYEFAYWGQGTLVTVSA

SEQ ID NO: 1777 - protein, 119 aa, Artificial Sequence
  source: /note="Description of Artificial Sequence: Synthetic heavy chain variable domain"
QVQLKQSGPGLVQPSQSLSITCHVSGFSLTNYGVHWVRQSPGKGLEWLGVIWSGGNTDYNTPFTSRLSINKDNSKSQVFFKMNSLQSNDTAIYYCARALTYYDYEFAYWGQGTLVTVSA

SEQ ID NO: 1778 - protein, 119 aa, Artificial Sequence
  source: /note="Description of Artificial Sequence: Synthetic heavy chain variable domain"
QVQLKQSGPGLVQPSQSLSITCIVSGFSLTNYGVHWVRQSPGKGLEWLGVIWSGGNTDYNTPFTSRLSINKDNSKSQVFFKMNSLQSNDTAIYYCARALTYYDYEFAYWGQGTLVTVSA

SEQ ID NO: 1779 - protein, 119 aa, Artificial Sequence
  source: /note="Description of Artificial Sequence: Synthetic heavy chain variable domain"
QVQLKQSGPGLVQPSQSLSITCKVSGFSLTNYGVHWVRQSPGKGLEWLGVIWSGGNTDYNTPFTSRLSINKDNSKSQVFFKMNSLQSNDTAIYYCARALTYYDYEFAYWGQGTLVTVSA

SEQ ID NO: 1780 - protein, 119 aa, Artificial Sequence
  source: /note="Description of Artificial Sequence: Synthetic heavy chain variable domain"
QVQLKQSGPGLVQPSQSLSITCLVSGFSLTNYGVHWVRQSPGKGLEWLGVIWSGGNTDYNTPFTSRLSINKDNSKSQVFFKMNSLQSNDTAIYYCARALTYYDYEFAYWGQGTLVTVSA

SEQ ID NO: 1781 - protein, 119 aa, Artificial Sequence
  source: /note="Description of Artificial Sequence: Synthetic heavy chain variable domain"
QVQLKQSGPGLVQPSQSLSITCMVSGFSLTNYGVHWVRQSPGKGLEWLGVIWSGGNTDYNTPFTSRLSINKDNSKSQVFFKMNSLQSNDTAIYYCARALTYYDYEFAYWGQGTLVTVSA

SEQ ID NO: 1782 - protein, 119 aa, Artificial Sequence
  source: /note="Description of Artificial Sequence: Synthetic heavy chain variable domain"
QVQLKQSGPGLVQPSQSLSITCNVSGFSLTNYGVHWVRQSPGKGLEWLGVIWSGGNTDYNTPFTSRLSINKDNSKSQVFFKMNSLQSNDTAIYYCARALTYYDYEFAYWGQGTLVTVSA

SEQ ID NO: 1783 - protein, 119 aa, Artificial Sequence
  source: /note="Description of Artificial Sequence: Synthetic heavy chain variable domain"
QVQLKQSGPGLVQPSQSLSITCPVSGFSLTNYGVHWVRQSPGKGLEWLGVIWSGGNTDYNTPFTSRLSINKDNSKSQVFFKMNSLQSNDTAIYYCARALTYYDYEFAYWGQGTLVTVSA

SEQ ID NO: 1784 - protein, 119 aa, Artificial Sequence
  source: /note="Description of Artificial Sequence: Synthetic heavy chain variable domain"
QVQLKQSGPGLVQPSQSLSITCRVSGFSLTNYGVHWVRQSPGKGLEWLGVIWSGGNTDYNTPFTSRLSINKDNSKSQVFFKMNSLQSNDTAIYYCARALTYYDYEFAYWGQGTLVTVSA

SEQ ID NO: 1785 - protein, 119 aa, Artificial Sequence
  source: /note="Description of Artificial Sequence: Synthetic heavy chain variable domain"
QVQLKQSGPGLVQPSQSLSITCSVSGFSLTNYGVHWVRQSPGKGLEWLGVIWSGGNTDYNTPFTSRLSINKDNSKSQVFFKMNSLQSNDTAIYYCARALTYYDYEFAYWGQGTLVTVSA

SEQ ID NO: 1786 - protein, 119 aa, Artificial Sequence
  source: /note="Description of Artificial Sequence: Synthetic heavy chain variable domain"
QVQLKQSGPGLVQPSQSLSITCTASGFSLTNYGVHWVRQSPGKGLEWLGVIWSGGNTDYNTPFTSRLSINKDNSKSQVFFKMNSLQSNDTAIYYCARALTYYDYEFAYWGQGTLVTVSA

SEQ ID NO: 1787 - protein, 119 aa, Artificial Sequence
  source: /note="Description of Artificial Sequence: Synthetic heavy chain variable domain"
QVQLKQSGPGLVQPSQSLSITCTESGFSLTNYGVHWVRQSPGKGLEWLGVIWSGGNTDYNTPFTSRLSINKDNSKSQVFFKMNSLQSNDTAIYYCARALTYYDYEFAYWGQGTLVTVSA

SEQ ID NO: 1788 - protein, 119 aa, Artificial Sequence
  source: /note="Description of Artificial Sequence: Synthetic heavy chain variable domain"
QVQLKQSGPGLVQPSQSLSITCTESGRSLTNYGVHWVRQSPGKGLEWLGVIWSGGNTDYNTPFTSRLSINKDNSKSQVFFKMNSLQSNDTAIYYCAHALTYYDYEFAYWGPGTLVTVSA

SEQ ID NO: 1789 - protein, 119 aa, Artificial Sequence
  source: /note="Description of Artificial Sequence: Synthetic heavy chain variable domain"
QVQLKQSGPGLVQPSQSLSITCTFSGFSLTNYGVHWVRQSPGKGLEWLGVIWSGGNTDYNTPFTSRLSINKDNSKSQVFFKMNSLQSNDTAIYYCARALTYYDYEFAYWGQGTLVTVSA

SEQ ID NO: 1790 - protein, 119 aa, Artificial Sequence
  source: /note="Description of Artificial Sequence: Synthetic heavy chain variable domain"
QVQLKQSGPGLVQPSQSLSITCTGSGFSLTNYGVHWVRQSPGKGLEWLGVIWSGGNTDYNTPFTSRLSINKDNSKSQVFFKMNSLQSNDTAIYYCARALTYYDYEFAYWGQGTLVTVSA

SEQ ID NO: 1791 - protein, 119 aa, Artificial Sequence
  source: /note="Description of Artificial Sequence: Synthetic heavy chain variable domain"
QVQLKQSGPGLVQPSQSLSITCTISGFSLTNYGVHWVRQSPGKGLEWLGVIWSGGNTDYNTPFTSRLSINKDNSKSQVFFKMNSLQSNDTAIYYCARALTYYDYEFAYWGQGTLVTVSA

SEQ ID NO: 1792 - protein, 119 aa, Artificial Sequence
  source: /note="Description of Artificial Sequence: Synthetic heavy chain variable domain"
QVQLKQSGPGLVQPSQSLSITCTLSGFSLTNYGVHWVRQSPGKGLEWLGVIWSGGNTDYNTPFTSRLSINKDNSKSQVFFKMNSLQSNDTAIYYCARALTYYDYEFAYWGQGTLVTVSA

SEQ ID NO: 1793 - protein, 119 aa, Artificial Sequence
  source: /note="Description of Artificial Sequence: Synthetic heavy chain variable domain"
QVQLKQSGPGLVQPSQSLSITCTMSGFSLTNYGVHWVRQSPGKGLEWLGVIWSGGNTDYNTPFTSRLSINKDNSKSQVFFKMNSLQSNDTAIYYCARALTYYDYEFAYWGQGTLVTVSA

SEQ ID NO: 1794 - protein, 119 aa, Artificial Sequence
  source: /note="Description of Artificial Sequence: Synthetic heavy chain variable domain"
QVQLKQSGPGLVQPSQSLSITCTPSGFSLTNYGVHWVRQSPGKGLEWLGVIWSGGNTDYNTPFTSRLSINKDNSKSQVFFKMNSLQSNDTAIYYCARALTYYDYEFAYWGQGTLVTVSA

SEQ ID NO: 1795 - protein, 119 aa, Artificial Sequence
  source: /note="Description of Artificial Sequence: Synthetic heavy chain variable domain"
QVQLKQSGPGLVQPSQSLSITCTRSGFSLTNYGVHWVRQSPGKGLEWLGVIWSGGNTDYNTPFTSRLSINKDNSKSQVFFKMNSLQSNDTAIYYCARALTYYDYEFAYWGQGTLVTVSA

SEQ ID NO: 1796 - protein, 119 aa, Artificial Sequence
  source: /note="Description of Artificial Sequence: Synthetic heavy chain variable domain"
QVQLKQSGPGLVQPSQSLSITCTSSGFSLTNYGVHWVRQSPGKGLEWLGVIWSGGNTDYNTPFTSRLSINKDNSKSQVFFKMNSLQSNDTAIYYCARALTYYDYEFAYWGQGTLVTVSA

SEQ ID NO: 1797 - protein, 119 aa, Artificial Sequence
  source: /note="Description of Artificial Sequence: Synthetic heavy chain variable domain"
QVQLKQSGPGLVQPSQSLSITCTTSGFSLTNYGVHWVRQSPGKGLEWLGVIWSGGNTDYNTPFTSRLSINKDNSKSQVFFKMNSLQSNDTAIYYCARALTYYDYEFAYWGQGTLVTVSA

SEQ ID NO: 1798 - protein, 119 aa, Artificial Sequence
  source: /note="Description of Artificial Sequence: Synthetic heavy chain variable domain"
QVQLKQSGPGLVQPSQSLSITCTVAGFSLTNYGVHWVRQSPGKGLEWLGVIWSGGNTDYNTPFTSRLSINKDNSKSQVFFKMNSLQSNDTAIYYCARALTYYDYEFAYWGQGTLVTVSA

SEQ ID NO: 1799 - protein, 119 aa, Artificial Sequence
  source: /note="Description of Artificial Sequence: Synthetic heavy chain variable domain"
QVQLKQSGPGLVQPSQSLSITCTVCGFSLTNYGVHWVRQSPGKGLEWLGVIWSGGNTDYNTPFTSRLSINKDNSKSQVFFKMNSLQSNDTAIYYCARALTYYDDEFAYWGQGTLVTVSA

SEQ ID NO: 1800 - protein, 119 aa, Artificial Sequence
  source: /note="Description of Artificial Sequence: Synthetic heavy chain variable domain"
QVQLKQSGPGLVQPSQSLSITCTVCGFSLTNYGVHWVRQSPGKGLEWLGVIWSGGNTDYNTPFTSRLSINKDNSKSQVFFKMNSLQSNDTAIYYCARALTYYDYEFAYWGPGTLVTVSA

SEQ ID NO: 1801 - protein, 119 aa, Artificial Sequence
  source: /note="Description of Artificial Sequence: Synthetic heavy chain variable domain"
QVQLKQSGPGLVQPSQSLSITCTVCGFSLTNYGVHWVRQSPGKGLEWLGVIWSGGNTDYNTPFTSRLSINKDNSKSQVFFKMNSLQSNDTAIYYCARALTYYDYEFAYWGQGTLVTVSA

SEQ ID NO: 1802 - protein, 119 aa, Artificial Sequence
  source: /note="Description of Artificial Sequence: Synthetic heavy chain variable domain"
QVQLKQSGPGLVQPSQSLSITCTVDGFSLTNYGVHWVRQSPGKGLEWLGVIWSGGNTDYNTPFTSRLSINKDNSKSQVFFKMNSLQSNDTAIYYCARALTYYDYEFAYWGQGTLVTVSA

SEQ ID NO: 1803 - protein, 119 aa, Artificial Sequence
  source: /note="Description of Artificial Sequence: Synthetic heavy chain variable domain"
QVQLKQSGPGLVQPSQSLSITCTVEGFSLTNYGVHWVRQSPGKGLEWLGVIWSGGNTDYNTPFTSRLSINKDNSKSQVFFKMNSLQSNDTAIYYCARALTYYDYEFAYWGQGTLVTVSA

SEQ ID NO: 1804 - protein, 119 aa, Artificial Sequence
  source: /note="Description of Artificial Sequence: Synthetic heavy chain variable domain"
QVQLKQSGPGLVQPSQSLSITCTVFGFSLTNYGVHWVRQSPGKGLEWLGVIWSGGNTDYNTPFTSRLSINKDNSKSQVFFKMNSLQSNDTAIYYCARALTYYDYEFAYWGQGTLVTVSA

SEQ ID NO: 1805 - protein, 119 aa, Artificial Sequence
  source: /note="Description of Artificial Sequence: Synthetic heavy chain variable domain"
QVQLKQSGPGLVQPSQSLSITCTVGGFSLTNYGVHWVRQSPGKGLEWLGVIWSGGNTDYNTPFTSRLSINKDNSKSQVFFKMNSLQSNDTAIYYCARALTYYDYEFAYWGQGTLVTVSA

SEQ ID NO: 1806 - protein, 119 aa, Artificial Sequence
  source: /note="Description of Artificial Sequence: Synthetic heavy chain variable domain"
QVQLKQSGPGLVQPSQSLSITCTVHGFSLTNYGVHWVRQSPGKGLEWLGVIWSGGNTDYNTPFTSRLSINKDNSKSQVFFKMNSLQSNDTAIYYCARALTYYDYEFAYWGQGTLVTVSA

SEQ ID NO: 1807 - protein, 119 aa, Artificial Sequence
  source: /note="Description of Artificial Sequence: Synthetic heavy chain variable domain"
QVQLKQSGPGLVQPSQSLSITCTVIGFSLTNYGVHWVRQSPGKGLEWLGVIWSGGNTDYNTPFTSRLSINKDNSKSQVFFKMNSLQSNDTAIYYCARALTYYDYEFAYWGQGTLVTVSA

SEQ ID NO: 1808 - protein, 119 aa, Artificial Sequence
  source: /note="Description of Artificial Sequence: Synthetic heavy chain variable domain"
QVQLKQSGPGLVQPSQSLSITCTVLGFSLTNYGVHWVRQSPGKGLEWLGVIWSGGNTDYNTPFTSRLSINKDNSKSQVFFKMNSLQSNDTAIYYCARALTYYDYEFAYWGQGTLVTVSA

SEQ ID NO: 1809 - protein, 119 aa, Artificial Sequence
  source: /note="Description of Artificial Sequence: Synthetic heavy chain variable domain"
QVQLKQSGPGLVQPSQSLSITCTVMGFSLTNYGVHWVRQSPGKGLEWLGVIWSGGNTDYNTPFTSRLSINKDNSKSQVFFKMNSLQSNDTAIYYCARALTYYDYEFAYWGQGTLVTVSA

SEQ ID NO: 1810 - protein, 119 aa, Artificial Sequence
  source: /note="Description of Artificial Sequence: Synthetic heavy chain variable domain"
QVQLKQSGPGLVQPSQSLSITCTVPGFSLTNYGVHWVRQSPGKGLEWLGVIWSGGNTDYNTPFTSRLSINKDNSKSQVFFKMNSLQSNDTAIYYCARALTYYDYEFAYWGQGTLVTVSA

SEQ ID NO: 1811 - protein, 119 aa, Artificial Sequence
  source: /note="Description of Artificial Sequence: Synthetic heavy chain variable domain"
QVQLKQSGPGLVQPSQSLSITCTVQGFSLTNYGVHWVRQSPGKGLEWLGVIWSGGNTDYNTPFTSRLSINKDNSKSQVFFKMNSLQSNDTAIYYCARALTYYDYEFAYWGQGTLVTVSA

SEQ ID NO: 1812 - protein, 119 aa, Artificial Sequence
  source: /note="Description of Artificial Sequence: Synthetic heavy chain variable domain"
QVQLKQSGPGLVQPSQSLSITCTVRGFSLTNYGVHWVRQSPGKGLEWLGVIWSGGNTDYNTPFTSRLSINKDNSKSQVFFKMNSLQSNDTAIYYCARALTYYDYEFAYWGQGTLVTVSA

SEQ ID NO: 1813 - protein, 119 aa, Artificial Sequence
  source: /note="Description of Artificial Sequence: Synthetic heavy chain variable domain"
QVQLKQSGPGLVQPSQSLSITCTVSDFSLTNYGVHWVRQSPGKGLEWLGVIWSGGNTDYNTPFTSRLSINKDNSKSQVFFKMNSLQSNDTAIYYCARALTYYDYEFAYWGQGTLVTVSA

SEQ ID NO: 1814 - protein, 119 aa, Artificial Sequence
  source: /note="Description of Artificial Sequence: Synthetic heavy chain variable domain"
QVQLKQSGPGLVQPSQSLSITCTVSFFSLTNYGVHWVRQSPGKGLEWLGVIWSGGNTDYNTPFTSRLSINKDNSKSQVFFKMNSLQSNDTAIYYCARALTYYDYEFAYWGQGTLVTVSA

SEQ ID NO: 1815 - protein, 119 aa, Artificial Sequence
  source: /note="Description of Artificial Sequence: Synthetic heavy chain variable domain"
QVQLKQSGPGLVQPSQSLSITCTVSGASLTNYGVHWVRQSPGKGLEWLGVIWSGGNTDYNTPFTSRLSINKDNSKSQVFFKMNSLQSNDTAIYYCARALTYYDYEFAYWGQGTLVTVSA

SEQ ID NO: 1816 - protein, 119 aa, Artificial Sequence
  source: /note="Description of Artificial Sequence: Synthetic heavy chain variable domain"
QVQLKQSGPGLVQPSQSLSITCTVSGDSLTNYGVHWVRQSPGKGLEWLGVIWSGGNTDYNTPFTSRLSINKDNSKSQVFFKMNSLQSNDTAIYYCARALTYYDYEFAYWGQGTLVTVSA

SEQ ID NO: 1817 - protein, 119 aa, Artificial Sequence
  source: /note="Description of Artificial Sequence: Synthetic heavy chain variable domain"
QVQLKQSGPGLVQPSQSLSITCTVSGESLTNYGVHWVRQSPGKGLEWLGVIWSGGNTDYNTPFTSRLSINKDNSKSQVFFKMNSLQSNDTAIYYCARALTYYDYEFAYWGQGTLVTVSA

SEQ ID NO: 1818 - protein, 119 aa, Artificial Sequence
  source: /note="Description of Artificial Sequence: Synthetic heavy chain variable domain"
QVQLKQSGPGLVQPSQSLSITCTVSGFALTNYGVHWVRQSPGKGLEWLGVIWSGGNTDYNTPFTSRLSINKDNSKSQVFFKMNSLQSNDTAIYYCARALTYYDYEFAYWGQGTLVTVSA

SEQ ID NO: 1819 - protein, 119 aa, Artificial Sequence
  source: /note="Description of Artificial Sequence: Synthetic heavy chain variable domain"
QVQLKQSGPGLVQPSQSLSITCTVSGFCLTNYGVHWVRQSPGKGLEWLGVIWSGGNTDYNTPFTSRLSINKDNSKSQVFFKMNSLQSNDTAIYYCARALTYYDYEFAYWGQGTLVTVSA

SEQ ID NO: 1820 - protein, 119 aa, Artificial Sequence
  source: /note="Description of Artificial Sequence: Synthetic heavy chain variable domain"
QVQLKQSGPGLVQPSQSLSITCTVSGFDLTNYGVHWVRQSPGKGLEWLGVIWSGGNTDYNTPFTSRLSINKDNSKSQVFFKMNSLQSNDTAIYYCARALTYYDYEFAYWGQGTLVTVSA

SEQ ID NO: 1821 - protein, 119 aa, Artificial Sequence
  source: /note="Description of Artificial Sequence: Synthetic heavy chain variable domain"
QVQLKQSGPGLVQPSQSLSITCTVSGFHLTNYGVHWVRQSPGKGLEWLGVIWSGGNTDYNTPFTSRLSINKDNSKSQVFFKMNSLQSNDTAIYYCARALTYYDYEFAYWGQGTLVTVSA

SEQ ID NO: 1822 - protein, 119 aa, Artificial Sequence
  source: /note="Description of Artificial Sequence: Synthetic heavy chain variable domain"
QVQLKQSGPGLVQPSQSLSITCTVSGFILTNYGVHWVRQSPGKGLEWLGVIWSGGNTDYNTPFTSRLSINKDNSKSQVFFKMNSLQSNDTAIYYCARALTYYDYEFAYWGQGTLVTVSA

SEQ ID NO: 1823 - protein, 119 aa, Artificial Sequence
  source: /note="Description of Artificial Sequence: Synthetic heavy chain variable domain"
QVQLKQSGPGLVQPSQSLSITCTVSGFKLTNYGVHWVRQSPGKGLEWLGVIWSGGNTDYNTPFTSRLSINKDNSKSQVFFKMNSLQSNDTAIYYCARALTYYDYEFAYWGQGTLVTVSA

SEQ ID NO: 1824 - protein, 119 aa, Artificial Sequence
  source: /note="Description of Artificial Sequence: Synthetic heavy chain variable domain"
QVQLKQSGPGLVQPSQSLSITCTVSGFLLTNYGVHWVRQSPGKGLEWLGVIWSGGNTDYNTPFTSRLSINKDNSKSQVFFKMNSLQSNDTAIYYCARALTYYDYEFAYWGQGTLVTVSA

SEQ ID NO: 1825 - protein, 119 aa, Artificial Sequence
  source: /note="Description of Artificial Sequence: Synthetic heavy chain variable domain"
QVQLKQSGPGLVQPSQSLSITCTVSGFMLTNYGVHWVRQSPGKGLEWLGVIWSGGNTDYNTPFTSRLSINKDNSKSQVFFKMNSLQSNDTAIYYCARALTYYDYEFAYWGQGTLVTVSA

SEQ ID NO: 1826 - protein, 119 aa, Artificial Sequence
  source: /note="Description of Artificial Sequence: Synthetic heavy chain variable domain"
QVQLKQSGPGLVQPSQSLSITCTVSGFPLTNYGVHWVRQSPGKGLEWLGVIWSGGNTDYNTPFTSRLSINKDNSKSQVFFKMNSLQSNDTAIYYCARALTYYDYEFAYWGQGTLVTVSA

SEQ ID NO: 1827 - protein, 119 aa, Artificial Sequence
  source: /note="Description of Artificial Sequence: Synthetic heavy chain variable domain"
QVQLKQSGPGLVQPSQSLSITCTVSGFQLTNYGVHWVRQSPGKGLEWLGVIWSGGNTDYNTPFTSRLSINKDNSKSQVFFKMNSLQSNDTAIYYCARALTYYDYEFAYWGQGTLVTVSA

SEQ ID NO: 1828 - protein, 119 aa, Artificial Sequence
  source: /note="Description of Artificial Sequence: Synthetic heavy chain variable domain"
QVQLKQSGPGLVQPSQSLSITCTVSGFRLTNYGVHWVRQSPGKGLEWLGVIWSGGNTDYNTPFTSRLSINKDNSKSQVFFKMNSLQSNDTAIYYCARALTYYDYEFAYWGQGTLVTVSA

SEQ ID NO: 1829 - protein, 119 aa, Artificial Sequence
  source: /note="Description of Artificial Sequence: Synthetic heavy chain variable domain"
QVQLKQSGPGLVQPSQSLSITCTVSGFSATNYGVHWVRQSPGKGLEWLGVIWSGGNTDYNTPFTSRLSINKDNSKSQVFFKMNSLQSNDTAIYYCARALTYYDYEFAYWGQGTLVTVSA

SEQ ID NO: 1830 - protein, 119 aa, Artificial Sequence
  source: /note="Description of Artificial Sequence: Synthetic heavy chain variable domain"
QVQLKQSGPGLVQPSQSLSITCTVSGFSDTNYGVHWVRQSPGKGLEWLGVIWSGGNTDYNTPFTSRLSINKDNSKSQVFFKMNSLQSNDTAIYYCARALTYYDYEFAYWGQGTLVTVSA

SEQ ID NO: 1831 - protein, 119 aa, Artificial Sequence
  source: /note="Description of Artificial Sequence: Synthetic heavy chain variable domain"
QVQLKQSGPGLVQPSQSLSITCTVSGFSGTNYGVHWVRQSPGKGLEWLGVIWSGGNTDYNTPFTSRLSINKDNSKSQVFFKMNSLQSNDTAIYYCARALTYYDYEFAYWGQGTLVTVSA

SEQ ID NO: 1832 - protein, 119 aa, Artificial Sequence
  source: /note="Description of Artificial Sequence: Synthetic heavy chain variable domain"
QVQLKQSGPGLVQPSQSLSITCTVSGFSHTNYGVHWVRQSPGKGLEWLGVIWSGGNTDYNTPFTSRLSINKDNSKSQVFFKMNSLQSNDTAIYYCARALTYYDYEFAYWGQGTLVTVSA

SEQ ID NO: 1833 - protein, 119 aa, Artificial Sequence
  source: /note="Description of Artificial Sequence: Synthetic heavy chain variable domain"
QVQLKQSGPGLVQPSQSLSITCTVSGFSITNYGVHWVRQSPGKGLEWLGVIWSGGNTDYNTPFTSRLSINKDNSKSQVFFKMNSLQSNDTAIYYCARALTYYDYEFAYWGQGTLVTVSA

SEQ ID NO: 1834 - protein, 119 aa, Artificial Sequence
  source: /note="Description of Artificial Sequence: Synthetic heavy chain variable domain"
QVQLKQSGPGLVQPSQSLSITCTVSGFSKTNYGVHWVRQSPGKGLEWLGVIWSGGNTDYNTPFTSRLSINKDNSKSQVFFKMNSLQSNDTAIYYCARALTYYDYEFAYWGQGTLVTVSA

SEQ ID NO: 1835 - protein, 119 aa, Artificial Sequence
  source: /note="Description of Artificial Sequence: Synthetic heavy chain variable domain"
QVQLKQSGPGLVQPSQSLSITCTVSGFSLDNYGVHWVRQSPGKGLEWLGVIWSGGNTDYNTPFTSRLSINKDNSKSQVFFKMNSLQSNDTAIYYCARALTYYDYEFAYWGQGTLVTVSA

SEQ ID NO: 1836 - protein, 119 aa, Artificial Sequence
  source: /note="Description of Artificial Sequence: Synthetic heavy chain variable domain"
QVQLKQSGPGLVQPSQSLSITCTVSGFSLFNYGVHWVRQSPGKGLEWLGVIWGGGNTDYNTPFTSRLSINKDNSKSQVFFKMNSLQSNDTAIYYCARALTYYDDEFAYWGPGTLVTVSA

SEQ ID NO: 1837 - protein, 119 aa, Artificial Sequence
  source: /note="Description of Artificial Sequence: Synthetic heavy chain variable domain"
QVQLKQSGPGLVQPSQSLSITCTVSGFSLTNYGVHWVRQSPGKGLEWLGVIWSGGNTDYNTPFTSRLSINKDNSKSQVFFKMNSLQSNDTAIYYCARALTYYDDEFAYWGQGTLVTVSA

SEQ ID NO: 1838 - protein, 119 aa, Artificial Sequence
  source: /note="Description of Artificial Sequence: Synthetic heavy chain variable domain"
QVQLKQSGPGLVQPSQSLSITCTVSGFSLTNYGVHWVRQSPGKGLEWLGVIWSGGNTDYNTPFTSRLSINKDNSKSQVFFKMNSLQSNDTAIYYCARALTYYDFEFAYWGQGTLVTVSA

SEQ ID NO: 1839 - protein, 119 aa, Artificial Sequence
  source: /note="Description of Artificial Sequence: Synthetic heavy chain variable domain"
QVQLKQSGPGLVQPSQSLSITCTVSGFSLTNYGVHWVRQSPGKGLEWLGVIWSGGNTDYNTPFTSRLSINKDNSKSQVFFKMNSLQSNDTAIYYCARALTYYDHEFAYWGQGTLVTVSA

SEQ ID NO: 1840 - protein, 119 aa, Artificial Sequence
  source: /note="Description of Artificial Sequence: Synthetic heavy chain variable domain"
QVQLKQSGPGLVQPSQSLSITCTVSGFSLTNYGVHWVRQSPGKGLEWLGVIWSGGNTDYNTPFTSRLSINKDNSKSQVFFKMNSLQSNDTAIYYCARALTYYDIEFAYWGQGTLVTVSA

SEQ ID NO: 1841 - protein, 119 aa, Artificial Sequence
  source: /note="Description of Artificial Sequence: Synthetic heavy chain variable domain"
QVQLKQSGPGLVQPSQSLSITCTVSGFSLTNYGVHWVRQSPGKGLEWLGVIWSGGNTDYNTPFTSRLSINKDNSKSQVFFKMNSLQSNDTAIYYCARALTYYDLEFAYWGQGTLVTVSA

SEQ ID NO: 1842 - protein, 119 aa, Artificial Sequence
  source: /note="Description of Artificial Sequence: Synthetic heavy chain variable domain"
QVQLKQSGPGLVQPSQSLSITCTVSGFSLTNYGVHWVRQSPGKGLEWLGVIWSGGNTDYNTPFTSRLSINKDNSKSQVFFKMNSLQSNDTAIYYCARALTYYDMEFAYWGQGTLVTVSA

SEQ ID NO: 1843 - protein, 119 aa, Artificial Sequence
  source: /note="Description of Artificial Sequence: Synthetic heavy chain variable domain"
QVQLKQSGPGLVQPSQSLSITCTVSGFSLTNYGVHWVRQSPGKGLEWLGVIWSGGNTDYNTPFTSRLSINKDNSKSQVFFKMNSLQSNDTAIYYCARALTYYDSEFAYWGQGTLVTVSA

SEQ ID NO: 1844 - protein, 119 aa, Artificial Sequence
  source: /note="Description of Artificial Sequence: Synthetic heavy chain variable domain"
QVQLKQSGPGLVQPSQSLSITCTVSGFSLTNYGVHWVRQSPGKGLEWLGVIWSGGNTDYNTPFTSRLSINKDNSKSQVFFKMNSLQSNDTAIYYCARALTYYDVEFAYWGQGTLVTVSA

SEQ ID NO: 1845 - protein, 119 aa, Artificial Sequence
  source: /note="Description of Artificial Sequence: Synthetic heavy chain variable domain"
QVQLKQSGPGLVQPSQSLSITCTVSGFSLTNYGVHWVRQSPGKGLEWLGVIWSGGNTDYNTPFTSRLSINKDNSKSQVFFKMNSLQSNDTAIYYCARALTYYDYEFACWGQGTLVTVSA

SEQ ID NO: 1846 - protein, 119 aa, Artificial Sequence
  source: /note="Description of Artificial Sequence: Synthetic heavy chain variable domain"
QVQLKQSGPGLVQPSQSLSITCTVSGFSLTNYGVHWVRQSPGKGLEWLGVIWSGGNTDYNTPFTSRLSINKDNSKSQVFFKMNSLQSNDTAIYYCARALTYYDYEFAFWGQGTLVTVSA

SEQ ID NO: 1847 - protein, 119 aa, Artificial Sequence
  source: /note="Description of Artificial Sequence: Synthetic heavy chain variable domain"
QVQLKQSGPGLVQPSQSLSITCTVSGFSLTNYGVHWVRQSPGKGLEWLGVIWSGGNTDYNTPFTSRLSINKDNSKSQVFFKMNSLQSNDTAIYYCARALTYYDYEFAHWGQGTLVTVSA

SEQ ID NO: 1848 - protein, 119 aa, Artificial Sequence
  source: /note="Description of Artificial Sequence: Synthetic heavy chain variable domain"
QVQLKQSGPGLVQPSQSLSITCTVSGFSLTNYGVHWVRQSPGKGLEWLGVIWSGGNTDYNTPFTSRLSINKDNSKSQVFFKMNSLQSNDTAIYYCARALTYYDYEFAIWGQGTLVTVSA

SEQ ID NO: 1849 - protein, 119 aa, Artificial Sequence
  source: /note="Description of Artificial Sequence: Synthetic heavy chain variable domain"
QVQLKQSGPGLVQPSQSLSITCTVSGFSLTNYGVHWVRQSPGKGLEWLGVIWSGGNTDYNTPFTSRLSINKDNSKSQVFFKMNSLQSNDTAIYYCARALTYYDYEFAKWGQGTLVTVSA

SEQ ID NO: 1850 - protein, 119 aa, Artificial Sequence
  source: /note="Description of Artificial Sequence: Synthetic heavy chain variable domain"
QVQLKQSGPGLVQPSQSLSITCTVSGFSLTNYGVHWVRQSPGKGLEWLGVIWSGGNTDYNTPFTSRLSINKDNSKSQVFFKMNSLQSNDTAIYYCARALTYYDYEFALWGQGTLVTVSA

SEQ ID NO: 1851 - protein, 119 aa, Artificial Sequence
  source: /note="Description of Artificial Sequence: Synthetic heavy chain variable domain"
QVQLKQSGPGLVQPSQSLSITCTVSGFSLTNYGVHWVRQSPGKGLEWLGVIWSGGNTDYNTPFTSRLSINKDNSKSQVFFKMNSLQSNDTAIYYCARALTYYDYEFANWGQGTLVTVSA

SEQ ID NO: 1852 - protein, 119 aa, Artificial Sequence
  source: /note="Description of Artificial Sequence: Synthetic heavy chain variable domain"
QVQLKQSGPGLVQPSQSLSITCTVSGFSLTNYGVHWVRQSPGKGLEWLGVIWSGGNTDYNTPFTSRLSINKDNSKSQVFFKMNSLQSNDTAIYYCARALTYYDYEFARWGQGTLVTVSA

SEQ ID NO: 1853 - protein, 119 aa, Artificial Sequence
  source: /note="Description of Artificial Sequence: Synthetic heavy chain variable domain"
QVQLKQSGPGLVQPSQSLSITCTVSGFSLTNYGVHWVRQSPGKGLEWLGVIWSGGNTDYNTPFTSRLSINKDNSKSQVFFKMNSLQSNDTAIYYCARALTYYDYEFASWGQGTLVTVSA

SEQ ID NO: 1854 - protein, 119 aa, Artificial Sequence
  source: /note="Description of Artificial Sequence: Synthetic heavy chain variable domain"
QVQLKQSGPGLVQPSQSLSITCTVSGFSLTNYGVHWVRQSPGKGLEWLGVIWSGGNTDYNTPFTSRLSINKDNSKSQVFFKMNSLQSNDTAIYYCARALTYYDYEFATWGQGTLVTVSA

SEQ ID NO: 1855 - protein, 119 aa, Artificial Sequence
  source: /note="Description of Artificial Sequence: Synthetic heavy chain variable domain"
QVQLKQSGPGLVQPSQSLSITCTVSGFSLTNYGVHWVRQSPGKGLEWLGVIWSGGNTDYNTPFTSRLSINKDNSKSQVFFKMNSLQSNDTAIYYCARALTYYDYEFAVWGQGTLVTVSA

SEQ ID NO: 1856 - protein, 119 aa, Artificial Sequence
  source: /note="Description of Artificial Sequence: Synthetic heavy chain variable domain"
QVQLKQSGPGLVQPSQSLSITCTVSGFSLTNYGVHWVRQSPGKGLEWLGVIWSGGNTDYNTPFTSRLSINKDNSKSQVFFKMNSLQSNDTAIYYCARALTYYDYEFAWWGQGTLVTVSA

SEQ ID NO: 1857 - protein, 119 aa, Artificial Sequence
  source: /note="Description of Artificial Sequence: Synthetic heavy chain variable domain"
QVQLKQSGPGLVQPSQSLSITCTVSGFSLTNYGVHWVRQSPGKGLEWLGVIWSGGNTDYNTPFTSRLSINKDNSKSQVFFKMNSLQSNDTAIYYCARALTYYDYEFAYIGQGTLVTVSA

SEQ ID NO: 1858 - protein, 119 aa, Artificial Sequence
  source: /note="Description of Artificial Sequence: Synthetic heavy chain variable domain"
QVQLKQSGPGLVQPSQSLSITCTVSGFSLTNYGVHWVRQSPGKGLEWLGVIWSGGNTDYNTPFTSRLSINKDNSKSQVFFKMNSLQSNDTAIYYCARALTYYDYEFAYMGQGTLVTVSA

SEQ ID NO: 1859 - protein, 119 aa, Artificial Sequence
  source: /note="Description of Artificial Sequence: Synthetic heavy chain variable domain"
QVQLKQSGPGLVQPSQSLSITCTVSGFSLTNYGVHWVRQSPGKGLEWLGVIWSGGNTDYNTPFTSRLSINKDNSKSQVFFKMNSLQSNDTAIYYCARALTYYDYEFAYWAQGTLVTVSA

SEQ ID NO: 1860 - protein, 119 aa, Artificial Sequence
  source: /note="Description of Artificial Sequence: Synthetic heavy chain variable domain"
QVQLKQSGPGLVQPSQSLSITCTVSGFSLTNYGVHWVRQSPGKGLEWLGVIWSGGNTDYNTPFTSRLSINKDNSKSQVFFKMNSLQSNDTAIYYCARALTYYDYEFAYWGDGTLVTVSA

SEQ ID NO: 1861 - protein, 119 aa, Artificial Sequence
  source: /note="Description of Artificial Sequence: Synthetic heavy chain variable domain"
QVQLKQSGPGLVQPSQSLSITCTVSGFSLTNYGVHWVRQSPGKGLEWLGVIWSGGNTDYNTPFTSRLSINKDNSKSQVFFKMNSLQSNDTAIYYCARALTYYDYEFAYWGEGTLVTVSA

SEQ ID NO: 1862 - protein, 119 aa, Artificial Sequence
  source: /note="Description of Artificial Sequence: Synthetic heavy chain variable domain"
QVQLKQSGPGLVQPSQSLSITCTVSGFSLTNYGVHWVRQSPGKGLEWLGVIWSGGNTDYNTPFTSRLSINKDNSKSQVFFKMNSLQSNDTAIYYCARALTYYDYEFAYWGGGTLVTVSA

SEQ ID NO: 1863 - protein, 119 aa, Artificial Sequence
  source: /note="Description of Artificial Sequence: Synthetic heavy chain variable domain"
QVQLKQSGPGLVQPSQSLSITCTVSGFSLTNYGVHWVRQSPGKGLEWLGVIWSGGNTDYNTPFTSRLSINKDNSKSQVFFKMNSLQSNDTAIYYCARALTYYDYEFAYWGHGTLVTVSA

SEQ ID NO: 1864 - protein, 119 aa, Artificial Sequence
  source: /note="Description of Artificial Sequence: Synthetic heavy chain variable domain"
QVQLKQSGPGLVQPSQSLSITCTVSGFSLTNYGVHWVRQSPGKGLEWLGVIWSGGNTDYNTPFTSRLSINKDNSKSQVFFKMNSLQSNDTAIYYCARALTYYDYEFAYWGIGTLVTVSA

SEQ ID NO: 1865 - protein, 119 aa, Artificial Sequence
  source: /note="Description of Artificial Sequence: Synthetic heavy chain variable domain"
QVQLKQSGPGLVQPSQSLSITCTVSGFSLTNYGVHWVRQSPGKGLEWLGVIWSGGNTDYNTPFTSRLSINKDNSKSQVFFKMNSLQSNDTAIYYCARALTYYDYEFAYWGKGTLVTVSA

SEQ ID NO: 1866 - protein, 119 aa, Artificial Sequence
  source: /note="Description of Artificial Sequence: Synthetic heavy chain variable domain"
QVQLKQSGPGLVQPSQSLSITCTVSGFSLTNYGVHWVRQSPGKGLEWLGVIWSGGNTDYNTPFTSRLSINKDNSKSQVFFKMNSLQSNDTAIYYCARALTYYDYEFAYWGLGTLVTVSA

SEQ ID NO: 1867 - protein, 119 aa, Artificial Sequence
  source: /note="Description of Artificial Sequence: Synthetic heavy chain variable domain"
QVQLKQSGPGLVQPSQSLSITCTVSGFSLTNYGVHWVRQSPGKGLEWLGVIWSGGNTDYNTPFTSRLSINKDNSKSQVFFKMNSLQSNDTAIYYCARALTYYDYEFAYWGMGTLVTVSA

SEQ ID NO: 1868 - protein, 119 aa, Artificial Sequence
  source: /note="Description of Artificial Sequence: Synthetic heavy chain variable domain"
QVQLKQSGPGLVQPSQSLSITCTVSGFSLTNYGVHWVRQSPGKGLEWLGVIWSGGNTDYNTPFTSRLSINKDNSKSQVFFKMNSLQSNDTAIYYCARALTYYDYEFAYWGPGTLVTVSA

SEQ ID NO: 1869 - protein, 119 aa, Artificial Sequence
  source: /note="Description of Artificial Sequence: Synthetic heavy chain variable domain"
QVQLKQSGPGLVQPSQSLSITCTVSGFSLTNYGVHWVRQSPGKGLEWLGVIWSGGNTDYNTPFTSRLSINKDNSKSQVFFKMNSLQSNDTAIYYCARALTYYDYEFAYWGQATLVTVSA

SEQ ID NO: 1870 - protein, 119 aa, Artificial Sequence
  source: /note="Description of Artificial Sequence: Synthetic heavy chain variable domain"
QVQLKQSGPGLVQPSQSLSITCTVSGFSLTNYGVHWVRQSPGKGLEWLGVIWSGGNTDYNTPFTSRLSINKDNSKSQVFFKMNSLQSNDTAIYYCARALTYYDYEFAYWGQNTLVTVSA

SEQ ID NO: 1871 - protein, 119 aa, Artificial Sequence
  source: /note="Description of Artificial Sequence: Synthetic heavy chain variable domain"
QVQLKQSGPGLVQPSQSLSITCTVSGFSLTNYGVHWVRQSPGKGLEWLGVIWSGGNTDYNTPFTSRLSINKDNSKSQVFFKMNSLQSNDTAIYYCARALTYYDYEFAYWGQPTLVTVSA

SEQ ID NO: 1872 - protein, 119 aa, Artificial Sequence
  source: /note="Description of Artificial Sequence: Synthetic heavy chain variable domain"
QVQLKQSGPGLVQPSQSLSITCTVSGFSLTNYGVHWVRQSPGKGLEWLGVIWSGGNTDYNTPFTSRLSINKDNSKSQVFFKMNSLQSNDTAIYYCARALTYYDYEFAYWGQSTLVTVSA

SEQ ID NO: 1873 - protein, 119 aa, Artificial Sequence
  source: /note="Description of Artificial Sequence: Synthetic heavy chain variable domain"
QVQLKQSGPGLVQPSQSLSITCTVSGFSLTNYGVHWVRQSPGKGLEWLGVIWSGGNTDYNTPFTSRLSINKDNSKSQVFFKMNSLQSNDTAIYYCARALTYYDYEFAYWGQTTLVTVSA

SEQ ID NO: 1874 - protein, 119 aa, Artificial Sequence
  source: /note="Description of Artificial Sequence: Synthetic heavy chain variable domain"
QVQLKQSGPGLVQPSQSLSITCTVSGFSLTNYGVHWVRQSPGKGLEWLGVIWSGGNTDYNTPFTSRLSINKDNSKSQVFFKMNSLQSNDTAIYYCARALTYYDYEFAYWGQYTLVTVSA

SEQ ID NO: 1875 - protein, 119 aa, Artificial Sequence
  source: /note="Description of Artificial Sequence: Synthetic heavy chain variable domain"
QVQLKQSGPGLVQPSQSLSITCTVSGFSLTNYGVHWVRQSPGKGLEWLGVIWSGGNTDYNTPFTSRLSINKDNSKSQVFFKMNSLQSNDTAIYYCARALTYYDYEFAYWGRGTLVTVSA

SEQ ID NO: 1876 - protein, 119 aa, Artificial Sequence
  source: /note="Description of Artificial Sequence: Synthetic heavy chain variable domain"
QVQLKQSGPGLVQPSQSLSITCTVSGFSLTNYGVHWVRQSPGKGLEWLGVIWSGGNTDYNTPFTSRLSINKDNSKSQVFFKMNSLQSNDTAIYYCARALTYYDYEFAYWGSGTLVTVSA

SEQ ID NO: 1877 - protein, 119 aa, Artificial Sequence
  source: /note="Description of Artificial Sequence: Synthetic heavy chain variable domain"
QVQLKQSGPGLVQPSQSLSITCTVSGFSLTNYGVHWVRQSPGKGLEWLGVIWSGGNTDYNTPFTSRLSINKDNSKSQVFFKMNSLQSNDTAIYYCARALTYYDYEFAYWGTGTLVTVSA

SEQ ID NO: 1878 - protein, 119 aa, Artificial Sequence
  source: /note="Description of Artificial Sequence: Synthetic heavy chain variable domain"
QVQLKQSGPGLVQPSQSLSITCTVSGFSLTNYGVHWVRQSPGKGLEWLGVIWSGGNTDYNTPFTSRLSINKDNSKSQVFFKMNSLQSNDTAIYYCARALTYYDYEFAYWGVGTLVTVSA

SEQ ID NO: 1879 - protein, 119 aa, Artificial Sequence
  source: /note="Description of Artificial Sequence: Synthetic heavy chain variable domain"
QVQLKQSGPGLVQPSQSLSITCTVSGFSLTNYGVHWVRQSPGKGLEWLGVIWSGGNTDYNTPFTSRLSINKDNSKSQVFFKMNSLQSNDTAIYYCARALTYYDYEFAYWGWGTLVTVSA

SEQ ID NO: 1880 - protein, 119 aa, Artificial Sequence
  source: /note="Description of Artificial Sequence: Synthetic heavy chain variable domain"
QVQLKQSGPGLVQPSQSLSITCTVSGFSLTNYGVHWVRQSPGKGLEWLGVIWSGGNTDYNTPFTSRLSINKDNSKSQVFFKMNSLQSNDTAIYYCARALTYYDYEFAYWGYGTLVTVSA

SEQ ID NO: 1881 - protein, 119 aa, Artificial Sequence
  source: /note="Description of Artificial Sequence: Synthetic heavy chain variable domain"
QVQLKQSGPGLVQPSQSLSITCTVSGFSLTNYGVHWVRQSPGKGLEWLGVIWSGGNTDYNTPFTSRLSINKDNSKSQVFFKMNSLQSNDTAIYYCARALTYYDYEFAYWMQGTLVTVSA

SEQ ID NO: 1882 - protein, 119 aa, Artificial Sequence
  source: /note="Description of Artificial Sequence: Synthetic heavy chain variable domain"
QVQLKQSGPGLVQPSQSLSITCTVSGFSLTNYGVHWVRQSPGKGLEWLGVIWSGGNTDYNTPFTSRLSINKDNSKSQVFFKMNSLQSNDTAIYYCARALTYYDYEFAYWPQGTLVTVSA

SEQ ID NO: 1883 - protein, 119 aa, Artificial Sequence
  source: /note="Description of Artificial Sequence: Synthetic heavy chain variable domain"
QVQLKQSGPGLVQPSQSLSITCTVSGFSLTNYGVHWVRQSPGKGLEWLGVIWSGGNTDYNTPFTSRLSINKDNSKSQVFFKMNSLQSNDTAIYYCARALTYYDYEFAYWRQGTLVTVSA

SEQ ID NO: 1884 - protein, 119 aa, Artificial Sequence
  source: /note="Description of Artificial Sequence: Synthetic heavy chain variable domain"
QVQLKQSGPGLVQPSQSLSITCTVSGFSLTNYGVHWVRQSPGKGLEWLGVIWSGGNTDYNTPFTSRLSINKDNSKSQVFFKMNSLQSNDTAIYYCARALTYYDYEFAYWTQGTLVTVSA

SEQ ID NO: 1885 - protein, 119 aa, Artificial Sequence
  source: /note="Description of Artificial Sequence: Synthetic heavy chain variable domain"
QVQLKQSGPGLVQPSQSLSITCTVSGFSLTNYGVHWVRQSPGKGLEWLGVIWSGGNTDYNTPFTSRLSINKDNSKSQVFFKMNSLQSNDTAIYYCARALTYYDYEFAYYGQGTLVTVSA

SEQ ID NO: 1886 - protein, 119 aa, Artificial Sequence
  source: /note="Description of Artificial Sequence: Synthetic heavy chain variable domain"
QVQLKQSGPGLVQPSQSLSITCTVSGFSLTNYGVHWVRQSPGKGLEWLGVIWSGGNTDYNTPFTSRLSINKDNSKSQVFFKMNSLQSNDTAIYYCARALTYYDYEFCYWGQGTLVTVSA

SEQ ID NO: 1887 - protein, 119 aa, Artificial Sequence
  source: /note="Description of Artificial Sequence: Synthetic heavy chain variable domain"
QVQLKQSGPGLVQPSQSLSITCTVSGFSLTNYGVHWVRQSPGKGLEWLGVIWSGGNTDYNTPFTSRLSINKDNSKSQVFFKMNSLQSNDTAIYYCARALTYYDYEFDYWGQGTLVTVSA

SEQ ID NO: 1888 - protein, 119 aa, Artificial Sequence
  source: /note="Description of Artificial Sequence: Synthetic heavy chain variable domain"
QVQLKQSGPGLVQPSQSLSITCTVSGFSLTNYGVHWVRQSPGKGLEWLGVIWSGGNTDYNTPFTSRLSINKDNSKSQVFFKMNSLQSNDTAIYYCARALTYYDYEFEYWGQGTLVTVSA

SEQ ID NO: 1889 - protein, 119 aa, Artificial Sequence
  source: /note="Description of Artificial Sequence: Synthetic heavy chain variable domain"
QVQLKQSGPGLVQPSQSLSITCTVSGFSLTNYGVHWVRQSPGKGLEWLGVIWSGGNTDYNTPFTSRLSINKDNSKSQVFFKMNSLQSNDTAIYYCARALTYYDYEFGYWGQGTLVTVSA

SEQ ID NO: 1890 - protein, 119 aa, Artificial Sequence
  source: /note="Description of Artificial Sequence: Synthetic heavy chain variable domain"
QVQLKQSGPGLVQPSQSLSITCTVSGFSLTNYGVHWVRQSPGKGLEWLGVIWSGGNTDYNTPFTSRLSINKDNSKSQVFFKMNSLQSNDTAIYYCARALTYYDYEFHYWGQGTLVTVSA

SEQ ID NO: 1891 - protein, 119 aa, Artificial Sequence
  source: /note="Description of Artificial Sequence: Synthetic heavy chain variable domain"
QVQLKQSGPGLVQPSQSLSITCTVSGFSLTNYGVHWVRQSPGKGLEWLGVIWSGGNTDYNTPFTSRLSINKDNSKSQVFFKMNSLQSNDTAIYYCARALTYYDYEFKYWGQGTLVTVSA

SEQ ID NO: 1892 - protein, 119 aa, Artificial Sequence
  source: /note="Description of Artificial Sequence: Synthetic heavy chain variable domain"
QVQLKQSGPGLVQPSQSLSITCTVSGFSLTNYGVHWVRQSPGKGLEWLGVIWSGGNTDYNTPFTSRLSINKDNSKSQVFFKMNSLQSNDTAIYYCARALTYYDYEFLYWGQGTLVTVSA

SEQ ID NO: 1893 - protein, 119 aa, Artificial Sequence
  source: /note="Description of Artificial Sequence: Synthetic heavy chain variable domain"
QVQLKQSGPGLVQPSQSLSITCTVSGFSLTNYGVHWVRQSPGKGLEWLGVIWSGGNTDYNTPFTSRLSINKDNSKSQVFFKMNSLQSNDTAIYYCARALTYYDYEFNYWGQGTLVTVSA

SEQ ID NO: 1894 - protein, 119 aa, Artificial Sequence
  source: /note="Description of Artificial Sequence: Synthetic heavy chain variable domain"
QVQLKQSGPGLVQPSQSLSITCTVSGFSLTNYGVHWVRQSPGKGLEWLGVIWSGGNTDYNTPFTSRLSINKDNSKSQVFFKMNSLQSNDTAIYYCARALTYYDYEFRYWGQGTLVTVSA

SEQ ID NO: 1895 - protein, 119 aa, Artificial Sequence
  source: /note="Description of Artificial Sequence: Synthetic heavy chain variable domain"
QVQLKQSGPGLVQPSQSLSITCTVSGFSLTNYGVHWVRQSPGKGLEWLGVIWSGGNTDYNTPFTSRLSINKDNSKSQVFFKMNSLQSNDTAIYYCARALTYYDYEFSYWGQGTLVTVSA

SEQ ID NO: 1896 - protein, 119 aa, Artificial Sequence
  source: /note="Description of Artificial Sequence: Synthetic heavy chain variable domain"
QVQLKQSGPGLVQPSQSLSITCTVSGFSLTNYGVHWVRQSPGKGLEWLGVIWSGGNTDYNTPFTSRLSINKDNSKSQVFFKMNSLQSNDTAIYYCARALTYYDYEFTYWGQGTLVTVSA

SEQ ID NO: 1897 - protein, 119 aa, Artificial Sequence
  source: /note="Description of Artificial Sequence: Synthetic heavy chain variable domain"
QVQLKQSGPGLVQPSQSLSITCTVSGFSLTNYGVHWVRQSPGKGLEWLGVIWSGGNTDYNTPFTSRLSINKDNSKSQVFFKMNSLQSNDTAIYYCARALTYYDYEFYYWGQGTLVTVSA

SEQ ID NO: 1898 - protein, 119 aa, Artificial Sequence
  source: /note="Description of Artificial Sequence: Synthetic heavy chain variable domain"
QVQLKQSGPGLVQPSQSLSITCTVSGFSLTNYGVHWVRQSPGKGLEWLGVIWSGGNTDYNTPFTSRLSINKDNSKSQVFFKMNSLQSNDTAIYYCARALTYYDYELAYWGQGTLVTVSA

SEQ ID NO: 1899 - protein, 119 aa, Artificial Sequence
  source: /note="Description of Artificial Sequence: Synthetic heavy chain variable domain"
QVQLKQSGPGLVQPSQSLSITCTVSGFSLTNYGVHWVRQSPGKGLEWLGVIWSGGNTDYNTPFTSRLSINKDNSKSQVFFKMNSLQSNDTAIYYCARALTYYDYEVAYWGQGTLVTVSA

SEQ ID NO: 1900 - protein, 119 aa, Artificial Sequence
  source: /note="Description of Artificial Sequence: Synthetic heavy chain variable domain"
QVQLKQSGPGLVQPSQSLSITCTVSGFSLTNYGVHWVRQSPGKGLEWLGVIWSGGNTDYNTPFTSRLSINKDNSKSQVFFKMNSLQSNDTAIYYCARALTYYDYEWAYWGQGTLVTVSA

SEQ ID NO: 1901 - protein, 119 aa, Artificial Sequence
  source: /note="Description of Artificial Sequence: Synthetic heavy chain variable domain"
QVQLKQSGPGLVQPSQSLSITCTVSGFSLTNYGVHWVRQSPGKGLEWLGVIWSGGNTDYNTPFTSRLSINKDNSKSQVFFKMNSLQSNDTAIYYCARALTYYDYEYAYWGQGTLVTVSA

SEQ ID NO: 1902 - protein, 119 aa, Artificial Sequence
  source: /note="Description of Artificial Sequence: Synthetic heavy chain variable domain"
QVQLKQSGPGLVQPSQSLSITCTVSGFSLTNYGVHWVRQSPGKGLEWLGVIWSGGNTDYNTPFTSRLSINKDNSKSQVFFKMNSLQSNDTAIYYCARALTYYDYHFAYWGQGTLVTVSA

SEQ ID NO: 1903 - protein, 119 aa, Artificial Sequence
  source: /note="Description of Artificial Sequence: Synthetic heavy chain variable domain"
QVQLKQSGPGLVQPSQSLSITCTVSGFSLTNYGVHWVRQSPGKGLEWLGVIWSGGNTDYNTPFTSRLSINKDNSKSQVFFKMNSLQSNDTAIYYCARALTYYDYTFAYWGQGTLVTVSA

SEQ ID NO: 1904 - protein, 119 aa, Artificial Sequence
  source: /note="Description of Artificial Sequence: Synthetic heavy chain variable domain"
QVQLKQSGPGLVQPSQSLSITCTVSGFSLTNYGVHWVRQSPGKGLEWLGVIWSGGNTDYNTPFTSRLSINKDNSKSQVFFKMNSLQSNDTAIYYCARALTYYIYEFAYWGQGTLVTVSA

SEQ ID NO: 1905 - protein, 119 aa, Artificial Sequence
  source: /note="Description of Artificial Sequence: Synthetic heavy chain variable domain"
QVQLKQSGPGLVQPSQSLSITCTVSGFSLTNYGVHWVRQSPGKGLEWLGVIWSGGNTDYNTPFTSRLSINKDNSKSQVFFKMNSLQSNDTAIYYCARALTYYLYEFAYWGQGTLVTVSA

SEQ ID NO: 1906 - protein, 119 aa, Artificial Sequence
  source: /note="Description of Artificial Sequence: Synthetic heavy chain variable domain"
QVQLKQSGPGLVQPSQSLSITCTVSGFSLTNYGVHWVRQSPGKGLEWLGVIWSGGNTDYNTPFTSRLSINKDNSKSQVFFKMNSLQSNDTAIYYCARALTYYPYEFAYWGQGTLVTVSA

SEQ ID NO: 1907 - protein, 119 aa, Artificial Sequence
  source: /note="Description of Artificial Sequence: Synthetic heavy chain variable domain"
QVQLKQSGPGLVQPSQSLSITCTVSGFSLTNYGVHWVRQSPGKGLEWLGVIWSGGNTDYNTPFTSRLSINKDNSKSQVFFKMNSLQSNDTAIYYCARALTYYQYEFAYWGQGTLVTVSA

SEQ ID NO: 1908 - protein, 119 aa, Artificial Sequence
  source: /note="Description of Artificial Sequence: Synthetic heavy chain variable domain"
QVQLKQSGPGLVQPSQSLSITCTVSGFSLTNYGVHWVRQSPGKGLEWLGVIWSGGNTDYNTPFTSRLSINKDNSKSQVFFKMNSLQSNDTAIYYCARALTYYRYEFAYWGQGTLVTVSA

SEQ ID NO: 1909 - protein, 119 aa, Artificial Sequence
  source: /note="Description of Artificial Sequence: Synthetic heavy chain variable domain"
QVQLKQSGPGLVQPSQSLSITCTVSGFSLTNYGVHWVRQSPGKGLEWLGVIWSGGNTDYNTPFTSRLSINKDNSKSQVFFKMNSLQSNDTAIYYCARALTYYYYEFAYWGQGTLVTVSA

SEQ ID NO: 1910 - protein, 119 aa, Artificial Sequence
  source: /note="Description of Artificial Sequence: Synthetic heavy chain variable domain"
QVQLKQSGPGLVQPSQSLSITCTVSGFSLTNYGVHWVRQSPGKGLEWLGVIWSGGNTDYNTPFTSRLSINKDNSKSQVFFKMNSLQSNDTAIYYCARALVYYDYEFAYWGQGTLVTVSA

SEQ ID NO: 1911 - protein, 119 aa, Artificial Sequence
  source: /note="Description of Artificial Sequence: Synthetic heavy chain variable domain"
QVQLKQSGPGLVQPSQSLSITCTVSGFSLTNYGVHWVRQSPGKGLEWLGVIWSGGNTDYNTPFTSRLSINKDNSKSQVFFKMNSLQSNDTAIYYCARALYYYDYEFAYWGQGTLVTVSA

SEQ ID NO: 1912 - protein, 119 aa, Artificial Sequence
  source: /note="Description of Artificial Sequence: Synthetic heavy chain variable domain"
QVQLKQSGPGLVQPSQSLSITCTVSGFSLTNYGVHWVRQSPGKGLEWLGVIWSGGNTDYNTPFTSRLSINKDNSKSQVFFKMNSLQSNDTAIYYCARANTYYDYEFAYWGQGTLVTVSA

SEQ ID NO: 1913 - protein, 119 aa, Artificial Sequence
  source: /note="Description of Artificial Sequence: Synthetic heavy chain variable domain"
QVQLKQSGPGLVQPSQSLSITCTVSGFSLTNYGVHWVRQSPGKGLEWLGVIWSGGNTDYNTPFTSRLSINKDNSKSQVFFKMNSLQSNDTAIYYCARAWTYYDYEFAYWGQGTLVTVSA

SEQ ID NO: 1914 - protein, 117 aa, Artificial Sequence
  source: /note="Description of Artificial Sequence: Synthetic heavy chain variable domain"
QVQLKQSGPGLVQPSQSLSITCTVSGFSLTNYGVHWVRQSPGKGLEWLGVIWSGGNTDYNTPFTSRLSINKDNSKSQVFFKMNSLQSNDTAIYYCARPLTYYDYEFAYWGQGTLVTV

SEQ ID NO: 1915 - protein, 119 aa, Artificial Sequence
  source: /note="Description of Artificial Sequence: Synthetic heavy chain variable domain"
QVQLKQSGPGLVQPSQSLSITCTVSGFSLTNYGVHWVRQSPGKGLEWLGVIWSGGNTDYNTPFTSRLSINKDNSKSQVFFKMNSLQSNDTAIYYCAWALTYYDYEFAYWGQGTLVTVSA

SEQ ID NO: 1916 - protein, 119 aa, Artificial Sequence
  source: /note="Description of Artificial Sequence: Synthetic heavy chain variable domain"
QVQLKQSGPGLVQPSQSLSITCTVSGFSLTNYGVHWVRQSPGKGLEWLGVIWSGGNTDYNTPFTSRLSINKDNSKSRVFFKMNSLQSNDTAIYYCARALTYYDYEFAYWGQGTLVTVSA

SEQ ID NO: 1917 - protein, 119 aa, Artificial Sequence
  source: /note="Description of Artificial Sequence: Synthetic heavy chain variable domain"
QVQLKQSGPGLVQPSQSLSITCTVSGFSLTNYGVHWVRQSPGKGLEWLGVIWSGGNTDYNTPFTSRLSINKDNSKSSVFFKMNSLQSNDTAIYYCARALTYYDYEFAYWGQGTLVTVSA

SEQ ID NO: 1918 - protein, 119 aa, Artificial Sequence
  source: /note="Description of Artificial Sequence: Synthetic heavy chain variable domain"
QVQLKQSGPGLVQPSQSLSITCTVSGFSLTNYGVHWVRQSPGKGLEWLGVIWSGGNTDYNTPFTSRLSINKDNSKSVVFFKMNSLQSNDTAIYYCARALTYYDYEFAYWGQGTLVTVSA

SEQ ID NO: 1919 - protein, 119 aa, Artificial Sequence
  source: /note="Description of Artificial Sequence: Synthetic heavy chain variable domain"
QVQLKQSGPGLVQPSQSLSITCTVSGFSLTNYGVHWVRQSPGKGLEWLGVIWSGGNTDYNTPFTSRLSINKDNSKSWVFFKMNSLQSNDTAIYYCARALTYYDYEFAYWGQGTLVTVSA

SEQ ID NO: 1920 - protein, 119 aa, Artificial Sequence
  source: /note="Description of Artificial Sequence: Synthetic heavy chain variable domain"
QVQLKQSGPGLVQPSQSLSITCTVSGFSLTNYGVHWVRQSPGKGLEWLGVIWSGGNTDYNTPFTSRLSINKDNSKSYVFFKMNSLQSNDTAIYYCARALTYYDYEFAYWGQGTLVTVSA

SEQ ID NO: 1921 - protein, 119 aa, Artificial Sequence
  source: /note="Description of Artificial Sequence: Synthetic heavy chain variable domain"
QVQLKQSGPGLVQPSQSLSITCTVSGFSLTNYGVHWVRQSPGKGLEWLGVIWSGGNTDYNTPFTSRLSINKDNSKTQVFFKMNSLQSNDTAIYYCARALTYYDYEFAYWGQGTLVTVSA

SEQ ID NO: 1922 - protein, 119 aa, Artificial Sequence
  source: /note="Description of Artificial Sequence: Synthetic heavy chain variable domain"
QVQLKQSGPGLVQPSQSLSITCTVSGFSLTNYGVHWVRQSPGKGLEWLGVIWSGGNTDYNTPFTSRLSINKDNSKVQVFFKMNSLQSNDTAIYYCARALTYYDYEFAYWGQGTLVTVSA

SEQ ID NO: 1923 - protein, 119 aa, Artificial Sequence
  source: /note="Description of Artificial Sequence: Synthetic heavy chain variable domain"
QVQLKQSGPGLVQPSQSLSITCTVSGFSLTNYGVHWVRQSPGKGLEWLGVIWSGGNTDYNTPFTSRLSINKDNSKYQVFFKMNSLQSNDTAIYYCARALTYYDYEFAYWGQGTLVTVSA

SEQ ID NO: 1924 - protein, 119 aa, Artificial Sequence
  source: /note="Description of Artificial Sequence: Synthetic heavy chain variable domain"
QVQLKQSGPGLVQPSQSLSITCTVSGFSLTNYGVHWVRQSPGKGLEWLGVIWSGGNTDYNTPFTSRLSINKDNSLSQVFFKMNSLQSNDTAIYYCARALTYYDYEFAYWGQGTLVTVSA

SEQ ID NO: 1925 - protein, 119 aa, Artificial Sequence
  source: /note="Description of Artificial Sequence: Synthetic heavy chain variable domain"
QVQLKQSGPGLVQPSQSLSITCTVSGFSLTNYGVHWVRQSPGKGLEWLGVIWSGGNTDYNTPFTSRLSINKDNSMSQVFFKMNSLQSNDTAIYYCARALTYYDYEFAYWGQGTLVTVSA

SEQ ID NO: 1926 - protein, 119 aa, Artificial Sequence
  source: /note="Description of Artificial Sequence: Synthetic heavy chain variable domain"
QVQLKQSGPGLVQPSQSLSITCTVSGFSLTNYGVHWVRQSPGKGLEWLGVIWSGGNTDYNTPFTSRLSINKDNSPSQVFFKMNSLQSNDTAIYYCARALTYYDYEFAYWGQGTLVTVSA

SEQ ID NO: 1927 - protein, 119 aa, Artificial Sequence
  source: /note="Description of Artificial Sequence: Synthetic heavy chain variable domain"
QVQLKQSGPGLVQPSQSLSITCTVSGFSLTNYGVHWVRQSPGKGLEWLGVIWSGGNTDYNTPFTSRLSINKDNSQSQVFFKMNSLQSNDTAIYYCARALTYYDYEFAYWGQGTLVTVSA

SEQ ID NO: 1928 - protein, 119 aa, Artificial Sequence
  source: /note="Description of Artificial Sequence: Synthetic heavy chain variable domain"
QVQLKQSGPGLVQPSQSLSITCTVSGFSLTNYGVHWVRQSPGKGLEWLGVIWSGGNTDYNTPFTSRLSINKDNSRSQVFFKMNSLQSNDTAIYYCARALTYYDYEFAYWGQGTLVTVSA

SEQ ID NO: 1929 - protein, 119 aa, Artificial Sequence
  source: /note="Description of Artificial Sequence: Synthetic heavy chain variable domain"
QVQLKQSGPGLVQPSQSLSITCTVSGFSLTNYGVHWVRQSPGKGLEWLGVIWSGGNTDYNTPFTSRLSINKDNSTSQVFFKMNSLQSNDTAIYYCARALTYYDYEFAYWGQGTLVTVSA

SEQ ID NO: 1930 - protein, 119 aa, Artificial Sequence
  source: /note="Description of Artificial Sequence: Synthetic heavy chain variable domain"
QVQLKQSGPGLVQPSQSLSITCTVSGFSLTNYGVHWVRQSPGKGLEWLGVIWSGGNTDYNTPFTSRLSINKDNSVSQVFFKMNSLQSNDTAIYYCARALTYYDYEFAYWGQGTLVTVSA

SEQ ID NO: 1931 - protein, 119 aa, Artificial Sequence
  source: /note="Description of Artificial Sequence: Synthetic heavy chain variable domain"
QVQLKQSGPGLVQPSQSLSITCTVSGFSLTNYGVHWVRQSPGKGLEWLGVIWSGGNTDYNTPFTSRLSINKDNSWSQVFFKMNSLQSNDTAIYYCARALTYYDYEFAYWGQGTLVTVSA

SEQ ID NO: 1932 - protein, 119 aa, Artificial Sequence
  source: /note="Description of Artificial Sequence: Synthetic heavy chain variable domain"
QVQLKQSGPGLVQPSQSLSITCTVSGFSLTNYGVHWVRQSPGKGLEWLGVIWSGGNTDYNTPFTSRLSINKDNSYSQVFFKMNSLQSNDTAIYYCARALTYYDYEFAYWGQGTLVTVSA

SEQ ID NO: 1933 - protein, 119 aa, Artificial Sequence
  source: /note="Description of Artificial Sequence: Synthetic heavy chain variable domain"
QVQLKQSGPGLVQPSQSLSITCTVSGFSLTNYGVHWVRQSPGKGLEWLGVIWSGGNTDYNTPFTSRLSINKDNTKSQVFFKMNSLQSNDTAIYYCARALTYYDYEFAYWGQGTLVTVSA

SEQ ID NO: 1934 - protein, 119 aa, Artificial Sequence
  source: /note="Description of Artificial Sequence: Synthetic heavy chain variable domain"
QVQLKQSGPGLVQPSQSLSITCTVSGFSLTNYGVHWVRQSPGKGLEWLGVIWSGGNTDYNTPFTSRLSINKDNVKSQVFFKMNSLQSNDTAIYYCARALTYYDYEFAYWGQGTLVTVSA

SEQ ID NO: 1935 - protein, 119 aa, Artificial Sequence
  source: /note="Description of Artificial Sequence: Synthetic heavy chain variable domain"
QVQLKQSGPGLVQPSQSLSITCTVSGFSLTNYGVHWVRQSPGKGLEWLGVIWSGGNTDYNTPFTSRLSINKDNYKSQVFFKMNSLQSNDTAIYYCARALTYYDYEFAYWGQGTLVTVSA

SEQ ID NO: 1936 - protein, 119 aa, Artificial Sequence
  source: /note="Description of Artificial Sequence: Synthetic heavy chain variable domain"
QVQLKQSGPGLVQPSQSLSITCTVSGFSLTNYGVHWVRQSPGKGLEWLGVIWSGGNTDYNTPFTSRLSINKDPSKSQVFFKMNSLQSNDTAIYYCARALTYYDYEFAYWGQGTLVTVSA

SEQ ID NO: 1937 - protein, 119 aa, Artificial Sequence
  source: /note="Description of Artificial Sequence: Synthetic heavy chain variable domain"
QVQLKQSGPGLVQPSQSLSITCTVSGFSLTNYGVHWVRQSPGKGLEWLGVIWSGGNTDYNTPFTSRLSINKDQSKSQVFFKMNSLQSNDTAIYYCARALTYYDYEFAYWGQGTLVTVSA

SEQ ID NO: 1938 - protein, 119 aa, Artificial Sequence
  source: /note="Description of Artificial Sequence: Synthetic heavy chain variable domain"
QVQLKQSGPGLVQPSQSLSITCTVSGFSLTNYGVHWVRQSPGKGLEWLGVIWSGGNTDYNTPFTSRLSINKDRSKSQVFFKMNSLQSNDTAIYYCARALTYYDYEFAYWGQGTLVTVSA

SEQ ID NO: 1939 - protein, 119 aa, Artificial Sequence
  source: /note="Description of Artificial Sequence: Synthetic heavy chain variable domain"
QVQLKQSGPGLVQPSQSLSITCTVSGFSLTNYGVHWVRQSPGKGLEWLGVIWSGGNTDYNTPFTSRLSINKDSSKSQVFFKMNSLQSNDTAIYYCARALTYYDYEFAYWGQGTLVTVSA

SEQ ID NO: 1940 - protein, 119 aa, Artificial Sequence
  source: /note="Description of Artificial Sequence: Synthetic heavy chain variable domain"
QVQLKQSGPGLVQPSQSLSITCTVSGFSLTNYGVHWVRQSPGKGLEWLGVIWSGGNTDYNTPFTSRLSINKDTSKSQVFFKMNSLQSNDTAIYYCARALTYYDYEFAYWGQGTLVTVSA

SEQ ID NO: 1941 - protein, 119 aa, Artificial Sequence
  source: /note="Description of Artificial Sequence: Synthetic heavy chain variable domain"
QVQLKQSGPGLVQPSQSLSITCTVSGFSLTNYGVHWVRQSPGKGLEWLGVIWSGGNTDYNTPFTSRLSINKDVSKSQVFFKMNSLQSNDTAIYYCARALTYYDYEFAYWGQGTLVTVSA

SEQ ID NO: 1942 - protein, 119 aa, Artificial Sequence
  source: /note="Description of Artificial Sequence: Synthetic heavy chain variable domain"
QVQLKQSGPGLVQPSQSLSITCTVSGFSLTNYGVHWVRQSPGKGLEWLGVIWSGGNTDYNTPFTSRLSINKDWSKSQVFFKMNSLQSNDTAIYYCARALTYYDYEFAYWGQGTLVTVSA

SEQ ID NO: 1943 - protein, 119 aa, Artificial Sequence
  source: /note="Description of Artificial Sequence: Synthetic heavy chain variable domain"
QVQLKQSGPGLVQPSQSLSITCTVSGFSLTNYGVHWVRQSPGKGLEWLGVIWSGGNTDYNTPFTSRLSINKDYSKSQVFFKMNSLQSNDTAIYYCARALTYYDYEFAYWGQGTLVTVSA

SEQ ID NO: 1944 - protein, 119 aa, Artificial Sequence
  source: /note="Description of Artificial Sequence: Synthetic heavy chain variable domain"
QVQLKQSGPGLVQPSQSLSITCTVSGFSLTNYGVHWVRQSPGKGLEWLGVIWSGGNTDYNTPFTSRLSINKGNSKSQVFFKMNSLQSNDTAIYYCARALTYYDYEFAYWGQGTLVTVSA

SEQ ID NO: 1945 - protein, 119 aa, Artificial Sequence
  source: /note="Description of Artificial Sequence: Synthetic heavy chain variable domain"
QVQLKQSGPGLVQPSQSLSITCTVSGFSLTNYGVHWVRQSPGKGLEWLGVIWSGGNTDYNTPFTSRLSINKHNSKSQVFFKMNSLQSNDTAIYYCARALTYYDYEFAYWGQGTLVTVSA

SEQ ID NO: 1946 - protein, 119 aa, Artificial Sequence
  source: /note="Description of Artificial Sequence: Synthetic heavy chain variable domain"
QVQLKQSGPGLVQPSQSLSITCTVSGFSLTNYGVHWVRQSPGKGLEWLGVIWSGGNTDYNTPFTSRLSINKINSKSQVFFKMNSLQSNDTAIYYCARALTYYDYEFAYWGQGTLVTVSA

SEQ ID NO: 1947 - protein, 119 aa, Artificial Sequence
  source: /note="Description of Artificial Sequence: Synthetic heavy chain variable domain"
QVQLKQSGPGLVQPSQSLSITCTVSGFSLTNYGVHWVRQSPGKGLEWLGVIWSGGNTDYNTPFTSRLSINKKNSKSQVFFKMNSLQSNDTAIYYCARALTYYDYEFAYWGQGTLVTVSA

SEQ ID NO: 1948 - protein, 119 aa, Artificial Sequence
  source: /note="Description of Artificial Sequence: Synthetic heavy chain variable domain"
QVQLKQSGPGLVQPSQSLSITCTVSGFSLTNYGVHWVRQSPGKGLEWLGVIWSGGNTDYNTPFTSRLSINKLNSKSQVFFKMNSLQSNDTAIYYCARALTYYDDEFAYWGPGTLVTVSA

SEQ ID NO: 1949 - protein, 119 aa, Artificial Sequence
  source: /note="Description of Artificial Sequence: Synthetic heavy chain variable domain"
QVQLKQSGPGLVQPSQSLSITCTVSGFSLTNYGVHWVRQSPGKGLEWLGVIWSGGNTDYNTPFTSRLSINKLNSKSQVFFKMNSLQSNDTAIYYCARALTYYDYEFAYWGQGTLVTVSA

SEQ ID NO: 1950 - protein, 119 aa, Artificial Sequence
  source: /note="Description of Artificial Sequence: Synthetic heavy chain variable domain"
QVQLKQSGPGLVQPSQSLSITCTVSGFSLTNYGVHWVRQSPGKGLEWLGVIWSGGNTDYNTPFTSRLSINKMNSKSQVFFKMNSLQSNDTAIYYCARALTYYDYEFAYWGQGTLVTVSA

SEQ ID NO: 1951 - protein, 119 aa, Artificial Sequence
  source: /note="Description of Artificial Sequence: Synthetic heavy chain variable domain"
QVQLKQSGPGLVQPSQSLSITCTVSGFSLTNYGVHWVRQSPGKGLEWLGVIWSGGNTDYNTPFTSRLSINKNNSKSQVFFKMNSLQSNDTAIYYCARALTYYDYEFAYWGQGTLVTVSA

SEQ ID NO: 1952 - protein, 119 aa, Artificial Sequence
  source: /note="Description of Artificial Sequence: Synthetic heavy chain variable domain"
QVQLKQSGPGLVQPSQSLSITCTVSGFSLTNYGVHWVRQSPGKGLEWLGVIWSGGNTDYNTPFTSRLSINKPNSKSQVFFKMNSLQSNDTAIYYCARALTYYDYEFAYWGQGTLVTVSA

SEQ ID NO: 1953 - protein, 119 aa, Artificial Sequence
  source: /note="Description of Artificial Sequence: Synthetic heavy chain variable domain"
QVQLKQSGPGLVQPSQSLSITCTVSGFSLTNYGVHWVRQSPGKGLEWLGVIWSGGNTDYNTPFTSRLSINKQNSKSQVFFKMNSLQSNDTAIYYCARALTYYDYEFAYWGQGTLVTVSA

SEQ ID NO: 1954 - protein, 119 aa, Artificial Sequence
  source: /note="Description of Artificial Sequence: Synthetic heavy chain variable domain"
QVQLKQSGPGLVQPSQSLSITCTVSGFSLTNYGVHWVRQSPGKGLEWLGVIWSGGNTDYNTPFTSRLSINKRNSKSQVFFKMNSLQSNDTAIYYCARALTYYDYEFAYWGQGTLVTVSA

SEQ ID NO: 1955 - protein, 119 aa, Artificial Sequence
  source: /note="Description of Artificial Sequence: Synthetic heavy chain variable domain"
QVQLKQSGPGLVQPSQSLSITCTVSGFSLTNYGVHWVRQSPGKGLEWLGVIWSGGNTDYNTPFTSRLSINKSNSKSQVFFKMNSLQSNDTAIYYCARALTYYDYEFAYWGQGTLVTVSA

SEQ ID NO: 1956 - protein, 119 aa, Artificial Sequence
  source: /note="Description of Artificial Sequence: Synthetic heavy chain variable domain"
QVQLKQSGPGLVQPSQSLSITCTVSGFSLTNYGVHWVRQSPGKGLEWLGVIWSGGNTDYNTPFTSRLSINKVNSKSQVFFKMNSLQSNDTAIYYCARALTYYDYEFAYWGQGTLVTVSA

SEQ ID NO: 1957 - protein, 119 aa, Artificial Sequence
  source: /note="Description of Artificial Sequence: Synthetic heavy chain variable domain"
QVQLKQSGPGLVQPSQSLSITCTVSGFSLTNYGVHWVRQSPGKGLEWLGVIWSGGNTDYNTPFTSRLSINKWNSKSQVFFKMNSLQSNDTAIYYCARALTYYDYEFAYWGQGTLVTVSA

SEQ ID NO: 1958 - protein, 119 aa, Artificial Sequence
  source: /note="Description of Artificial Sequence: Synthetic heavy chain variable domain"
QVQLKQSGPGLVQPSQSLSITCTVSGFSLTNYGVHWVRQSPGKGLEWLGVIWSGGNTDYNTPFTSRLSINKYNSKSQVFFKMNSLQSNDTAIYYCARALTYYDYEFAYWGQGTLVTVSA

SEQ ID NO: 1959 - protein, 119 aa, Artificial Sequence
  source: /note="Description of Artificial Sequence: Synthetic heavy chain variable domain"
QVQLKQSGPGLVQPSQSLSITCTVSGFSLTNYGVHWVRQSPGKGLEWLGVIWSGGNTDYNTPFTSRLSINLDNSKSQVFFKMNSLQSNDTAIYYCARALTYYDYEFAYWGQGTLVTVSA

SEQ ID NO: 1960 - protein, 119 aa, Artificial Sequence
  source: /note="Description of Artificial Sequence: Synthetic heavy chain variable domain"
QVQLKQSGPGLVQPSQSLSITCTVSGFSLTNYGVHWVRQSPGKGLEWLGVIWSGGNTDYNTPFTSRLSINQDNSKSQVFFKMNSLQSNDTAIYYCARALTYYDYEFAYWGQGTLVTVSA

SEQ ID NO: 1961 - protein, 119 aa, Artificial Sequence
  source: /note="Description of Artificial Sequence: Synthetic heavy chain variable domain"
QVQLKQSGPGLVQPSQSLSITCTVSGFSLTNYGVHWVRQSPGKGLEWLGVIWSGGNTDYNTPFTSRLSINRDNSKSQVFFKMNSLQSNDTAIYYCARALTYYDYEFAYWGQGTLVTVSA

SEQ ID NO: 1962 - protein, 119 aa, Artificial Sequence
  source: /note="Description of Artificial Sequence: Synthetic heavy chain variable domain"
QVQLKQSGPGLVQPSQSLSITCTVSGFSLTNYGVHWVRQSPGKGLEWLGVIWSGGNTDYNTPFTSRLSINSDNSKSQVFFKMNSLQSNDTAIYYCARALTYYDYEFAYWGQGTLVTVSA

SEQ ID NO: 1963 - protein, 119 aa, Artificial Sequence
  source: /note="Description of Artificial Sequence: Synthetic heavy chain variable domain"
QVQLKQSGPGLVQPSQSLSITCTVSGFSLTNYGVHWVRQSPGKGLEWLGVIWSGGNTDYNTPFTSRLSINTDNSKSQVFFKMNSLQSNDTAIYYCARALTYYDYEFAYWGQGTLVTVSA

SEQ ID NO: 1964 - protein, 119 aa, Artificial Sequence
  source: /note="Description of Artificial Sequence: Synthetic heavy chain variable domain"
QVQLKQSGPGLVQPSQSLSITCTVSGFSLTNYGVHWVRQSPGKGLEWLGVIWSGGNTDYNTPFTSRLSINVDNSKSQVFFKMNSLQSNDTAIYYCARALTYYDYEFAYWGQGTLVTVSA

SEQ ID NO: 1965 - protein, 119 aa, Artificial Sequence
  source: /note="Description of Artificial Sequence: Synthetic heavy chain variable domain"
QVQLKQSGPGLVQPSQSLSITCTVSGFSLTNYGVHWVRQSPGKGLEWLGVIWSGGNTDYNTPFTSRLSINWDNSKSQVFFKMNSLQSNDTAIYYCARALTYYDYEFAYWGQGTLVTVSA

SEQ ID NO: 1966 - protein, 119 aa, Artificial Sequence
  source: /note="Description of Artificial Sequence: Synthetic heavy chain variable domain"
QVQLKQSGPGLVQPSQSLSITCTVSGFSLTNYGVHWVRQSPGKGLEWLGVIWSGGNTDYNTPFTSRLSINYDNSKSQVFFKMNSLQSNDTAIYYCARALTYYDYEFAYWGQGTLVTVSA

SEQ ID NO: 1967 - protein, 119 aa, Artificial Sequence
  source: /note="Description of Artificial Sequence: Synthetic heavy chain variable domain"
QVQLKQSGPGLVQPSQSLSITCTVSGFSLTNYGVHWVRQSPGKGLEWLGVIWSGGNTDYNTPFTSRLSIPKDNSKSQVFFKMNSLQSNDTAIYYCARALTYYDYEFAYWGQGTLVTVSA

SEQ ID NO: 1968 - protein, 119 aa, Artificial Sequence
  source: /note="Description of Artificial Sequence: Synthetic heavy chain variable domain"
QVQLKQSGPGLVQPSQSLSITCTVSGFSLTNYGVHWVRQSPGKGLEWLGVIWSGGNTDYNTPFTSRLSIQKDNSKSQVFFKMNSLQSNDTAIYYCARALTYYDYEFAYWGQGTLVTVSA

SEQ ID NO: 1969 - protein, 119 aa, Artificial Sequence
  source: /note="Description of Artificial Sequence: Synthetic heavy chain variable domain"
QVQLKQSGPGLVQPSQSLSITCTVSGFSLTNYGVHWVRQSPGKGLEWLGVIWSGGNTDYNTPFTSRLSIRKDNSKSQVFFKMNSLQSNDTAIYYCARALTYYDYEFAYWGQGTLVTVSA

SEQ ID NO: 1970 - protein, 119 aa, Artificial Sequence
  source: /note="Description of Artificial Sequence: Synthetic heavy chain variable domain"
QVQLKQSGPGLVQPSQSLSITCTVSGFSLTNYGVHWVRQSPGKGLEWLGVIWSGGNTDYNTPFTSRLSISKDNSKSQVFFKMNSLQSNDTAIYYCARALTYYDYEFAYWGQGTLVTVSA

SEQ ID NO: 1971 - protein, 119 aa, Artificial Sequence
  source: /note="Description of Artificial Sequence: Synthetic heavy chain variable domain"
QVQLKQSGPGLVQPSQSLSITCTVSGFSLTNYGVHWVRQSPGKGLEWLGVIWSGGNTDYNTPFTSRLSITKDNSKSQVFFKMNSLQSNDTAIYYCARALTYYDYEFAYWGQGTLVTVSA

SEQ ID NO: 1972 - protein, 119 aa, Artificial Sequence
  source: /note="Description of Artificial Sequence: Synthetic heavy chain variable domain"
QVQLKQSGPGLVQPSQSLSITCTVSGFSLTNYGVHWVRQSPGKGLEWLGVIWSGGNTDYNTPFTSRLSIVKDNSKSQVFFKMNSLQSNDTAIYYCARALTYYDYEFAYWGQGTLVTVSA

SEQ ID NO: 1973 - protein, 119 aa, Artificial Sequence
  source: /note="Description of Artificial Sequence: Synthetic heavy chain variable domain"
QVQLKQSGPGLVQPSQSLSITCTVSGFSLTNYGVHWVRQSPGKGLEWLGVIWSGGNTDYNTPFTSRLSIYKDNSKSQVFFKMNSLQSNDTAIYYCARALTYYDYEFAYWGQGTLVTVSA

SEQ ID NO: 1974 - protein, 119 aa, Artificial Sequence
  source: /note="Description of Artificial Sequence: Synthetic heavy chain variable domain"
QVQLKQSGPGLVQPSQSLSITCTVSGFSLTNYGVHWVRQSPGKGLEWLGVIWSGGNTDYNTPFTSRLSYNKDNSKSQVFFKMNSLQSNDTAIYYCARALTYYDYEFAYWGQGTLVTVSA

SEQ ID NO: 1975 - protein, 119 aa, Artificial Sequence
  source: /note="Description of Artificial Sequence: Synthetic heavy chain variable domain"
QVQLKQSGPGLVQPSQSLSITCTVSGFSLTNYGVHWVRQSPGKGLEWLGVIWSGGNTDYNTPFTSRLVINKDNSKSQVFFKMNSLQSNDTAIYYCARALTYYDYEFAYWGQGTLVTVSA

SEQ ID NO: 1976 - protein, 119 aa, Artificial Sequence
  source: /note="Description of Artificial Sequence: Synthetic heavy chain variable domain"
QVQLKQSGPGLVQPSQSLSITCTVSGFSLTNYGVHWVRQSPGKGLEWLGVIWSGGNTDYNTPFTSRMSINKDNSKSQVFFKMNSLQSNDTAIYYCARALTYYDYEFAYWGQGTLVTVSA

SEQ ID NO: 1977 - protein, 119 aa, Artificial Sequence
  source: /note="Description of Artificial Sequence: Synthetic heavy chain variable domain"
QVQLKQSGPGLVQPSQSLSITCTVSGFSLTNYGVHWVRQSPGKGLEWLGVIWSGGNTDYNTPFTSRQSINKDNSKSQVFFKMNSLQSNDTAIYYCARALTYYDYEFAYWGQGTLVTVSA

SEQ ID NO: 1978 - protein, 119 aa, Artificial Sequence
  source: /note="Description of Artificial Sequence: Synthetic heavy chain variable domain"
QVQLKQSGPGLVQPSQSLSITCTVSGFSLTNYGVHWVRQSPGKGLEWLGVIWSGGNTDYNTPFTSRSSINKDNSKSQVFFKMNSLQSNDTAIYYCARALTYYDYEFAYWGQGTLVTVSA

SEQ ID NO: 1979 - protein, 119 aa, Artificial Sequence
  source: /note="Description of Artificial Sequence: Synthetic heavy chain variable domain"
QVQLKQSGPGLVQPSQSLSITCTVSGFSLTNYGVHWVRQSPGKGLEWLGVIWSGGNTDYNTPFTSRTSINKDNSKSQVFFKMNSLQSNDTAIYYCARALTYYDYEFAYWGQGTLVTVSA

SEQ ID NO: 1980 - protein, 119 aa, Artificial Sequence
  source: /note="Description of Artificial Sequence: Synthetic heavy chain variable domain"
QVQLKQSGPGLVQPSQSLSITCTVSGFSLTNYGVHWVRQSPGKGLEWLGVIWSGGNTDYNTPFTSRVSINKDNSKSQVFFKMNSLQSNDTAIYYCARALTYYDYEFAYWGQGTLVTVSA

SEQ ID NO: 1981 - protein, 119 aa, Artificial Sequence
  source: /note="Description of Artificial Sequence: Synthetic heavy chain variable domain"
QVQLKQSGPGLVQPSQSLSITCTVSGFSLTNYGVHWVRQSPGKGLEWLGVIWSGGNTDYNTPFTSRYSINKDNSKSQVFFKMNSLQSNDTAIYYCARALTYYDYEFAYWGQGTLVTVSA

SEQ ID NO: 1982 - protein, 119 aa, Artificial Sequence
  source: /note="Description of Artificial Sequence: Synthetic heavy chain variable domain"
QVQLKQSGPGLVQPSQSLSITCTVSGFSLTNYGVHWVRQSPGKGLEWLGVIWSGGNTDYNTPFTSSLSINKDNSKSQVFFKMNSLQSNDTAIYYCARALTYYDYEFAYWGQGTLVTVSA

SEQ ID NO: 1983 - protein, 119 aa, Artificial Sequence
  source: /note="Description of Artificial Sequence: Synthetic heavy chain variable domain"
QVQLKQSGPGLVQPSQSLSITCTVSGFSLTNYGVHWVRQSPGKGLEWLGVIWSGGNTDYNTPFTSTLSINKDNSKSQVFFKMNSLQSNDTAIYYCARALTYYDYEFAYWGQGTLVTVSA

SEQ ID NO: 1984 - protein, 119 aa, Artificial Sequence
  source: /note="Description of Artificial Sequence: Synthetic heavy chain variable domain"
QVQLKQSGPGLVQPSQSLSITCTVSGFSLTNYGVHWVRQSPGKGLEWLGVIWSGGNTDYNTPFTSVLSINKDNSKSQVFFKMNSLQSNDTAIYYCARALTYYDYEFAYWGQGTLVTVSA

SEQ ID NO: 1985 - protein, 119 aa, Artificial Sequence
  source: /note="Description of Artificial Sequence: Synthetic heavy chain variable domain"
QVQLKQSGPGLVQPSQSLSITCTVSGFSLTNYGVHWVRQSPGKGLEWLGVIWSGGNTDYNTPFTTRLSINKDNSKSQVFFKMNSLQSNDTAIYYCARALTYYDYEFAYWGQGTLVTVSA

SEQ ID NO: 1986 - protein, 119 aa, Artificial Sequence
  source: /note="Description of Artificial Sequence: Synthetic heavy chain variable domain"
QVQLKQSGPGLVQPSQSLSITCTVSGFSLTNYGVHWVRQSPGKGLEWLGVIWSGGNTDYNTPFTWRLSINKDNSKSQVFFKMNSLQSNDTAIYYCARALTYYDYEFAYWGQGTLVTVSA

SEQ ID NO: 1987 - protein, 119 aa, Artificial Sequence
  source: /note="Description of Artificial Sequence: Synthetic heavy chain variable domain"
QVQLKQSGPGLVQPSQSLSITCTVSGFSLTNYGVHWVRQSPGKGLEWLGVIWSGGNTDYNTPFTYRLSINKDNSKSQVFFKMNSLQSNDTAIYYCARALTYYDYEFAYWGQGTLVTVSA

SEQ ID NO: 1988 - protein, 119 aa, Artificial Sequence
  source: /note="Description of Artificial Sequence: Synthetic heavy chain variable domain"
QVQLKQSGPGLVQPSQSLSITCTVSGFSLTNYGVHWVRQSPGKGLEWLGVIWSGGNTDYNTPFVSRLSINKDNSKSQVFFKMNSLQSNDTAIYYCARALTYYDYEFAYWGQGTLVTVSA

SEQ ID NO: 1989 - protein, 119 aa, Artificial Sequence
  source: /note="Description of Artificial Sequence: Synthetic heavy chain variable domain"
QVQLKQSGPGLVQPSQSLSITCTVSGFSLTNYGVHWVRQSPGKGLEWLGVIWSGGNTDYNTPGTSRLSINKDNSKSQVFFKMNSLQSNDTAIYYCARALTYYDYEFAYWGQGTLVTVSA

SEQ ID NO: 1990 - protein, 119 aa, Artificial Sequence
  source: /note="Description of Artificial Sequence: Synthetic heavy chain variable domain"
QVQLKQSGPGLVQPSQSLSITCTVSGFSLTNYGVHWVRQSPGKGLEWLGVIWSGGNTDYNTPHTSRLSINKDNSKSQVFFKMNSLQSNDTAIYYCARALTYYDYEFAYWGQGTLVTVSA

SEQ ID NO: 1991 - protein, 119 aa, Artificial Sequence
  source: /note="Description of Artificial Sequence: Synthetic heavy chain variable domain"
QVQLKQSGPGLVQPSQSLSITCTVSGFSLTNYGVHWVRQSPGKGLEWLGVIWSGGNTDYNTPLTSRLSINKDNSKSQVFFKMNSLQSNDTAIYYCARALTYYDYEFAYWGQGTLVTVSA

SEQ ID NO: 1992 - protein, 119 aa, Artificial Sequence
  source: /note="Description of Artificial Sequence: Synthetic heavy chain variable domain"
QVQLKQSGPGLVQPSQSLSITCTVSGFSLTNYGVHWVRQSPGKGLEWLGVIWSGGNTDYNTPMTSRLSINKDNSKSQVFFKMNSLQSNDTAIYYCARALTYYDYEFAYWGQGTLVTVSA

SEQ ID NO: 1993 - protein, 119 aa, Artificial Sequence
  source: /note="Description of Artificial Sequence: Synthetic heavy chain variable domain"
QVQLKQSGPGLVQPSQSLSITCTVSGFSLTNYGVHWVRQSPGKGLEWLGVIWSGGNTDYNTPNTSRLSINKDNSKSQVFFKMNSLQSNDTAIYYCARALTYYDYEFAYWGQGTLVTVSA

SEQ ID NO: 1994 - protein, 119 aa, Artificial Sequence
  source: /note="Description of Artificial Sequence: Synthetic heavy chain variable domain"
QVQLKQSGPGLVQPSQSLSITCTVSGFSLTNYGVHWVRQSPGKGLEWLGVIWSGGNTDYNTPPTSRLSINKDNSKSQVFFKMNSLQSNDTAIYYCARALTYYDYEFAYWGQGTLVTVSA

SEQ ID NO: 1995 - protein, 119 aa, Artificial Sequence
  source: /note="Description of Artificial Sequence: Synthetic heavy chain variable domain"
QVQLKQSGPGLVQPSQSLSITCTVSGFSLTNYGVHWVRQSPGKGLEWLGVIWSGGNTDYNTPQTSRLSINKDNSKSQVFFKMNSLQSNDTAIYYCARALTYYDYEFAYWGQGTLVTVSA

SEQ ID NO: 1996 - protein, 119 aa, Artificial Sequence
  source: /note="Description of Artificial Sequence: Synthetic heavy chain variable domain"
QVQLKQSGPGLVQPSQSLSITCTVSGFSLTNYGVHWVRQSPGKGLEWLGVIWSGGNTDYNTPRTSRLSINKDNSKSQVFFKMNSLQSNDTAIYYCARALTYYDYEFAYWGQGTLVTVSA

SEQ ID NO: 1997 - protein, 119 aa, Artificial Sequence
  source: /note="Description of Artificial Sequence: Synthetic heavy chain variable domain"
QVQLKQSGPGLVQPSQSLSITCTVSGFSLTNYGVHWVRQSPGKGLEWLGVIWSGGNTDYNTPSTSRLSINKDNSKSQVFFKMNSLQSNDTAIYYCARALTYYDYEFAYWGQGTLVTVSA

SEQ ID NO: 1998 - protein, 119 aa, Artificial Sequence
  source: /note="Description of Artificial Sequence: Synthetic heavy chain variable domain"
QVQLKQSGPGLVQPSQSLSITCTVSGFSLTNYGVHWVRQSPGKGLEWLGVIWSGGNTDYNTPVTSRLSINKDNSKSQVFFKMNSLQSNDTAIYYCARALTYYDYEFAYWGQGTLVTVSA

SEQ ID NO: 1999 - protein, 119 aa, Artificial Sequence
  source: /note="Description of Artificial Sequence: Synthetic heavy chain variable domain"
QVQLKQSGPGLVQPSQSLSITCTVSGFSLTNYGVHWVRQSPGKGLEWLGVIWSGGNTDYPTPFTSRLSINKDNSKSQVFFKMNSLQSNDTAIYYCARALTYYDYEFAYWGQGTLVTVSA

SEQ ID NO: 2000 - protein, 119 aa, Artificial Sequence
  source: /note="Description of Artificial Sequence: Synthetic heavy chain variable domain"
QVQLKQSGPGLVQPSQSLSITCTVSGFSLTNYGVHWVRQSPGKGLEWLGVIWSGGNTDYQTPFTSRLSINKDNSKSQVFFKMNSLQSNDTAIYYCARALTYYDYEFAYWGQGTLVTVSA

SEQ ID NO: 2001 - protein, 119 aa, Artificial Sequence
  source: /note="Description of Artificial Sequence: Synthetic heavy chain variable domain"
QVQLKQSGPGLVQPSQSLSITCTVSGFSLTNYGVHWVRQSPGKGLEWLGVIWSGGNTDYSTPFTSRLSINKDNSKSQVFFKMNSLQSNDTAIYYCARALTYYDYEFAYWGQGTLVTVSA

SEQ ID NO: 2002 - protein, 119 aa, Artificial Sequence
  source: /note="Description of Artificial Sequence: Synthetic heavy chain variable domain"
QVQLKQSGPGLVQPSQSLSITCTVSGFSLTNYGVHWVRQSPGKGLEWLGVIWSGGNTDYTTPFTSRLSINKDNSKSQVFFKMNSLQSNDTAIYYCARALTYYDYEFAYWGQGTLVTVSA

SEQ ID NO: 2003 - protein, 119 aa, Artificial Sequence
  source: /note="Description of Artificial Sequence: Synthetic heavy chain variable domain"
QVQLKQSGPGLVQPSQSLSITCTVSGFSLTNYGVHWVRQSPGKGLEWLGVIWSGGNTDYYTPFTSRLSINKDNSKSQVFFKMNSLQSNDTAIYYCARALTYYDYEFAYWGQGTLVTVSA

SEQ ID NO: 2004 - protein, 119 aa, Artificial Sequence
  source: /note="Description of Artificial Sequence: Synthetic heavy chain variable domain"
QVQLKQSGPGLVQPSQSLSITCTVSGFSLTNYGVHWVRQSPGKGLEWLGVIWSGGNTGYNTPFTSRLSINKDNSKSQVFFKMNSLQSNDTAIYYCARALTYYDYEFAYWGQGTLVTVSA

SEQ ID NO: 2005 - protein, 119 aa, Artificial Sequence
  source: /note="Description of Artificial Sequence: Synthetic heavy chain variable domain"
QVQLKQSGPGLVQPSQSLSITCTVSGFSLTNYGVHWVRQSPGKGLEWLGVIWSGGNTLYNTPFTSRLSINKDNSKSQVFFKMNSLQSNDTAIYYCARALTYYDYEFAYWGQGTLVTVSA

SEQ ID NO: 2006 - protein, 119 aa, Artificial Sequence
  source: /note="Description of Artificial Sequence: Synthetic heavy chain variable domain"
QVQLKQSGPGLVQPSQSLSITCTVSGFSLTNYGVHWVRQSPGKGLEWLGVIWSGGNTMYNTPFTSRLSINKDNSKSQVFFKMNSLQSNDTAIYYCARALTYYDYEFAYWGQGTLVTVSA

SEQ ID NO: 2007 - protein, 119 aa, Artificial Sequence
  source: /note="Description of Artificial Sequence: Synthetic heavy chain variable domain"
QVQLKQSGPGLVQPSQSLSITCTVSGFSLTNYGVHWVRQSPGKGLEWLGVIWSGGNTNYNTPFTSRLSINKDNSKSQVFFKMNSLQSNDTAIYYCARALTYYDYEFAYWGQGTLVTVSA

SEQ ID NO: 2008 - protein, 119 aa, Artificial Sequence
  source: /note="Description of Artificial Sequence: Synthetic heavy chain variable domain"
QVQLKQSGPGLVQPSQSLSITCTVSGFSLTNYGVHWVRQSPGKGLEWLGVIWSGGNTQYNTPFTSRLSINKDNSKSQVFFKMNSLQSNDTAIYYCARALTYYDYEFAYWGQGTLVTVSA

SEQ ID NO: 2009 - protein, 119 aa, Artificial Sequence
  source: /note="Description of Artificial Sequence: Synthetic heavy chain variable domain"
QVQLKQSGPGLVQPSQSLSITCTVSGFSLTNYGVHWVRQSPGKGLEWLGVIWSGGNWDYNTPFTSRLSINKDNSKSQVFFKMNSLQSNDTAIYYCARALTYYDYEFAYWGQGTLVTVSA

SEQ ID NO: 2010 - protein, 119 aa, Artificial Sequence
  source: /note="Description of Artificial Sequence: Synthetic heavy chain variable domain"
QVQLKQSGPGLVQPSQSLSITCTVSGFSLTNYGVHWVRQSPGKGLEWLGVIWSGGNYDYNTPFTSRLSINKDNSKSQVFFKMNSLQSNDTAIYYCARALTYYDYEFAYWGQGTLVTVSA

SEQ ID NO: 2011 - protein, 119 aa, Artificial Sequence
  source: /note="Description of Artificial Sequence: Synthetic heavy chain variable domain"
QVQLKQSGPGLVQPSQSLSITCTVSGFSLTNYGVHWVRQSPGKGLEWLGVIWSGGPTDYNTPFTSRLSINKDNSKSQVFFKMNSLQSNDTAIYYCARALTYYDYEFAYWGQGTLVTVSA

SEQ ID NO: 2012 - protein, 119 aa, Artificial Sequence
  source: /note="Description of Artificial Sequence: Synthetic heavy chain variable domain"
QVQLKQSGPGLVQPSQSLSITCTVSGFSLTNYGVHWVRQSPGKGLEWLGVIWSGGSTDYNTPFTSRLSINKDNSKSQVFFKMNSLQSNDTAIYYCARALTYYDYEFAYWGQGTLVTVSA

SEQ ID NO: 2013 - protein, 119 aa, Artificial Sequence
  source: /note="Description of Artificial Sequence: Synthetic heavy chain variable domain"
QVQLKQSGPGLVQPSQSLSITCTVSGFSLTNYGVHWVRQSPGKGLEWLGVIWSGGVTDYNTPFTSRLSINKDNSKSQVFFKMNSLQSNDTAIYYCARALTYYDYEFAYWGQGTLVTVSA

SEQ ID NO: 2014 - protein, 119 aa, Artificial Sequence
  source: /note="Description of Artificial Sequence: Synthetic heavy chain variable domain"
QVQLKQSGPGLVQPSQSLSITCTVSGFSLTNYGVHWVRQSPGKGLEWLGVIWSGHNTDYNTPFTSRLSINKDNSKSQVFFKMNSLQSNDTAIYYCARALTYYDYEFAYWGQGTLVTVSA

SEQ ID NO: 2015 - protein, 119 aa, Artificial Sequence
  source: /note="Description of Artificial Sequence: Synthetic heavy chain variable domain"
QVQLKQSGPGLVQPSQSLSITCTVSGFSLTNYGVHWVRQSPGKGLEWLGVIWSGMNTDYNTPFTSRLSINKDNSKSQVFFKMNSLQSNDTAIYYCARALTYYDYEFAYWGQGTLVTVSA

SEQ ID NO: 2016 - protein, 119 aa, Artificial Sequence
  source: /note="Description of Artificial Sequence: Synthetic heavy chain variable domain"
QVQLKQSGPGLVQPSQSLSITCTVSGFSLTNYGVHWVRQSPGKGLEWLGVIWSGRNTDYNTPFTSRLSINKDNSKSQVFFKMNSLQSNDTAIYYCARALTYYDYEFAYWGQGTLVTVSA

SEQ ID NO: 2017 - protein, 119 aa, Artificial Sequence
  source: /note="Description of Artificial Sequence: Synthetic heavy chain variable domain"
QVQLKQSGPGLVQPSQSLSITCTVSGFSLTNYGVHWVRQSPGKGLEWLGVIWSGSNTDYNTPFTSRLSINKDNSKSQVFFKMNSLQSNDTAIYYCARALTYYDYEFAYWGQGTLVTVSA

SEQ ID NO: 2018 - protein, 119 aa, Artificial Sequence
  source: /note="Description of Artificial Sequence: Synthetic heavy chain variable domain"
QVQLKQSGPGLVQPSQSLSITCTVSGFSLTNYGVHWVRQSPGKGLEWLGVIWSGYNTDYNTPFTSRLSINKDNSKSQVFFKMNSLQSNDTAIYYCARALTYYDYEFAYWGQGTLVTVSA

SEQ ID NO: 2019 - protein, 119 aa, Artificial Sequence
  source: /note="Description of Artificial Sequence: Synthetic heavy chain variable domain"
QVQLKQSGPGLVQPSQSLSITCTVSGFSLTNYGVHWVRQSPGKGLEWLGVIWSHGNTDYNTPFTSRLSINKDNSKSQVFFKMNSLQSNDTAIYYCARALTYYDYEFAYWGQGTLVTVSA

SEQ ID NO: 2020 - protein, 119 aa, Artificial Sequence
  source: /note="Description of Artificial Sequence: Synthetic heavy chain variable domain"
QVQLKQSGPGLVQPSQSLSITCTVSGFSLTNYGVHWVRQSPGKGLEWLGVIWSPGNTDYNTPFTSRLSINKDNSKSQVFFKMNSLQSNDTAIYYCARALTYYDYEFAYWGQGTLVTVSA

SEQ ID NO: 2021 - protein, 119 aa, Artificial Sequence
  source: /note="Description of Artificial Sequence: Synthetic heavy chain variable domain"
QVQLKQSGPGLVQPSQSLSITCTVSGFSLTNYGVHWVRQSPGKGLEWLGVIWSRGNTDYNTPFTSRLSINKDNSKSQVFFKMNSLQSNDTAIYYCARALTYYDYEFAYWGQGTLVTVSA

SEQ ID NO: 2022 - protein, 119 aa, Artificial Sequence
  source: /note="Description of Artificial Sequence: Synthetic heavy chain variable domain"
QVQLKQSGPGLVQPSQSLSITCTVSGFSLTNYGVHWVRQSPGKGLEWLGVIWSSGNTDYNTPFTSRLSINKDNSKSQVFFKMNSLQSNDTAIYYCARALTYYDYEFAYWGQGTLVTVSA

SEQ ID NO: 2023 - protein, 119 aa, Artificial Sequence
  source: /note="Description of Artificial Sequence: Synthetic heavy chain variable domain"
QVQLKQSGPGLVQPSQSLSITCTVSGFSLTNYGVHWVRQSPGKGLEWLGVIWTGGNTDYNTPFTSRLSINKDNSKSQVFFKMNSLQSNDTAIYYCARALTYYDYEFAYWGQGTLVTVSA

SEQ ID NO: 2024 - protein, 119 aa, Artificial Sequence
  source: /note="Description of Artificial Sequence: Synthetic heavy chain variable domain"
QVQLKQSGPGLVQPSQSLSITCTVSGFSLTNYGVHWVRQSPGKGLEWLGVIWVGGNTDYNTPFTSRLSINKDNSKSQVFFKMNSLQSNDTAIYYCARALTYYDYEFAYWGQGTLVTVSA

SEQ ID NO: 2025 - protein, 119 aa, Artificial Sequence
  source: /note="Description of Artificial Sequence: Synthetic heavy chain variable domain"
QVQLKQSGPGLVQPSQSLSITCTVSGFSLTNYGVHWVRQSPGKGLEWLGVIWYGGNTDYNTPFTSRLSINKDNSKSQVFFKMNSLQSNDTAIYYCARALTYYDYEFAYWGQGTLVTVSA

SEQ ID NO: 2026 - protein, 119 aa, Artificial Sequence
  source: /note="Description of Artificial Sequence: Synthetic heavy chain variable domain"
QVQLKQSGPGLVQPSQSLSITCTVSGFSLTNYGVHWVRQSPGKGLEWLGVIYSGGNTDYNTPFTSRLSINKDNSKSQVFFKMNSLQSNDTAIYYCARALTYYDYEFAYWGQGTLVTVSA

SEQ ID NO: 2027 - protein, 119 aa, Artificial Sequence
  source: /note="Description of Artificial Sequence: Synthetic heavy chain variable domain"
QVQLKQSGPGLVQPSQSLSITCTVSGFSLTNYGVHWVRQSPGKGLEWLGVKWSGGNTDYNTPFTSRLSINKDNSKSQVFFKMNSLQSNDTAIYYCARALTYYDYEFAYWGQGTLVTVSA

SEQ ID NO: 2028 - protein, 119 aa, Artificial Sequence
  source: /note="Description of Artificial Sequence: Synthetic heavy chain variable domain"
QVQLKQSGPGLVQPSQSLSITCTVSGFSLTNYGVHWVRQSPGKGLEWLGVLWSGGNTDYNTPFTSRLSINKDNSKSQVFFKMNSLQSNDTAIYYCARALTYYDYEFAYWGQGTLVTVSA

SEQ ID NO: 2029 - protein, 119 aa, Artificial Sequence
  source: /note="Description of Artificial Sequence: Synthetic heavy chain variable domain"
QVQLKQSGPGLVQPSQSLSITCTVSGFSLTNYGVHWVRQSPGKGLEWLGVNWSGGNTDYNTPFTSRLSINKDNSKSQVFFKMNSLQSNDTAIYYCARALTYYDYEFAYWGQGTLVTVSA

SEQ ID NO: 2030 - protein, 119 aa, Artificial Sequence
  source: /note="Description of Artificial Sequence: Synthetic heavy chain variable domain"
QVQLKQSGPGLVQPSQSLSITCTVSGFSLTNYGVHWVRQSPGKGLEWLGVQWSGGNTDYNTPFTSRLSINKDNSKSQVFFKMNSLQSNDTAIYYCARALTYYDYEFAYWGQGTLVTVSA

SEQ ID NO: 2031 - protein, 119 aa, Artificial Sequence
  source: /note="Description of Artificial Sequence: Synthetic heavy chain variable domain"
QVQLKQSGPGLVQPSQSLSITCTVSGFSLTNYGVHWVRQSPGKGLEWLGVSWSGGNTDYNTPFTSRLSINKDNSKSQVFFKMNSLQSNDTAIYYCARALTYYDYEFAYWGQGTLVTVSA

SEQ ID NO: 2032 - protein, 119 aa, Artificial Sequence
  source: /note="Description of Artificial Sequence: Synthetic heavy chain variable domain"
QVQLKQSGPGLVQPSQSLSITCTVSGFSLTNYGVHWVRQSPGKGLEWLGVVWSGGNTDYNTPFTSRLSINKDNSKSQVFFKMNSLQSNDTAIYYCARALTYYDYEFAYWGQGTLVTVSA

SEQ ID NO: 2033 - protein, 119 aa, Artificial Sequence
  source: /note="Description of Artificial Sequence: Synthetic heavy chain variable domain"
QVQLKQSGPGLVQPSQSLSITCTVSGFSLTNYGVHWVRQSPGKGLEWLGVYWSGGNTDYNTPFTSRLSINKDNSKSQVFFKMNSLQSNDTAIYYCARALTYYDYEFAYWGQGTLVTVSA

SEQ ID NO: 2034 - protein, 119 aa, Artificial Sequence
  source: /note="Description of Artificial Sequence: Synthetic heavy chain variable domain"
QVQLKQSGPGLVQPSQSLSITCTVSGFSLTNYGVHYVRQSPGKGLEWLGVIWSGGNTDYNTPFTSRLSINKDNSKSQVFFKMNSLQSNDTAIYYCARALTYYDYEFAYWGQGTLVTVSA

SEQ ID NO: 2035 - protein, 119 aa, Artificial Sequence
  source: /note="Description of Artificial Sequence: Synthetic heavy chain variable domain"
QVQLKQSGPGLVQPSQSLSITCTVSGFSLTNYGVIWVRQSPGKGLEWLGVIWSGGNTDYNTPFTSRLSINKDNSKSQVFFKMNSLQSNDTAIYYCARALTYYDYEFAYWGQGTLVTVSA

SEQ ID NO: 2036 - protein, 119 aa, Artificial Sequence
  source: /note="Description of Artificial Sequence: Synthetic heavy chain variable domain"
QVQLKQSGPGLVQPSQSLSITCTVSGFSLTNYGVQWVRQSPGKGLEWLGVIWSGGNTDYNTPFTSRLSINKDNSKSQVFFKMNSLQSNDTAIYYCARALTYYDYEFAYWGQGTLVTVSA

SEQ ID NO: 2037 - protein, 119 aa, Artificial Sequence
  source: /note="Description of Artificial Sequence: Synthetic heavy chain variable domain"
QVQLKQSGPGLVQPSQSLSITCTVSGFSLTNYMVHWVRQSPGKGLEWLGVIWSGGNTDYNTPFTSRLSINKDNSKSQVFFKMNSLQSNDTAIYYCARALTYYDYEFAYWGQGTLVTVSA

SEQ ID NO: 2038 - protein, 119 aa, Artificial Sequence
  source: /note="Description of Artificial Sequence: Synthetic heavy chain variable domain"
QVQLKQSGPGLVQPSQSLSITCTVSGFSLTNYSVHWVRQSPGKGLEWLGVIWSGGNTDYNTPFTSRLSINKDNSKSQVFFKMNSLQSNDTAIYYCARALTYYDYEFAYWGQGTLVTVSA

SEQ ID NO: 2039 - protein, 119 aa, Artificial Sequence
  source: /note="Description of Artificial Sequence: Synthetic heavy chain variable domain"
QVQLKQSGPGLVQPSQSLSITCTVSGFSLTNYTVHWVRQSPGKGLEWLGVIWSGGNTDYNTPFTSRLSINKDNSKSQVFFKMNSLQSNDTAIYYCARALTYYDYEFAYWGQGTLVTVSA

SEQ ID NO: 2040 - protein, 119 aa, Artificial Sequence
  source: /note="Description of Artificial Sequence: Synthetic heavy chain variable domain"
QVQLKQSGPGLVQPSQSLSITCTVSGFSLTNYYVHWVRQSPGKGLEWLGVIWSGGNTDYNTPFTSRLSINKDNSKSQVFFKMNSLQSNDTAIYYCARALTYYDYEFAYWGQGTLVTVSA

SEQ ID NO: 2041 - protein, 119 aa, Artificial Sequence
  source: /note="Description of Artificial Sequence: Synthetic heavy chain variable domain"
QVQLKQSGPGLVQPSQSLSITCTVSGFSLTTYGVHWVRQSPGKGLEWLGVIWSGGNTDYNTPFTSRLSINKDNSKSQVFFKMNSLQSNDTAIYYCARALTYYDYEFAYWGQGTLVTVSA

SEQ ID NO: 2042 - protein, 119 aa, Artificial Sequence
  source: /note="Description of Artificial Sequence: Synthetic heavy chain variable domain"
QVQLKQSGPGLVQPSQSLSITCTVSGFSLTVYGVHWVRQSPGKGLEWLGVIWSGGNTDYNTPFTSRLSINKDNSKSQVFFKMNSLQSNDTAIYYCARALTYYDYEFAYWGQGTLVTVSA

SEQ ID NO: 2043 - protein, 119 aa, Artificial Sequence
  source: /note="Description of Artificial Sequence: Synthetic heavy chain variable domain"
QVQLKQSGPGLVQPSQSLSITCTVSGFSLVNYGVHWVRQSPGKGLEWLGVIWSGGNTDYNTPFTSRLSINKDNSKSQVFFKMNSLQSNDTAIYYCARALTYYDYEFAYWGQGTLVTVSA

SEQ ID NO: 2044 - protein, 119 aa, Artificial Sequence
  source: /note="Description of Artificial Sequence: Synthetic heavy chain variable domain"
QVQLKQSGPGLVQPSQSLSITCTVSGFSLWNYGVHWVRQSPGKGLEWLGVIWSGGNTDYNTPFTSRLSINKDNSKSQVFFKMNSLQSNDTAIYYCARALTYYDYEFAYWGQGTLVTVSA

SEQ ID NO: 2045 - protein, 119 aa, Artificial Sequence
  source: /note="Description of Artificial Sequence: Synthetic heavy chain variable domain"
QVQLKQSGPGLVQPSQSLSITCTVSGFSLYNYGVHWVRQSPGKGLEWLGVIWSGGNTDYNTPFTSRLSINKDNSKSQVFFKMNSLQSNDTAIYYCARALTYYDYEFAYWGQGTLVTVSA

SEQ ID NO: 2046 - protein, 119 aa, Artificial Sequence
  source: /note="Description of Artificial Sequence: Synthetic heavy chain variable domain"
QVQLKQSGPGLVQPSQSLSITCTVSGFSMTNYGVHWVRQSPGKGLEWLGVIWSGGNTDYNTPFTSRLSINKDNSKSQVFFKMNSLQSNDTAIYYCARALTYYDYEFAYWGQGTLVTVSA

SEQ ID NO: 2047 - protein, 119 aa, Artificial Sequence
  source: /note="Description of Artificial Sequence: Synthetic heavy chain variable domain"
QVQLKQSGPGLVQPSQSLSITCTVSGFSNTNYGVHWVRQSPGKGLEWLGVIWSGGNTDYNTPFTSRLSINKDNSKSQVFFKMNSLQSNDTAIYYCARALTYYDYEFAYWGQGTLVTVSA

SEQ ID NO: 2048 - protein, 119 aa, Artificial Sequence
  source: /note="Description of Artificial Sequence: Synthetic heavy chain variable domain"
QVQLKQSGPGLVQPSQSLSITCTVSGFSSTNYGVHWVRQSPGKGLEWLGVIWSGGNTDYNTPFTSRLSINKDNSKSQVFFKMNSLQSNDTAIYYCARALTYYDYEFAYWGQGTLVTVSA

SEQ ID NO: 2049 - protein, 119 aa, Artificial Sequence
  source: /note="Description of Artificial Sequence: Synthetic heavy chain variable domain"
QVQLKQSGPGLVQPSQSLSITCTVSGFSVTNYGVHWVRQSPGKGLEWLGVIWSGGNTDYNTPFTSRLSINKDNSKSQVFFKMNSLQSNDTAIYYCARALTYYDYEFAYWGQGTLVTVSA

SEQ ID NO: 2050 - protein, 119 aa, Artificial Sequence
  source: /note="Description of Artificial Sequence: Synthetic heavy chain variable domain"
QVQLKQSGPGLVQPSQSLSITCTVSGFVLTNYGVHWVRQSPGKGLEWLGVIWSGGNTDYNTPFTSRLSINKDNSKSQVFFKMNSLQSNDTAIYYCARALTYYDYEFAYWGQGTLVTVSA

SEQ ID NO: 2051 - protein, 119 aa, Artificial Sequence
  source: /note="Description of Artificial Sequence: Synthetic heavy chain variable domain"
QVQLKQSGPGLVQPSQSLSITCTVSGFWLTNYGVHWVRQSPGKGLEWLGVIWSGGNTDYNTPFTSRLSINKDNSKSQVFFKMNSLQSNDTAIYYCARALTYYDYEFAYWGQGTLVTVSA

SEQ ID NO: 2052 - protein, 449 aa, Artificial Sequence
  source: /note="Description of Artificial Sequence: Synthetic heavy chain variable domain"
QVQLKQSGPGLVQPSQSLSITCTVSGGSLTNYGVHWVRQSPGKGLEWLGVIWGGGNTDYNTPFTSRLSINKDNSKSQVFFKMNSLQSNDTAIYYCARALTYYDDEFAYWGPGTLVTVSSASTKGPSVFPLAPSSKSTSGGTAALGCLVKDYFPEPVTVSWNSGALTSGVHTFPAVLQSSGLYSLSSVVTVPSSSLGTQTYICNVNHKPSNTKVDKKVEPKSCDKTHTCPPCPAPELLGGPSVFLFPPKPKDTLMISRTPEVTCVVVDVSHEDPEVKFNWYVDGVEVHNAKTKPREEQYNSTYRVVSVLTVLHQDWLNGKEYKCKVSNKALPAPIEKTISKAKGQPREPQVYTLPPSRDELTKNQVSLTCLVKGFYPSDIAVEWESNGQPENNYKTTPPVLDSDGSFFLYSKLTVDKSRWQQGNVFSCSVMHEALHNHYTQKSLSLSPGK

SEQ ID NO: 2053 - protein, 449 aa, Artificial Sequence
  source: /note="Description of Artificial Sequence: Synthetic heavy chain variable domain"
QVQLKQSGPGLVQPSQSLSITCTVSGGSLTNYGVHWVRQSPGKGLEWLGVIWGGGNTDYNTPFTSRLSINKDNSKSQVFFKMNSLQSNDTAIYYCARALTYYDDEFAYWGQGTLVTVSSASTKGPSVFPLAPSSKSTSGGTAALGCLVKDYFPEPVTVSWNSGALTSGVHTFPAVLQSSGLYSLSSVVTVPSSSLGTQTYICNVNHKPSNTKVDKKVEPKSCDKTHTCPPCPAPELLGGPSVFLFPPKPKDTLMISRTPEVTCVVVDVSHEDPEVKFNWYVDGVEVHNAKTKPREEQYNSTYRVVSVLTVLHQDWLNGKEYKCKVSNKALPAPIEKTISKAKGQPREPQVYTLPPSRDELTKNQVSLTCLVKGFYPSDIAVEWESNGQPENNYKTTPPVLDSDGSFFLYSKLTVDKSRWQQGNVFSCSVMHEALHNHYTQKSLSLSPGK

SEQ ID NO: 2054 - protein, 119 aa, Artificial Sequence
  source: /note="Description of Artificial Sequence: Synthetic heavy chain variable domain"
QVQLKQSGPGLVQPSQSLSITCTVSGGSLTNYGVHWVRQSPGKGLEWLGVIWGGGNTDYNTPFTSRLSINKDNSKSQVFFKMNSLQSNDTAIYYCARALTYYDEEFAYWGPGTLVTVSA

SEQ ID NO: 2055 - protein, 119 aa, Artificial Sequence
  source: /note="Description of Artificial Sequence: Synthetic heavy chain variable domain"
QVQLKQSGPGLVQPSQSLSITCTVSGGSLTNYGVHWVRQSPGKGLEWLGVIWGGGNTDYNTPFTSRLSINKDNSKSQVFFKMNSLQSNDTAIYYCARALTYYDEEFAYWGPGTLVTVSS

SEQ ID NO: 2056 - protein, 449 aa, Artificial Sequence
  source: /note="Description of Artificial Sequence: Synthetic heavy chain variable domain"
QVQLKQSGPGLVQPSQSLSITCTVSGGSLTNYGVHWVRQSPGKGLEWLGVIWGGGNTDYNTPFTSRLSINKDNSKSQVFFKMNSLQSNDTAIYYCARALTYYDEEFAYWGPGTLVTVSSASTKGPSVFPLAPSSKSTSGGTAALGCLVKDYFPEPVTVSWNSGALTSGVHTFPAVLQSSGLYSLSSVVTVPSSSLGTQTYICNVNHKPSNTKVDKKVEPKSCDKTHTCPPCPAPELLGGPSVFLFPPKPKDTLMISRTPEVTCVVVDVSHEDPEVKFNWYVDGVEVHNAKTKPREEQYNSTYRVVSVLTVLHQDWLNGKEYKCKVSNKALPAPIEKTISKAKGQPREPQVYTLPPSRDELTKNQVSLTCLVKGFYPSDIAVEWESNGQPENNYKTTPPVLDSDGSFFLYSKLTVDKSRWQQGNVFSCSVMHEALHNHYTQKSLSLSPGK

SEQ ID NO: 2057 - protein, 119 aa, Artificial Sequence
  source: /note="Description of Artificial Sequence: Synthetic heavy chain variable domain"
QVQLKQSGPGLVQPSQSLSITCTVSGGSLTNYGVHWVRQSPGKGLEWLGVIWGGGNTDYNTPFTSRLSINKDNSKSQVFFKMNSLQSNDTAIYYCARALTYYDEEFAYWGQGTLVTVSA

SEQ ID NO: 2058 - protein, 119 aa, Artificial Sequence
  source: /note="Description of Artificial Sequence: Synthetic heavy chain variable domain"
QVQLKQSGPGLVQPSQSLSITCTVSGGSLTNYGVHWVRQSPGKGLEWLGVIWGGGNTDYNTPFTSRLSINKDNSKSQVFFKMNSLQSNDTAIYYCARALTYYDEEFAYWGQGTLVTVSS

SEQ ID NO: 2059 - protein, 119 aa, Artificial Sequence
  source: /note="Description of Artificial Sequence: Synthetic heavy chain variable domain"
QVQLKQSGPGLVQPSQSLSITCTVSGGSLTNYGVHWVRQSPGKGLEWLGVIWGGGNTDYNTPFTSRLSINKDNSKSQVFFKMNSLQSNDTAIYYCARALTYYDDEFAYWGQGTLVTVSA

SEQ ID NO: 2060 - protein, 119 aa, Artificial Sequence
  source: /note="Description of Artificial Sequence: Synthetic heavy chain variable domain"
QVQLKQSGPGLVQPSQSLSITCTVSGGSLTNYGVHWVRQSPGKGLEWLGVIWSGGNTDYNTPFTSRLSINKDNSKSQVFFKMNSLQSNDTAIYYCARALTYYDDEFAYWGPGTLVTVSA

SEQ ID NO: 2061 - protein, 119 aa, Artificial Sequence
  source: /note="Description of Artificial Sequence: Synthetic heavy chain variable domain"
QVQLKQSGPGLVQPSQSLSITCTVSGGSLTNYGVHWVRQSPGKGLEWLGVIWSGGNTDYNTPFTSRLSINKDNSKSQVFFKMNSLQSNDTAIYYCARALTYYDDEFAYWGQGTLVTVSA

SEQ ID NO: 2062 - protein, 119 aa, Artificial Sequence
  source: /note="Description of Artificial Sequence: Synthetic heavy chain variable domain"
QVQLKQSGPGLVQPSQSLSITCTVSGGSLTNYGVHWVRQSPGKGLEWLGVIWSGGNTDYNTPFTSRLSINKDNSKSQVFFKMNSLQSNDTAIYYCARALTYYDYEFAYWGQGTLVTVSA

SEQ ID NO: 2063 - protein, 119 aa, Artificial Sequence
  source: /note="Description of Artificial Sequence: Synthetic heavy chain variable domain"
QVQLKQSGPGLVQPSQSLSITCTVSGHSLTNYGVHWVRQSPGKGLEWLGVIWSGGNTDYNTPFTSRLSINKDNSKSQVFFKMNSLQSNDTAIYYCARALTYYDYEFAYWGQGTLVTVSA

SEQ ID NO: 2064 - protein, 119 aa, Artificial Sequence
  source: /note="Description of Artificial Sequence: Synthetic heavy chain variable domain"
QVQLKQSGPGLVQPSQSLSITCTVSGLSLTNYGVHWVRQSPGKGLEWLGVIWSGGNTDYNTPFTSRLSINKDNSKSQVFFKMNSLQSNDTAIYYCARALTYYDYEFAYWGQGTLVTVSA

SEQ ID NO: 2065 - protein, 119 aa, Artificial Sequence
  source: /note="Description of Artificial Sequence: Synthetic heavy chain variable domain"
QVQLKQSGPGLVQPSQSLSITCTVSGMSLTNYGVHWVRQSPGKGLEWLGVIWSGGNTDYNTPFTSRLSINKDNSKSQVFFKMNSLQSNDTAIYYCARALTYYDYEFAYWGQGTLVTVSA

SEQ ID NO: 2066 - protein, 119 aa, Artificial Sequence
  source: /note="Description of Artificial Sequence: Synthetic heavy chain variable domain"
QVQLKQSGPGLVQPSQSLSITCTVSGPSLTNYGVHWVRQSPGKGLEWLGVIWSGGNTDYNTPFTSRLSINKDNSKSQVFFKMNSLQSNDTAIYYCARALTYYDYEFAYWGQGTLVTVSA

SEQ ID NO: 2067 - protein, 119 aa, Artificial Sequence
  source: /note="Description of Artificial Sequence: Synthetic heavy chain variable domain"
QVQLKQSGPGLVQPSQSLSITCTVSGQSLTNYGVHWVRQSPGKGLEWLGVIWSGGNTDYNTPFTSRLSINKDNSKSQVFFKMNSLQSNDTAIYYCARALTYYDYEFAYWGQGTLVTVSA

SEQ ID NO: 2068 - protein, 119 aa, Artificial Sequence
  source: /note="Description of Artificial Sequence: Synthetic heavy chain variable domain"
QVQLKQSGPGLVQPSQSLSITCTVSGRSLTNYGVHWVRQSPGKGLEWLGVIWSGGNTDYNTPFTSRLSINKDNSKSQVFFKMNSLQSNDTAIYYCARALTYYDYEFAYWGQGTLVTVSA

SEQ ID NO: 2069 - protein, 119 aa, Artificial Sequence
  source: /note="Description of Artificial Sequence: Synthetic heavy chain variable domain"
QVQLKQSGPGLVQPSQSLSITCTVSGSSLTNYGVHWVRQSPGKGLEWLGVIWSGGNTDYNTPFTSRLSINKDNSKSQVFFKMNSLQSNDTAIYYCARALTYYDYEFAYWGQGTLVTVSA

SEQ ID NO: 2070 - protein, 119 aa, Artificial Sequence
  source: /note="Description of Artificial Sequence: Synthetic heavy chain variable domain"
QVQLKQSGPGLVQPSQSLSITCTVSGTSLTNYGVHWVRQSPGKGLEWLGVIWSGGNTDYNTPFTSRLSINKDNSKSQVFFKMNSLQSNDTAIYYCARALTYYDYEFAYWGQGTLVTVSA

SEQ ID NO: 2071 - protein, 119 aa, Artificial Sequence
  source: /note="Description of Artificial Sequence: Synthetic heavy chain variable domain"
QVQLKQSGPGLVQPSQSLSITCTVSGVSLTNYGVHWVRQSPGKGLEWLGVIWSGGNTDYNTPFTSRLSINKDNSKSQVFFKMNSLQSNDTAIYYCARALTYYDYEFAYWGQGTLVTVSA

SEQ ID NO: 2072 - protein, 119 aa, Artificial Sequence
  source: /note="Description of Artificial Sequence: Synthetic heavy chain variable domain"
QVQLKQSGPGLVQPSQSLSITCTVSGWSLTNYGVHWVRQSPGKGLEWLGVIWSGGNTDYNTPFTSRLSINKDNSKSQVFFKMNSLQSNDTAIYYCARALTYYDYEFAYWGQGTLVTVSA

SEQ ID NO: 2073 - protein, 119 aa, Artificial Sequence
  source: /note="Description of Artificial Sequence: Synthetic heavy chain variable domain"
QVQLKQSGPGLVQPSQSLSITCTVSGYSLTNYGVHWVRQSPGKGLEWLGVIWSGGNTDYNTPFTSRLSINKDNSKSQVFFKMNSLQSNDTAIYYCARALTYYDYEFAYWGQGTLVTVSA

SEQ ID NO: 2074 - protein, 119 aa, Artificial Sequence
  source: /note="Description of Artificial Sequence: Synthetic heavy chain variable domain"
QVQLKQSGPGLVQPSQSLSITCTVSHFSLTNYGVHWVRQSPGKGLEWLGVIWSGGNTDYNTPFTSRLSINKDNSKSQVFFKMNSLQSNDTAIYYCARALTYYDYEFAYWGQGTLVTVSA

SEQ ID NO: 2075 - protein, 119 aa, Artificial Sequence
  source: /note="Description of Artificial Sequence: Synthetic heavy chain variable domain"
QVQLKQSGPGLVQPSQSLSITCTVSLFSLTNYGVHWVRQSPGKGLEWLGVIWSGGNTDYNTPFTSRLSINKDNSKSQVFFKMNSLQSNDTAIYYCARALTYYDYEFAYWGQGTLVTVSA

SEQ ID NO: 2076 - protein, 119 aa, Artificial Sequence
  source: /note="Description of Artificial Sequence: Synthetic heavy chain variable domain"
QVQLKQSGPGLVQPSQSLSITCTVSMFSLTNYGVHWVRQSPGKGLEWLGVIWSGGNTDYNTPFTSRLSINKDNSKSQVFFKMNSLQSNDTAIYYCARALTYYDYEFAYWGQGTLVTVSA

SEQ ID NO: 2077 - protein, 119 aa, Artificial Sequence
  source: /note="Description of Artificial Sequence: Synthetic heavy chain variable domain"
QVQLKQSGPGLVQPSQSLSITCTVSNFSLTNYGVHWVRQSPGKGLEWLGVIWSGGNTDYNTPFTSRLSINKDNSKSQVFFKMNSLQSNDTAIYYCARALTYYDYEFAYWGQGTLVTVSA

SEQ ID NO: 2078 - protein, 119 aa, Artificial Sequence
  source: /note="Description of Artificial Sequence: Synthetic heavy chain variable domain"
QVQLKQSGPGLVQPSQSLSITCTVSPFSLTNYGVHWVRQSPGKGLEWLGVIWSGGNTDYNTPFTSRLSINKDNSKSQVFFKMNSLQSNDTAIYYCARALTYYDYEFAYWGQGTLVTVSA

SEQ ID NO: 2079 - protein, 119 aa, Artificial Sequence
  source: /note="Description of Artificial Sequence: Synthetic heavy chain variable domain"
QVQLKQSGPGLVQPSQSLSITCTVSQFSLTNYGVHWVRQSPGKGLEWLGVIWSGGNTDYNTPFTSRLSINKDNSKSQVFFKMNSLQSNDTAIYYCARALTYYDYEFAYWGQGTLVTVSA

SEQ ID NO: 2080 - protein, 119 aa, Artificial Sequence
  source: /note="Description of Artificial Sequence: Synthetic heavy chain variable domain"
QVQLKQSGPGLVQPSQSLSITCTVSRFSLTNYGVHWVRQSPGKGLEWLGVIWSGGNTDYNTPFTSRLSINKDNSKSQVFFKMNSLQSNDTAIYYCARALTYYDYEFAYWGQGTLVTVSA

SEQ ID NO: 2081 - protein, 119 aa, Artificial Sequence
  source: /note="Description of Artificial Sequence: Synthetic heavy chain variable domain"
QVQLKQSGPGLVQPSQSLSITCTVSSFSLTNYGVHWVRQSPGKGLEWLGVIWSGGNTDYNTPFTSRLSINKDNSKSQVFFKMNSLQSNDTAIYYCARALTYYDYEFAYWGQGTLVTVSA

SEQ ID NO: 2082 - protein, 119 aa, Artificial Sequence
  source: /note="Description of Artificial Sequence: Synthetic heavy chain variable domain"
QVQLKQSGPGLVQPSQSLSITCTVSYFSLTNYGVHWVRQSPGKGLEWLGVIWSGGNTDYNTPFTSRLSINKDNSKSQVFFKMNSLQSNDTAIYYCARALTYYDYEFAYWGQGTLVTVSA

SEQ ID NO: 2083 - protein, 119 aa, Artificial Sequence
  source: /note="Description of Artificial Sequence: Synthetic heavy chain variable domain"
QVQLKQSGPGLVQPSQSLSITCTVTGFSLTNYGVHWVRQSPGKGLEWLGVIWSGGNTDYNTPFTSRLSINKDNSKSQVFFKMNSLQSNDTAIYYCARALTYYDYEFAYWGQGTLVTVSA

SEQ ID NO: 2084 - protein, 119 aa, Artificial Sequence
  source: /note="Description of Artificial Sequence: Synthetic heavy chain variable domain"
QVQLKQSGPGLVQPSQSLSITCTVVGFSLTNYGVHWVRQSPGKGLEWLGVIWGGGNTDYNTPFTSRLSINKDNSKSQVFFKMNSLQSNDTAIYYCARALTYYDDEFAYWGPGTLVTVSA

SEQ ID NO: 2085 - protein, 119 aa, Artificial Sequence
  source: /note="Description of Artificial Sequence: Synthetic heavy chain variable domain"
QVQLKQSGPGLVQPSQSLSITCTVVGFSLTNYGVHWVRQSPGKGLEWLGVIWGGGNTDYNTPFTSRLSINKDNSKSQVFFKMNSLQSNDTAIYYCARALTYYDDEFAYWGQGTLVTVSA

SEQ ID NO: 2086 - protein, 119 aa, Artificial Sequence
  source: /note="Description of Artificial Sequence: Synthetic heavy chain variable domain"
QVQLKQSGPGLVQPSQSLSITCTVVGFSLTNYGVHWVRQSPGKGLEWLGVIWSGGNTDYNTPFTSRLSINKDNSKSQVFFKMNSLQSNDTAIYYCARALTYYDDEFAYWGPGTLVTVSA

SEQ ID NO: 2087 - protein, 119 aa, Artificial Sequence
  source: /note="Description of Artificial Sequence: Synthetic heavy chain variable domain"
QVQLKQSGPGLVQPSQSLSITCTVVGFSLTNYGVHWVRQSPGKGLEWLGVIWSGGNTDYNTPFTSRLSINKDNSKSQVFFKMNSLQSNDTAIYYCARALTYYDDEFAYWGQGTLVTVSA

SEQ ID NO: 2088 - protein, 119 aa, Artificial Sequence
  source: /note="Description of Artificial Sequence: Synthetic heavy chain variable domain"
QVQLKQSGPGLVQPSQSLSITCTVVGFSLTNYGVHWVRQSPGKGLEWLGVIWSGGNTDYNTPFTSRLSINKDNSKSQVFFKMNSLQSNDTAIYYCARALTYYDYEFAYWGQGTLVTVSA

SEQ ID NO: 2089 - protein, 119 aa, Artificial Sequence
  source: /note="Description of Artificial Sequence: Synthetic heavy chain variable domain"
QVQLKQSGPGLVQPSQSLSITCVVSGFSLTNYGVHWVRQSPGKGLEWLGVIWSGGNTDYNTPFTSRLSINKDNSKSQVFFKMNSLQSNDTAIYYCARALTYYDYEFAYWGQGTLVTVSA

SEQ ID NO: 2090 - protein, 119 aa, Artificial Sequence
  source: /note="Description of Artificial Sequence: Synthetic heavy chain variable domain"
QVQLKQSGPGLVQPSQSLSITCWVSGFSLTNYGVHWVRQSPGKGLEWLGVIWSGGNTDYNTPFTSRLSINKDNSKSQVFFKMNSLQSNDTAIYYCARALTYYDYEFAYWGQGTLVTVSA

SEQ ID NO: 2091 - protein, 119 aa, Artificial Sequence
  source: /note="Description of Artificial Sequence: Synthetic heavy chain variable domain"
QVQLQQSGPGLVKPSQTLSLTCAISGFSLFNYGVHWIRQSPSRGLEWLGVIWSGGNTDYNTPFTSRLTISKDTSKNQVVLTMTNMDPVDTATYYCARALTYYDDEFAYWGPGTLVTVSA

SEQ ID NO: 2092 - protein, 119 aa, Artificial Sequence
  source: /note="Description of Artificial Sequence: Synthetic heavy chain variable domain"
QVQLQQSGPGLVKPSQTLSLTCAISGFSLTNYGVHWIRQPPGKGLEWIGVIWSGGNTDYNTPFTSRFTISRDDSKNTAYLQMNSLKTEDTAVYYCARALTYYDDEFAYWGPGTLVTVSA

SEQ ID NO: 2093 - protein, 107 aa, Artificial Sequence
  source: /note="Description of Artificial Sequence: Synthetic heavy chain variable domain"
WILLTQSPVILSVSPGERVSFSCRASQSIGTNIHWYQQRTNGSPRLLIKYASESISGIPSRFSGSGSGTDFTLSINSVESEDIADYYCQQNNNWPTTFGAGTKLELK

SEQ ID NO: 2094 - protein, 107 aa, Artificial Sequence
  source: /note="Description of Artificial Sequence: Synthetic heavy chain variable domain"
WILLTQSPVILSVSPGERVSFSCRASQSIGTNIHWYQQRTNGSPRLLIKYASESISGIPSRFSGSGSGTDFTLSINSVESEDIADYYCQQNNNWPTTFGQGTKLELK

SEQ ID NO: 2095 - protein, 119 aa, Artificial Sequence
  source: /note="Description of Artificial Sequence: Synthetic heavy chain variable domain"
QVQLKQSGPGLVQPSQSLSITCTVSGFSLFNYGVHWVRQSPGKGLEWLGVIWGGGNTDYNTPFTSRLSINKDNSKSQVFFKMNSLQSNDTAIYYCARALTYYDDEFAYWGQGTLVTVSA

SEQ ID NO: 2096 - protein, 119 aa, Artificial Sequence
  source: /note="Description of Artificial Sequence: Synthetic heavy chain variable domain"
QVQLKQSGPGLVQPSQSLSITCTVSGFSLFNYGVHWVRQSPGKGLEWLGVIWSGGNTDYNTPFTSRLSINKDNSKSQVFFKMNSLQSNDTAIYYCARALTYYDDEFAYWGPGTLVTVSA

SEQ ID NO: 2097 - protein, 119 aa, Artificial Sequence
  source: /note="Description of Artificial Sequence: Synthetic heavy chain variable domain"
QVQLKQSGPGLVQPSQSLSITCTVSGFSLFNYGVHWVRQSPGKGLEWLGVIWSGGNTDYNTPFTSRLSINKDNSKSQVFFKMNSLQSNDTAIYYCARALTYYDDEFAYWGQGTLVTVSA

SEQ ID NO: 2098 - protein, 119 aa, Artificial Sequence
  source: /note="Description of Artificial Sequence: Synthetic heavy chain variable domain"
QVQLKQSGPGLVQPSQSLSITCTVSGFSLTNYGVHWVRQSPGKGLEWLGVIWGGGNTDYNTPFTSRLSINKDNSKSQVFFKMNSLQSNDTAIYYCARALTYYDDEFAYWGQGTLVTVSA

SEQ ID NO: 2099 - protein, 119 aa, Artificial Sequence
  source: /note="Description of Artificial Sequence: Synthetic heavy chain variable domain"
QVQLKQSGPGLVQPSQSLSITCTVSGFSLTNYGVHWVRQSPGKGLEWLGVIWGGGNTDYNTPFTSRLSINKDNSKSQVFFKMNSLQSNDTAIYYCARALTYYDYEFAYWGQGTLVTVSA

SEQ ID NO: 2100 - protein, 119 aa, Artificial Sequence
  source: /note="Description of Artificial Sequence: Synthetic heavy chain variable domain"
QVQLKQSGPGLVQPSQSLSITCTVSGFSLTNYGVHWVRQSPGKGLEWLGVIWGGGNTDYNTPFTSRLSINKLNSKSQVFFKMNSLQSNDTAIYYCARALTYYDDEFAYWGPGTLVTVSA

SEQ ID NO: 2101 - protein, 119 aa, Artificial Sequence
  source: /note="Description of Artificial Sequence: Synthetic heavy chain variable domain"
QVQLKQSGPGLVQPSQSLSITCTVSGFSLTNYGVHWVRQSPGKGLEWLGVIWGGGNTDYNTPFTSRLSINKLNSKSQVFFKMNSLQSNDTAIYYCARALTYYDDEFAYWGQGTLVTVSA

SEQ ID NO: 2102 - protein, 119 aa, Artificial Sequence
  source: /note="Description of Artificial Sequence: Synthetic heavy chain variable domain"
QVQLKQSGPGLVQPSQSLSITCTVSGFSLTNYGVHWVRQSPGKGLEWLGVIWSGGNTDYNTPFTSRLSINKLNSKSQVFFKMNSLQSNDTAIYYCARALTYYDDEFAYWGQGTLVTVSA

SEQ ID NO: 2103 - protein, 119 aa, Artificial Sequence
  source: /note="Description of Artificial Sequence: Synthetic heavy chain variable domain"
EVQLVQSGAEVKKPGATVKISCKVSGFSLFNYGVHWVRQARGQRLEWIGVIWSGGNTDYNTPFTSRFTISRDDSKNTAYLQMNSLKTEDTAVYYCARALTYYDDEFAYWGPGTLVTVSA

SEQ ID NO: 2104 - protein, 107 aa, Artificial Sequence
  source: /note="Description of Artificial Sequence: Synthetic heavy chain variable domain"
  MOD_RES (53)..(53): Any amino acid
  MOD_RES (94)..(94): Any amino acid
DILLTQSPVILSVSPGERVSFSCRASQSIGTNIHWYQQRTNGSPRLLIKYASXSISGIPSRFSGSGSGTDFTLSINSVESEDIADYYCQQNNNXPTTFGAGTKLELK

SEQ ID NO: 2105 - protein, 97 aa, Artificial Sequence
  source: /note="Description of Artificial Sequence: Synthetic heavy chain variable domain"
QCQSVEESGGRLVTPGTPLTLTCTVSGFSLNTYGVSWVRQAPGKGLEWIGYIFTDGQTYYASWAKGRFTISKTSSTTVDLKITSPTTEDTATYFCAS

SEQ ID NO: 2106 - protein, 99 aa, Artificial Sequence
  source: /note="Description of Artificial Sequence: Synthetic heavy chain variable domain"
HCQSLEESGGGLVKPGASLTLTCTASGFSFSNNDWMCWVRQAPGKGLEWICIYGGSSIGTNYAGWAKGRFTISRTSSTTVALQMTSLTVADTATYFCTR

SEQ ID NO: 2107 - protein, 118 aa, Artificial Sequence
  source: /note="Description of Artificial Sequence: Synthetic heavy chain variable domain"
QVELVESGGGVVQPGRSQRLSCAASGFTFSSYGMHWVRQAPGKGLEWVAIIWFDGSSTYYADSVRGRFTISRDNSKNTLYLQMNSLRAEDTAVYFCARELGRRYFDLWGRGTLVSVSS

SEQ ID NO: 2108 - protein, 120 aa, Artificial Sequence
  source: /note="Description of Artificial Sequence: Synthetic heavy chain variable domain"
QVNLLQSGAALVKPGASVKLSCKGSGFTFTDYKIHWVKQSHGKSLEWIGYFNPNSGYSTYNEKFKSKATLTADKSTDTAYMELTSLTSEDSATYYCTRLSPGGYYVMDAWGQGASVTVSS

SEQ ID NO: 2109 - protein, 118 aa, Artificial Sequence
  source: /note="Description of Artificial Sequence: Synthetic heavy chain variable domain"
QVQLVESGGGVVQPGRSLRLSCAASGFTFSSYGMHWVRQAPGKGLEWMAIIWFDGSSKYYGDSVKGRFTISRDNSKNTLYLQMNSLRADDTAVYYCARELGRRYFDLWGRGTLVTVSS

SEQ ID NO: 2110 - protein, 120 aa, Artificial Sequence [sequence omitted]

SEQ ID NO: 2111 - protein, 116 aa, Artificial Sequence
  source: /note="Description of Artificial Sequence: Synthetic heavy chain variable domain"
DVQLQESGPSLVKPSQSLSLTCTVTGYSITSDYAWNWIRQFPGNKLEWMGYISYSANTRYNPSLKSRISITRDTSKNQFFLQLNSVTTEDTATYYCATAGRGFPYWGQGTLVTVSA

SEQ ID NO: 2112 - protein, 116 aa, Artificial Sequence
  source: /note="Description of Artificial Sequence: Synthetic heavy chain variable domain"
DVQLQESGPSLVKPSQTLSLTCTVTGYSITSDFAWNWIRQFPGNKLEWMGYISYSGNTRYNPSLKSRISITRDTSKNQFFLQLNSVTIEDTATYYCVTAGRGFPYWGQGTLVTVSA

SEQ ID NO: 2113 - protein, 116 aa, Artificial Sequence
  source: /note="Description of Artificial Sequence: Synthetic heavy chain variable domain"
DVQLQGSGPSLVKPSQSLSLTCTVTGYSITSDYAWNWIRQFPGNKLEWMGYISYSGNTRYNPSLRSRISITRDTSKNQFFLQLNSVTTEDTATYYCATAGRGFPYWGQGTLVTVSA

SEQ ID NO: 2114 - protein, 116 aa, Artificial Sequence
  source: /note="Description of Artificial Sequence: Synthetic heavy chain variable domain"
LVKLQESGPSLVKPSQSLSLTCTVTGYSITSDYAWNWIRQFPGNKLEWMGYISYSANTRYNPSLKSRISITRDTSKNQFFLQLNSVTTEDTATYYCATAGRGFPYWGQGTLVTVSA

SEQ ID NO: 2115 - protein, 135 aa, Artificial Sequence
  source: /note="Description of Artificial Sequence: Synthetic heavy chain variable domain"
MDWTWRILFLVAAATGVHSQVQLQESGPGLVKPSQTLSLTCTVSGYSISSDFAWNWIRQPPGKGLEWMGYISYSGNTRYQPSLKSRITISRDTSKNQFFLKLNSVTAADTATYYCVTAGRGFPYWGQGTLVTVSS

SEQ ID NO: 2116 - protein, 134 aa, Artificial Sequence
  source: /note="Description of Artificial Sequence: Synthetic heavy chain variable domain"
MRVLILLWLFTAFPGVLSDVQLQESGPSLVKPSQSLSLTCTVTGYSITSDFAWNWIRQFPGNKLEWMGYISYSGNTRYNPSLKSRISITRDTSKNQFFLQLNSVTIEDTATYYCVTAGRGFPYWGQGTLVTVSA

SEQ ID NO: 2117 - protein, 116 aa, Artificial Sequence
  source: /note="Description of Artificial Sequence: Synthetic heavy chain variable domain"
QVQLQESGPGLVKPSQTLSLTCTVSGYSISSDFAWNWIRQPPGKGLEWMGYISYSGNTRYQPSLKSRITISRDTSKNQFFLKLNSVTAADTATYYCVTAGRGFPYWGQGTLVTVSS

SEQ ID NO: 2118 - protein, 116 aa, Artificial Sequence
  source: /note="Description of Artificial Sequence: Synthetic heavy chain variable domain"
QVQLQESGPGLVKPSQTLSLTCTVSGYSISSDFAWNWIRQPPGKGLEWMGYISYSGNTRYQPSLKSRITITRDTSKSQFFLQLNSVTAPDTATYYCVTAGRGFPYWGQGTLVTVSS

SEQ ID NO: 2119 - protein, 106 aa, Artificial Sequence
  source: /note="Description of Artificial Sequence: Synthetic heavy chain variable domain"
TVAAPSVFIFPPSDEQLKSGTASVVCLLNNFYPREAKVQWKVDNALQSGNSQESVTEQDSKDSTYSLSSTLTLSKADYEKHKVYACEVTHQGLSSPVTKSFNRGEC

SEQ ID NO: 2120 - protein, 658 aa, Artificial Sequence
  source: /note="Description of Artificial Sequence: Synthetic heavy chain variable domain"
MATGSRTSLLLAFGLLCLPWLQEGSAGSADILMTQSPSSMSVSLGDTVSITCHSSQDINSNIGWLQQRPGKSFKGLIYHGTNLDDEVPSRFSGSGSGADYSLTISSLESEDFADYYCVQYAQFPWTFGGGTKLEIKRGGGGSGGGGSGGGGSDVQLQESGPSLVKPSQSLSLTCTVTGYSITSDFAWNWIRQFPGNKLEWMGYISYSGNTRYNPSLKSRISITRDTSKNQFFLQLNSVTIEDTATYYCVTAGRGFPYWGQGTLVTVSAAAASKEPLRPRCRPINATLAVEKEGCPVCITVNTTICAGYCPTMTRVLQGVLPALPQVVCNYRDVRFESIRLPGCPRGVNPVVSYAVALSCQCALCRRSTTDCGGPKDHPLTCDDPRFQDSSSSKAPPPSLPSPSRLPGPSDTPILPQLDDIQMTQSPSSLSASVGDRVTITCITSNDIDDDMNWYQQKPGKAPKLLISEGNTLRPGVPSRFSGSGYGTDFTLTISSLQPEDVATYYCFQSDNLPYTFGQGTKVEIKGGGGSGGGGSGGGGSEVQLVQSGAEVKKPGASVKVSCKASGDTFTTYVIHWMRQAPGQGLEWIGYINPYNDGTKYNEKFKGRVTITSDKSTSTAYMELSSLRSEDTAVYYCARIYYDYDGDYWGQGTLVTVSS

SEQ ID NO: 2121 - protein, 232 aa, Artificial Sequence [sequence omitted]

SEQ ID NO: 2122 - protein, 291 aa, Artificial Sequence
  source: /note="Description of Artificial Sequence: Synthetic heavy chain variable domain"
MATGSRTSLLLAFGLLCLPWLQEGSAQVQLQESGPGLVKPSETLSLTCTVSGYSITGGYLWNWIRQPPGKGLEWIGYISYDGTNNYKPSLKDRVTISRDTSKNQFSLKLSSVTAADTAVYYCARYGRVFFDYWGQGTLVTVSSAAASKEPLRPRCRPINATLAVEKEGCPVCITVNTTICAGYCPTMTRVLQGVLPALPQVVCNYRDVRFESIRLPGCPRGVNPVVSYAVALSCQCALCRRSTTDCGGPKDHPLTCDDPRFQDSSSSKAPPPSLPSPSRLPGPSDTPILPQ

SEQ ID NO: 2123 - protein, 119 aa, Artificial Sequence
  source: /note="Description of Artificial Sequence: Synthetic heavy chain variable domain"
QVQLKQSGPGLVQPSQSLSITCTVSGFSLTNYGVHWVRQSPGKGLEWLGVIWSGGNTDYNTPFTSRLSINKDNSKSQVFFKMNSLQSNDTAIYYCARALTYYDYEFAYWGQGTLVTVSA

SEQ ID NO: 2124 - protein, 119 aa, Artificial Sequence
  source: /note="Description of Artificial Sequence: Synthetic heavy chain variable domain"
QVQLKQSGPGLVQPSQSLSITCTVSGFSLTNYGVHWVRQSPGKGLEWLGVIWSGGNTDYNTPFTSRLSINKDNSKSQVFFKMNSLQSNDTAIYYCARALTYYDYEFAYWGQGTLVTVSS

SEQ ID NO: 2125 - protein, 122 aa, Artificial Sequence
  source: /note="Description of Artificial Sequence: Synthetic heavy chain variable domain"
EVQLVESGGGLVQPGGSLRLSCAASGFPFSSYDMHWVRQATGKGLEWVSAIGTAGATYYPGSVKGRFTISRENAKNSLYLQMNSLRAGDTAVYYCARGDYVWGTYRPLFDYWGQGTLVTVSS

SEQ ID NO: 2126 - protein, 126 aa, Artificial Sequence
  source: /note="Description of Artificial Sequence: Synthetic heavy chain variable domain"
EVQLVESGGGLVQPGRSLRLSCAASGFTFDDYAMHWVRQVPGKGLEWVSGISWNSGSIGYADSVKGRFTISRDNAKNSLYLQMNSLRAEDTALYYCAKDIHDYGKDYYYYYGMDVWGQGTTVTVSS

SEQ ID NO: 2127 - protein, 119 aa, Artificial Sequence
  source: /note="Description of Artificial Sequence: Synthetic heavy chain variable domain"
QVQLQQWGAGLLKPAETLSLTCAVYGGSFSGNYWSWIRQSPGKGLEWIGEINHRGNSNYNPSLKSRGTISLDTSKNQLSLKLRSVTAADTAMYYCVRGGGDYYFGMDVWGQGTTVTVSS

SEQ ID NO: 2128 - protein, 119 aa, Artificial Sequence
  source: /note="Description of Artificial Sequence: Synthetic heavy chain variable domain"
QVQLQQWGAGLLKPSETLSLTCAVYGGSFSGDYWSWIRQSPGKGLEWIGEINHSGSTNYNPSLKSRVTISIDTSKNQFSLKLSSVTAADTAVYYCARGGGDYYYGMDVWGLGTTVTVSS

SEQ ID NO: 2129 - protein, 119 aa, Artificial Sequence
  source: /note="Description of Artificial Sequence: Synthetic heavy chain variable domain"
QVQLQQWGAGLLKPSETLSLTCAVYGGSFSGYYWSWIRQSPGKGLEWIGEINHSGSTNYNPSLKSRVTISVDTSKNQFSLKLTSVTAADTAVYFCARGGGTYYYGMDVWGQGTTVTVSS

SEQ ID NO: 2130 - protein, 118 aa, Artificial Sequence
  source: /note="Description of Artificial Sequence: Synthetic heavy chain variable domain"
QVQLVESGGGVVQPGRSLRLSCAASGFTFSAYAMHWVRQAPGKGLEWVAVIWYDGSNKNYADSVKGRFTVSRDNSKNTLYLEMNSLRAEDTAVYYCARDLMVGVTNYWGQGTLVTVST

SEQ ID NO: 2131 - protein, 124 aa, Artificial Sequence
  source: /note="Description of Artificial Sequence: Synthetic heavy chain variable domain"
QVQLVESGGGVVQPGRSLRLSCAASGFTFSRYGIHWVRQAPGKGLEWVAVIWHDGSNKYYADSVKGRFTISRDNSKNTLYLQMTSLRAEDTAVYYCARDGLEIRDHYYYGMDVWGQGTTVTVSS

SEQ ID NO: 2132 - protein, 124 aa, Artificial Sequence
  source: /note="Description of Artificial Sequence: Synthetic heavy chain variable domain"
QVQLVESGGGVVQPGRSRRLSCVGSGFIFSSYGMHWVRQAPGKGLEWVALIFYDGSNEYYVDSVKGRFTISRDNSKNTLYLQMNSLRAEDTAVYYCAREGYSQRYKYYFGMDVWGQGTTVTVSS

SEQ ID NO: 2133 - protein, 118 aa, Artificial Sequence
  source: /note="Description of Artificial Sequence: Synthetic heavy chain variable domain"
QVQLVQSGAEVKKPGASVKVSCKASGYTFTSYDINWVRQATGQGLEWMGWINPNSDYTGYVQKFQGRVTMTRDTSISTAYMELSSLRSEDTAVYYCATSRWSEHFHHWGQGTLVTVSS

SEQ ID NO: 2134 - protein, 116 aa, Artificial Sequence
  source: /note="Description of Artificial Sequence: Synthetic heavy chain variable domain"
EGQLLESGGGWVQPGESLRLSCAASGFTFSSYAMSWVRQAPGKGLEWVSAISGSGGSTNYADSVKGRFTISRDNSKNTLYLQVNSLRVEDTAVYYCAGSSGWSEYWGQGTLVTVSS

SEQ ID NO: 2135 - protein, 126 aa, Artificial Sequence
  source: /note="Description of Artificial Sequence: Synthetic heavy chain variable domain"
QVQLQESGPFLVKPSQTLSLTCTVSGGSISSGGYYWSWIRQHPGKGLEWIGFIYYRGNTYYNPSLKSRVTISVDTSKNQFSLKLSSVTAADTAVYYCARDGYCSRTGCYGGWFDPWGQGTLVTVSP

SEQ ID NO: 2136 - protein, 118 aa, Artificial Sequence
  source: /note="Description of Artificial Sequence: Synthetic heavy chain variable domain"
QVQLQQSGPGLVKPSQTLSLTCAISGDSVSSNNAAWNWIRQSPARGLEWLGRTYYRSKWYNDYVVSVKSRITINPDTSKNQFSLQLNSVTPEDTAVYYCVRATAFDYWGQGTLVTVSS

SEQ ID NO: 2137 - protein, 118 aa, Artificial Sequence
  source: /note="Description of Artificial Sequence: Synthetic heavy chain variable domain"
QVQLQQSGPGLVKPSQTLSLTCAISGDSVSSYSSAWNWIRQSPSRGLEWLGRAYHRSRWYYEYAVSVKSRINITPDTSKNQFSLQLNSVTPEDTAVYYCARGSRFDYWGQGTLVTVSS

SEQ ID NO: 2138 - protein, 110 aa, Artificial Sequence
  source: /note="Description of Artificial Sequence: Synthetic heavy chain variable domain"
QVQLVESGGGVVQPGRSLRLSCAASGFTFSSYGMHWVRQAPGKGLEWVAVIWYDGSNKYYADSVKGRFTISRDNSKNTLYLQMNSLRAEDTAVYYCARWGQGTLVTVSSA

SEQ ID NO: 2139 - protein, 121 aa, Artificial Sequence
  source: /note="Description of Artificial Sequence: Synthetic heavy chain variable domain"
QVQLVESGGGVVQPGRSLRLSCAASGFTFSSYGMHWVRQAPGKGLEWVAVIWYDGSNKYYVDSVKGRFTISRDNSKNTLYLQMNSLRAEDTAVYYCARDGWQQLAPFDYWGQGTLVTVSSA

SEQ ID NO: 2140 - protein, 170 aa, Artificial Sequence
  source: /note="Description of Artificial Sequence: Synthetic heavy chain variable domain"
QVQLVESGGGVVQPGRSLRLSCAASGFTFSSYGMHWVRQAPGKGLEWVAVIWYDGSNKYYVDSVKGRFTISRDNSKNTLYLQMNSLRAEDTAVYYCARDGWQQLAPFDYWGQGTLVTVSSASTKGPSVFPLAPSSKSTSGGTAALGCLVKDYFPEPVTVSWNSGALTSGV

SEQ ID NO: 2141 - protein, 128 aa, Artificial Sequence
  source: /note="Description of Artificial Sequence: Synthetic heavy chain variable domain"
QVQLVESGGGVVQPGRSLRLSCAASGFTLSSYGMHWVRQAPGKGLEWVAVMSYDGSKEDYADSVKGRFTISRDNSENTLYLQMNSLRAEDTAVYYCVSEGYCSSRSCYKYYYYGMDVWGQGTTVTVSS

SEQ ID NO: 2142 - protein, 128 aa, Artificial Sequence
  source: /note="Description of Artificial Sequence: Synthetic heavy chain variable domain"
QVQLVESGGGVVQPGRSLRLSCVASGFTLSSYGMHWVRQALGKGLEWVAVTSYDGSKKDYADSVKGRFTISRDNSKNTLYLQMNSLRAEDTAVYYCVSEGYCDSTSCYKYYYYGMDVWGQGTTVTVSS

SEQ ID NO: 2143 - protein, 128 aa, Artificial Sequence
  source: /note="Description of Artificial Sequence: Synthetic heavy chain variable domain"
QVQLVESGGGVVQPGRSLRLSCVASGFTLSSYGMHWVRQAPGKGLEWVAVTSYDGSKKDYADSAKGRFTISRDNSKNTLYLQMNSLRAEDTAVYYCVSEGYCSSSSCYKYYYYGMDVWGQGTTVTVSS

SEQ ID NO: 2144 - protein, 128 aa, Artificial Sequence
  source: /note="Description of Artificial Sequence: Synthetic heavy chain variable domain"
QVQLVESGGGVVQPGRSLRLSCVASGFTLSSYGMHWVRQAPGKGLEWVAVTSYDGSKKDYADSVKGRFTISRDNSKNTLYLQMNSLRAEDTAVYYCVSEGYCDSSSCYKYYYYGMDVWGQGTTVTVSS

SEQ ID NO: 2145 - protein, 128 aa, Artificial Sequence
  source: /note="Description of Artificial Sequence: Synthetic heavy chain variable domain"
QVQLVESGGGVVQPGRSLRLSCVASGFTLSSYGMHWVRQAPGKGLEWVAVTSYDGSKKDYADSVKGRFTISRDNSKNTLYLQMNSLRAEDTAVYYCVSEGYCDSTSCYKYYYYGMDVWGQGTTVTVSS

SEQ ID NO: 2146 - protein, 124 aa, Artificial Sequence
  source: /note="Description of Artificial Sequence: Synthetic heavy chain variable domain"
QVQLVESGGGVVQSGRSLRLSCAASGFTFRNYGMHWVRQAPGKGLEWVAVIWYDGSDKYYADSVRGRFTISRDNSKNTLYLQMNSLRAEDTAVYYCARDGYDILTGNPRDFDYWGQGTLVTVSS

SEQ ID NO: 2147 - protein, 118 aa, Artificial Sequence
  source: /note="Description of Artificial Sequence: Synthetic heavy chain variable domain"
QVQLQQSGGGLVKPGASLKLSCVTSGFTFRKFGMSWVRQTSDKRLEWVASISTGGYNTYYSDNVKGRFTISRENAKNTLYLQMSSLKSEDTALYYCTRGYSSTSYAMDYWGQGTTVTV

SEQ ID NO: 2148 - protein, 217 aa, Artificial Sequence
  source: /note="Description of Artificial Sequence: Synthetic heavy chain variable domain"
QLQESGPGLVKPSQTLSLTCTVSGYSISSDFAWNWIRQPPGKGLEWMGYISYSGNTRYQPSLKSRITISRDTSKNQFFLKLNSVTAADTATYYCVTAGRGFPYWGQGTLVTVSSASTKGPSVFPLAPSSKSTSGGTAALGCLVKDYFPEPVTVSWNSGALTSGVHTFPAVLQSSGLYSLSSVVTVPSSSLGTQTYICNVNHKPSNTKVDKKVEPKSC

SEQ ID NO: 2149 - protein, 122 aa, Artificial Sequence; identical to SEQ ID NO: 2125
  source: /note="Description of Artificial Sequence: Synthetic heavy chain variable domain"

SEQ ID NO: 2150 - protein, 116 aa, Artificial Sequence
  source: /note="Description of Artificial Sequence: Synthetic heavy chain variable domain"
EVQVLESGGGLVQPGGSLRLSCAASGFTFSSYAMSWVRQAPGKGLEWVSAISGSGGSTNYADSVKGRFTISRDNSKNTLYLQMNSLRAEDTAVYYCAGSSGWSEYWGQGTLVTVSS

SEQ ID NO: 2151 - protein, 118 aa, Artificial Sequence
  source: /note="Description of Artificial Sequence: Synthetic heavy chain variable domain"
EVQLVESGGGLVKPGGSLRLSCAASGFTFSDAWMDWVRQAPGKGLEWVGEIRSKASNHATYYAESVKGRFTISRDDSKNTLYLQMNSLKTEDTAVYYCTTWRRFFDSWGQGTLVTVSS

SEQ ID NO: 2152 - protein, 118 aa, Artificial Sequence
  source: /note="Description of Artificial Sequence: Synthetic heavy chain variable domain"
EVQLVESGGGLVKPGGSLRLSCAASGFTFSDAWMDWVRQAPGKGLEWVGEIRSKASNHATYYAESVKGRFTISRDDSKNTLYLQMNSLKTEDTAVYYCTRWRRFFDSWGQGTLVTVSS

SEQ ID NO: 2153 - protein, 118 aa, Artificial Sequence
  source: /note="Description of Artificial Sequence: Synthetic heavy chain variable domain"
EVQLVESGGGLVKPGGSLRLSCAASGFTFSDAWMDWVRQAPGKGLEWVAEIRSKASNHATYYAESVKGRFTISRDDSKNTVYLQMNSLKTEDTAVYYCTRWRRFFDSWGQGTLVTVSS

SEQ ID NO: 2154 - protein, 106 aa, Artificial Sequence
  source: /note="Description of Artificial Sequence: Synthetic heavy chain variable domain"
EIVLTQSPATLSLSPGERATLSCRASSSVSYMHWYQQKPGQAPRPWIYATSNLASGIPARFSGSGSGTDYTLTISSLEPEDFAVYYCQQWSSNPLTFGGGTKVEIK

SEQ ID NO: 2155 - protein, 115 aa, Artificial Sequence
  source: /note="Description of Artificial Sequence: Synthetic heavy chain variable domain"
EVQLVESGGGLVQPGGSLKLSCAASGFTFSGSAMHWVRQASGKGLEWVGRIRSKANSYATAYAASVKGRFTISRDDSKNTAYLQMNSLKTEDTAVYYCTRYFDYWGQGTLVTVSS

SEQ ID NO: 2156 - protein, 118 aa, Artificial Sequence
  source: /note="Description of Artificial Sequence: Synthetic heavy chain variable domain"
EVQLVESGGGLVQPGGSLKLSCAASGFTFSDAWMDWVRQASGKGLEWVAEIRSKASNHATYYAESVKGRFTISRDDSKNTVYLQMNSLKTEDTAVYYCTRWRRFFDSWGQGTLVTVSS

SEQ ID NO: 2157 - protein, 118 aa, Artificial Sequence; identical to SEQ ID NO: 765
  source: /note="Description of Artificial Sequence: Synthetic heavy chain variable domain"

SEQ ID NO: 2158 - protein, 118 aa, Artificial Sequence
  source: /note="Description of Artificial Sequence: Synthetic heavy chain variable domain"
EVQLVESGGGLVKPGGSLRLSCAASGFTFSDAWMDWVRQAPGKGLEWVGEARSKASNHATYYAESVKGRFTISRDDSKNTLYLQMNSLKTEDTAVYYCTRWRRFFDSWGQGTLVTVSS

SEQ ID NO: 2159 - protein, 118 aa, Artificial Sequence; identical to SEQ ID NO: 766
  source: /note="Description of Artificial Sequence: Synthetic heavy chain variable domain"

SEQ ID NO: 2160 - protein, 118 aa, Artificial Sequence
  source: /note="Description of Artificial Sequence: Synthetic heavy chain variable domain"
EVQLVESGGGLVKPGGSLRLSCAASGFTFSDAWMDWVRQAPGKGLEWVGEIRSRASNHATYYAESVKGRFTISRDDSKNTLYLQMNSLKTEDTAVYYCTRWRRFFDSWGQGTLVTVSS

SEQ ID NO: 2161 - protein, 118 aa, Artificial Sequence; identical to SEQ ID NO: 767
  source: /note="Description of Artificial Sequence: Synthetic heavy chain variable domain"

SEQ ID NO: 2162 - protein, 121 aa, Artificial Sequence
  source: /note="Description of Artificial Sequence: Synthetic heavy chain variable domain"
QVQLQQPGSELVRPGASVQLSCKASGYSFTSYWMHWVRQRPGQGLQWIGNIYPGTGNTNYDEKFMNKATLTVDTYSSTTYMQLSSLTSEDSAVYYCARWGLVRYFFAMDYWGQGTSVTVSS

SEQ ID NO: 2163 - protein, 118 aa, Artificial Sequence
  source: /note="Description of Artificial Sequence: Synthetic heavy chain variable domain"
EVQLQQSGPELVKPGASMKISCRASGYSFTGYTMNWVRQSHGKNLEWIGLINPHNGGSSYNLKFKGKATLTVDKSSSTAYMELLSLTSEDSAVYYCVRWGDYGSFAYWGQGTLVTVSA

SEQ ID NO: 2164 - protein, 119 aa, Artificial Sequence
  source: /note="Description of Artificial Sequence: Synthetic heavy chain variable domain"
EVQLQQSGPELVKPGASVKISCKASGYSFTAYYMHWVKQSHVKSLEWIGLVNPYNGFSSYNQNFEDKASLTVDKFSSTAYMELHSLTSEDSAVYYCAREFYGYRYFDVWGAGTAVTVSS

SEQ ID NO: 2165 - protein, 121 aa, Artificial Sequence
  source: /note="Description of Artificial Sequence: Synthetic heavy chain variable domain"
QVQLVQPGAEVVKPGASVKLSCKASGYNFTSYWMHWVRQRPGQGLQWIGNIYPGTGNTNYDQKFQGKATLTVDTSTSTTYMQLSSLTSEDSAVYYCARWGLVRYFFAMDYWGQGTSVTVSS

SEQ ID NO: 2166 - protein, 121 aa, Artificial Sequence
  source: /note="Description of Artificial Sequence: Synthetic heavy chain variable domain"
QVQLVQPGAEVVKPGASVKLSCKASGYSFTSYWMHWVRQRPGQGLQWIGNIYPGTGNTNYDQKFQGKATLTVDTSTSTTYMQLSSLTSEDSAVYYCARWGLVRYFFAMDYWGQGTSVTVSS

SEQ ID NO: 2167 - protein, 121 aa, Artificial Sequence
  source: /note="Description of Artificial Sequence: Synthetic heavy chain variable domain"
QVQLVQPGAEVVKPGASVKLSCKASGYNFTSYWMHWVRQRPGQGLQWIGNIYPGTGNTNYDQKFQGKATLTVDTYTSTTYMQLSSLTSEDSAVYYCARWGLVRYFFAMDYWGQGTSVTVSS

SEQ ID NO: 2168 - protein, 118 aa, Artificial Sequence
  source: /note="Description of Artificial Sequence: Synthetic heavy chain variable domain"
EVQLLQSGGELVQPGASMRISCAASGYTFTGYTMNWVRQSPGKNLEWIGLINPHNGGSSYNDSFKGKATLTVDKSSSTAYMELLSLTAEDSAVYYCVRWGDYGSFAYWGQGTLVTVSS

SEQ ID NO: 2169 - protein, 118 aa, Artificial Sequence
  source: /note="Description of Artificial Sequence: Synthetic heavy chain variable domain"
EVQLLQSGGELVQPGASMRISCAASGYSFTGYTMNWVRQSPGKNLEWIGLINPHNGGSSYNDSFKGKATLTVDKSSSTAYMELLSLTAEDSAVYYCVRWGDYGSFAYWGQGTLVTVSS

SEQ ID NO: 2170 - protein, 119 aa, Artificial Sequence
  source: /note="Description of Artificial Sequence: Synthetic heavy chain variable domain"
QVQLVQSGAEVVKPGASVKISCKASGYTFTAYYMHWVKQSPVQSLEWIGLVNPYNGFSSYNQKFQGKASLTVDKSSSTAYMELHSLTSEDSAVYYCAREFYGYRYFDVWGQGTAVTVSS

SEQ ID NO: 2171 - protein, 119 aa, Artificial Sequence
  source: /note="Description of Artificial Sequence: Synthetic heavy chain variable domain"
QVQLVQSGAEVVKPGASVKISCKASGYSFTAYYMHWVKQSPVQSLEWIGLVNPYNGFSSYNQKFQGKASLTVDKSSSTAYMELHSLTSEDSAVYYCAREFYGYRYFDVWGQGTAVTVSS

SEQ ID NO: 2172 - protein, 119 aa, Artificial Sequence
  source: /note="Description of Artificial Sequence: Synthetic heavy chain variable domain"
QVQLVQSGAEVVKPGASVKISCKASGYTFTAYYMHWVKQSPGQSLEWIGLVNPYNGFSSYNQKFQGKASLTVDKSSSTAYMELHSLTSEDSAVYYCAREFYGYRYFDVWGQGTAVTVSS

SEQ ID NO: 2173 - protein, 119 aa, Artificial Sequence
  source: /note="Description of Artificial Sequence: Synthetic heavy chain variable domain"
QVQLVQSGAEVVKPGASVKISCKASGYSFTAYYMHWVKQSPGQSLEWIGLVNPYNGFSSYNQKFQGKASLTVDKSSSTAYMELHSLTSEDSAVYYCAREFYGYRYFDVWGQGTAVTVSS

SEQ ID NO: 2174 - protein, 120 aa, Artificial Sequence
  source: /note="Description of Artificial Sequence: Synthetic heavy chain variable domain"
EVQLQQSGPDLVKPGASVKISCKASGYRFTEYNMHWMKQSHGESLEWIGYIYPYNGDTGYRQKFKNMATLTADISSNTAYMELRSLTSDDSAVYFCARWGYGSGGGFTYWGQGTLVTVSA

SEQ ID NO: 2175 - protein, 119 aa, Artificial Sequence
  source: /note="Description of Artificial Sequence: Synthetic heavy chain variable domain"
EVQLQQSGPELVKPGASVKISCKASGYTFTDYNMHWVKQSHGKSLEWIGFIYPYNGGTGYNQRFKNKATLTVDTSSSTAYMEVRSLTSEDSAVYFCARGYYYGRHFDYWGQGTTLTVSS

SEQ ID NO: 2176 - protein, 119 aa, Artificial Sequence
  source: /note="Description of Artificial Sequence: Synthetic heavy chain variable domain"
EVQLQQSGPELVKPGTSVKISCKASGFTFTDYTMDWVKQSHGKSLEWIGDVNPNSGGSIYNQRFKGKASLTVDRSSRIVYMELRSLTFEDTAVYYCARNLGPSFYFDYWGQGTTLTVSS

SEQ ID NO: 2177 - protein, 119 aa, Artificial Sequence [sequence omitted]

SEQ ID NO: 2178 - protein, 117 aa, Artificial Sequence
  source: /note="Description of Artificial Sequence: Synthetic heavy chain variable domain"
EVQLVESGGGLVQPGGSLRLSCAASGFTFSSYWMHWVRQTPGKGLEWVANIKQDGSEKYYVDSVKGRFTISRDNAKNSLHLQMNSLRAEDTAAYYCASFRDYGMDVWGQGTTVTVSS

SEQ ID NO: 2179 - protein, 129 aa, Artificial Sequence
  source: /note="Description of Artificial Sequence: Synthetic heavy chain variable domain"
QVQLQESGPGLVKPSQTLSLTCTVSGGSISSGGYYWSWIRQHPGKGLEWIGYIYYSGSTYYNPSLKSRVTISVDTSKNQFSLKLSSVTAADTAVYYCAREGPITIVRGVYYYFYGMDVWGQGTTVTVSS

SEQ ID NO: 2180 - protein, 121 aa, Artificial Sequence
  source: /note="Description of Artificial Sequence: Synthetic heavy chain variable domain"
EVQLVESGGGLVKPGGSLRLSCAASGFTFSSYSMNWVRQAPGKGLEWVSSISSSSSYIYYADSVKGRFTISRDNAKNSLYLQMNSLSAEDTAVYSCARGGDGYNYYYFDYWGQGTLVTVSS

SEQ ID NO: 2181 - protein, 121 aa, Artificial Sequence
  source: /note="Description of Artificial Sequence: Synthetic heavy chain variable domain"
EVQLVESGGGLVKPGGSLRLSCAASGFTFSSYTMNWVRQAPGKGLEWVSSISSSSSYIYYADSVKGRFTISRDNAKNSLYLQMNSLSAEDTAVYSCARGGDGYNYYYFDYWGQGTLVTVSS

SEQ ID NO: 2182 - protein, 121 aa, Artificial Sequence
  source: /note="Description of Artificial Sequence: Synthetic heavy chain variable domain"
EVQLVESGGGLVKPGGSLRLSCAASGFTFSSYSMNWVRQAPGKGLEWVSSISSSSSYIYYADSVKGRFTISRDNAKNSLYLQMNSLRAEDTAVYYCARGGDGYNYYYFDYWGQGTLVTVSS

SEQ ID NO: 2183 - protein, 112 aa, Artificial Sequence
  source: /note="Description of Artificial Sequence: Synthetic heavy chain variable domain"
DIVMTQTPLSLSVTPGQPASISCKSSQSLLHSDGKTYLYWYLQKPGQPPQPLIYEVSNRFSGVPDRFSGSGSGTDFTLKISRVEAEDVGIYYCMQSKQLPRTFGQGTKVEIK

SEQ ID NO: 2184 - protein, 113 aa, Artificial Sequence
  source: /note="Description of Artificial Sequence: Synthetic heavy chain variable domain"
DIVMTQFPDSLAVSLDERATINCKSSQSVFFRSNNKNCLAWYQQKPGQPPNLLIYWASTRESGVPDRFSGSGSGTDFTLTISSLQAEDVAFYYCQQYYSSPFTFGPGTKVDIK

SEQ ID NO: 2185 - protein, 123 aa, Artificial Sequence
  source: /note="Description of Artificial Sequence: Synthetic heavy chain variable domain"
EVQLVESGGGLVQPGGSLRLSCTASGFPFSSYDMHWVRQATGKGLEWVSAIGTAGDTFYPGSVKGRFTISRENAKNSLYLQMNSLRAGDTAVYYCAREGYSSGRYFYYGMDVWGQGTTVTVSS

SEQ ID NO: 2186 - protein, 112 aa, Artificial Sequence
  source: /note="Description of Artificial Sequence: Synthetic heavy chain variable domain"
DIVMTQTPLSLSVTPGQPASISCKSSQSLLHSDGKTYLYWYLQKPGQPPQLLIYEVSNRFSGVPDRFSGSGSGTDFTLKISRVEAEDVGVYYCMQSIQLPRTFGQGTKVEIK

SEQ ID NO: 2187 - protein, 121 aa, Artificial Sequence
  source: /note="Description of Artificial Sequence: Synthetic heavy chain variable domain"
  MOD_RES (99)..(100): Any amino acid
  MOD_RES (106)..(106): Any amino acid
EVQLVESGGGLVKPGGSLRLSCAASGFTFSSYSMNWVRQAPGKGLEWVSSISSSSSYIYYADSVKGRFTISRDNAKNSLYLQMNSLRAEDTAVYYCARXXDGYNYXYFDYWGQGTLVTVSS

SEQ ID NO: 2188 - protein, 123 aa, Artificial Sequence
  source: /note="Description of Artificial Sequence: Synthetic heavy chain variable domain"
  MOD_RES (98)..(98): Any amino acid
  MOD_RES (103)..(104): Any amino acid
EVQLVESGGGLVQPGGSLRLSCAASGFTFSSYDMHWVRQATGKGLEWVSAIGTAGDTYYPGSVKGRFTISRENAKNSLYLQMNSLRAGDTAVYYCARXGYSSXXYYYYGMDVWGQGTTVTVSS

SEQ ID NO: 2189 - protein, 117 aa, Artificial Sequence
  source: /note="Description of Artificial Sequence: Synthetic heavy chain variable domain"
  MOD_RES (98)..(101): Any amino acid
EVQLVESGGGLVQPGGSLRLSCAASGFTFSSYWMSWVRQAPGKGLEWVANIKQDGSEKYYVDSVKGRFTISRDNAKNSLYLQMNSLRAEDTAVYYCAXXXXYGMDVWGQGTTVTVSS

SEQ ID NO: 2190 - protein, 117 aa, Artificial Sequence
  source: /note="Description of Artificial Sequence: Synthetic heavy chain variable domain"
  MOD_RES (98)..(99): Any amino acid
EVQLVESGGGLVQPGGSLRLSCAASGFTFSSYWMSWVRQAPGKGLEWVANIKQDGSEKYYVDSVKGRFTISRDNAKNSLYLQMNSLRAEDTAVYYCAXXRDYGMDVWGQGTTVTVSS

SEQ ID NO: 2191 - protein, 121 aa, Artificial Sequence
  source: /note="Description of Artificial Sequence: Synthetic heavy chain variable domain"
EVQLVESGGGLVKPGGSLRLSCAASGFTFSSYSMNWVRQAPRKGLEWVSSISSSSSYIYYADSVKGRFTISRDNAKNSLYLQMNSLRAEDTAVYYCARGGDGYNYYYFDYWGQGTLVTVSS

SEQ ID NO: 2192 - protein, 120 aa, Artificial Sequence
  source: /note="Description of Artificial Sequence: Synthetic heavy chain variable domain"
  MOD_RES (57)..(57): Any amino acid
  MOD_RES (59)..(59): Any amino acid
EVQLVESGGGLVQPGGSLRLSCAASGFNIKDTYIHWVRQAPGKGLEWVARIYPTNGXTXYADSVKGRFTISADTSKNTAYLQMNSLRAEDTAVYYCSRWGGDGFYAMDYWGQGTLVTVSS

SEQ ID NO: 2193 - protein, 120 aa, Artificial Sequence [sequence omitted]

SEQ ID NO: 2194 - protein, 115 aa, Artificial Sequence
  source: /note="Description of Artificial Sequence: Synthetic heavy chain variable domain"
EVQLVQSGPELKKPGASVKVSCKASGYTFTNYGMNWVRQAPGQGLEWMGWINTYTGETTYAEDFKGRFVFSLDTSVSTAYLQISSLKAEDTAVYYCEREGGVNNWGQGTLVTVSS

SEQ ID NO: 2195 - protein, 115 aa, Artificial Sequence
  source: /note="Description of Artificial Sequence: Synthetic heavy chain variable domain"
EVQLVQSGPELKKPGASVKVSCKASGYTFTNYGMNWVRQAPGQGLEWMGWINTYTGETTYAEDFKGRFVFSLDTSVSTAYLQISSLKAEDTAVYYCEREGGVSNWGQGTLVTVSS

SEQ ID NO: 2196 - protein, 223 aa, Artificial Sequence
  source: /note="Description of Artificial Sequence: Synthetic heavy chain variable domain"
EVQLVQSGPELKKPGASVKVSCKASGYTFTNYGMNWVRQAPGQGLEWMGWINTYTGETTYAEDFKGRFVFSLDTSVSTAYLQISSLKAEDTAVYYCEREGGVNNWGQGTLVTVSSASTKGPSVFPLAPSSKSTSGGTAALGCLVKDYFPEPVTVSWNSGALTSGVHTFPAVLQSSGLYSLSSVVTVPSSSLGTQTYICNVNHKPSNTKVDKKVEPKSCDKTHT

SEQ ID NO: 2197 - protein, 223 aa, Artificial Sequence
  source: /note="Description of Artificial Sequence: Synthetic heavy chain variable domain"
EVQLVQSGPELKKPGASVKVSCKASGYTFTNYGMNWVRQAPGQGLEWMGWINTYTGETTYAEDFKGRFVFSLDTSVSTAYLQISSLKAEDTAVYYCEREGGVSNWGQGTLVTVSSASTKGPSVFPLAPSSKSTSGGTAALGCLVKDYFPEPVTVSWNSGALTSGVHTFPAVLQSSGLYSLSSVVTVPSSSLGTQTYICNVNHKPSNTKVDKKVEPKSCDKTHT

SEQ ID NO: 2198 - protein, 224 aa, Artificial Sequence
  source: /note="Description of Artificial Sequence: Synthetic heavy chain variable domain"
EVQLVQSGPELKKPGASVKVSCKASGYTFTNYGMNWVRQAPGQGLEWMGWINTYTGETTYAEDFKGRFVFSLDTSVSTAYLQISSLKAEDTAVYYCEREGGVNNWGQGTLVTVSSASTKGPSVFPLAPSSKSTSGGTAALGCLVKDYFPEPVTVSWNSGALTSGVHTFPAVLQSSGLYSLSSVVTVPSSSLGTQTYICNVNHKPSNTKVDKKVEPKSCDKTHTC

SEQ ID NO: 2199 - protein, 227 aa, Artificial Sequence
  source: /note="Description of Artificial Sequence: Synthetic heavy chain variable domain"
EVQLVQSGPELKKPGASVKVSCKASGYTFTNYGMNWVRQAPGQGLEWMGWINTYTGETTYAEDFKGRFVFSLDTSVSTAYLQISSLKAEDTAVYYCEREGGVNNWGQGTLVTVSSASTKGPSVFPLAPSSKSTSGGTAALGCLVKDYFPEPVTVSWNSGALTSGVHTFPAVLQSSGLYSLSSVVTVPSSSLGTQTYICNVNHKPSNTKVDKKVEPKSCDKTHTCPPC

SEQ ID NO: 2200 - protein, 224 aa, Artificial Sequence
  source: /note="Description of Artificial Sequence: Synthetic heavy chain variable domain"
EVQLVQSGPELKKPGASVKVSCKASGYTFTNYGMNWVRQAPGQGLEWMGWINTYTGETTYAEDFKGRFVFSLDTSVSTAYLQISSLKAEDTAVYYCEREGGVSNWGQGTLVTVSSASTKGPSVFPLAPSSKSTSGGTAALGCLVKDYFPEPVTVSWNSGALTSGVHTFPAVLQSSGLYSLSSVVTVPSSSLGTQTYICNVNHKPSNTKVDKKVEPKSCDKTHTC

SEQ ID NO: 2201 - protein, 227 aa, Artificial Sequence
  source: /note="Description of Artificial Sequence: Synthetic heavy chain variable domain"
EVQLVQSGPELKKPGASVKVSCKASGYTFTNYGMNWVRQAPGQGLEWMGWINTYTGETTYAEDFKGRFVFSLDTSVSTAYLQISSLKAEDTAVYYCEREGGVSNWGQGTLVTVSSASTKGPSVFPLAPSSKSTSGGTAALGCLVKDYFPEPVTVSWNSGALTSGVHTFPAVLQSSGLYSLSSVVTVPSSSLGTQTYICNVNHKPSNTKVDKKVEPKSCDKTHTCPPC

SEQ ID NO: 2202 - protein, 115 aa, Artificial Sequence [sequence omitted]

SEQ ID NO: 2203 - protein, 219 aa, Artificial Sequence
  source: /note="Description of Artificial Sequence: Synthetic heavy chain variable domain"
DIVMTQATPSVPVTPGESVSISCRSSKSLLHSNGITYLYWFLQRPGQSPQRLIYYMSNLASGVPDRFSGRGSGTDFTLRISRVEAEDVGVYYCMQSLEYPYTFGGGTKLEIKRADAAPTVSIFPPSSEQLTSGGASVVCFLNNFYPKDINVKWKIDGSERQNGVLNSWTDQDSKDSTYSMSSTLTLTKDEYERHNSYTCEATHKTSTSPIVKSFNRNEC

SEQ ID NO: 2204 - protein, 469 aa, Artificial Sequence
  source: /note="Description of Artificial Sequence: Synthetic heavy chain variable domain"
METDTLLLWVLLLWVPGSTGQVQLVQSGAEVKKPGASVKVSCKASGYTFTENIIHWVRQAPGQGLEWMGWFHPGSGSIKYNEKFKDRVTMTADTSTSTVYMELSSLRSEDTAVYYCARHGGTGRGAMDYWGQGTLVTVSSASTKGPSVFPLAPSSKSTSGGTAALGCLVKDYFPEPVTVSWNSGALTSGVHTFPAVLQSSGLYSLSSVVTVPSSSLGTQTYICNVNHKPSNTKVDKKVEPKSCDKTHTCPPCPAPPVAGPSVFLFPPKPKDTLMISRTPEVTCVVVDVSHEDPEVKFNWYVDGVEVHNAKTKPREEQYNSTYRVVSVLTVLHQDWLNGKEYKCKVSNKGLPSSIEKTISKAKGQPREPQVYTLPPSRDELTKNQVSLTCLVKGFYPSDIAVEWESNGQPENNYKTTPPVLDSDGSFFLYSKLTVDKSRWQQGNVFSCSVMHEALHNHYTQKSLSLSPGK

SEQ ID NO: 2205 - protein, 120 aa, Artificial Sequence
  source: /note="Description of Artificial Sequence: Synthetic heavy chain variable domain"
QVQLVQSGAEVKKPGASVKVSCKASGYTFTENIIHWVRQAPGQGLEWMGWFHPGSGSIKYNEKFKDRVTMTADTSTSTVYMELSSLRSEDTAVYYCARHGGTGRGAMDYWGQGTLVTVSS

SEQ ID NO: 2206 - protein, 124 aa, Artificial Sequence
  source: /note="Description of Artificial Sequence: Synthetic heavy chain variable domain"
QVQLVQSGAEVKKPGASVKVSCKTSRYTFTEYTIHWVRQAPGQRLEWIGGINPNNGIPNYNQKFKGRVTITVDTSASTAYMELSSLRSEDTAVYYCARRRIAYGYDEGHAMDYWGQGTLVTVSS

SEQ ID NO: 2207 - protein, 119 aa, Artificial Sequence
  source: /note="Description of Artificial Sequence: Synthetic heavy chain variable domain"
QVQLQQSGAELARPGASVNLSCKASGYTFTNNGINWLKQRTGQGLEWIGEIYPRSTNTLYNEKFKGKATLTADRSSNTAYMETELRSLTSEDSAVYFCARTLTAPFAFWGQGTLVTVSA

SEQ ID NO: 2208 - protein, 121 aa, Artificial Sequence
  source: /note="Description of Artificial Sequence: Synthetic heavy chain variable domain"
EVQLVETGGGVVQPGRSLRLSCAASGFTFSSYGMHWVRQAPGKGLEWVAVISHDGSNKYYADSVKGRFTISRDNSKDTLYLQMNSLRGEDTAVYYCARSNQWSGYFSFDYWGQGTLVTVSS

SEQ ID NO: 2209 - protein, 117 aa, Artificial Sequence
  source: /note="Description of Artificial Sequence: Synthetic heavy chain variable domain"
EVQLVQSGAEVKKPGASVKVSCKASGYTFTTYGISWVRQAPGQGLEWMGWINTYNGHTNYAQKLQGRATMTADTSTNTAYMELRSLRSDDTAVYYCARVIYGSGDYWGQGTLVTVSS

SEQ ID NO: 2210 - protein, 116 aa, Artificial Sequence
  source: /note="Description of Artificial Sequence: Synthetic heavy chain variable domain"
QVQLQESGPGLVKPSETLSLTCNVSGYSISSGYFWGWIRQPPGKGLEWIGSIYHSRSTYYNPSLKSRVTISVDTSKNQFSLKLNSVTAADTAVYYCARGYGYFDYWGQGTLVTVSS

SEQ ID NO: 2211 - protein, 120 aa, Artificial Sequence
  source: /note="Description of Artificial Sequence: Synthetic heavy chain variable domain"
EVQLVESGGGVVRPGGSLRLSCAASGFTFGDYGMSWVRQAPGKGLEWVSGINWNGGSTGYADSVKGRFTISRDNAKNSLYLQMNSLRAEDTAVYYCARSKYNFHVYYDYWGQGTLVTVSS

SEQ ID NO: 2212 - protein, 120 aa, Artificial Sequence
  source: /note="Description of Artificial Sequence: Synthetic heavy chain variable domain"
QVQLVQSGAEVKKPGASVKVSCKASGYTFTSYGISWVRQAPGQGLEWMGWISAYNGNTNYAQKLQGRVTMTTDTSTSTAYMELRSLRSDDTAVYYCARSSGNMVSWKDMWGQGTLVTVSS

SEQ ID NO: 2213 - protein, 116 aa, Artificial Sequence
  source: /note="Description of Artificial Sequence: Synthetic heavy chain variable domain"
QVQLVQSGAEVKKPGASVKVSCKASGYTFTSYGISWVRQAPGQGLEWMGWISAYNGNTNYAQKLQGRVTMTTDTSTSTAYMELRSLRSDDTAVYYCARGAVAYHDWGQGTLVTVSS

SEQ ID NO: 2214 - protein, 118 aa, Artificial Sequence
  source: /note="Description of Artificial Sequence: Synthetic heavy chain variable domain"
QMQLVQSGAEVKKPGSSVKVSCEASGGTLSSYAINWVRQAPGQGLEWMGGIIPMFGTAHYAQKFQGRVTITADESTKTAYMELSSLRSEDTAVYYCARGVHYASFDHWGQGTLVTVSS

SEQ ID NO: 2215 - protein, 117 aa, Artificial Sequence
  source: /note="Description of Artificial Sequence: Synthetic heavy chain variable domain"
QVQLQQWGAGLLKPSETLSLTCAVYGGSFSGYYWSWIRQPPGKGLEWIGEINHSGSTNYNPSLKSRVTISVDTSKNQFSLKLSSVTAADTAVYYCAREGPYDGFDSWGQGTLVTVSS

SEQ ID NO: 2216 - protein, 117 aa, Artificial Sequence
  source: /note="Description of Artificial Sequence: Synthetic heavy chain variable domain"
QMQLVQSGAEVKKPGASVKVSCKTSGFPFNIFGITWVRQAPGQGLEWMGWISGYNGNTDYPQKFQGRVTMSTDTSTSTAYMELRNLKSDDTAVYYCARGAYGGMDTWGQGTLVTVSS

SEQ ID NO: 2217 - protein, 118 aa, Artificial Sequence
  source: /note="Description of Artificial Sequence: Synthetic heavy chain variable domain"
EVQLVESGTEVKKPGASVKVSCKASGYMFTSYGLNWVRQAPGQGLEWMGWISANNGKTNYAKKFQDRVTMTRDTSTSTGYMELRSLRSDDTAVYYCARHIGGSYFDRWGQGTLVTVSS

SEQ ID NO: 2218 - protein, 119 aa, Artificial Sequence
  source: /note="Description of Artificial Sequence: Synthetic heavy chain variable domain"
EVQLVETGGGLVQPGGSLRLSCAASGFTFSSYAMSWVRQAPGKGLEWVSAISGSDGSTYYADSVKGRFTISRDNSKNTLYLQMNSLRDEDTAVYYCARSHEANLVGDWWGQGTLVTVSS

SEQ ID NO: 2219 - protein, 116 aa, Artificial Sequence
  source: /note="Description of Artificial Sequence: Synthetic heavy chain variable domain"
QVQLVQSGTEVKKPGASVRVACKASGYPFNKYDINWVRQAPGQGLEWMGGIIPIFRTTNYAQKFQGRVTITADESTSTAYMELSSLRSEDTAVYYCAREWFYWDIWGQGTLVTVSS

SEQ ID NO: 2220 - protein, 113 aa, Artificial Sequence
  source: /note="Description of Artificial Sequence: Synthetic heavy chain variable domain"
VKLQESGGGLVQPGGSRKLSCAASGTSIFGLHWVRQAPEKGLEWVAYISGDSNTIYYADTVKGRTISRDNPKNTLFLQMTSLRSEDTAMYYCARNSYYALDYWGQGTTVTVSS

SEQ ID NO: 2221 - protein, 117 aa, Artificial Sequence
  source: /note="Description of Artificial Sequence: Synthetic heavy chain variable domain"
VQLQESGGGLVQPGGSRKLSCTASGFTSSFGMHWVRQAPEKGLEWVAYISSGSNIYFADTVKGRFTISRDNPKNTLFLQMTSLRSEDTAMYYCARSEYYGSSHMDYWGQGTTVTVSS

SEQ ID NO: 2222 - protein, 125 aa, Artificial Sequence
  source: /note="Description of Artificial Sequence: Synthetic heavy chain variable domain"
EVQLVESGGGLVQPGGSLRLSCAASGFTFTSTGISWVRQAPGKGLEWVGRIYPTSGSTNYADSVKGRFTISADTSKNTAYLQMNSLRAEDTAVYYCARARTYGIYDLYVDYTEYVMDYWGQGTLV

SEQ ID NO: 2223 - protein, 125 aa, Artificial Sequence
  source: /note="Description of Artificial Sequence: Synthetic heavy chain variable domain"
EVQLVESGGGLVQPGGSLRLSCAASGFTFTSTGISWVRQAPGKGLEWVARIYPTNGSTNYADSVKGRFTISADTSKNTAYLQMNSLRAEDTAVYYCARARTYGIYDLYVDYTEYVMDYWGQGTLV

SEQ ID NO: 2224 - protein, 125 aa, Artificial Sequence
  source: /note="Description of Artificial Sequence: Synthetic heavy chain variable domain"
EVQLVESGGGLVQPGGSLRLSCAASGFTFSTTGISWVRQAPGKGLEWVARIYPLYGSTHYADSVKGRFTISADTSKNTAYLQMNSLRAEDTAVYYCARARTYGIYDLYVDYTEYVMDYWGQGTLV

SEQ ID NO: 2225 - protein, 117 aa, Artificial Sequence
  source: /note="Description of Artificial Sequence: Synthetic heavy chain variable domain"
EVQLVESGGGLVQPGGSLRLSCAASGYTFTNHWMNWVRQAPGKGLEWVGMILPVDSETTLEQKFKDRFTISADTSKNTAYLQMNSLRAEDTAVYYCTRGDISLFDYWGQGTLVTVSS

SEQ ID NO: 2226 - protein, 118 aa, Artificial Sequence
  source: /note="Description of Artificial Sequence: Synthetic heavy chain variable domain"
EVQLVESGGGLVQPGGSLRLSCAASGFTFSHYTLSWVRQAPGKGLEWVSVISGDGSYTYYADSVKGRFTISSDNSKNTLYLQMNSLRAEDTAVYYCARNFIKYVFANWGQGTLVTVSS

SEQ ID NO: 2227 - protein, 119 aa, Artificial Sequence
  source: /note="Description of Artificial Sequence: Synthetic heavy chain variable domain"
QVQLQESGPGLVKPSQTLSLTCTVSGGSISSCGFYWNWIRQHPGKGLEWIGYIYYSGSTYYNPSLKSRVTISLDTSKSQFSLKLSSLTAADTAVYYCARSTRLRGADYWGQGTMVTVSS

SEQ ID NO: 2228 - protein, 121 aa, Artificial Sequence
  source: /note="Description of Artificial Sequence: Synthetic heavy chain variable domain"
EVMLVESGGGLVKPGGSLKLSCAASGFTFSTYAMSWVRQTPEKRLEWVATITSGGSYTYYPDSVKGRFTISRDNAKNILYLQMSSLRSEDTAMYYCTRLRQIGLRGFSDYWGQGTTLTVSS

SEQ ID NO: 2229 - protein, 118 aa, Artificial Sequence
  source: /note="Description of Artificial Sequence: Synthetic heavy chain variable domain"
QVQLQESGPGLVKPSQTLSITCTVSGFSLASYNIHWVRQPPGKGLEWLGVIWAGGSTNYNSALMSRLTISKDNSKNQVFLKMSSLTAADTAVYYCAKRSDDYSWFAYWGQGTLVTVSS

SEQ ID NO: 2230 - protein, 446 aa, Artificial Sequence
  source: /note="Description of Artificial Sequence: Synthetic heavy chain variable domain"
QVQLKESGPGLVAPSQSLSITCTVSGFSVTNYGVHWVRQPPGKGLEWLGVIWAGGITNYNSAFMSRLSISKDNSKSQVFLKMNSLQIDDTAMYYCASRGGHYGYALDYWGQGTSVTVSSASTKGPSVFPLAPCSRSTSESTAALGCLVKDYFPEPVTVSWNSGALTSGVHTFPAVLQSSGLYSLSSVVTVPSSSLGTKTYTCNVDHKPSNTKVDKRVESKYGPPCPSCPAPEFLGGPSVFLFPPKPKDTLMISRTPEVTCVVVDVSQEDPEVQFNWYVDGVEVHNAKTKPREEQFNSTYRVVSVLTVLHQDWLNGKEYKCKVSNKGLPSSIEKTISKAKGQPREPQVYTLPPSQEEMTKNQVSLTCLVKGFYPSDIAVEWESNGQPENNYKTTPPVLDSDGSFFLYSRLTVDKSRWQEGNVFSCSVMHEALHNHYTQKSLSLSLGK

SEQ ID NO: 2231 - protein, 448 aa, Artificial Sequence
  source: /note="Description of Artificial Sequence: Synthetic heavy chain variable domain"
QVQLVESGPGVVQPGRSLRISCAVSGFSVTNYGVHWVRQPPGKGLEWLGVIWAGGITNYNSAFMSRLTISKDNSKNTVYLQMNSLRAEDTAMYYCASRGGHYGYALDYWGQGTLVTVSSASTKGPSVFPLAPSSKSTSGGTAALGCLVKDYFPEPVTVSWNSGALTSGVHTFPAVLQSSGLYSLSSVVTVPSSSLGTQTYICNVNHKPSNTKVDKRVEPKSCDKTHTCPPCPAPELLGGPSVFLFPPKPKDTLMISRTPEVTCVVVDVSHEDPEVKFNWYVDGVEVHNAKTKPREEQYNSTYRVVSVLTVLHQDWLNGKEYKCKVSNKALPAPIEKTISKAKGQPREPQVYTLPPSRDELTKNQVSLTCLVKGFYPSDIAVEWESNGQPENNYKTTPPVLDSDGSFFLYSKLTVDKSRWQQGNVFSCSVMHEALHNHYTQKSLSLSPG

SEQ ID NO: 2232 - protein, 448 aa, Artificial Sequence
  source: /note="Description of Artificial Sequence: Synthetic heavy chain variable domain"
QVQLKESGPGVVQPGQSLSISCAVSGFSVTNYGVHWVRQPPGKGLEWLGVIWAGGITNYNSAFMSRLTISKDNSKSTVYLKMNSLQAEDTAMYYCASRGGHYGYALDYWGQGTLVTVSSASTKGPSVFPLAPSSKSTSGGTAALGCLVKDYFPEPVTVSWNSGALTSGVHTFPAVLQSSGLYSLSSVVTVPSSSLGTQTYICNVNHKPSNTKVDKRVEPKSCDKTHTCPPCPAPELLGGPSVFLFPPKPKDTLMISRTPEVTCVVVDVSHEDPEVKFNWYVDGVEVHNAKTKPREEQYNSTYRVVSVLTVLHQDWLNGKEYKCKVSNKALPAPIEKTISKAKGQPREPQVYTLPPSRDELTKNQVSLTCLVKGFYPSDIAVEWESNGQPENNYKTTPPVLDSDGSFFLYSKLTVDKSRWQQGNVFSCSVMHEALHNHYTQKSLSLSPG

SEQ ID NO: 2233 - protein, 446 aa, Artificial Sequence
  source: /note="Description of Artificial Sequence: Synthetic heavy chain variable domain"
QVQLVESGPGVVQPGRSLRISCAVSGFSVTNYGVHWVRQPPGKGLEWLGVIWAGGITNYNSAFMSRLTISKDNSKNTVYLQMNSLRAEDTAMYYCASRGGHYGYALDYWGQGTLVTVSSASTKGPSVFPLAPCSRSTSESTAALGCLVKDYFPEPVTVSWNSGALTSGVHTFPAVLQSSGLYSLSSVVTVPSSSLGTKTYTCNVDHKPSNTKVDKRVESKYGPPCPSCPAPEFLGGPSVFLFPPKPKDTLMISRTPEVTCVVVDVSQEDPEVQFNWYVDGVEVHNAKTKPREEQFNSTYRVVSVLTVLHQDWLNGKEYKCKVSNKGLPSSIEKTISKAKGQPREPQVYTLPPSQEEMTKNQVSLTCLVKGFYPSDIAVEWESNGQPENNYKTTPPVLDSDGSFFLYSRLTVDKSRWQEGNVFSCSVMHEALHNHYTQKSLSLSLGK

SEQ ID NO: 2234 - protein, 118 aa, Artificial Sequence
  source: /note="Description of Artificial Sequence: Synthetic heavy chain variable domain"
QVQLKESGPVLVAPSQTLSITCTVSGFSLASYNIHWVRQPPGKGLEWLGVIWAGGSTNYNSALMSRLSISKDNSKSQVFLQMNSLQTDDTAMYYCAKRSDDYSWFAYWGQGTLVTVSA

SEQ ID NO: 2235 - protein, 120 aa, Artificial Sequence
  source: /note="Description of Artificial Sequence: Synthetic heavy chain variable domain"
DVQLVESGGGLVQPGGSRKLSCAASGFTFSNFGMHWVRQAPEKGLEWVAYISSGGSSINYADTVKGRFTISRDNPKNTLFLQMTSLRSEDTAIYYCTRGGTGTRSLYYFDYWGQGATLIV

SEQ ID NO: 2236 - protein, 121 aa, Artificial Sequence
  source: /note="Description of Artificial Sequence: Synthetic heavy chain variable domain"
EVVVVESGGGFVKPGGSLKLSCAAAGFTFSRYAMSWVRQTPEKRLEWVATISSGGSHTYYPDSVKGRFTISRDNAKNTLYLQMSSLRSEDTAIYYCARPGYDRGAWFFDVWGAGTTVTVSS

SEQ ID NO: 2237 - protein, 119 aa, Artificial Sequence
  source: /note="Description of Artificial Sequence: Synthetic heavy chain variable domain"
EVTLVESGGDFVKPGGSLKVSCAASGFAFSHYAMSWVRQTPAKRLEWVAYISSGGSGTYYSDSVKGRFTISRDNAKNTLYLQMRSLRSEDSAMYFCTRVKLGTYYFDSWGQGTTLTVSS

SEQ ID NO: 2238 - protein, 118 aa, Artificial Sequence
  source: /note="Description of Artificial Sequence: Synthetic heavy chain variable domain"
QVQLQQSGGGLVKPGGSLTLSCAASRFTFSTYAMSWVRQTPAKRLEWVAYISSGGASTYYRDSVKGRFTISRDNAKNTLYLQMSSLRSEDTAMYYCARGGSRYAMDYWGQGTTVTVSS

SEQ ID NO: 2239 - protein, 122 aa, Artificial Sequence
  source: /note="Description of Artificial Sequence: Synthetic heavy chain variable domain"
EVKLEESGGGLVQPGGSMKLSCVASGFTFSNYWMNWVRQSPEKGLEWVAEIRLKSNNYATHYAESVKGRFTISRDDSKSSVYLQMNNLRAEDTGIYYCIRETVFYYYAMDYWGQGTTVTVSS

SEQ ID NO: 2240 - protein, 119 aa, Artificial Sequence
  source: /note="Description of Artificial Sequence: Synthetic heavy chain variable domain"
EVQLLESGGGLVQPGGSLRLSCAASGFTFSDYYMYWVRQAPEKRLEWVAYISNGGGSSHYVDSVKGRFTISRDNAKNTLYLQMNSLRAEDTALYHCARGMDYGAWFAYWGQGTLVTVSS

SEQ ID NO: 2241 - protein, 120 aa, Artificial Sequence
  source: /note="Description of Artificial Sequence: Synthetic heavy chain variable domain"
EVQLQQSGPELVKPGASVKISCKASGYTFTDYNMDWVKQSHGKSLEWIGYIYPNNGGTGYNQKFKSKATLTVDKSSSTAYMELHSLTSEDSAVYYCATYGHYYGYMFAYWGQGTLVTVSA

SEQ ID NO: 2242 - protein, 125 aa, Artificial Sequence
  source: /note="Description of Artificial Sequence: Synthetic heavy chain variable domain"
EVQLVQSGAEVKKPGASVKVSCKASGYTFTDYNMDWVRQAPGQGLEWMGYIYPNNGGTGYNQKFKSKVTITVDTSTSTAYMELHSLRSEDTAVYYCATYGHYYGYMFAYWGQGTLVTVSSASTKG

SEQ ID NO: 2243 - protein, 125 aa, Artificial Sequence
  source: /note="Description of Artificial Sequence: Synthetic heavy chain variable domain"
EVQLVQSGAEVKKPGASVKVSCKASGYTFTDYNMDWVRQAPGQGLEWMGYIYPNNGGTGYNQKFKSRVTITADTSTSTAYMELSSLRSEDTAVYYCARYGHYYGYMFAYWGQGTLVTVSSASTKG

SEQ ID NO: 2244 - protein, 125 aa, Artificial Sequence
  source: /note="Description of Artificial Sequence: Synthetic heavy chain variable domain"
EVQLVQSGAEVKKPGASVKVSCKASGYTFTDYNMDWVKQSPGQGLEWMGYIYPNNGGTGYNQKFKSKVTITVDTSTSTAYMELHSLRSEDTAVYYCATYGHYYGYMFAYWGQGTLVTVSSASTKG

SEQ ID NO: 2245 - protein, 125 aa, Artificial Sequence
  source: /note="Description of Artificial Sequence: Synthetic heavy chain variable domain"
EVQLVQSGAEVKKPGASVKVSCKASGYTFTDYNMDWVKQSPGKSLEWMGYIYPNNGGTGYNQKFKSKVTITVDTSTSTAYMELHSLRSEDTAVYYCATYGHYYGYMFAYWGQGTLVTVSSASTKG

SEQ ID NO: 2246 - protein, 125 aa, Artificial Sequence
  source: /note="Description of Artificial Sequence: Synthetic heavy chain variable domain"
EVQLVQSGAEVKKPGASVKVSCKASGYTFTDYNMDWVRQAPGQGLEWMGYIYPNNGGTGYNQKFKSKATLTVDTSTSTAYMELHSLRSEDTAVYYCATYGHYYGYMFAYWGQGTLVTVSSASTKG

SEQ ID NO: 2247 - protein, 125 aa, Artificial Sequence
  source: /note="Description of Artificial Sequence: Synthetic heavy chain variable domain"
EVQLVQSGAEVKKPGASVKVSCKASGYTFTDYNMDWVKQSPGKSLEWMGYIYPNNGGTGYNQKFKSKATLTVDTSTSTAYMELHSLRSEDTAVYYCATYGHYYGYMFAYWGQGTLVTVSSASTKG

SEQ ID NO: 2248 - protein, 125 aa, Artificial Sequence
  source: /note="Description of Artificial Sequence: Synthetic heavy chain variable domain"
EVQLVQSGAEVKKPGASVKVSCKASGYTFTDYNMDWVKQSPGQGLEWMGYIYPNNGGTGYNQKFKSKATLTVDTSTSTAYMELHSLRSEDTAVYYCATYGHYYGYMFAYWGQGTLVTVSSASTKG

SEQ ID NO: 2249 - protein, 117 aa, Artificial Sequence
  source: /note="Description of Artificial Sequence: Synthetic heavy chain variable domain"
EVQLVESGGGLVQPGGSLRLSCAASGFTFSSYEMNWVRQAPGKGLEWVSYISSSGSTIYYADSVKGRFTISRDNAKNSLYLQMNSLRAEDTAVYYCARENIAAFDYWGQGTLVTVSS

SEQ ID NO: 2250 - protein, 116 aa, Artificial Sequence
  source: /note="Description of Artificial Sequence: Synthetic heavy chain variable domain"
EVQLLESGGGLVQPGGSLRLSCAASGFTFSSYAMSWVRQAPGKGLEWVSTIQKQGLPTQYADSVKGRFTISRDNSKNTLYLQMNSLRAEDTAVYYCAKNRAKFDYWGQGTLVTVSS

SEQ ID NO: 2251 - protein, 117 aa, Artificial Sequence
  source: /note="Description of Artificial Sequence: Synthetic heavy chain variable domain"
QVQLVQSGGGLVQPGGSLRLSCAASYFDFDSYEMSWVRQAPGKGLEWIGSIYHSGSTYYNPSLKSRVTISRDNSKNTLYLQMNTLRAEDTATYYCARVNMDRFDYWGQGTLVTVSSS

SEQ ID NO: 2252 - protein, 125 aa, Artificial Sequence
  source: /note="Description of Artificial Sequence: Synthetic heavy chain variable domain"
QVQLVQSGGGLVQPGGSLRLSCAASGFSFSTYEMSWVRQAPGKGLEWVSPISGSGGNSYYADSVKGRFTISRDNSKNTLYLQMNTLRAEDTAVYYCAKGPPVWSGYYFADGFDIWGQGTMVTVSS

SEQ ID NO: 2253 - protein, 116 aa, Artificial Sequence
  source: /note="Description of Artificial Sequence: Synthetic heavy chain variable domain"
EVQLLESGGGLVQPGGSLRLSCAASGFTFSSYAMSWVRQAPGKGLEWVSAISGSGGSTYYADSVKGRFTISRDNSKNTLYLQMNSLRAEDTAVYYCAKSYGAFDYWGQGTLVTVSS

SEQ ID NO: 2254 - protein, 120 aa, Artificial Sequence
  source: /note="Description of Artificial Sequence: Synthetic heavy chain variable domain"
EVQLLESGGGLVQPGGSLRLSCAASGFRISDEDMGWVRQAPGKGLEWVSSIYGPSGSTYYADSVKGRFTISRDNSKNTLYLQMNSLRAEDTAVYYCASALEPLSEPLGFWGQGTLVTVSS

SEQ ID NO: 2255 - protein, 115 aa, Artificial Sequence
  source: /note="Description of Artificial Sequence: Synthetic heavy chain variable domain"
QVQLVQSGGGLVQPGGSLRLSCAASGFTVSSNYMSWVRQAPGKGLEWVSVIYHGGTTYYTDSVKGRFTISRDNSKNTLYLQMNSLRAEDTAVYYCARANGAFDIWGQGTMVTVSS

SEQ ID NO: 2256 - protein, 116 aa, Artificial Sequence
  source: /note="Description of Artificial Sequence: Synthetic heavy chain variable domain"
QVQLVQSGGGLIQPGGSLRLSCAASGFTVSSNYMSWVRQAPGKGLEWVSVIYSGGSTYYADSVKGRFTISRDNSKNTLYLQMNSLRAEDTAVYYCARNFGEDFDYWGQGTLVTVSS

SEQ ID NO: 2257 - protein, 116 aa, Artificial Sequence
  source: /note="Description of Artificial Sequence: Synthetic heavy chain variable domain"
EVQLVESGGGLVQPGGSLRLSCAASGFTFSTYAMSWVRQAPGKGLEWVASISTGGSTYYPDSVKGRFTISRDNAKNTLYLQMNSLRAEDTAVYYCARDYDGYFDYWGQGTLVTVSS

SEQ ID NO: 2258 - protein, 124 aa, Artificial Sequence
  source: /note="Description of Artificial Sequence: Synthetic heavy chain variable domain"
QVQLVQSGGGLVQPGGSLRLSCAASGFTFSSYAMSWVRQAPGKGLEWVSAISGSGGSTYYADSVKGRFTISRDNSKNTLYLQMNSLRAEDTAVYYCAKGITMIVVVISDAFDIWGQGTMVTVSS

SEQ ID NO: 2259 - protein, 121 aa, Artificial Sequence
  source: /note="Description of Artificial Sequence: Synthetic heavy chain variable domain"
QVQLVQSGAEVKKPGASVKVSCKASGYTFTSYYMHWVRQAPGQGLEWMGIINPSGGSTRYAQKFQGRVTMTRDTSTSTVYMELSSLRSEDTAVYYCARGSSRWGGWTGDYWGQGTLVTVSS

SEQ ID NO: 2260 - protein, 117 aa, Artificial Sequence
  source: /note="Description of Artificial Sequence: Synthetic heavy chain variable domain"
EVQLVETGGGLVQPGGSLRLSCAASGSTFSSYAMSWVRQAPGKGLEWVSAISGRGRSTYYADSVKGRFTISRDNSKNTLYLQMNSLRAEDTAVYYCARYYKSSKDHWGQGTLVTVSS

SEQ ID NO: 2261 - protein, 121 aa, Artificial Sequence
  source: /note="Description of Artificial Sequence: Synthetic heavy chain variable domain"
QVQLVQSGAEVQRPGASVRVSCKAIAYTFTDYYIHWVRQAPGQGPEWMGWINPKSGRTQYAPKFQDRVTLARETPISTASMELRGLTSDDTAVYYCARVYGYSRWSGFDLWGQGTLVTVSS

SEQ ID NO: 2262 - protein, 124 aa, Artificial Sequence
  source: /note="Description of Artificial Sequence: Synthetic heavy chain variable domain"
QVQLVQSGAEVKQPGASVKVSCQASGYTFTTYYMHWVRQAPGQGLEWMGIINPNGGGTFYAQKFQDRVTMTRDTSTGTVYMELSSLRSDDTAVYYCARGHKVYKSHPTGGYDRWGQGTLVTVSS

SEQ ID NO: 2263 - protein, 119 aa, Artificial Sequence
  source: /note="Description of Artificial Sequence: Synthetic heavy chain variable domain"
EVQLVQSGAEVKKPGSSVKVSCKASGGTFSSYAISWVRQAPGQGLEWMGGIIPIFGTAKYAQKFQGRVTITADESTSTAYMELSSLRSEDTAVYYCARSHVAWSLLDYWGQGTLVTVSS

SEQ ID NO: 2264 - protein, 121 aa, Artificial Sequence
  source: /note="Description of Artificial Sequence: Synthetic heavy chain variable domain"
QLQLQESGGGSVQPGGSLRLSCAASGFTFSNYAMSWVRQAPGKGLEWVSAITNSGRSTYYADSVKGRFTISRDNSKNTLSLQMSSLRAEDTAVYYCARVTHRRYGSTFDSRGQGTLVTVSS

SEQ ID NO: 2265 - protein, 121 aa, Artificial Sequence
  source: /note="Description of Artificial Sequence: Synthetic heavy chain variable domain"
QVQLVQSGAEVKKPGSSVKVSCKASGGTFRSYAITWVRQAPGQGLEWMGRIIPMLDITNYAQKFQGRVTITADKSTSTAYMELSSLRSEDTAVYYCARTYSRSPFHMEDFWGQGTLVTVSS

SEQ ID NO: 2266 - protein, 120 aa, Artificial Sequence
  source: /note="Description of Artificial Sequence: Synthetic heavy chain variable domain"
QVQLVQSGAEVKKPGSSVKVSCKASGGTFSSYAISWVRQAPGQGLEWMGWMNPNSGNTGYAQKFQGRVTMTRNTSISTAYMELSSLRSEDTAVYYCARYQSYKGSQSDSWGQGTLVTVSS

SEQ ID NO: 2267 - protein, 114 aa, Artificial Sequence
  source: /note="Description of Artificial Sequence: Synthetic heavy chain variable domain"
EVQLVESGGGLVQPGGSLRLSCAASGFTFSSYAMSWVRQAPGKGLEWVSAISGSGGSTYYADSVKGRFTISRDNAKNTLYLQMNSLRAEDTAVYYCARKYQDVWGQGTLVTVSS

SEQ ID NO: 2268 - protein, 122 aa, Artificial Sequence
  source: /note="Description of Artificial Sequence: Synthetic heavy chain variable domain"
QVQLVQSGGGVVQPGRSLRLSCAASGFSFSGTAMHWVRQAPGKGLEWVSTISSTGRSTYYRDSVKGRFTISRDNSKNTLYLQMNSLRGEDTAVYYCARPVSSMTLSIQSDGWGQGTLVTVSS

SEQ ID NO: 2269 - protein, 130 aa, Artificial Sequence
  source: /note="Description of Artificial Sequence: Synthetic heavy chain variable domain"
QMQLVQSGAEVKKPGASVKVSCKASGYTFTSYYMHWVRQAPGQGLEWMGIINPSGGSTSYAQKFQGRVTMTRDTSTSTVYMELSSLRSEDTAVYYCARGQKYHSQYSRGGTGGGMTQDMWGQGTLVTVSS

SEQ ID NO: 2270 - protein, 127 aa, Artificial Sequence
  source: /note="Description of Artificial Sequence: Synthetic heavy chain variable domain"
EVQLVQSGAEVKKPGASVKVSCKASGYTFTSYYMHWVRQAPGQGLEWMGIINPSGGSTSYAQKFQGRVTMTRDTSTSTVYMELSSLRSEDTAVYYCARGGSKKWSGEKWRRENFDYWGQGTLVTVSS

SEQ ID NO: 2271 - protein, 117 aa, Artificial Sequence
  source: /note="Description of Artificial Sequence: Synthetic heavy chain variable domain"
EVQLVQSGAEVKKPGASVKVSCKASGYTFSRYYIHWVRQAPGQGLEWMGWMNPNSGNTGYAQKFQGRVTMTRNTSISTAYMELSSLRSEDTAVYYCARGRYHVIDYWGQGTLVTVSS

SEQ ID NO: 2272 - protein, 113 aa, Artificial Sequence
  source: /note="Description of Artificial Sequence: Synthetic heavy chain variable domain"
QLQLVQSGAEVKKPGSSVKVSCKASGYTFNTYYLHWVRQAPGQGLEWMGRINPNNGGTNYAQKFQGRVTMTRDTSINTAYMELSRLRSDDTAVYYCARSYDYWGQGTLVTVSS

SEQ ID NO: 2273 - protein, 113 aa, Artificial Sequence
  source: /note="Description of Artificial Sequence: Synthetic heavy chain variable domain"
QMQLVQSGAEVKKPGASVKVSCKASEYTFTRHILHWVRQAPGQSLEWMGWINPGNGNTKYSQKFQVRVTFTRDTSASTVYMELSSLRSEDTAVYYCARLPDQWGQGTLVTVSS

SEQ ID NO: 2274 - protein, 114 aa, Artificial Sequence
  source: /note="Description of Artificial Sequence: Synthetic heavy chain variable domain"
EVQLVESGGGVVRPGGSLRLSCAASGFTFGDYGMSWVRQAPGKGLEWVSGINWNGGSTGYADSVKGRFTISRDNAKNSLYLQMNSLRAEDTAVYYCARSKQDYWGQGTLVTVSS

SEQ ID NO: 2275 - protein, 114 aa, Artificial Sequence
  source: /note="Description of Artificial Sequence: Synthetic heavy chain variable domain"
EVQLVETGGNLVQPGASLRLSCAASGFSFSGTAMHWVRQAPGKGLEWVSTISSTGRSTYYRDSVKGRFTISRDNSKNTLYLQMNSLRGEDTAVYYCARVSFDYWGQGTLVTVSS

SEQ ID NO: 2276 - protein, 116 aa, Artificial Sequence
  source: /note="Description of Artificial Sequence: Synthetic heavy chain variable domain"
EVQLVESGGGLVQPGGSLRLSCAASGFTFSNYAMSWVRQAPGKGLEWVSAISGSGNTYYADSVKGRFTISRDNSKNTLYLQMNSLRAEDTAVYYCARGSVRYTDIWGQGTLVTVSS

SEQ ID NO: 2277 - protein, 118 aa, Artificial Sequence
  source: /note="Description of Artificial Sequence: Synthetic heavy chain variable domain"
EVQLVESGGAFVQPGGSLRLSCAASGFTFSSYAMTWVRQAPGKGLEWVSTISGRGRSTFYADSVKGRFTISRDNSKNTLYLQMNSLRAEDTAVYYCARYYHAGAFDLWGQGTLVTVSS

SEQ ID NO: 2278 - protein, 114 aa, Artificial Sequence
  source: /note="Description of Artificial Sequence: Synthetic heavy chain variable domain"
QMQLVQSGAEVKKPGASVKVSCKASGYTFNRYAITWVRQAPGQGLEWMGWISAYNGNSHYAQKLQGRVTMTTDTSTGTAYMELRRLRSDDTAVYYCARMAYDSWGQGTLVTVSS

SEQ ID NO: 2279 - protein, 117 aa, Artificial Sequence
  source: /note="Description of Artificial Sequence: Synthetic heavy chain variable domain"
EVQLVESGGGLVKPGGSLRLSCAASGFTFSDYYMSWIRQAPGKGLEWVSYISSSGSTIYYADSVKGRFTISRDNAKNSLYLQMNSLRAEDTAVYYCARGYGKAYDQWGQGTLVTVSS

SEQ ID NO: 2280 - protein, 119 aa, Artificial Sequence
  source: /note="Description of Artificial Sequence: Synthetic heavy chain variable domain"
QVQLVESGGGLVHPGGSLRLSCAASGFTFRSHSMNWVRQAPGKGLEWVSSISSDSTYTYYADSVKGRFTISRDNAKNSLYLQMNSLRAEDTAVYYCARSGGQWKYYDYWGQGTLVTVSS

SEQ ID NO: 2281 - protein, 116 aa, Artificial Sequence
  source: /note="Description of Artificial Sequence: Synthetic heavy chain variable domain"
EVQLVESGGGLIQPGGSLRLSCAASGFTFSNYAMNWVRQAPGKGLEWVSTINGRGSSTIYADSVKGRFTISRDNSKNTLYLQMNSLRAEDTATYYCARYISRGLGDSWGQGTLVTV

SEQ ID NO: 2282 - protein, 116 aa, Artificial Sequence
  source: /note="Description of Artificial Sequence: Synthetic heavy chain variable domain"
QMQLVQSGAEVKKPGASVKVSCKASGYTFTSYYMHWVRQAPGQGLEWMGIINPSGGSTSYAQKFQGRVTMTRDTSTSTVYMELSSLRSEDTAVYYCARAGMGMDTWGQGTLVTVSS

SEQ ID NO: 2283 - protein, 117 aa, Artificial Sequence
  source: /note="Description of Artificial Sequence: Synthetic heavy chain variable domain"
QVQLVQSGAEVKKPGASVKVSCRASGYTFTAYSLHWVRQAPGQGLEWMGWINPSSGGAVYAQKFQGRVTMTRDTSISTAYMELSGLRSDDTAVYYCARNVGGQADDWGQGTLVTVSS

SEQ ID NO: 2284 - protein, 117 aa, Artificial Sequence
  source: /note="Description of Artificial Sequence: Synthetic heavy chain variable domain"
QVQLVQSGAEVKKPGASVKVSCRASGYTFTAYSLHWVRQAPGQGLEWMGWINPSSGGAVYAQKFQGRVTMTRDTSISTAYMELSGLRSDDTAVYYCARNVGGHADDWGQGTLVTVSS

SEQ ID NO: 2285 - protein, 129 aa, Artificial Sequence
  source: /note="Description of Artificial Sequence: Synthetic heavy chain variable domain"
QVQLVQSGGEVKKPGASVKVSCKASGFTFNTYGISWVRQAPGQGLEWMGWISANNGHTKSAQRFQDRVAMATDTSTSTAYMELRSLKFDDTAVYYCARGGYHHQMQRYYKATSVYSDYWGQGTLVTVSS

SEQ ID NO: 2286 - protein, 116 aa, Artificial Sequence
  source: /note="Description of Artificial Sequence: Synthetic heavy chain variable domain"
QMQLVQSGAEVKKPGASVKVSCKASGYTFTSYYMHWVRQAPGQGLEWMGIINPSGGSSSYAQKFQGRVTMTRDTSTSTVYMELSSLRSEDTAVYYCARAGMGMDTWGQGTLVTVSS

SEQ ID NO: 2287 - protein, 117 aa, Artificial Sequence
  source: /note="Description of Artificial Sequence: Synthetic heavy chain variable domain"
QVQLVQSGAEVKKPGASVKVSCKASGYTFTSYYMHWVRQAPGQGLEWMGIINPSGGSTSYAQKFQGRVTMTRDTSTSTVYMELSSLRSEDTAVYYCARDVISGFDSWGQGTLVTVSS

SEQ ID NO: 2288 - protein, 120 aa, Artificial Sequence
  source: /note="Description of Artificial Sequence: Synthetic heavy chain variable domain"
QVQLVQSGSELKKPGASVRVSCTASGYTFTSYYMHWVRQAPGQGLEWMGVINPNAGSTRYAQKFQGRVTMSTDTSTSTAYMDLSSLRSEDTAVYYCARGMYRSLLFYDPWGQGTLVTVSS

SEQ ID NO: 2289 - protein, 119 aa, Artificial Sequence
  source: /note="Description of Artificial Sequence: Synthetic heavy chain variable domain"
EVQLVQSGGGLVQPGGSLRLSCATSGFTFNNYWMSWVRQAPGKGLEWVANIKQDGSEKYYADSVRGRFTISRDNAKNSLSLQLNNLRAEDTAVYYCARSMSTAWGYDEWGQGTLVTVSS

SEQ ID NO: 2290 - protein, 118 aa, Artificial Sequence
  source: /note="Description of Artificial Sequence: Synthetic heavy chain variable domain"
EVQLVESGGGLVQPGGSLRLSCAASGFTLSGDWVIHWVRQAPGKGLEWVGEISAAGGYTDYADSVKGRFTISADTSKNTAYLQMNSLRAEDTAVYYCARESRVSFEAAMDYWGQGTLV

SEQ ID NO: 2291 - protein, 117 aa, Artificial Sequence
  source: /note="Description of Artificial Sequence: Synthetic heavy chain variable domain"
EVQLLESGGGLVQPGGSLRLSCAASGFTFSSYAMSWVRQAPGKGLEWVSAINSQGKSTYYADSVKGRFTISRDNSKNTLYLQMNSLRAEDTAVYYCARWGDEGFDIWGQGTLVTVSS

SEQ ID NO: 2292 - protein, 228 aa, Artificial Sequence
  source: /note="Description of Artificial Sequence: Synthetic heavy chain variable domain"
EVQLVESGGGLVQPGGSLRLSCAASGFNIKDTYIHWVRQAPGKGLEWVARIYPTNGYTRYADSVKGRFTISADTSKNTAYLQMNSLRAEDTAVVYCSRWGGDGFYAMDYWGQGTLVTVSSASTKGPSVFPLAPSSKSTSGGTAALGCLVKDYFPEPVTVSWNSGALTSGVHTFPAVLQSSGLVSLSSVVTVPSSSLGTQTVICNVNHKPSNTKVDKKVEPKSCDKTHT

SEQ ID NO: 2293 - protein, 233 aa, Artificial Sequence
  source: /note="Description of Artificial Sequence: Synthetic heavy chain variable domain"
DIQMTQSPSSLSASVGDRVTITCRASQDVNTAVAWYQQKPGKAPKLLIVSASFLVSGVPSRFSGSRSGTDFTLTISSLQPEDFATYVCQQHYTTPPTFGQGTKLEIKRTVAAPSVFIFPPSDEQLKSGTASVVCLLNNFYPREAKVQWKVDNALQSGNSQESVTEQDSKDSTVSLSSTLTLSKADYEKHKVVACEVTHQGLSSPVTKSFNRGECGGGGSNYHLENEVARLKKL

SEQ ID NO: 2294 - protein, 247 aa, Artificial Sequence
  source: /note="Description of Artificial Sequence: Synthetic heavy chain variable domain"
EVQLVESGGGLVQPGGSLRLSCAASGFNIKDTYIHWVRQAPGKGLEWVARIYPTNGYTRYADSVKGRFTISADTSKNTAYLQMNSLRAEDTAVVYCSRWGGDGFYAMDYWGQGTLVTVSSASTKGPSVFPLAPSSKSTSGGTAALGCLVKDYFPEPVTVSWNSGALTSGVHTFPAVLQSSGLVSLSSVVTVPSSSLGTQTVICNVNHKPSNTKVDKKVEPKSCDKTHTGGGGSNYHLENEVARLKKL

SEQ ID NO: 2295 - protein, 232 aa, Artificial Sequence
  source: /note="Description of Artificial Sequence: Synthetic heavy chain variable domain"
DIQMTQSPSSLSASVGDRVTITCRASQDVNTAVAWYQQKPGKAPKLLIVSASFLVSGVPSRFSGSRSGTDFTLTISSLQPEDFATYVCQQHYTTPPTFGQGTKLEIKRTVAAPSVFIFPPSDEQLKSGTASVVCLLNNFYPREAKVQWKVDNALQSGNSQESVTEQDSKDSTVSLSSTLTLSKADYEKHKVVACEVTHQGLSSPVTKSFNRGECGGGGSGGGGSDYKDDDDK

SEQ ID NO: 2296 - protein, 246 aa, Artificial Sequence
  source: /note="Description of Artificial Sequence: Synthetic heavy chain variable domain"
EVQLVESGGGLVQPGGSLRLSCAASGFNIKDTYIHWVRQAPGKGLEWVARIYPTNGYTRYADSVKGRFTISADTSKNTAYLQMNSLRAEDTAVYVCSRWGGDGFYAMDYWGQGTLVTVSSASTKGPSVFPLAPSSKSTSGGTAALGCLVKDYFPEPVTVSWNSGALTSGVHTFPAVLQSSGLVSLSSVVTVPSSSLGTQTVICNVNHKPSNTKVDKKVEPKSCDKTHTGGGGSGGGGSDYKDDDDK

SEQ ID NO: 2297 - protein, 118 aa, Artificial Sequence
  source: /note="Description of Artificial Sequence: Synthetic heavy chain variable domain"
EVQLVQSGAEVKKPGASVKVSCKASGYSFTGYWMNWVRQAPGQGLEWIGMIHPLDAEIRANQKFRDRVTITVDTSTSTAYLELSSLRSEDTAVYYCARGTYDGGFEYWGQGTLVTVSS

SEQ ID NO: 2298 - protein, 227 aa, Artificial Sequence
  source: /note="Description of Artificial Sequence: Synthetic heavy chain variable domain"
QVQLVQSGGGVKKPGASVKVSCKASGYTFRSSYISWVRQSPGQGLEWMGWIYAGTGSPSYNQKLQGRVTMTTDTSTSTAYMELRSLRSDDTAIYYCARHRDYYSNSLTYWGQGTLVTVSSASTKGPSVFPLAPSSKSTSGGTAALGCLVKDYFPEPVTVSWNSGALTSGVHTFPAVLQSSGLYSLSSVVTVPSSSLGTQTYICNVNHKPSNTKVDKKVEPKSCDKTH

SEQ ID NO: 2299 - protein, 119 aa, Artificial Sequence
  source: /note="Description of Artificial Sequence: Synthetic heavy chain variable domain"
EVQLQESGGGLVQPKGSLKLSCAAFGFTFNTYAMHWVRQAPGKGLEWVARIRSKSNNYATYYADSVKDRFTISRDDSQSMLSLQMNNLKTEDTAIYYCVRGGYWSFDVWGAGTTVTVSS

SEQ ID NO: 2300 - protein, 117 aa, Artificial Sequence
  source: /note="Description of Artificial Sequence: Synthetic heavy chain variable domain"
QVQLQESGAELVKPGASVKLSCTASGFNIKDTYMHWVKQRPEQGLEWIGRIDPANGNTKYDPKFQGKATITADTSSNTAYLQLSSLTSEDTAVYYCARSYYGGFAYWGQGTLVTVSA

SEQ ID NO: 2301 - protein, 117 aa, Artificial Sequence
  source: /note="Description of Artificial Sequence: Synthetic heavy chain variable domain"
EVKLQESGPGLVAPSQSLSFTCTVSGFSLSRNSVHWVRQPPGKGLEWLGMIWGGGSTDYNSALKSRLNISKDSSKSQVFLKMNSLQTDDTAMYFCARNGGYDVFHYWGQGTTVTVSS

SEQ ID NO: 2302 - protein, 117 aa, Artificial Sequence
  source: /note="Description of Artificial Sequence: Synthetic heavy chain variable domain"
EVQLVESGGGLVQPGGSLRLSCAASGFSLSRNSVHWVRQAPGKGLEWLGMIWGGGSTDYNSALKSRFTISRDNSKNTLYLQMNSLRAEDTAVYYCARNGGYDVFHYWGQGTTVTVSS

SEQ ID NO: 2303 - protein, 121 aa, Artificial Sequence
  source: /note="Description of Artificial Sequence: Synthetic heavy chain variable domain"
QVQLQQSGPELVKPGASVKISCKTSGYAFSFSWMNWVKWGPGQGLEWIGRIYPGNGDTNYNGKFKGKATLTADKSSNTAYMQLSSLTSVDSAVYFCARWVYSGNNYAVDYWGQGTSVTVSS

SEQ ID NO: 2304 - protein, 112 aa, Artificial Sequence
  source: /note="Description of Artificial Sequence: Synthetic heavy chain variable domain"
QIQLVQSGPELKKPGETVKISCKASGYTFTDYSMHWVKQAPGEGLKWMGWINTETGEPTYADDFKGRFAFSLETSASTAYLQINNLKNEDTATYFCYYGSYWGQGTLVTVSA

SEQ ID NO: 2305 - protein, 151 aa, Artificial Sequence
  source: /note="Description of Artificial Sequence: Synthetic heavy chain variable domain"
MSSPQTLNTLTLTMRWSWIFLFLLSGTAGVHSEYHLQQSGPVLVKPGASVKMSCKASGYTFTDYYMTWVKQSHEKSLEWIGIIDPYNGDTSYNQKFMGKATLTVDMSSSTAYMELNSLTSDDSAVYYCARDLDYWGRGTTLTVSPASTTPP

SEQ ID NO: 2306 - protein, 124 aa, Artificial Sequence
  source: /note="Description of Artificial Sequence: Synthetic heavy chain variable domain"
MGWLWNLLFLMAAAQSAQAQIQLVQSGPELKKPGETVKISCKASGYTFTTYGMSWVKQAPGKGLKWMGWINTYSGVPTYADDFKGRFAFSLETSASTAYLQINNLKNEDTATYFCARCYYGNYN

SEQ ID NO: 2307 - protein, 123 aa, Artificial Sequence
  source: /note="Description of Artificial Sequence: Synthetic heavy chain variable domain"
MGWLWNLLFLMAAAQSAQAQIQLVQSGPELKKPGETVKISCKASGYTFTTYGMSWVKQAPGKGLKWMGWINTYSGVPTYADDFKGRFAFSLETSASTAYLQINNLKNEDTATYFCARCYYGNY

SEQ ID NO: 2308 - protein, 123 aa, Artificial Sequence
  source: /note="Description of Artificial Sequence: Synthetic heavy chain variable domain"
EVMLVESGGGLVKPGGSLKLSCAASGFTFSSYAMSWVRQTPEKRLEWVATITSGGDYTFYPDSVKGRFTISRDNAKNTLYLQMSSRRSEDTAMYYCARHGEIGYGSSAWFAYWGQGTLVTVSA

SEQ ID NO: 2309 - protein, 463 aa, Artificial Sequence
  source: /note="Description of Artificial Sequence: Synthetic heavy chain variable domain"
MGWSCIIVLLVSTATGVHSQVQLQQPGAELVRPGTSVKLSCKASGYTFTSHWLHWVKQRPGQGLEWIGVLDPSDFYSNYNQNFKGKATLTVDTSSSTAYMQLSSLTSEDSAVYYCARGLLSGDYAMDYWGQGTSVTVSSAKTTPPSVYPLAPGSAAQTNSMVTLGCLVKGYFPEPVTVTWNSGSLSSGVHTFPAVLQSDLYTLSSSVTVPSSTWPSQTVTCNVAHPASSTKVDKKIVPRDCGCKPCICTVPEVSSVFIFPPKPKDVLTITLTPKVTCVVVDISKDDPEVQFSWFVDDVEVHTAQTQPREEQFNSTFRSVSELPIMHQDWLNGKEFKCRVNSAAFPAPIEKTISKTKGRPKAPQVYTIPPPKEQMAKDKVSLTCMITDFFPEDITVEWQWNGQPAENYKNTQPIMDTDGSYFVYSKLNVQKSNWEAGNTFTCSVLHEGLHNHHTEKSLSHSPGK

SEQ ID NO: 2310 - protein, 475 aa, Artificial Sequence
  source: /note="Description of Artificial Sequence: Synthetic heavy chain variable domain"
MGRLTSSFLLLIVPAYVLSQVTLKESGPGILRPSQTLSLTCSFSGFSLSTFGLSVGWIRQPSGKGLEWLAHIWWDDDKYYNPALKSRLTISKDTSKNQVFLKIANVDTADTATYYCARIGADALPFDYWGQGTTLTVSSAKTTPPSVYPLAPGCGDTTGSSVTSGCLVKGYFPEPVTVTWNSGSLSSSVHTFPALLQSGLYTMSSSVTVPSSTWPSQTVTCSVAHPASSTTVDKKLEPSGPISTINPCPPCKECHKCPAPNLEGGPSVFIFPPNIKDVLMISLTPKVTCVVVDVSEDDPDVQISWFVNNVEVHTAQTQTHREDYNSTIRVVSTLPIQHQDWMSGKEFKCKVNNKDLPSPIERTISKIKGLVRAPQVYTLPPPAEQLSRKDVSLTCLVVGFNPGDISVEWTSNGHTEENYKDTAPVLDSDGSYFIYSKLNMKTSKWEKTDSFSCNVRHEGLKNYYLKKTISRSPGK

SEQ ID NO: 2311 - protein, 460 aa, Artificial Sequence
  source: /note="Description of Artificial Sequence: Synthetic heavy chain variable domain"
MEWSWVSLFFLSVTTGVHSQVQLQQSDAELVKPGASVKISCKVSGYTFTDHIIHWMKQRPEQGLEWIGYIYPRDGYIKYNEKFKGKATLTADKSSSTAYMQVNSLTSEDSAVYFCARGYYYAMDYWGQGTSVTVSSAKTTPPSVYPLAPGSAAQTNSMVTLGCLVKGYFPEPVTVTWNSGSLSSGVHTFPAVLQSDLYTLSSSVTVPSSTWPSQTVTCNVAHPASSTKVDKKIVPRDCGCKPCICTVPEVSSVFIFPPKPKDVLTITLTPKVTCVVVDISKDDPEVQFSWFVDDVEVHTAQTQPREEQFNSTFRSVSELPIMHQDWLNGKEFKCRVNSAAFPAPIEKTISKTKGRPKAPQVYTIPPPKEQMAKDKVSLTCMITDFFPEDITVEWQWNGQPAENYKNTQPIMDTDGSYFVYSKLNVQKSNWEAGNTFTCSVLHEGLHNHHTEKSLSHSPGK

SEQ ID NO: 2312 - protein, 458 aa, Artificial Sequence
  source: /note="Description of Artificial Sequence: Synthetic heavy chain variable domain"
MGWSCIIVLLVSTATCVHSQVQLLQPGAELVRPGTSVKLSCKTSGYTFSSYWMHWVKQRPGQGLEWIGMIDPSDVYTNYNPKFKGKATLTVDTSSSTAYMQLSSLTSEDSAVYYCARNYSGDYWGQGTTLTVSSAKTTPPSVYPLAPGSAAQTNSMVTLGCLVKGYFPEPVTVTWNSGSLSSGVHTFPAVLQSDLYTLSSSVTVPSSTWPSQTVTCNVAHPASSTKVDKKIVPRDCGCKPCICTVPEVSSVFIFPPKPKDVLTITLTPKVTCVVVDISKDDPEVQFSWFVDDVEVHTAQTQPREEQFNSTFRSVSELPIMHQDWLNGKEFKCRVNSAAFPAPIEKTISKTKGRPKAPQVYTIPPPKEQMAKDKVSLTCMITDFFPEDITVEWQWNGQPAENYKNTQPIMDTDGSYFVYSKLNVQKSNWEAGNTFTCSVLHEGLHNHHTEKSLSHSPGK

SEQ ID NO: 2313 - protein, 464 aa, Artificial Sequence
  source: /note="Description of Artificial Sequence: Synthetic heavy chain variable domain"
MGWLWNLLFLMAAAQSAQAQIQLVQSGPELKKPGEAVKISCKSSGYTFTTYGMSWVKQAPGRALKWMGWINTYSGVPTYADDFKGRFAFSLESSASTAYLQINNLKNEDTATYFCARGRDGYQVAWFAYWGQGTLVTVSAAKTTPPSVYPLAPGSAAQTNSMVTLGCLVKGYFPEPVTVTWNSGSLSSGVHTFPAVLQSDLYTLSSSVTVPSSTWPSQTVTCNVAHPASSTKVDKKIVPRDCGCKPCICTVPEVSSVFIFPPKPKDVLTITLTPKVTCVVVDISKDDPEVQFSWFVDDVEVHTAQTQPREEQFNSTFRSVSELPIMHQDWLNGKEFKCRVNSAAFPAPIEKTISKTKGRPKAPQVYTIPPPKEQMAKDKVSLTCMITDFFPEDITVEWQWNGQPAENYKNTQPIMDTDGSYFVYSKLNVQKSNWEAGNTFTCSVLHEGLHNHHTEKSLSHSPGK

SEQ ID NO: 2314 - protein, 458 aa, Artificial Sequence
  source: /note="Description of Artificial Sequence: Synthetic heavy chain variable domain"
MGWSCIIVLLVSTATGVHSQVQLQQPGAELVRPGTSVKLSCKASGYTFTNYWMHWVKQRPGQGLEWIGMIDPSDSYTNYNPKFKGKATLTVDTSSSTAYMQLSSLTSEDSAVYYCARNYSGDYWGQGTTLTVSSAKTTPPSVYPLAPGSAAQTNSMVTLGCLVKGYFPEPVTVTWNSGSLSSGVHTFPAVLQSDLYTLSSSVTVPSSTWPSQTVTCNVAHPASSTKVDKKIVPRDCGCKPCICTVPEVSSVFIFPPKPKDVLTITLTPKVTCVVVDISKDDPEVQFSWFVDDVEVHTAQTQPREEQFNSTFRSVSELPIMHQDWLNGKEFKCRVNSAAFPAPIEKTISKTKGRPKAPQVYTIPPPKEQMAKDKVSLTCMITDFFPEDITVEWQWNGQPAENYKNTQPIMDTDGSYFVYSKLNVQKSNWEAGNTFTCSVLHEGLHNHHTEKSLSHSPGK

SEQ ID NO: 2315 - protein, 471 aa, Artificial Sequence
  source: /note="Description of Artificial Sequence: Synthetic heavy chain variable domain"
MDMRVPAQLLGLLLLWLRGARCQVQLVESGGGLVKPGGSLRLSCAASGFTFSDYAMSWIRQAPGKGLEWVSTISDGGTYTYYPDSVKGRFTISRDNAKNSLYLQMNSLRAEDTAVYYCAREWGDYDGFDYWGQGTLVTVSSASTKGPSVFPLAPSSKSTSGGTAALGCLVKDYFPEPVTVSWNSGALTSGVHTFPAVLQSSGLYSLSSVVTVPSSSLGTQTYICNVNHKPSNTKVDKRVEPKSCDKTHTCPPCPAPELLGGPSVFLFPPKPKDTLMISRTPEVTCVVVDVSHEDPEVKFNWYVDGVEVHNAKTKPREEQYNSTYRVVSVLTVLHQDWLNGKEYKCKVSNKALPAPIEKTISKAKGQPREPQVYTLPPSREEMTKNQVSLTCLVKGFYPSDIAVEWESNGQPENNYKTTPPVLDSDGSFFLYSKLTVDKSRWQQGNVFSCSVMHEALHNHYTQKSLSLSPGK

SEQ ID NO: 2316 - protein, 121 aa, Artificial Sequence
  source: /note="Description of Artificial Sequence: Synthetic heavy chain variable domain"
QVQLVQSGAEVKKPGSSVKVSCKASGYTFTDYAMHWVRQAPGQGLEWIGLISIYSDHTNYNQKFQGRATMTVDKSTSTAYMELSSLRSEDTAVYYCGRNNYGNYGWYFDVWGQGTTVTVSS

SEQ ID NO: 2317 - protein, 451 aa, Artificial Sequence
  source: /note="Description of Artificial Sequence: Synthetic heavy chain variable domain"
QVQLVQSGAEVKKPGSSVKVSCKASGYTFTDYAMHWVRQAPGQGLEWIGLISIYSDHTNYNQKFQGRATMTVDKSTSTAYMELSSLRSEDTAVYYCGRNNYGNYGWYFDVWGQGTTVTVSSASTKGPSVFPLAPSSKSTSGGTAALGCLVKDYFPEPVTVSWNSGALTSGVHTFPAVLQSSGLYSLSSVVTVPSSSLGTQTYICNVNHKPSNTKVDKKVEPKSCDKTHTCPPCPAPELLGGPSVFLFPPKPKDTLMISRTPEVTCVVVDVSHEDPEVKFNWYVDGVEVHNAKTKPREEQYNSTYRVVSVLTVLHQDWLNGKEYKCKVSNKALPAPIEKTISKAKGQPREPQVYTLPPSRDELTKNQVSLTCLVKGFYPSDIAVEWESNGQPENNYKTTPPVLDSDGSFFLYSKLTVDKSRWQQGNVFSCSVMHEALHNHYTQKSLSLSPGK

SEQ ID NO: 2318 - protein, 121 aa, Artificial Sequence
  source: /note="Description of Artificial Sequence: Synthetic heavy chain variable domain"
QVQLQQSGPELVRPGESVKISCMGSGYTFTDYAMHWVKQSHAKSLEWIGLISIYSDHTNYNQKFQGKATMTVDKSSSTAYMELARLTSEDSAIYYCGRNNYGNYGWYFDVWGAGTTVTVSS

SEQ ID NO: 2319 - protein, 448 aa, Artificial Sequence
  source: /note="Description of Artificial Sequence: Synthetic heavy chain variable domain"
QVQLVQSGAEVKKPGSSVKVSCKASHYTFTDYAMHWVRQAPGQGLEWMGLISIYSDHTNYNQKFQGRVTITADKSTSTAYMELSSLRSEDTAVYYCGRNNYGNYGWYFDVWGQGTTVTVSSASTKGPSVFPLAPCSRSTSESTAALGCLVKDYFPEPVTVSWNSGALTSGVHTFPAVLQSSGLYSLSSVVTVPSSSLGTKTYTCNVDHKPSNTKVDKRVESKYGPPCPPCPAPEFEGGPSVFLFPPKPKDTLMISRTPEVTCVVVDVSQEDPEVQFNWYVDGVEVHNAKTKPREEQFNSTYRVVSVLTVLHQDWLNGKEYKCKVSNKGLPSSIEKTISKAKGQPREPQVYTLPPSQEEMTKNQVSLTCLVKGFYPSDIAVEWESNGQPENNYKTTPPVLDSDGSFFLYSRLTVDKSRWQEGNVFSCSVMHEALHNHYTQKSLSLSLGK

SEQ ID NO: 2320 - protein, 121 aa, Artificial Sequence
  source: /note="Description of Artificial Sequence: Synthetic heavy chain variable domain"
QVQLVQSGAEVKKPGSSVKVSCKASGYTFTDYAMHWVRQAPGQGLEWMGLISIYSDHTNYNQKFQGRVTITADKSTSTAYMELSSLRSEDTAVYYCGRNNYGNYGWYFDVWGQGTTVTVSS

SEQ ID NO: 2321 - protein, 121 aa, Artificial Sequence
  source: /note="Description of Artificial Sequence: Synthetic heavy chain variable domain"
QVQLVQSGVEVKKPGASVKVPCKASGYTFTSYYMHWVRQAPGQGLEWMGIINPSGGSTSYAQKFQGRVTMTRDTSTSTVYMELSSLRSEDTAVYYCARDDFWSGAVGMDVWGQGTTVTVSS

SEQ ID NO: 2322 - protein, 120 aa, Artificial Sequence
  source: /note="Description of Artificial Sequence: Synthetic heavy chain variable domain"
EVQLVQSGVDVKKPGSSVKVSCKASGGTFSSYAISWVRQAPGQGLEWMGGIIPIFGTANYAQKFQGRVTITADESASTAYMELSSLRSEDTAVYYCASGYEGPLWAFDIWGQGTMVTVSS

SEQ ID NO: 2323 - protein, 120 aa, Artificial Sequence
  source: /note="Description of Artificial Sequence: Synthetic heavy chain variable domain"
QVQLQQSGAEVKKPGSSVKVSCKASGGTFSSYAISWVRQAPGQGLEWMGGIIPILGIANYAQKFQGRVTITADESTSTAYMELSSLRSEDTAVYYCARGPRGYSYNFDYWGQGTLVTVSS

SEQ ID NO: 2324 - protein, 126 aa, Artificial Sequence
  source: /note="Description of Artificial Sequence: Synthetic heavy chain variable domain"
VQLLESGGGLVGINPGGSLRLSCTASGFTFSSYAMNWVRQAPGKGLEWVSAISGSGGTTFYADSVKGRFTISRDNSRTTLYLQMNSLRAEDTAVYYCAKDLGWSDSYYYYYGMDVWGQGTTVTVSS

SEQ ID NO: 2325 - protein, 118 aa, Artificial Sequence
  source: /note="Description of Artificial Sequence: Synthetic heavy chain variable domain"
EVTLRESGPALVKPTQTLTLTCTVSGFSLSAYSVNWIRQPPGKALEWLAMIWGDGKIVYNSALKSRLTISKDTSKNQVVLTMTNMDPVDTATYYCAGDGYYPYAMDNWGQGSLVTVSS

SEQ ID NO: 2326 - protein, 119 aa, Artificial Sequence
  source: /note="Description of Artificial Sequence: Synthetic heavy chain variable domain"
QVQLQQPGAELVRPGASVKLSCKASGYTFSNYLMNWVKQRPEQDLDWIGRIDPYDGDIDYNQNFKDKAILTVDKSSSTAYMQLSSLTSEDSAVYYCARGYGTAYGVDYWGQGTSVTVSS

SEQ ID NO: 2327 - protein, 111 aa, Artificial Sequence
  source: /note="Description of Artificial Sequence: Synthetic heavy chain variable domain"
DIVLTQSPASLAVSLGQRATISCRASESVDNYGISFMNWFQQKPGQPPKLLIYAASRQGSGVPARFSGSGSGTDFSLNIHPMEEDDTAMYFCQQSKEVPWTFGGGTKLEIK

SEQ ID NO: 2328 - protein, 120 aa, Artificial Sequence
  source: /note="Description of Artificial Sequence: Synthetic heavy chain variable domain"
QVQLQQSGTELMKPGASVKISCKATGYTVSSYWIDWVKQTPGHGLEWIGEILPGSAINNYNEKFKGKATFTADTSSNTAYMQLSSLTSEDSAVYYCASGDYFDSTFVYYWGQGTTLTVSS

SEQ ID NO: 2329 - protein, 120 aa, Artificial Sequence
  source: /note="Description of Artificial Sequence: Synthetic heavy chain variable domain"
QVQLVQSGAEVKKPGATVKISCKADGYTVSSYWIDWVRQAPGQGLEWMGEILPGSAITNYAEKFQGRVTFTADTSTSTAYMELSSLRSEDTATYYCASGDYFDSTFVYYWGQGTTVTVSS

SEQ ID NO: 2330 - protein, 119 aa, Artificial Sequence
  source: /note="Description of Artificial Sequence: Synthetic heavy chain variable domain"
DVKLVESGGGLVKPGGSLKLSCAASGFTFSIYTMSWVRQTPEKRLEWVATISIGGSYINYPDSVKGRFTISRDNAKNTLYLQMSSLKSEDTAIYYCSREVDGSYAMDYWGQGTSVTVSS

SEQ ID NO: 2331 - protein, 120 aa, Artificial Sequence
  source: /note="Description of Artificial Sequence: Synthetic heavy chain variable domain"
EVQLVQSGAEVKKPGATVKISCKASGYTVSSYWIDWVRQAPGQGLEWMGEILPGSAINNYAEKFQGRVTFTADTSTDTAYMELSSLRSEDTAVYYCASGDYFDSTFVYYWGQGTTVTVSS

SEQ ID NO: 2332 - protein, 120 aa, Artificial Sequence
  source: /note="Description of Artificial Sequence: Synthetic heavy chain variable domain"
QVQLVQSGAEVKKPGATVKISCKASGYTVSSYWIDWVRQAPGQGLEWMGEILPGSAITNYAEKFQGRVTFTADTSTSTAYMELSSLRSEDTAVYYCASGDYFDSTFVYYWGQGTTVTVSS

SEQ ID NO: 2333 - protein, 119 aa, Artificial Sequence
  source: /note="Description of Artificial Sequence: Synthetic heavy chain variable domain"
EVKLVESGGGLVKPGASLKLSCAASGFTFSNYGMSWVRQTSDKRLEWVASISSGGGSTYYPDNVKGRFTISRENAKNTLYLQMSSLKSEDTALYYCARVLPGRWAMDYWGQGSSVTVSS

SEQ ID NO: 2334 - protein, 116 aa, Artificial Sequence
  source: /note="Description of Artificial Sequence: Synthetic heavy chain variable domain"
QVQLQQSGTELVRPGASVKLSCKASGYTFTDYEMHWVKQTPVHGLEWIGAIDPGTGGIAYNQKFKGKATLTADKSSSTAYMELRSLTSEDSAVYYCTLYDYDLAYWGQGTLVTVSA

SEQ ID NO: 2335 - protein, 118 aa, Artificial Sequence
  source: /note="Description of Artificial Sequence: Synthetic heavy chain variable domain"
EVKLVESGGGLVKPGGSLKLSCAASGFTFRTYAMSWVRQTPEKRLEWVASISSRGRIYYPDSVKGRFTISRDNARNILYLQMSSLRSEDTAMYYCARDGDYGSSYDYWGQGTTLTVSS

SEQ ID NO: 2336 - protein, 113 aa, Artificial Sequence
  source: /note="Description of Artificial Sequence: Synthetic heavy chain variable domain"
EVQLQQSGADLVRSGASVKLSCTASGFNIKDYYIHWVKQRPEQGLELIGWIDPESGDTEYAPKFQVKATMTADTSSNTAYLQLSSLTSEDTAVYYCNDGSGYWGQGTTLTVSS

SEQ ID NO: 2337 - protein, 112 aa, Artificial Sequence
  source: /note="Description of Artificial Sequence: Synthetic heavy chain variable domain"
DVVMTQTPLTLSVTLGQPASISCKSSQSLLDSDGETYLNWLLQRPGQSPKRLISLVSKLDSGVPDRFTGSGSGTDFTLKISRVEAEDLGVYYCWQGTHFPYTFGGGTKLEIK

SEQ ID NO: 2338 - protein, 121 aa, Artificial Sequence
  source: /note="Description of Artificial Sequence: Synthetic heavy chain variable domain"
EVKLEESGGGLVQPGGSMKLSCVASGFTFSNYWMNWVRQSPEKGLEWMAEITLKFNNYSTHYAESVKGRFSISRDDSKSTVYLQMNNLRAEDTGIYYCARRNYGDWYINVWGAGTTVTVSS

SEQ ID NO: 2339 - protein, 121 aa, Artificial Sequence
  source: /note="Description of Artificial Sequence: Synthetic heavy chain variable domain"
EVQLVESGGGLVQPGGSLRLSCAASGFTFSNYWMNWVRQAPGKGLEWMAEITLKFNNYSTHYAESVKGRFTISRDNSKNTVYLQMNSLRAEDTAVYYCARRNYGNWYINVWGQGTLVTVSS

SEQ ID NO: 2340 - protein, 121 aa, Artificial Sequence
  source: /note="Description of Artificial Sequence: Synthetic heavy chain variable domain"
EVQLVESGGGLVQPGGSLRLSCAASGFTFSNYWMNWVRQAPGKGLEWMAEITLKFNDYSTHYAESVKGRFTISRDNSKNTVYLQMNSLRAEDTAVYYCARRNYGNWYINVWGQGTLVTVSS

SEQ ID NO: 2341 - protein, 121 aa, Artificial Sequence
  source: /note="Description of Artificial Sequence: Synthetic heavy chain variable domain"
EVKLEESGGGLVQPGGSMKLSCVASGFTFNKFWMNWVRQSPEKGLEWVAEIRLNSINYVKDYAESVKGRFTISRDDSKNSVYLQMNNLRAEDTGIYYCIRRNYGNWFFEIWGAGTTVTVSS

SEQ ID NO: 2342 - protein, 121 aa, Artificial Sequence
  source: /note="Description of Artificial Sequence: Synthetic heavy chain variable domain"
EVQLVESGGGLVQPGGSLRLSCAASGFTFNKFWMNWVRQAPGKGLEWVAEIRLNSINYVKDYAESVKGRFTISRDNAKNSVYLQMNSLRAEDTAVYYCIRRNYGNWFFEIWGQGTLVTVSS

SEQ ID NO: 2343 - protein, 121 aa, Artificial Sequence
  source: /note="Description of Artificial Sequence: Synthetic heavy chain variable domain"
EVQLVESGGGLVQPGGSLRLSCAASGFTFNKFWMNWVRQAPGKGLEWVAEIRLSSINYVKDYAESVKGRFTISRDNAKNSVYLQMNSLRAEDTAVYYCIRRNYGNWFFEIWGQGTLVTVSS

SEQ ID NO: 2344 - protein, 121 aa, Artificial Sequence
  source: /note="Description of Artificial Sequence: Synthetic heavy chain variable domain"
EVQLVESGGGLVQPGGSLRLSCAASGFTFNKFWMNWVRQAPGKGLEWVAEIRLNAINYVKDYAESVKGRFTISRDNAKNSVYLQMNSLRAEDTAVYYCIRRNYGNWFFEIWGQGTLVTVSS

SEQ ID NO: 2345 - protein, 122 aa, Artificial Sequence
  source: /note="Description of Artificial Sequence: Synthetic heavy chain variable domain"
EVLLQQSGPELVKPGASVKISCNASGYTFSDYNMNWVKQSHGKSLESIGDINPKNGDTFYNQNFKDKATLTIDKSSSTVYMELRSLTSEDTAMYYCARHYYYGSSYGGFVYWGQGTLVTVAA

SEQ ID NO: 2346 - protein, 122 aa, Artificial Sequence
  source: /note="Description of Artificial Sequence: Synthetic heavy chain variable domain"
EVQLVQSGAEVKKPGASVKVSCKASGYTFSDYNMNWVRQAPGQGLESIGDINPKNGDTFYNQNFKDRATLTIDKSTSTAYLELSSLRSEDTAVYYCARHYYYGSSYGGFVYWGQGTLVTVSS

SEQ ID NO: 2347 - protein, 122 aa, Artificial Sequence
  source: /note="Description of Artificial Sequence: Synthetic heavy chain variable domain"
EVQLVQSGAEVKKPGASVKVSCKASGYTFSDYNMNWVRQAPGQGLESIGDINPKSGDTFYNQNFKDRATLTIDKSTSTAYLELSSLRSEDTAVYYCARHYYYGSSYGGFVYWGQGTLVTVSS

SEQ ID NO: 2348 - protein, 122 aa, Artificial Sequence
  source: /note="Description of Artificial Sequence: Synthetic heavy chain variable domain"
EVQLVQSGAEVKKPGASVKVSCKASGYTFSDYNMNWVRQAPGQGLESIGDINPKNADTFYNQNFKDRATLTIDKSTSTAYLELSSLRSEDTAVYYCARHYYYGSSYGGFVYWGQGTLVTVSS

SEQ ID NO: 2349 - protein, 122 aa, Artificial Sequence
  source: /note="Description of Artificial Sequence: Synthetic heavy chain variable domain"
QVQLQQSGNDLVKPGASVKLSCKASGYTFTSYWINWIKQRPGQGLEWIGRIAPGSGFISYNELFKDKATLTVDTSSSTAYIQLGSLSSEDSAVYFCAREFYYGSFYGGFAYWGQGTLVTVSA

SEQ ID NO: 2350 - protein, 122 aa, Artificial Sequence
  source: /note="Description of Artificial Sequence: Synthetic heavy chain variable domain"
EVQLVQSGAEVKKPGASVKVSCKASGYTFTSYWINWVRQAPGQGLEWIGRIAPGSGFISYNELFKDRVTITRDTSTSTAYLELSSLRSEDTAVYYCAREFYYGSFYGGFAYWGQGTLVTVSS

SEQ ID NO: 2351 - protein, 119 aa, Artificial Sequence
  source: /note="Description of Artificial Sequence: Synthetic heavy chain variable domain"
QVQLVQSGGGLVQPGGSLKLSCAASGFTFSGSAMHWVRQASGKGLEWVGRIRSRNNNYATAYAASVKGRFTISRDDSKRTTYLQMNSLKTEDTAVYYCTRLQQPPFDYWGQGTLVTVSS

SEQ ID NO: 2352 - protein, 119 aa, Artificial Sequence
  source: /note="Description of Artificial Sequence: Synthetic heavy chain variable domain"
EVQLVESGGDLVQPGGSLKLSCAASGFTFSGSAIHWVRQASGKGLEWVGRIRSRTNNYATEYDASVKGRFTISRDDSKRTAYLQMNSLKTEDTAVYYCTRLGQPPFDYWGQGTLVTVSS

SEQ ID NO: 2353 - protein, 119 aa, Artificial Sequence
  source: /note="Description of Artificial Sequence: Synthetic heavy chain variable domain"
EVQLVESGGGLVQPGGSLKLSCAASGFTFSGSAMHWVRQAPGKGLEWVGRIRSKGNSYATAYAASVKGRFSISRDDSKRTAYLQMSSLKTEDSAVYYCARQFGDPFDYWGQGTLVTVSS

SEQ ID NO: 2354 - protein, 119 aa, Artificial Sequence
  source: /note="Description of Artificial Sequence: Synthetic heavy chain variable domain"
EVQLVESGGGLVQPGGSLRLSCAASGFTFSSFSMSWVRQAPGKGLEWVATISGGKTFTDYVDSVKGRFTISRDDSKNTLYLQMNSLRAEDTAVYYCTRANYGNWFFEVWGQGTLVTVSS

SEQ ID NO: 2355 - protein, 119 aa, Artificial Sequence
  source: /note="Description of Artificial Sequence: Synthetic heavy chain variable domain"
DVNLVESGGGSVKPGGSLKLSCVASGFTFSSFSMSWVRQTPEKRLEWVATISGGKTFTDYVDSVKGRFTISRDDAKNTLYLQMSSLESEDTAMYYCTRANYGNWFFEVWGAGTTVAVSS

SEQ ID NO: 2356 - protein, 119 aa, Artificial Sequence
  source: /note="Description of Artificial Sequence: Synthetic heavy chain variable domain"
EVQLVESGGGLVQPGGSLRLSCAASGFTFSSFSMSWVRQAPGKGLEWVATISGGKTFTDYVDSVKGRFTISRDNSKNTLYLQMNSLRAEDTAVYYCTRANYGNWFFEVWGQGTLVTVSS

SEQ ID NO: 2357 - protein, 128 aa, Artificial Sequence
  source: /note="Description of Artificial Sequence: Synthetic heavy chain variable domain"
ELQLQESGPGLVKPSETLSLTCTVSGGSIRSSIFYWGWIRQPPGKGLEWIGSIYYSGRTYYNPSLKSRVTISVDTSKNQFSLMLTSVTAADTAVYYCARAGGLYNWNDESFSFYMDVWGQGTTVTVSS

SEQ ID NO: 2358 - protein, 128 aa, Artificial Sequence
  source: /note="Description of Artificial Sequence: Synthetic heavy chain variable domain"
ELQLQESGPGLVKPSETLSLTCTVSGGSIRSSIFYWGWIRQPPGKGLEWIGSIYYSGRTYYNPALKSRVTISVDTSKNQFSLMLTSVTAADTAVYYCARAGGLYNWNDESFSFYMDVWGQGTTVTVSS

SEQ ID NO: 2359 - protein, 128 aa, Artificial Sequence
  source: /note="Description of Artificial Sequence: Synthetic heavy chain variable domain"
QLQLQESGPGLVKPSETLSLTCTVSGGSIRSSIFYWGWIRQPPGKGLEWIGSIYYSGRTYYNPSLKSRVTISVDTSKNQFSLMLTSVTAADTAVYYCARAGGLYNWNDESFSFYMDVWGNGTTVTVSS

SEQ ID NO: 2360 - protein, 112 aa, Artificial Sequence
  source: /note="Description of Artificial Sequence: Synthetic heavy chain variable domain"
QIQLVQSGPELKKPGETVKISCKTSGYVFTNYGMNWVKQAPGKGFKWMGWMNTNTGEPTSLEDFKGRFAFSLETSASTAYLQINNLKNDDTATYFCARSGGYDPMDYWGQGT

SEQ ID NO: 2361 - protein, 121 aa, Artificial Sequence
  source: /note="Description of Artificial Sequence: Synthetic heavy chain variable domain"
EVQLVQSGAEVKKPGATVKISCKVSGFNIKDTYMHWVQQAPGKGLEWMGRIDPASGDTKYDPKFQVRVTITADTSTDTAYMELSSLRSEDTAVYYCATGMWVSTGYALDFWGQGTLVTVSS

SEQ ID NO: 2362 - protein, 121 aa, Artificial Sequence
  source: /note="Description of Artificial Sequence: Synthetic heavy chain variable domain"
EVQLVQSGAEVKKPGATVKISCKASGFNIKDTYMHWVQQAPGKGLEWMGRIDPASGDTKYDPKFQVRVTITADTSTDTAYMELSSLRSEDTAVYYCADGMWVSTGYALDFWGQGTLVTVSS

SEQ ID NO: 2363 - protein, 121 aa, Artificial Sequence
  source: /note="Description of Artificial Sequence: Synthetic heavy chain variable domain"
EVQLVQSGAEVKKPGATVKISCKASGFNIKDTYMHWVQQAPGKGLEWIGRIDPASGDTKYDPKFQVRATITADTSTNTAYLELSSLRSEDTAVYYCADGMWVSTGYALDFWGQGTLVTVSS

SEQ ID NO: 2364 - protein, 125 aa, Artificial Sequence
  source: /note="Description of Artificial Sequence: Synthetic heavy chain variable domain"
EVQLVQSGAEVKKPGASVKVSCKASGGTFSSYAISWVRQAPGQGLEWMGGIIPIFGTANYAQKFQGRVTFTADKSTSTAYMELRSLRSDDTAVYYCARGYDYYDSSGVASPFDYWGQGTLVTVSS

SEQ ID NO: 2365 - protein, 116 aa, Artificial Sequence [sequence omitted]

SEQ ID NO: 2366 - protein, 107 aa, Artificial Sequence
  source: /note="Description of Artificial Sequence: Synthetic heavy chain variable domain"
EIVMTQSPATLSLSPGERATLSCRASQSVSSYLAWYQQKPGQAPRLLIYDSSNRATGIPARFSGSGSGTDFTLTISSLEPEDFATYYCLQHNTFPPTFGQGTKVEIK

SEQ ID NO: 2367 - protein, 110 aa, Artificial Sequence
  source: /note="Description of Artificial Sequence: Synthetic heavy chain variable domain"
QSALTQPASLSGSPGQSITISCAGTTTDLTYYDLVSWYQQHPGQAPKLVIYDGNKRPSGVSNRFSGSKSGNTASLTISGLQAEDEADYYCNSYVSSRFYVFGTGTKVTVL

SEQ ID NO: 2368 - protein, 116 aa, Artificial Sequence
  source: /note="Description of Artificial Sequence: Synthetic heavy chain variable domain"
EVQLVQSGGGLVKPGGSLRLSCAASGFTFSSYSMNWVRQAPGKGLEWVSSISSSSSYIYYADSVKGRFTISRDNAKDSLYLQMNSLRAEDTAVYYCARVTDAFDIWGQGTMVTVSS

SEQ ID NO: 2369 - protein, 107 aa, Artificial Sequence
  source: /note="Description of Artificial Sequence: Synthetic heavy chain variable domain"
DIQLTQSPSSVSASVGDRVTITCRASQGISSRLAWYQQKPGKAPKLLIYAASSLQTGVPSRFSGSGSGTDFTLTISSLQPEDFATYYCQQANRFPPTFGPGTKVDIK

SEQ ID NO: 2370 - protein, 123 aa, Artificial Sequence
  source: /note="Description of Artificial Sequence: Synthetic heavy chain variable domain"
QVQLVQSGAEVKKPGSSVKVSCKASGGTFSFYAISWVRQAPGQGLEWMGGFIPIFGAANYAQKFQGRVTITADESTSTAYMELSSLRSDDTAVYYCARIPSGSYYYDYDMDVWGQGTTVTVSS

SEQ ID NO: 2371 - protein, 450 aa, Artificial Sequence
  source: /note="Description of Artificial Sequence: Synthetic heavy chain variable domain"
QVQLVQSGAEVKKPGSSVKVSCKASGGTFSFYAISWVRQAPGQGLEWMGGFIPIFGAANYAQKFQGRVTITADESTSTAYMELSSLRSDDTAVYYCARIPSGSYYYDYDMDVWGQGTTVTVSSASTKGPSVFPLAPCSRSTSESTAALGCLVKDYFPEPVTVSWNSGALTSGVHTFPAVLQSSGLYSLSSVVTVPSSSLGTKTYTCNVDHKPSNTKVDKRVESKYGPPCPPCPAPEFLGGPSVFLFPPKPKDTLMISRTPEVTCVVVDVSQEDPEVQFNWYVDGVEVHNAKTKPREEQFNSTYRVVSVLTVLHQDWLNGKEYKCKVSNKGLPSSIEKTISKAKGQPREPQVYTLPPSQEEMTKNQVSLTCLVKGFYPSDIAVEWESNGQPENNYKTTPPVLDSDGSFFLYSRLTVDKSRWQEGNVFSCSVMHEALHNHYTQKSLSLSLGK

SEQ ID NO: 2372 - protein, 123 aa, Artificial Sequence; identical to SEQ ID NO: 2370
  source: /note="Description of Artificial Sequence: Synthetic heavy chain variable domain"

SEQ ID NO: 2373 - protein, 113 aa, Artificial Sequence
  source: /note="Description of Artificial Sequence: Synthetic heavy chain variable domain"
MADYKDIVMTQSHKFMSTSVGDRVNITCKASQNVDSAVAWYQQKPGQSPKALIYSASYRYSGVPDRFTGRGSGTDFTLTISSVQAEDLAVYYCQQYYSTPWTFGGGTKLEIKR

SEQ ID NO: 2374 - protein, 125 aa, Artificial Sequence
  source: /note="Description of Artificial Sequence: Synthetic heavy chain variable domain"
EVQLQQSGAELVKPGASVKLSCTASGFNIKDTYMHWVKQRPEQGLEWIGRIDPANGNTKYDPKFQGKATIIADTSSNTAYLQLSSLTSEDTAVYYCARGVYHDYDGDYWGQGTTLTVSSYVTVSS

SEQ ID NO: 2375 - protein, 125 aa, Artificial Sequence
  source: /note="Description of Artificial Sequence: Synthetic heavy chain variable domain"
EVQLVQSGAEVKKPGATVKISCKVSGFTLTNYGMNWVRQAPGQGLEWMGWINTDTGEPTYADDFKGRFVFSLDTSVSTAYLQISSLKAEDTAVYYCARNPPYYYGTNNAEAMDYWGQGTTVTVSS

SEQ ID NO: 2376 - protein, 125 aa, Artificial Sequence
  source: /note="Description of Artificial Sequence: Synthetic heavy chain variable domain"
QVQLVQSGAEVKKPGASVKVSCKASGFTLTNYGMNWVRQARGQRLEWIGWINTDTGEPTYADDFKGRFVFSLDTSVSTAYLQISSLKAEDTAVYYCARNPPYYYGTNNAEAMDYWGQGTTVTVSS

SEQ ID NO: 2377 - protein, 125 aa, Artificial Sequence
  source: /note="Description of Artificial Sequence: Synthetic heavy chain variable domain"
QVQLVQSGAEVKKPGASVKVSCKASGFTLTNYGMNWVRQAPGQGLEWMGWINTDTGEPTYADDFKGRFVFSLDTSVSTAYLQISSLKAEDTAVYYCARNPPYYYGTNNAEAMDYWGQGTTVTVSS

SEQ ID NO: 2378 - protein, 125 aa, Artificial Sequence
  source: /note="Description of Artificial Sequence: Synthetic heavy chain variable domain"
EVQLVQSGAEVKKPGATVKISCKVSGFTLTNYGMNWVRQAPGQGLEWMGWINTDTGEPTYADDFKGRFVFSLDTSVSTAYLQICSLKAEDTAVYYCARNPPYYYGTNNAEAMDYWGQGTTVTVSS

SEQ ID NO: 2379 - protein, 125 aa, Artificial Sequence
  source: /note="Description of Artificial Sequence: Synthetic heavy chain variable domain"
QVQLVQSGAEVKKPGASVKVSCKASGFTLTNYGMNWVRQARGQRLEWIGWINTDTGEPTYADDFKGRFVFSLDTSVSTAYLQICSLKAEDTAVYYCARNPPYYYGTNNAEAMDYWGQGTTVTVSS

SEQ ID NO: 2380 - protein, 125 aa, Artificial Sequence
  source: /note="Description of Artificial Sequence: Synthetic heavy chain variable domain"
QVQLVQSGAEVKKPGASVKVSCKASGFTLTNYGMNWVRQAPGQGLEWMGWINTDTGEPTYADDFKGRFVFSLDTSVSTAYLQICSLKAEDTAVYYCARNPPYYYGTNNAEAMDYWGQGTTVTVSS

SEQ ID NO: 2381 - protein, 125 aa, Artificial Sequence
  source: /note="Description of Artificial Sequence: Synthetic heavy chain variable domain"
EVQLVQSGAEVKKPGATVKISCKVSGFTLTNYGMNWIRQSPSRGLEWLGWINTDTGEPTYADDFKGRFVFSLDTSVSTAYLQICSLKAEDTAVYYCARNPPYYYGTNNAEAMDYWGQGTTVTVSS

SEQ ID NO: 2382 - protein, 125 aa, Artificial Sequence
  source: /note="Description of Artificial Sequence: Synthetic heavy chain variable domain"
EVQLVQSGAEVKKPGESLRISCKGSGFTLTNYGMNWVRQATGQGLEWMGWINTDTGEPTYADDFKGRVTISADKSISTAYLQWSSLKASDTAMYYCARNPPYYYGTNNAEAMDYWGQGTTVTVSS

SEQ ID NO: 2383 - protein, 125 aa, Artificial Sequence
  source: /note="Description of Artificial Sequence: Synthetic heavy chain variable domain"
EVQLVQSGAEVKKPGATVKISCKVSGFTLTNYGMNWIRQSPSRGLEWLGWINTDTGEPTYADDFKGRFVFSLDTSVSTAYLQISSLKAEDTAVYYCARNPPYYYGTNNAEAMDYWGQGTTVTVSS

SEQ ID NO: 2384 - protein, 125 aa, Artificial Sequence
  source: /note="Description of Artificial Sequence: Synthetic heavy chain variable domain"
QVQLVQSGSELKKPGASVKVSCKASGFTLTNYGMNWVRQAPGQGLEWMGWINTDTGEPTYADDFKGRFVFSLDTSVSTAYLQISTLKAEDTATYFCARNPPYYYGTNNAEAMDYWGQGTTVTVSS

SEQ ID NO: 2385 - protein, 447 aa, Artificial Sequence
  source: /note="Description of Artificial Sequence: Synthetic heavy chain variable domain"
QVQLQQWGAGLLKPSETLSLTCAVYGGSFSDYYWNWIRQPPGKGLEWIGEINHRGSTNSNPSLKSRVTLSLDTSKNQFSLKLRSVTAADTAVYYCAFGYSDYEYNWFDPWGQGTLVTVSSASTKGPSVFPLAPCSRSTSESTAALGCLVKDYFPEPVTVSWNSGALTSGVHTFPAVLQSSGLYSLSSVVTVPSSSLGTKTYTCNVDHKPSNTKVDKRVESKYGPPCPPCPAPEFLGGPSVFLFPPKPKDTLMISRTPEVTCVVVDVSQEDPEVQFNWYVDGVEVHNAKTKPREEQFNSTYRVVSVLTVLHQDWLNGKEYKCKVSNKGLPSSIEKTISKAKGQPREPQVYTLPPSQEEMTKNQVSLTCLVKGFYPSDIAVEWESNGQPENNYKTTPPVLDSDGSFFLYSRLTVDKSRWQEGNVFSCSVMHEALHNHYTQKSLSLSLGK

SEQ ID NO: 2386 - protein, 107 aa, Artificial Sequence
  source: /note="Description of Artificial Sequence: Synthetic heavy chain variable domain"
EVKLEESGGDLVKPGGSLKLSCAASGFTFSGYGMSWVRQTPDKRLEWVATISSGGSYTYYPDSVKGRFTISRDNAKNTLYLQMSSLKSEDTAMYYCARHEGGYYGSS

SEQ ID NO: 2387 - protein, 161 aa, Artificial Sequence
  source: /note="Description of Artificial Sequence: Synthetic heavy chain variable domain"
LPEFEVKLEESGGDLVKPGGSLKLSCAASGFTFSGYGMSWVRQTPDKRLEWVATISSGGSYTYYPDSVKGRFTISRDNAKNTLYLQMSSLKSEDTAMYYCARHEGGYYGSSPAWFVYWGQGTLVTLSAAKTTAPSVYPLAPVCGDTTGSSVTLGCLVKRSS

SEQ ID NO: 2388 - protein, 119 aa, Artificial Sequence
  source: /note="Description of Artificial Sequence: Synthetic heavy chain variable domain"
QVQLVQSGAEVKKPGASVKVSCKASGYTFTSNFMHWVRQAPGQGLEWIGWIYPGDGDTEYNQKFNGKVTMTRDTSTSTVYMELSSLRSEDTAVYYCARGNSGYNWFAYWGQGTTVTVSS

SEQ ID NO: 2389 - protein, 119 aa, Artificial Sequence
  source: /note="Description of Artificial Sequence: Synthetic heavy chain variable domain"
EVQLVQSGAEVKKPGESLKISCKGSGYTFTSNFMHWVRQMPGKGLEWIGWIYPGDGDTEYNQKFNGKVTISADKSISTAYLQWSSLKASDTAMYYCARGNSGYNWFAYWGQGTTVTVSS

SEQ ID NO: 2390 - protein, 119 aa, Artificial Sequence
  source: /note="Description of Artificial Sequence: Synthetic heavy chain variable domain"
QVQLQQSGAELVKPGSSVKISCKASGYTFTSYFIHWIKQQPGNGLEWIGWIYPGDGDTEYNQKFNGKATFIADKSSSTADMQLNSLTSEDSAVYFCARSKSAYNWFAYWGQGTLVTVSS

SEQ ID NO: 2391 - protein, 119 aa, Artificial Sequence
  source: /note="Description of Artificial Sequence: Synthetic heavy chain variable domain"
QVQLQQSGAELVKPGSSVKISCKASGYTFTSNFMHWIKQQPGNGPEWIGWIYPGDGDTEYNQKFNGKATLIADKSSTTAYMQLRSLTSEDSAVYFCARGNSGYNWFAYWGQGTLVTVSS

SEQ ID NO: 2392 - protein, 118 aa, Artificial Sequence
  source: /note="Description of Artificial Sequence: Synthetic heavy chain variable domain"
EVQLVQSGAEVKKPGASVKVSCKASGYTFSAYWIEWVRQAPGQGLEWIGEILPGSDSTDYNEKFKVRVTITSDTSTSTVYLELSSLRSEDTAVYYCARGGHYGSLDYWGQGTLVTVSS

SEQ ID NO: 2393 - protein, 118 aa, Artificial Sequence
  source: /note="Description of Artificial Sequence: Synthetic heavy chain variable domain"
EVQLVQSGAEVKKPGASVKVSCKASGYTFSAYWIEWVRQAPGQGLEWIGEILPGSDSTDYNEKFKVRATFTSDTSTSTVYLELSSLRSEDTAVYYCARGGHYGSLDYWGQGTLVTVSS

SEQ ID NO: 2394 - protein, 118 aa, Artificial Sequence
  source: /note="Description of Artificial Sequence: Synthetic heavy chain variable domain"
EVQLVQSGAEVKKPGASVKVSCKASGYTFSAYWIEWVRQAPGQGLEWIGEILPGSDSTDYNEKFKVRVTITADTSTSTAYLELSSLRSEDTAVYYCARGGHYGSLDYWGQGTLVTVSS

SEQ ID NO: 2395 - protein, 118 aa, Artificial Sequence
  source: /note="Description of Artificial Sequence: Synthetic heavy chain variable domain"
EVQLVQSGAEVKKPGASVKVSCKASGYTFSAYWIEWVRQAPGQGLEWIGEILPGSDSTDYNEKFKVRVTITRDTSTSTAYLELSSLRSEDTAVYYCARGGHYGSLDYWGQGTLVTVSS

SEQ ID NO: 2396 - protein, 118 aa, Artificial Sequence; identical to SEQ ID NO: 2394
  source: /note="Description of Artificial Sequence: Synthetic heavy chain variable domain"

SEQ ID NO: 2397 - protein, 115 aa, Artificial Sequence
  source: /note="Description of Artificial Sequence: Synthetic heavy chain variable domain"
QVQLQQPGAEMVKPGASVKLSCKASVDTFNSYWMHWVKQRPGQGLEWIGEINPSNGRTNYIEKFKNRATVTVDKSSSTAFMQLSSLTSEDSAVYYCATGWYFDVWGAGTTVTVSS

SEQ ID NO: 2398 - protein, 121 aa, Artificial Sequence
  source: /note="Description of Artificial Sequence: Synthetic heavy chain variable domain"
EVQLQQSGPELVKPGTSMKISCKASGYSFTGYTMNWVKQSHKNGLEWIGLINCYNGGTNYNQKFKGKATLTVDKSSSTAFMELLSLTSEDSAVYYCARGGSTMITPRFAYWGQGTLVTVSS

SEQ ID NO: 2399 - protein, 116 aa, Artificial Sequence
  source: /note="Description of Artificial Sequence: Synthetic heavy chain variable domain"
EVQLVESGGGLVQPGGSLRLSCAASGFTFTSYSISWVRQAPGKGLEWVAEIYPPGGYTDYADSVKGRFTISADTSKNTAYLQMNSLRAEDTAVYYCAKARLFFDYWGQGTLVTVSS

SEQ ID NO: 2400 - protein, 118 aa, Artificial Sequence
  source: /note="Description of Artificial Sequence: Synthetic heavy chain variable domain"
QVQLQQSGTELMKPGASVKISCKATGYTFSAYWIEWIKQRPGHGLEWIGEILPGSDSTDYNEKFKVKATFSSDTSSNTVYIQLNSLTYEDSAVYYCARGGHYGSLDYWGQGTTLKVSS

SEQ ID NO: 2401 - protein, 113 aa, Artificial Sequence
  source: /note="Description of Artificial Sequence: Synthetic heavy chain variable domain"
EVQLQESGPDLVKPSQSLSLTCTVTGYSITSGYGWHWIRQFPGNKLEWMGYIHYSGSTTYNPSLKSRISISRDTSKNQFFLQLNSVTTEDTATYYCARSLRYWGQGTTLTVSS

SEQ ID NO: 2402 - protein, 115 aa, Artificial Sequence
  source: /note="Description of Artificial Sequence: Synthetic heavy chain variable domain"
QVQLKESGPGLVAPSQSLSRRCTVSGFSLTTYGVSWVRQPPGKGLEWLGVIWGDGSTYYHSALISRLSISKDNSKSQVFLKLNSLQTDDTATYYCAEGSSLFAYWGQGTLVTVSA

SEQ ID NO: 2403 - protein, 103 aa, Artificial Sequence
  source: /note="Description of Artificial Sequence: Synthetic heavy chain variable domain"
EVQLEQSGGGLVQPGGSRKLSCAASGFTFSSFGMHWVRQAPEKGLEWVAYISSGSSTLHYADTVKGRFTISRDNPKNTLFLQMKLPSLCYGLLGSRNLSHRLL

SEQ ID NO: 2404 - protein, 121 aa, Artificial Sequence
  source: /note="Description of Artificial Sequence: Synthetic heavy chain variable domain"
QVKLQQSGPELVKPGASVKISCKASGYSFTGYYMHWVKQSHGNILDWIGYIYPYNGVSSYNQKFKGKATLTVDKSSSTAYMELRSLTSEDSAVYYCARERGLYQLRAMDYWGQGTSVTVSS

SEQ ID NO: 2405 - protein, 106 aa, Artificial Sequence
  source: /note="Description of Artificial Sequence: Synthetic heavy chain variable domain"
DIVMTQTPAIMSASPGQKVTITCSASSSVNYMHWYQQKLGSSPKLWIYDTSKLAPGVPARFSGSGSGTSYSLTISSMEAEDAASYFCHQWSSYPYTFGSGTKLEIK

SEQ ID NO: 2406 - protein, 113 aa, Artificial Sequence
  source: /note="Description of Artificial Sequence: Synthetic heavy chain variable domain"
  MOD_RES (89)..(89): Any amino acid
DIVMTQSPSSLTVTAGEKVTMSCKSSQSLLNSGNQKNYLTWYQQKPGQPPKLLIYWASTRQSGVPDRFTGSGSGTDFTLTISSVQAEDXAVYYCQNDYSYPLTFGSGTKLEIK

SEQ ID NO: 2407 - protein, 107 aa, Artificial Sequence
  source: /note="Description of Artificial Sequence: Synthetic heavy chain variable domain"
DIVLTQTPSSLSASLGDTITITCHASQNINVWLFWYQQKPGNIPKLLIYKASNLLTGVPSRFSGSGSGTGFTLTISSLQPEDIATYYCQQGQSFPWTFGGGTKLEIK

SEQ ID NO: 2408 - protein, 107 aa, Artificial Sequence
  source: /note="Description of Artificial Sequence: Synthetic heavy chain variable domain"
DIVLTQTPATLSVTPGDSVSLSCRASQSISNNLHWYQQKSHESPRLLIKNASQSISGIPSKFSGSGSGTDFTLRINSVETEDFGMYFCQQSNSWPYTFGSGTKLEIK

SEQ ID NO: 2409 - protein, 119 aa, Artificial Sequence
  source: /note="Description of Artificial Sequence: Synthetic heavy chain variable domain"
EVQLVESGGGLVQPKGSLKLSCAASGFTFNTNAMNWVRQAPGKGLEWVARIRSKSNNYATYYADSVKDRFTLSRDDSQSMLYLQMNNLKTEDTAMYYCVRDRGWGAMDYWGQGTTVTVS

SEQ ID NO: 2410 - protein, 119 aa, Artificial Sequence
  source: /note="Description of Artificial Sequence: Synthetic heavy chain variable domain"
GVQLVETGGGLVQPKGSLKLSCAASGFTFNTNAMNWVRQAPGKGLEWVARIRSKSNNYATYYADSVKDRFTLSRDDSQSMLYLQMNNLKTEDTAMYYCVRDRGWGAMDYWGQGTTVTVS

SEQ ID NO: 2411 - protein, 120 aa, Artificial Sequence
  source: /note="Description of Artificial Sequence: Synthetic heavy chain variable domain"
EVQLVESGGGLVKPGGSLRLSCAASGFTFNTNAMNWVRQAPGKGLEWVARIRSKSNNYATYYADSVKDRFTLSRDDSKNTLYLQMNSLKTEDTAVYYCTRDRGWGAMDYWGQGTTVTVSS

SEQ ID NO: 2412 - protein, 120 aa, Artificial Sequence
  source: /note="Description of Artificial Sequence: Synthetic heavy chain variable domain"
EVQLVESGGGLVKPGGSLRLSCAASGFTFNTNAMNWVRQAPGKGLEWVARIRSKSNNYATYYADSVKDRFTISRDDSKNTLYLQMNSLKTEDTAVYYCTRDRGWGAMDYWGQGTTVTVSS

SEQ ID NO: 2413 - protein, 119 aa, Artificial Sequence
  source: /note="Description of Artificial Sequence: Synthetic heavy chain variable domain"
EVQLVETGGGLVQPKGSLKLSCAASGFTFNTNAMNWVRQAPGKGLEWVARIRSKSNNYATYYADSVKDRFTLSRDDSQSMLYLQMNNLKTEDTAMYYCVRDRGWGAMDYWGQGTTVTVS

SEQ ID NO: 2414 - protein, 116 aa, Artificial Sequence
  source: /note="Description of Artificial Sequence: Synthetic heavy chain variable domain"
QVQLVQSGAEVKKPGSSVKVSCKASGYTFTTYYLHWVRQAPGQGLEWIGWIYPGNVHAQYNEKFKGRATLTADKSTSTAYMELSSLRSEDTAVYFCARSWEGFPYWGQGTTVTVSS

SEQ ID NO: 2415 - protein, 116 aa, Artificial Sequence
  source: /note="Description of Artificial Sequence: Synthetic heavy chain variable domain"
QVQLVQSGAEVKKPGSSVKVSCKASGYTFTTYYLHWVRQAPGQGLEWIGWIYPGNVHAQYNEKFKGRATITADKSTSTAYMELSSLRSEDTAVYYCARSWEGFPYWGQGTTVTVSS

SEQ ID NO: 2416 - protein, 116 aa, Artificial Sequence
  source: /note="Description of Artificial Sequence: Synthetic heavy chain variable domain"
QVQLVQSGAEVKKPGSSVKVSCKASGYTFTTYYLHWVRQAPGQGLEWMGWIYPGNVHAQYNEKFKGRVTITADKSTSTAYMELSSLRSEDTAVYYCARSWEGFPYWGQGTTVTVSS

SEQ ID NO: 2417 - protein, 445 aa, Artificial Sequence
  source: /note="Description of Artificial Sequence: Synthetic heavy chain variable domain"
QVQLVQSGAEVKKPGSSVKVSCKASGYTFTTYYLHWVRQAPGQGLEWMGWIYPGNVHAQYNEKFKGRVTITADKSTSTAYMELSSLRSEDTAVYYCARSWEGFPYWGQGTTVTVSSASTKGPSVFPLAPSSKSTSGGTAALGCLVKDYFPEPVTVSWNSGALTSGVHTFPAVLQSSGLYSLSSVVTVPSSSLGTQTYICNVNHKPSNTKVDKKVEPKSCDKTHTCPPCPAPELLGGPSVFLFPPKPKDTLMISRTPEVTCVVVDVSHEDPEVKFNWYVDGVEVHNAKTKPREEQYNSTYRVVSVLTVLHQDWLNGKEYKCKVSNKALPAPIEKTISKAKGQPREPQVYTLPPSRDELTKNQVSLTCLVKGFYPSDIAVEWESNGQPENNYKTTPPVLDSDGSFFLYSKLTVDKSRWQQGNVFSCSVMHEALHNHYTQKSLSLSPG

SEQ ID NO: 2418 - protein, 112 aa, Artificial Sequence
  source: /note="Description of Artificial Sequence: Synthetic heavy chain variable domain"
VQLQQSGPELVKPGASVRISCKASGYTFTTYYLHVKQRPGQGLEIGWIYPGVHAQYNEKFKGKATLTADKSSSTAYMQLSSLTSEDSAIYFCARSWEGFPYWGQGTTVTVSS

SEQ ID NO: 2419 - protein, 135 aa, Artificial Sequence
  source: /note="Description of Artificial Sequence: Synthetic heavy chain variable domain"
MEWSRVFIFLLSVTAGVHSQVQLQQSGAELVRPGTSVKVSCKASGYAFTYYLIEWVKQRPGQGLEWIGVINPGSGGTNYNEKFKGKATLTADKSSSTAYMQLSSLTSDDSAVYFCARNWMNFDYWGQGTTLTVSS

SEQ ID NO: 2420 - protein, 462 aa, Artificial Sequence
  source: /note="Description of Artificial Sequence: Synthetic heavy chain variable domain"
MGWSLILLFLVAVATRVHSQVQLVQSGAEVKKPGASVKVSCKASGYAFTYYLIEWVRQAPGQGLEWIGVINPGSGGTNYNEKFKGRATITADKSTSTAYMELSSLRSEDTAVYFCARNWMNFDYWGQGTTVTVSSASTKGPSVFPLAPCSRSTSESTAALGCLVKDYFPEPVTVSWNSGALTSGVHTFPAVLQSSGLYSLSSVVTVPSSSLGTKTYTCNVDHKPSNTKVDKRVESKYGPPCPPCPAPEFLGGPSVFLFPPKPKDTLMISRTPEVTCVVVDVSQEDPEVQFNWYVDGVEVHNAKTKPREEQFNSTYRVVSVLTVLHQDWLNGKEYKCKVSNKGLPSSIEKTISKAKGQPREPQVYTLPPSQEEMTKNQVSLTCLVKGFYPSDIAVEWESNGQPENNYKTTPPVLDSDGSFFLYSRLTVDKSRWQEGNVFSCSVMHEALHNHYTQKSLSLSLGK

SEQ ID NO: 2421 - protein, 121 aa, Artificial Sequence
  source: /note="Description of Artificial Sequence: Synthetic heavy chain variable domain"
QVQLKESGPGLVAPSQSLSITCTVSGFSLSRYSVHWVRQPPGKGLEWLGMIWGGGSTDYNSALKSRLSISKDNSKSQVFLKMNSLQTDDTAMYYCARNEGDTTAGTWFAYWGQGTLVTVSA

SEQ ID NO: 2422 - protein, 118 aa, Artificial Sequence
  source: /note="Description of Artificial Sequence: Synthetic heavy chain variable domain"
QVTLKESGPVLVKPTETLTLTCTVSGFSLTSNGVSWVRQPPGKALEWIAAISSGGTTYYNSAFKSRLTISRDTSKSQVVLTMTNMDPVDTATYYCARRYGYGWYFDFWGQGTLVTVSS

SEQ ID NO: 2423 - protein, 118 aa, Artificial Sequence
  source: /note="Description of Artificial Sequence: Synthetic heavy chain variable domain"
QVTLKESGPVLVKPTETLTLTCTVSGFSLTSNGVSWVRQPPGKALEWIAAISSGGTTYYNSAFKSRLSISRDTSKSQVVLTMTNMDPVDTATYYCARRYGYGWYFDFWGQGTLVTVSS

SEQ ID NO: 2424 - protein, 118 aa, Artificial Sequence
  source: /note="Description of Artificial Sequence: Synthetic heavy chain variable domain"
QVTLKESGPVLVKPTETLTLTCTVSGFSLTSSGVSWVRQPPGKALEWIAAISSGGTTYYNSAFKSRLTISRDTSKSQVVLTMTNMDPVDTATYYCARRYGYGWYFDFWGQGTLVTVSS

SEQ ID NO: 2425 - protein, 118 aa, Artificial Sequence
  source: /note="Description of Artificial Sequence: Synthetic heavy chain variable domain"
QVTLKESGPVLVKPTETLTLTCTVSGFSLTSQGVSWVRQPPGKALEWIAAISSGGTTYYNSAFKSRLTISRDTSKSQVVLTMTNMDPVDTATYYCARRYGYGWYFDFWGQGTLVTVSS

SEQ ID NO: 2426 - protein, 118 aa, Artificial Sequence
  source: /note="Description of Artificial Sequence: Synthetic heavy chain variable domain"
QVTLKESGPVLVKPTETLTLTCTVSGFSLTSNAVSWVRQPPGKALEWIAAISSGGTTYYNSAFKSRLTISRDTSKSQVVLTMTNMDPVDTATYYCARRYGYGWYFDFWGQGTLVTVSS

SEQ ID NO: 2427 - protein, 118 aa, Artificial Sequence
  source: /note="Description of Artificial Sequence: Synthetic heavy chain variable domain"
EVTLKESGPVLVKPTETLTLTCTVSGFSLTSNGVSWVRQPPGKALEWIAAISSGGTTYYNSAFKSRLTISRDTSKSQVVLTMTNMDPVDTATYYCARRYGYGWYFDFWGQGTLVTVSS

SEQ ID NO: 2428 - protein, 118 aa, Artificial Sequence
  source: /note="Description of Artificial Sequence: Synthetic heavy chain variable domain"
EVTLKESGPVLVKPTETLTLTCTVSGFSLTSNGVSWVRQPPGKALEWIAAISSGGTTYYNSAFKSRLSISRDTSKSQVVLTMTNMDPVDTATYYCARRYGYGWYFDFWGQGTLVTVSS

SEQ ID NO: 2429 - protein, 118 aa, Artificial Sequence
  source: /note="Description of Artificial Sequence: Synthetic heavy chain variable domain"
EVTLKESGPVLVKPTETLTLTCTVSGFSLTSSGVSWVRQPPGKALEWIAAISSGGTTYYNSAFKSRLTISRDTSKSQVVLTMTNMDPVDTATYYCARRYGYGWYFDFWGQGTLVTVSS

SEQ ID NO: 2430 - protein, 118 aa, Artificial Sequence
  source: /note="Description of Artificial Sequence: Synthetic heavy chain variable domain"
EVTLKESGPVLVKPTETLTLTCTVSGFSLTSQGVSWVRQPPGKALEWIAAISSGGTTYYNSAFKSRLTISRDTSKSQVVLTMTNMDPVDTATYYCARRYGYGWYFDFWGQGTLVTVSS

SEQ ID NO: 2431 - protein, 118 aa, Artificial Sequence
  source: /note="Description of Artificial Sequence: Synthetic heavy chain variable domain"
EVTLKESGPVLVKPTETLTLTCTVSGFSLTSNAVSWVRQPPGKALEWIAAISSGGTTYYNSAFKSRLTISRDTSKSQVVLTMTNMDPVDTATYYCARRYGYGWYFDFWGQGTLVTVSS

SEQ ID NO: 2432 - protein, 116 aa, Artificial Sequence
  source: /note="Description of Artificial Sequence: Synthetic heavy chain variable domain"
QVTLKESGPVLVKPTETLTLTCTVSGFSLTSSGVSWVRQPPGKALEWIAAISSGGSTYYNSAFKSRLTISRDTSKSQVVLTMTNMDPVDTATYYCARHRPFYFDYWGQGTLVTVSS

SEQ ID NO: 2433 - protein, 116 aa, Artificial Sequence
  source: /note="Description of Artificial Sequence: Synthetic heavy chain variable domain"
QVTLKESGPVLVKPTETLTLTCTVSGFSLTSQGVSWVRQPPGKALEWIAAISSGGSTYYNSAFKSRLTISRDTSKSQVVLTMTNMDPVDTATYYCARHRPFYFDYWGQGTLVTVSS

SEQ ID NO: 2434 - protein, 121 aa, Artificial Sequence
  source: /note="Description of Artificial Sequence: Synthetic heavy chain variable domain"
QIQLVQSGPELKKPGETVKISCKASGYTFTNYGMNWVKQAPGKGLKWMGWINTYTGEPTYADDFKGRFALSLETSASTAYLQINNLKNEDMATYFCARYRYNKYERAMDYWGQGTSVTVSS

SEQ ID NO: 2435 - protein, 117 aa, Artificial Sequence
  source: /note="Description of Artificial Sequence: Synthetic heavy chain variable domain"
EIQLQQTGPELVKPGASVKISCKASGYSFTDYIMLWVKQSHGKSLEWIGNINPYSGSSGYNLKFKGKATLTVDKSSSTAYMQLNSLTSEDSAVYYCARGKDFAMDYWGQGTSVTVSS

SEQ ID NO: 2436 - protein, 122 aa, Artificial Sequence
  source: /note="Description of Artificial Sequence: Synthetic heavy chain variable domain"
QVQLQQPGAELVQPGAPVKLSCKASGYIFTSYWMNWVKQRPGRGLEWIGRIDPSDSKIHYNQKFKDKATLTVDRSSSTAYIQLGSLTSEDSAVYYCAKEGGLRRGDYAMDYWGQGTSVTVSS

SEQ ID NO: 2437 - protein, 120 aa, Artificial Sequence
  source: /note="Description of Artificial Sequence: Synthetic heavy chain variable domain"
DVKLVESGGDLVKPGGSLKLSCAASGFTFSSYIMSWVRQTPEKRLEWVATISSGGSSTYYPDSVKGRFTISRDNAKNTLYLQMSSLKSEDTAMYYCTRDDDYDVKVFAYWGQGTLVTVSA

SEQ ID NO: 2438 - protein, 118 aa, Artificial Sequence
  source: /note="Description of Artificial Sequence: Synthetic heavy chain variable domain"
QVQLKESGPGLVQPSQTLSLTCTVSGFSLTSNGVSWVRQPPGKGLEWIAAISSGGTTYYNSAFKSRLSISRNTSKSQVLLKMNSLQTEDTAMYFCARRYGYGWYFDFWGPGTMVTVSS

SEQ ID NO: 2439 - protein, 116 aa, Artificial Sequence
  source: /note="Description of Artificial Sequence: Synthetic heavy chain variable domain"
QVQLKESGPGLVQSSQTLSLTCTVSGFSLTSNGVSWVRQPPGKGLEWIAAISSGGSTYYNSAFKSRLSISRNTSKSQVLLKMNSLQTEDTGMYFCARHRPFYFDYWGQGVMVTVSS

SEQ ID NO: 2440 - protein, 464 aa, Artificial Sequence
  source: /note="Description of Artificial Sequence: Synthetic heavy chain variable domain"
MEFGLSWVFLVAIIKGVQCQVQLVESGGGLVKPGGSLRLSCAASGFTFSDYYMSWIRQAPGKGLEWVSYISSSGSTIYYADSVKGRFTISRDNAKNSLYLQMNSLRAEDTAVYYCARGLTGDYWGQGTLVTVSSASTKGPSVFPLAPSSKSTSGGTAALGCLVKDYFPEPVTVSWNSGALTSGVHTFPAVLQSSGLYSLSSVVTVPSSSLGTQTYICNVNHKPSNTKVDKKVEPKSCDKTHTCPPCPAPELLGGPSVFLFPPKPKDTLMISRTPEVTCVVVDVSHEDPEVKFNWYVDGVEVHNAKTKPREEQYNSTYRVVSVLTVLHQDWLNGKEYKCKVSNKALPAPIEKTISKAKGQPREPQVYTLPPSRDELTKNQVSLTCLVKGFYPSDIAVEWESNGQPENNYKTTPPVLDSDGSFFLYSKLTVDKSRWQQGNVFSCSVMHEALHNHYTQKSLSLSPGK

SEQ ID NO: 2441 - protein, 466 aa, Artificial Sequence
  source: /note="Description of Artificial Sequence: Synthetic heavy chain variable domain"
MEFGLRWIFVQCEVQLLEPGGSLRLSCLVAILKGSGGGLVQAASGFTFSSYAMSWVRQAPGKGLEWVSAISGRGGRTYFADSVKGRFTISRDNSKNTLYLQMNSLRAEDTAVYFCAVEGYSGRYGFFDYWGQGTLVTVSSASTKGPSVFPLAPCSRSTSESTAALGCLVKDYFPEPVTVSWNSGALTSGVHTFPAVLQSSGLYSLSSVVTVPSSNFGTQTYTCNVDHKPSNTKVDKTVERKCCVECPPCPAPPVAGPSVFLFPPKPKDTLMISRTPEVTCVVVDVSHEDPEVQFNWYVDGVEVHNAKTKPREEQFNSTFRVVSVLTVVHQDWLNGKEYKCKVSNKGLPAPIEKTISKTKGQPREPQVYTLPPSREEMTKNQVSLTCLVKGFYPSDIAVEWESNGQPENNYKTTPPMLDSDGSFFLYSKLTVDKSRWQQGNVFSCSVMHEALHNHYTQKSLSLSPGK

SEQ ID NO: 2442 - protein, 460 aa, Artificial Sequence
  source: /note="Description of Artificial Sequence: Synthetic heavy chain variable domain"
MEFGLSWVFLVAIIKGVQCQVQLVESGGGLVKPGGSLRLSCAASGFTFSDYYMSWIRQAPGKGLEWFSYISSSGSTIYYADSVKGRFTISRDNAKNSLSLQMNSLRAEDTAVYYCARGLTGDYWGQGTLVTVSSASTKGPSVFPLAPCSRSTSESTAALGCLVKDYFPEPVTVSWNSGALTSGVHTFPAVLQSSGLYSLSSVVTVPSSNFGTQTYTCNVDHKPSNTKVDKTVERKCCVECPPCPAPPVAGPSVFLFPPKPKDTLMISRTPEVTCVVVDVSHEDPEVQFNWYVDGVEVHNAKTKPREEQFNSTFRVVSVLTVVHQDWLNGKEYKCKVSNKGLPAPIEKTISKTKGQPREPQVYTLPPSREEMTKNQVSLTCLVKGFYPSDIAVEWESNGQPENNYKTTPPMLDSDGSFFLYSKLTVDKSRWQQGNVFSCSVMHEALHNHYTQKSLSLSPGK

SEQ ID NO: 2443 - protein, 462 aa, Artificial Sequence
  source: /note="Description of Artificial Sequence: Synthetic heavy chain variable domain"
MEFGLSWVFLVALLRGCQCQVQLVESGGGVVQPGRSLRLSCAASGFTFSSYGMHWVRQAPGKGLEWVAFIWYDGSNKYYADSVKGRFTISRDNSKNTLYLQMNSLRAEDTAVYYCARGYRVYFDYWGQGTLVTVSSASTKGPSVFPLAPCSRSTSESTAALGCLVKDYFPEPVTVSWNSGALTSGVHTFPAVLQSSGLYSLSSVVTVPSSSLGTKTYTCNVDHKPSNTKVDKRVESKYGPPCPSCPAPEFLGGPSVFLFPPKPKDTLMISRTPEVTCVVVDVSQEDPEVQFNWYVDGVEVHNAKTKPREEQFNSTYRVVSVLTVLHQDWLNGKEYKCKVSNKGLPSSIEKTISKAKGQPREPQVYTLPPSQEEMTKNQVSLTCLVKGFYPSDIAVEWESNGQPENNYKTTPPVLDSDGSFFLYSRLTVDKSRWQEGNVFSCSVMHEALHNHYTQSLSLSPGK

SEQ ID NO: 2444 - protein, 461 aa, Artificial Sequence
  source: /note="Description of Artificial Sequence: Synthetic heavy chain variable domain"
MELGLCWIFLVAIIKGVQCQVQLVESGGGLVKPGGSLRLSCAASGFTFSDYYMSWIRQAPGKGLEWISYISGSGSTIYYADSVKGRFTISRDNAKNSLYLQMNSLRAEDTAVYHCARALGGMDVWGQGTTVTVSSASTKGPSVFPLAPCSRSTSESTAALGCLVKDYFPEPVTVSWNSGALTSGVHTFPAVLQSSGLYSLSSVVTVPSSNFGTQTYTCNVDHKPSNTKVDKTVERKCCVECPPCPAPPVAGPSVFLFPPKPKDTLMISRTPEVTCVVVDVSHEDPEVQFNWYVDGVEVHNAKTKPREEQFNSTFRVVSVLTVVHQDWLNGKEYKCKVSNKGLPAPIEKTISKTKGQPREPQVYTLPPSREEMTKNQVSLTCLVKGFYPSDIAVEWESNGQPENNYKTTPPMLDSDGSFFLYSKLTVDKSRWQQGNVFSCSVMHEALHNHYTQKSLSLSPGK

SEQ ID NO: 2445 - protein, 464 aa, Artificial Sequence
  source: /note="Description of Artificial Sequence: Synthetic heavy chain variable domain"
MEWTWSFLFLVAAATGAHSQVQLVQSGAEVKKPGASVKVSCKASGYTFTSYGISWVRQAPGQGLEWMGWISAYNGNTNYAQKLQDRVTMTTDTSTTTAYMELRSLRSDDTAVYYCARRAYGANFFDYWGQGTLVTVSSASTKGPSVFPLAPCSRSTSESTAALGCLVKDYFPEPVTVSWNSGALTSGVHTFPAVLQSSGLYSLSSVVTVPSSNFGTQTYTCNVDHKPSNTKVDKTVERKCCVECPPCPAPPVAGPSVFLFPPKPKDTLMISRTPEVTCVVVDVSHEDPEVQFNWYVDGVEVHNAKTKPREEQFNSTFRVVSVLTVVHQDWLNGKEYKCKVSNKGLPAPIEKTISKTKGQPREPQVYTLPPSREEMTKNQVSLTCLVKGFYPSDIAVEWESNGQPENNYKTTPPMLDSDGSFFLYSKLTVDKSRWQQGNVFSCSVMHEALHNHYTQKSLSLSPGK

SEQ ID NO: 2446 - protein, 460 aa, Artificial Sequence
  source: /note="Description of Artificial Sequence: Synthetic heavy chain variable domain"
MEFGLSWVFLVAIIKGVQCQVQLVESGGGLVKPGGSLRLSCAASGFTFSDYYMSWIRQAPGKGLEWVSYISSSGSTIYYADSVKGRFTISRDNAKNSLYLQMNSLRAEDTAVYYCARGLTGDYWGQGTLVTVSSASTKGPSVFPLAPCSRSTSESTAALGCLVKDYFPEPVTVSWNSGALTSGVHTFPAVLQSSGLYSLSSVVTVPSSNFGTQTYTCNVDHKPSNTKVDKTVERKCCVECPPCPAPPVAGPSVFLFPPKPKDTLMISRTPEVTCVVVDVSHEDPEVQFNWYVDGVEVHNAKTKPREEQFNSTFRVVSVLTVVHQDWLNGKEYKCKVSNKGLPAPIEKTISKTKGQPREPQVYTLPPSREEMTKNQVSLTCLVKGFYPSDIAVEWESNGQPENNYKTTPPMLDSDGSFFLYSKLTVDKSRWQQGNVFSCSVMHEALHNHYTQKSLSLSPGK

SEQ ID NO: 2447 - protein, 466 aa, Artificial Sequence
  source: /note="Description of Artificial Sequence: Synthetic heavy chain variable domain"
MELGLCWVFLVAILEGVQCEVQLVESGGGLVQPGGSLRLSCAASGFTFSSFSMTWVRQAPGKGLEWVSYISSRSSTISYADSVKGRFTISRDNAKNSLYLQMNSLRDEDTAVYYCARDPLLAGATFFDYWGQGTLVTVSSASTKGPSVFPLAPCSRSTSESTAALGCLVKDYFPEPVTVSWNSGALTSGVHTFPAVLQSSGLYSLSSVVTVPSSNFGTQTYTCNVDHKPSNTKVDKTVERKCCVECPPCPAPPVAGPSVFLFPPKPKDTLMISRTPEVTCVVVDVSHEDPEVQFNWYVDGVEVHNAKTKPREEQFNSTFRVVSVLTVVHQDWLNGKEYKCKVSNKGLPAPIEKTISKTKGQPREPQVYTLPPSREEMTKNQVSLTCLVKGFYPSDIAVEWESNGQPENNYKTTPPMLDSDGSFFLYSKLTVDKSRWQQGNVFSCSVMHEALHNHYTQKSLSLSPGK

SEQ ID NO: 2448 - protein, 461 aa, Artificial Sequence
  source: /note="Description of Artificial Sequence: Synthetic heavy chain variable domain"
MEFGLSWVFLVAIIKGVQCQVQLVESGGGLVKPGGSLRLSCAASGFTFSDYYMSWIRQAPGKGLEWVSYISSSGSTIYYADSVKGRFTISRDNAKNSLYLQMNSLRAEDTAVYYCARRIGGMDVWGQGTTVTVSSASTKGPSVFPLAPCSRSTSESTAALGCLVKDYFPEPVTVSWNSGALTSGVHTFPAVLQSSGLYSLSSVVTVPSSNFGTQTYTCNVDHKPSNTKVDKTVERKCCVECPPCPAPPVAGPSVFLFPPKPKDTLMISRTPEVTCVVVDVSHEDPEVQFNWYVDGVEVHNAKTKPREEQFNSTFRVVSVLTVVHQDWLNGKEYKCKVSNKGLPAPIEKTISKTKGQPREPQVYTLPPSREEMTKNQVSLTCLVKGFYPSDIAVEWESNGQPENNYKTTPPMLDSDGSFFLYSKLTVDKSRWQQGNVFSCSVMHEALHNHYTQKSLSLSPGK

SEQ ID NO: 2449 - protein, 458 aa, Artificial Sequence
  source: /note="Description of Artificial Sequence: Synthetic heavy chain variable domain"
MEFGLSWVFLVAIIKGVQCQVQLVESGGGLVKPGGSLRLSCAASGFTFSDYYMSWIRQAPGKGLEWVSYISSSGSTIYYADSVKGRFTISRDNAKNSLYLQMNSLRAEDTAVYYCARGLTGDYWGQGTLVTVSSASTKGPSVFPLAPCSRSTSESTAALGCLVKDYFPEPVTVSWNSGALTSGVHTFPAVLQSSGLYSLSSVVTVPSSSLGTKTYTCNVDHKPSNTKVDKRVESKYGPPCPSCPAPEFLGGPSVFLFPPKPKDTLMISRTPEVTCVVVDVSQEDPEVQFNWYVDGVEVHNAKTKPREEQFNSTYRVVSVLTVLHQDWLNGKEYKCKVSNKGLPSSIEKTISKAKGQPREPQVYTLPPSQEEMTKNQVSLTCLVKGFYPSDIAVEWESNGQPENNYKTTPPVLDSDGSFFLYSRLTVDKSRWQEGNVFSCSVMHEALHNHYTQSLSPGK

SEQ ID NO: 2450 - protein, 462 aa, Artificial Sequence
  source: /note="Description of Artificial Sequence: Synthetic heavy chain variable domain"
MEFGLSWVFLVAIIKGVQCQVQLVESGGGLVKPGGSLRLSCAASGFTFSDYYMSWIRQAPGKGLEWVSYISSSGSTIYYADSVKGRFTISRDNAKNSLYLQMNSLRAEDTAVYYCARRIGGMDVWGQGTTVTVSSASTKGPSVFPLAPCSRSTSESTAALGCLVKDYFPEPVTVSWNSGALTSGVHTFPAVLQSSGLYSLSSVVTVPSSSLGTKTYTCNVDHKPSNTKVDKRVESKYGPPCPSCPAPEFLGGPSVFLFPPKPKDTLMISRTPEVTCVVVDVSQEDPEVQFNWYVDGVEVHNAKTKPREEQFNSTYRVVSVLTVLHQDWLNGKEYKCKVSNKGLPSSIEKTISKAKGQPREPQVYTLPPSQEEMTKNQVSLTCLVKGFYPSDIAVEWESNGQPENNYKTTPPVLDSDGSFFLYSRLTVDKSRWQEGNVFSCSVMHEALHNHYTQKSLSLSPGK

SEQ ID NO: 2451 - protein, 462 aa, Artificial Sequence
  source: /note="Description of Artificial Sequence: Synthetic heavy chain variable domain"
MEFGLSWVFLVAIIKGVQCQVQLVESGGGLVKPGGSLRLSCAASGFTFSDYYMSWIRQAPGKGLEWVSYISSSGSTIYYADSVKGRFTISRDNAKNSLYLQMNSLRAEDTAVYYCAIRIGGMDVWGQGTTVTVSSASTKGPSVFPLAPCSRSTSESTAALGCLVKDYFPEPVTVSWNSGALTSGVHTFPAVLQSSGLYSLSSVVTVPSSSLGTKTYTCNVDHKPSNTKVDKRVESKYGPPCPPCPAPEFLGGPSVFLFPPKPKDTLMISRTPEVTCVVVDVSQEDPEVQFNWYVDGVEVHNAKTKPREEQFNSTYRVVSVLTVLHQDWLNGKEYKCKVSNKGLPSSIEKTISKAKGQPREPQVYTLPPSQEEMTKNQVSLTCLVKGFYPSDIAVEWESNGQPENNYKTTPPVLDSDGSFFLYSRLTVDKSRWQEGNVFSCSVMHEALHNHYTQKSLSLSPGK

SEQ ID NO: 2452 - protein, 461 aa, Artificial Sequence
  source: /note="Description of Artificial Sequence: Synthetic heavy chain variable domain"
MEFGLSWVFLVAIIKGVQCQVQLVESGGGLVKPGGSLRLSCAASGFTFSDYYMSWIRQAPGKGLEWVSYISSSGSTIYYADSVKGRFTISRDNAKNSLYLQMNSLRAEDTAVYYCARGLTGDYWGQGTLVTVSSASTKGPSVFPLAPCSRSTSESTAALGCLVKDYFPEPVTVSWNSGALTSGVHTFPAVLQSSGLYSLSSVVTVPSSSLGTKTYTCNVDHKPSNTKVDKRVESKYGPPCPPCPAPEFLGGPSVFLFPPKPKDTLMISRTPEVTCVVVDVSQEDPEVQFNWYVDGVEVHNAKTKPREEQFNSTYRVVSVLTVLHQDWLNGKEYKCKVSNKGLPSSIEKTISKAKGQPREPQVYTLPPSQEEMTKNQVSLTCLVKGFYPSDIAVEWESNGQPENNYKTTPPVLDSDGSFFLYSRLTVDKSRWQEGNVFSCSVMHEALHNHYTQKSLSLSPGK

SEQ ID NO: 2453 - protein, 467 aa, Artificial Sequence
  source: /note="Description of Artificial Sequence: Synthetic heavy chain variable domain"
MELGLCWVFLVAILEGVQCEVQLVESGGGLVQPGGSLRLSCAASGFTFSSFSMTWVRQAPGKGLEWVSYISSRSSTISYADSVKGRFTISRDNAKNSLYLQMNSLRDEDTAVYYCARDPLLAGATFFDYWGQGTLVTVSSASTKGPSVFPLAPCSRSTSESTAALGCLVKDYFPEPVTVSWNSGALTSGVHTFPAVLQSSGLYSLSSVVTVPSSSLGTKTYTCNVDHKPSNTKVDKRVESKYGPPCPPCPAPEFLGGPSVFLFPPKPKDTLMISRTPEVTCVVVDVSQEDPEVQFNWYVDGVEVHNAKTKPREEQFNSTYRVVSVLTVLHQDWLNGKEYKCKVSNKGLPSSIEKTISKAKGQPREPQVYTLPPSQEEMTKNQVSLTCLVKGFYPSDIAVEWESNGQPENNYKTTPPVLDSDGSFFLYSRLTVDKSRWQEGNVFSCSVMHEALHNHYTQKSLSLSPGK

SEQ ID NO: 2454 - protein, 455 aa, Artificial Sequence
  source: /note="Description of Artificial Sequence: Synthetic heavy chain variable domain"
MEFGLCWVFLVAILEGVQCEVQLVESGGGLVQPGGSLRLSCAASGFTFSSYWMSWVRQAPGKGLEWVANIKQDGSEKYYVDSVKGRFTISRDNAKNSLYLQMNSLRAEDTAVAAGRAYWGQGTLVTVSSASTKGPSVFPLAPCSRSTSESTAALGCLVKDYFPEPVTVSWNSGALTSGVHTFPAVLQSSGLYSLSSVVTVPSSNFGTQTYTCNVDHKPSNTKVDKTVERKCCVECPPCPAPPVAGPSVFLFPPKPKDTLMISRTPEVTCVVVDVSHEDPEVQFNWYVDGVEVHNAKTKPREEQFNSTFRVVSVLTVVHQDWLNGKEYKCKVSNKGLPAPIEKTISKTKGQPREPQVYTLPPSREEMTKNQVSLTCLVKGFYPSDIAVEWESNGQPENNYKTTPPMLDSDGSFFLYSKLTVDKSRWQQGNVFSCSVMHEALHNHYTQKSLSLSPGK

SEQ ID NO: 2455 - protein, 445 aa, Artificial Sequence
  source: /note="Description of Artificial Sequence: Synthetic heavy chain variable domain"
MEFGLSWVFLVAIIKGVQCQVQLVESGGGLVKPGGSLRLSCAASGFTFSDYYMSWIRQAPGKGLEWVSYISSSGSTIYYADSVKGRFTISRDNAKNSLYLQMNSLRAEDTAVYYCAIRIGGMDVWGQGTTVTVSSASTKGPSVFPLAPCSRSTSESTAALGCLVKDYFPEPVTVSWNSGALTSGVHTFPAVLQSSGLYSLSSVVTVPSSNFGTQTYTCNVDHKPSNTKVDKTVERKCCVECPPCPAPPVAGPSVFLFPPKPKDTLMISRTPEVTCVVVDVSHEDPEVQFNWYVDGVEVHNAKTKPREEQFNSTFRVVSVLTVVHQDWLNGKEYKCKVSNKGLPAPIEKTISKTKGQPREPQVYTLPPSREEMTKNQVSLTCLVKGFYPSDIAVEWESNGQPENNYKTTPPMLDSDGQGNVFSCSVMHEALHNHYTQKSLSLSPGK

SEQ ID NO: 2456 - protein, 461 aa, Artificial Sequence
  source: /note="Description of Artificial Sequence: Synthetic heavy chain variable domain"
MEFGLSWVFLVAIIKGVQCQVQLVESGGGLVKPGGSLRLSCAASGFTFSDYYMSWIRQAPGKGLEWVSYISSSGSTIYYADSVKGRFTISRDNAKNSLYLQMNSLRAEDTAVYYCARIGGMDVWGQGTTVTVSSASTKGPSVFPLAPCSRSTSESTAALGCLVKDYFPEPVTVSWNSGALTSGVHTFPAVLQSSGLYSLSSVVTVPSSSLGTKTYTCNVDHKPSNTKVDKRVESKYGPPCPSCPAPEFLGGPSVFLFPPKPKDTLMISRTPEVTCVVVDVSQEDPEVQFNWYVDGVEVHNAKTKPREEQFNSTYRVVSVLTVLHQDWLNGKEYKCKVSNKGLPSSIEKTISKAKGQPREPQVYTLPPSQEEMTKNQVSLTCLVKGFYPSDIAVEWESNGQPENNYKTTPPVLDSDGSFFLYSRLTVDKSRWQEGNVFSCSVMHEALHNHYTQKSLSLSPGK

SEQ ID NO: 2457 - protein, 460 aa, Artificial Sequence; identical to SEQ ID NO: 2446
  source: /note="Description of Artificial Sequence: Synthetic heavy chain variable domain"

SEQ ID NO: 2458 - protein, 461 aa, Artificial Sequence
  source: /note="Description of Artificial Sequence: Synthetic heavy chain variable domain"
MEFGLSWVFLVAIIKGVQCQVQLVESGGGLVKPGGSLRLSCAASGFTFSDYYMSWIRQAPGKGLEWVSYISSSGSTIYYADSVKGRFTISRDNAKNSLYLQMNSLRAEDTAVYYCARGLTGDYWGQGTLVTVSSASTKGPSVFPLAPCSRSTSESTAALGCLVKDYFPEPVTVSWNSGALTSGVHTFPAVLQSSGLYSLSSVVTVPSSSLGTKTYTCNVDHKPSNTKVDKRVESKYGPPCPSCPAPEFLGGPSVFLFPPKPKDTLMISRTPEVTCVVVDVSQEDPEVQFNWYVDGVEVHNAKTKPREEQFNSTYRVVSVLTVLHQDWLNGKEYKCKVSNKGLPSSIEKTISKAKGQPREPQVYTLPPSQEEMTKNQVSLTCLVKGFYPSDIAVEWESNGQPENNYKTTPPVLDSDGSFFLYSRLTVDKSRWQEGNVFSCSVMHEALHNHYTQKSLSLSPGK

SEQ ID NO: 2459 - protein, 461 aa, Artificial Sequence; identical to SEQ ID NO: 2452
  source: /note="Description of Artificial Sequence: Synthetic heavy chain variable domain"

SEQ ID NO: 2460 - protein, 462 aa, Artificial Sequence
  source: /note="Description of Artificial Sequence: Synthetic heavy chain variable domain"
MEFGLSWVFLVAIIKGVQCQVQLVESGGGLVKPGGSLRLSCAASGFTFSDYYMSWIRQAPGKGLEWVSYISSSGSTIYYADSVKGRFTISRDNAKNSLYLQMNSLRAEDTAVYYCARRIGGMDVWGQGTTVTVSSASTKGPSVFPLAPCSRSTSESTAALGCLVKDYFPEPVTVSWNSGALTSGVHTFPAVLQSSGLYSLSSVVTVPSSSLGTKTYTCNVDHKPSNTKVDKRVESKYGPPCPPCPAPEFLGGPSVFLFPPKPKDTLMISRTPEVTCVVVDVSQEDPEVQFNWYVDGVEVHNAKTKPREEQFNSTYRVVSVLTVLHQDWLNGKEYKCKVSNKGLPSSIEKTISKAKGQPREPQVYTLPPSQEEMTKNQVSLTCLVKGFYPSDIAVEWESNGQPENNYKTTPPVLDSDGSFFLYSRLTVDKSRWQEGNVFSCSVMHEALHNHYTQKSLSLSPGK

SEQ ID NO: 2461 - protein, 467 aa, Artificial Sequence; identical to SEQ ID NO: 2453
  source: /note="Description of Artificial Sequence: Synthetic heavy chain variable domain"

SEQ ID NO: 2462 - protein, 467 aa, Artificial Sequence
  source: /note="Description of Artificial Sequence: Synthetic heavy chain variable domain"
MELGLCWVFLVAILEGVQCEVQLVESGGGLVQPGGSLRLSCAASGFTFSSFSMTWVRQAPGKGLEWVSYISSRSSTISYADSVKGRFTISRDNAKNSLYLQMNSLRDEDTAVYYCARDPLLAGATFFDYWGQGTLVTVSSASTKGPSVFPLAPCSRSTSESTAALGCLVKDYFPEPVTVSWNSGALTSGVHTFPAVLQSSGLYSLSSVVTVPSSSLGTKTYTCNVDHKPSNTKVDKRVESKYGPPCPSCPAPEFLGGPSVFLFPPKPKDTLMISRTPEVTCVVVDVSQEDPEVQFNWYVDGVEVHNAKTKPREEQFNSTYRVVSVLTVLHQDWLNGKEYKCKVSNKGLPSSIEKTISKAKGQPREPQVYTLPPSQEEMTKNQVSLTCLVKGFYPSDIAVEWESNGQPENNYKTTPPVLDSDGSFFLYSRLTVDKSRWQEGNVFSCSVMHEALHNHYTQKSLSLSPGK

SEQ ID NO: 2463 - protein, 470 aa, Artificial Sequence
  source: /note="Description of Artificial Sequence: Synthetic heavy chain variable domain"
MELGLCWVFLVAILEGVQCEVQLVESGGGLVQPGGSLRLSCAASGFTFSSFSMTWVRQAPGKGLEWVSYISSRSSTISYADSVKGRFTISRDNAKNSLYLQMNSLRDEDTAVYYCARDPLLAGATFFDYWGQGTLVTVSSASTKGPSVFPLAPSSKSTSGGTAALGCLVKDYFPEPVTVSWNSGALTSGVHTFPAVLQSSGLYSLSSVVTVPSSSLGTQTYICNVNHKPSNTKVDKKVEPKSCDKTHTCPPCPAPELLGGPSVFLFPPKPKDTLMISRTPEVTCVVVDVSHEDPEVKFNWYVDGVEVHNAKTKPREEQYNSTYRVVSVLTVLHQDWLNGKEYKCKVSNKALPAPIEKTISKAKGQPREPQVYTLPPSRDELTKNQVSLTCLVKGFYPSDIAVEWESNGQPENNYKTTPPVLDSDGSFFLYSKLTVDKSRWQQGNVFSCSVMHEALHNHYTQKSLSLSPGK

SEQ ID NO: 2464 - protein, 224 aa, Artificial Sequence
  source: /note="Description of Artificial Sequence: Synthetic heavy chain variable domain"
QVQLQESGPGLVKPSETLSLTCTVSGGSVSSGSYYWSWIRQPPGKGLEWIGYIYYSGSTNYPSLKSRVTISVDTSKQFSLKLSSVTAADTAVYYCAREGKNGAFDIWGQGTMVTVSSASKGPSVFPLAPSSKSTSGGTAALGCLVKDYFPEPVTVSWNSGALTSGVHTFPAVLQSSGLYSLSSWTVPSSSLGTQTYICNVNHKPSNTKVDKVEPKSCDKSGQAG

SEQ ID NO: 2465 - protein, 118 aa, Artificial Sequence
  source: /note="Description of Artificial Sequence: Synthetic heavy chain variable domain"
QVQLQESGPGLVKPSETLSLTCTVSGGSVSSGSYYWSWIRQPPGKGLEWIGYIYYSGSTNYNPSLKSRWISVDTSKNQFSLLSSVTAADTAVYYCAREGKMGAFDIWGQGTMVTVSSS

SEQ ID NO: 2466 - protein, 223 aa, Artificial Sequence
  source: /note="Description of Artificial Sequence: Synthetic heavy chain variable domain"
EVQLVESGGGLVQPGGSLRLSCAASGFDLGFYFYACWVRQSPGKGLEWVACIYTAGSGSTYYADSVKGRFTISADTSKNTAYLQMNSLRAEDTAIYYCSRSTANTRSTYLNLWGQGTLVTVSSASTKGPSVFPLAPSSKSTSGGTAALGCLVKDYFPEPVTVSWNSGALTSGVHTFPAVLQSSGLYSLSSVVTVPSSSLGTQTYICNVNHKPSNTKVDKKVEP

SEQ ID NO: 2467 - protein, 119 aa, Artificial Sequence
  source: /note="Description of Artificial Sequence: Synthetic heavy chain variable domain"
QVQLQQSGPELEKPGASVKISCKASGYSFTGYTMNWVKQSHGKSLEWIGLITPYNGASSYNQKFRGKATLTVDKSSSTAYMDLLSLTSEDSAVYFCARGGYDGRGFDYWGQGTTVTVSS

SEQ ID NO: 2468 - protein, 231 aa, Artificial Sequence
  source: /note="Description of Artificial Sequence: Synthetic heavy chain variable domain"
EVQLQQSGGELEKPGASVKISCKASGYSFTGYTMNWVKQSHGKSLEWIGLITPYNGASSYNQKFRGKATLTVDKSSSTAYMDLLSLTSEDSAIYFCARGGYDGRGFDYWGSGTPVTVSSASTKGPSVFPLAPSSKSTSGGTAALGCLVKDYFPEPVTVSWNSGALTSGVHTFPAVLQSSGLYSLSSVVTVPSSSLGTQTYICNVNHKPSNTKVDKKVEPKSCDKTHTCPPC

SEQ ID NO: 2469 - protein, 120 aa, Artificial Sequence
  source: /note="Description of Artificial Sequence: Synthetic heavy chain variable domain"
AQVQLVQSGAEVKRPGASVQVSCRASGYSINTYYMQWVRQAPGAGLEWMGVINPSGVTSYAQKFQGRVTLTNDTSTNTVYMQLNSLTSADTAVYYCARWALWGDFGMDVWGKGTLVTVSS

SEQ ID NO: 2470 - protein, 121 aa, Artificial Sequence
  source: /note="Description of Artificial Sequence: Synthetic heavy chain variable domain"
QVQLVQSGGGLVQPGGSLRLSCAASDFAFDDYEMSWVRQAPGKALEWIGDINHSGTTIYNPSLKSRVTISRDNSKNTLYLQMNTLRAEDTAIYYCARPHYGDYSDAFDIWGQGTMVTVSSS

SEQ ID NO: 2471 - protein, 113 aa, Artificial Sequence
  source: /note="Description of Artificial Sequence: Synthetic heavy chain variable domain"
QVQLVQSGGGLVQPGGSLRLSCAASDFDFAAYEMSWVRQAPGQGLEWVAIISHDGIDKYYTDSVKGRFTISRDNSKNTLYLQMNTLRAEDTATYYCLRLGAVGQGTLVTVSSS

SEQ ID NO: 2472 - protein, 115 aa, Artificial Sequence
  source: /note="Description of Artificial Sequence: Synthetic heavy chain variable domain"
ELVQSGAEVKKPGASVKVSCKASGYTFTTNYMHWVRQAPGQGLEWMGIINPHNGSTSYAQKFQGRVTMTRDTSISTAYMELSSLRSEDTAVYYCARGRYFLMDVWGQGTLVTVSS

SEQ ID NO: 2473 - protein, 115 aa, Artificial Sequence
  source: /note="Description of Artificial Sequence: Synthetic heavy chain variable domain"
ELVESGGGLVQPGGSLRLSCAASGFTFSNNAMNWVRQAPGKGLEWVSGISYDSSKTYYADSVKGRFTISRDNSKNTLYLQMNSLRAEDTAVYYCARLTYTGAYRWGQGTLVTVSS

SEQ ID NO: 2474 - protein, 116 aa, Artificial Sequence
  source: /note="Description of Artificial Sequence: Synthetic heavy chain variable domain"
ELVESGGGLVQPGGSLRLSCAASGFTFSDYSINWVRQAPGKGLEYVSNISYSGSSTYYADSVKGRFTISRDNSKNTLYLQMNSLRAEDTAVYYCARFKYSGGSDSWGQGTLVTVSS

SEQ ID NO: 2475 - protein, 120 aa, Artificial Sequence
  source: /note="Description of Artificial Sequence: Synthetic heavy chain variable domain"
ELVESGGGLVQPGGSLRLSCAASGFTFSSYGISWVRQAPGKGLEWVSGISYSGSSTYYADSVKGRFTISRDNSKNTLYLQMNSLRAEDTAVYYCARLKPYRHKNGWFDYWGQGTLVTVSS

SEQ ID NO: 2476 - protein, 118 aa, Artificial Sequence
  source: /note="Description of Artificial Sequence: Synthetic heavy chain variable domain"
ELVESGGGLVQPGGSLRLSCAASGFTFSSYGISWVRQAPGKGLEWVSSISYSGSNTYYADSVKGRFTISRDNSKNTLYLQMNSLRAEDTAVYYCARMKPMRGYSGAVWGQGTLVTVSS

SEQ ID NO: 2477 - protein, 115 aa, Artificial Sequence
  source: /note="Description of Artificial Sequence: Synthetic heavy chain variable domain"
ELVESGGGLVQPGGSLRLSCAASGFTFSNYGISWVRQAPGKGLEWVSAISYYGSNTYYADSVKGRFTISRDNSKNTLYLQMNSLRAEDTAVYYCARLKGGSGFVWGQGTLVTVSS

SEQ ID NO: 2478 - protein, 119 aa, Artificial Sequence
  source: /note="Description of Artificial Sequence: Synthetic heavy chain variable domain"
ELVESGGGLVQPGGSLRLSCAASGFTFSSYGMSWVRQAPGKGLEWVSGISSLGSTTYYADSVKGRFTISRDNSKNTLYLQMNSLRAEDTAVYYCARTGSPGTFMHGDHWGQGTLVTVSS

SEQ ID NO: 2479 - protein, 119 aa, Artificial Sequence
  source: /note="Description of Artificial Sequence: Synthetic heavy chain variable domain"
ELVQSGAEVKKPGESLKISCKGSGYSFSKYWIGWVRQMPGKGLEWMGIIYPTDSYTRYSPSFQGQVTISADKSISTAYLQWSSLKASDTAMYYCARTHGYYKNGRMDVWGQGTLVTVSS

SEQ ID NO: 2480 - protein, 117 aa, Artificial Sequence
  source: /note="Description of Artificial Sequence: Synthetic heavy chain variable domain"
ELVQSGAEVKKPGESLKISCKGSGYSFTGYISWVRQAPGKGLEWMGIIYPGDSYTNYSPSFQGQVTISADKSISTAYLQWSSLKASDTAMYYCARYSGPNWDVMDSWGQGTLVTVSS

SEQ ID NO: 2481 - protein, 115 aa, Artificial Sequence
  source: /note="Description of Artificial Sequence: Synthetic heavy chain variable domain"
ELVESGGGLVQPGGSLRLSCAASGFTFSSYGMHWVRQAPGKGLEYVSAISYSSSSTSYADSVKGRFTISRDNSKNTLYLQMNSLRAEDTAVYYCARLSYTGFAVWGQGTLVTVSS

SEQ ID NO: 2482 - protein, 153 aa, Artificial Sequence
  source: /note="Description of Artificial Sequence: Synthetic heavy chain variable domain"
MLLLVTSLLLCELPHPAFLLIPEVQLVESGGGLVKPGGSLRLSCSASGFDFDNAWMTWVRQFPGKGLEWVGRITGPGEGWSVDYAAPVEGRFTISRLNSINFLYLEMNNLRMEDSGLYFCARTGKYYDFWSGYPPGEEYFQDWGRGTLVTVSS

SEQ ID NO: 2483 - protein, 118 aa, Artificial Sequence
  source: /note="Description of Artificial Sequence: Synthetic heavy chain variable domain"
EVQLQQSGGERATPGASVKMSCKTSGYTFTNYWMHWVKQRPGQGLEWIGYINPSSGYTQYNQKFKDKATLTADKSSSTAYIQLSSLTSEDSAVYYCSTYYGDYLFPYWGQGTLVTVSA

SEQ ID NO: 2484 - protein, 116 aa, Artificial Sequence
  source: /note="Description of Artificial Sequence: Synthetic heavy chain variable domain"
EVQLQQSGAELVRPGASVKLSCTASGLNIQDYFIHWVKQRPEQGLEWIGRIDPENGDTEYAPKFQGKATMTADTSSNTAYLQLSSLTSEDTAVYYCTSGSRFRDYWGQGTSVTVSS

SEQ ID NO: 2485 - protein, 117 aa, Artificial Sequence
  source: /note="Description of Artificial Sequence: Synthetic heavy chain variable domain"
EVQLQQSGAELVKPGASVKLSCTASGFNIEDHYMHWVKQRTEQGLDWIGRIDPEDGQTKYDPKFQGKATITVDTSSNTAYLQLSSLTSEDTAVYYCARNYPYALDYWGQGTSVTVSS

SEQ ID NO: 2486 - protein, 118 aa, Artificial Sequence
  source: /note="Description of Artificial Sequence: Synthetic heavy chain variable domain"
EVQLVESGGGLVQPGESLKLSCESNEYEFPSHDMSWVRKTPEKRLELVAAINSDGGSTYYPDTMERRFIISRDNTKKTLYLQMSSLRSEDTALYYCVRLYYGNVMDYWGQGTSVTVSS

SEQ ID NO: 2487 - protein, 112 aa, Artificial Sequence
  source: /note="Description of Artificial Sequence: Synthetic heavy chain variable domain"
DVVMTQTPLSLPVSLGDQASISCRSSQSLVHSNGNTYLYWYLQKPGQSPKLLIYKVSNRFSGVPDRFSGSGSGTDFTLKISRVEAEDLGVYFCSQSTHVPLTFGAGTKLELK

SEQ ID NO: 2488 - protein, 120 aa, Artificial Sequence
  source: /note="Description of Artificial Sequence: Synthetic heavy chain variable domain"
QIQLVQSGPELKKPGETVKTSCKASGYTFTGYSMHWVKQAPGKGLKWMGWINTETGEPTYADDFKGRFALSLETSASTTYLQINNLKNEDTATYFCVRGTGGDDWGQGTTLTVSSAKTTP

SEQ ID NO: 2489 - protein, 118 aa, Artificial Sequence
  source: /note="Description of Artificial Sequence: Synthetic heavy chain variable domain"
QVQLQQSGAELMKPGASVKISCKAIGFTFNYFWIEWVKQRPGHGLEWIGEILPGTGSTNYNEKFKGKAIFTADTSSNTAYMQLRSLTSEDSAVYYCVRYDYTSSMDYWGQGTSVTVSS

SEQ ID NO: 2490 - protein, 118 aa, Artificial Sequence
  source: /note="Description of Artificial Sequence: Synthetic heavy chain variable domain"
QITLKESGPGILQPSQTLSLTCSFSGFSLSTSGMGVSWIRQPSGKGLEWLSHIYWDDDKRYNPSLKSRLSISKDTSRNQVFLKITSVDTADTATYYCAPGVSSWFPYWGPGTLVTVSA

SEQ ID NO: 2491 - protein, 119 aa, Artificial Sequence
  source: /note="Description of Artificial Sequence: Synthetic heavy chain variable domain"
QVQLQQPGAELVKPGASEKLSCKASGHTFTSYWMHWVKQRPGQGLEWIGEINPSNGRTYYNENFKTKATLTVDKYSSSASMQLRSLTSEDSAVYYCASDGDYVSGFAYWGQGTTLTVSS

SEQ ID NO: 2492 - protein, 122 aa, Artificial Sequence
  source: /note="Description of Artificial Sequence: Synthetic heavy chain variable domain"
QVTLKESGPGILQPSQTLSLTCSFSGFSLNTLGMGVGWIRQPSGKGLEWLAHIWWDDDKYYNPALKSRLTISKDSSKNQVFLKIANVDTADIATYYCSRIGTAQATDALDYWGQGTSVTVSS

SEQ ID NO: 2493 - DNA, 354 bp, Artificial Sequence
  source: /note="Description of Artificial Sequence: Synthetic heavy chain variable domain"
gaggtgaagctggaggagtcaggacctgaactggtgaagcctggggcttcagtgaagatatcctgcaaggcttctggttactcatttactggctactttatgaactgggtgaagcagacccatggaaagagccttgagtggattggacgtattaatccttacaatggtgctactttctacaatcagaagttcacgggcaaggccacaatgactgtagacaaatcctctaccacagcccacatggagctcctgagcctgacatctgaggactctgcagtctattattgtggaaaggggaattactacggcccctttgattactggggccaagggaccacggtcaccgtctcctca

SEQ ID NO: 2494 - protein, 123 aa, Artificial Sequence
  source: /note="Description of Artificial Sequence: Synthetic heavy chain variable domain"
QVTLKESGPGILQPSQTLSLTCSFSGFSLSTVGMGVGWSRQPSGKGLEWLAHIWWDDEDKYYNPALKSRLTISKDTSKNQVFLKIANVDTADSATYYCTRIGTAQATDALDYWGQGTSVTVSS

SEQ ID NO: 2495 - protein, 122 aa, Artificial Sequence
  source: /note="Description of Artificial Sequence: Synthetic heavy chain variable domain"
QVNLKESGPGKLQPSQTLSLTCSFSGFSLSTLGMGVGWIRQSSGKGLEWLAHIWWDDDKYYNPALKSRLTISRATSKNQVFLKIVNVGTADTATYYCARIGTAQATDALDYWGQGTSVTVSS

SEQ ID NO: 2496 - protein, 123 aa, Artificial Sequence
  source: /note="Description of Artificial Sequence: Synthetic heavy chain variable domain"
QVTLKESGPGILQPSQTLSLTCSFSGFSLSTVGMGVGWSRQPSGKGLEWLAHIWWDDEDKYYNPALKSRLTISKDTSKNQVFLKIANVDTADTATYYCTRIGTAQATDALDYWGQGTSVTVSS

SEQ ID NO: 2497 - DNA, 366 bp, Artificial Sequence
  source: /note="Description of Artificial Sequence: Synthetic heavy chain variable domain"
gtgaagctggaggagtcagggggaggcttcgtgaagcctggagggtccctcaaaatctcctgtgcagcctctggattcactttcagaaactatgccatgtcctgggttcgcctgagtccggagatgaggctggagtgggtcgcaaccattagcagtgctggtggttacatcttctattctgacagtgtgcagggacgattcaccatttccagagacaatgccaagaacaccctccacttgcaaatgggcagtctgaggtctggggacacggccatgtattactgtgcaaggcagggatttggtaactacggtgattactatgctatggactactggggccaagggaccacggtcaccgtctcctca

SEQ ID NO: 2498 - DNA, 366 bp, Artificial Sequence
  source: /note="Description of Artificial Sequence: Synthetic heavy chain variable domain"
gtgaagctgcaggagtcagggggaggcttcgtgaagcctggagggtccctcaaagtctcctgtgcagcctctggattcactttcagtagctatgccatgtcctgggttcgcctgagtccggagatgaggctggagtgggtcgcaaccattagcagtgctggtggttacatcttctattctgacagtgtgcagggacgattcaccatttccagagacaatgccaagaacaccctgcacctgcaaatgggcagtctgaggtctggggacacggccatgtattactgtgcaaggcagggatttggtaactacggtgattactatgctatggactactggggccaagggaccacggtcaccgtctcctca

SEQ ID NO: 2499 - protein, 122 aa, Artificial Sequence
  source: /note="Description of Artificial Sequence: Synthetic heavy chain variable domain"
QVTLKESGPGILQPSQTLSLTCSFSGFSLNTLGMGVGWIRQPSGKGLEWLAHIWWDDDKYYYPALKSRLTISRDTSKNQVFLKIANVDTADTATYYCARIGTAQATDALDYWGQGTSVTVSS

SEQ ID NO: 2500 - DNA, 348 bp, Artificial Sequence
  source: /note="Description of Artificial Sequence: Synthetic heavy chain variable domain"
gtgaagctggaggagtcagggggagacttggtgaagcctggagggtccctgaaactctcctgtgcagtctctggattcactttcagtagccattccatgtcttggattcgtcagactccagagaagaggctagagtgggtcgcatccgtgagtagtggtggtaggatctactattcggacagtgtgaagggccgattcaccgtcaccagagaaaatgacaggaacaccctgtatttgttaatgagtagtctgaggtctgaggacacggccatgtattattgtggaagaggacaggtattttatgctttggacaattggggccaagggaccacggtcaccgtctcctca

SEQ ID NO: 2501 - protein, 123 aa, Artificial Sequence
  source: /note="Description of Artificial Sequence: Synthetic heavy chain variable domain"
EVQLVESGGGLVQPGGSLRLSCAASGFTVSSNYMSWVRQAPGKGLEWVSVIYSGGSTYYADSVKGRFIISRDNSKNTLYLQMNSLRAEDTAVYYCARDQEHYFDGSGYYVDYWGQGTLVTVSS

SEQ ID NO: 2502 - protein, 107 aa, Artificial Sequence
  source: /note="Description of Artificial Sequence: Synthetic heavy chain variable domain"
SLRLSCAASGFTVSSNYMSWVRQAPGKGLEWVSVIYSGGSTYYADSVKGRFTISRDNSKNTLYLQMNSLRAEDTAVYYCARDQEHYFDGSGYYVDYWGQGTLVTVSS

SEQ ID NO: 2503 - protein, 121 aa, Artificial Sequence
  source: /note="Description of Artificial Sequence: Synthetic heavy chain variable domain"
EVQLVESGGGLVQPGGSLRLSCAASGFTVSSNYMSWVRQAPGKGLEWVSVIYSGGTTYYADSVKGRFTISRHNSKNTLYLQMNSLRAEDTAVYYCARDHDPDYGGYYMDVWGKGTTVTVSS

SEQ ID NO: 2504 - protein, 128 aa, Artificial Sequence
  source: /note="Description of Artificial Sequence: Synthetic heavy chain variable domain"
QVQLVESGGGLVKPGGSLRLSCAASGFTFSDYYMSWIRQAPGKGLEWVSYISSSGSTIYYADSVKGRFTISRDNAKNSLYLQMNSLRAEDTAVYYCARERIGYCTGGNCFYYYYMDVWGKGTTVTVSS

SEQ ID NO: 2505 - protein, 128 aa, Artificial Sequence
  source: /note="Description of Artificial Sequence: Synthetic heavy chain variable domain"
QVQLVESGGGLVKPGGSLRLSCAASGFTFSDYYMSWIRQAPGKGLEWVSYISSSGTTKYYADSVKGRFTISRDNAKNSLYLQMNSLRAEDTAVYYCVRENIGYCTGGNCFYYYYMDVWGKGTTVTVSS

SEQ ID NO: 2506 - protein, 128 aa, Artificial Sequence
  source: /note="Description of Artificial Sequence: Synthetic heavy chain variable domain"
QVQLVESGGGLVKPGGSLRLSCAASGFTFSDYYMSWIRQAPGKGLEWVSYISSSGTTKYYADSVKGRFTISRDNAKNSLYLQMNSLRAEDTAVYYCVRENLGYCSGGSCFYYYYMDVWGKGTTVTVSS

SEQ ID NO: 2507 - protein, 128 aa, Artificial Sequence
  source: /note="Description of Artificial Sequence: Synthetic heavy chain variable domain"
QVQLVESGGGLVKPGGSLRLSCAASGFTFSDYYMSWIRQAPGKGLEWISYISSSGSTIYYADSVKGRFTISRDNAKNSLYLQMNSLRAEDTAVYYCARERIGYCSGGSCFYYYYMDVWGKGTTVTVSS

SEQ ID NO: 2508 - protein, 128 aa, Artificial Sequence
  source: /note="Description of Artificial Sequence: Synthetic heavy chain variable domain"
QVQLVESGGGLVKPGGSLRLSCAASGFTFSDYYMSWIRQAPGKGLEWVSYISSSGTTKYYADSVKGRFTISRDNAKNSLYLHLNSLRAEDTAVYYCVRENLGYCSGGSCFYYYYMDVWGKGTTVTVSS

SEQ ID NO: 2509 - protein, 127 aa, Artificial Sequence
  source: /note="Description of Artificial Sequence: Synthetic heavy chain variable domain"
QLQLQESGPGLVKPSETLSLTCTVSGGSISSSSYYWGWIRQPPGKGLEWIGSIYYSGSTHYNPSLKRRVTISEDTSKNQFSLKLSSVTAADTAVYYCARGVVEVRGNHYYYYYMDVWGKGTTVTVSS

SEQ ID NO: 2510 - protein, 127 aa, Artificial Sequence
  source: /note="Description of Artificial Sequence: Synthetic heavy chain variable domain"
QLQLQESGPGLVKPSETLSLTCTVSGGSISSSSYYWGWIRQPPGKGLEWIGSIYYSGSTHYNPSLKSRVTISVDTSKNQFSLKLRSVTAADTAVYYCARGVVEVRGNHYYYYYMDVWGKGTTVTVSS

SEQ ID NO: 2511 - protein, 127 aa, Artificial Sequence
  source: /note="Description of Artificial Sequence: Synthetic heavy chain variable domain"
QLQLQESGPGLVKPSETLSLTCTVSGGSISSSSYYLGWIHQPPGMGLEWIGSIYYSGSTHYNPSLKSRVTISVDTSKNQFSLKLRSVTAADTAVYYCARGVVEVRGNHYYYYYMDVWGKGTTVTVSS

SEQ ID NO: 2512 - protein, 127 aa, Artificial Sequence
  source: /note="Description of Artificial Sequence: Synthetic heavy chain variable domain"
QLQLQESGPGLVKPSETLSLTCTVSGGSISSSSYYVGWIRHAPGKGLEWIGSIYYSGSTHYNPSLKRRVTISEDTSKNQFSLKLSSVTAADTAVYYCARGVVEVRGNHYYYYHMDAWGKGTTVTVSS

SEQ ID NO: 2513 - protein, 127 aa, Artificial Sequence
  source: /note="Description of Artificial Sequence: Synthetic heavy chain variable domain"
QLQLQESGPGLVKPSETLSLTCTVSGGSISSSSYYWGWIRQPPGKGLEWIGSIYYSGSTHYNPSLKRRVTISEDTSKNQFSLKLSSVTAADTAVYYCARGVVEVRGNHYYYYHMDAWGKGTTVTVSS

SEQ ID NO: 2514 - protein, 127 aa, Artificial Sequence
  source: /note="Description of Artificial Sequence: Synthetic heavy chain variable domain"
QLQLQESGPGLVKPSETLSLTCTVSGGSISSSSYYWGWIRQPPGKGLEWIGSIYYSGSTHYTPSLKSRVTISVDTSKNQFSLKLSSVTAADTAVYYCARGVVEVRGNHYYYYHMDAWGKGTTVTVSS

SEQ ID NO: 2515 - protein, 122 aa, Artificial Sequence
  source: /note="Description of Artificial Sequence: Synthetic heavy chain variable domain"
EVQLVESGGGLVQPGGSLRLSCAASGFTVSSNYMSWVRQAPGKGLEWVSVIYSGGSTYYADSVKGRFTISRDNSKNTLYLQMNSLRAEDTAVYYCARGSTNTYYYDSSGHPWGQGTMVTVSS

SEQ ID NO: 2516 - protein, 123 aa, Artificial Sequence
  source: /note="Description of Artificial Sequence: Synthetic heavy chain variable domain"
QLQLQESGPGLVKPSETLSLTCTVSGGSISSSRYYWGWIRQPPGKGLEWIGSIYYSGSTYYNPSLKSRVTISVDTSNNQFSLKLTSVTAADTAVYYCARLPESGGYSGWFDPWGQGTLVTVSS

SEQ ID NO: 2517 - protein, 128 aa, Artificial Sequence
  source: /note="Description of Artificial Sequence: Synthetic heavy chain variable domain"
QVQLVESGGGLVKPGGSLRLSCAASGFTFSDYYMSWIRQAPGKGLEWVSYISSSGTTKYYADSVKGRFTISRDNAKNSLYLQMNSLRAEDTAVYYCARERIGYCSGGSCYYYYYMDVWGKGTTVTVSS

SEQ ID NO: 2518 - protein, 128 aa, Artificial Sequence
  source: /note="Description of Artificial Sequence: Synthetic heavy chain variable domain"
QVQLVESGGGLVKPGGSLRLSCAASGFTFSDYYMSWIRQAPGKGLEWVSYISSSGSTIYYADSVKGRFTISRDNAKNSLYLQMNSLRAEDTAVYYCARERIGYCSGGSCYYYYYMDVWGKGTTVTVSS

SEQ ID NO: 2519 - protein, 128 aa, Artificial Sequence
  source: /note="Description of Artificial Sequence: Synthetic heavy chain variable domain"
QVQLVESGGGLVKPGGSLRLSCAASGFTFSDYYMSWIRQAPGKGLEWVSYISSSGTTKYYADSVKGRFTISRDNAKNSLYLQMNSLRAEDTAVYYCVRENLGYCSGGSCYYYYYMDVWGKGTTVTVSS

SEQ ID NO: 2520 - protein, 128 aa, Artificial Sequence
  source: /note="Description of Artificial Sequence: Synthetic heavy chain variable domain"
QVQLVESGGGLVKPGGSLRLSCAASGFTFSDYYMSWIRQAPGKGLEWVSYISSSGSTKYYADSVKGRFTISRDNAKNSLYLQMNSLRAEDTAVYYCVRENLGYCTGGNCFYYYYMDVWGKGTTVTVSS

SEQ ID NO: 2521 - protein, 128 aa, Artificial Sequence
  source: /note="Description of Artificial Sequence: Synthetic heavy chain variable domain"
QVQLVESGGGLVKPGGSLRLSCAASGFTFSDYYMSWIRQAPGKGLEWVSYISSSGTTKYYADSVKGRFTISRDNAKNSLYLQMNSLRAEDTAVYYCVRENLGYCTGGNCFYYYYMDVWGKGTTVTVSS

SEQ ID NO: 2522 - protein, 128 aa, Artificial Sequence
  source: /note="Description of Artificial Sequence: Synthetic heavy chain variable domain"
QVQLVESGGGLVKPGGSLRLSCAASGFTFSDYYMSWIRQAPGKGLEWVSYISSSGTTKYYADSVKGRFTISRDNAKNSLYLQMNSLRAEDTAVYYCVRENIGYCSGGSCFYYYYMDVWGKGTTVTVSS

SEQ ID NO: 2523 - protein, 128 aa, Artificial Sequence
  source: /note="Description of Artificial Sequence: Synthetic heavy chain variable domain"
QVQLVESGGGLVKPGGSLRLSCAASGFIFSDYYMSWIRQAPGKGLEWVSYISSSGTTKYYADSVKGRFTISRDNAKNSLYLQMNSLRAEDTAVYYCVREDIGYCSGGSCFYYYYMDVWGKGTTVTVSS

SEQ ID NO: 2524 - protein, 113 aa, Artificial Sequence
  source: /note="Description of Artificial Sequence: Synthetic heavy chain variable domain"
EVQLVESGGGLVQPGGSLRLSCAASGFTFSSYWMHWVRQAPGKGLVWVSHINSDGSSTSYADSVKGRFTISRDNAKNTLYLQMNSLRAEDTAVYYCARELADWGQGTLVTVSS

SEQ ID NO: 2525 - protein, 121 aa, Artificial Sequence; identical to SEQ ID NO: 2421
  source: /note="Description of Artificial Sequence: Synthetic heavy chain variable domain"

SEQ ID NO: 2526 - protein, 159 aa, Artificial Sequence
  source: /note="Description of Artificial Sequence: Synthetic heavy chain variable domain"
MLLLVTSLLLCELPHPAFLLIPQPQLQESGPGLVEASETLSLTCTVSGDSTAACDYFWGWVRQPPGKGLEWIGGLSHCAGYYNTGWTYHNPSLKSRLTISLDTPKNQVFLKLNSVTAADTAIYYCARFDGEVLVYHDWPKPAWVDLWGRGTLVTVTVSS

SEQ ID NO: 2527 - protein, 157 aa, Artificial Sequence
  source: /note="Description of Artificial Sequence: Synthetic heavy chain variable domain"
MLLLVTSLLLCELPHPAFLLIPQPQLQESGPTLVEASETLSLTCAVSGDSTAACNSFWGWVRQPPGKGLEWVGSLSHCASYWNRGWTYHNPSLKSRLTLALDTPKNLVFLKLNSVTAADTATYYCARFGGEVLRYTDWPKPAWVDLWGRGTLVTVSS

SEQ ID NO: 2528 - protein, 119 aa, Artificial Sequence
  source: /note="Description of Artificial Sequence: Synthetic heavy chain variable domain"
EVQLVESGGGLVKPGGSLKLSCAASGFTFSSYAMSWVRQSPEKRLEWVAEISSGGSYTYYPDTVTGRFTISRDNAKNTLYLEISSLRSEDTAMYYCTRHGDYPRFFDVWGAGTTVTVSS

SEQ ID NO: 2529 - protein, 452 aa, Artificial Sequence
  source: /note="Description of Artificial Sequence: Synthetic heavy chain variable domain"
EVQLVQSGAEVKKPGESLKISCKGSGYSFTSYWMNWVRQMPGKGLEWMGRIDPYDSETHYSPSFQGQVTISADKSISTAYLQWSSLKASDTAMYYCARGGYDFDVGTLYWFFDVWGQGTTVTVSSASTKGPSVFPLAPCSRSTSESTAALGCLVKDYFPEPVTVSWNSGALTSGVHTFPAVLQSSGLYSLSSVVTVPSSSLGTKTYTCNVDHKPSNTKVDKRVESKYGPPCPPCPAPEFLGGPSVFLFPPKPKDTLMISRTPEVTCVVVDVSQEDPEVQFNWYVDGVEVHNAKTKPREEQFNSTYRVVSVLTVLHQDWLNGKEYKCKVSNKGLPSSIEKTISKAKGQPREPQVYTLPPSQEEMTKNQVSLTCLVKGFYPSDIAVEWESNGQPENNYKTTPPVLDSDGSFFLYSRLTVDKSRWQEGNVFSCSVMHEALHNHYTQKSLSLSLGK

SEQ ID NO: 2530 - protein, 452 aa, Artificial Sequence
  source: /note="Description of Artificial Sequence: Synthetic heavy chain variable domain"
QVQLVQSGAEVKKPGASVKVSCKASGYTFTSYWMNWVRQAPGQGLEWMGRIDPYDSETHYAQKLQGRVTMTTDTSTSTAYMELRSLRSDDTAVYYCARGGYDFDVGTLYWFFDVWGQGTTVTVSSASTKGPSVFPLAPCSRSTSESTAALGCLVKDYFPEPVTVSWNSGALTSGVHTFPAVLQSSGLYSLSSVVTVPSSSLGTKTYTCNVDHKPSNTKVDKRVESKYGPPCPPCPAPEFLGGPSVFLFPPKPKDTLMISRTPEVTCVVVDVSQEDPEVQFNWYVDGVEVHNAKTKPREEQFNSTYRVVSVLTVLHQDWLNGKEYKCKVSNKGLPSSIEKTISKAKGQPREPQVYTLPPSQEEMTKNQVSLTCLVKGFYPSDIAVEWESNGQPENNYKTTPPVLDSDGSFFLYSRLTVDKSRWQEGNVFSCSVMHEALHNHYTQKSLSLSLGK

SEQ ID NO: 2531 - protein, 452 aa, Artificial Sequence
  source: /note="Description of Artificial Sequence: Synthetic heavy chain variable domain"
EVQLVQSGAEVKKPGESLRISCKGSGYSFTSYWMNWVRQMPGKGLEWMGRIDPYDSETHYSPSFQGHVTISADKSISTAYLQWSSLKASDTAMYYCARGGYDFDVGTLYWFFDVWGQGTTVTVSSASTKGPSVFPLAPCSRSTSESTAALGCLVKDYFPEPVTVSWNSGALTSGVHTFPAVLQSSGLYSLSSVVTVPSSSLGTKTYTCNVDHKPSNTKVDKRVESKYGPPCPPCPAPEFLGGPSVFLFPPKPKDTLMISRTPEVTCVVVDVSQEDPEVQFNWYVDGVEVHNAKTKPREEQFNSTYRVVSVLTVLHQDWLNGKEYKCKVSNKGLPSSIEKTISKAKGQPREPQVYTLPPSQEEMTKNQVSLTCLVKGFYPSDIAVEWESNGQPENNYKTTPPVLDSDGSFFLYSRLTVDKSRWQEGNVFSCSVMHEALHNHYTQKSLSLSLGK

SEQ ID NO: 2532 - protein, 452 aa, Artificial Sequence
  source: /note="Description of Artificial Sequence: Synthetic heavy chain variable domain"
EVQLVQSGAEVKKPGATVKISCKVSGYTFTSYWMNWVQQAPGKGLEWMGRIDPYDSETHYAEKFQGRVTITADTSTDTAYMELSSLRSEDTAVYYCATGGYDFDVGTLYWFFDVWGQGTTVTVSSASTKGPSVFPLAPCSRSTSESTAALGCLVKDYFPEPVTVSWNSGALTSGVHTFPAVLQSSGLYSLSSVVTVPSSSLGTKTYTCNVDHKPSNTKVDKRVESKYGPPCPPCPAPEFLGGPSVFLFPPKPKDTLMISRTPEVTCVVVDVSQEDPEVQFNWYVDGVEVHNAKTKPREEQFNSTYRVVSVLTVLHQDWLNGKEYKCKVSNKGLPSSIEKTISKAKGQPREPQVYTLPPSQEEMTKNQVSLTCLVKGFYPSDIAVEWESNGQPENNYKTTPPVLDSDGSFFLYSRLTVDKSRWQEGNVFSCSVMHEALHNHYTQKSLSLSLGK

SEQ ID NO: 2533 - protein, 452 aa, Artificial Sequence
  source: /note="Description of Artificial Sequence: Synthetic heavy chain variable domain"
QVQLVQSGAEVKKPGASVKVSCKASGYTFTSYWMNWVRQAPGQGLEWMGRIDPYDSETHYAQKFQGRVTMTRDTSTSTVYMELSSLRSEDTAVYYCARGGYDFDVGTLYWFFDVWGQGTTVTVSSASTKGPSVFPLAPCSRSTSESTAALGCLVKDYFPEPVTVSWNSGALTSGVHTFPAVLQSSGLYSLSSVVTVPSSSLGTKTYTCNVDHKPSNTKVDKRVESKYGPPCPPCPAPEFLGGPSVFLFPPKPKDTLMISRTPEVTCVVVDVSQEDPEVQFNWYVDGVEVHNAKTKPREEQFNSTYRVVSVLTVLHQDWLNGKEYKCKVSNKGLPSSIEKTISKAKGQPREPQVYTLPPSQEEMTKNQVSLTCLVKGFYPSDIAVEWESNGQPENNYKTTPPVLDSDGSFFLYSRLTVDKSRWQEGNVFSCSVMHEALHNHYTQKSLSLSLGK

SEQ ID NO: 2534 - protein, 118 aa, Artificial Sequence
  source: /note="Description of Artificial Sequence: Synthetic heavy chain variable domain"
EVQLVESGGGVVQPGGSLRLSCAASGFTFSSYGMHWVRQAPGKGLEWVAFIRYDGSNKYYADSVKGRFTISRDNSKNTKYLQMNSLRAEDTAVYYCAKDRFGYYLDYWGQGTLVTVSS

SEQ ID NO: 2535 - protein, 121 aa, Artificial Sequence
  source: /note="Description of Artificial Sequence: Synthetic heavy chain variable domain"
QVQLVESGGGLVKPGGSLRLSCAASGFTFSSYGMHWVRQAPGKGLEWVAFIRYDGSNKYYADSVKGRFTISRDNSKNTLYLQMNSLRAEDTAVYYCAKDRGLGDGTYFDYWGQGTTVTVSS

SEQ ID NO: 2536 - protein, 466 aa, Artificial Sequence
  source: /note="Description of Artificial Sequence: Synthetic heavy chain variable domain"
MDWTWRVFCLLAVAPGVLSQVQLVQSGAEVKKPGASVKISCKVSGYTLRGYWIEWVRQAPGKGLEWIGQILPGTGRTNYNEKFKGRVTMTADTSTDTAYMELSSLRSEDTAVYYCARFDGNYGYYAMDYWGQGTTVTVSSASTKGPSVFPLAPCSRSTSESTAALGCLVKDYFPEPVTVSWNSGALTSGVHTFPAVLQSSGLYSLSSVVTVPSSNFGTQTYTCNVDHKPSNTKVDKTVERKCCVECPPCPAPPVAGPSVFLFPPKPKDTLMISRTPEVTCVVVDVSHEDPEVQFNWYVDGVEVHNAKTKPREEQFNSTFRVVSVLTVVHQDWLNGKEYKCKVSNKGLPAPIEKTISKTKGQPREPQVYTLPPSREEMTKNQVSLTCLVKGFYPSDIAVEWESNGQPENNYKTTPPMLDSDGSFFLYSKLTVDKSRWQQGNVFSCSVMHEALHNHYTQKSLSLSPGK

SEQ ID NO: 2537 - protein, 441 aa, Artificial Sequence
  source: /note="Description of Artificial Sequence: Synthetic heavy chain variable domain"
EVQLVESGGGLVQPGGSLRLSCAASGFTFSSSGMSWVRQAPGKGLEWVSVIASSGSNTYYADSVKGRFTISRDNSKNTLYLQMNSLRAEDTAVYYCARSIFYTTWGQGTLVTVSSASTKGPSVFPLAPCSRSTSESTAALGCLVKDYFPEPVTVSWNSGALTSGVHTFPAVLQSSGLYSLSSVVTVPSSNFGTQTYTCNVDHKPSNTKVDKTVERKCCVECPPCPAPPVAGPSVFLFPPKPKDTLMISRTPEVTCVVVDVSHEDPEVQFNWYVDGVEVHNAKTKPREEQFNSTFRVVSVLTVVHQDWLNGKEYKCKVSNKGLPAPIEKTISKTKGQPREPQVYTLPPSREEMTKNQVSLTCLVKGFYPSDIAVEWESNGQPENNYKTTPPMLDSDGSFFLYSKLTVDKSRWQQGNVFSCSVMHEALHNHYTQKSLSLSPGK

SEQ ID NO: 2538 - protein, 227 aa, Artificial Sequence
  source: /note="Description of Artificial Sequence: Synthetic heavy chain variable domain"
EVQLVESGGGLVQPGGSLRLSCAASGFTFSSYWIHWVRQSPGKGLEWVARINPPNRSNQYADSVKGRFTISADTSKNTAYLQMNSLRAEDTAIYYCARGSGFRWVMDYWGQGTLVTVSSASTKGPSVFPLAPSSKSTSGGTAALGCLVKDYFPEPVTVSWNSGALTSGVHTFPAVLQSSGLYSLSSVVTVPSSSLGTQTYICNVNHKPSNTKVDKKVEPKSCDKTHT

SEQ ID NO: 2539 - protein, 119 aa, Artificial Sequence
  source: /note="Description of Artificial Sequence: Synthetic heavy chain variable domain"
DVQLVESGGGLVQPGGSRKISCAASGFTFSSYGMHWVRQAPEKGLEWVAYISSSTVTTYYADTVKGRFTISRDNANNTLFLQMTSLRSEDTAMYYCSRQNWDGGYFDVWGAGTTVTVSS

SEQ ID NO: 2540 - protein, 119 aa, Artificial Sequence
  source: /note="Description of Artificial Sequence: Synthetic heavy chain variable domain"
EVQLVESGGGLVQPGGSLRLSCAASGFTFSSYGMNWVRQAPGKGLEWVSYISSSTVTTYYADSVKGRFTISRDNAKNSLYLQMNSLRDEDTAVYYCSRQNWDGGYFDVWGAGTTVTVSS

SEQ ID NO: 2541 - protein, 117 aa, Artificial Sequence
  source: /note="Description of Artificial Sequence: Synthetic heavy chain variable domain"
AVHLVESGGGLVQPKESLKISCAASGFTFSNAAMYWVRQAPGKGLEWVARIRTKPNDYATYYVDSVKGRFTISRDDSQSMVYLQMDNLKTEDTAMYYCTAFTEPDYWGQGVMVTVSS

SEQ ID NO: 2542 - protein, 120 aa, Artificial Sequence
  source: /note="Description of Artificial Sequence: Synthetic heavy chain variable domain"
QVQLKESGPGLVQPSQTLSLTCTVSGFSLTRNNVHWVRQPPGKGLEWMGRMRYNGDTSYNSALKSRLSISRDTSKNQVFLKMNSLQIDDTGTYYCSREGYYDGTYYPDYWGQGVMVTVSS

SEQ ID NO: 2543 - protein, 117 aa, Artificial Sequence
  source: /note="Description of Artificial Sequence: Synthetic heavy chain variable domain"
EVQLVETGGSLVQPGKSLKLTCATSGFTFSNAWMHWVRQSPEKQLEWVAQIKAKSNNYATYYAESVKGRFTISRDDSKSSIYLQMNSLKEEDTAIYYCLYGYYFDYWGQGVMVTVSS

SEQ ID NO: 2544 - protein, 140 aa, Artificial Sequence
  source: /note="Description of Artificial Sequence: Synthetic heavy chain variable domain"
QVQLQQSDAELVKPGASVKISCKVSGYTFTDHTIHWMKQRPEQGLEWIGYIYPRDGSTKYNEKFKGKATLTADKSSSTTYMQLNSLTSEDSAVYFCARLAFGIITTVVRYFDVWGTGTTVTVSSAKTTAPSVYPLAPGSL

SEQ ID NO: 2545 - protein, 444 aa, Artificial Sequence
  source: /note="Description of Artificial Sequence: Synthetic heavy chain variable domain"
QVQLVESGGGVVQPGRSLRLSCAASGFTFSNYALHWVRQAPGKGLEWVALISYDGSRKHYADSVKGRFSISRDNSKNTLYLQMNSLRAEDTAVYYCASLTYVREWGQGTLVTVSSASTKGPSVFPLAPSSKSTSGGTAALGCLVKDYFPEPVTVSWNSGALTSGVHTFPAVLQSSGLYSLSSVVTVPSSSLGTQTYICNVNHKPSNTKVDKRVEPKSCDKTHTCPPCPAPELLGGPSVFLFPPKPKDTLMISRTPEVTCVVVDVSHEDPEVKFNWYVDGVEVHNAKTKPREEQYNSTYRVVSVLTVLHQDWLNGKEYKCKVSNKALPAPIEKTISKAKGQPREPQVYTLPPSREEMTKNQVSLTCLVKGFYPSDIAVEWESNGQPENNYKTTPPVLDSDGSFFLYSKLTVDKSRWQQGNVFSCSVMHEALHNHYTQKSLSLSPG

SEQ ID NO: 2546 - protein, 444 aa, Artificial Sequence
  source: /note="Description of Artificial Sequence: Synthetic heavy chain variable domain"
QVQLVESGGGVVQPGRSLRLSCAASGFTFSNYALHWVRQAPGKGLEWVALISYSGSRKHYADSVKGRFSISRDNSKNTLYLQMNSLRAEDTAVYYCASLTMVREGGQGTLVTVSSASTKGPSVFPLAPSSKSTSGGTAALGCLVKDYFPEPVTVSWNSGALTSGVHTFPAVLQSSGLYSLSSVVTVPSSSLGTQTYICNVNHKPSNTKVDKRVEPKSCDKTHTCPPCPAPELLGGPSVFLFPPKPKDTLMISRTPEVTCVVVDVSHEDPEVKFNWYVDGVEVHNAKTKPREEQYNSTYRVVSVLTVLHQDWLNGKEYKCKVSNKALPAPIEKTISKAKGQPREPQVYTLPPSREEMTKNQVSLTCLVKGFYPSDIAVEWESNGQPENNYKTTPPVLDSDGSFFLYSKLTVDKSRWQQGNVFSCSVMHEALHNHYTQKSLSLSPG

SEQ ID NO: 2547 - protein, 444 aa, Artificial Sequence
  source: /note="Description of Artificial Sequence: Synthetic heavy chain variable domain"
QVQLVESGGGVVQPGRSLRLSCAASGFTFSNYALHWVRQAPGKGLEWVALISYDSSRKHYADSVKGRFSISRDNSKNTLYLQMNSLRAEDTAVYYCASLTMVREGGQGTLVTVSSASTKGPSVFPLAPSSKSTSGGTAALGCLVKDYFPEPVTVSWNSGALTSGVHTFPAVLQSSGLYSLSSVVTVPSSSLGTQTYICNVNHKPSNTKVDKRVEPKSCDKTHTCPPCPAPELLGGPSVFLFPPKPKDTLMISRTPEVTCVVVDVSHEDPEVKFNWYVDGVEVHNAKTKPREEQYNSTYRVVSVLTVLHQDWLNGKEYKCKVSNKALPAPIEKTISKAKGQPREPQVYTLPPSREEMTKNQVSLTCLVKGFYPSDIAVEWESNGQPENNYKTTPPVLDSDGSFFLYSKLTVDKSRWQQGNVFSCSVMHEALHNHYTQKSLSLSPG

SEQ ID NO: 2548 - protein, 444 aa, Artificial Sequence
  source: /note="Description of Artificial Sequence: Synthetic heavy chain variable domain"
QVQLVESGGGVVQPGRSLRLSCAASGFTFSNYALHWVRQAPGKGLEWVALISYSGSRKHYADSVKGRFSISRDNSKNTLYLQMNSLRAEDTAVYYCASLTMVREWGQGTLVTVSSASTKGPSVFPLAPSSKSTSGGTAALGCLVKDYFPEPVTVSWNSGALTSGVHTFPAVLQSSGLYSLSSVVTVPSSSLGTQTYICNVNHKPSNTKVDKRVEPKSCDKTHTCPPCPAPELLGGPSVFLFPPKPKDTLMISRTPEVTCVVVDVSHEDPEVKFNWYVDGVEVHNAKTKPREEQYNSTYRVVSVLTVLHQDWLNGKEYKCKVSNKALPAPIEKTISKAKGQPREPQVYTLPPSREEMTKNQVSLTCLVKGFYPSDIAVEWESNGQPENNYKTTPPVLDSDGSFFLYSKLTVDKSRWQQGNVFSCSVMHEALHNHYTQKSLSLSPG

SEQ ID NO: 2549 - protein, 444 aa, Artificial Sequence
  source: /note="Description of Artificial Sequence: Synthetic heavy chain variable domain"
QVQLVESGGGVVQPGRSLRLSCAASGFTFSNYALHWVRQAPGKGLEWVALISYDSSRKHYADSVKGRFSISRDNSKNTLYLQMNSLRAEDTAVYYCASLTMVREWGQGTLVTVSSASTKGPSVFPLAPSSKSTSGGTAALGCLVKDYFPEPVTVSWNSGALTSGVHTFPAVLQSSGLYSLSSVVTVPSSSLGTQTYICNVNHKPSNTKVDKRVEPKSCDKTHTCPPCPAPELLGGPSVFLFPPKPKDTLMISRTPEVTCVVVDVSHEDPEVKFNWYVDGVEVHNAKTKPREEQYNSTYRVVSVLTVLHQDWLNGKEYKCKVSNKALPAPIEKTISKAKGQPREPQVYTLPPSREEMTKNQVSLTCLVKGFYPSDIAVEWESNGQPENNYKTTPPVLDSDGSFFLYSKLTVDKSRWQQGNVFSCSVMHEALHNHYTQKSLSLSPG

SEQ ID NO: 2550 - protein, 444 aa, Artificial Sequence
  source: /note="Description of Artificial Sequence: Synthetic heavy chain variable domain"
QVQLVESGGGVVQPGRSLRLSCAASGFTFSNYALHWVRQAPGKGLEWVALISYSGSRKHYADSVKGRFSISRDNSKNTLYLQMNSLRAEDTAVYYCASLTYVREWGQGTLVTVSSASTKGPSVFPLAPSSKSTSGGTAALGCLVKDYFPEPVTVSWNSGALTSGVHTFPAVLQSSGLYSLSSVVTVPSSSLGTQTYICNVNHKPSNTKVDKRVEPKSCDKTHTCPPCPAPELLGGPSVFLFPPKPKDTLMISRTPEVTCVVVDVSHEDPEVKFNWYVDGVEVHNAKTKPREEQYNSTYRVVSVLTVLHQDWLNGKEYKCKVSNKALPAPIEKTISKAKGQPREPQVYTLPPSREEMTKNQVSLTCLVKGFYPSDIAVEWESNGQPENNYKTTPPVLDSDGSFFLYSKLTVDKSRWQQGNVFSCSVMHEALHNHYTQKSLSLSPG

SEQ ID NO: 2551 - protein, 444 aa, Artificial Sequence
  source: /note="Description of Artificial Sequence: Synthetic heavy chain variable domain"
QVQLVESGGGVVQPGRSLRLSCAASGFTFSNYALHWVRQAPGKGLEWVALISYDSSRKHYADSVKGRFSISRDNSKNTLYLQMNSLRAEDTAVYYCASLTYVREWGQGTLVTVSSASTKGPSVFPLAPSSKSTSGGTAALGCLVKDYFPEPVTVSWNSGALTSGVHTFPAVLQSSGLYSLSSVVTVPSSSLGTQTYICNVNHKPSNTKVDKRVEPKSCDKTHTCPPCPAPELLGGPSVFLFPPKPKDTLMISRTPEVTCVVVDVSHEDPEVKFNWYVDGVEVHNAKTKPREEQYNSTYRVVSVLTVLHQDWLNGKEYKCKVSNKALPAPIEKTISKAKGQPREPQVYTLPPSREEMTKNQVSLTCLVKGFYPSDIAVEWESNGQPENNYKTTPPVLDSDGSFFLYSKLTVDKSRWQQGNVFSCSVMHEALHNHYTQKSLSLSPG

SEQ ID NO: 2552 - protein, 446 aa, Artificial Sequence
  source: /note="Description of Artificial Sequence: Synthetic heavy chain variable domain"
EVQLVQSGGGLVQPGGSLRLSCAGSGFTFSSYAMYWVRQAPGKGLEWVSAIDTDGGTFYADSVRGRFTISRDNAKNSLYLQMNSLRAEDTAVYFCARLGEGYFFDYWGQGTLVTVSSASTKGPSVFPLAPSSKSTSGGTAALGCLVKDYFPEPVTVSWNSGALTSGVHTFPAVLQSSGLYSLSSVVTVPSSSLGTQTYICNVNHKPSNTKVDKRVEPKSCDKTHTCPPCPAPELLGGPSVFLFPPKPKDTLMISRTPEVTCVVVDVSHEDPEVKFNWYVDGVEVHNAKTKPREEQYNSTYRVVSVLTVLHQDWLNGKEYKCKVSNKALPAPIEKTISKAKGQPREPQVYTLPPSREEMTKNQVSLTCLVKGFYPSDIAVEWESNGQPENNYKTTPPVLDSDGSFFLYSKLTVDKSRWQQGNVFSCSVMHEALHNHYTQKSLSLSPG

SEQ ID NO: 2553 - protein, 446 aa, Artificial Sequence
  source: /note="Description of Artificial Sequence: Synthetic heavy chain variable domain"
EVQLVESGGGLVQPGGSLRLSCAASGFTFSSYDMHWVRQTTGKGLEWVSVIGTAGDTYYPGSVKGRFTISRENAKNSLYLQMNSLRAGDTAVYYCARGGMGNYFDYWGQGTLVTVSSASTKGPSVFPLAPSSKSTSGGTAALGCLVKDYFPEPVTVSWNSGALTSGVHTFPAVLQSSGLYSLSSVVTVPSSSLGTQTYICNVNHKPSNTKVDKRVEPKSCDKTHTCPPCPAPELLGGPSVFLFPPKPKDTLMISRTPEVTCVVVDVSHEDPEVKFNWYVDGVEVHNAKTKPREEQYNSTYRVVSVLTVLHQDWLNGKEYKCKVSNKALPAPIEKTISKAKGQPREPQVYTLPPSREEMTKNQVSLTCLVKGFYPSDIAVEWESNGQPENNYKTTPPVLDSDGSFFLYSKLTVDKSRWQQGNVFSCSVMHEALHNHYTQKSLSLSPG

SEQ ID NO: 2554 - protein, 449 aa, Artificial Sequence
  source: /note="Description of Artificial Sequence: Synthetic heavy chain variable domain"
QVQLVQSGAEVKKPGASVKVSCKASGYTFTSYDVNWVRQATGQGLEWMGWMNPNSGNTGYAPKFQGRVTMTRDTSISTAYMELSSLRSEDTAVYYCARIYSSSYNWFDYWGQGTLVTVSSASTKGPSVFPLAPSSKSTSGGTAALGCLVKDYFPEPVTVSWNSGALTSGVHTFPAVLQSSGLYSLSSVVTVPSSSLGTQTYICNVNHKPSNTKVDKRVEPKSCDKTHTCPPCPAPELLGGPSVFLFPPKPKDTLMISRTPEVTCVVVDVSHEDPEVKFNWYVDGVEVHNAKTKPREEQYNSTYRVVSVLTVLHQDWLNGKEYKCKVSNKALPAPIEKTISKAKGQPREPQVYTLPPSREEMTKNQVSLTCLVKGFYPSDIAVEWESNGQPENNYKTTPPVLDSDGSFFLYSKLTVDKSRWQQGNVFSCSVMHEALHNHYTQKSLSLSPG

SEQ ID NO: 2555 - protein, 444 aa, Artificial Sequence
  source: /note="Description of Artificial Sequence: Synthetic heavy chain variable domain"
QVQLVESGGGVVQPGRSLRLSCAASGFTFSNYALHWVRQAPGKGLEWVALISYDGSRKHYADSVKGRFSISRDNSKNTLYLQMNSLRAEDTAVYYCASLTLVREWGQGTLVTVSSASTKGPSVFPLAPSSKSTSGGTAALGCLVKDYFPEPVTVSWNSGALTSGVHTFPAVLQSSGLYSLSSVVTVPSSSLGTQTYICNVNHKPSNTKVDKRVEPKSCDKTHTCPPCPAPELLGGPSVFLFPPKPKDTLMISRTPEVTCVVVDVSHEDPEVKFNWYVDGVEVHNAKTKPREEQYNSTYRVVSVLTVLHQDWLNGKEYKCKVSNKALPAPIEKTISKAKGQPREPQVYTLPPSREEMTKNQVSLTCLVKGFYPSDIAVEWESNGQPENNYKTTPPVLDSDGSFFLYSKLTVDKSRWQQGNVFSCSVMHEALHNHYTQKSLSLSPG

SEQ ID NO: 2556 - protein, 446 aa, Artificial Sequence
  source: /note="Description of Artificial Sequence: Synthetic heavy chain variable domain"
EVQLVQSGGGLVQPGGSLRLSCAGSGFTFSSYAMYWVRQAPGKGLEWVSAIDTSGGTFYADSVRGRFTISRDNAKNSLYLQMNSLRAEDTAVYFCARLGEGYFFDYWGQGTLVTVSSASTKGPSVFPLAPSSKSTSGGTAALGCLVKDYFPEPVTVSWNSGALTSGVHTFPAVLQSSGLYSLSSVVTVPSSSLGTQTYICNVNHKPSNTKVDKRVEPKSCDKTHTCPPCPAPELLGGPSVFLFPPKPKDTLMISRTPEVTCVVVDVSHEDPEVKFNWYVDGVEVHNAKTKPREEQYNSTYRVVSVLTVLHQDWLNGKEYKCKVSNKALPAPIEKTISKAKGQPREPQVYTLPPSREEMTKNQVSLTCLVKGFYPSDIAVEWESNGQPENNYKTTPPVLDSDGSFFLYSKLTVDKSRWQQGNVFSCSVMHEALHNHYTQKSLSLSPG

SEQ ID NO: 2557 - protein, 446 aa, Artificial Sequence
  source: /note="Description of Artificial Sequence: Synthetic heavy chain variable domain"
EVQLVQSGGGLVQPGGSLRLSCAGSGFTFSSYAMYWVRQAPGKGLEWVSAIDTDAGTFYADSVRGRFTISRDNAKNSLYLQMNSLRAEDTAVYFCARLGEGYFFDYWGQGTLVTVSSASTKGPSVFPLAPSSKSTSGGTAALGCLVKDYFPEPVTVSWNSGALTSGVHTFPAVLQSSGLYSLSSVVTVPSSSLGTQTYICNVNHKPSNTKVDKRVEPKSCDKTHTCPPCPAPELLGGPSVFLFPPKPKDTLMISRTPEVTCVVVDVSHEDPEVKFNWYVDGVEVHNAKTKPREEQYNSTYRVVSVLTVLHQDWLNGKEYKCKVSNKALPAPIEKTISKAKGQPREPQVYTLPPSREEMTKNQVSLTCLVKGFYPSDIAVEWESNGQPENNYKTTPPVLDSDGSFFLYSKLTVDKSRWQQGNVFSCSVMHEALHNHYTQKSLSLSPG

SEQ ID NO: 2558 - protein, 446 aa, Artificial Sequence
  source: /note="Description of Artificial Sequence: Synthetic heavy chain variable domain"
EVQLVQSGGGLVQPGGSLRLSCAGSGFTFSSYAMYWVRQAPGKGLEWVSAIDTSTGTFYADSVRGRFTISRDNAKNSLYLQMNSLRAEDTAVYFCARLGEGYFFDYWGQGTLVTVSSASTKGPSVFPLAPSSKSTSGGTAALGCLVKDYFPEPVTVSWNSGALTSGVHTFPAVLQSSGLYSLSSVVTVPSSSLGTQTYICNVNHKPSNTKVDKRVEPKSCDKTHTCPPCPAPELLGGPSVFLFPPKPKDTLMISRTPEVTCVVVDVSHEDPEVKFNWYVDGVEVHNAKTKPREEQYNSTYRVVSVLTVLHQDWLNGKEYKCKVSNKALPAPIEKTISKAKGQPREPQVYTLPPSREEMTKNQVSLTCLVKGFYPSDIAVEWESNGQPENNYKTTPPVLDSDGSFFLYSKLTVDKSRWQQGNVFSCSVMHEALHNHYTQKSLSLSPG

SEQ ID NO: 2559 - protein, 228 aa, Artificial Sequence
  source: /note="Description of Artificial Sequence: Synthetic heavy chain variable domain"
EVQLVESGGGLVQPGGSLRLSCAASGFTFTNYGIHWIRQAPGKGLEWVASISPSGGLTYYRDSVKGRFTISRDDAKNSPYLQMNSLRAEDTAVYYCATGGEGIFDYWGQGTLVTVSSASTKGPSVFPLAPSSKSTSGGTAALGCLVKDYFPEPVTVSWNSGALTSGVHTFPAVLQSSGLYSLSSVVTVPSSSLGTQTYICNVNHKPSNTKVDKKVEPKSCDKTHTCAA

SEQ ID NO: 2560 - protein, 120 aa, Artificial Sequence
  source: /note="Description of Artificial Sequence: Synthetic heavy chain variable domain"
QVQLVQSGAEVKKPGASVKVSCKASGNTFTSYDVNWVRQATGQGLEWMGWMNPNSGNTGYAPKFQGRVTMTRNTSISTAYMELSSLRSEDTAVYYCARIYSSSYNWFDPWGQGTLVTVSS

SEQ ID NO: 2561 - protein, 118 aa, Artificial Sequence
  source: /note="Description of Artificial Sequence: Synthetic heavy chain variable domain"
EVQLEQSGAEVKKPGESLKISCKGSGYSFTSNWIGWVRQMPGKGLEWMGFIYPGDSDTRYSPSFQGQVTISADKSISTAYLQWSSLKASDIAMYYCARYGDDWYFDLWGRGTLVTVSS

SEQ ID NO: 2562 - protein, 107 aa, Artificial Sequence
  source: /note="Description of Artificial Sequence: Synthetic heavy chain variable domain"
EIVLTQSPATLSLSPGERATLSCRASQSVSSYLAWFQQRPGQAPRLLIYDASNRATGIPARFSGSGSGTDFSLTISSLEPEDFAVYYCQQRGDWPITFGQGTRLEIK

SEQ ID NO: 2563 - protein, 451 aa, Artificial Sequence
  source: /note="Description of Artificial Sequence: Synthetic heavy chain variable domain"
EVQLVESGGGLVQPGGSLRLSCAASGFTFSNYTMNWVRQAPGKGLEWVSAISGSGGSTYYADSVKGRFTISRDNSKNTLYLQMNSLRAEDTAVYYCAKDRYSQVHYALDYWGQGTLVTVSSASTKGPSVFPLAPSSKSTSGGTAALGCLVKDYFPEPVTVSWNSGALTSGVHTFPAVLQSSGLYSLSSVVTVPSSSLGTQTYICNVNHKPSNTKVDKRVEPKSCDKTHTCPPCPAPELLGGPSVFLFPPKPKDTLMISRTPEVTCVVVDVSHEDPEVKFNWYVDGVEVHNAKTKPREEQYNSTYRVVSVLTVLHQDWLNGKEYKCKVSNKALPAPIEKTISKAKGQPREPQVYTLPPSREEMTKNQVSLTCLVKGFYPSDIAVEWESNGQPENNYKTTPPVLDSDGSFFLYSKLTVDKSRWQQGNVFSCSVMHEALHNHYTQKSLSLSPGK

SEQ ID NO: 2564 - protein, 117 aa, Artificial Sequence
  source: /note="Description of Artificial Sequence: Synthetic heavy chain variable domain"
EVQLVQSGGGLVQPGGSLRLSCAGSGFTFSSYAMYWVRQAPGKGLEWVSAIDTDAGTFYADSVRGRFTISRDNAKNSLYLQMNSLRAEDTAVYFCARLGEGYFFDYWGQGTLVTVSS

SEQ ID NO: 2565 - protein, 121 aa, Artificial Sequence
  source: /note="Description of Artificial Sequence: Synthetic heavy chain variable domain"
QVQLQESGPGLVKPSQTLSLTCAVYGGSFSSGYWNWIRQHPGKGLEWIGYISYNGITYHNPSLKSRITINPDTSKNQFSLQLNSVTPEDTAVYYCARYRYDYDGGHAMDYWGQGTLVTVSS

SEQ ID NO: 2566 - protein, 450 aa, Artificial Sequence
  source: /note="Description of Artificial Sequence: Synthetic heavy chain variable domain"
EVQLVESGGGLVHPGGSLRLSCAGSGFTFSSYAMHWVRQAPGKGLEWVSAIGTGGGTYYADSVMGRFTISRDNSKNTLYLQMNSLRAEDTAVYYCARYDNVMGLYWFDYWGQGTLVTVSSASTKGPSVFPLAPSSKSTSGGTAALGCLVKDYFPEPVTVSWNSGALTSGVHTFPAVLQSSGLYSLSSVVTVPSSSLGTQTYICNVNHKPSNTKVDKRVEPKSCDKTHTCPPCPAPELLGGPSVFLFPPKPKDTLMISRTPEVTCVVVDVSHEDPEVKFNWYVDGVEVHNAKTKPREEQYNSTYRVVSVLTVLHQDWLNGKEYKCKVSNKALPAPIEKTISKAKGQPREPQVYTLPPSREEMTKNQVSLTCLVKGFYPSDIAVEWESNGQPENNYKTTPPVLDSDGSFFLYSKLTVDKSRWQQGNVFSCSVMHEALHNHYTQKSLSLSPGK

SEQ ID NO: 2567 - protein, 121 aa, Artificial Sequence
  source: /note="Description of Artificial Sequence: Synthetic heavy chain variable domain"
QVQLQESGPGLVKPSQTLSLTCAVYGGSFSSGYWNWIRKHPGKGLEWIGYISYNGITYHNPSLKSRITINRDTSKNQFSLQLNSVTPEDTAVYYCARYRYDYDGGHAMDYWGQGTLVTVSS

SEQ ID NO: 2568 - protein, 118 aa, Artificial Sequence
  source: /note="Description of Artificial Sequence: Synthetic heavy chain variable domain"
EVQLVESGGGLVQPGGSLRLSCAASGFTFSSYSMNWVRQAPGKGLEWVSYISSSSSTIDYADSVKGRFTISRDNAKNSLYLQMNSLRDEDTAVYYCARESGWYLFDYWGQGTLVTVSS

SEQ ID NO: 2569 - protein, 121 aa, Artificial Sequence
  source: /note="Description of Artificial Sequence: Synthetic heavy chain variable domain"
QVQLQESGPGLVKPSQTLSLTCAVYGDSFSSGYWNWIRKHPGKGLEYMGYISYNGITYHNPSLKSRITINRDTSKNQYSLQLNSVTPEDTAVYFCARYRYDYDGGHAMDYWGQGTLVTVSS

SEQ ID NO: 2570 - protein, 117 aa, Artificial Sequence
  source: /note="Description of Artificial Sequence: Synthetic heavy chain variable domain"
EVQLVQSGGGLVHPGGSLRLSCAGSGFTFSNYAMYWVRQAPGKGLEWVSAIGIGGDTFYTDSVKGRFTISRDNAKNSLSLQMNSLRAEDMAVYYCARMGTGYFFDYWGQGTLVTVSS

SEQ ID NO: 2571 - protein, 124 aa, Artificial Sequence
  source: /note="Description of Artificial Sequence: Synthetic heavy chain variable domain"
EVQLVESGGGLVQPGRSLRLSCAASGFTFDDYAMHWVRQAPGKGLEWVSGISWNSGSIGYADSVKGRFTISRDNAKNSLYLQMNSLRAEDTALYYCAKDQSTADYYFYYGMDVWGQGTTVTVSS

SEQ ID NO: 2572 - protein, 121 aa, Artificial Sequence
  source: /note="Description of Artificial Sequence: Synthetic heavy chain variable domain"
QVQLQESGPGLVKPSQTLSLTCAVYGDSFSSGYWNWIRKHPGKGLEYIGYISYNGITYHNPSLKSRITINRDTSKNQYSLQLNSVTPEDTAVYFCARYRYDYDGGHAMDYWGQGTLVTVSS

SEQ ID NO: 2573 - protein, 122 aa, Artificial Sequence
  source: /note="Description of Artificial Sequence: Synthetic heavy chain variable domain"
QVQLVQSGSELKKPGASVKVSCKASGYTFTDYSMHWVRQAPGQGLKWMGWINTETGEPTYADDFKGRFVFSLDTSVSTAYLQISSLKAEDTAVYYCANPYYDYVSYYAMDYWGQGTTVTVSS

SEQ ID NO: 2574 - protein, 121 aa, Artificial Sequence
  source: /note="Description of Artificial Sequence: Synthetic heavy chain variable domain"
QVQLQESGPGLVKPSQTLSLTCAVYGDSFSSGYWNWIRKHPGKGLEYIGYISYNGITYHNPSLKSRITINRDTSKNQFSLQLNSVTPEDTAVYFCARYRYDYDGGHAMDYWGQGTLVTVSS

SEQ ID NO: 2575 - protein, 120 aa, Artificial Sequence
  source: /note="Description of Artificial Sequence: Synthetic heavy chain variable domain"
EVQLVESGGGLVQPGGSLRLSCAASEYEFPSHDMSWVRQAPGKGLELVAAINSDGGSTYYPDTMERRFTISRDNAKNSLYLQMNSLRAEDTAVYYCARHYDDYYAWFAYWGQGTMVTVSS

SEQ ID NO: 2576 - protein, 121 aa, Artificial Sequence
  source: /note="Description of Artificial Sequence: Synthetic heavy chain variable domain"
QVQLQESGPGLVKPSQTLSLTCAVYGDSFSSGYWNWIRKHPGKGLEYIGYISYNGITYHNPSLKSRITINRDTSKNQYSLQLNSVTPEDTAVYYCARYRYDYDGGHAMDYWGQGTLVTVSS

SEQ ID NO: 2577 - protein, 469 aa, Artificial Sequence [sequence omitted]

SEQ ID NO: 2578 - protein, 136 aa, Artificial Sequence
  source: /note="Description of Artificial Sequence: Synthetic heavy chain variable domain"
MDTLCSTLLLLTIPSWVLSQITLKESGPTLVKPTQTLTLSCTFSGFSLSTSGVGVGWIRQPPGKALEWLALIHWDDAERYSPSLKSRLTITKDTSKNQVVLTMTNMDLVDTATYYCAHTRGAFDIWGQGTMVTVSS

SEQ ID NO: 2579 - protein, 121 aa, Artificial Sequence
  source: /note="Description of Artificial Sequence: Synthetic heavy chain variable domain"
QVQLQESGPGLVKPSQTLSLTCAVYGDSFSSGYWNWIRKHPGKGLEYIGYISYNGITYHNPSLKSRITINRDTSKNQFSLQLNSVTPEDTAVYYCARYRYDYDGGHAMDYWGQGTLVTVSS

SEQ ID NO: 2580 - protein, 119 aa, Artificial Sequence
  source: /note="Description of Artificial Sequence: Synthetic heavy chain variable domain"
EVQLQQSGPELVKPGASVKMSCKASGYTFTSYVMHWVKQKPGQGLEWIGYINPYNDGTKYNEKFKGKATLTSDKSSSTAYMELSSLTSEDSAVYYCANYYGSSLSMDYWGQGTSVTVSS

SEQ ID NO: 2581 - protein, 136 aa, Artificial Sequence
  source: /note="Description of Artificial Sequence: Synthetic heavy chain variable domain"
MDTLCSTLLLLTIPSWVLSQITLKESGPTLVKPTQTLTLTCTFSGFSLSTSGVGVGWIRQPPGKALEWLALIYWDDHSPYSPSLKSRLTITKDTSKNQVVLTMTNMDPVDTATYYCARTRGAFDIWGQGTMVTVSS

SEQ ID NO: 2582 - protein, 121 aa, Artificial Sequence
  source: /note="Description of Artificial Sequence: Synthetic heavy chain variable domain"
QVQLQESGPGLVKPSQTLSLTCAVYGGSFSSGYWNWIRKHPGKGLEYIGYISYNGITYHNPSLKSRITINPDTSKNQYSLQLNSVTPEDTAVYFCARYRYDYDGGHAMDYWGQGTLVTVSS

SEQ ID NO: 2583 - protein, 121 aa, Artificial Sequence
  source: /note="Description of Artificial Sequence: Synthetic heavy chain variable domain"
EVQLQQSGPELVKPGASVKISCKTSGYTFKDYTMHWVKQSHGKSLEWIGGIYPNNGGSTYNQNFKDKATLTVDKSSSTAYMEFRSLTSEDSAVYYCARMGYHGPHLDFDVWGAGTTVTVSP

SEQ ID NO: 2584 - protein, 154 aa, Artificial Sequence
  source: /note="Description of Artificial Sequence: Synthetic heavy chain variable domain"
MTMITPSLVPSSDPLVTAASVLEFALLIRLTIGQAVVSTQSTGGGLVQPGRSLRLSCAASGFTLDDYGMHWVRQAPGKGLEWVSGISWNSDSIGYVDSVKGRFTISRDNAKNSLYLQMNSLRVEDTALYYCVKDISGWYSFDYWGQGTLVTVSS

SEQ ID NO: 2585 - protein, 121 aa, Artificial Sequence
  source: /note="Description of Artificial Sequence: Synthetic heavy chain variable domain"
QVQLVESGGGVVQPGRSLRLSCAASGFTFSSFAMHWVRQAPGKGLEWVTVISYDGSIKYYTDSVKGRFTFSRDNSKNTLYLQMNSLRAEDTAVYYCTRDGNYGSARYFQHWGQGTLVTVSS

SEQ ID NO: 2586 - protein, 121 aa, Artificial Sequence
  source: /note="Description of Artificial Sequence: Synthetic heavy chain variable domain"
QVQLQESGPGLVKPSQTLSLTCAVYGGSFSSGYWNWIRKHPGKGLEYIGYISYNGITYHNPSLKSRITINRDTSKNQYSLQLNSVTPEDTAVYFCARYRYDYDGGHAMDYWGQGTLVTVSS

SEQ ID NO: 2587 - protein, 119 aa, Artificial Sequence
  source: /note="Description of Artificial Sequence: Synthetic heavy chain variable domain"
QVQLVQSGAEVKKPGASVKVSCKASGYTFTSYVMHWVRQAPGQRLEWMGYINPYNDGTKYNEKFKGRVTITSDTSASTAYMELSSLRSEDTAVYYCANYYGSSLSMDYWGQGTLVTVSS

SEQ ID NO: 2588 - protein, 107 aa, Artificial Sequence
  source: /note="Description of Artificial Sequence: Synthetic heavy chain variable domain"
EIVLTQSPATLSLSPGERATLSCRASQSVSSYLAWYQQKPGQAPRLLIYDASNRATGIPARFSGSGSGTDFTLTISSLEPEDFAVYYCQQRSNWPYTFGQGTKLEIK

SEQ ID NO: 2589 - protein, 121 aa, Artificial Sequence
  source: /note="Description of Artificial Sequence: Synthetic heavy chain variable domain"
QVQLQESGPGLVKPSQTLSLTCAVYGGSFSSGYWNWIRKHPGKGLEYIGYISYNGITYHNPSLKSRITINRDTSKNQYSLQLNSVTPEDTAVYYCARYRYDYDGGHAMDYWGQGTLVTVSS

SEQ ID NO: 2590 - protein, 119 aa, Artificial Sequence
  source: /note="Description of Artificial Sequence: Synthetic heavy chain variable domain"
QVQLVQSGAEVKKPGASVKVSCKASGYTFTSYVMHWVRQAPGQRLEWIGYINPYNDGTKYNEKFKGRATITSDTSASTAYMELSSLRSEDTAVYYCANYYGSSLSMDYWGQGTLVTVSS

SEQ ID NO: 2591 - protein, 121 aa, Artificial Sequence
  source: /note="Description of Artificial Sequence: Synthetic heavy chain variable domain"
QVQLQESGPGLVKPSQTLSLTCAVYGGSFSSGYWNWIRKHPGKGLEYIGYISYNGITYHNPSLKSRITINPDTSKNQYSLQLNSVTPEDTAVYYCARYRYDYDGGHAMDYWGQGTLVTVSS

SEQ ID NO: 2592 - protein, 119 aa, Artificial Sequence
  source: /note="Description of Artificial Sequence: Synthetic heavy chain variable domain"
QVQLVQSGAEVKKPGASVKVSCKASGYTFTSYVMHWVRQAPGQRLEWIGYINPYNDGTKYNEKFKGRATLTSDKSASTAYMELSSLRSEDTAVYYCANYYGSSLSMDYWGQGTLVTVSS

SEQ ID NO: 2593 - protein, 121 aa, Artificial Sequence
  source: /note="Description of Artificial Sequence: Synthetic heavy chain variable domain"
QVQLVQSGAEVKKPGSSVKVSCKASGYTFKDYTMHWVRQAPGQGLEWMGGIYPNNGGSTYNQNFKDRVTITADKSTSTAYMELSSLRSEDTAVYYCARMGYHGPHLDFDVWGQGTTVTVSS

SEQ ID NO: 2594 - protein, 121 aa, Artificial Sequence
  source: /note="Description of Artificial Sequence: Synthetic heavy chain variable domain"
QVQLQESGPGLVKPSQTLSLTCAVYGGSFSSGYWNWIRKHPGKGLEYIGYISYNAITYHNPSLKSRITINRDTSKNQYSLQLNSVTPEDTAVYYCARYKYDYDAGHAMDYWGQGTLVTVSS

SEQ ID NO: 2595 - protein, 121 aa, Artificial Sequence
  source: /note="Description of Artificial Sequence: Synthetic heavy chain variable domain"
QVQLQESGPGLVKPSQTLSLTCAVYGGSFSSGYWNWIRKHPGKGLEYIGYISYNAITYHNPSLKSRITINRDTSKNQYSLQLNSVTPEDTAVYYCARYRYDYDGGHAMDYWGQGTLVTVSS

SEQ ID NO: 2596 - protein, 121 aa, Artificial Sequence
  source: /note="Description of Artificial Sequence: Synthetic heavy chain variable domain"
QVQLVQSGAEVKKPGSSVKVSCKASGYTFKDYTMHWVRQAPGQGLEWIGGIYPNNGGSTYNQNFKDRVTLTADKSTSTAYMELSSLRSEDTAVYYCARMGYHGPHLDFDVWGQGTTVTVSS

SEQ ID NO: 2597 - protein, 107 aa, Artificial Sequence
  source: /note="Description of Artificial Sequence: Synthetic heavy chain variable domain"
DIQMTQSPSSVSASVGDRVTITCRASQGISSWLAWYQHKPGKAPKLLIYAASSLQSGVPSRFSGSGSGTDFTLTISSLQPEDFATYYCQQANSFPSTFGQGTKVEIK

SEQ ID NO: 2598 - protein, 121 aa, Artificial Sequence
  source: /note="Description of Artificial Sequence: Synthetic heavy chain variable domain"
QVQLVQSGAEVKKPGSSVKVSCKASGYTFKDYTMHWVRQAPGQGLEWIGGIYPNNGGSTYNQNFKDRATLTVDKSTSTAYMELSSLRSEDTAVYYCARMGYHGPHLDFDVWGQGTTVTVSS

SEQ ID NO: 2599 - protein, 121 aa, Artificial Sequence
  source: /note="Description of Artificial Sequence: Synthetic heavy chain variable domain"
QVQLQESGPGLVKPSQTLSLTCAVYGGSFSSGYWNWIRKHPGKGLEYIGYISYNGITYHNPSLKSRITINRDTSKNQYSLQLNSVTPEDTAVYYCARYKYDYDGGHAMDYWGQGTLVTVSS

SEQ ID NO: 2600 - protein, 138 aa, Artificial Sequence
  source: /note="Description of Artificial Sequence: Synthetic heavy chain variable domain"
MYLGLNYVFIVFLLNGVQSEVKLEESGGGLVQPGGSMKLSCAASGFTFSDAWMDWVRQSPEKGLEWVAEIRSKANNHATYYAESVNGRFTISRDDSKSSVYLQMNSLRAEDTGIYYCTWGEVFYFDYWGQGTTLTVSS

SEQ ID NO: 2601 - protein, 121 aa, Artificial Sequence
  source: /note="Description of Artificial Sequence: Synthetic heavy chain variable domain"
QVQLQESGPGLVKPSQTLSLTCAVYGGSFSSGYWNWIRKHPGKGLEYIGYISYSGITYHNPSLKSRITINRDTSKNQYSLQLNSVTPEDTAVYYCARYRYDYDGGHAMDYWGQGTLVTVSS

SEQ ID NO: 2602 - protein, 121 aa, Artificial Sequence
  source: /note="Description of Artificial Sequence: Synthetic heavy chain variable domain"
QVQLQESGPGLVKPSQTLSLTCAVYGGSFSSGYWNWIRKHPGKGLEYIGYISYSGITYHNPSLKSRITINRDTSKNQYSLQLNSVTPEDTAVYYCARYKYDYDGGHAMDYWGQGTLVTVSS

SEQ ID NO: 2603 - protein, 121 aa, Artificial Sequence
  source: /note="Description of Artificial Sequence: Synthetic heavy chain variable domain"
EVQLQESGPSLVKPSQTLSLTCSVTGDSFTSGYWNWIRKFPGNRLEYMGYISYNAITYHNPSLKSRISITRDTSKNHYYLQLNSVTTEDTATYFCARYRYDYDGGHAMDYWGQGTLVTVSS

SEQ ID NO: 2604 - protein, 107 aa, Artificial Sequence [sequence omitted]

SEQ ID NO: 2605 - protein, 121 aa, Artificial Sequence
  source: /note="Description of Artificial Sequence: Synthetic heavy chain variable domain"
QVQLQESGPGLVKPSQTLSLTCAVYGGSFSSGYWNWIRKHPGKGLEYIGYISYNAITYHNPSLKSRITINRDTSKNQYSLQLNSVTPEDTAVYYCARYKYDYDGGHAMDYWGQGTLVTVSS

SEQ ID NO: 2606 - protein, 140 aa, Artificial Sequence
  source: /note="Description of Artificial Sequence: Synthetic heavy chain variable domain"
MEWGPCWVFLVVILEGVQCGVQLVESGGGLVQPGGSLRLSCAASGFTFSSYSMNWVRQAPGKGLEWVSYISSSSSTIYYADSVKGRFTISRDNAKNSLYLQMNSLRDEDTAVYYCARGVYHNGWSFFDYWGQGTLLTVSS

SEQ ID NO: 2607 - protein, 451 aa, Artificial Sequence
  source: /note="Description of Artificial Sequence: Synthetic heavy chain variable domain"
QVQLQESGPGLVKPSQTLSLTCAVYGGSFSSGYWNWIRKHPGKGLEYIGYISYNGITYHNPSLKSRITINRDTSKNQYSLQLNSVTPEDTAVYYCARYKYDYDGGHAMDYWGQGTLVTVSSASTKGPSVFPLAPSSKSTSGGTAALGCLVKDYFPEPVTVSWNSGALTSGVHTFPAVLQSSGLYSLSSVVTVPSSSLGTQTYICNVNHKPSNTKVDKRVEPKSCDKTHTCPPCPAPELLGGPSVFLFPPKPKDTLMISRTPEVTCVVVDVSHEDPEVKFNWYVDGVEVHNAKTKPREEQYNSTYRVVSVLTVLHQDWLNGKEYKCKVSNKALPAPIEKTISKAKGQPREPQVYTLPPSREEMTKNQVSLTCLVKGFYPSDIAVEWESNGQPENNYKTTPPVLDSDGSFFLYSKLTVDKSRWQQGNVFSCSVMHEALHNHYTQKSLSLSPGK

SEQ ID NO: 2608 - protein, 107 aa, Artificial Sequence
  source: /note="Description of Artificial Sequence: Synthetic heavy chain variable domain"
EIVLTQSPATLSLSPGERATLSCRASQSVSSYLAWYQQKPGQAPRLLIYDASNRATGIPARFSGSGSGTDFTLTISSLEPEDFAVYYCQQRSNWPLTFGGGTKVEIK

SEQ ID NO: 2609 - protein, 108 aa, Artificial Sequence
  source: /note="Description of Artificial Sequence: Synthetic heavy chain variable domain"
EIVLTQSPGTLSLSPGERATLSCRASQSVSSSYLAWYQQKPGQAPRLLIYGASSRATGIPDRFSGSGSGTDFTLTISRLEPEDFAVYYCQQYGSSPFTFGPGTKVDIK

SEQ ID NO: 2610 - protein, 117 aa, Artificial Sequence
  source: /note="Description of Artificial Sequence: Synthetic heavy chain variable domain"
EVQLVESGGGLVQPGGSLRLSCAASGFTFTNYGIHWIRQAPGKGLEWVASISPSGGLTYYRDSVKGRFTISRDDAKNSPYLQMNSLRAEDTAVYYCATGGEGIFDYWGQGTLVTVSS

SEQ ID NO: 2611 - protein, 141 aa, Artificial Sequence
  source: /note="Description of Artificial Sequence: Synthetic heavy chain variable domain"
MDTLCSTLLLLTIPSWVLSQITLKESGPTLVKPKQTLTLTCTFSGFSLSTSGMGVGWIRQPPGKALEWLAVIYWDDHQLYSPSLKSRLTITKDTSKNQVVLTMTNMDPVDTATYYCAHRRGAFQHWGQGTLVTVSSASTKG

SEQ ID NO: 2612 - protein, 117 aa, Artificial Sequence
  source: /note="Description of Artificial Sequence: Synthetic heavy chain variable domain"
EAQLVQSGGGLVHPGGSLRLSCADSGFTFSSYAMYWVRQAPGKGLEWVSAIDTDGGTFYADSVRGRFTISRDNAKNSLYLQMNGLRAEDMAVYFCARLGEGYFFDYWGQGTLVTVSS

SEQ ID NO: 2613 - protein, 446 aa, Artificial Sequence
  source: /note="Description of Artificial Sequence: Synthetic heavy chain variable domain"
EVQLVQSGGGLVQPGGSLRLSCAGSGFTFSNYAMYWVRQAPGKGLEWVSAIGIGGDTFYTDSVKGRFTISRDNAKNSLSLQMNSLRAEDTAVYYCARMGTGYFFDYWGQGTLVTVSSASTKGPSVFPLAPSSKSTSGGTAALGCLVKDYFPEPVTVSWNSGALTSGVHTFPAVLQSSGLYSLSSVVTVPSSSLGTQTYICNVNHKPSNTKVDKRVEPKSCDKTHTCPPCPAPELLGGPSVFLFPPKPKDTLMISRTPEVTCVVVDVSHEDPEVKFNWYVDGVEVHNAKTKPREEQYNSTYRVVSVLTVLHQDWLNGKEYKCKVSNKALPAPIEKTISKAKGQPREPQVYTLPPSREEMTKNQVSLTCLVKGFYPSDIAVEWESNGQPENNYKTTPPVLDSDGSFFLYSKLTVDKSRWQQGNVFSCSVMHEALHNHYTQKSLSLSPG

SEQ ID NO: 2614 - protein, 446 aa, Artificial Sequence
  source: /note="Description of Artificial Sequence: Synthetic heavy chain variable domain"
EVQLVQSGGGLVHPGGSLRLSCAGSGFTFSNYAMYWVRQAPGKGLEWVSAIGIGGDTFYTDSVKGRFTISRDNAKNSLSLQMNSLRAEDTAVYYCARYGTGYFFDYWGQGTLVTVSSASTKGPSVFPLAPSSKSTSGGTAALGCLVKDYFPEPVTVSWNSGALTSGVHTFPAVLQSSGLYSLSSVVTVPSSSLGTQTYICNVNHKPSNTKVDKRVEPKSCDKTHTCPPCPAPELLGGPSVFLFPPKPKDTLMISRTPEVTCVVVDVSHEDPEVKFNWYVDGVEVHNAKTKPREEQYNSTYRVVSVLTVLHQDWLNGKEYKCKVSNKALPAPIEKTISKAKGQPREPQVYTLPPSREEMTKNQVSLTCLVKGFYPSDIAVEWESNGQPENNYKTTPPVLDSDGSFFLYSKLTVDKSRWQQGNVFSCSVMHEALHNHYTQKSLSLSPG

SEQ ID NO: 2615 - protein, 444 aa, Artificial Sequence
  source: /note="Description of Artificial Sequence: Synthetic heavy chain variable domain"
QVQLVESGGGVVQPGRSLRLSCAASGFTFSNYALHWVRQAPGKGLEWVALISYDGSRKHYADSVKGRFSISRDNSKNTLYLQMNSLRAEDTAVYYCASLTMVREWGQGTLVTVSSASTKGPSVFPLAPSSKSTSGGTAALGCLVKDYFPEPVTVSWNSGALTSGVHTFPAVLQSSGLYSLSSVVTVPSSSLGTQTYICNVNHKPSNTKVDKRVEPKSCDKTHTCPPCPAPELLGGPSVFLFPPKPKDTLMISRTPEVTCVVVDVSHEDPEVKFNWYVDGVEVHNAKTKPREEQYNSTYRVVSVLTVLHQDWLNGKEYKCKVSNKALPAPIEKTISKAKGQPREPQVYTLPPSREEMTKNQVSLTCLVKGFYPSDIAVEWESNGQPENNYKTTPPVLDSDGSFFLYSKLTVDKSRWQQGNVFSCSVMHEALHNHYTQKSLSLSPG

SEQ ID NO: 2616 - protein, 113 aa, Artificial Sequence [sequence omitted]

SEQ ID NO: 2617 - protein, 121 aa, Artificial Sequence
  source: /note="Description of Artificial Sequence: Synthetic heavy chain variable domain"
QVQLVQSGAELKQPGASVKMSCKASGYSFTSSWIHWVKQAPGQGLEWIGYIYPSTGFTEYNQKFKDRATLTADKSTSTAYMELSSLRSEDSAVYYCARWRDSSGYHAMDYWGQGTSVTVSS

SEQ ID NO: 2618 - protein, 121 aa, Artificial Sequence
  source: /note="Description of Artificial Sequence: Synthetic heavy chain variable domain"
QVQLVQSGAEVKQPGASVKMSCKASGYSFTSSWIHWVKQAPGQGLEWIGYIYPSTGFTEYNQKFKDRATLTADKSTSTAYMELSSLRSEDTAVYYCARWRDSSGYHAMDYWGQGTSVTVSS

SEQ ID NO: 2619 - protein, 121 aa, Artificial Sequence
  source: /note="Description of Artificial Sequence: Synthetic heavy chain variable domain"
QVQLVQSGHEVKQPGASVKMSCKASGYSFTSSWIHWVKQAPGQGLEWIGYIYPSTGFTEYNQKFKDRATLTADKSTSTAYMELSSLRSEDTAVYYCARWRDSSGYHAMDYWGQGTLVTVSS

SEQ ID NO: 2620 - protein, 121 aa, Artificial Sequence
  source: /note="Description of Artificial Sequence: Synthetic heavy chain variable domain"
QVQLVQSGHEVKQPGASVKMSCKASGYSFTSSWIHWVRQAPGQGLEWIGYIYPSTGFTEYNQKFKDRATLTADKSTSTAYMELSSLRSEDTAVYYCARWRDSSGYHAMDYWGQGTLVTVSS

SEQ ID NO: 2621 - protein, 444 aa, Artificial Sequence
  source: /note="Description of Artificial Sequence: Synthetic heavy chain variable domain"
QVQLVQSGAEVKKPGASVKVSCKASGYTFTSYWINWVRQAPGQGLEWMGNIYPGSSLTNYNEKFKNRVTMTRDTSTSTVYMELSSLRSEDTAVYYCARLSTGTFAYWGQGTLVTVSSASTKGPSVFPLAPCSRSTSESTAALGCLVKDYFPEPVTVSWNSGALTSGVHTFPAVLQSSGLYSLSSVVTVPSSSLGTKTYTCNVDHKPSNTKVDKRVESKYGPPCPPCPAPEFLGGPSVFLFPPKPKDTLMISRTPEVTCVVVDVSQEDPEVQFNWYVDGVEVHNAKTKPREEQFNSTYRVVSVLTVLHQDWLNGKEYKCKVSNKGLPSSIEKTISKAKGQPREPQVYTLPPSQEEMTKNQVSLTCLVKGFYPSDIAVEWESNGQPENNYKTTPPVLDSDGSFFLYSRLTVDKSRWQEGNVFSCSVMHEALHNHYTQKSLSLSLGK

SEQ ID NO: 2622 - protein, 121 aa, Artificial Sequence
  source: /note="Description of Artificial Sequence: Synthetic heavy chain variable domain"
QVQLVQSGHEVKQPGASVKVSCKASGYSFTSSWIHWVRQAPGQGLEWIGYIYPSTGFTEYNQKFKDRATITADKSTSTAYMELSSLRSEDTAVYYCARWRDSSGYHAMDYWGQGTLVTVSS

SEQ ID NO: 2623 - protein, 117 aa, Artificial Sequence
  source: /note="Description of Artificial Sequence: Synthetic heavy chain variable domain"
QVQLVQSGAEVKKPGASVKVSCKASGYTFTSYWINWVRQAPGQGLEWMGNIYPGSSLTNYNEKFKNRVTMTRDTSTSTVYMELSSLRSEDTAVYYCARLLTGTFAYWGQGTLVTVSS

SEQ ID NO: 2624 - protein, 443 aa, Artificial Sequence
  source: /note="Description of Artificial Sequence: Synthetic heavy chain variable domain"
QVQLVQSGAEVKKPGASVKVSCKASGYTFTSYWINWVRQAPGQGLEWMGNIYPGSSLTNYNEKFKNRVTMTRDTSTSTVYMELSSLRSEDTAVYYCARLSTGTFAYWGQGTLVTVSSASTKGPSVFPLAPCSRSTSESTAALGCLVKDYFPEPVTVSWNSGALTSGVHTFPAVLQSSGLYSLSSVVTVPSSSLGTKTYTCNVDHKPSNTKVDKRVESKYGPPCPPCPAPEFLGGPSVFLFPPKPKDTLMISRTPEVTCVVVDVSQEDPEVQFNWYVDGVEVHNAKTKPREEQFNSTYRVVSVLTVLHQDWLNGKEYKCKVSNKGLPSSIEKTISKAKGQPREPQVYTLPPSQEEMTKNQVSLTCLVKGFYPSDIAVEWESNGQPENNYKTTPPVLDSDGSFFLYSRLTVDKSRWQEGNVFSCSVMHEALHNHYTQKSLSLSLG

SEQ ID NO: 2625 - protein, 117 aa, Artificial Sequence
  source: /note="Description of Artificial Sequence: Synthetic heavy chain variable domain"
EVQLVQSGAEVKKPGESLRISCKGSGYTFTTYWMHWVRQATGQGLEWMGNIYPGTGGSNFDEKFKNRVTITADKSTSTAYMELSSLRSEDTAVYYCTRWTTGTGAYWGQGTTVTVSS

SEQ ID NO: 2626 - protein, 117 aa, Artificial Sequence
  source: /note="Description of Artificial Sequence: Synthetic heavy chain variable domain"
QVQLVQSGAEVKKPGASVKVSCKASGYTFTSYWINWVRQAPGQGLEWMGNIYPGSSLTNYNEKFKNRVTMTRDTSTSTVYMELSSLRSEDTAVYYCARLSTGTFAYWGQGTLVTVSS

SEQ ID NO: 2627 - protein, 117 aa, Artificial Sequence
  source: /note="Description of Artificial Sequence: Synthetic heavy chain variable domain"
QVQLVQSGAEVKKPGASVKVSCKASGYTFTSYWINWVRQAPGQGLEWMGNIYPGSSITNYNEKFKNRVTMTRDTSTSTVYMELSSLRSEDTAVYYCARLTTGTFAYWGQGTLVTVSS

SEQ ID NO: 2628 - protein, 117 aa, Artificial Sequence
  source: /note="Description of Artificial Sequence: Synthetic heavy chain variable domain"
EVQLVQSGAEVKKPGESLRISCKGSGYTFTTYWMHWIRQSPSRGLEWLGNIYPGTGGSNFDEKFKNRFTISRDNSKNTLYLQMNSLRAEDTAVYYCTRWTTGTGAYWGQGTTVTVSS

SEQ ID NO: 2629 - protein, 117 aa, Artificial Sequence
  source: /note="Description of Artificial Sequence: Synthetic heavy chain variable domain"
QVQLVQSGAEVKKPGASVKVSCKASGYTFTSYWINWVRQAPGQGLEWMGNIWPGSSLTNYNEKFKNRVTMTRDTSTSTVYMELSSLRSEDTAVYYCARLLTGTFAYWGQGTLVTVSS

SEQ ID NO: 2630 - protein, 117 aa, Artificial Sequence
  source: /note="Description of Artificial Sequence: Synthetic heavy chain variable domain"
QVQLVQSGAEVKKPGASVKVSCKASGYTFTTYWMHWIRQSPSRGLEWLGNIYPGTGGSNFDEKFKNRFTISRDNSKNTLYLQMNSLRAEDTAVYYCTRWTTGTGAYWGQGTTVTVSS

SEQ ID NO: 2631 - protein, 117 aa, Artificial Sequence
  source: /note="Description of Artificial Sequence: Synthetic heavy chain variable domain"
EVQLVQSGAEVKKPGESLRISCKGSGYTFTTYWMHWVRQAPGQGLEWMGNIYPGTGGSNFDEKFKNRFTISRDNSKNTLYLQMNSLRAEDTAVYYCTRWTTGTGAYWGQGTTVTVSS

SEQ ID NO: 2632 - protein, 440 aa, Artificial Sequence
  source: /note="Description of Artificial Sequence: Synthetic heavy chain variable domain"
QVQLVESGGGVVQPGRSLRLDCKASGITFSNSGMHWVRQAPGKGLEWVAVIWYDGSKRYYADSVKGRFTISRDNSKNTLFLQMNSLRAEDTAVYYCATNDDYWGQGTLVTVSSASTKGPSVFPLAPCSRSTSESTAALGCLVKDYFPEPVTVSWNSGALTSGVHTFPAVLQSSGLYSLSSVVTVPSSSLGTKTYTCNVDHKPSNTKVDKRVESKYGPPCPPCPAPEFLGGPSVFLFPPKPKDTLMISRTPEVTCVVVDVSQEDPEVQFNWYVDGVEVHNAKTKPREEQFNSTYRVVSVLTVLHQDWLNGKEYKCKVSNKGLPSSIEKTISKAKGQPREPQVYTLPPSQEEMTKNQVSLTCLVKGFYPSDIAVEWESNGQPENNYKTTPPVLDSDGSFFLYSRLTVDKSRWQEGNVFSCSVMHEALHNHYTQKSLSLSLGK

SEQ ID NO: 2633 - protein, 440 aa, Artificial Sequence; identical to SEQ ID NO: 2632
  source: /note="Description of Artificial Sequence: Synthetic heavy chain variable domain"

SEQ ID NO: 2634 - protein, 440 aa, Artificial Sequence; identical to SEQ ID NO: 2632
  source: /note="Description of Artificial Sequence: Synthetic heavy chain variable domain"

SEQ ID NO: 2635 - protein, 447 aa, Artificial Sequence
  source: /note="Description of Artificial Sequence: Synthetic heavy chain variable domain"
QVQLVQSGVEVKKPGASVKVSCKASGYTFTNYYMYWVRQAPGQGLEWMGGINPSNGGTNFNEKFKNRVTLTTDSSTTTAYMELKSLQFDDTAVYYCARRDYRFDMGFDYWGQGTTVTVSSASTKGPSVFPLAPCSRSTSESTAALGCLVKDYFPEPVTVSWNSGALTSGVHTFPAVLQSSGLYSLSSVVTVPSSSLGTKTYTCNVDHKPSNTKVDKRVESKYGPPCPPCPAPEFLGGPSVFLFPPKPKDTLMISRTPEVTCVVVDVSQEDPEVQFNWYVDGVEVHNAKTKPREEQFNSTYRVVSVLTVLHQDWLNGKEYKCKVSNKGLPSSIEKTISKAKGQPREPQVYTLPPSQEEMTKNQVSLTCLVKGFYPSDIAVEWESNGQPENNYKTTPPVLDSDGSFFLYSRLTVDKSRWQEGNVFSCSVMHEALHNHYTQKSLSLSLGK

SEQ ID NO: 2636 - protein, 447 aa, Artificial Sequence; identical to SEQ ID NO: 2635
  source: /note="Description of Artificial Sequence: Synthetic heavy chain variable domain"

SEQ ID NO: 2637 - protein, 253 aa, Artificial Sequence
  source: /note="Description of Artificial Sequence: Synthetic heavy chain variable domain"
GFGLRWVFLVAILKGVQCEVQLLESGGGLVQPGGSLRLSCAASGFTFSNFGMTWVRQAPGKGLEWVSGVSIRGIATYYADSVKGRFTISRDDSRNTLYLQMNSLRAEDTALYYCATGVRLLGREWGQGTLVTVSSASTKGPSVFPLAPSSKSTSGGTAALGCLVKDYFPEPVTVSWNSGALTSGVHTFPAVLQSSGLYSLSSVVTVPSSSLGTQTYICNVNHKPSNTKVDKRVEPKSCDKTHTCPPCPAPELL

SEQ ID NO: 2638 - protein, 448 aa, Artificial Sequence
  source: /note="Description of Artificial Sequence: Synthetic heavy chain variable domain"
  MOD_RES (403)..(403): Any amino acid
EVQLVESGGGLVQPGGSLRLSCAASGFTFSDSWIHWVRQAPGKGLEWVAWISPYGGSTYYADSVKGRFTISADTSKNTAYLQMNSLRAEDTAVYYCARRHWPGGFDYWGQGTLVTVSSASTKGPSVFPLAPSSKSTSGGTAALGCLVKDYFPEPVTVSWNSGALTSGVHTFPAVLQSSGLYSLSSVVTVPSSSLGTQTYICNVNHKPSNTKVDKKVEPKSCDKTHTCPPCPAPELLGGPSVFLFPPKPKDTLMISRTPEVTCVVVDVSHEDPEVKFNWYVDGVEVHNAKTKPREEQYASTYRVVSVLTVLHQDWLNGKEYKCKVSNKALPAPIEKTISKAKGQPREPQVYTLPPSREEMTKNQVSLTCLVKGFYPSDIAVEWESNGQPENNYKTTPPVLDSIXDSFFLYSKLTVDKSRWQQGNVFSCSVMHEALHNHYTQKSLSLSPG

SEQ ID NO: 2639 - protein, 120 aa, Artificial Sequence
  source: /note="Description of Artificial Sequence: Synthetic heavy chain variable domain"
QVQLVQSGAEVKKPGASVKVSCKASGYTFTSYWMYWVRQATGQGLEWMGRIDPNSGSTKYNEKFKNRFTISRDDSKNTAYLQMNSLKTEDTAVYYCARDYRKGLYAMDYWGQGTTVTVSS

SEQ ID NO: 2640 - protein, 447 aa, Artificial Sequence
  source: /note="Description of Artificial Sequence: Synthetic heavy chain variable domain"
EVQLVESGGGLVQPGGSLRLSCAASGFTFSDSWIHWVRQAPGKGLEWVAWISPYGGSTYYADSVKGRFTISADTSKNTAYLQMNSLRAEDTAVYYCARRHWPGGFDYWGQGTLVTVSSASTKGPSVFPLAPSSKSTSGGTAALGCLVKDYFPEPVTVSWNSGALTSGVHTFPAVLQSSGLYSLSSVVTVPSSSLGTQTYICNVNHKPSNTKVDKKVEPKSCDKTHTCPPCPAPELLGGPSVFLFPPKPKDTLMISRTPEVTCVVVDVSHEDPEVKFNWYVDGVEVHNAKTKPREEQYASTYRVVSVLTVLHQDWLNGKEYKCKVSNKALPAPIEKTISKAKGQPREPQVYTLPPSREEMTKNQVSLTCLVKGFYPSDIAVEWESNGQPENNYKTTPPVLDSDGSFFLYSKLTVDKSRWQQGNVFSCSVMHEALHNHYTQKSLSLSPG

SEQ ID NO: 2641 - protein, 120 aa, Artificial Sequence
  source: /note="Description of Artificial Sequence: Synthetic heavy chain variable domain"
EVQLVQSGAEVKKPGATVKISCKVSGYTFTSYWMYWVRQATGQGLEWMGRIDPNSGSTKYNEKFKNRVTITADKSTSTAYMELSSLRSEDTAVYYCARDYRKGLYAMDYWGQGTTVTVSS

SEQ ID NO: 2642 - protein, 118 aa, Artificial Sequence [sequence omitted]

SEQ ID NO: 2643 - protein, 120 aa, Artificial Sequence
  source: /note="Description of Artificial Sequence: Synthetic heavy chain variable domain"
EVQLVQSGAEVKKPGESLRISCKGSGYTFTSYWMYWVRQAPGQGLEWMGRIDPNSGSTKYNEKFKNRVTISVDTSKNQFSLKLSSVTAADTAVYYCARDYRKGLYAMDYWGQGTTVTVSS

SEQ ID NO: 2644 - protein, 120 aa, Artificial Sequence
  source: /note="Description of Artificial Sequence: Synthetic heavy chain variable domain"
EVQLVQSGAEVKKPGATVKISCKVSGYTFTSYWMYWIRQSPSRGLEWLGRIDPNSGSTKYNEKFKNRLTISKDTSKNQVVLTMTNMDPVDTATYYCARDYRKGLYAMDYWGQGTTVTVSS

SEQ ID NO: 2645 - protein, 120 aa, Artificial Sequence
  source: /note="Description of Artificial Sequence: Synthetic heavy chain variable domain"
EVQLVQSGAEVKKPGESLRISCKGSGYTFTSYWMYWIRQPPGKGLEWIGRIDPNSGSTKYNEKFKNRVTITADKSTSTAYMELSSLRSEDTAVYYCARDYRKGLYAMDYWGQGTTVTVSS

SEQ ID NO: 2646 - protein, 120 aa, Artificial Sequence
  source: /note="Description of Artificial Sequence: Synthetic heavy chain variable domain"
QVQLVQSGAEVKKPGASVKVSCKASGYTFTSYWMYWIRQSPSRGLEWLGRIDPNSGSTKYNEKFKNRFTISRDDSKNTAYLQMNSLKTEDTAVYYCARDYRKGLYAMDYWGQGTTVTVSS

SEQ ID NO: 2647 - protein, 120 aa, Artificial Sequence
  source: /note="Description of Artificial Sequence: Synthetic heavy chain variable domain"
EVQLVQSGAEVKKPGESLRISCKGSGYTFTSYWMYWVRQARGQRLEWIGRIDPNSGSTKYNEKFKNRLTISKDTSKNQVVLTMTNMDPVDTATYYCARDYRKGLYAMDYWGQGTTVTVSS

SEQ ID NO: 2648 - protein, 118 aa, Artificial Sequence [sequence omitted]

SEQ ID NO: 2649 - protein, 120 aa, Artificial Sequence
  source: /note="Description of Artificial Sequence: Synthetic heavy chain variable domain"
QITLKESGPTLVKPTQTLTLTCTFSGYTFTSYWMYWVRQAPGKGLEWVSRIDPNSGSTKYNEKFKNRVTITADKSTSTAYMELSSLRSEDTAVYYCARDYRKGLYAMDYWGQGTTVTVSS

SEQ ID NO: 2650 - protein, 120 aa, Artificial Sequence
  source: /note="Description of Artificial Sequence: Synthetic heavy chain variable domain"
EVQLVQSGAEVKKPGATVKISCKVSGYTFTSYWMYWVRQARGQRLEWIGRIDPNSGSTKYNEKFKNRFTISRDNSKNTLYLQMNSLRAEDTAVYYCARDYRKGLYAMDYWGQGTTVTVSS

SEQ ID NO: 2651 - protein, 122 aa, Artificial Sequence
  source: /note="Description of Artificial Sequence: Synthetic heavy chain variable domain"
EVQLVESGGGLVQPGGSLRLSCAASGFTFSDSWIHWVRQAPGKGLEWVAWISPYGGSTYYADSVKGRFTISADTSKNTAYLQMNSLRAEDTAVYYCARRHWPGGFDYWGQGTLVTVSSASTK

SEQ ID NO: 2652 - protein, 120 aa, Artificial Sequence
  source: /note="Description of Artificial Sequence: Synthetic heavy chain variable domain"
EVQLQQSGAELVKPGASVKLSCKASGYTFTSYWMYWVKQGPGRGLEWIGRIDPNSGSTKYNEKFKNKATLTVDKSSSTAYMQLSSLTSEDSAVYYCARDYRKGLYAMDYWGQGTTVTVSS

SEQ ID NO: 2653 - protein, 120 aa, Artificial Sequence; identical to SEQ ID NO: 2639
  source: /note="Description of Artificial Sequence: Synthetic heavy chain variable domain"

SEQ ID NO: 2654 - protein, 446 aa, Artificial Sequence
  source: /note="Description of Artificial Sequence: Synthetic heavy chain variable domain"
EVQLVQSGAEVKKPGATVKISCKVSGYTFTSYWMYWVRQATGQGLEWMGRIDPNSGSTKYNEKFKNRVTITADKSTSTAYMELSSLRSEDTAVYYCARDYRKGLYAMDYWGQGTTVTVSSASTKGPSVFPLAPCSRSTSESTAALGCLVKDYFPEPVTVSWNSGALTSGVHTFPAVLQSSGLYSLSSVVTVPSSSLGTKTYTCNVDHKPSNTKVDKRVESKYGPPCPPCPAPEFLGGPSVFLFPPKPKDTLMISRTPEVTCVVVDVSQEDPEVQFNWYVDGVEVHNAKTKPREEQFNSTYRVVSVLTVLHQDWLNGKEYKCKVSNKGLPSSIEKTISKAKGQPREPQVYTLPPSQEEMTKNQVSLTCLVKGFYPSDIAVEWESNGQPENNYKTTPPVLDSDGSFFLYSRLTVDKSRWQEGNVFSCSVMHEALHNHYTQKSLSLSLG

SEQ ID NO: 2655 - protein, 447 aa, Artificial Sequence
  source: /note="Description of Artificial Sequence: Synthetic heavy chain variable domain"
EVQLVQSGAEVKKPGATVKISCKVSGYTFTSYWMYWVRQARGQRLEWIGRIDPNSGSTKYNEKFKNRFTISRDNSKNTLYLQMNSLRAEDTAVYYCARDYRKGLYAMDYWGQGTTVTVSSASTKGPSVFPLAPCSRSTSESTAALGCLVKDYFPEPVTVSWNSGALTSGVHTFPAVLQSSGLYSLSSVVTVPSSSLGTKTYTCNVDHKPSNTKVDKRVESKYGPPCPPCPAPEFLGGPSVFLFPPKPKDTLMISRTPEVTCVVVDVSQEDPEVQFNWYVDGVEVHNAKTKPREEQFNSTYRVVSVLTVLHQDWLNGKEYKCKVSNKGLPSSIEKTISKAKGQPREPQVYTLPPSQEEMTKNQVSLTCLVKGFYPSDIAVEWESNGQPENNYKTTPPVLDSDGSFFLYSRLTVDKSRWQEGNVFSCSVMHEALHNHYTQKSLSLSLGK

SEQ ID NO: 2656 - protein, 98 aa, Artificial Sequence
  source: /note="Description of Artificial Sequence: Synthetic heavy chain variable domain"
QVQLQQPGAELVKPGASVKLSCKASGYTFTSYWMHWVKQRPGRGLEWIGRIDPNSGGTKYNEKFKSKATLTVDKPSSTAYMQLSSLTSEDSAVYYCAR

SEQ ID NO: 2657 - protein, 113 aa, Artificial Sequence
  source: /note="Description of Artificial Sequence: Synthetic heavy chain variable domain"
EVQLQQSGAELVKPGASVKLSCKASGYTFTSYWMYWVKQGPGRGLEWIGRIDPNSGSTKYNEKFKNKATLTVDKSSSTAYMQLSSLTSEDSAVYYCARDYRKGLYAMDYWGQG

SEQ ID NO: 2658 - protein, 113 aa, Artificial Sequence
  source: /note="Description of Artificial Sequence: Synthetic heavy chain variable domain"
QVQLVQSGAEVKKPGASVKVSCKASGYTFTSYWMYWVRQATGQGLEWMGRIDPNSGSTKYNEKFKNRFTISRDDSKNTAYLQMNSLKTEDTAVYYCARDYRKGLYAMDYWGQG

SEQ ID NO: 2659 - protein, 113 aa, Artificial Sequence
  source: /note="Description of Artificial Sequence: Synthetic heavy chain variable domain"
EVQLVQSGAEVKKPGESLRISCKGSGYTFTSYWMYWIRQPPGKGLEWIGRIDPNSGSTKYNEKFKNRVTITADKSTSTAYMELSSLRSEDTAVYYCARDYRKGLYAMDYWGQG

SEQ ID NO: 2660 - protein, 113 aa, Artificial Sequence
  source: /note="Description of Artificial Sequence: Synthetic heavy chain variable domain"
EVQLVQSGAEVKKPGATVKISCKVSGYTFTSYWMYWVRQATGQGLEWMGRIDPNSGSTKYNEKFKNRVTITADKSTSTAYMELSSLRSEDTAVYYCARDYRKGLYAMDYWGQG

SEQ ID NO: 2661 - protein, 113 aa, Artificial Sequence
  source: /note="Description of Artificial Sequence: Synthetic heavy chain variable domain"
EVQLVQSGAEVKKPGESLRISCKGSGYTFTSYWMYWVRQAPGQGLEWMGRIDPNSGSTKYNEKFKNRVTISVDTSKNQFSLKLSSVTAADTAVYYCARDYRKGLYAMDYWGQG

SEQ ID NO: 2662 - protein, 113 aa, Artificial Sequence
  source: /note="Description of Artificial Sequence: Synthetic heavy chain variable domain"
QVQLVQSGAEVKKPGASVKVSCKASGYTFTSYWMYWIRQSPSRGLEWLGRIDPNSGSTKYNEKFKNRFTISRDDSKNTAYLQMNSLKTEDTAVYYCARDYRKGLYAMDYWGQG

SEQ ID NO: 2663 - protein, 113 aa, Artificial Sequence
  source: /note="Description of Artificial Sequence: Synthetic heavy chain variable domain"
EVQLVQSGAEVKKPGESLRISCKGSGYTFTSYWMYWVRQARGQRLEWIGRIDPNSGSTKYNEKFKNRLTISKDTSKNQVVLTMTNMDPVDTATYYCARDYRKGLYAMDYWGQG

SEQ ID NO: 2664 - protein, 113 aa, Artificial Sequence
  source: /note="Description of Artificial Sequence: Synthetic heavy chain variable domain"
EVQLVQSGAEVKKPGATVKISCKVSGYTFTSYWMYWIRQSPSRGLEWLGRIDPNSGSTKYNEKFKNRLTISKDTSKNQVVLTMTNMDPVDTATYYCARDYRKGLYAMDYWGQG

SEQ ID NO: 2665 - protein, 113 aa, Artificial Sequence
  source: /note="Description of Artificial Sequence: Synthetic heavy chain variable domain"
QITLKESGPTLVKPTQTLTLTCTFSGYTFTSYWMYWVRQAPGKGLEWVSRIDPNSGSTKYNEKFKNRVTITADKSTSTAYMELSSLRSEDTAVYYCARDYRKGLYAMDYWGQG

SEQ ID NO: 2666 - protein, 113 aa, Artificial Sequence
  source: /note="Description of Artificial Sequence: Synthetic heavy chain variable domain"
EVQLVQSGAEVKKPGATVKISCKVSGYTFTSYWMYWVRQARGQRLEWIGRIDPNSGSTKYNEKFKNRFTISRDNSKNTLYLQMNSLRAEDTAVYYCARDYRKGLYAMDYWGQG

SEQ ID NO: 2667 - protein, 446 aa, Artificial Sequence
  source: /note="Description of Artificial Sequence: Synthetic heavy chain variable domain"
EVQLVQSGAEVKKPGESLRISCKGSGYTFTSYWMYWIRQPPGKGLEWIGRIDPNSGSTKYNEKFKNRVTITADKSTSTAYMELSSLRSEDTAVYYCARDYRKGLYAMDYWGQGTTVTVSSASTKGPSVFPLAPCSRSTSESTAALGCLVKDYFPEPVTVSWNSGALTSGVHTFPAVLQSSGLYSLSSVVTVPSSSLGTKTYTCNVDHKPSNTKVDKRVESKYGPPCPPCPAPEFLGGPSVFLFPPKPKDTLMISRTPEVTCVVVDVSQEDPEVQFNWYVDGVEVHNAKTKPREEQFNSTYRVVSVLTVLHQDWLNGKEYKCKVSNKGLPSSIEKTISKAKGQPREPQVYTLPPSQEEMTKNQVSLTCLVKGFYPSDIAVEWESNGQPENNYKTTPPVLDSDGSFFLYSRLTVDKSRWQEGNVFSCSVMHEALHNHYTQKSLSLSLG

SEQ ID NO: 2668 - protein, 120 aa, Artificial Sequence; identical to SEQ ID NO: 2641
  source: /note="Description of Artificial Sequence: Synthetic heavy chain variable domain"

SEQ ID NO: 2669 - protein, 118 aa, Artificial Sequence
  source: /note="Description of Artificial Sequence: Synthetic heavy chain variable domain"
EVQLLESGGGLVQPGGSLRLSCAASGFTFSSYIMMWVRQAPGKGLEWVSSIYPSGGITFYADKGRFTISRDNSKNTLYLQMNSLRAEDTAVYYCARIKLGTVTTVDYWGQGTLVTVSS

SEQ ID NO: 2670 - protein, 253 aa, Artificial Sequence [sequence omitted]

SEQ ID NO: 2671 - protein, 117 aa, Artificial Sequence
  source: /note="Description of Artificial Sequence: Synthetic heavy chain variable domain"
EVQLLESGGGLVQPGGSLRLSCAASGFTFSSYAMSWVRQAPGKGLEWVSGIGSYGGGTYYADSVKGRFTISRDNSKNTLYLQMNSLRAEDTAVYYCARYVNFGMDYWGQGTLVTVSS

SEQ ID NO: 2672 - protein, 116 aa, Artificial Sequence
  source: /note="Description of Artificial Sequence: Synthetic heavy chain variable domain"
EVQLLESGGGLVQPGGSLRLSCAASGFTFSSYAMSWVRQAPGKGLEWVSAISGSGGSTYYADSVKGRFTISRDNSKNTLYLQMNSLRAEDTAVYYCARRVWGFDYWGQGTLVTVSS

SEQ ID NO: 2673 - protein, 447 aa, Artificial Sequence
  source: /note="Description of Artificial Sequence: Synthetic heavy chain variable domain"
EVQLVQSGAEVKKPGATVKISCKVSGYTFTSYWMYWVRQATGQGLEWMGRIDPNSGSTKYNEKFKNRVTITADKSTSTAYMELSSLRSEDTAVYYCARDYRKGLYAMDYWGQGTTVTVSSASTKGPSVFPLAPCSRSTSESTAALGCLVKDYFPEPVTVSWNSGALTSGVHTFPAVLQSSGLYSLSSVVTVPSSSLGTKTYTCNVDHKPSNTKVDKRVESKYGPPCPPCPAPEFLGGPSVFLFPPKPKDTLMISRTPEVTCVVVDVSQEDPEVQFNWYVDGVEVHNAKTKPREEQFNSTYRVVSVLTVLHQDWLNGKEYKCKVSNKGLPSSIEKTISKAKGQPREPQVYTLPPSQEEMTKNQVSLTCLVKGFYPSDIAVEWESNGQPENNYKTTPPVLDSDGSFFLYSRLTVDKSRWQEGNVFSCSVMHEALHNHYTQKSLSLSLGK

SEQ ID NO: 2674 - protein, 128 aa, Artificial Sequence
  source: /note="Description of Artificial Sequence: Synthetic heavy chain variable domain"
  MOD_RES (120)..(120): Any amino acid
  MOD_RES (124)..(125): Any amino acid
EVRLQQSGADLVKPGASVKLSCASGFIIKATYMHWVRQRPEQGLEWIGRIDPANGEKYDPKFQVKAITADTSSSTAYLQLNSLTSDDTAVYYCARYAWYFDVWGAGTTVTVSSAKTTPPXVYPXXPGS

SEQ ID NO: 2675 - protein, 446 aa, Artificial Sequence
  source: /note="Description of Artificial Sequence: Synthetic heavy chain variable domain"
EVQLVESGGDLVQPGGSLRLSCAASGFTFSSYWMSWVRQAPGKGLEWVANIKQDGSEKYYVDSVKGRFTISRDNAKNSLYLQMNSLRAEDTAVYYCARDRGSLYYWGQGTLVTVSSASTKGPSVFPLAPSSKSTSGGTAALGCLVKDYFPEPVTVSWNSGALTSGVHTFPAVLQSSGLYSLSSVVTVPSSSLGTQTYICNVNHKPSNTKVDKRVEPKSCDKTHTCPPCPAPELLGGPSVFLFPPKPKDTLMISRTPEVTCVVVDVSHEDPEVKFNWYVDGVEVHNAKTKPREEQYNSTYRVVSVLTVLHQDWLNGKEYKCKVSNKALPAPIEKTISKAKGQPREPQVYTLPPSREEMTKNQVSLTCLVKGFYPSDIAVEWESNGQPENNYKTTPPVLDSDGSFFLYSKLTVDKSRWQQGNVFSCSVMHEALHNHYTQKSLSLSPGK

SEQ ID NO: 2676 - protein, 124 aa, Artificial Sequence
  source: /note="Description of Artificial Sequence: Synthetic heavy chain variable domain"
QVQLQQSGPGLVKPSQTLSLTCAISGDSVSSNSAAWGWIRQSPGRGLEWLGRIYYRSKWYNSYAVSVKSRITINPDTSKNQFSLQLNSVTPEDTAVYYCARYDWVPKIGVFDSWGQGTLVTVSS

SEQ ID NO: 2677 - protein, 120 aa, Artificial Sequence; identical to SEQ ID NO: 2643
  source: /note="Description of Artificial Sequence: Synthetic heavy chain variable domain"

SEQ ID NO: 2678 - protein, 447 aa, Artificial Sequence
  source: /note="Description of Artificial Sequence: Synthetic heavy chain variable domain"
EVQLVQSGAEVKKPGESLRISCKGSGYTFTSYWMYWVRQAPGQGLEWMGRIDPNSGSTKYNEKFKNRVTISVDTSKNQFSLKLSSVTAADTAVYYCARDYRKGLYAMDYWGQGTTVTVSSASTKGPSVFPLAPCSRSTSESTAALGCLVKDYFPEPVTVSWNSGALTSGVHTFPAVLQSSGLYSLSSVVTVPSSSLGTKTYTCNVDHKPSNTKVDKRVESKYGPPCPPCPAPEFLGGPSVFLFPPKPKDTLMISRTPEVTCVVVDVSQEDPEVQFNWYVDGVEVHNAKTKPREEQFNSTYRVVSVLTVLHQDWLNGKEYKCKVSNKGLPSSIEKTISKAKGQPREPQVYTLPPSQEEMTKNQVSLTCLVKGFYPSDIAVEWESNGQPENNYKTTPPVLDSDGSFFLYSRLTVDKSRWQEGNVFSCSVMHEALHNHYTQKSLSLSLGK

SEQ ID NO: 2679 - protein, 120 aa, Artificial Sequence; identical to SEQ ID NO: 2644
  source: /note="Description of Artificial Sequence: Synthetic heavy chain variable domain"

SEQ ID NO: 2680 - protein, 447 aa, Artificial Sequence
  source: /note="Description of Artificial Sequence: Synthetic heavy chain variable domain"
EVQLVQSGAEVKKPGATVKISCKVSGYTFTSYWMYWIRQSPSRGLEWLGRIDPNSGSTKYNEKFKNRLTISKDTSKNQVVLTMTNMDPVDTATYYCARDYRKGLYAMDYWGQGTTVTVSSASTKGPSVFPLAPCSRSTSESTAALGCLVKDYFPEPVTVSWNSGALTSGVHTFPAVLQSSGLYSLSSVVTVPSSSLGTKTYTCNVDHKPSNTKVDKRVESKYGPPCPPCPAPEFLGGPSVFLFPPKPKDTLMISRTPEVTCVVVDVSQEDPEVQFNWYVDGVEVHNAKTKPREEQFNSTYRVVSVLTVLHQDWLNGKEYKCKVSNKGLPSSIEKTISKAKGQPREPQVYTLPPSQEEMTKNQVSLTCLVKGFYPSDIAVEWESNGQPENNYKTTPPVLDSDGSFFLYSRLTVDKSRWQEGNVFSCSVMHEALHNHYTQKSLSLSLGK

SEQ ID NO: 2681 - protein, 120 aa, Artificial Sequence; identical to SEQ ID NO: 2645
  source: /note="Description of Artificial Sequence: Synthetic heavy chain variable domain"

SEQ ID NO: 2682 - protein, 447 aa, Artificial Sequence
  source: /note="Description of Artificial Sequence: Synthetic heavy chain variable domain"
EVQLVQSGAEVKKPGESLRISCKGSGYTFTSYWMYWIRQPPGKGLEWIGRIDPNSGSTKYNEKFKNRVTITADKSTSTAYMELSSLRSEDTAVYYCARDYRKGLYAMDYWGQGTTVTVSSASTKGPSVFPLAPCSRSTSESTAALGCLVKDYFPEPVTVSWNSGALTSGVHTFPAVLQSSGLYSLSSVVTVPSSSLGTKTYTCNVDHKPSNTKVDKRVESKYGPPCPPCPAPEFLGGPSVFLFPPKPKDTLMISRTPEVTCVVVDVSQEDPEVQFNWYVDGVEVHNAKTKPREEQFNSTYRVVSVLTVLHQDWLNGKEYKCKVSNKGLPSSIEKTISKAKGQPREPQVYTLPPSQEEMTKNQVSLTCLVKGFYPSDIAVEWESNGQPENNYKTTPPVLDSDGSFFLYSRLTVDKSRWQEGNVFSCSVMHEALHNHYTQKSLSLSLGK

SEQ ID NO: 2683 - protein, 120 aa, Artificial Sequence; identical to SEQ ID NO: 2646
  source: /note="Description of Artificial Sequence: Synthetic heavy chain variable domain"

SEQ ID NO: 2684 - protein, 120 aa, Artificial Sequence
  source: /note="Description of Artificial Sequence: Synthetic heavy chain variable domain"
QVHLQQPGAELVKPGASVKLSCKASGYTFTSYWMYWVKQGPGRGLEWIGRIDPNSGSTKYNEKFKNKATLTVDKSSSTAYMQLSSLTSEDSAVYYCARDYRKGLYAMDYWGQGTSVTVSS

SEQ ID NO: 2685 - protein, 120 aa, Artificial Sequence; identical to SEQ ID NO: 2647
  source: /note="Description of Artificial Sequence: Synthetic heavy chain variable domain"

SEQ ID NO: 2686 - protein, 120 aa, Artificial Sequence; identical to SEQ ID NO: 2649
  source: /note="Description of Artificial Sequence: Synthetic heavy chain variable domain"

SEQ ID NO: 2687 - protein, 447 aa, Artificial Sequence
  source: /note="Description of Artificial Sequence: Synthetic heavy chain variable domain"
QITLKESGPTLVKPTQTLTLTCTFSGYTFTSYWMYWVRQAPGKGLEWVSRIDPNSGSTKYNEKFKNRVTITADKSTSTAYMELSSLRSEDTAVYYCARDYRKGLYAMDYWGQGTTVTVSSASTKGPSVFPLAPCSRSTSESTAALGCLVKDYFPEPVTVSWNSGALTSGVHTFPAVLQSSGLYSLSSVVTVPSSSLGTKTYTCNVDHKPSNTKVDKRVESKYGPPCPPCPAPEFLGGPSVFLFPPKPKDTLMISRTPEVTCVVVDVSQEDPEVQFNWYVDGVEVHNAKTKPREEQFNSTYRVVSVLTVLHQDWLNGKEYKCKVSNKGLPSSIEKTISKAKGQPREPQVYTLPPSQEEMTKNQVSLTCLVKGFYPSDIAVEWESNGQPENNYKTTPPVLDSDGSFFLYSRLTVDKSRWQEGNVFSCSVMHEALHNHYTQKSLSLSLGK

SEQ ID NO: 2688 - protein, 120 aa, Artificial Sequence; identical to SEQ ID NO: 2650
  source: /note="Description of Artificial Sequence: Synthetic heavy chain variable domain"

SEQ ID NO: 2689 - protein, 446 aa, Artificial Sequence
  source: /note="Description of Artificial Sequence: Synthetic heavy chain variable domain"
EVQLVQSGAEVKKPGATVKISCKVSGYTFTSYWMYWVRQARGQRLEWIGRIDPNSGSTKYNEKFKNRFTISRDNSKNTLYLQMNSLRAEDTAVYYCARDYRKGLYAMDYWGQGTTVTVSSASTKGPSVFPLAPCSRSTSESTAALGCLVKDYFPEPVTVSWNSGALTSGVHTFPAVLQSSGLYSLSSVVTVPSSSLGTKTYTCNVDHKPSNTKVDKRVESKYGPPCPPCPAPEFLGGPSVFLFPPKPKDTLMISRTPEVTCVVVDVSQEDPEVQFNWYVDGVEVHNAKTKPREEQFNSTYRVVSVLTVLHQDWLNGKEYKCKVSNKGLPSSIEKTISKAKGQPREPQVYTLPPSQEEMTKNQVSLTCLVKGFYPSDIAVEWESNGQPENNYKTTPPVLDSDGSFFLYSRLTVDKSRWQEGNVFSCSVMHEALHNHYTQKSLSLSLG

SEQ ID NO: 2690 - protein, 446 aa, Artificial Sequence
  source: /note="Description of Artificial Sequence: Synthetic heavy chain variable domain"
EVQLVQSGAEVKKPGESLRISCKGSGYTFTSYWMYWVRQAPGQGLEWMGRIDPNSGSTKYNEKFKNRVTISVDTSKNQFSLKLSSVTAADTAVYYCARDYRKGLYAMDYWGQGTTVTVSSASTKGPSVFPLAPCSRSTSESTAALGCLVKDYFPEPVTVSWNSGALTSGVHTFPAVLQSSGLYSLSSVVTVPSSSLGTKTYTCNVDHKPSNTKVDKRVESKYGPPCPPCPAPEFLGGPSVFLFPPKPKDTLMISRTPEVTCVVVDVSQEDPEVQFNWYVDGVEVHNAKTKPREEQFNSTYRVVSVLTVLHQDWLNGKEYKCKVSNKGLPSSIEKTISKAKGQPREPQVYTLPPSQEEMTKNQVSLTCLVKGFYPSDIAVEWESNGQPENNYKTTPPVLDSDGSFFLYSRLTVDKSRWQEGNVFSCSVMHEALHNHYTQKSLSLSLG

SEQ ID NO: 2691 - protein, 446 aa, Artificial Sequence; identical to SEQ ID NO: 2654
  source: /note="Description of Artificial Sequence: Synthetic heavy chain variable domain"

SEQ ID NO: 2692 - protein, 112 aa, Artificial Sequence
  source: /note="Description of Artificial Sequence: Synthetic heavy chain variable domain"
QVQLVQSGAELKKPGASVKMSCKASGYTFTGYTMHWVKQAPGQGLEWIGYINPRSGYTEYNQKFKDRTTLTADKSTSTAYMELSSLRSEDSAVYYCARPWFAYWGQGTLVTV

SEQ ID NO: 2693 - protein, 114 aa, Artificial Sequence
  source: /note="Description of Artificial Sequence: Synthetic heavy chain variable domain"
QVQLVQSGAEVKKPGASVKMSCKASGYTFTGYTMHWVKQAPGQGLEWIGYINPRSGYTEYNQKFKDRTTLTADKSTSTAYMELSSLRSEDTAVYYCARPWFAYWGQGTLVTVSS

SEQ ID NO: 2694 - protein, 114 aa, Artificial Sequence
  source: /note="Description of Artificial Sequence: Synthetic heavy chain variable domain"
QVQLVQSGAEVKKPGASVKMSCKASGYTFTGYTMHWVRQAPGQGLEWIGYINPRSGYTEYNQKFKDRTTLTADKSTSTAYMELSSLRSEDTAVYYCARPWFAYWGQGTLVTVSS

SEQ ID NO: 2695 - protein, 114 aa, Artificial Sequence
  source: /note="Description of Artificial Sequence: Synthetic heavy chain variable domain"
QVQLVQSGAEVKKPGASVKVSCKASGYTFTGYTMHWVRQAPGQGLEWIGYINPRSGYTEYNQKFKDRTTLTADKSTSTAYMELSSLRSEDTAVYYCARPWFAYWGQGTLVTVSS

SEQ ID NO: 2696 - protein, 137 aa, Artificial Sequence
  source: /note="Description of Artificial Sequence: Synthetic heavy chain variable domain"
QEQLVESGGGVVQPGGSLRLSCLASGFTFHKYGMHWVRQAPGKGLEWVALISDDGMRKYHSDSMWGRVTISRDNSKNTLYLQFSSLKVEDTAMFFCAREAGGPIWHDDVKYYDFNDGYYNYHYMDVWGKGTTVTVSS

SEQ ID NO: 2697 - protein, 136 aa, Artificial Sequence
  source: /note="Description of Artificial Sequence: Synthetic heavy chain variable domain"
QRLVESGGGVVQPGSSLRLSCAASGFDFSRQGMHWVRQAPGQGLEWVAFIKYDGSEKYHADSVWGRLSISRDNSKDTLYLQMNSLRVEDTATYFCVREAGGPDYRNGYNYYDFYDGYYNYHYMDVWGKGTTVTVSS

SEQ ID NO: 2698 - protein, 141 aa, Artificial Sequence
  source: /note="Description of Artificial Sequence: Synthetic heavy chain variable domain"
QVQLVQSGPEVKKPGSSVKVSCKASGNTFSKYDVHWVRQATGQGLEWVGWMSHEGDKTESAQRFKGRVTFTRDTSASTAYMELRGLTSDDTAIYYCTRGSKHRLRDYVLYDDYGLINYQEWNDYLEFLDVWGHGTAVTVSS

SEQ ID NO: 2699 - protein, 141 aa, Artificial Sequence
  source: /note="Description of Artificial Sequence: Synthetic heavy chain variable domain"
QVQLVQSGPEVKKPGSSVKVSCKASGNTFSKYDVHWVRQATGQGLEWVGWISHERDKTESAQRFKGRVTFTRDTSATTAYMELRGLTSDDTAIYYCTRGSKHRLRDYVLYDDYGLINYQEWNDYLEFLDVWGHGTAVTVSS

SEQ ID NO: 2700 - protein, 141 aa, Artificial Sequence
  source: /note="Description of Artificial Sequence: Synthetic heavy chain variable domain"
QVQLEQSGAEVKKPGSSVKVSCKASGNTFSKYDVHWVRQATGQGLEWVGWMSHEGDKTESAQRFKGRVTFTRDTSASTAYMELRGLTSDDTAIYYCTRGSKHRLRDYVLYDDYGLINYQEWNDYLEFLDVWGHGTAVTVSS

SEQ ID NO: 2701 - protein, 141 aa, Artificial Sequence
  source: /note="Description of Artificial Sequence: Synthetic heavy chain variable domain"
QVQLVQSGAEVKKPGSSVKVSCKASGNTFRKYDVHWVRQATGQGLEWVGWMSHEGDKTESAQRFKGRVSFTRDNSASTAYIELRGLTSDDTAIYYCTGGSKHRLRDYVLYDDYGLINQQEWNDYLEFLDVWGHGTAVTVSS

SEQ ID NO: 2702 - protein, 140 aa, Artificial Sequence
  source: /note="Description of Artificial Sequence: Synthetic heavy chain variable domain"
QVQLVQSGAEVKKPGSSVKVSCKASGNSFSNHDVHWVRQATGQGLEWMGWMSHEGDKTGLAQKFQGRVTITRDSGASTVYMELRGLTADDTAIYYCLTGSKHRLRDYFLYNEYGPNYEEWGDYLATLDVWGHGTAVTVSS

SEQ ID NO: 2703 - protein, 112 aa, Artificial Sequence
  source: /note="Description of Artificial Sequence: Synthetic heavy chain variable domain"
QAVLTQPPSASGTPGQRVTISCSGSSSNIGSNTVNWYQQLPGTAPKLLIYSNNQRPSGVPDRFSGSKSGTSASLAISGLQSEDEADYYCAAWDDSLNGSYVFGTGTKVTVLG

SEQ ID NO: 2704 - protein, 112 aa, Artificial Sequence
  source: /note="Description of Artificial Sequence: Synthetic heavy chain variable domain"
QSVVTQPPAVSGALGQRVTISCTGTTSNIGAGFDVHWYQQRPGAAPKLLISGNTHRPSGVPDRISGSKSGTLASLAITGLQAEDEADYYCQSYDRSLSTILFGGGTKLTVLG

SEQ ID NO: 2705 - protein, 112 aa, Artificial Sequence
  source: /note="Description of Artificial Sequence: Synthetic heavy chain variable domain"
QSVLTQPPSVSGAPGQRVTISCTGSSSNIGAGFDVHWYQQLPGTAPKLLIFGNSNRPSGVPDRFSGSKSGTSASLAITGLQAEDEADYYCQSYDSSLSGYVFGSGTKVTVLG

SEQ ID NO: 2706 - protein, 108 aa, Artificial Sequence
  source: /note="Description of Artificial Sequence: Synthetic heavy chain variable domain"
DIQLTQSPSSLSASVGDRVTITCRASQSISSYLNWYQQKPGKAPKLLIYAASSLQSGVPSRFSGSGSGTDFTLTISSLQPEDFATYYCQQSYSTPRTFGQGTKVEIKR

SEQ ID NO: 2707 - protein, 111 aa, Artificial Sequence
  source: /note="Description of Artificial Sequence: Synthetic heavy chain variable domain"
KLLPVLTQPPSVSVAPGKTARITCGGNNIGSKSVHWYQQKPGQAPVLVIYYDSDRPSGIPERFSGSNSGNTATLTISRVEAGDEADYYCQVWDSITDHYVFGTGTKVTVLG

SEQ ID NO: 2708 - protein, 113 aa, Artificial Sequence
  source: /note="Description of Artificial Sequence: Synthetic heavy chain variable domain"
KLLPVLTQPHSVSESPGKTVTISCTGSSGSIASNFVQWYQQRPGSAPTTVIYDDNQRPSGVPDRFSASIDRSSNSASLTISGLKTDDEADYYCQSYDGSNVIFGGGTKLTVLG

SEQ ID NO: 2709 - protein, 109 aa, Artificial Sequence
  source: /note="Description of Artificial Sequence: Synthetic heavy chain variable domain"
QPVLTQPPSVSVAPGETASVSCGGNNFGSQSVHWYQQKSGQAPLLVIYYDQDRPSEIPARFSGSKSGNTATLTISRVEAGDEADYYCQVWDTYTDHVVFGGGTKLTVLG

SEQ ID NO: 2710 - protein, 215 aa, Artificial Sequence
  source: /note="Description of Artificial Sequence: Synthetic heavy chain variable domain"
EVQLQQSGGELVKPGSSVKISCKASRNTFTDYNLDWVKQSHGKTLEWIGNVYPNNGVTGYNQKFRGKATLTVDKSSSTAYMELHSLTSEDSAIYYCALYYYDVSYWGQGTLVTVSSAKTTPPSVYPLAPGSAAQTSMVTLGCLVKGYFPEPVTVTWNSGSLSSGVHTFPAVLQSDLYTLSSSVTVPSSTWPSQSVTCNVAHPASSTKVDKKITPR

SEQ ID NO: 2711 - protein, 115 aa, Artificial Sequence
  source: /note="Description of Artificial Sequence: Synthetic heavy chain variable domain"
EVQLQQSGPELVKPGTSVRISCKTSGYTFTEYTIHWVKQSHGKSLEWIGNINPNNGGTTYNQKFEDKATLTVDKSSSTAYMELRSLTSEDSAVYYCAAGWNFDYWGQGTTVTVSS

SEQ ID NO: 2712 - protein, 113 aa, Artificial Sequence
  source: /note="Description of Artificial Sequence: Synthetic heavy chain variable domain"
QVQMQQSGAELMKPGASVKLSCKATGYTFTGYWIEWVKQRPGHGLEWIGEILPGSGRSNSNEKFKGKATFTADTSSNTAYMQLSSLTTEDSAIYYCARGKLSWGQGTLVTVSA

SEQ ID NO: 2713 - protein, 115 aa, Artificial Sequence
  source: /note="Description of Artificial Sequence: Synthetic heavy chain variable domain"
QVQLQQSGAELVRPGVSVKISCKGSGYRFTDYPIHWVKQSHAKSLEWIGIISTYYGDVTNNPKFRGKATMTVDKSSTTAYMELARLTSEDSAIYYCARNDLFAYWGQGTLVTVSA

SEQ ID NO: 2714 - protein, 123 aa, Artificial Sequence
  source: /note="Description of Artificial Sequence: Synthetic heavy chain variable domain"
SDVQLQESGPGLVKPSQSLSLTCTVTGYSITSDYAWNWIRQFPGNKLEWMVSYSGYTNYNPSLKSRISITRDTSKNQFFLQLISVTTEDTATYYCARGDAYDVRRSTYYFDYWGQGTTLTVSS

SEQ ID NO: 2715 - protein, 114 aa, Artificial Sequence
  source: /note="Description of Artificial Sequence: Synthetic heavy chain variable domain"
QLEESGAELMQPGASVKVSCKATLEEGYTFTVYWIEWVKQRPGHGLEWIGEILPGSGSTDYNEKFKGKATFTADSSSNTAYMQLSSLTTEDSAIYYCARGKLHWGQGTLVTVSA

SEQ ID NO: 2716 - protein, 118 aa, Artificial Sequence
  source: /note="Description of Artificial Sequence: Synthetic heavy chain variable domain"
EVKLLESGGGLVQPGGSLKLSCAASGFDFSKDWMSWVRQAPGKGLEWIGEINPDSRTINYAPSLKDKFIISRENAKNTLYLQMSKVRSEDTALYYCARWDYDGGMDYWGQGTSVTVSS

SEQ ID NO: 2717 - protein, 118 aa, Artificial Sequence
  source: /note="Description of Artificial Sequence: Synthetic heavy chain variable domain"
EVKLLESGGGLVQPGGSLKLSCAASGFDFSRYWMSWVRQAPGKGLEWIGEINPDSSTINYTPSLKDKFIISRDNAKNTLYLQMSKVRSEDTALYYCARPGYGNLFAYWGQGTLVTVSA

SEQ ID NO: 2718 - protein, 122 aa, Artificial Sequence
  source: /note="Description of Artificial Sequence: Synthetic heavy chain variable domain"
EVQLQQSGPELVKPGASVKMSCKASGYTFTSYVIHWVKQKPGQGLEWIGYIINPFSDGTKFTEKFKGKASLTSDKSSSTAYMELNSLTSEDSAVYYCARRGPYYYGTAMDYWGQGTSVTVSS

SEQ ID NO: 2719 - protein, 122 aa, Artificial Sequence
  source: /note="Description of Artificial Sequence: Synthetic heavy chain variable domain"
QVQLQQSGAELGRPGASVKLSCKDSGYTITIYWMQWVKQRPGQGLEWIGAIYPGDGDTRYPQKFKGKSTLSADKSSNTASMHLSSLASDDSAVYYCSRGGSTNYDYDGFAYWGQGTLVTVSA

SEQ ID NO: 2720 - protein, 113 aa, Artificial Sequence
  source: /note="Description of Artificial Sequence: Synthetic heavy chain variable domain"
QVQLQQSGAELMKPGASVKISCKATGYTFSNYWIEWVKQRPGHGLEWIGEILPGRGSTNYNEKFKGKATFTADTSSNTAYMQLSSLTSEDSAVYYCARGKQYWGQGTTLTVSS

SEQ ID NO: 2721 - protein, 120 aa, Artificial Sequence
  source: /note="Description of Artificial Sequence: Synthetic heavy chain variable domain"
QVQLQQPGAELVKPGASVKLSCKASGYTFTSYWMHWVKQRPGQGLEWIGEINPSNGRSNYNEKFKSKATLTVDKSSSTAYMQLSSLTSEDSAVYFCAHYYDGSYGFFDYWGQGTTLTVSS

SEQ ID NO: 2722 - protein, 118 aa, Artificial Sequence
  source: /note="Description of Artificial Sequence: Synthetic heavy chain variable domain"
EVKLLESGGGLVQPGGSLKVSCTASGFDFSRYWMSWVRQAPGKGLEWIGEINPDSSTINYTPSLKDKFIISRDNAKNTLYLQMSKVRSEDTALYYCARPGYGNLFVYWGQGTLVTVSS

SEQ ID NO: 2723 - protein, 116 aa, Artificial Sequence
  source: /note="Description of Artificial Sequence: Synthetic heavy chain variable domain"
EVKLLESGGGLVQPGGSLRLSCAASGFDFSKDWMSWVRQAPGKGLEWIGEINPDSSTINYAPALKDKFIISRENAKNTLYLQMNKVRSEDTALYYCARWSTGLDYWGQGTTLTVSS

SEQ ID NO: 2724 - protein, 116 aa, Artificial Sequence
  source: /note="Description of Artificial Sequence: Synthetic heavy chain variable domain"
QVQLQQSGPELVKPGASVKISCKASGYPFSTSWMNWVKQRPGKGLEWIGRIYLGDGDTNYNGKFTGKATLTADKSSSTVYMQLSSLTSEDSAVYFCARWRGDYDYWGQGTTLTVSS

SEQ ID NO: 2725 - protein, 118 aa, Artificial Sequence
  source: /note="Description of Artificial Sequence: Synthetic heavy chain variable domain"
SDVQLQESGPGLVKPSQTLSLTCSVPDYSITSDYHWHWIRQFPGNKLEWMGYISSRGSTNYNPSLKNRISITHDTSENQFFLKLTSVTTEDSATYYCAGLSQLALDYWGQGTTLTVSS

SEQ ID NO: 2726 - protein, 120 aa, Artificial Sequence
  source: /note="Description of Artificial Sequence: Synthetic heavy chain variable domain"
QVTLKESGPGILKPSQTLSLTCSFSGFSLSTSNMGVGWIRQPSGKGLEWLAHIWWDDDKYYNPSLKSQLTISKDTSRNQVFLKITSVDTEDTATYYCVRSNYGYAWFAYWGQGTLVTVSA

SEQ ID NO: 2727 - protein, 119 aa, Artificial Sequence
  source: /note="Description of Artificial Sequence: Synthetic heavy chain variable domain"
QVQLQQSGPEVVRPGVSVKISCKGSGYTFTDYAVHWVKLSHAKSLEWIGVISTYNDYTYNNQDFKGKATMTVDKSSSTAYMELARLTSEDSAIYYCARGNSYFYALDYWGQGTSVTVSS

SEQ ID NO: 2728 - protein, 121 aa, Artificial Sequence
  source: /note="Description of Artificial Sequence: Synthetic heavy chain variable domain"
QVQLQQSGAELASPGTSVKLSCKASGYTFTFYGISWVKQKTGQGLEWIGEIYPGSYNAYYNDKFKGKATLTADRSSSTAYMQLSSLTSEDSAVYFCARDYGDPYYYAMDYWGQGTSVTVSS

SEQ ID NO: 2729 - protein, 118 aa, Artificial Sequence
  source: /note="Description of Artificial Sequence: Synthetic heavy chain variable domain"
EVKLLESGGGLVQPGGSQKLSCAASGFDFSRYWMSWVRQAPGKGLEWIGEINPDSSTVNYTPSLKDKFIISRDNAKNTLYLQMSKVRSEDTALYYCARPGYGNLFVYWGQGTLVTVSA

SEQ ID NO: 2730 - protein, 118 aa, Artificial Sequence
  source: /note="Description of Artificial Sequence: Synthetic heavy chain variable domain"
EVQLQQSGAESVRSGASVKLSCTASGLNIKDYYMHWVNLRPEQGLEWIGWIDPENGDTEYAPEFQGKATMTADTSSNTAYLQLSSLTSEDTAVYYCNACNYGSAYGYWGQGTTLTVSS

SEQ ID NO: 2731 - protein, 120 aa, Artificial Sequence
  source: /note="Description of Artificial Sequence: Synthetic heavy chain variable domain"
EVKLLESGGGLVQPGGSLKLSCAASGFDFSRYWMSWVRQAPGKGLEWIGDLNPDSSAINYTPSLKDKFIISRDNAKNTLYLQMSKVRSEDTALYYCTLITTLVPYTMDFWGQGTSVTVSS

SEQ ID NO: 2732 - protein, 120 aa, Artificial Sequence
  source: /note="Description of Artificial Sequence: Synthetic heavy chain variable domain"
EIHLVESGGGLVKPGGSLKVSCAASGFTFSRYAMSWVRQTPEKRLEWVATISGGGRYTYYPDLVKGRFTISRDIARTTLYLQMSSLRSEDTAMYYCARTARASNYAMDYWGQGTSVTVSS

SEQ ID NO: 2733 - protein, 120 aa, Artificial Sequence
  source: /note="Description of Artificial Sequence: Synthetic heavy chain variable domain"
QITLKESGPTLVKPTQTLTLTCTFSGFSLSTSNMGVGWIRQPPGKALEWLAHIWWDDDKYYSPSLKSRLTITKDTSKNQVVLTMTNMDPVDTATYYCVRSNYGYAWFAYWGQGTLVTVSS

SEQ ID NO: 2734 - protein, 119 aa, Artificial Sequence
  source: /note="Description of Artificial Sequence: Synthetic heavy chain variable domain"
QVQLVQSGPEVKKPGASVKVSCKASGYTFTDYAVHWVRQAPGKRLEWIGVISTYNDYTYNNQDFKGRVTMTRDTSASTAYMELSRLRSEDTAVYYCARGNSYFYALDYWGQGTSVTVSS

SEQ ID NO: 2735 - protein, 118 aa, Artificial Sequence
  source: /note="Description of Artificial Sequence: Synthetic heavy chain variable domain"
QVQLVQSGAEVKKPGASVKVSCKASGYTFKDYYMHWVRQAPGQGLEWMGWIDPENGDTEYAPEFQGRVTMTRDTSTSTVYMELSSLRSEDTAVYYCNACNYGSAYGYWGQGTTLTVSS

SEQ ID NO: 2736 - protein, 120 aa, Artificial Sequence
  source: /note="Description of Artificial Sequence: Synthetic heavy chain variable domain"
EVQLVESGGGLVQPGGSLRLSCAASGFDFSRYWMSWVRQAPGKGLEWIGDLNPDSSAINYVDSVKGRFTISRDNAKNSLYLQMNSLRAEDTAVYYCTLITTLVPYTMDFWGQGTSVTVSS

SEQ ID NO: 2737 - protein, 117 aa, Artificial Sequence
  source: /note="Description of Artificial Sequence: Synthetic heavy chain variable domain"
QVQLVQSGAEVKKPGSSVKVSCKASGGTFSSYTINWVRQAPGQGLEWMGGFIPISGTVNYAQKFQGRVTITADESTSTAYMELSSLRSEDTAVYYCARPLDWTEDIWGQGTLVTVSS

SEQ ID NO: 2738 - protein, 116 aa, Artificial Sequence
  source: /note="Description of Artificial Sequence: Synthetic heavy chain variable domain"
QVQLQQWGAGLLKPSETLSLTCAVYGGSFSGYYWSWIRQSPGKGLEWIGEVNHSGNTNYNPSLKSRVTISLDTSKNQFSLKLNSVTAADTAVYYCARYFPPMIDVWGQGTLVTVSS

SEQ ID NO: 2739 - protein, 122 aa, Artificial Sequence
  source: /note="Description of Artificial Sequence: Synthetic heavy chain variable domain"
QLQLQESGPGLVKPSETLSLSCTVSGGSISSSSYYWGWIRQPPGKGLEWIGEINHSGSTNYNPSLKSRVTISVDTSKNQFSLKLSSVTAADTAVYYCARYSHHVDSGGYDVWGQGTLVTVSS

SEQ ID NO: 2740 - protein, 117 aa, Artificial Sequence
  source: /note="Description of Artificial Sequence: Synthetic heavy chain variable domain"
EVQLVESGAEVKEPGSSVKVSCKASGGTFSSYGISWIRQAPGQGLEWMGEIIPIFGTPNYAQKFQGRVTITADESTSTAYVELSSLRSDDTAVYYCARSYYGYFDGWGQGTLVTVSS

SEQ ID NO: 2741 - protein, 118 aa, Artificial Sequence
  source: /note="Description of Artificial Sequence: Synthetic heavy chain variable domain"
QVQLVQSGAEVKKPGSSVKVSCKASGGTFSSYAISWVRQAPGQGLEWMGGIIPIFGKGNYPQKFQGRVTITADESTGTAYMELSSLRSEDTAVYYCARHIPTFSFDYWGQGTLVTVSS

SEQ ID NO: 2742 - protein, 118 aa, Artificial Sequence
  source: /note="Description of Artificial Sequence: Synthetic heavy chain variable domain"
EVQLVESGAEVKKPGASVKISCKASGYTFTSYYMHWVRQAPGQGLEWMGIINPSGGSTSYAQKFQGRVTMTRDTSTSTVYMELSSLRSEDTAVYYCARSMYQYFLDSWGQGTLVTVSS

SEQ ID NO: 2743 - protein, 117 aa, Artificial Sequence
  source: /note="Description of Artificial Sequence: Synthetic heavy chain variable domain"
DIQMTQTTSSLSASLGDRVTISCRASQDISNYLNWYQQKPDGTVKLLIYYTSRLHSGVPSRFSGSGSGTDYSLTISNLEQEDIATYFCQQGNTLPRTFGGGTKLEIKRQQGNTLPRT

SEQ ID NO: 2744 - protein, 119 aa, Artificial Sequence
  source: /note="Description of Artificial Sequence: Synthetic heavy chain variable domain"
QVQLKESGPGLVAPSQSLSITCTVSGFSLTGYGVNWVRQPPGKGLEWLGMIWVDGGTDYNSALKSRLSISKDNSKSQVFLKMNSLQTDDTARYYCARGGSSLLGFAYWGQGTLVTVSAA

SEQ ID NO: 2745 - protein, 224 aa, Artificial Sequence
  source: /note="Description of Artificial Sequence: Synthetic heavy chain variable domain"
QVQLQQPGGGLVKPGASVKMSCKASGYTFTSYNMHWVKQTPGRGLEWIGAIYPGNGDTSYNQKFKGKATLTADKSSSTAYMQLSSLTSEDSAIYYCARSTYYGGDWYFNVWGAGTTVTVSAASTKGPSVFPLAPSSKSTSGGTAALGCLVKDYFPEPVTVSWNSGALTSGVHTFPAVLQSSGLYSLSSVVTVPSSSLGTQTYICNVNHKPSNTKVDKKVEPKSC

SEQ ID NO: 2746 - protein, 118 aa, Artificial Sequence
  source: /note="Description of Artificial Sequence: Synthetic heavy chain variable domain"
QVQLQQSGAELVRPGASVTLSCKASGYTFSDYEMHWVIQTPVHGLEWIGAIDPETGGTAYNQKFKGKAILTADKSSSTAYMELRSLTSEDSAVYYCTGYYDYDSFTYWGQGTLVTVSA

SEQ ID NO: 2747 - protein, 119 aa, Artificial Sequence
  source: /note="Description of Artificial Sequence: Synthetic heavy chain variable domain"
EVKLVESGGGLVKPGGSLKLSCAASGFTFSSYAMSWVRQIPEKRLEWVASISRGGTTYYPDSVKGRFTISRDNVRNILYLQMSSLRSEDTAMYYCGRYDYDGYYAMDYWGQGTSVTVSS

SEQ ID NO: 2748 - protein, 117 aa, Artificial Sequence
  source: /note="Description of Artificial Sequence: Synthetic heavy chain variable domain"
QVQLKESGPGLVAPSQTLSITCTVSGFSLTSYGVHWVRQPPGKGLEWLGVIWAGGFTNYNSALKSRLSISKDNSKSQVLLKMTSLQTDDTAMYYCARRGSSYSMDYWGQGTSVTVSS

SEQ ID NO: 2749 - protein, 119 aa, Artificial Sequence
  source: /note="Description of Artificial Sequence: Synthetic heavy chain variable domain"
EVQLQQSGPELEKPGASVKISCKASGFAFTGYNMNWVKQTNGKSLEWIGSIDPYYGGSTYNQKFKDKATLTVDKSSSTAYMQLKSLTSDDSAVYYCARSPGGDYAMDYWGQGTSVTVSS

SEQ ID NO: 2750 - protein, 118 aa, Artificial Sequence
  source: /note="Description of Artificial Sequence: Synthetic heavy chain variable domain"
QVQLQQPGAELVKPGTSVKLSCKASGYNFTNYWINWVKLRPGQGLEWIGEIYPGSGSTNYNEKFKSKATLTADTSSSTAYMQLSSLASEDSALYYCARDGNYYAMDYWGQGTSVTVSS

SEQ ID NO: 2751 - protein, 114 aa, Artificial Sequence
  source: /note="Description of Artificial Sequence: Synthetic heavy chain variable domain"
EVKLQQSGPELVKPGASVKISCKTSGYTFTEYTMHWVKQSHGKSLEWIGGINPNNGGTSYNQKFKGKATLTVDKSSSTAYMELRSLTSEDSAVYYCALQGFAYWGQGTPLTVSS

SEQ ID NO: 2752 - protein, 119 aa, Artificial Sequence
  source: /note="Description of Artificial Sequence: Synthetic heavy chain variable domain"
EVKLQESGAELARPGASVKMSCKASGYTFTSYTMHWVKQRPGQGLEWIGYINPSSGYTEYNQKFKDKTTLTADKSSSTAYMQLSSLTSGDSAVYYCARRVLWLRRGDYWGQGTILTVSA

SEQ ID NO: 2753 - protein, 118 aa, Artificial Sequence
  source: /note="Description of Artificial Sequence: Synthetic heavy chain variable domain"
  MOD_RES (3)..(3): Any amino acid
  MOD_RES (60)..(60): Any amino acid
  MOD_RES (92)..(92): Any amino acid
EVXLVESGGGLVKPGGSLRLSCAASGFTFSSYAMSWVRQAPGKGLEWVASISTGASAYFXDSVKGRFTISRDNAKNSLYLQMNSLRAEDTAXYYCARITTSTWYFDVWGQGTTVTVSS

SEQ ID NO: 2754 - protein, 119 aa, Artificial Sequence; identical to SEQ ID NO: 2747
  source: /note="Description of Artificial Sequence: Synthetic heavy chain variable domain"

SEQ ID NO: 2755 - protein, 117 aa, Artificial Sequence
  source: /note="Description of Artificial Sequence: Synthetic heavy chain variable domain"
  MOD_RES (5)..(5): Any amino acid
  MOD_RES (13)..(13): Any amino acid
  MOD_RES (61)..(61): Any amino acid
  MOD_RES (88)..(88): Any amino acid
  MOD_RES (92)..(92): Any amino acid
QVQLXESGPGLVXPSETLSLTCTVSGFSLTSYGVHWVRQPPGKGLEWLGVIWAGGFTNYNXSLKSRLTISKDNSKNQVSLKLSSVTAXDTAXYYCARRGSSYSMDYWGQGTLVTVSS

SEQ ID NO: 2756 - protein, 118 aa, Artificial Sequence; identical to SEQ ID NO: 2750
  source: /note="Description of Artificial Sequence: Synthetic heavy chain variable domain"

SEQ ID NO: 2757 - protein, 118 aa, Artificial Sequence
  source: /note="Description of Artificial Sequence: Synthetic heavy chain variable domain"
EVKLVESGGGLVKPGGSLKLSCAASGFTFSSYAMSWVRQTPEKRLEWVASISTGASAYFPDSVKGRFTISRDNARNILYLQMSSLRSEDTAMYYCARITTSTWYFDVWGAGTTVTVSS

SEQ ID NO: 2758 - protein, 119 aa, Artificial Sequence; identical to SEQ ID NO: 2752
  source: /note="Description of Artificial Sequence: Synthetic heavy chain variable domain"

SEQ ID NO: 2759 - protein, 118 aa, Artificial Sequence; identical to SEQ ID NO: 2746
  source: /note="Description of Artificial Sequence: Synthetic heavy chain variable domain"

SEQ ID NO: 2760 - protein, 119 aa, Artificial Sequence; identical to SEQ ID NO: 2747
  source: /note="Description of Artificial Sequence: Synthetic heavy chain variable domain"

SEQ ID NO: 2761 - protein, 117 aa, Artificial Sequence; identical to SEQ ID NO: 2748
  source: /note="Description of Artificial Sequence: Synthetic heavy chain variable domain"

SEQ ID NO: 2762 - protein, 116 aa, Artificial Sequence
  source: /note="Description of Artificial Sequence: Synthetic heavy chain variable domain"
QVQLQESGPGLVKPSQTLSLTCTVSGYAFTAYNIHWVRQAPGQGLEWMGSFDPYDGGSSYNQKFKDRLTISKDTSKNQVVLTMTNMDPVDTATYYCARGWYYFDYWGHGTLVTVSS

SEQ ID NO: 2763 - protein, 116 aa, Artificial Sequence
  source: /note="Description of Artificial Sequence: Synthetic heavy chain variable domain"
QVQLQESGPGLVKPSQTLSLTCTVSGYAFTAYNIHWIRQPPGKGLEWIGSFDPYDGGSSYNQKFKDRLTISKDTSKNQVVLTMTNMDPVDTATYYCARGWYYFDYWGHGTLVTVSS

SEQ ID NO: 2764 - protein, 122 aa, Artificial Sequence
  source: /note="Description of Artificial Sequence: Synthetic heavy chain variable domain"
QITLKESGGGLVKPGGSLRLSCAASGFTFSNAWMSWVRQAPGKGLEWVGRIRSKTDGGTTDYAALVKGRFTISRDDSENTLYLQMNSLKTEDTAVYYCARDFGRWSYYFDYWSQGTLVTVSS

SEQ ID NO: 2765 - protein, 122 aa, Artificial Sequence
  source: /note="Description of Artificial Sequence: Synthetic heavy chain variable domain"
QITLKESGGGLVKPGGSLRLSCAASGFTFSNAWMSWVRQAPGKGLEWVGRIKSKTDGGTTDYAAPVKGRFTISRDDSKNTLYLQMNSLKTEDTAVYYCARDFGRWSYYFDYWSQGTLVTVSS

SEQ ID NO: 2766 - protein, 122 aa, Artificial Sequence
  source: /note="Description of Artificial Sequence: Synthetic heavy chain variable domain"
QVQLVESGGGLVKPGGSLRLSCAASGFTFSNAWMSWVRQAPGKGLEWVGRIKSKTDGGTTDYAAPVKGRFTISRDDSKNSLYLQMNSLKTEDTAVYYCARDFGRWSYYFDYWGQGTLVTVSS

SEQ ID NO: 2767 - protein, 122 aa, Artificial Sequence
  source: /note="Description of Artificial Sequence: Synthetic heavy chain variable domain"
QVTLKESGGGLVKPGGSLRLSCAASGFTFSNAWMSWVRQAPGKGLEWVGRIKSKTDGGTTDYAAPVKGRFTISRDDSKNTLYLQMNSLRTEDTAVYYCARDFGRWSYYFDYWSQGTLVTVSS

SEQ ID NO: 2768 - protein, 122 aa, Artificial Sequence
  source: /note="Description of Artificial Sequence: Synthetic heavy chain variable domain"
EVQLVESGGGLVKPGGSLRLSCAASGFTFSNAWMSWVRQAPGKGLEWVGRIKSKTDGGTTDYAAPVKGRFTISRDDSKNTLYLQMNSLRTEDTAVYYCARDFGRWSYYFDYWSQGTLVTVSS

SEQ ID NO: 2769 - protein, 119 aa, Artificial Sequence
  source: /note="Description of Artificial Sequence: Synthetic heavy chain variable domain"
EVQLVESGGGLVQPGRSLRLSCTASGFTFGDYAMSWVRQAPGKGLEWVSSISGSGRSTDHADYVKGRFTISRDNSKNTVYLQMNRLRAEDTAVYYCAKVSNYEYYFDYWAQGTLVTVSS

SEQ ID NO: 2770 - protein, 122 aa, Artificial Sequence
  source: /note="Description of Artificial Sequence: Synthetic heavy chain variable domain"
QVTLKESGGGLVKPGGSLRLSCAASGFTFSNAWMSWVRQAPGKGLEWVGRIKSKTDGGTTDYAAPVKGRFTISRDDSKNTLYLQMNSLKTEDTAVYYCARDFGRWSYYFDYWSQGTLVTVSS

SEQ ID NO: 2771 - protein, 122 aa, Artificial Sequence
  source: /note="Description of Artificial Sequence: Synthetic heavy chain variable domain"
EVQLVESGGGLVKPGGSLRLSCAASGFTFSNAWMSWVRQAPGKGLEWVGRIKSKTDGGTTDYAAPVKGRFTISRDDSKNTLYLQMNSLKTEDTAVYYCARDFGRWSYYFDYWSQGTLVTVSS

SEQ ID NO: 2772 - protein, 125 aa, Artificial Sequence
  source: /note="Description of Artificial Sequence: Synthetic heavy chain variable domain"
QVQLVESGGGLVKPGRSLRLSCTASGFTFGDYAMSWFRQAPGKGLEWVGFIRSKAYGGTTEYAASVKGRFTISRDDSKSIAYLQMNSLKTEDTAVYYCAKDFEVREAHLSYFDYWGQGTLVTVSS

SEQ ID NO: 2773 - protein, 125 aa, Artificial Sequence
  source: /note="Description of Artificial Sequence: Synthetic heavy chain variable domain"
EVQLVESGGGLVKPGRSLRLSCTASGFTFGDYAMSWFRQAPGKGLEWVGFIRSKAYGGTTEYAASVKGRFTISRDDSKSIAYLQMNSLKTEDTAVYYCAKDFEVREAHLSYFDYWGQGTLVTVSS

SEQ ID NO: 2774 - protein, 125 aa, Artificial Sequence
  source: /note="Description of Artificial Sequence: Synthetic heavy chain variable domain"
QVTLKESGGGLVKPGGSLRLSCAASGFTFSNAWMSWVRQAPGKELEWVGRIKSKTDGGTTDYAAPVKGRFTISRDDSKKTLYLQMNSLKTEDTAVYYCARGSNERFLEWLNFDYWGQGTLVTVSS

SEQ ID NO: 2775 - protein, 122 aa, Artificial Sequence
  source: /note="Description of Artificial Sequence: Synthetic heavy chain variable domain"
EVQLLESGGGVVQPGGSLRLSCAASGFTFDTFWMSWVRQAPGKGLEWVGRIKSKTDGGTTDYAAPVKGRFTISRDDSKNTLYLQMNSLKTEDTAVYYCARDFGRWSYYFDYWSQGTLVTVSS

SEQ ID NO: 2776 - protein, 125 aa, Artificial Sequence
  source: /note="Description of Artificial Sequence: Synthetic heavy chain variable domain"
QITLKESGGGLVKPGRSLRLSCTASGFTFGDYAMSWFRQAPGKGLEWVGFIRSKAYGGTTEYAASVKGRFTISRDDSKSIAYLQMNSLKTEDTAVYYCAKDFEVRGAHLSYFDYWGQGTLVTVSS

SEQ ID NO: 2777 - protein, 123 aa, Artificial Sequence
  source: /note="Description of Artificial Sequence: Synthetic heavy chain variable domain"
QVQLVESGGGLVQPGGSLRLSCAASGFTFSTSAMSWVRQAPGKGLEWVSTISTDGATTWYADSVRGRFSVSRDNSKNTLYLQMTGLRAEDTAVYYCARVLRSGFLEWNLFDYWGQGTLVTVSS

SEQ ID NO: 2778 - protein, 120 aa, Artificial Sequence
  source: /note="Description of Artificial Sequence: Synthetic heavy chain variable domain"
QVQLLESGGGLVQPGGSLRLSCAASGFTFSSYAMSWVRQAPGKGLEWVSAISGSGGSTYYADSVKGRFTISRDNSKNTLYLQMNSLRAEDTAVYYCARVIFGVVNIPDYWGQGTLVTVSS

SEQ ID NO: 2779 - protein, 125 aa, Artificial Sequence
  source: /note="Description of Artificial Sequence: Synthetic heavy chain variable domain"
QVQLVESGGGLVKPGGSLRLSCAASGFTFINAWMSWVRQAPGKGLEWVGRIKSKTDGGTTDYAAPVKGRFTISRDDSKNTLYLQMNSLKTEDTAVYYCARTYSSSWYESLLFDYWGQGTLVTVSS

SEQ ID NO: 2780 - protein, 127 aa, Artificial Sequence
  source: /note="Description of Artificial Sequence: Synthetic heavy chain variable domain"
QVQLVESGGGLVKPGGSLRLSCAASGFTFSNAWMSWVRQAPGKGLEWVGRIKSKTDGGTTDYAAPVKGRFTISRDDSKNTLYLQMNSLKTEDTAVYYCARQGDSSSWYVEVYYFDYWGQGTLVTVSS

SEQ ID NO: 2781 - protein, 126 aa, Artificial Sequence
  source: /note="Description of Artificial Sequence: Synthetic heavy chain variable domain"
QVQLVESGGGLVKPGGSLRLSCAASGFTFSNAWMSWVRQAPGKGLEWVGRIKSKTDGGTTDYAAPVKGRFTISRDDSKKTLYLQMNSLKTEDTAVYYCARGSGELRFLESYYFDYWGQGTLVTVSS

SEQ ID NO: 2782 - protein, 122 aa, Artificial Sequence
  source: /note="Description of Artificial Sequence: Synthetic heavy chain variable domain"
QVQLVESGGGLVQPGRSLRLSCTASGFTFGDYAMSWVRQAPGKGLEWVGFIRSKAYGGTTEYAASVKGRFTISRDDSQSIAYLQMDSLKTEDTAVYYCAKVGPSWDYYFDYWGQGTLVTVSS

SEQ ID NO: 2783 - protein, 125 aa, Artificial Sequence
  source: /note="Description of Artificial Sequence: Synthetic heavy chain variable domain"
QITLKESGGGLVKPGRSLRLSCTASGFTFGDYAMSWFRQAPGKGLEWVGFIRSKAYGGTTEYAASVKGRFTISRDDSKSIAYLQMNSLKTEDTAVYYCAKDFEVREAHLSYFDYWGQGTLVTVSS

SEQ ID NO: 2784 - protein, 125 aa, Artificial Sequence
  source: /note="Description of Artificial Sequence: Synthetic heavy chain variable domain"
EVQLVESGGGLVKPRGSLRLSCAASGFTFSNAWMSWVRQAPGKGLEWVGRIKSKTDGGTTDYAAPVKGRFTISRDDSKNTLYLQMNSLKTEDTAVYYCARTSRGRFLEWLLFDYWGQGTLVTVSS

SEQ ID NO: 2785 - protein, 123 aa, Artificial Sequence
  source: /note="Description of Artificial Sequence: Synthetic heavy chain variable domain"
EVQLVESGGGLVRPGGSLRLSCAASGLTFSRTWMSWVRQAPGKGLEWVASINDDGSEKYYVDSVKGRFTISRDNARNSLYLQMNRLRAEDTAVYYCARVDSERFLEWYYFDYWGQGTLVTVSS

SEQ ID NO: 2786 - protein, 121 aa, Artificial Sequence
  source: /note="Description of Artificial Sequence: Synthetic heavy chain variable domain"
QVQLQQWGAGLLKPSETLSLTCAVYGGSFSGYYWSWIRQPPGKGLEWIGKINHSGSTNYNPSLKSRVTISVDTSKNQFSLKLSSVTAADTAVYYCARGQIAAHVWGWFDPWGQGTLVTVSS

SEQ ID NO: 2787 - protein, 121 aa, Artificial Sequence
  source: /note="Description of Artificial Sequence: Synthetic heavy chain variable domain"
QITLKESGGGLVQPGGSLRLSCAASGFTFSSYAMSWVRQAPGKGLEWVSAISGSGGSTYYADSVKGRFTISRDNSKNTLYLQMNSLRAEDTAVYYCAKERSRWGDNWFDPWGQGTLVTVSS

SEQ ID NO: 2788 - protein, 118 aa, Artificial Sequence
  source: /note="Description of Artificial Sequence: Synthetic heavy chain variable domain"
EVQLVESGAEVKKPGSSVKVSCKASGGTFSSYAISWVRQAPGQGLEWMGGIIPIFGTANYAQKFQGRVTITADESTSTAYMELSSLRSEDTAVYYCARIYPPDAFDIWGQGTMVTVSS

SEQ ID NO: 2789 - protein, 125 aa, Artificial Sequence
  source: /note="Description of Artificial Sequence: Synthetic heavy chain variable domain"
EVQLVESGGGLVKPGGSLRLSCAASGFTFSNAWMSWVRQAPGKGLEWVGRIKSKTDGGTTDYAAPVKGRFTISRDDSKNTLYLQMNSLKTEDTAVYYCARDMVGAWLVLSYFDYWGQGTLVTVSS

SEQ ID NO: 2790 - protein, 119 aa, Artificial Sequence
  source: /note="Description of Artificial Sequence: Synthetic heavy chain variable domain"
EVQLVESGGGLVQPGGSLRLSCAASGFTFSSYWMSWVRQAPGKGLEWVANIKQDGSEKYYVDSVKGRFTISRDNAKNSLYLQMNSLRAEDTAVYYCARVRGSEYYFDYWGQGTLVTVSS

SEQ ID NO: 2791 - protein, 125 aa, Artificial Sequence
  source: /note="Description of Artificial Sequence: Synthetic heavy chain variable domain"
QVQLVESGGGLVQPGGSLRLSCAASGFTFSSYAMSWVRQAPGKGLEWVSAISGSGGSTYYADSVKGRFTISRDNSKNTLYLQMNSLRAEDTAVYYCAKGIGYSSSWYEIWTFDYWGQGTLVTVSS

SEQ ID NO: 2792 - protein, 125 aa, Artificial Sequence
  source: /note="Description of Artificial Sequence: Synthetic heavy chain variable domain"
QITLKESGGGLVQPGGSLRLSCAASGFTFSNAWMSWVRQAPGKGLEWVGRIKSKTDGGTTDYAAPLKGRFTISRDDSKNTLYLQMNSLKTEDTAVYYCARAKGLWFGESYYFDYWGQGTLVTVSS

SEQ ID NO: 2793 - protein, 119 aa, Artificial Sequence
  source: /note="Description of Artificial Sequence: Synthetic heavy chain variable domain"
QVQLVESGGGLVQPGGSLRLSCAASGFTFSSYWMSWVRQAPGKGLEWVANIKQDGSEKYYVDSVKGRFTISRDNAKNSLYLQMNSLRAEDTAVYYCARVNGGEYYFDYWGQGTLVTVSS

SEQ ID NO: 2794 - protein, 121 aa, Artificial Sequence
  source: /note="Description of Artificial Sequence: Synthetic heavy chain variable domain"
QVQLQQWGAGLLKPSETLSLTCAVYGGSFSGYYWSWIRQPPGKGLEWIGEINHSGSTNYNPSLKSRVTISVDTSKNQFSLKLSSVTAEDTAVYYCARGPLRPQKVLPFQIGAQGTLVTVSS

SEQ ID NO: 2795 - protein, 124 aa, Artificial Sequence
  source: /note="Description of Artificial Sequence: Synthetic heavy chain variable domain"
  MOD_RES (64)..(64): Any amino acid
QVQLVESGGGVVQPGRSLRLSCAASGFTFSSYAMHWVRQAPGKGLEWVAVISYDGSTNYNPSLXAASRVTISVDTSKNQFSLKLSSVTAADTAVYYCARVYGYDYRDFGWFDPWGQGTLVTVSS

SEQ ID NO: 2796 - protein, 126 aa, Artificial Sequence
  source: /note="Description of Artificial Sequence: Synthetic heavy chain variable domain"
  MOD_RES (64)..(64): Any amino acid
  MOD_RES (106)..(106): Any amino acid
QVQLVESGGGVVQPGRSLRLSCAASGFTFSSYAMHWVRQAPGKGLEWVAVISYDGSTNYNPSLXAASRVTISVDTSKNQFSLKLSSVTAADTAVYYCARVYGYDYXAADFGWFDPWGQGTLVTVSS

SEQ ID NO: 2797 - protein, 121 aa, Artificial Sequence
  source: /note="Description of Artificial Sequence: Synthetic heavy chain variable domain"
QEQLVESGGRLVTPGGSLTLSCKASGFDFSAYYMSWVRQAPGKGLEWIATIYPSSGKTYYATWVNGRFTISSDNAQNTVDLQMNSLTAADRATYFCARDSYADDGALFNIWGPGTLVTISS

SEQ ID NO: 2798 - protein, 121 aa, Artificial Sequence
  source: /note="Description of Artificial Sequence: Synthetic heavy chain variable domain"
QVQLQQSGAEVKKPGASVKVSCKASGYTFSRYYIHWVRRAPGQGLEWMGLINPGGGSTNYAQKFQGRVTMTRDTSTNTVYLELSSLRSDDTAVYYCARDYGTIDARRFDFWGQGTLVTVSS

SEQ ID NO: 2799 - protein, 120 aa, Artificial Sequence
  source: /note="Description of Artificial Sequence: Synthetic heavy chain variable domain"
QVQLVQSGAEVKKPGESLKISCKGSGYSFTSYWIGWVRQMPGKGLEWMGIIYPGDSDTRYSPSFQGQVTISADKSISTAYLQWSSLKASDTAMYYCARLSSSSYDAFDIWGQGTMVTVSS

SEQ ID NO: 2800 - protein, 120 aa, Artificial Sequence
  source: /note="Description of Artificial Sequence: Synthetic heavy chain variable domain"
EVQLVQSGAELKKPGSSVRVSCKTSGGSFKTHGISWVRQAPGQGLEWMGWINPNSGGALYVDNFQGRATMTRDTSINTAYMELRSLSSDDTAVYYCARGMADLIDVFDIWGQGTMVTVSS

SEQ ID NO: 2801 - protein, 121 aa, Artificial Sequence
  source: /note="Description of Artificial Sequence: Synthetic heavy chain variable domain"
EVQLVQSGGGVVQPGGPLRLSCAASGFTFSSYSMNWVRQAPGKGLEWVSSISSSSSYIYYADSVKGRFTISRDNAKNSLYLQMNSLRAEDTAVYYCARGLGGWTHDAFDIWGQGTMVTVSS

SEQ ID NO: 2802 - protein, 121 aa, Artificial Sequence
  source: /note="Description of Artificial Sequence: Synthetic heavy chain variable domain"
QVQLVQSGGGLVKPGGSLRLSCAASGFTFGTYSMNWVRQAPGKGLEWVSSISSSSSYIYYADSVKGRFTISRDNAKNSLYLQMNSLRAEDTAVYYCARGLGGWTHDAFDIWGQGTTVTVSS

SEQ ID NO: 2803 - protein, 119 aa, Artificial Sequence
  source: /note="Description of Artificial Sequence: Synthetic heavy chain variable domain"
EVQLVESGGGLVKPGGSLRLSCAASGFTFSDYYMGWVRQAPGKGLKWLSYISDRAHTIYDTDSVKGRFTISRDDAKSSLYLRMNNLRVEDTAVYYCARAVGAGEGFDYWGQGTLVTVSS

SEQ ID NO: 2804 - protein, 121 aa, Artificial Sequence
  source: /note="Description of Artificial Sequence: Synthetic heavy chain variable domain"
QMQLVQSGAEVKKPGASVKVSCKASGYTFSRYYIHWVRQAPGQGLEWMGLINPGGGSTNYAQKFQGRVTMTRDTSTNTVYLELSSLRSDDTAVYYCARDYGTIDARRFDFWGQGTLVTVSS

SEQ ID NO: 2805 - protein, 118 aa, Artificial Sequence
  source: /note="Description of Artificial Sequence: Synthetic heavy chain variable domain"
EVQLVQSGPGLVKPSGTLSLTCAVSGGSISSSNWWSWVRQPPGKGLEWIGEIYHSGSTNYNPSLKSRVTISVDKSKNQFSLKLGSVTAADTATYYCARDLWLGEWDLWGQGTLVTVSS

SEQ ID NO: 2806 - protein, 119 aa, Artificial Sequence
  source: /note="Description of Artificial Sequence: Synthetic heavy chain variable domain"
EVQLVESGGGLVKPGGSLKLSCAASGFTFSDYYMGWVRQAPGKGLKWLSYISDRAHTIYDTHSVKGRFTISRDDAKSSLYLRMNNLRVEDTAVYYCARAVGAGEGFDYWCQGTLVTVSS

SEQ ID NO: 2807 - protein, 121 aa, Artificial Sequence
  source: /note="Description of Artificial Sequence: Synthetic heavy chain variable domain"
EVQLVQSGAEVKKPGSSVKVSCKASGGTFSTFAINWVRQAPGQGLEWMGGVIPVSGTEDYSQKFQGRLSLTADESTGTAYMELSSLRSDDTAVYYCARDRSGRDWDYFDYWGQGTLVTVSS

SEQ ID NO: 2808 - protein, 118 aa, Artificial Sequence
  source: /note="Description of Artificial Sequence: Synthetic heavy chain variable domain"
EVQLVQSGAEVRKPGSSVKVSCKASGGSLSSHGVSWVRQAPGQGLEWMARIIPMFGLTDYAQNFQARVTISADRSTNTVYMEISNLGSEDTAVYFCARESLGATFEYWGQGTLVTVSS

SEQ ID NO: 2809 - protein, 118 aa, Artificial Sequence
  source: /note="Description of Artificial Sequence: Synthetic heavy chain variable domain"
QVQLVQSGTEVKKPGSSVKVSCQASGGSLSSHGVSWLRQAPGQGLEWVGRIIPMFGVTDYAQKFQDRVTITADKSTSTVYMELISLGSDDTAVYFCARESRGATFEYWGQGTLVTVSS

SEQ ID NO: 2810 - protein, 125 aa, Artificial Sequence
  source: /note="Description of Artificial Sequence: Synthetic heavy chain variable domain"
QVQLQQSGAEVKKPGASVKVSCKASGYTSTNYGISWVRQAPGQGLEWMGWISTYNGNTNYAQKLQGRVTMTTDTSTSTAYMELRSLRSDDTAVYYCARDYYSDSSGYWDDAFDIWGQGTMVTVSS

SEQ ID NO: 2811 - protein, 125 aa, Artificial Sequence
  source: /note="Description of Artificial Sequence: Synthetic heavy chain variable domain"
QVQLQQSGAEVKKPGASVRVSCKASGYSFGNNGITWVRQAPGQGLEWMGWISTYNGNTNYAQKLQGRVTMTTDTSTSTAYMELRSLRSDDTAVYYCARDYYSDSSGYWDDAFDIWGQGTTVTVSS

SEQ ID NO: 2812 - protein, 122 aa, Artificial Sequence
  source: /note="Description of Artificial Sequence: Synthetic heavy chain variable domain"
QVQLVQSGAEVKKPGASVKVSCKASGYTFTGYYMHWVRQAPGQGLEWMGWINPNSGGTNYAQKFQGRVTMTRDTSISTAYMELSRLRSDDTAVYYCARDGDMVYDSSGPDYWGQGTLVTVSS

SEQ ID NO: 2813 - protein, 119 aa, Artificial Sequence
  source: /note="Description of Artificial Sequence: Synthetic heavy chain variable domain"
QLQLQESGPGLVKPSETLSLTCTVSGGSISSSSYYWGWIRQPPGKGLEWIGSIYYSGSTYYNPSLKSRVTISVDTSKNQFSLKLGSVTAADTAVYYCARHDGTDAFDIWGQGTTVTVSS

SEQ ID NO: 2814 - protein, 125 aa, Artificial Sequence
  source: /note="Description of Artificial Sequence: Synthetic heavy chain variable domain"
EVQLVQSGAEVKKPGASVKVSCKASGYTFNNYGFSWVRQAPGQGLEWMGWISVYNGNTNYAQKLQGRVTMTTDTSTSTAYMELRSLRSDDTAVYYCARDYYSDSSGYWDDAFDIWGQGTMVTVSS

SEQ ID NO: 2815 - protein, 125 aa, Artificial Sequence
  source: /note="Description of Artificial Sequence: Synthetic heavy chain variable domain"
EVQLVQSGAEVKKPGSSVKISCKASGGAFTNFGISWVRQAPGQGLEWMGWISTYNSETNYAQKLQGRVTMTTDTSTSTAYMELRSLRSDDTAVYYCARDYYSDSSGYWDDAFDIWGQGTLVTVSS

SEQ ID NO: 2816 - protein, 119 aa, Artificial Sequence
  source: /note="Description of Artificial Sequence: Synthetic heavy chain variable domain"
QVQLQQSGPGLVKPSQTLSLTCAISGDSVSSNSATWNWIRQSPSRGLEWLGRTYYRSKWYNDYAVSVKSRIIINPDTSKNQFSLQLNSVTPEDTAVYYCARGVRAFDIWGQGTTVTVSS

SEQ ID NO: 2817 - protein, 120 aa, Artificial Sequence
  source: /note="Description of Artificial Sequence: Synthetic heavy chain variable domain"
QVQLVQSGAEVKEPGASVKVSCKASGYTFRNSGITWVRQAPGQGLEWMGWINPNSGGAMYVDNFQGRATMTRDTSINTAYMELRSLSSDDTAVYYCARGMADLIDVFDIWGQGTLVTVSS

SEQ ID NO: 2818 - protein, 118 aa, Artificial Sequence
  source: /note="Description of Artificial Sequence: Synthetic heavy chain variable domain"
EVQLVESGGGVVRPGGSLRLSCATSGFNFDNYGLSWVRQGPGKGLEWMGFIYKSVNTNYSPSLKSRLTISMDTSKNQFSLNLASVTTADTAIYYCARGKVETSVVDYWGQGTLVTVSS

SEQ ID NO: 2819 - protein, 119 aa, Artificial Sequence
  source: /note="Description of Artificial Sequence: Synthetic heavy chain variable domain"
QVTLKESGPTLLKPTQTLTLTCTFSGFSLSTRGVGVGWIRQPPGQALEWLTLIYWDDDKRYSPSLKSRLTITKDTSKNQVVLTMTNMESVDTATYYCAQQTMTGAFDIWGQGTTVTVSS

SEQ ID NO: 2820 - protein, 121 aa, Artificial Sequence
  source: /note="Description of Artificial Sequence: Synthetic heavy chain variable domain"
QVQLQESGPGLVKSSETLSLTCTVSGGSMNNYYWSWIRQPAGKGLEWMGRIYSSGSTNYNPALKSRVTMSVDTSKNQFSLNLSSVTAADTAIYYCARASWSGTYWALFDYWGQGTLVTVSS

SEQ ID NO: 2821 - protein, 125 aa, Artificial Sequence
  source: /note="Description of Artificial Sequence: Synthetic heavy chain variable domain"
EVQLVQSGNEVKRPGASVKVSCKASGHSFSTYGFSWVRQAPGQGLEWMGWISTYNGNTNYAQKLQGRVTMTTDTSTSTAYMELRSLRSDDTAVYYCARDYYSDSSGYWDDAFDIWGQGTLVTVSS

SEQ ID NO: 2822 - protein, 119 aa, Artificial Sequence
  source: /note="Description of Artificial Sequence: Synthetic heavy chain variable domain"
QLQLQESGPGLVKPSETLSLTCTVSGGSISSNSYYWGWIRQPPGKGLEWIGSIYYSGSTYYNPSLKSRVTISVDTSKNQFSLKLGSVTAADTAVYYCARHDGTDAFDIWGQGTTVTVSS

SEQ ID NO: 2823 - protein, 121 aa, Artificial Sequence
  source: /note="Description of Artificial Sequence: Synthetic heavy chain variable domain"
QMQLVQSGGDLVQPGGSLRLSCAASGFTFSSYSMNWVRQAPGKGLEWVSSISSSSSYIYYADSVKGRFTISRDNAKNSLYLQMNSLRAEDTAVYYCARGLGGWTHDAFDIWGQGTTVTVSS

SEQ ID NO: 2824 - protein, 121 aa, Artificial Sequence
  source: /note="Description of Artificial Sequence: Synthetic heavy chain variable domain"
QVQLVQSGGDLVQPGGSLRLSCAASGFTFSSYSMNWVRQAPGKGLEWVSSISSSSSYIYYADSVKGRFTISRDNAKNSLYLQMNSLRAEDTAVYYCARGLGGWTHDAFDIWGQGTTVTVSS

SEQ ID NO: 2825 - protein, 119 aa, Artificial Sequence
  source: /note="Description of Artificial Sequence: Synthetic heavy chain variable domain"
EVQLVQSGAEVKKPGESLKISCKGSGYSFSRYWIGWVRQMPGKGLEWMGIIYPRDSDTRYSPSFQGQVTISADKSISTAYLQWSSLKASDTAMYYCATPVVTAGAFDIWGQGTMVTVSS

SEQ ID NO: 2826 - protein, 121 aa, Artificial Sequence
  source: /note="Description of Artificial Sequence: Synthetic heavy chain variable domain"
EVQLVQSGGDLVQPGGSLRLSCAASGFTFSSYSMNWVRQAPGKGLEWVSSISSSSSYIYYADSVKGRFTISRDNAKNSLYLQMNSLRAEDTAVYYCARGLGGWTHDAFDIWGQGTTVTVSS

SEQ ID NO: 2827 - protein, 116 aa, Artificial Sequence
  source: /note="Description of Artificial Sequence: Synthetic heavy chain variable domain"
EVQLVETGGGLVKPGGSLRLSCEASGFSLSSYSMNWVRQAPGKGLEWVSSISSSSTHIYYADSLKGRFTISRDNAKNSLFLQMDNLRAEDTAVYYCARATIGFDYWGQGTLVTVSS

SEQ ID NO: 2828 - protein, 121 aa, Artificial Sequence
  source: /note="Description of Artificial Sequence: Synthetic heavy chain variable domain"
EVQLVQSGAEVKKPGASVKVSCKASGYTFTDYYIHWVRQAPGQGLEWMGWMNPNSGNSVSAQKFQGRVTMTRDTSINTAYMELSSLTSDDTAVYYCARNSEWHPWGYYDYWGQGTLVTVSS

SEQ ID NO: 2829 - protein, 121 aa, Artificial Sequence
  source: /note="Description of Artificial Sequence: Synthetic heavy chain variable domain"
QVQLVQSGAEVKKPGASVKVSCKASGYTFSRYYIHWVRQAPGQGLEWMGLINPGGGSTNYAQKFQGRVTMTRDTSTNTVYLELSSLRSDDTAVYYCARDYGTIDARRFDFWGQGTLVTVSS

SEQ ID NO: 2830 - protein, 121 aa, Artificial Sequence
  source: /note="Description of Artificial Sequence: Synthetic heavy chain variable domain"
QVQLQQSGAEVKKPGASVKVSCKASGYTFSRYYIHWVRQAPGQGLEWMGIINTDGGTTTYAQKFQGRLTMTRDTSTSTVYMELSSLRSDDTAVYYCARDYGTIDARRFDYWGQGTLVTVSS

SEQ ID NO: 2831 - protein, 125 aa, Artificial Sequence
  source: /note="Description of Artificial Sequence: Synthetic heavy chain variable domain"
QVQLQQSGAEVKKPGASVKVSCKASGHTFSNYGISWVRQAPGQGLEWMGWISTYNGNTNYAQKLQGRVTMTTDTSTSTAYMELRSLRSDDTAVYYCARDYYSDSSGYWDDAFDIWGQGTTVTVSS

SEQ ID NO: 2832 - protein, 119 aa, Artificial Sequence
  source: /note="Description of Artificial Sequence: Synthetic heavy chain variable domain"
EAQLVESGGGLVKPGGSLRLSCAASGFTFSDYYMGWVRQAPGKGLKWLSYISDRAHTIYDTDSVKGRFTISRDDAKSSLYLRMNNLRVEDTAVYYCARAVGAGEGFDYWGQGTLVTVSS

SEQ ID NO: 2833 - protein, 125 aa, Artificial Sequence
  source: /note="Description of Artificial Sequence: Synthetic heavy chain variable domain"
QVTLKESGPTLVKPTQTLTLTCTFSGFSLSSFGVAVGWFRQPPGKALEWLGLIYWDDDKRYSPSLKTRLTITKDTSKNQVVLTMTNMDPVDTATYYCAHKGGIATTGSPNWFDPWGQGTLVTVSS

SEQ ID NO: 2834 - protein, 126 aa, Artificial Sequence
  source: /note="Description of Artificial Sequence: Synthetic heavy chain variable domain"
QVTLKESGPTLVKPTQTLTLTCTFSGFSLNSFGVAVGWFRQPPGKALEWLGLIYWDDDRRYFPSLEGRLSITKDASDNNVVLTMMNVDPADTATYYCARTSPMVQGIANYYAMDVWGQGTTVTVSS

SEQ ID NO: 2835 - protein, 124 aa, Artificial Sequence
  source: /note="Description of Artificial Sequence: Synthetic heavy chain variable domain"
QLQLQESGPGVVKPSGTLSLTCTVSGGSISRSDGYWGWVRQPPGKGLEWIGSIYDTGTTYYSPSLKSRLIISVDTSKNQFSLTLNSVTAADTAVYYCASMGGLRSSSSDAFHTWGPGTMVTVSS

SEQ ID NO: 2836 - protein, 119 aa, Artificial Sequence
  source: /note="Description of Artificial Sequence: Synthetic heavy chain variable domain"
EVQLVESGGGLVKPGGSLRLSCAASGFTFSDYYMSWIRQAPGKGLEWVSYISDSTNTIYYADSVKGRFTVSRDNPKNSLYLQMISLRAEDTAVYYCARAVGAGEGFDHWGQGTLVTVSS

SEQ ID NO: 2837 - protein, 120 aa, Artificial Sequence
  source: /note="Description of Artificial Sequence: Synthetic heavy chain variable domain"
QVQLVQSGAEVKKPGESLKISCKDSGYSFTNYWLGWVRQMPGKGLEWMGIIYPGDSDTRYSPSFRGQVTISADKSISTAYLQWSSLKASDTAMYYCARLNLATHTAFDIWGQGTTVTVSS

SEQ ID NO: 2838 - protein, 120 aa, Artificial Sequence
  source: /note="Description of Artificial Sequence: Synthetic heavy chain variable domain"
QMQLVQSGAEVKKPGASVKVSCKASGYTFTSYYMHWVRQAPGQGLEWMGIINPSGGSTSYAQKFQGRVTMTRDTSTSTVYMELSSLRSEDTAVYYCARGGYTGWSPSDPWGQGTLVTVSS

SEQ ID NO: 2839 - protein, 118 aa, Artificial Sequence
  source: /note="Description of Artificial Sequence: Synthetic heavy chain variable domain"
QVQLQQSGPELVKPGASVKISCKASGYSFSDYYMHWVKQSPENSLEWIGQINPTTGGASYNQKFKGKATLTVDKSSSTAYMQLKSLTSEESAVYYCTRYYYGRHFDVWGQGTTVTVSS

SEQ ID NO: 2840 - protein, 118 aa, Artificial Sequence
  source: /note="Description of Artificial Sequence: Synthetic heavy chain variable domain"
QVQLQQSGAELAKPGASVKMSCKASGYTFTRYWMHWVKQRPGQGLEWIGYINPSTGYSDYNQKFKDKATLTADKSSSTAYMQLSSLTSEDSAVYYCARDPYGWTMDSWGQGTLVTVSS

SEQ ID NO: 2841 - protein, 118 aa, Artificial Sequence
  source: /note="Description of Artificial Sequence: Synthetic heavy chain variable domain"
QVQLVQSGAEVKKPGSSVKVSCKASGYSFSDYYMHWVRQAPGQGLEWMGQINPTTGGASYNQKFKGKATITVDKSTSTAYMELSSLRSEDTAVYYCARYYYGRHFDVWGQGTTVTVSS

SEQ ID NO: 2842 - protein, 215 aa, Artificial Sequence
  source: /note="Description of Artificial Sequence: Synthetic heavy chain variable domain"
EVQLVESGGGLVQPGGSLRLSCAASGYTFTDHAIHWVRQSPGKGLEWVAYFSPGNDDFKYADSVKGRFTISADTSKNTAYLQMNSLRAEDTAIYYCSRSLNMAYWGQGTLVTVSSASTKGPSVFPLAPSSKSTSGGTAALGCLVKDYFPEPVTVSWNSGALTSGVHTFPAVLQSSGLYSLSSVVTVPSSSLGTQTYICNVNHKPSNTKVDKKVEP

SEQ ID NO: 2843 - protein, 120 aa, Artificial Sequence
  source: /note="Description of Artificial Sequence: Synthetic heavy chain variable domain"
QVQLVQSGAEVKKPGASVKVSCKASGYKFTSYVMHWVRQAPGQGLEWIGYINPYNDVTKYNEKFKGRVTITADKSTSTAYLQMNSLRSEDTAVHYCARGSYYDYDGFVYWGQGTLVTVSS

SEQ ID NO: 2844 - protein, 117 aa, Artificial Sequence
  source: /note="Description of Artificial Sequence: Synthetic heavy chain variable domain"
QVQLVQSGAEVKKPGTSVKVSCKVPGYTFSSYAISWVRQAPGQGLEWMGGIIPIFGTTNYAQKFQGRVTITGEESTSTVYMELSSLRSEDTAVYYCARDTDYMFDYWGQGTLVTVSS

SEQ ID NO: 2845 - protein, 117 aa, Artificial Sequence
  source: /note="Description of Artificial Sequence: Synthetic heavy chain variable domain"
QVQLVQSGAEVKKPGASVKVSCKVSGYTFSSYAISWVRQAPGQGLEWMGGIIPIFGTANYAQKFQGRVTITADESTSTAYMELSSLRSEDTAVYYCARDTDYMFDYWGQGTLVTVSS

SEQ ID NO: 2846 - protein, 121 aa, Artificial Sequence
  source: /note="Description of Artificial Sequence: Synthetic heavy chain variable domain"
EVQLVESGGGVVQPGRSVRLSCAASGFTFSTYTMHWVRQAPGKGLEWVAIISNDGSNKYYADPVRGRFTISRDNSKNTLYLQMNSLRAEDTAVYYCVRGSSWYRGNWFDPWGQGTLVTVSS

SEQ ID NO: 2847 - protein, 121 aa, Artificial Sequence
  source: /note="Description of Artificial Sequence: Synthetic heavy chain variable domain"
EVQLVETGAEVKKPGASVKVSCKASGYTFTGYYMHWVRQAPGQGLEWMGWINPTSGSTNYAQKFQGRVTMTRDTSISTAYMELSGLRSDDTAVYYCVRDPGSPKWLAFDPWGQGTLVTVSS

SEQ ID NO: 2848 - protein, 214 aa, Artificial Sequence
  source: /note="Description of Artificial Sequence: Synthetic heavy chain variable domain"
DIQMTQSPSSLSASVGDRVTITCRASQGIGHYLAWYQQKPGKVPKLLIYTASTLQSGVPSRFSGSGSGTDFTLTISSLQPEDVATYYCQQFNSYPHTFGQGTRLEIKRTVAAPSVFIFPPSDEQLKSGTASVVCLLNNFYPREAKVQWKVDNALQSGNSQESVTEQDSKDSTYSLSSTLTLSKADYEKHKVYACEVTHQGLSSPVTKSFNRGEC

SEQ ID NO: 2849 - protein, 127 aa, Artificial Sequence
  source: /note="Description of Artificial Sequence: Synthetic heavy chain variable domain"
EVQLQESGPGLVKPSETLSLTCTVSGGSISSDYWGWIRQPPGKGLEWIGFITYSGSTSYNPSLKSRVTISRDTSKNQFSLKLSSVTAADTAVYYCARMPSFITLASLSTWEGYFDFWGQGTMVTVSS

SEQ ID NO: 2850 - protein, 127 aa, Artificial Sequence
  source: /note="Description of Artificial Sequence: Synthetic heavy chain variable domain"
EVQLQESGPGLVKPSETLSLTCTVSGGSISSDYWGWIRQPPGKGLEWIGFITYSGSTSYNPSLKSRITISRDTSKNQFSLKLSSVTAADTAVYYCARMPSFITLASLSTWEGYFDFWGQGTMVTVSS

SEQ ID NO: 2851 - protein, 127 aa, Artificial Sequence
  source: /note="Description of Artificial Sequence: Synthetic heavy chain variable domain"
EVQLQESGPGLVKPSETLSLTCTVSGSSISSDYWGWIRQPPGKGLEWMGFITYSGSTSYNPSLKSRITISRDTSKNQFSLKLSSVTAADTAVYYCARMPSFITLASLSTWEGYFDFWGQGTMVTVSS

SEQ ID NO: 2852 - protein, 119 aa, Artificial Sequence
  source: /note="Description of Artificial Sequence: Synthetic heavy chain variable domain"
EVQLVQSGAEVKKPGASVKVSCKASGYTFSSYVMHWVRQAPGQRLEWIGYIDPYNDGAKYSQKFQGRVTLTRDTSASTAYMELSSLRSEDTAVYYCARGGPYGWYFDVWGQGTTVTVSS

SEQ ID NO: 2853 - protein, 119 aa, Artificial Sequence
  source: /note="Description of Artificial Sequence: Synthetic heavy chain variable domain"
EVQLVQSGAEVKKPGASVKVSCKASGYTFSSYVMHWVRQAPGQRLEWIGYIDPYNDGAKYSQKFQGRVTLTSDKSASTAYMELSSLRSEDTAVYYCARGGPYGWYFDVWGQGTTVTVSS

SEQ ID NO: 2854 - protein, 119 aa, Artificial Sequence
  source: /note="Description of Artificial Sequence: Synthetic heavy chain variable domain"
EVQLVQSGAEVKKPGASVKVSCKASGYTFSSYVMHWVRQAPGQGLEWIGYIDPYNDGAKYAQKFQGRVTLTRDTSTSTVYMELSSLRSEDTAVYYCARGGPYGWYFDVWGQGTTVTVSS

SEQ ID NO: 2855 - protein, 119 aa, Artificial Sequence
  source: /note="Description of Artificial Sequence: Synthetic heavy chain variable domain"
EVQLVQSGAEVKKPGASVKVSCKASGYTFSSYVMHWVRQAPGQGLEWIGYIDPYNDGAKYAQKFQGRVTLTSDKSTSTVYMELSSLRSEDTAVYYCARGGPYGWYFDVWGQGTTVTVSS

SEQ ID NO: 2856 - protein, 119 aa, Artificial Sequence
  source: /note="Description of Artificial Sequence: Synthetic heavy chain variable domain"
EVQLVQSGAEVKKPGSSVKVSCKASGYTFSSYVMHWVRQAPGQGLEWIGYIDPYNDGAKYAQKFQGRVTLTSDKSTSTAYMELSSLRSEDTAVYYCARGGPYGWYFDVWGQGTTVTVSS

SEQ ID NO: 2857 - protein, 119 aa, Artificial Sequence
  source: /note="Description of Artificial Sequence: Synthetic heavy chain variable domain"
EVQLVQSGAEVKKPGASVKVSCKASGYTFSSYVMHWVRQAPGQGLEWIGYIDPYNDGAKYAQKFQGRVTLTSDKSISTAYMELSRLRSDDTVVYYCARGGPYGWYFDVWGQGTTVTVSS

SEQ ID NO: 2858 - protein, 127 aa, Artificial Sequence
  source: /note="Description of Artificial Sequence: Synthetic heavy chain variable domain"
EVQLQESGPGLVKPSETLSLTCTVSGGSISSDYWGWIRQPPGKGLEWIGFITYSGSTSYNPSLKSRVTISRDTSKNQFSLKLHSVTAADTAVYYCARMPSFITLASLSTWEGYFDFWGQGTMVTVSS

SEQ ID NO: 2859 - protein, 116 aa, Artificial Sequence
  source: /note="Description of Artificial Sequence: Synthetic heavy chain variable domain"
QVQLMESGPGLVQPSQTLSLTCTVSGFPLTSYTVHWVRQPPGKGLEWIGAIWSSGSTDYNSALKSRLNINRDSSKSQVFLKMNSLQTEDTAIYFCTKSGWAFFDYWGQGVMVTVSS

SEQ ID NO: 2860 - protein, 119 aa, Artificial Sequence
  source: /note="Description of Artificial Sequence: Synthetic heavy chain variable domain"
EVQLVESGGDLVQPGRSLKISCVASGFTFSDYYMAWVRLAPQKGLEWVASISYEGSRTHYGDSVRGRFIISRDNPKNILYLQMNSLGSEDTATYFCARHTGTLDWLVYWGQGTLVIVSS

SEQ ID NO: 2861 - protein, 127 aa, Artificial Sequence
  source: /note="Description of Artificial Sequence: Synthetic heavy chain variable domain"
EVQLQESGPGLVKPSETLSLTCTVSGGSISSDYWGWIRQPPGKGLEWIGFITYSGSTSYNPSLKSRITISRDTSKNQFSLKLHSVTAADTAVYYCARMPSFITLASLSTWEGYFDFWGQGTMVTVSS

SEQ ID NO: 2862 - protein, 127 aa, Artificial Sequence
  source: /note="Description of Artificial Sequence: Synthetic heavy chain variable domain"
  MOD_RES (6)..(6): Any amino acid
  MOD_RES (9)..(9): Any amino acid
  MOD_RES (12)..(12): Any amino acid
  MOD_RES (15)..(17): Any amino acid
  MOD_RES (23)..(23): Any amino acid
  MOD_RES (25)..(25): Any amino acid
  MOD_RES (27)..(27): Any amino acid
  MOD_RES (30)..(30): Any amino acid
  MOD_RES (37)..(37): Any amino acid
  MOD_RES (39)..(40): Any amino acid
  MOD_RES (43)..(45): Any amino acid
  MOD_RES (48)..(48): Any amino acid
  MOD_RES (67)..(68): Any amino acid
  MOD_RES (70)..(71): Any amino acid
  MOD_RES (79)..(79): Any amino acid
  MOD_RES (81)..(81): Any amino acid
  MOD_RES (83)..(83): Any amino acid
  MOD_RES (87)..(88): Any amino acid
  MOD_RES (92)..(92): Any amino acid
  MOD_RES (94)..(94): Any amino acid
  MOD_RES (110)..(110): Any amino acid
  MOD_RES (119)..(119): Any amino acid
  MOD_RES (122)..(123): Any amino acid
EVQLQXSGXGLXKPXXXLSLTCXVXGXSIXSDYWGWXRXXPGXXXEWXGFITYSGSTSYNPSLKSRXXIXXDTSKNQFXLXLXSVTXXDTAXYXCARMPSFITLASLSTXEGYFDFWGXGTXXTVSS

SEQ ID NO: 2863 - protein, 127 aa, Artificial Sequence
  source: /note="Description of Artificial Sequence: Synthetic heavy chain variable domain"
  MOD_RES (6)..(6): Any amino acid
  MOD_RES (9)..(9): Any amino acid
  MOD_RES (12)..(12): Any amino acid
  MOD_RES (15)..(16): Any amino acid
  MOD_RES (23)..(23): Any amino acid
  MOD_RES (25)..(25): Any amino acid
  MOD_RES (27)..(27): Any amino acid
  MOD_RES (30)..(30): Any amino acid
  MOD_RES (37)..(37): Any amino acid
  MOD_RES (39)..(40): Any amino acid
  MOD_RES (44)..(45): Any amino acid
  MOD_RES (48)..(48): Any amino acid
  MOD_RES (67)..(67): Any amino acid
  MOD_RES (71)..(71): Any amino acid
  MOD_RES (83)..(83): Any amino acid
  MOD_RES (88)..(88): Any amino acid
  MOD_RES (110)..(110): Any amino acid
  MOD_RES (122)..(123): Any amino acid
EVQLQXSGXGLXKPXXTLSLTCXVXGXSIXSDYWGWXRXXPGKXXEWXGFITYSGSTSYNPSLKSRXTISXDTSKNQFSLKLXSVTAXDTAVYYCARMPSFITLASLSTXEGYFDFWGQGTXXTVSS

SEQ ID NO: 2864 - protein, 119 aa, Artificial Sequence
  source: /note="Description of Artificial Sequence: Synthetic heavy chain variable domain"
  MOD_RES (5)..(5): Any amino acid
  MOD_RES (9)..(9): Any amino acid
  MOD_RES (11)..(12): Any amino acid
  MOD_RES (16)..(16): Any amino acid
  MOD_RES (20)..(20): Any amino acid
  MOD_RES (38)..(38): Any amino acid
  MOD_RES (40)..(40): Any amino acid
  MOD_RES (44)..(44): Any amino acid
  MOD_RES (56)..(57): Any amino acid
  MOD_RES (61)..(62): Any amino acid
  MOD_RES (65)..(65): Any amino acid
  MOD_RES (67)..(68): Any amino acid
  MOD_RES (72)..(72): Any amino acid
  MOD_RES (74)..(74): Any amino acid
  MOD_RES (76)..(76): Any amino acid
  MOD_RES (79)..(79): Any amino acid
  MOD_RES (85)..(85): Any amino acid
  MOD_RES (87)..(87): Any amino acid
  MOD_RES (89)..(89): Any amino acid
  MOD_RES (91)..(92): Any amino acid
  MOD_RES (104)..(104): Any amino acid
  MOD_RES (111)..(111): Any amino acid
EVQLXQSGXEXXKPGXSVKXSCKASGYTFSSYVMHWVXQXPGQXLEWIGYIDPYNXXAKYXXKFXGXXTLTXDXSXSTXYMELSXLXSXDXXVYYCARGGPYGXYFDVWGXGTTVTVSS

SEQ ID NO: 2865 - protein, 127 aa, Artificial Sequence
  source: /note="Description of Artificial Sequence: Synthetic heavy chain variable domain"
EVQLQESGPGLVKPSETLSLTCTVSGSSISSDYWGWIRQPPGKGLEWIGFITYSGSTSYNPSLKSRITISRDTSKNQFSLKLHSVTAADTAVYYCARMPSFITLASLSTWEGYFDFWGQGTMVTVSS

SEQ ID NO: 2866 - protein, 119 aa, Artificial Sequence
  source: /note="Description of Artificial Sequence: Synthetic heavy chain variable domain"
  MOD_RES (16)..(16): Any amino acid
  MOD_RES (44)..(44): Any amino acid
  MOD_RES (56)..(57): Any amino acid
  MOD_RES (61)..(62): Any amino acid
  MOD_RES (65)..(65): Any amino acid
  MOD_RES (72)..(72): Any amino acid
  MOD_RES (74)..(74): Any amino acid
  MOD_RES (76)..(76): Any amino acid
  MOD_RES (79)..(79): Any amino acid
  MOD_RES (85)..(85): Any amino acid
  MOD_RES (89)..(89): Any amino acid
  MOD_RES (92)..(92): Any amino acid
  MOD_RES (104)..(104): Any amino acid
EVQLVQSGAEVKKPGXSVKVSCKASGYTFSSYVMHWVRQAPGQXLEWIGYIDPYNXXAKYXXKFXGRVTLTXDXSXSTXYMELSXLRSXDTXVYYCARGGPYGXYFDVWGQGTTVTVSS

SEQ ID NO: 2867 - protein, 127 aa, Artificial Sequence
  source: /note="Description of Artificial Sequence: Synthetic heavy chain variable domain"
EVQLQESGPGLVKPSETLSLTCTVSGSSISSDYWGWIRQPPGKGLEWMGFITYSGSTSYNPSLKSRITISVDTSKNQFSLKLHSVTAADTAVYYCARMPSFITLASLSTWEGYFDFWGQGTMVTVSS

SEQ ID NO: 2868 - protein, 127 aa, Artificial Sequence
  source: /note="Description of Artificial Sequence: Synthetic heavy chain variable domain"
EVQLQESGPGLVKPSETLSLTCAVSGYSISSDYWGWIRQPPGKGLEWIGFITYSGSTSYNPSLKSRVTISVDTSKNQFSLKLSSVTAADTAVYYCARMPSFITLASLSTWEGYFDFWGQGTMVTVSS

SEQ ID NO: 2869 - protein, 127 aa, Artificial Sequence
  source: /note="Description of Artificial Sequence: Synthetic heavy chain variable domain"
EVQLQESGPGLVKPSETLSLTCAVSGYSISSDYWGWIRQPPGKGLEWIGFITYSGSTSYNPSLKSRVTISRDTSKNQFSLKLSSVTAADTAVYYCARMPSFITLASLSTWEGYFDFWGQGTMVTVSS

SEQ ID NO: 2870 - protein, 127 aa, Artificial Sequence
  source: /note="Description of Artificial Sequence: Synthetic heavy chain variable domain"
EVQLQESGPGLVKPSETLSLTCAVSGYSISSDYWGWIRQPPGKGLEWIGFITYSGSTSYNPSLKSRITISRDTSKNQFSLKLSSVTAADTAVYYCARMPSFITLASLSTWEGYFDFWGQGTMVTVSS

SEQ ID NO: 2871 - protein, 127 aa, Artificial Sequence
  source: /note="Description of Artificial Sequence: Synthetic heavy chain variable domain"
EVQLQESGPGLVKPSETLSLTCAVSGSSISSDYWGWIRQPPGKGLEWMGFITYSGSTSYNPSLKSRITISRDTSKNQFSLKLSSVTAADTAVYYCARMPSFITLASLSTWEGYFDFWGQGTMVTVSS

SEQ ID NO: 2872 - protein, 127 aa, Artificial Sequence
  source: /note="Description of Artificial Sequence: Synthetic heavy chain variable domain"
EVQLQESGPGLVKPSETLSLTCAVSGYSISSDYWGWIRQPPGKGLEWIGFITYSGSTSYNPSLKSRVTISRDTSKNQFSLKLHSVTAADTAVYYCARMPSFITLASLSTWEGYFDFWGQGTMVTVSS

SEQ ID NO: 2873 - protein, 127 aa, Artificial Sequence
  source: /note="Description of Artificial Sequence: Synthetic heavy chain variable domain"
EVQLQESGPGLVKPSETLSLTCAVSGYSISSDYWGWIRQPPGKGLEWIGFITYSGSTSYNPSLKSRITISRDTSKNQFSLKLHSVTAADTAVYYCARMPSFITLASLSTWEGYFDFWGQGTMVTVSS

SEQ ID NO: 2874 - protein, 127 aa, Artificial Sequence
  source: /note="Description of Artificial Sequence: Synthetic heavy chain variable domain"
EVQLQESGPGLVKPSETLSLTCAVSGSSISSDYWGWIRQPPGKGLEWIGFITYSGSTSYNPSLKSRITISRDTSKNQFSLKLHSVTAADTAVYYCARMPSFITLASLSTWEGYFDFWGQGTMVTVSS

SEQ ID NO: 2875 - protein, 127 aa, Artificial Sequence
  source: /note="Description of Artificial Sequence: Synthetic heavy chain variable domain"
EVQLQESGPGLVKPSETLSLTCAVSGSSISSDYWGWIRQPPGKGLEWMGFITYSGSTSYNPSLKSRITISRDTSKNQFSLKLHSVTAADTAVYYCARMPSFITLASLSTWEGYFDFWGQGTMVTVSS

SEQ ID NO: 2876 - protein, 129 aa, Artificial Sequence
  source: /note="Description of Artificial Sequence: Synthetic heavy chain variable domain"
EVQLQESGPGLVKPSETLSLTCTVSGSSIASDYWGWIRQPPGKGLEWIGFITYSGSTSYNPSLKSRVTISVDTSKNQFSLKLSSVTAADTAVYYCARMPSFITLASLSTWEGYFDFWGQGTMVTVSSAS

SEQ ID NO: 2877 - protein, 127 aa, Artificial Sequence
  source: /note="Description of Artificial Sequence: Synthetic heavy chain variable domain"
EVQLQESGPGLVKPSETLSLTCTVSGSSIASDYWGWIRQPPGKGLEWIGFITYSGSTSYNPSLKSRVTISRDTSKNQFSLKLSSVTAADTAVYYCARMPSFITLASLSTWEGYFDFWGQGTMVTVSS

SEQ ID NO: 2878 - protein, 127 aa, Artificial Sequence
  source: /note="Description of Artificial Sequence: Synthetic heavy chain variable domain"
EVQLQESGPGLVKPSETLSLTCTVSGSSIASDYWGWIRKPPGKGLEWIGFITYSGSTSYNPSLKSRVTISRDTSKNQFSLKLSSVTAADTAVYYCARMPSFITLASLSTWEGYFDFWGQGTMVTVSS

SEQ ID NO: 2879 - protein, 127 aa, Artificial Sequence
  source: /note="Description of Artificial Sequence: Synthetic heavy chain variable domain"
EVQLQESGPGLVKPSETLSLTCTVSGSSIASDYWGWIRQPPGKKLEWIGFITYSGSTSYNPSLKSRVTISRDTSKNQFSLKLSSVTAADTAVYYCARMPSFITLASLSTWEGYFDFWGQGTMVTVSS

SEQ ID NO: 2880 - protein, 127 aa, Artificial Sequence
  source: /note="Description of Artificial Sequence: Synthetic heavy chain variable domain"
EVQLQESGPGLVKPSETLSLTCTVSGSSIASDYWGWIRQPPGKGMEWIGFITYSGSTSYNPSLKSRVTISRDTSKNQFSLKLSSVTAADTAVYYCARMPSFITLASLSTWEGYFDFWGQGTMVTVSS

SEQ ID NO: 2881 - protein, 127 aa, Artificial Sequence
  source: /note="Description of Artificial Sequence: Synthetic heavy chain variable domain"
EVQLQESGPGLVKPSETLSLTCTVSGSSIASDYWGWIRKPPGKKMEWIGFITYSGSTSYNPSLKSRVTISRDTSKNQFSLKLSSVTAADTAVYYCARMPSFITLASLSTWEGYFDFWGQGTMVTVSS

SEQ ID NO: 2882 - protein, 127 aa, Artificial Sequence
  source: /note="Description of Artificial Sequence: Synthetic heavy chain variable domain"
EVQLQESGPGLVKPSETLSLTCTVSGSSIASDYWGWIRQFPGKGLEWIGFITYSGSTSYNPSLKSRVTISRDTSKNQFSLKLSSVTADDTAVYYCARMPSFITLASLSTWEGYFDFWGQGTMVTVSS

SEQ ID NO: 2883 - protein, 127 aa, Artificial Sequence
  source: /note="Description of Artificial Sequence: Synthetic heavy chain variable domain"
EVQLQESGPGLVKPSETLSLTCTVSGSSIASDYWGWIRKPPGKKMEWIGFITYSGSTSYNPSLKSRVTISVDTSKNQFSLKLSSVTAADTAVYYCARMPSFITLASLSTWEGYFDFWGQGTMVTVSS

SEQ ID NO: 2884 - protein, 127 aa, Artificial Sequence
  source: /note="Description of Artificial Sequence: Synthetic heavy chain variable domain"
EVQLQESGPGLVKPSETLSLTCSVTGSSIASDYWGWIRQPPGKGLEWIGFITYSGSTSYNPSLKSRVTISRDTSKNQFSLKLSSVTAADTAVYYCARMPSFITLASLSTWEGYFDFWGQGTMVTVSS

SEQ ID NO: 2885 - protein, 127 aa, Artificial Sequence
  source: /note="Description of Artificial Sequence: Synthetic heavy chain variable domain"
EVQLQQSGAGLLKPSETLSLTCSVTGSSIASDYWGWIRQPPGKGLEWIGFITYSGSTSYNPSLKSRVTISVDTSKNQFSLKLSSVTAADTAVYYCARMPSFITLASLSTWEGYFDFWGQGTMVTVSS

SEQ ID NO: 2886 - protein, 127 aa, Artificial Sequence
  source: /note="Description of Artificial Sequence: Synthetic heavy chain variable domain"
EVQLQESGPGLVKPPGTLSLTCSVTGSSIASDYWGWVRQPPGKGLEWIGFITYSGSTSYNPSLKSRVTISVDTSKNQFSLKLSSVTAADTAVYYCARMPSFITLASLSTWEGYFDFWGQGTMVTVSS

SEQ ID NO: 2887 - protein, 121 aa, Artificial Sequence
  source: /note="Description of Artificial Sequence: Synthetic heavy chain variable domain"
DVQLQESGPGLVKPSQSLSLTCTVTGYSITSDYAWNWIRQFPGNKLEWMGYISNSGSASYNPSLKSRISITRDTSKNQFFLQLNSVTTEDTATYYCATLIYYDYGGAMNFWGQGTSVTVSS

SEQ ID NO: 2888 - protein, 119 aa, Artificial Sequence
  source: /note="Description of Artificial Sequence: Synthetic heavy chain variable domain"
EVQLQQSGPELVKPGSSVKMSCKASGYTFSSYVMHWVKQKPGQGLEWIGYIDPYNDGAKYNEKFKGKATLTSDKSSSTAYMELSSLTSEDSAVYYCARGGPYGWYFDVWGAGTTVTVSS

SEQ ID NO: 2889 - protein, 127 aa, Artificial Sequence
  source: /note="Description of Artificial Sequence: Synthetic heavy chain variable domain"
EVQLQESGPGLVKPSQSLSLTCSVTGSSIASDYWGWIRKFPGNKMEWMGFITYSGSTSYNPSLKSRISITRDTSKNQFFLQLHSVTTDDTATYSCARMPSFITLASLSTWEGYFDFWGPGTMVTVSS

SEQ ID NO: 2890 - protein, 127 aa, Artificial Sequence
  source: /note="Description of Artificial Sequence: Synthetic heavy chain variable domain"
EVQLQESGPGLVKPSETLSLTCTVSGGSISSDYWGWIRQPPGKGLEWIGFITYSGSTSYNPSLKSRVTISVDTSKNQFSLKLSSVTAADTAVYYCARMPSFITLASLSTWEGYFDFWGQGTMVTVSS

SEQ ID NO: 2891 - protein, 121 aa, Artificial Sequence
  source: /note="Description of Artificial Sequence: Synthetic heavy chain variable domain"
QVQLQQSGAELAKPGVSVKMSCKASGYTSNYNWIHWIKQRPGQGLEWIGYINPATGYTDYNQKERDKVTLTADKSSSTAYMQLSSLTSEDSALYYCTTGRNDEGGYALDSWGQGTSVTVSS

SEQ ID NO: 2892 - protein, 117 aa, Artificial Sequence
  source: /note="Description of Artificial Sequence: Synthetic heavy chain variable domain"
EVQLVESGGGLVQPGGSLKLSCAASGFIFSGYGMSWVRQTPDKRLELVAIINSNGGSVDYPDSVKGRVTISRDNAKNTLYLQMSSLKSEDTAMYYCARIYYRCMDYWGQGTSVTVSS

SEQ ID NO: 2893 - protein, 120 aa, Artificial Sequence
  source: /note="Description of Artificial Sequence: Synthetic heavy chain variable domain"
QIQLQQSGPELVKPGASVKISYKASGYTFTDYYINWVKQKPGQGLEWIGWIYPGSGITKYNEKFKGKATLTVDSSSSTAYMQLSSLTSEDTAVYFCAIYGYDGGYAMDYWGQGTSVTVSS

SEQ ID NO: 2894 - protein, 117 aa, Artificial Sequence
  source: /note="Description of Artificial Sequence: Synthetic heavy chain variable domain"
EVQLQQSGAELVRPGALVKLSCKASGFNIKHYYIHWVNQRPEQGLEWIGWIDPETGNTIYDPKFQGKASITADTSSSTAYLQLNSLTSEDTAVYCCARGWSYAMDYWGQGTSVIVSS

SEQ ID NO: 2895 - protein, 123 aa, Artificial Sequence
  source: /note="Description of Artificial Sequence: Synthetic heavy chain variable domain"
EVKLVESGGGLVQPGGSLNLSCAASGFTFSSYTMSWVRQTPEKRLEWVAYISSGGHSTYFPDTVKGRFTISRDNAKNTLYLQMSSLKSEDTAVYYCARGGYGNYGPYYNMDYWGQGTSVTVSS

SEQ ID NO: 2896 - protein, 117 aa, Artificial Sequence
  source: /note="Description of Artificial Sequence: Synthetic heavy chain variable domain"
SDVQLQESGPGLVKPSQSLSLTCTVTGYSITSDYAWNWIRQFPGNKLEWMGYISYSGSISYNPSLKSRISITRDTSKNQFFLQLNSVTTEDTATYYCARSGRLRRDFDYWGQGTTLT

SEQ ID NO: 2897 - protein, 122 aa, Artificial Sequence
  source: /note="Description of Artificial Sequence: Synthetic heavy chain variable domain"
EVKLLESGGGLVQPGGSLKLSCAASGFDFSRYWMSWVRQAPGKGLEWIGEINPDSSTINYTPSLKDKFIISRDNAKNTLFLQMSKVRSEDTALYYCARPSYDGYYGYAMDYWGQGTSVTVSS

SEQ ID NO: 2898 - protein, 123 aa, Artificial Sequence
  source: /note="Description of Artificial Sequence: Synthetic heavy chain variable domain"
EVNLVESGGGLVQPGGSLKLSCAASGFTFSSYTMSWVRQSPEKRLEWVAYTSSSGASTYYPDTVKGRFTISRDNAKNTLHLQMSSLKSEDTAMYYCARGGYGNYGPYYALDYWGQGTSVTVSS

SEQ ID NO: 2899 - protein, 119 aa, Artificial Sequence
  source: /note="Description of Artificial Sequence: Synthetic heavy chain variable domain"
EVQLQQSGPELVKPGASVKISCKASGYSFTGYLMNWVMQSHGKSLEWIGRINPYNGDIFYNQKFKDKATLTVDKSSSTAHMELRSLASEDSAVYYCARRDENFDYDNAMDYWGQGTSVT

SEQ ID NO: 2900 - protein, 121 aa, Artificial Sequence
  source: /note="Description of Artificial Sequence: Synthetic heavy chain variable domain"
QVQLQQSGAELAKPGVSVKMSCKASGYTSNYNWIHWIKQRPGQGLEWIGYINPATGYTDYNQKFRDKVTLTADKSSSTAYMQLSSLTSEDSALYYCTTGRNDEGGYALDSWGQGTSVTVSS

SEQ ID NO: 2901 - protein, 118 aa, Artificial Sequence
  source: /note="Description of Artificial Sequence: Synthetic heavy chain variable domain"
QVQLQQSGPELVRPGPSMRMSCKASGYTFTSYWMYWVKKRPGQGLEWIGMIDPSKSETRLNQKCEDKATLNGEKASNTAYMEVSSLTSDDSAVHYCAQYGNHVLLLTGAKGHRSLSLH

SEQ ID NO: 2902 - protein, 119 aa, Artificial Sequence
  source: /note="Description of Artificial Sequence: Synthetic heavy chain variable domain"
EVQLQQSGAELVRPGALVKLSCKASGFNIKDYYMYWMKQRPEQGLEWIGWIDPENVKTIYDPKFQGRATLTADTSSNTAYLQLSSLTSEDTAVYYCTRDFGYVGFFDVWGAGTTVTVSS

SEQ ID NO: 2903 - protein, 121 aa, Artificial Sequence
  source: /note="Description of Artificial Sequence: Synthetic heavy chain variable domain"
EVMLVESGGGLVKPGGSLKLSCAASGFTFSSYAMSWVRQTPERKLEWVATISSGGTYTYYPDSVKGRFTISRDNAKNRLYLQMSGLRSEGTAMYYCVRPDYTHDDGGFAYWGQGTLVTVSA

SEQ ID NO: 2904 - protein, 117 aa, Artificial Sequence
  source: /note="Description of Artificial Sequence: Synthetic heavy chain variable domain"
QVQLKQSGPELEKPGASVKISCKASGYSFTGYNMNWVKQSNGKSLEWIGNIDPYYGGTSYNQKFKGKATLTVDKSSNTAYMHLKSLTSEDSAVYYCARDSSSWFAYWGQGTLVTVSA

SEQ ID NO: 2905 - protein, 121 aa, Artificial Sequence
  source: /note="Description of Artificial Sequence: Synthetic heavy chain variable domain"
EVQLQQSGAELMKPGASVKISCKATGYTFSSYWIEWVKQRPGHGLEWIGEILPGSASTKYNEKFKGKATFTADTSSNTAYMQLSSLTSEDSAVYYCARDYYYGSSYGFAYWGQGTLVTVSS

SEQ ID NO: 2906 - protein, 118 aa, Artificial Sequence
  source: /note="Description of Artificial Sequence: Synthetic heavy chain variable domain"
QVQLQQPGAELVKPGASVKLSCKTSGYTFTSYWMHWVKQRPGQGLEWIGEIDPSDSYTNYNQKFKGKATLTVDKSSSTAYMQLSSLTSEDSAVYYCTYYVNYYAMDYWGQGTSVTVSS

SEQ ID NO: 2907 - protein, 120 aa, Artificial Sequence
  source: /note="Description of Artificial Sequence: Synthetic heavy chain variable domain"
QVQLKESGAELMKPGASVKISCKATGYTFSSYWIEWVKQRPGHGLEWIGEILPGSGSTNYNEKFKGKATFTADTSSNTAYMQLSSLTSEDSAVYYCARDRNGYVNYFDSWGQGTTLTVSS

SEQ ID NO: 2908 - protein, 117 aa, Artificial Sequence
  source: /note="Description of Artificial Sequence: Synthetic heavy chain variable domain"
DVKLQESGPDLVKPSQSLSLTCTVTGYSITSGYSWHWIRQFPGNKLEWMGYIHYSGSTKYNPSLKSRISITRDTSKNQFFLQLNSVTTEDTATYYCARLWSWYFDVWGAGTTVTVSS

SEQ ID NO: 2909 - protein, 116 aa, Artificial Sequence
  source: /note="Description of Artificial Sequence: Synthetic heavy chain variable domain"
QVQLKQSGAELMKPGASVKISCKATGYTFSSYWIEWVKQRPGHGLEWIGEILPGSGSTNYNEKFKGKATFTADTSSNTAYMQLSSLTSEDSAVYYCAREDRYDGDYWGQGTTLTVS

SEQ ID NO: 2910 - protein, 226 aa, Artificial Sequence
  source: /note="Description of Artificial Sequence: Synthetic heavy chain variable domain"
EVQLVESGGGLVQPGGSLRLSCAASGFNIKEYYMEIWVRQSPGKGLEWVGLIDPEQGNTIYDPKFQDRATISADNSKNTAYLQMNSLRAEDTAIYYCARDTAAYFDYWGQGTLVTVSSASTKGPSVFPLAPSSKSTSGGTAALGCLVKDYFPEPVTVSWNSGALTSGVHTFPAVLQSSGLYSLSSVVTVPSSSLGTQTYICNVNHKPSNTKVDKKVEPKSCDKTHT

SEQ ID NO: 2911 - protein, 106 aa, Artificial Sequence
  source: /note="Description of Artificial Sequence: Synthetic heavy chain variable domain"
QIVLTQSPAIMSASPGEKVTITCSASSSVSYMHWFQQKPGTSPKLWIYSTSNLASGVPARFSGSGSGTSYSLTISRMEAEDAATYYCQQRSSYPFTFGSGTKLEIK

SEQ ID NO: 2912 - protein, 114 aa, Artificial Sequence
  source: /note="Description of Artificial Sequence: Synthetic heavy chain variable domain"
QVQLEESGPGLVAPSQSLSITCTVSGFSLTSYGVSWVRQPPGKGLEWLGVIWGDGSTNYHSALISRLSISKDNSKSQVFLKLNSLQTDDTATYYCAKGGYFDYWGQGTTLTVSS

SEQ ID NO: 2913 - protein, 124 aa, Artificial Sequence
  source: /note="Description of Artificial Sequence: Synthetic heavy chain variable domain"
EVRLQQSGPDLIKPGASVKMSCKASGYTFTGYVMHWVKQRPGQGLEWIGFINPYNDDIQSNERFRGKATLTSDKSSTTAYMELSSLTSEDSAVYYCARGAGYNFDGAYRFFDFWGQGTTLTVSS

SEQ ID NO: 2914 - protein, 122 aa, Artificial Sequence
  source: /note="Description of Artificial Sequence: Synthetic heavy chain variable domain"
EVQLVESGGGLVQPKGSLKLSCAASGFTFNTYAMNWVRQAPGKGLEWVARIRSKSNNYATYYADSVKDRFTISRDDSQSMLYLQMNNLKTEDTAMYYCVRQWDYDVRAMNYWGQGTSVTVSS

SEQ ID NO: 2915 - protein, 119 aa, Artificial Sequence
  source: /note="Description of Artificial Sequence: Synthetic heavy chain variable domain"
QIQLVQSGPELKKPGETVKISCKASGYTFTNFGMNWVKQGPGEGLKWMGWINTNTGEPRYAEEFKGRFAFSLETTASTAYLQINNLKNEDTATYFCARDWDGAYFFDYWGQGTTLTVSS

SEQ ID NO: 2916 - protein, 117 aa, Artificial Sequence
  source: /note="Description of Artificial Sequence: Synthetic heavy chain variable domain"
QVQLQQSRPELVKPGASVKMSCKASGYTFTDYVISWVKQRTGQGLEWIGEIYPGSNSIYYNEKFKGRATLTADKSSSTAYMQLSSLTSEDSAVYFCAMGGNYGFDYWGQGTTLTVSS

SEQ ID NO: 2917 - protein, 120 aa, Artificial Sequence
  source: /note="Description of Artificial Sequence: Synthetic heavy chain variable domain"
EVQLQQSGPDLVKPGASVKISCKASGYSFTGYYMHWVKQSHGKSLEWIGRINPNNGVTLYNQKFKDKAILTVDKSSTTAYMELRSLTSEDSAVYYCARSTMITNYVMDYWGQVTSVTVSS

SEQ ID NO: 2918 - protein, 229 aa, Artificial Sequence
  source: /note="Description of Artificial Sequence: Synthetic heavy chain variable domain"
EVQLQQSGGGLVKTGASVKISCKASGYSFTSYYMEIWVKQSHGKSLEWIGEINPYNGGASYNQKIKGRATFTVDTSSRTAYMQFNSLTSEDSAIYYCARSIYGHSVLDYWGQGTSVSVSSAKTTPPSVYPLAPGSAAQTNSMVTLGCLVKGYFPEPVTVTWNSGSLSSGVHTFPAVLQSDLYTLSSSVTVPSSTWPSQTVTCNVAHPASSTKVDKKIVPRDCGCKPCIC

SEQ ID NO: 2919 - protein, 158 aa, Artificial Sequence
  source: /note="Description of Artificial Sequence: Synthetic heavy chain variable domain"
MLLLVTSLLLCELPHPAFLLIPQRLVESGGGVVQPGSSLRLSCAASGFDFSRQGMHWVRQAPGQGLEWVAFIKYDGSEKYHADSVWGRLSISRDNSKDTLYLQMNSLRVEDTATYFCVREAGGPDYRNGYNYYDFYDGYYNYHYMDVWGKGTTVTVSS

SEQ ID NO: 2920 - protein, 137 aa, Artificial Sequence
  source: /note="Description of Artificial Sequence: Synthetic heavy chain variable domain"
MEWSWIFLFLLSGTAGVHSEVQLQQSGPELVKPGASVKMSCKASGDTFTTYVIHWMKQKPGQGLEWIGYINPYNDGTKYNEKFKGKATLISDKSSSIAYMELSSLTSEDSAVYYCARIYYDYDGDYWGQGTTLIVSS

SEQ ID NO: 2921 - protein, 137 aa, Artificial Sequence
  source: /note="Description of Artificial Sequence: Synthetic heavy chain variable domain"
MEWSWIFLFLLSGTAGVHSEVQLVQSGAEVKKPGASVKVSCKASGDTFTTYVIHWMRQAPGQGLEWIGYINPYNDGTKYNEKFKGRVTITSDKSTSTAYMELSSLRSEDTAVYYCARIYYDYDGDYWGQGTLVTVSS

SEQ ID NO: 2922 - protein, 117 aa, Artificial Sequence
  source: /note="Description of Artificial Sequence: Synthetic heavy chain variable domain"
QVQPQQPGAELVKPGASVKMSCKASGDTFTNSWIGWVTQRPGQGLEWIGDIFPGSGHTNYNEKFKNRATLTVDTSSSTAYMLLSSLTSDDSAVYYCVIENYAWFAYWGQGTLVTVSA

SEQ ID NO: 2923 - protein, 119 aa, Artificial Sequence
  source: /note="Description of Artificial Sequence: Synthetic heavy chain variable domain"
QVQLQQSGPELVKPGTSVRISCKASGYTFTTFYIHWVKQRPGQGLEWIGWFYPGNVNTNYNEKLKGKATLTADKSSSAAYLQLNSLTSEDSAVYFCTRSPYYGYVFDYWGQGTTLTVSS

SEQ ID NO: 2924 - protein, 122 aa, Artificial Sequence
  source: /note="Description of Artificial Sequence: Synthetic heavy chain variable domain"
QVQLQQPGTELVKPGASVKLSCKASGYTFTGFWIHWVKQRPGQGLEWIGHINPGNGGTNYNEKFKRMATLTVDKSSSTAYMQLSSLTSEDSAVYYCARSYSNYVRAMDTYIWGQGTSVTVSS

SEQ ID NO: 2925 - protein, 119 aa, Artificial Sequence
  source: /note="Description of Artificial Sequence: Synthetic heavy chain variable domain"
QVQLQQSGPELVKPGASVRISCKASGYTFTTFYIHWVKQRPGQGLEWIAWFYPGNVNTNYNEKFKDKATLTADKSSSAAYLQLNSLTSEDSAVYFCTRSPYYGYVFDFWGQGTTLTVSS

SEQ ID NO: 2926 - protein, 127 aa, Artificial Sequence
  source: /note="Description of Artificial Sequence: Synthetic heavy chain variable domain"
KLQVQLQESGPELVKPGASVKMSCKASGYTFTSYVFHWVKQKPGQGLEWIGYINPYNDVTKYNEKFKGKATLTSDKSSSTAYMELSSLTSEDSAVYYCASYYGSSYGYYAMDDWGQGTTVTVSSGGG

SEQ ID NO: 2927 - protein, 127 aa, Artificial Sequence
  source: /note="Description of Artificial Sequence: Synthetic heavy chain variable domain"
EVQLLESGGGLVQPGGSLRLSCAASGFTFSGYAMSWVRQAPGKGLEWVSSIYSSSGSKYYADSVKGRFTISRDNSKNTLYLQMNSLRAEDTAVYYCARASSTCTRTWCSYDDAMDVWGQGTLVTVSS

SEQ ID NO: 2928 - protein, 121 aa, Artificial Sequence
  source: /note="Description of Artificial Sequence: Synthetic heavy chain variable domain"
EVQLLESGGGLVQTGGSLRLSCAASGFTFSDYAMSWVRQAPGKGLEWVSSIYPGSGSKYYADSVKGRFAISRDNSKNTLYLQMNSLRAEDTAVYYCARDAWFRGHNVFDYWGQGTLVTVSS

SEQ ID NO: 2929 - protein, 127 aa, Artificial Sequence
  source: /note="Description of Artificial Sequence: Synthetic heavy chain variable domain"
EVQLLESGGGLVQPGGSLRLSCAASGFTFSNYDMSWVRQAPGKGLEWVSGIYPNGGSKYYADSVKGRFTISRDNSKNTLYLQMNSLRAEDTAVYYCARALRQCQRYWCSYADGMDVWGQGTLVTVSS

SEQ ID NO: 2930 - protein, 121 aa, Artificial Sequence
  source: /note="Description of Artificial Sequence: Synthetic heavy chain variable domain"
EVQLLESGGGLVQPGGSLRLSCAASGFTFSDYYMSWVRQAPGKGLEWVSAIYSGGGSIYYADSVKGRFTISRDNSKNTLYLQMNSLRAEDTAVYYCARDVQWNKAPRFDYWGQGTLVTVSS

SEQ ID NO: 2931 - protein, 121 aa, Artificial Sequence
  source: /note="Description of Artificial Sequence: Synthetic heavy chain variable domain"
EVQLLESGGGLVQPGGSLRLSCAASGFTFSSYSMSWVRQAPGKGLEWVSGISHGGGNKYYADSVKGRFTISRDNSKNTLYLQMNSLRAEDTAVYYCARDLRANNDTGFDYWGQGTLVTVSS

SEQ ID NO: 2932 - protein, 127 aa, Artificial Sequence
  source: /note="Description of Artificial Sequence: Synthetic heavy chain variable domain"
EVQLLESGGGLVQPGGSLRLSCAASGFTFSNYDMSWVRQAPGKGLEWVSLISHGGGNIYYADSVKGRFTISRDNSKNTLYLQMNSLRAEDTAVYYCARVPVMCTNHWCSYANGMDVWGQGTLVTVSS

SEQ ID NO: 2933 - protein, 121 aa, Artificial Sequence
  source: /note="Description of Artificial Sequence: Synthetic heavy chain variable domain"
EVQLLESGGGLVQPGGSLRLSCAASGFTFSGYAMSWVRQAPGKGLEWVSGISHDGGNTYYADSVKGRFTISRDNSKNTLYLQMNSLRAEDTAVYYCARDRRKGPSTEFDYWGQGTLVTVSS

SEQ ID NO: 2934 - protein, 127 aa, Artificial Sequence
  source: /note="Description of Artificial Sequence: Synthetic heavy chain variable domain"
EVQLLESGGGLVQTGGSLRLSCAASGFTFSDYAMSWVRQAPGKGLEWVSWIYPGDSSIYYADSVKGRFTISRDNSKNTLYLQMNSLRAEDTAVYYCARLLSIDQAQLHYYYDAMDVWGQGTLVTVSS

SEQ ID NO: 2935 - protein, 161 aa, Artificial Sequence
  source: /note="Description of Artificial Sequence: Synthetic heavy chain variable domain"
EVQLVQSGAEVKKPGSSVKVSCKASGGTFSSYAISWVRQAPGQGLEWMGGIIPIFGTAYAQKFQGRVTITADESTSTAYMELSSLRSEDTAVYYCARVGATTSLYYYYGMDVWGQGTTVTVSSASTKGPSVFPLAPSSKSTSGGTAALGCLVKDYFPEPVT

SEQ ID NO: 2936 - protein, 159 aa, Artificial Sequence
  source: /note="Description of Artificial Sequence: Synthetic heavy chain variable domain"
EVQLVQSGGGLVKPGGSLRLSCAASGFTFSSYSMNWVRQAPGKGLEWVSSISSSSSYIYYADSVKGRFTISRDNAKNSLYLQMNSLRAEDTAVYYCARGIIVGPTDAFDIWGQGTTVTVSSASTKGPSVFPLAPSSKSTSGGTAALGCLVKDYFPEPVT

SEQ ID NO: 2937 - protein, 155 aa, Artificial Sequence
  source: /note="Description of Artificial Sequence: Synthetic heavy chain variable domain"
QVQLVQSGGGLVQPGGSLRLSCAASGFSFSTYAMSWVRQAPGKGLEWVSGISGSGGATHYADSVKGRFTISRDNSKNTVNLQMNSLRAEDTAVYYCAKGLWFGEGYWGQGTLVTVSSASTKGPSVFPLAPSSKSTSGGTAALGCLVKDYFPEPVT

SEQ ID NO: 2938 - protein, 160 aa, Artificial Sequence
  source: /note="Description of Artificial Sequence: Synthetic heavy chain variable domain"
EVQLVQSGAEVKKPGSSVKVSCKASGGTFSSYAISWVRQAPGQGLEWMGGIIPIFGTANYAQKFQGRVTITADESTSTAYMELSSLRSEDTAVYYCARDGSLGVGYYYMDFWGKGTTVTVSSASTKGPSVFPLAPSSKSTSGGTAALGCLVKDYFPEPVT

SEQ ID NO: 2939 - protein, 155 aa, Artificial Sequence; identical to SEQ ID NO: 2937
  source: /note="Description of Artificial Sequence: Synthetic heavy chain variable domain"

SEQ ID NO: 2940 - protein, 155 aa, Artificial Sequence
  source: /note="Description of Artificial Sequence: Synthetic heavy chain variable domain"
QVQLVQSGGGLVQPGGSLRLSCAASGFSFSTYAMSWVRQAPGKGLEWVSGISGSGGATHYADSVKGRFTISRDNSKNTVNLQMNSLRAEDTAVYYCAKGLWFGEGLWGQGTLVTVSSASTKGPSVFPLAPSSKSTSGGTAALGCLVKDYFPEPVT

SEQ ID NO: 2941 - protein, 155 aa, Artificial Sequence
  source: /note="Description of Artificial Sequence: Synthetic heavy chain variable domain"
QVQLVQSGGGLVQPGGSLRLSCAASGFSFSTYAMSWVRQAPGKGLEWVSGISGSGGATHYADSVKGRFTISRDNSKNTVNLQMNSLRAEDTAVYYCAKGLWFGEGIWGQGTLVTVSSASTKGPSVFPLAPSSKSTSGGTAALGCLVKDYFPEPVT

SEQ ID NO: 2942 - protein, 155 aa, Artificial Sequence
  source: /note="Description of Artificial Sequence: Synthetic heavy chain variable domain"
QVQLVQSGGGLVQPGGSLRLSCAASGFTFSTYAMSWVRQAPGKGLEWVSGINGSGGATHYADSVKGRFTISRDNSKNTVNLQMNSLRAEDTAVYYCAKGLWFGEGYWGQGTLVTVSSASTKGPSVFPLAPSSKSTSGGTAALGCLVKDYFPEPVT

SEQ ID NO: 2943 - protein, 155 aa, Artificial Sequence
  source: /note="Description of Artificial Sequence: Synthetic heavy chain variable domain"
QVQLVQSGGGLVQPGGSLRLSCAASGFTFSTYAMSWVRQAPGKGLEWVSGINGSGGATHYADSVKGRFTISRDNSKNTVNLQMNSLRAEDTAVYYCAKGLWFGEGLWGQGTLVTVSSASTKGPSVFPLAPSSKSTSGGTAALGCLVKDYFPEPVT

SEQ ID NO: 2944 - protein, 155 aa, Artificial Sequence
  source: /note="Description of Artificial Sequence: Synthetic heavy chain variable domain"
QVQLVQSGGGLVQPGGSLRLSCAASGFSFSTYAMSWVRQAPGKGLEWVSGISGSSGATHYADSVKGRFTISRDNSKNTVNLQMNSLRAEDTAVYYCAKGLWFGEGYWGQGTLVTVSSASTKGPSVFPLAPSSKSTSGGTAALGCLVKDYFPEPVT

SEQ ID NO: 2945 - protein, 155 aa, Artificial Sequence
  source: /note="Description of Artificial Sequence: Synthetic heavy chain variable domain"
QVQLVQSGGGLVQPGGSLRLSCAASGFSFSTYAMSWVRQAPGKGLEWVSGISGSSGATHYADSVKGRFTISRDNSKNTVNLQMNSLRAEDTAVYYCAKGLWFGEGLWGQGTLVTVSSASTKGPSVFPLAPSSKSTSGGTAALGCLVKDYFPEPVT

SEQ ID NO: 2946 - protein, 155 aa, Artificial Sequence
  source: /note="Description of Artificial Sequence: Synthetic heavy chain variable domain"
QVQLVQSGGGLVQPGGSLRLSCAASRFSFSTYAMSWVRQAPGKGLEWVSGISGSGQATHYADSVKGRFTISRDNSKNTVNLQMNSLRAEDTAVYYCAKGLWFGEGYWGQGTLVTVSSASTKGPSVFPLAPSSKSTSGGTAALGCLVKDYFPEPVT

SEQ ID NO: 2947 - protein, 155 aa, Artificial Sequence; identical to SEQ ID NO: 2946
  source: /note="Description of Artificial Sequence: Synthetic heavy chain variable domain"

SEQ ID NO: 2948 - protein, 155 aa, Artificial Sequence
  source: /note="Description of Artificial Sequence: Synthetic heavy chain variable domain"
QVQLVQSGGGLVQPGGSLRLSCAASGFSFSTYAMSWVRQAPGKGLEWVSGISGSGGTTHYADSVKGRFTISRDNSKNTVNLQMNSLRAEDTAVYYCAKGLWFGEGYWGQGTLVTVSSASTKGPSVFPLAPSSKSTSGGTAALGCLVKDYFPEPVT

SEQ ID NO: 2949 - protein, 155 aa, Artificial Sequence
  source: /note="Description of Artificial Sequence: Synthetic heavy chain variable domain"
QVQLVQSGGGLVQPGGSLRLSCAASGFSFSTYAMSWVRQAPGKGLEWVSGISGSGGTTHYADSVKGRFTISRDNSKNTVNLQMNSLRAEDTAVYYCAKGLWFGEGLWGQGTLVTVSSASTKGPSVFPLAPSSKSTSGGTAALGCLVKDYFPEPVT

SEQ ID NO: 2950 - protein, 158 aa, Artificial Sequence
  source: /note="Description of Artificial Sequence: Synthetic heavy chain variable domain"
EVQLVQSGAEVKKPGASVKVSCRASGFSFTTYYMHWVRQAPGQGLEWMGIINPSGGSTSYAQKFQGRVTMTRDTSTSTVYMELSSLRSEDTAVYYCARDLVVPAATLDYWGQGTLVTVSSASTKGPSVFPLAPSSKSTSGGTAALGCLVKDYFPEPVT

SEQ ID NO: 2951 - protein, 156 aa, Artificial Sequence
  source: /note="Description of Artificial Sequence: Synthetic heavy chain variable domain"
EVQLVQTGGGAVQPGRSLRLSCAATGFTFSSYGMHWVRQAPGKGLEWVAVISYDGSNKYYADSVKGRFTISRDNAKNTLYLQMNSLRAEDTAVYYCARESYGGQFDYWGPGTLVTVSSASTKGPSVFPLAPSSKSTSGGTAALGCLVKDYFPEPVT

SEQ ID NO: 2952 - protein, 163 aa, Artificial Sequence
  source: /note="Description of Artificial Sequence: Synthetic heavy chain variable domain"
EVQLVQSGGGVVQPGRSLRLSCAASGFTFSSYAMHWVRQAPGKGLEWVAVISYDGSNKYYADSVKGRFTISRDNSKNTLYLQMNSLRAEDTAVYYCARDGFGLAVAGPYWYFDLWGRGTLVTVSSASTKGPSVFPLAPSSKSTSGGTAALGCLVKDYFPEPVT

SEQ ID NO: 2953 - protein, 166 aa, Artificial Sequence
  source: /note="Description of Artificial Sequence: Synthetic heavy chain variable domain"
EVQLVQSGAEVKKPGSSVKVSCKASGGTFSSYAISWVRQAPGQGLEWMGGIIPIFGTANYAQKFQGRVTITADESTSTAYMELSSLRSEDTAVYYCAGPTRSRDFWSGLGYYYYMDVWGKGTTVTVSSASTKGPSVFPLAPSSKSTSGGTAALGCLVKDYFPEPVT

SEQ ID NO: 2954 - protein, 159 aa, Artificial Sequence
  source: /note="Description of Artificial Sequence: Synthetic heavy chain variable domain"
EVQLVQSGGGVVQPGRSLRLSCAASGFTFSSYGMHWVRQAPGKGLEWVAVISYDGSNKHYADSVKGRFTISRDNSKNTLYLQMNSLRAEDTAVYYCARDFYEAGGWYFDLWGRGTLVTVSSASTKGPSVFPLAPSSKSTSGGTAALGCLVKDYFPEPVT

SEQ ID NO: 2955 - protein, 120 aa, Artificial Sequence
  source: /note="Description of Artificial Sequence: Synthetic heavy chain variable domain"
QVQLVQSGAEVKKPGSSVKVSCKASGGTFSSYAISWVRQAPGQGLEWMGGIIPIFGTANYAQKFQGRVTITADESTSTAYMELSSLRSEDTAVYYCARSSYGWSYEFDYWGQGTLVTVSS

SEQ ID NO: 2956 - protein, 119 aa, Artificial Sequence
  source: /note="Description of Artificial Sequence: Synthetic heavy chain variable domain"
QVQLVQSGSELKKPGASVKVSCKASGYTFTNYGLNWVRQAPGQGLEWMGWINPYTGEPTYADDFKGRFVFSLDTSVSTAYLQICSLKAEDTAVYYCAREGYGNYIFPYWGQGTLVTVSS

SEQ ID NO: 2957 - protein, 122 aa, Artificial Sequence
  source: /note="Description of Artificial Sequence: Synthetic heavy chain variable domain"
QVQLVQSGAEVKPGASVKVSCKASGYTFTHYTIHWVRQAPGQGLEWMGYIIPSSGYSEYNQKFKDRVTMTRDTSTSTVYMELSSLRSEDTAVYYCARGAYDDYYDYYAMDYWGQGTLVTVSS

SEQ ID NO: 2958 - protein, 122 aa, Artificial Sequence
  source: /note="Description of Artificial Sequence: Synthetic heavy chain variable domain"
EVQLVESGGGLVQPGGSLRLSCAASGFTFRNYGMSWVRQAPGKGLEWVASIISGGSYTYYPDSVKGRFTISRDNAKNSLYLQMNSLRAEDTAVYYCARIYDHDGDYYAMDYWGQGTTVTVSS

SEQ ID NO: 2959 - protein, 136 aa, Artificial Sequence
  source: /note="Description of Artificial Sequence: Synthetic heavy chain variable domain"
MAWVWTLLFLMAAAQSIQAQIQLVQSGPELKKPGETVKISCKASGYTFTNYGMNWVKQAPGKGLKWMGWINTDSGESTYAEEFKGRFAFSLETSANTAYLQINNLNNEDTATYFCVRVGYDALDYWGQGTSVTVSS

SEQ ID NO: 2960 - protein, 118 aa, Artificial Sequence
  source: /note="Description of Artificial Sequence: Synthetic heavy chain variable domain"
EVQLVETGGGLLQPGGSLRLSCAASGFSVSGTYMGWVRQAPGKGLEWVALLYSGGGTYHPASLQGRFIVSRDSSKNMVYLQMNSLKAEDTAVYYCAKGGAGGGHFDSWGQGTLVTVSS

SEQ ID NO: 2961 - protein, 107 aa, Artificial Sequence
  source: /note="Description of Artificial Sequence: Synthetic heavy chain variable domain"
DDIVLTQSPATLSLSPGERATLSCRASQSVSYMNWYQQKPGKAPKRWIYDTSKVASGVPARFSGSGSGTDYSLTINSLEAEDAATYYCQQWSSNPLTFGGGTKVEIK

SEQ ID NO: 2962 - protein, 451 aa, Artificial Sequence
  source: /note="Description of Artificial Sequence: Synthetic heavy chain variable domain"
QMQLVQSGAEVKEPGESLRISCKGSGYSFTNFWISWVRQMPGKGLEWMGRVDPGYSYSTYSPSFQGHVTISADKSTSTAYLQWNSLKASDTAMYYCARVQYSGYYDWFDPWGQGTLVTVSSASTKGPSVFPLAPSSKSTSGGTAALGCLVKDYFPEPVTVSWNSGALTSGVHTFPAVLQSSGLYSLSSVVTVPSSSLGTQTYICNVNHKPSNTKVDKRVEPKSCDKTHTCPPCPAPELLGGPSVFLFPPKPKDTLMISRTPEVTCVVVDVSHEDPEVKFNWYVDGVEVHNAKTKPREEQYASTYRVVSVLTVLHQDWLNGKEYKCKVSNKALPAPIEKTISKAKGQPREPQVYTLPPSRDELTKNQVSLTCLVKGFYPSDIAVEWESNGQPENNYKTTPPVLDSDGSFFLYSRLTVDKSRWQQGNVFSCSVMHEALHNHYTQKSLSLSPGK

SEQ ID NO: 2963 - protein, 119 aa, Artificial Sequence
  source: /note="Description of Artificial Sequence: Synthetic heavy chain variable domain"
QVQLVQSGAEVKKPGSSVKVSCKASGGTFSSYAISWVRQAPGQGLEWMGGIIPIFGTANYAQKFQGRVTITADESTSTAYMELSSLRSEDTAVYYCARRIPPYYGMDVWGQGTTVTVSS

SEQ ID NO: 2964 - protein, 121 aa, Artificial Sequence
  source: /note="Description of Artificial Sequence: Synthetic heavy chain variable domain"
QVQLQQSGPGLVKPSQTLSLTCAISGDSVSSNSAAWNWIRQSPSRGLEWLGRTYYGSKWYNDYAVSVKSRITINPDTSKNQFSLQLNSVTPEDTAVYYCARGRLGDAFDIWGQGTMVTVSS

SEQ ID NO: 2965 - protein, 121 aa, Artificial Sequence
  source: /note="Description of Artificial Sequence: Synthetic heavy chain variable domain"
QMQLVQSGAEVKEPGESLRISCKGSGYSFTNFWISWVRQMPGKGLEWMGRVDPGYSYSTYSPSFQGHVTISADKSTSTAYLQWNSLKASDTAMYYCARVQYSGYYDWFDPWGQGTLVTVSS

SEQ ID NO: 2966 - protein, 118 aa, Artificial Sequence
  source: /note="Description of Artificial Sequence: Synthetic heavy chain variable domain"
QVQLVQSGAEVKKPGESLKISCKGSGYNFSNKWIGWVRQLPGRGLEWIAIIYPGYSDITYSPSFQGRVTISADTSINTAYLHWHSLKASDTAMYYCVRHTALAGFDYWGLGTLVTVSS

SEQ ID NO: 2967 - protein, 121 aa, Artificial Sequence
  source: /note="Description of Artificial Sequence: Synthetic heavy chain variable domain"
EVQLVQSGGGVVRPGGSLRLSCAASGFTFDDYGMSWVRQAPGKGLEWVSGINWNGGSTGYADSVRGRFTISRDNAKNSLYLQMNSLRAEDTALYYCARERGYGYHDPHDYWGQGTLVTVSS

SEQ ID NO: 2968 - protein, 118 aa, Artificial Sequence
  source: /note="Description of Artificial Sequence: Synthetic heavy chain variable domain"
EVKLQESGPGLVAPSQSLSVTCTVSGVSLPDYGVSWIRQPPRKGLEWLGVIWGSETTYYNSALKSRLTIIKDNSKSQVFLKMNSLQTDDTAIYYCAKHYYYGGSYAMDYWGQGTSVTV

SEQ ID NO: 2969 - protein, 119 aa, Artificial Sequence
  source: /note="Description of Artificial Sequence: Synthetic heavy chain variable domain"
EVQLQQSGPELIKPGASVKMSCKASGYTFTSYVMHWVKQKPGQGLEWIGYINPYNDGTKYNEKFKGKATLTSDKSSSTAYMELSSLTSEDSAVYYCARGTYYYGSRVFDYWGQGTTLTV

SEQ ID NO: 2970 - protein, 122 aa, Artificial Sequence; identical to SEQ ID NO: 836
  source: /note="Description of Artificial Sequence: Synthetic heavy chain variable domain"

SEQ ID NO: 2971 - protein, 121 aa, Artificial Sequence [sequence omitted]

SEQ ID NO: 2972 - protein, 122 aa, Artificial Sequence
  source: /note="Description of Artificial Sequence: Synthetic heavy chain variable domain"
QVQLQQSGAEVKKPGSSVKVSCKASGYTFTSYNMHWVKQAPGQGLEWIGAIYPGNGDTSYNQKFKGKATLTADESTNTAYMELSSLRSEDTAFYYCARSTYYGGDWYFDVWGQGTTVTVSSA

SEQ ID NO: 2973 - protein, 122 aa, Artificial Sequence
  source: /note="Description of Artificial Sequence: Synthetic heavy chain variable domain"
EVQLVESGGGLVKPGGSLKLSCAASGFAFSIYDMSWVRQTPEKRLEWVAYISSGGGTYYPDTVKGRFTISRDNAKNTLYLQMSSLKSEDTAMYYCARHSGYGTHWGVLFAYWGQGTLVTVSA

SEQ ID NO: 2974 - protein, 122 aa, Artificial Sequence
  source: /note="Description of Artificial Sequence: Synthetic heavy chain variable domain"
EVQLVESGGGLVKPGGSLKLSCAASGFAFSIYDMSWVRQTPEKRLEWVAYISSGGGTYYPDTVKGRFTISRDNAKNTLYLQMSSLKSEDTAMYYCARHSGYGSSYGVLFAYWGQGTLVTVSA

SEQ ID NO: 2975 - protein, 116 aa, Artificial Sequence
  source: /note="Description of Artificial Sequence: Synthetic heavy chain variable domain"
LQQSGAELVKPGASVRLSCKASGYTFTEYIIHWIKLRSGQGLEWIGWFYPGSNDIQYNAKFKGKATLTADKSSSTVYMELTGLTSEDSAVYFCARRDDFSGYDALPYWGQGTMVTV

SEQ ID NO: 2976 - protein, 115 aa, Artificial Sequence; identical to SEQ ID NO: 951
  source: /note="Description of Artificial Sequence: Synthetic heavy chain variable domain"

SEQ ID NO: 2977 - protein, 117 aa, Artificial Sequence; identical to SEQ ID NO: 952
  source: /note="Description of Artificial Sequence: Synthetic heavy chain variable domain"

SEQ ID NO: 2978 - protein, 120 aa, Artificial Sequence; identical to SEQ ID NO: 953
  source: /note="Description of Artificial Sequence: Synthetic heavy chain variable domain"

SEQ ID NO: 2979 - protein, 118 aa, Artificial Sequence; identical to SEQ ID NO: 954
  source: /note="Description of Artificial Sequence: Synthetic heavy chain variable domain"

SEQ ID NO: 2980 - protein, 120 aa, Artificial Sequence; identical to SEQ ID NO: 2917
  source: /note="Description of Artificial Sequence: Synthetic heavy chain variable domain"

SEQ ID NO: 2981 - protein, 119 aa, Artificial Sequence; identical to SEQ ID NO: 2915
  source: /note="Description of Artificial Sequence: Synthetic heavy chain variable domain"

SEQ ID NO: 2982 - protein, 117 aa, Artificial Sequence; identical to SEQ ID NO: 2916
  source: /note="Description of Artificial Sequence: Synthetic heavy chain variable domain"

SEQ ID NO: 2983 - protein, 122 aa, Artificial Sequence; identical to SEQ ID NO: 2914
  source: /note="Description of Artificial Sequence: Synthetic heavy chain variable domain"

SEQ ID NO: 2984 - protein, 107 aa, Artificial Sequence
  source: /note="Description of Artificial Sequence: Synthetic heavy chain variable domain"
DIVMTQSHIFMSTSVGDRVSITCKASQDVDTAVAWYQQKPGQSPKLLIYWASTRLTGVPDRFTGSGSGTDFTLTISNVQSEDLADYFCQQYSSYPYTFGGGTKLEIK

SEQ ID NO: 2985 - protein, 115 aa, Artificial Sequence
  source: /note="Description of Artificial Sequence: Synthetic heavy chain variable domain"
QVQVKESGPGLVAPSQSLSITCTVSGFSLTTSGVSWVRQPPGKGLEWLGVIWGDGSTNYHSALKSRLSIKKDHSKSQVFLKLNSLQTDDTATYYCAKGGYSLAHWGQGTLVTVSA

SEQ ID NO: 2986 - protein, 115 aa, Artificial Sequence
  source: /note="Description of Artificial Sequence: Synthetic heavy chain variable domain"
QVQVQESGPGLVAPSQTLSITCTVSGFSLTTSGVSWVRQPPGKGLEWLGVIWGDGSTNYHPSLKSRLSIKKDHSKSQVFLKLNSLTAADTATYYCAKGGYSLAHWGQGTLVTVSS

SEQ ID NO: 2987 - protein, 444 aa, Artificial Sequence
  source: /note="Description of Artificial Sequence: Synthetic heavy chain variable domain"
QVQVQESGPGLVAPSQTLSITCTVSGFSLTTSGVSWVRQPPGKGLEWLGVIWGDGSTNYHPSLKSRLSIKKDHSKSQVFLKLNSLTAADTATYYCAKGGYSLAHWGQGTLVTVSSASTKGPSVFPLAPSSKSTSGGTAALGCLVKDYFPEPVTVSWNSGALTSGVHTFPAVLQSSGLYSLSSVVTVPSSSLGTQTYICNVNHKPSNTKVDKKVEPKSCDKTHTCPPCPAPELLGGPSVFLFPPKPKDTLMISRTPEVTCVVVDVSHEDPEVKFNWYVDGVEVHNAKTKPREEQYNSTYRVVSVLTVLHQDWLNGKEYKCKVSNKALPAPIEKTISKAKGQPREPQVYTLPPSRDELTKNQVSLTCLVKGFYPSDIAVEWESNGQPENNYKTTPPVLDSDGSFFLYSKLTVDKSRWQQGNVFSCSVMHEALHNHYTQKSLSLSPG

SEQ ID NO: 2988 - protein, 447 aa, Artificial Sequence
  source: /note="Description of Artificial Sequence: Synthetic heavy chain variable domain"
QVQLVESGGGVVQPGRSLRLSCATSGFTFSNYGMHWVRQAPGKGLEWVAVILYDGSNKYYPDSVKGRFTISRDNSKNTLYLQMNSLRAEDTAVYYCARGGSSWYPDSFDIWGQGTMVTVSSASTKGPSVFPLAPCSRSTSESTAALGCLVKDYFPEPVTVSWNSGALTSGVHTFPAVLQSSGLYSLSSVVTVPSSNFGTQTYTCNVDHKPSNTKVDKTVERKCCVECPPCPAPPVAGPSVFLFPPKPKDTLMISRTPEVTCVVVDVSHEDPEVQFNWYVDGVEVHNAKTKPREEQFNSTFRVVSVLTVVHQDWLNGKEYKCKVSNKGLPAPIEKTISKTKGQPREPQVYTLPPSREEMTKNQVSLTCLVKGFYPSDIAVEWESNGQPENNYKTTPPMLDSDGSFFLYSKLTVDKSRWQQGNVFSCSVMHEALHNHYTQKSLSLSPGK

SEQ ID NO: 2989 - protein, 450 aa, Artificial Sequence
  source: /note="Description of Artificial Sequence: Synthetic heavy chain variable domain"
EVQLVESGGGLVQPGRSLRLSCAASGFTFDDYAMHWVRQAPGKGLEWVSGISWKSGSIGYADSVKGRFTISRDNAKNSLYLQMNSLRAEDTALYYCVKGYYVILTGLDYWGQGTLVTVSSASTKGPSVFPLAPSSKSTSGGTAALGCLVKDYFPEPVTVSWNSGALTSGVHTFPAVLQSSGLYSLSSVVTVPSSSLGTQTYICNVNHKPSNTKVDKKVEPKSCDKTHTCPPCPAPELLGGPSVFLFPPKPKDTLMISRTPEVTCVVVDVSHEDPEVKFNWYVDGVEVHNAKTKPREEQYNSTYRVVSVLTVLHQDWLNGKEYKCKVSNKALPAPIEKTISKAKGQPREPQVYTLPPSRDELTKNQVSLTCLVKGFYPSDIAVEWESNGQPENNYKTTPPVLDSDGSFFLYSKLTVDKSRWQQGNVFSCSVMHEALHNHYTQKSLSLSPGK

SEQ ID NO: 2990 - protein, 448 aa, Artificial Sequence
  source: /note="Description of Artificial Sequence: Synthetic heavy chain variable domain"
QVQLVESGGGVVQPGRSLRLSCAASGFTFSNYGMHWVRQAPGKGLEWVAVIWYDESNKYYADSVKGRFTISRDNSKNTLFLQMNSLRAEDTAVYYCARGYNSRWYPDAFDIWGQGTMVTVSSASTKGPSVFPLAPCSRSTSESTAALGCLVKDYFPEPVTVSWNSGALTSGVHTFPAVLQSSGLYSLSSVVTVPSSNFGTQTYTCNVDHKPSNTKVDKTVERKCCVECPPCPAPPVAGPSVFLFPPKPKDTLMISRTPEVTCVVVDVSHEDPEVQFNWYVDGVEVHNAKTKPREEQFNSTFRVVSVLTVVHQDWLNGKEYKCKVSNKGLPAPIEKTISKTKGQPREPQVYTLPPSREEMTKNQVSLTCLVKGFYPSDIAVEWESNGQPENNYKTTPPMLDSDGSFFLYSKLTVDKSRWQQGNVFSCSVMHEALHNHYTQKSLSLSPGK

SEQ ID NO: 2991 - protein, 448 aa, Artificial Sequence
  source: /note="Description of Artificial Sequence: Synthetic heavy chain variable domain"
QVQLVESGGGVVQPGRSLRLSCAASGFTFSNYGLHWVRQAPGKGLEWVAVIRYDGSNKYYADSVKGRFTISRDNSKNTLYLQMSSLRAEDTAVYYCARGGSSWYPDGLDVWGQGTTVTVSSASTKGPSVFPLAPCSRSTSESTAALGCLVKDYFPEPVTVSWNSGALTSGVHTFPAVLQSSGLYSLSSVVTVPSSSLGTKTYTCNVDHKPSNTKVDKRVESKYGPPCPSCPAPEFLGGPSVFLFPPKPKDTLMISRTPEVTCVVVDVSQEDPEVQFNWYVDGVEVHNAKTKPREEQFNSTYRVVSVLTVLHQDWLNGKEYKCKVSNKGLPSSIEKTISKAKGQPREPQVYTLPPSQEEMTKNQVSLTCLVKGFYPSDIAVEWESNGQPENNYKTTPPVLDSDGSFFLYSRLTVDKSRWQEGNVFSCSVMHEALHNHYTQKSLSLSLGK

SEQ ID NO: 2992 - protein, 450 aa, Artificial Sequence
  source: /note="Description of Artificial Sequence: Synthetic heavy chain variable domain"
EVQLVESGGNLVQPGRSLRLSCAASGFTFDDYAMHWVRQAPGKGLEWVSGISWNNNDIGYADSVKGRFIISRDNAKNSLYLQMNSLRPEDTALYYCVKGYYVILTGLDYWGQGTPVTVSSASTKGPSVFPLAPSSKSTSGGTAALGCLVKDYFPEPVTVSWNSGALTSGVHTFPAVLQSSGLYSLSSVVTVPSSSLGTQTYICNVNHKPSNTKVDKKVEPKSCDKTHTCPPCPAPELLGGPSVFLFPPKPKDTLMISRTPEVTCVVVDVSHEDPEVKFNWYVDGVEVHNAKTKPREEQYNSTYRVVSVLTVLHQDWLNGKEYKCKVSNKALPAPIEKTISKAKGQPREPQVYTLPPSRDELTKNQVSLTCLVKGFYPSDIAVEWESNGQPENNYKTTPPVLDSDGSFFLYSKLTVDKSRWQQGNVFSCSVMHEALHNHYTQKSLSLSPGK

SEQ ID NO: 2993 - protein, 448 aa, Artificial Sequence
  source: /note="Description of Artificial Sequence: Synthetic heavy chain variable domain"
QVQLVESGGGVVQPGRSLRLSCAASGFTFSNYGMHWVRQAPGKGLEWVAVIWYDGGNKYYADSVKGRFTISRDNSKNTLFLQMNSLRAEDTAVYYCARGGSSWYPDAFDIWGQGTMVTVSSASTKGPSVFPLAPCSRSTSESTAALGCLVKDYFPEPVTVSWNSGALTSGVHTFPAVLQSSGLYSLSSVVTVPSSSLGTKTYTCNVDHKPSNTKVDKRVESKYGPPCPSCPAPEFLGGPSVFLFPPKPKDTLMISRTPEVTCVVVDVSQEDPEVQFNWYVDGVEVHNAKTKPREEQFNSTYRVVSVLTVLHQDWLNGKEYKCKVSNKGLPSSIEKTISKAKGQPREPQVYTLPPSQEEMTKNQVSLTCLVKGFYPSDIAVEWESNGQPENNYKTTPPVLDSDGSFFLYSRLTVDKSRWQEGNVFSCSVMHEALHNHYTQKSLSLSLGK

SEQ ID NO: 2994 - protein, 449 aa, Artificial Sequence
  source: /note="Description of Artificial Sequence: Synthetic heavy chain variable domain"
EVQLVESGGGLVQPGGSLRLSCAASGFTFSSYWMHWVRQAPGKGLVWVSRIISDGSSTGYADSVKGRFTISRDNAKNTLYLQMNSLRAEDTAVYYCAREFSSGWYFDYWGQGTLVTVSSASTKGPSVFPLAPSSKSTSGGTAALGCLVKDYFPEPVTVSWNSGALTSGVHTFPAVLQSSGLYSLSSVVTVPSSSLGTQTYICNVNHKPSNTKVDKKVEPKSCDKTHTCPPCPAPELLGGPSVFLFPPKPKDTLMISRTPEVTCVVVDVSHEDPEVKFNWYVDGVEVHNAKTKPREEQYNSTYRVVSVLTVLHQDWLNGKEYKCKVSNKALPAPIEKTISKAKGQPREPQVYTLPPSRDELTKNQVSLTCLVKGFYPSDIAVEWESNGQPENNYKTTPPVLDSDGSFFLYSKLTVDKSRWQQGNVFSCSVMHEALHNHYTQKSLSLSPGK

SEQ ID NO: 2995 - protein, 451 aa, Artificial Sequence
  source: /note="Description of Artificial Sequence: Synthetic heavy chain variable domain"
EVQLVESGGALVQPGRSLRLSCAASGFTFDDYAMHWVRQAPGKGLEWVSGITWNSGGIGYADSVKGRFTISRDNAKNSLYLQMNSLRAEDTALYYCAKDRYYSSWLLFDNWGQGILVTVSSASTKGPSVFPLAPSSKSTSGGTAALGCLVKDYFPEPVTVSWNSGALTSGVHTFPAVLQSSGLYSLSSVVTVPSSSLGTQTYICNVNHKPSNTKVDKKVEPKSCDKTHTCPPCPAPELLGGPSVFLFPPKPKDTLMISRTPEVTCVVVDVSHEDPEVKFNWYVDGVEVHNAKTKPREEQYNSTYRVVSVLTVLHQDWLNGKEYKCKVSNKALPAPIEKTISKAKGQPREPQVYTLPPSRDELTKNQVSLTCLVKGFYPSDIAVEWESNGQPENNYKTTPPVLDSDGSFFLYSKLTVDKSRWQQGNVFSCSVMHEALHNHYTQKSLSLSPGK

SEQ ID NO: 2996 - protein, 451 aa, Artificial Sequence
  source: /note="Description of Artificial Sequence: Synthetic heavy chain variable domain"
EVQLVESGGGLVQTGRSLRLSCAASGFTFDDYAMHWVRQAPGKGLEWVSDISWNSDIIGYADSVKGRFTISRDNAKNSLYLQMNSLRAEDTALYYCAKDIYGSGSSFFDYWGQGILVTVSSASTKGPSVFPLAPSSKSTSGGTAALGCLVKDYFPEPVTVSWNSGALTSGVHTFPAVLQSSGLYSLSSVVTVPSSSLGTQTYICNVNHKPSNTKVDKKVEPKSCDKTHTCPPCPAPELLGGPSVFLFPPKPKDTLMISRTPEVTCVVVDVSHEDPEVKFNWYVDGVEVHNAKTKPREEQYNSTYRVVSVLTVLHQDWLNGKEYKCKVSNKALPAPIEKTISKAKGQPREPQVYTLPPSRDELTKNQVSLTCLVKGFYPSDIAVEWESNGQPENNYKTTPPVLDSDGSFFLYSKLTVDKSRWQQGNVFSCSVMHEALHNHYTQKSLSLSPGK

SEQ ID NO: 2997 - protein, 120 aa, Artificial Sequence
  source: /note="Description of Artificial Sequence: Synthetic heavy chain variable domain"
EVQLVESGGGLVQPGRSLRLSCAASGFTFDDYAMHWVRQAPGKGLEWVSGISWKSGSIGYADSVKGRFTISRDNAKNSLYLQMNSLRAEDTALYYCVKGYYVILTGLDYWGQGTLVTVSS

SEQ ID NO: 2998 - protein, 122 aa, Artificial Sequence
  source: /note="Description of Artificial Sequence: Synthetic heavy chain variable domain"
QVQLVESGGGVVQPGRSLRLSCAASGFTFSNYGMHWVRQAPGKGLEWVAVIWYDESNKYYADSVKGRFTISRDNSKNTLFLQMNSLRAEDTAVYYCARGYNSRWYPDAFDIWGQGTMVTVSS

SEQ ID NO: 2999 - protein, 121 aa, Artificial Sequence
  source: /note="Description of Artificial Sequence: Synthetic heavy chain variable domain"
QVQLVESGGGVVQPGRSLRLSCATSGFTFSNYGMHWVRQAPGKGLEWVAVILYDGSNKYYPDSVKGRFTISRDNSKNTLYLQMNSLRAEDTAVYYCARGGSSWYPDSFDIWGQGTMVTVSS

SEQ ID NO: 3000 - protein, 120 aa, Artificial Sequence
  source: /note="Description of Artificial Sequence: Synthetic heavy chain variable domain"
EVQLVESGGNLVQPGRSLRLSCAASGFTFDDYAMHWVRQAPGKGLEWVSGISWNNNDIGYADSVKGRFIISRDNAKNSLYLQMNSLRPEDTALYYCVKGYYVILTGLDYWGQGTPVTVSS

SEQ ID NO: 3001 - protein, 121 aa, Artificial Sequence
  source: /note="Description of Artificial Sequence: Synthetic heavy chain variable domain"
QVQLVESGGGVVQPGRSLRLSCAASGFTFSNYGMHWVRQAPGKGLEWVAVIWYDGGNKYYADSVKGRFTISRDNSKNTLFLQMNSLRAEDTAVYYCARGGSSWYPDAFDIWGQGTMVTVSS

SEQ ID NO: 3002 - protein, 119 aa, Artificial Sequence
  source: /note="Description of Artificial Sequence: Synthetic heavy chain variable domain"
EVQLVESGGGLVQPGGSLRLSCAASGFTFSSYWMHWVRQAPGKGLVWVSRIISDGSSTGYADSVKGRFTISRDNAKNTLYLQMNSLRAEDTAVYYCAREFSSGWYFDYWGQGTLVTVSS

SEQ ID NO: 3003 - protein, 121 aa, Artificial Sequence
  source: /note="Description of Artificial Sequence: Synthetic heavy chain variable domain"
EVQLVESGGALVQPGRSLRLSCAASGFTFDDYAMHWVRQAPGKGLEWVSGITWNSGGIGYADSVKGRFTISRDNAKNSLYLQMNSLRAEDTALYYCAKDRYYSSWLLFDNWGQGILVTVSS

SEQ ID NO: 3004 - protein, 121 aa, Artificial Sequence
  source: /note="Description of Artificial Sequence: Synthetic heavy chain variable domain"
EVQLVESGGGLVQTGRSLRLSCAASGFTFDDYAMHWVRQAPGKGLEWVSDISWNSDIIGYADSVKGRFTISRDNAKNSLYLQMNSLRAEDTALYYCAKDIYGSGSSFFDYWGQGILVTVSS

SEQ ID NO: 3005 - protein, 120 aa, Artificial Sequence; identical to SEQ ID NO: 1035
  source: /note="Description of Artificial Sequence: Synthetic heavy chain variable domain"

SEQ ID NO: 3006 - protein, 120 aa, Artificial Sequence; identical to SEQ ID NO: 1036
  source: /note="Description of Artificial Sequence: Synthetic heavy chain variable domain"

SEQ ID NO: 3007 - protein, 120 aa, Artificial Sequence; identical to SEQ ID NO: 1041
  source: /note="Description of Artificial Sequence: Synthetic heavy chain variable domain"

SEQ ID NO: 3008 - protein, 120 aa, Artificial Sequence
  source: /note="Description of Artificial Sequence: Synthetic heavy chain variable domain"
QVQLQQSGSELKKPGASVKVSCKASGYTFTNYGVNWIKQAPGQGLQWMGWINPNTGEPTFDDDFKGRFAFSLDTSVSTAYLQISSLKADDTAVYFCSRSRGKNEAWFAYWGQGSLVTVSS

SEQ ID NO: 3009 - protein, 467 aa, Artificial Sequence
  source: /note="Description of Artificial Sequence: Synthetic heavy chain variable domain"
MGWSCIILFLVATATGVHSQVQLQQPGAELVRPGASVKLSCKASGYTFTSYWINWVKQRPGQGLEWIGNIYPSDSYTNYNQKFKDKATLTVDKSSSTAYMQLSSPTSEDSAVYYCTRSWRGNSFDYWGQGTTLTVSSASTKGPSVFPLAPSSKSTSGGTAALGCLVKDYFPEPVTVSWNSGALTSGVHTFPAVLQSSGLYSLSSVVTVPSSSLGTQTYICNVNHKPSNTKVDKKVEPKSCDKTHTCPPCPAPELLGGPSVFLFPPKPKDTLMISRTPEVTCVVVDVSHEDPEVKFNWYVDGVEVHNAKTKPREEQYNSTYRVVSVLTVLHQDWLNGKEYKCKVSNKALPAPIEKTISKAKGQPREPQVYTLPPSRDELTKNQVSLTCLVKGFYPSDIAVEWESNGQPENNYKTTPPVLDSDGSFFLYSKLTVDKSRWQQGNVFSCSVMHEALHNHYTQKSLSLSPGK

SEQ ID NO: 3010 - protein, 118 aa, Artificial Sequence
  source: /note="Description of Artificial Sequence: Synthetic heavy chain variable domain"
QVQLQQPGAELVRPGASVKLSCKASGYTFTSYWINWVKQRPGQGLEWIGNIYPSDSYTNYNQKFKDKATLTVDKSSSTAYMQLSSPTSEDSAVYYCTRSWRGNSFDYWGQGTTLTVSS

SEQ ID NO: 3011 - protein, 443 aa, Artificial Sequence
  source: /note="Description of Artificial Sequence: Synthetic heavy chain variable domain"
QVQLVQSGPEVKKPGASVKISCKASGYTFTDYSMHWVKKAPGQGLKWLGWINTATGEPTYADDFKGRFTITLDTSARTVYLEISSLRSEDTATYFCFSYYDYWGQGTLLTVSSASTKGPSVFPLAPSSKSTSGGTAALGCLVKDYFPEPVTVSWNSGALTSGVHTFPAVLQSSGLYSLSSVVTVPSSSLGTQTYICNVNHKPSNTKVDKKVEPKSCDKTHTCPPCPAPELLGGPSVFLFPPKPKDTLMISRTPEVTCVVVDVSHEDPEVKFNWYVDGVEVHNAKTKPREEQYNSTYRVVSVLTVLHQDWLNGKEYKCKVSNKALPAPIEKTISKAKGQPREPQVYTLPPSREEMTKNQVSLTCLVKGFYPSDIAVEWESNGQPENNYKTTPPVLDSDGSFFLYSKLTVDKSRWQQGNVFSCSVMHEALHNHYTQKSLSLSPGK

SEQ ID NO: 3012 - protein, 440 aa, Artificial Sequence
  source: /note="Description of Artificial Sequence: Synthetic heavy chain variable domain"
QIQLVQSGPEVKKPGASVKISCKASGYTFTDYSMHWVKKAPGQGLEWLGWINTATGEPTYADDFKGRFTITLDTSARTVYLQINNLRSEDTATYFCFSYYDYWGQGTLLTVSSASTKGPSVFPLAPCSRSTSESTAALGCLVKDYFPEPVTVSWNSGALTSGVHTFPAVLQSSGLYSLSSVVTVPSSSLGTKTYTCNVDHKPSNTKVDKRVESKYGPPCPSCPAPEFLGGPSVFLFPPKPKDTLMISRTPEVTCVVVDVSQEDPEVQFNWYVDGVEVHNAKTKPREEQFNSTYRVVSVLTVLHQDWLNGKEYKCKVSNKGLPSSIEKTISKAKGQPREPQVYTLPPSQEEMTKNQVSLTCLVKGFYPSDIAVEWESNGQPENNYKTTPPVLDSDGSFFLYSRLTVDKSRWQEGNVFSCSVMHEALHNHYTQKSLSLSLGK

SEQ ID NO: 3013 - protein, 440 aa, Artificial Sequence
  source: /note="Description of Artificial Sequence: Synthetic heavy chain variable domain"
QVQLVQSGPEVKKPGASVKISCKASGYTFTDYSMHWVKKAPGQGLKWLGWINTATGEPTYADDFKGRFTITLDTSARTVYLEISSLRSEDTATYFCFSYYDYWGQGTLLTVSSASTKGPSVFPLAPCSRSTSESTAALGCLVKDYFPEPVTVSWNSGALTSGVHTFPAVLQSSGLYSLSSVVTVPSSSLGTKTYTCNVDHKPSNTKVDKRVESKYGPPCPSCPAPEFLGGPSVFLFPPKPKDTLMISRTPEVTCVVVDVSQEDPEVQFNWYVDGVEVHNAKTKPREEQFNSTYRVVSVLTVLHQDWLNGKEYKCKVSNKGLPSSIEKTISKAKGQPREPQVYTLPPSQEEMTKNQVSLTCLVKGFYPSDIAVEWESNGQPENNYKTTPPVLDSDGSFFLYSRLTVDKSRWQEGNVFSCSVMHEALHNHYTQKSLSLSLGK

SEQ ID NO: 3014 - protein, 442 aa, Artificial Sequence
  source: /note="Description of Artificial Sequence: Synthetic heavy chain variable domain"
QIQLVQSGPELKKPGETVKISCKASGYTFTDYSMHWVKKTPGKGLKWLGWINTATGEPTYADDFKGRFAISLETSARTVYLQINNLRNEDTATYFCFSYYDYWGQGTTLTVSASTKGPSVFPLAPSSKSTSGGTAALGCLVKDYFPEPVTVSWNSGALTSGVHTFPAVLQSSGLYSLSSVVTVPSSSLGTQTYICNVNHKPSNTKVDKRVEPKSCDKTHTCPPCPAPELLGGPSVFLFPPKPKDTLMISRTPEVTCVVVDVSHEDPEVKFNWYVDGVEVHNAKTKPREEQYNSTYRVVSVLTVLHQDWLNGKEYKCKVSNKALPAPIEKTISKAKGQPREPQVYTLPPSRDELTKNQVSLTCLVKGFYPSDIAVEWESNGQPENNYKTTPPVLDSDGSFFLYSKLTVDKSRWQQGNVFSCSVMHEALHNHYTQKSLSLSPGK

SEQ ID NO: 3015 - protein, 214 aa, Artificial Sequence
  source: /note="Description of Artificial Sequence: Synthetic heavy chain variable domain"
DIKLSQSPSILSVTPGETVSLSCRASQTIYKNLHWYQQKSHRSPRLLIKYGSDSISGIPSRFTGSGSGTDYTLNINSVKPEDEGIYYCLQGYSTPWTFGGGTKLEIKRTVAAPSVFIFPPSDEQLKSGTASVVCLLNNFYPREAKVQWKVDNALQSGNSQESVTEQDSKDSTYSLSSTLTLSKADYEKHKVYACEVTHQGLSSPVTKSFNRGEC

SEQ ID NO: 3016 - protein, 443 aa, Artificial Sequence
  source: /note="Description of Artificial Sequence: Synthetic heavy chain variable domain"
QIQLVQSGPEVKKPGASVKISCKASGYTFTDYSMHWVKKAPGQGLEWLGWINTATGEPTYADDFKGRFTITLDTSARTVYLQINNLRSEDTATYFCFSYYDYWGQGTLLTVSSASTKGPSVFPLAPSSKSTSGGTAALGCLVKDYFPEPVTVSWNSGALTSGVHTFPAVLQSSGLYSLSSVVTVPSSSLGTQTYICNVNHKPSNTKVDKRVEPKSCDKTHTCPPCPAPELLGGPSVFLFPPKPKDTLMISRTPEVTCVVVDVSHEDPEVKFNWYVDGVEVHNAKTKPREEQYNSTYRVVSVLTVLHQDWLNGKEYKCKVSNKALPAPIEKTISKAKGQPREPQVYTLPPSRDELTKNQVSLTCLVKGFYPSDIAVEWESNGQPENNYKTTPPVLDSDGSFFLYSKLTVDKSRWQQGNVFSCSVMHEALHNHYTQKSLSLSPGK

SEQ ID NO: 3017 - protein, 116 aa, Artificial Sequence; identical to SEQ ID NO: 2150
  source: /note="Description of Artificial Sequence: Synthetic heavy chain variable domain"

SEQ ID NO: 3018 - protein, 118 aa, Artificial Sequence; identical to SEQ ID NO: 2147
  source: /note="Description of Artificial Sequence: Synthetic heavy chain variable domain"

SEQ ID NO: 3019 - protein, 116 aa, Artificial Sequence
  source: /note="Description of Artificial Sequence: Synthetic heavy chain variable domain"
QVQLKESGGLVQPGGSLKLSCAASGFTFSSYGMSWVRQTADKRLELVATTNNNGGVTYYPDSVKGRFTISRDNAKNTLYLQMSSLQSEDTAMYYCARYGYYAMDYWGQGISVTVSS

SEQ ID NO: 3020 - protein, 119 aa, Artificial Sequence
  source: /note="Description of Artificial Sequence: Synthetic heavy chain variable domain"
QVQLVESGPGVVQPGRSLRISCAVSGFSVTNYGVHWVRQPPGKGLEWLGVIWAGGITNYNSAFMSRLTISKDNSKNTVYLQMNSLRAEDTAMYYCASRGGHYGYALDYWGQGTLVTVSS

SEQ ID NO: 3021 - protein, 115 aa, Artificial Sequence
  source: /note="Description of Artificial Sequence: Synthetic heavy chain variable domain"
QVQLQQSGAELVRPGASVKLSCKASGYTFTDYEMHWVKQTPVHGLKWIGALDPKTGDTAYSQKFKGKATLTADKSSSTAYMELRSLTSEDSAVYYCTRFYSYTYWGQGTLVTVSA

SEQ ID NO: 3022 - protein, 117 aa, Artificial Sequence
  source: /note="Description of Artificial Sequence: Synthetic heavy chain variable domain"
EVQLVETGGGLVQPEGSLKLSCATSGFNFNTNAMNWVRQAPGKGLEWVARVRNKTNNYATYYADSVKDRFTISRDDSQRMVFLQMNNLKTEDTAIYYCVAGNSFAYWGQGTLVTVSP

SEQ ID NO: 3023 - protein, 117 aa, Artificial Sequence
  source: /note="Description of Artificial Sequence: Synthetic heavy chain variable domain"
EVQLVGSGGGLVQPEGSLKLSCAASGFTFKTNAMNWVRQAPGKGLEWVARIRNKTNNYATYYADSVKDRFTISRDDSQSMLYLQMNNLKTEDTAMYFCVAGNSFAYWGQGTLVTVSA

SEQ ID NO: 3024 - protein, 117 aa, Artificial Sequence
  source: /note="Description of Artificial Sequence: Synthetic heavy chain variable domain"
EVQLVETGGGLVQPKGSLKLSCAASGFTFNTNAMNWVRQAPGKGLQWVARVRNKTNNYATYYADSVKDRFTISRDDSQSMLYLQMNNLKTEDTAIYYCVGGNSFAYWGQGTLVTVSA

SEQ ID NO: 3025 - protein, 117 aa, Artificial Sequence
  source: /note="Description of Artificial Sequence: Synthetic heavy chain variable domain"
EVQLVGSGGGLVQPEGSLKLSCAASGFTFKTNAMNWVRQAPGKGLEWVARIRNKTNNYATYYADSVKDRFTISRDDSQSMLYLQMNNLKTEDTAMYFCVAGNSFAYLGQGTLVTVSA

SEQ ID NO: 3026 - protein, 117 aa, Artificial Sequence
  source: /note="Description of Artificial Sequence: Synthetic heavy chain variable domain"
EVQLVETGGGMVQPEGSLKLSCAASGFTFNKNAMNWVRQAPGKGLEWVARIRNKTNNYATYYADSVKARFTISRDDSQSMLYLQMNNLKIEDTAMYYCVAGNSFAYWGQGTLVTVSA

SEQ ID NO: 3027 - protein, 448 aa, Artificial Sequence
  source: /note="Description of Artificial Sequence: Synthetic heavy chain variable domain"
EVQLVQSGAEVKKPGASVKVSCKASGYSFTGYWMNWVRQAPGQGLEWIGMIHPLDAEIRANQKFRDRVTITVDTSTSTAYLELSSLRSEDTAVYYCARGTYDGGFEYWGQGTLVTVSSASTKGPSVFPLAPSSKSTSGGTAALGCLVKDYFPEPVTVSWNSGALTSGVHTFPAVLQSSGLYSLSSVVTVPSSSLGTQTYICNVNHKPSNTKVDKKVEPKSCDKTHTCPPCPAPELLGGPSVFLFPPKPKDTLMISRTPEVTCVVVDVSHEDPEVKFNWYVDGVEVHNAKTKPREEQYNSTYRVVSVLTVLHQDWLNGKEYKCKVSNKALPAPIEKTISKAKGQPREPQVYTLPPSREEMTKNQVSLTCLVKGFYPSDIAVEWESNGQPENNYKTTPPVLDSDGSFFLYSKLTVDKSRWQQGNVFSCSVMHEALHNHYTQKSLSLSPGK

SEQ ID NO: 3028 - protein, 448 aa, Artificial Sequence
  source: /note="Description of Artificial Sequence: Synthetic heavy chain variable domain"
EVQLVQSGAEVKKPGASVKVSCKASGYSFTGYWMNWVRQAPGQGLEWIGMIHPLDAEIRANQKFRDRVTITVDTSTSTAYLELSSLRSEDTAVYYCARGTYDGGFEYWGQGTLVTVSSCSTKGPSVFPLAPSSKSTSGGTAALGCLVKDYFPEPVTVSWNSGALTSGVHTFPAVLQSSGLYSLSSVVTVPSSSLGTQTYICNVNHKPSNTKVDKKVEPKSCDKTHTCPPCPAPELLGGPSVFLFPPKPKDTLMISRTPEVTCVVVDVSHEDPEVKFNWYVDGVEVHNAKTKPREEQYNSTYRVVSVLTVLHQDWLNGKEYKCKVSNKALPAPIEKTISKAKGQPREPQVYTLPPSREEMTKNQVSLTCLVKGFYPSDIAVEWESNGQPENNYKTTPPVLDSDGSFFLYSKLTVDKSRWQQGNVFSCSVMHEALHNHYTQKSLSLSPGK

SEQ ID NO: 3029 - protein, 452 aa, Artificial Sequence
  source: /note="Description of Artificial Sequence: Synthetic heavy chain variable domain"
EVQLVQSGAEVKKPGATVKISCKVSGFTLTNYGMNWVRQAPGQGLEWMGWINTDTGEPTYADDFKGRFVFSLDTSVSTAYLQISSLKAEDTAVYYCARNPPYYYGTNNAEAMDYWGQGTTVTVSSASTKGPSVFPLAPCSRSTSESTAALGCLVKDYFPEPVTVSWNSGALTSGVHTFPAVLQSSGLYSLSSVVTVPSSSLGTKTYTCNVDHKPSNTKVDKRVESKYGPPCPPCPAPEFLGGPSVFLFPPKPKDTLMISRTPEVTCVVVDVSQEDPEVQFNWYVDGVEVHNAKTKPREEQFNSTYRVVSVLTVLHQDWLNGKEYKCKVSNKGLPSSIEKTISKAKGQPREPQVYTLPPSQEEMTKNQVSLTCLVKGFYPSDIAVEWESNGQPENNYKTTPPVLDSDGSFFLYSRLTVDKSRWQEGNVFSCSVMHEALHNHYTQKSLSLSLGK

SEQ ID NO: 3030 - protein, 452 aa, Artificial Sequence
  source: /note="Description of Artificial Sequence: Synthetic heavy chain variable domain"
QVQLVQSGAEVKKPGASVKVSCKASGFTLTNYGMNWVRQARGQRLEWIGWINTDTGEPTYADDFKGRFVFSLDTSVSTAYLQISSLKAEDTAVYYCARNPPYYYGTNNAEAMDYWGQGTTVTVSSASTKGPSVFPLAPCSRSTSESTAALGCLVKDYFPEPVTVSWNSGALTSGVHTFPAVLQSSGLYSLSSVVTVPSSSLGTKTYTCNVDHKPSNTKVDKRVESKYGPPCPPCPAPEFLGGPSVFLFPPKPKDTLMISRTPEVTCVVVDVSQEDPEVQFNWYVDGVEVHNAKTKPREEQFNSTYRVVSVLTVLHQDWLNGKEYKCKVSNKGLPSSIEKTISKAKGQPREPQVYTLPPSQEEMTKNQVSLTCLVKGFYPSDIAVEWESNGQPENNYKTTPPVLDSDGSFFLYSRLTVDKSRWQEGNVFSCSVMHEALHNHYTQKSLSLSLGK

SEQ ID NO: 3031 - protein, 452 aa, Artificial Sequence
  source: /note="Description of Artificial Sequence: Synthetic heavy chain variable domain"
QVQLVQSGAEVKKPGASVKVSCKASGFTLTNYGMNWVRQAPGQGLEWMGWINTDTGEPTYADDFKGRFVFSLDTSVSTAYLQISSLKAEDTAVYYCARNPPYYYGTNNAEAMDYWGQGTTVTVSSASTKGPSVFPLAPCSRSTSESTAALGCLVKDYFPEPVTVSWNSGALTSGVHTFPAVLQSSGLYSLSSVVTVPSSSLGTKTYTCNVDHKPSNTKVDKRVESKYGPPCPPCPAPEFLGGPSVFLFPPKPKDTLMISRTPEVTCVVVDVSQEDPEVQFNWYVDGVEVHNAKTKPREEQFNSTYRVVSVLTVLHQDWLNGKEYKCKVSNKGLPSSIEKTISKAKGQPREPQVYTLPPSQEEMTKNQVSLTCLVKGFYPSDIAVEWESNGQPENNYKTTPPVLDSDGSFFLYSRLTVDKSRWQEGNVFSCSVMHEALHNHYTQKSLSLSLGK

SEQ ID NO: 3032 - protein, 451 aa, Artificial Sequence
  source: /note="Description of Artificial Sequence: Synthetic heavy chain variable domain"
EVQLVQSGAEVKKPGATVKISCKVSGFTLTNYGMNWVRQAPGQGLEWMGWINTDTGEPTYADDFKGRFVFSLDTSVSTAYLQISSLKAEDTAVYYCARNPPYYYGTNNAEAMDYWGQGTTVTVSSASTKGPSVFPLAPCSRSTSESTAALGCLVKDYFPEPVTVSWNSGALTSGVHTFPAVLQSSGLYSLSSVVTVPSSSLGTKTYTCNVDHKPSNTKVDKRVESKYGPPCPPCPAPEFLGGPSVFLFPPKPKDTLMISRTPEVTCVVVDVSQEDPEVQFNWYVDGVEVHNAKTKPREEQFNSTYRVVSVLTVLHQDWLNGKEYKCKVSNKGLPSSIEKTISKAKGQPREPQVYTLPPSQEEMTKNQVSLTCLVKGFYPSDIAVEWESNGQPENNYKTTPPVLDSDGSFFLYSRLTVDKSRWQEGNVFSCSVMHEALHNHYTQKSLSLSLG

SEQ ID NO: 3033 - protein, 451 aa, Artificial Sequence
  source: /note="Description of Artificial Sequence: Synthetic heavy chain variable domain"
QVQLVQSGAEVKKPGASVKVSCKASGFTLTNYGMNWVRQARGQRLEWIGWINTDTGEPTYADDFKGRFVFSLDTSVSTAYLQISSLKAEDTAVYYCARNPPYYYGTNNAEAMDYWGQGTTVTVSSASTKGPSVFPLAPCSRSTSESTAALGCLVKDYFPEPVTVSWNSGALTSGVHTFPAVLQSSGLYSLSSVVTVPSSSLGTKTYTCNVDHKPSNTKVDKRVESKYGPPCPPCPAPEFLGGPSVFLFPPKPKDTLMISRTPEVTCVVVDVSQEDPEVQFNWYVDGVEVHNAKTKPREEQFNSTYRVVSVLTVLHQDWLNGKEYKCKVSNKGLPSSIEKTISKAKGQPREPQVYTLPPSQEEMTKNQVSLTCLVKGFYPSDIAVEWESNGQPENNYKTTPPVLDSDGSFFLYSRLTVDKSRWQEGNVFSCSVMHEALHNHYTQKSLSLSLG

SEQ ID NO: 3034 - protein, 452 aa, Artificial Sequence
  source: /note="Description of Artificial Sequence: Synthetic heavy chain variable domain"
EVQLVQSGAEVKKPGATVKISCKVSGFTLTNYGMNWIRQSPSRGLEWLGWINTDTGEPTYADDFKGRFVFSLDTSVSTAYLQISSLKAEDTAVYYCARNPPYYYGTNNAEAMDYWGQGTTVTVSSASTKGPSVFPLAPCSRSTSESTAALGCLVKDYFPEPVTVSWNSGALTSGVHTFPAVLQSSGLYSLSSVVTVPSSSLGTKTYTCNVDHKPSNTKVDKRVESKYGPPCPPCPAPEFLGGPSVFLFPPKPKDTLMISRTPEVTCVVVDVSQEDPEVQFNWYVDGVEVHNAKTKPREEQFNSTYRVVSVLTVLHQDWLNGKEYKCKVSNKGLPSSIEKTISKAKGQPREPQVYTLPPSQEEMTKNQVSLTCLVKGFYPSDIAVEWESNGQPENNYKTTPPVLDSDGSFFLYSRLTVDKSRWQEGNVFSCSVMHEALHNHYTQKSLSLSLGK

SEQ ID NO: 3035 - protein, 452 aa, Artificial Sequence
  source: /note="Description of Artificial Sequence: Synthetic heavy chain variable domain"
EVQLVQSGAEVKKPGATVKISCKVSGFTLTNYGMNWVRQAPGQGLEWMGWINTDTGEPTYADDFKGRFVFSLDTSVSTAYLQICSLKAEDTAVYYCARNPPYYYGTNNAEAMDYWGQGTTVTVSSASTKGPSVFPLAPCSRSTSESTAALGCLVKDYFPEPVTVSWNSGALTSGVHTFPAVLQSSGLYSLSSVVTVPSSSLGTKTYTCNVDHKPSNTKVDKRVESKYGPPCPPCPAPEFLGGPSVFLFPPKPKDTLMISRTPEVTCVVVDVSQEDPEVQFNWYVDGVEVHNAKTKPREEQFNSTYRVVSVLTVLHQDWLNGKEYKCKVSNKGLPSSIEKTISKAKGQPREPQVYTLPPSQEEMTKNQVSLTCLVKGFYPSDIAVEWESNGQPENNYKTTPPVLDSDGSFFLYSRLTVDKSRWQEGNVFSCSVMHEALHNHYTQKSLSLSLGK

SEQ ID NO: 3036 - protein, 452 aa, Artificial Sequence
  source: /note="Description of Artificial Sequence: Synthetic heavy chain variable domain"
QVQLVQSGAEVKKPGASVKVSCKASGFTLTNYGMNWVRQARGQRLEWIGWINTDTGEPTYADDFKGRFVFSLDTSVSTAYLQICSLKAEDTAVYYCARNPPYYYGTNNAEAMDYWGQGTTVTVSSASTKGPSVFPLAPCSRSTSESTAALGCLVKDYFPEPVTVSWNSGALTSGVHTFPAVLQSSGLYSLSSVVTVPSSSLGTKTYTCNVDHKPSNTKVDKRVESKYGPPCPPCPAPEFLGGPSVFLFPPKPKDTLMISRTPEVTCVVVDVSQEDPEVQFNWYVDGVEVHNAKTKPREEQFNSTYRVVSVLTVLHQDWLNGKEYKCKVSNKGLPSSIEKTISKAKGQPREPQVYTLPPSQEEMTKNQVSLTCLVKGFYPSDIAVEWESNGQPENNYKTTPPVLDSDGSFFLYSRLTVDKSRWQEGNVFSCSVMHEALHNHYTQKSLSLSLGK

SEQ ID NO: 3037 - protein, 452 aa, Artificial Sequence
  source: /note="Description of Artificial Sequence: Synthetic heavy chain variable domain"
QVQLVQSGAEVKKPGASVKVSCKASGFTLTNYGMNWVRQAPGQGLEWMGWINTDTGEPTYADDFKGRFVFSLDTSVSTAYLQICSLKAEDTAVYYCARNPPYYYGTNNAEAMDYWGQGTTVTVSSASTKGPSVFPLAPCSRSTSESTAALGCLVKDYFPEPVTVSWNSGALTSGVHTFPAVLQSSGLYSLSSVVTVPSSSLGTKTYTCNVDHKPSNTKVDKRVESKYGPPCPPCPAPEFLGGPSVFLFPPKPKDTLMISRTPEVTCVVVDVSQEDPEVQFNWYVDGVEVHNAKTKPREEQFNSTYRVVSVLTVLHQDWLNGKEYKCKVSNKGLPSSIEKTISKAKGQPREPQVYTLPPSQEEMTKNQVSLTCLVKGFYPSDIAVEWESNGQPENNYKTTPPVLDSDGSFFLYSRLTVDKSRWQEGNVFSCSVMHEALHNHYTQKSLSLSLGK

SEQ ID NO: 3038 - protein, 452 aa, Artificial Sequence
  source: /note="Description of Artificial Sequence: Synthetic heavy chain variable domain"
EVQLVQSGAEVKKPGATVKISCKVSGFTLTNYGMNWIRQSPSRGLEWLGWINTDTGEPTYADDFKGRFVFSLDTSVSTAYLQICSLKAEDTAVYYCARNPPYYYGTNNAEAMDYWGQGTTVTVSSASTKGPSVFPLAPCSRSTSESTAALGCLVKDYFPEPVTVSWNSGALTSGVHTFPAVLQSSGLYSLSSVVTVPSSSLGTKTYTCNVDHKPSNTKVDKRVESKYGPPCPPCPAPEFLGGPSVFLFPPKPKDTLMISRTPEVTCVVVDVSQEDPEVQFNWYVDGVEVHNAKTKPREEQFNSTYRVVSVLTVLHQDWLNGKEYKCKVSNKGLPSSIEKTISKAKGQPREPQVYTLPPSQEEMTKNQVSLTCLVKGFYPSDIAVEWESNGQPENNYKTTPPVLDSDGSFFLYSRLTVDKSRWQEGNVFSCSVMHEALHNHYTQKSLSLSLGK

SEQ ID NO: 3039 - protein, 452 aa, Artificial Sequence
  source: /note="Description of Artificial Sequence: Synthetic heavy chain variable domain"
EVQLVQSGAEVKKPGESLRISCKGSGFTLTNYGMNWVRQATGQGLEWMGWINTDTGEPTYADDFKGRVTISADKSISTAYLQWSSLKASDTAMYYCARNPPYYYGTNNAEAMDYWGQGTTVTVSSASTKGPSVFPLAPCSRSTSESTAALGCLVKDYFPEPVTVSWNSGALTSGVHTFPAVLQSSGLYSLSSVVTVPSSSLGTKTYTCNVDHKPSNTKVDKRVESKYGPPCPPCPAPEFLGGPSVFLFPPKPKDTLMISRTPEVTCVVVDVSQEDPEVQFNWYVDGVEVHNAKTKPREEQFNSTYRVVSVLTVLHQDWLNGKEYKCKVSNKGLPSSIEKTISKAKGQPREPQVYTLPPSQEEMTKNQVSLTCLVKGFYPSDIAVEWESNGQPENNYKTTPPVLDSDGSFFLYSRLTVDKSRWQEGNVFSCSVMHEALHNHYTQKSLSLSLGK

SEQ ID NO: 3040 - protein, 116 aa, Artificial Sequence
  source: /note="Description of Artificial Sequence: Synthetic heavy chain variable domain"
QVQLKESGPGLVQSSQTLSLTCTVSGFSLTSNGVSWVRQPPGKGLEWIAAISSGGSTYYNSAFKSRLSISPNTSKSQVLLKMNSLQTEDTGMYFCARHRPFYFDYWGQGVMVTVSS

SEQ ID NO: 3041 - protein, 116 aa, Artificial Sequence
  source: /note="Description of Artificial Sequence: Synthetic heavy chain variable domain"
QVTLKESGPVLVKPTETLTLTCTVSGFSLTSNGVSWVRQPPGKALEWIAAISSGGSTYYNSAFKSRLTISRDTSKSQVVLTMTNMDPVDTATYYCARHRPFYFDYWGQGTLVTVSS

SEQ ID NO: 3042 - protein, 116 aa, Artificial Sequence
  source: /note="Description of Artificial Sequence: Synthetic heavy chain variable domain"
QVTLKESGPVLVKPTETLTLTCTVSGFSLTSNGVSWVRQPPGKALEWIAAISSGGSTYYNSAFKSRLSISRDTSKSQVVLTMTNMDPVDTATYYCARHRPFYFDYWGQGTLVTVSS

SEQ ID NO: 3043 - protein, 116 aa, Artificial Sequence
  source: /note="Description of Artificial Sequence: Synthetic heavy chain variable domain"
QVTLKESGPVLVKPTETLTLTCTVSGFSLTSNGVSWVRQPPGKALEWIAAISSGGSTYYNSAFKSRLTISRNTSKSQVVLTMTNMDPVDTATYYCARHRPFYFDYWGQGTLVTVSS

SEQ ID NO: 3044 - protein, 116 aa, Artificial Sequence
  source: /note="Description of Artificial Sequence: Synthetic heavy chain variable domain"
QVTLKESGPVLVKPTETLTLTCTVSGFSLTSSGVSWVRQPPGKALEWIAAISSGGSTYYNSAFKSRLTISPDTSKSQVVLTMTNMDPVDTATYYCARHRPFYFDYWGQGTLVTVSS

SEQ ID NO: 3045 - protein, 116 aa, Artificial Sequence
  source: /note="Description of Artificial Sequence: Synthetic heavy chain variable domain"
QVTLKESGPVLVKPTETLTLTCTVSGFSLTSQGVSWVRQPPGKALEWIAAISSGGSTYYNSAFKSRLTISPDTSKSQVVLTMTNMDPVDTATYYCARHRPFYFDYWGQGTLVTVSS

SEQ ID NO: 3046 - protein, 116 aa, Artificial Sequence
  source: /note="Description of Artificial Sequence: Synthetic heavy chain variable domain"
QVTLKESGPVLVKPTETLTLTCTVSGFSLTSNAVSWVRQPPGKALEWIAAISSGGSTYYNSAFKSRLTISRDTSKSQVVLTMTNMDPVDTATYYCARHRPFYFDYWGQGTLVTVSS

SEQ ID NO: 3047 - protein, 123 aa, Artificial Sequence
  source: /note="Description of Artificial Sequence: Synthetic heavy chain variable domain"
QQQLEESGGGLVKPEGSLTLTCKASGFDLGFYFYACWVRQAPGKGLEWIACIYTAGSGSTYYASWAKGRFTISKASSTTVTLQMTSLAAADTATYFCARSTANTRSTYYLNLWGPGTLVTVSS

SEQ ID NO: 3048 - protein, 119 aa, Artificial Sequence
  source: /note="Description of Artificial Sequence: Synthetic heavy chain variable domain"
QEQLVESGGGLVQPGASLTLTCTASGIDFSRYYMCWVRQAPGKGLEGIACIYIGGSGSTYYASWAKGRFTISKASSTTVTLQMTSLTAADTATYFCARGTNLNYIFRLWGPGTLVTVSS

SEQ ID NO: 3049 - protein, 115 aa, Artificial Sequence
  source: /note="Description of Artificial Sequence: Synthetic heavy chain variable domain"
QSLEESGGDLVKPGASLTLTCKASGFDFSSNAMCWVRQAPGKGLEWIACIYVGDGNTYYASWAKGRFTISKTSSTTVTLQMTSLTAADTATYFCARGYASYGSDYYWDYFKLWGP

SEQ ID NO: 3050 - protein, 120 aa, Artificial Sequence
  source: /note="Description of Artificial Sequence: Synthetic heavy chain variable domain"
QSLEESGGDLVKPGASLTLTCTASGFSFSGDYYMCWVRQAPGKGLEWIACIGGGSNTATYYATWAKGRFTISKTSSTTVTLQMTSLTAADTATYFCARDLGFVDYALELWGPGTLVTVSS

SEQ ID NO: 3051 - protein, 123 aa, Artificial Sequence
  source: /note="Description of Artificial Sequence: Synthetic heavy chain variable domain"
QEQLEESGGDLVKPGASLTLTCTASGFSFSSSYWICWVRQAPGKGLEWIACIYAGDGGATYDASWVNGRFSISKTSSTTVTLQMTSLTAADTATYFCARKGAAPTTYYYFNLWGPGTLVTVSS

SEQ ID NO: 3052 - protein, 122 aa, Artificial Sequence
  source: /note="Description of Artificial Sequence: Synthetic heavy chain variable domain"
QEQLEESGGDLVQPEGSLTLTCKASGLDFSSSYWICWVRQAPGKGLEWIGCRHTFTANTWSASWVNGRFTISRSTSLGTVDLKMTSLTAADTATYFCARDESNNDGWDFKLWGPGTLVTVSS

SEQ ID NO: 3053 - protein, 118 aa, Artificial Sequence; identical to SEQ ID NO: 2486
  source: /note="Description of Artificial Sequence: Synthetic heavy chain variable domain"

SEQ ID NO: 3054 - protein, 236 aa, Artificial Sequence
  source: /note="Description of Artificial Sequence: Synthetic heavy chain variable domain"
EVQLEVQLVESGGGLVQPGESLKLSCESNEYEFPSHDMSWVRKTPEKRLELVAAINSDGGSTYYPDTMERRFIISRDNTKKTLYLQMSSLRSEDTALYYCVRLYYGNVMDYWGQGTSVTVSSVESGGGLVQPGESLKLSCESNEYEFPSHDMSWVRKTPEKRLELVAAINSDGGSTYYPDTMERRFIISRDNTKKTLYLQMSSLRSEDTALYYCVRLYYGNVMDYWGQGTSVTVSS

SEQ ID NO: 3055 - protein, 120 aa, Artificial Sequence; identical to SEQ ID NO: 2488
  source: /note="Description of Artificial Sequence: Synthetic heavy chain variable domain"

SEQ ID NO: 3056 - protein, 118 aa, Artificial Sequence
  source: /note="Description of Artificial Sequence: Synthetic heavy chain variable domain"
QVQLQQSGAELMKPGASVKISCKAIGFTFNYFWIEWVKQRPGHGLEWIGEILPGTGSTNYNEEFKGKAIFTADTSSNTAYMQLRSLTSEDSAVYYCVRYDYTSSMDYNGQGTSVIVSS

SEQ ID NO: 3057 - protein, 118 aa, Artificial Sequence
  source: /note="Description of Artificial Sequence: Synthetic heavy chain variable domain"
QITLKESGPGILQPSQTLSLTCSFSGFSLSTSGMGVSWIRQPSGKGLEWLSHIYWDDDKRYNPSLDSRLSISKDTSRNQVFLKITSVDTADTATYYCAPGVSSWFPYWGPGTLVTVSA

SEQ ID NO: 3058 - protein, 119 aa, Artificial Sequence; identical to SEQ ID NO: 2491
  source: /note="Description of Artificial Sequence: Synthetic heavy chain variable domain"

SEQ ID NO: 3059 - protein, 119 aa, Artificial Sequence
  source: /note="Description of Artificial Sequence: Synthetic heavy chain variable domain"
QVQLQQSGAELVRPGSSVKISCKTSGYAFSNFWMNWVKQRPGQGLEWIGQIYPGDGDTNYNGKFKGKATLTADKSSSTAYMQLSSLTSEASAVYFCARSYYRSAWFAYWGQGTLVSVSA

SEQ ID NO: 3060 - protein, 112 aa, Artificial Sequence
  source: /note="Description of Artificial Sequence: Synthetic heavy chain variable domain"
DVVMTQTPLTLSVTIGQPASISCKSSQSLLDSDGKTYLHWLLQRPGQSPKRLIFLVSKLDSGVPDRFTGSGSGTDFTLKISRVEAEDLGVYYCWQGTHFPQTFGGGTKLEIK

SEQ ID NO: 3061 - protein, 119 aa, Artificial Sequence [sequence omitted]

SEQ ID NO: 3062 - protein, 115 aa, Artificial Sequence
  source: /note="Description of Artificial Sequence: Synthetic heavy chain variable domain"
QVTLKESGPALVKPTQTLTLTCTFSGFSLSTSGMRVSWIRQPPGKALEWIARIDWDDDKYYSTSLKTRLTISKDTSKNQVVLTMTNMDPVDTATYYCARIYFDYWGQGTLVTVSS

SEQ ID NO: 3063 - protein, 115 aa, Artificial Sequence
  source: /note="Description of Artificial Sequence: Synthetic heavy chain variable domain"
QVTLRESGPALVKPTQTLTLTCTFSGFSLSTSGMCVSWIRQPPGKALEWLALIDWDDDKYYSTSLKTRLTISKDTSKNQVVLTMTNMDPVDTATYYCARIYFDYWGQGTLVTVSS

SEQ ID NO: 3064 - protein, 115 aa, Artificial Sequence
  source: /note="Description of Artificial Sequence: Synthetic heavy chain variable domain"
QVTLKESGPTLVKPTQTLTLTCTFSGFSLSTSGVGVGWIRQPPGKALEWLALIYWDDDKRYGPSLKSRLTITKDTSKNQVVLTMTNMDPVDTATYYCAHRYFDYWGQGTLVTVSS

SEQ ID NO: 3065 - protein, 115 aa, Artificial Sequence
  source: /note="Description of Artificial Sequence: Synthetic heavy chain variable domain"
RVTLRESGPALVKPTQTLTLTCTFSGFSLSTSGMCVSWIRQPPGKALEWLARIDWDDDKYYSTSLKTRLTISKDTSKNQVVLTMTNMDPVDTATYYCARIYFDYWGQGTLVTVSS

SEQ ID NO: 3066 - protein, 118 aa, Artificial Sequence
  source: /note="Description of Artificial Sequence: Synthetic heavy chain variable domain"
QVTLKESGPALVKPTQTLTLTCTFSGFSLSTSGMGVSWIRQPPGKALEWIARIWWDDDKYYSTSLKTRLTISKDTSKNQVVLTMTNMDPVDTATYYCARIDWDGFAYWGQGTLVTVSS

SEQ ID NO: 3067 - protein, 118 aa, Artificial Sequence
  source: /note="Description of Artificial Sequence: Synthetic heavy chain variable domain"
QVTLKESGPALVKPTQTLTLTCSFSGFSLSTSGMGVGWIRQPPGKALEWIAHIWWDDDKYYNTALKTRLTISKDTSKNQVVLTMTNMDPVDTATYYCARIDWDGFAYWGQGTLVTVSS

SEQ ID NO: 3068 - protein, 118 aa, Artificial Sequence
  source: /note="Description of Artificial Sequence: Synthetic heavy chain variable domain"
QVTLKESGPALVKPTQTLTLTCSFSGFSLSTSGMGVGWIRQPPGKALEWLAHIWWDDDKYYNTALKTRLTISKDTSKNQVVLTMTNMDPVDTATYYCARIDWDGFAYWGQGTLVTVSS

SEQ ID NO: 3069 - protein, 118 aa, Artificial Sequence
  source: /note="Description of Artificial Sequence: Synthetic heavy chain variable domain"
QVTLKESGPGILQPSQTLSLTCSFSGFSLSTSGMGVGWIRQPSGKGLEWLAHIWWDDDKYYNTALKSGLTISKDTSKNQVFLKIASVDTTDTATYYCARIDWDGFAYWGQGTLVTVSS

SEQ ID NO: 3070 - protein, 118 aa, Artificial Sequence
  source: /note="Description of Artificial Sequence: Synthetic heavy chain variable domain"
QVTLKESGPALVKPTQTLTLTCSFSGFSLSTSGMGVSWIRQPPGKALEWIARIWWDDDKYYSTSLKTRLTISKDTSKNQVVLTMTNMDPVDTATYYCARIDWDGFAYWGQGTLVTVSS

SEQ ID NO: 3071 - protein, 118 aa, Artificial Sequence
  source: /note="Description of Artificial Sequence: Synthetic heavy chain variable domain"
QVTLKESGPALVKPTQTLTLTCTFSGFSLSTSGMGVSWIRQPPGKALEWIAHIWWDDDKYYSTSLKTRLTISKDTSKNQVVLTMTNMDPVDTATYYCARIDWDGFAYWGQGTLVTVSS

SEQ ID NO: 3072 - protein, 118 aa, Artificial Sequence
  source: /note="Description of Artificial Sequence: Synthetic heavy chain variable domain"
QVTLKESGPALVKPTQTLTLTCSFSGFSLSTSGMGVSWIRQPPGKALEWIAHIWWDDDKYYSTSLKTRLTISKDTSKNQVVLTMTNMDPVDTATYYCARIDWDGFAYWGQGTLVTVSS

SEQ ID NO: 3073 - protein, 118 aa, Artificial Sequence
  source: /note="Description of Artificial Sequence: Synthetic heavy chain variable domain"
QVTLKESGPALVKPTQTLTLTCSFSGFSLSTSGMGVSWIRQPPGKALEWIAHIWWDDDKYYNTALKTRLTISKDTSKNQVVLTMTNMDPVDTATYYCARIDWDGFAYWGQGTLVTVSS

SEQ ID NO: 3074 - protein, 454 aa, Artificial Sequence
  source: /note="Description of Artificial Sequence: Synthetic heavy chain variable domain"
QVQLQQSGPGLVKPSQTLSLTCAISGDSVSSNSAAWGWIRQSPGRGLEWLGRIYYRSKWYNSYAVSVKSRITINPDTSKNQFSLQLNSVTPEDTAVYYCARYDWVPKIGVFDSWGQGTLVTVSSASTKGPSVFPLAPSSKSTSGGTAALGCLVKDYFPEPVTVSWNSGALTSGVHTFPAVLQSSGLYSLSSVVTVPSSSLGTQTYICNVNHKPSNTKVDKRVEPKSCDKTHTCPPCPAPELLGGPSVFLFPPKPKDTLMISRTPEVTCVVVDVSHEDPEVKFNWYVDGVEVHNAKTKPREEQYNSTYRVVSVLTVLHQDWLNGKEYKCKVSNKALPAPIEKTISKAKGQPREPQVYTLPPSREEMTKNQVSLTCLVKGFYPSDIAVEWESNGQPENNYKTTPPVLDSDGSFFLYSKLTVDKSRWQQGNVFSCSVMHEALHNHYTQKSLSLSPGK

SEQ ID NO: 3075 - protein, 447 aa, Artificial Sequence
  source: /note="Description of Artificial Sequence: Synthetic heavy chain variable domain"
QVQLVQSGAEVKKPGASVKVSCKASGYTFTSYWMYWIRQSPSRGLEWLGRIDPNSGSTKYNEKFKNRFTISRDDSKNTAYLQMNSLKTEDTAVYYCARDYRKGLYAMDYWGQGTTVTVSSASTKGPSVFPLAPCSRSTSESTAALGCLVKDYFPEPVTVSWNSGALTSGVHTFPAVLQSSGLYSLSSVVTVPSSSLGTKTYTCNVDHKPSNTKVDKRVESKYGPPCPPCPAPEFLGGPSVFLFPPKPKDTLMISRTPEVTCVVVDVSQEDPEVQFNWYVDGVEVHNAKTKPREEQFNSTYRVVSVLTVLHQDWLNGKEYKCKVSNKGLPSSIEKTISKAKGQPREPQVYTLPPSQEEMTKNQVSLTCLVKGFYPSDIAVEWESNGQPENNYKTTPPVLDSDGSFFLYSRLTVDKSRWQEGNVFSCSVMHEALHNHYTQKSLSLSLGK

SEQ ID NO: 3076 - protein, 447 aa, Artificial Sequence
  source: /note="Description of Artificial Sequence: Synthetic heavy chain variable domain"
EVQLVQSGAEVKKPGESLRISCKGSGYTFTSYWMYWVRQARGQRLEWIGRIDPNSGSTKYNEKFKNRLTISKDTSKNQVVLTMTNMDPVDTATYYCARDYRKGLYAMDYWGQGTTVTVSSASTKGPSVFPLAPCSRSTSESTAALGCLVKDYFPEPVTVSWNSGALTSGVHTFPAVLQSSGLYSLSSVVTVPSSSLGTKTYTCNVDHKPSNTKVDKRVESKYGPPCPPCPAPEFLGGPSVFLFPPKPKDTLMISRTPEVTCVVVDVSQEDPEVQFNWYVDGVEVHNAKTKPREEQFNSTYRVVSVLTVLHQDWLNGKEYKCKVSNKGLPSSIEKTISKAKGQPREPQVYTLPPSQEEMTKNQVSLTCLVKGFYPSDIAVEWESNGQPENNYKTTPPVLDSDGSFFLYSRLTVDKSRWQEGNVFSCSVMHEALHNHYTQKSLSLSLGK

SEQ ID NO: 3077 - protein, 120 aa, Artificial Sequence; identical to SEQ ID NO: 2733
  source: /note="Description of Artificial Sequence: Synthetic heavy chain variable domain"

SEQ ID NO: 3078 - protein, 119 aa, Artificial Sequence; identical to SEQ ID NO: 2734
  source: /note="Description of Artificial Sequence: Synthetic heavy chain variable domain"

SEQ ID NO: 3079 - protein, 120 aa, Artificial Sequence; identical to SEQ ID NO: 2736
  source: /note="Description of Artificial Sequence: Synthetic heavy chain variable domain"

SEQ ID NO: 3080 - protein, 119 aa, Artificial Sequence; identical to SEQ ID NO: 2902
  source: /note="Description of Artificial Sequence: Synthetic heavy chain variable domain"

SEQ ID NO: 3081 - protein, 121 aa, Artificial Sequence; identical to SEQ ID NO: 2903
  source: /note="Description of Artificial Sequence: Synthetic heavy chain variable domain"

SEQ ID NO: 3082 - protein, 117 aa, Artificial Sequence; identical to SEQ ID NO: 2892
  source: /note="Description of Artificial Sequence: Synthetic heavy chain variable domain"

SEQ ID NO: 3083 - protein, 122 aa, Artificial Sequence; identical to SEQ ID NO: 2897
  source: /note="Description of Artificial Sequence: Synthetic heavy chain variable domain"

SEQ ID NO: 3084 - protein, 120 aa, Artificial Sequence; identical to SEQ ID NO: 2893
  source: /note="Description of Artificial Sequence: Synthetic heavy chain variable domain"

SEQ ID NO: 3085 - protein, 117 aa, Artificial Sequence; identical to SEQ ID NO: 2894
  source: /note="Description of Artificial Sequence: Synthetic heavy chain variable domain"

SEQ ID NO: 3086 - protein, 123 aa, Artificial Sequence; identical to SEQ ID NO: 2895
  source: /note="Description of Artificial Sequence: Synthetic heavy chain variable domain"

SEQ ID NO: 3087 - protein, 117 aa, Artificial Sequence; identical to SEQ ID NO: 2896
  source: /note="Description of Artificial Sequence: Synthetic heavy chain variable domain"

SEQ ID NO: 3088 - protein, 123 aa, Artificial Sequence; identical to SEQ ID NO: 2898
  source: /note="Description of Artificial Sequence: Synthetic heavy chain variable domain"

SEQ ID NO: 3089 - protein, 120 aa, Artificial Sequence
  source: /note="Description of Artificial Sequence: Synthetic heavy chain variable domain"
EVQLQQSGPELVKPGASVKISCKASGYSFTGYLMNWVMQSHGKSLEWIGRINPYNGDIFYNQKFKDKATLTVDKSSSTAHMELRSLASEDSAVYYCARRDENFDYDNAMDYWGQGTSVTL

SEQ ID NO: 3090 - protein, 121 aa, Artificial Sequence; identical to SEQ ID NO: 2900
  source: /note="Description of Artificial Sequence: Synthetic heavy chain variable domain"

SEQ ID NO: 3091 - protein, 118 aa, Artificial Sequence; identical to SEQ ID NO: 2901
  source: /note="Description of Artificial Sequence: Synthetic heavy chain variable domain"

SEQ ID NO: 3092 - protein, 119 aa, Artificial Sequence; identical to SEQ ID NO: 859
  source: /note="Description of Artificial Sequence: Synthetic heavy chain variable domain"

SEQ ID NO: 3093 - protein, 449 aa, Artificial Sequence
  source: /note="Description of Artificial Sequence: Synthetic polypeptide"
QVQLKESGPGLVAPSQSLSITCTVSGFSVTNYGVHWVRQPPGKGLEWLGVIWAGGITNYNSAFMSRLSISKDNSKSQVFLKMNSLQIDDTAMYYCASRGGHYGYALDYWGQGTSVTVSSASTKGPSVFPLAPSSKSTSGGTAALGCLVKDYFPEPVTVSWNSGALTSGVHTFPAVLQSSGLYSLSSVVTVPSSSLGTQTYICNVNHKPSNTKVDKRVEPKSCDKTHTCPPCPAPELLGGPSVFLFPPKPKDTLMISRTPEVTCVVVDVSHEDPEVKFNWYVDGVEVHNAKTKPREEQYNSTYRVVSVLTVLHQDWLNGKEYKCKVSNKALPAPIEKTISKAKGQPREPQVYTLPPSRDELTKNQVSLTCLVKGFYPSDIAVEWESNGQPENNYKTTPPVLDSDGSFFLYSKLTVDKSRWQQGNVFSCSVMHEALHNHYTQKSLSLSPGK

SEQ ID NO: 3094 - protein, 449 aa, Artificial Sequence; identical to SEQ ID NO: 3093
  source: /note="Description of Artificial Sequence: Synthetic heavy chain variable domain"

SEQ ID NO: 3095 - protein, 112 aa, Artificial Sequence
  source: /note="Description of Artificial Sequence: Synthetic light chain variable domain"
DIQLTQSPSSLSASVGDRVTITCKASQSVDYDGDSYLNWYQQIPGKAPKLLIYDASNLVSGIPPRFSGSGSGTDYTFTISSLQPEDIATYHCQQSTEDPWTFGGGTKLQIKR

SEQ ID NO: 3096 - protein, 447 aa, Artificial Sequence
  source: /note="Description of Artificial Sequence: Synthetic light chain variable domain"
QVQLVQSGAEVKKPGASVKVSCKASGYTFTSYWMYWVRQATGQGLEWMGRIDPNSGSTKYNEKFKNRFTISRDDSKNTAYLQMNSLKTEDTAVYYCARDYRKGLYAMDYWGQGTTVTVSSASTKGPSVFPLAPCSRSTSESTAALGCLVKDYFPEPVTVSWNSGALTSGVHTFPAVLQSSGLYSLSSVVTVPSSSLGTKTYTCNVDHKPSNTKVDKRVESKYGPPCPPCPAPEFLGGPSVFLFPPKPKDTLMISRTPEVTCVVVDVSQEDPEVQFNWYVDGVEVHNAKTKPREEQFNSTYRVVSVLTVLHQDWLNGKEYKCKVSNKGLPSSIEKTISKAKGQPREPQVYTLPPSQEEMTKNQVSLTCLVKGFYPSDIAVEWESNGQPENNYKTTPPVLDSDGSFFLYSRLTVDKSRWQEGNVFSCSVMHEALHNHYTQKSLSLSLGK

SEQ ID NO: 3097 - protein, 112 aa, Artificial Sequence; identical to SEQ ID NO: 3095
  source: /note="Description of Artificial Sequence: Synthetic light chain variable domain"

SEQ ID NO: 3098 - protein, 112 aa, Artificial Sequence
  source: /note="Description of Artificial Sequence: Synthetic light chain variable domain"
DIQLTQSPASLAVSLGQRATISCKASQSVDYDGDSYLNWYQQIPGQPPKLLIYDASNLVSGIPPRFSGSGSGTDFTLNIHPVEKVDAATYHCQQSTEDPWTFGGGTKLQIKR

SEQ ID NO: 3099 - protein, 106 aa, Artificial Sequence
  source: /note="Description of Artificial Sequence: Synthetic light chain variable domain"
EIVLTQSPSSLSASVGDRVTITCSARSSVSYMHWFQQKPGKAPKLWIYRTSNLASGVPSRFSGSGSGTSYCLTINSLQPEDFATYYCQQRSSFPLTFGGGTKLEIK

SEQ ID NO: 3100 - protein, 106 aa, Artificial Sequence
  source: /note="Description of Artificial Sequence: Synthetic light chain variable domain"
EIVLTQSPSSLSASVGDRVTITCSARSSVSYMHWYQQKPGKAPKLWIYRTSNLASGVPSRFSGSGSGTDFTLTINSLQPEDFATYYCQQRSSFPLTFGGGTKLEIK

SEQ ID NO: 3101 - protein, 106 aa, Artificial Sequence
  source: /note="Description of Artificial Sequence: Synthetic light chain variable domain"
EIVLTQSPSSLSASVGDRVTITCSARSSVSYMHWFQQKPGKAPKLWIYRTSNLASGVPSRFSGSGSGTDYTLTINSLQPEDFATYYCQQRSSFPLTFGGGTKLEIK

SEQ ID NO: 3102 - protein, 107 aa, Artificial Sequence
  source: /note="Description of Artificial Sequence: Synthetic light chain variable domain"
EIVLTQSPSSLSASVGDRVTITCSARSSVSYMHWFQQKPGKAPKLWIYRTSNLASGVPSRFSGSGSGTDYCLTINSLQPEDFATYYCQQRSSSFPLTFGGGTKLEIK

SEQ ID NO: 3103 - protein, 131 aa, Artificial Sequence
  source: /note="Description of Artificial Sequence: Synthetic light chain variable domain"
MKLPVRLLVLMFWIPASNSDVVMTQTPLSLPVSLGDQASISCRSSQNLVHSDGNTYLHWYLQKPGQSPKLLIYKVSNRFSGVPDRFSGSGSGTDFTLKISRVEAEDLGVYFCSQSTHVPYTFGGGTKLEIK

SEQ ID NO: 3104 - protein, 131 aa, Artificial Sequence
  source: /note="Description of Artificial Sequence: Synthetic light chain variable domain"
MKLPVRLLVLMFWIPASSSDVVMTQTPLSLPVSLGDQASISCRSSQSLVHSNGNIYLHWFLQKPGQSPKLLIYKVSNRFSGVPDRFSGSGSGTDFTLKISRVEAEDLGVYFCSQSTHVPLTFGAGTKLELK

SEQ ID NO: 3105 - protein, 111 aa, Artificial Sequence
  source: /note="Description of Artificial Sequence: Synthetic light chain variable domain"
EIVLTQSPATLSLSPGERATLSCRASQSIVHSYGNTYAWYQQKPGQAPRLLIYRVSRATGIPARFSGSGSGTDFTLTISSLEPEDFAVYYCFQGTHVPYFFGQGTKLEIKR

SEQ ID NO: 3106 - protein, 111 aa, Artificial Sequence
  source: /note="Description of Artificial Sequence: Synthetic light chain variable domain"
EIVLTQSPATLSLSPGERATLSCRASESVDNYGISFAWYQQKPGQAPRLLIYRASRATGIPARFSGSGSGTDFTLTISSLEPEDFAVYYCQQNNKDPPTFFGQGTKLEIKR

SEQ ID NO: 3107 - protein, 112 aa, Artificial Sequence
  source: /note="Description of Artificial Sequence: Synthetic light chain variable domain"
EIVLTQSPATLSLSPGERATLSCRASKSLLHSNGNTYAWYQQKPGQAPRLLIYYMSRATGIPARFSGSGSGTDFTLTISSLEPEDFAVYYCMQGLEDPYTFFGQGTKLEIKR

SEQ ID NO: 3108 - protein, 107 aa, Artificial Sequence
  source: /note="Description of Artificial Sequence: Synthetic light chain variable domain"
EIVLTQSPATLSLSPGERATLSCRASQDIGNYAWYQQKPGQAPRLLIYYTSRATGIPARFSGSGSGTDFTLTISSLEPEDFAVYYCQQGSALPPTFFGQGTKLEIKR

SEQ ID NO: 3109 - protein, 112 aa, Artificial Sequence
  source: /note="Description of Artificial Sequence: Synthetic light chain variable domain"
GIVMTQSPLSLPVSLGDQASISCRSSQSIVHSYGNTYLFWYLQKPGQSPKLLIYRVSNRFSGVPDRFSGSGSGTNFTLKISRVEAEDMGVYYCFQGTHVPYTFGGGTKLEIK

SEQ ID NO: 3110 - protein, 111 aa, Artificial Sequence
  source: /note="Description of Artificial Sequence: Synthetic light chain variable domain"
DVQMIQTPDSLAVSLGQRATISCRASESVDNYGISFMHWYQQKPGQSPKLLIYRASNLESGIPARFSGSGSRTDFTLTINPVETDDVATYYCQQNNKDPPTFGGGTKLEIK

SEQ ID NO: 3111 - protein, 112 aa, Artificial Sequence
  source: /note="Description of Artificial Sequence: Synthetic light chain variable domain"
DIVMTQAAPSVPVTPGESVSISCRSSKSLLHSNGNTYLYWFLQRPGQSPQRLIYYMSNLASGVPDRFSGRGSGTDFTLRISRVEAEDVGVYYCMQGLEDPYTFGGGTKLEIK

SEQ ID NO: 3112 - protein, 107 aa, Artificial Sequence
  source: /note="Description of Artificial Sequence: Synthetic light chain variable domain"
DVQMIQTPSSLSASLGDRVTISCRASQDIGNYLNWYQQKPDGTVKLLIYYTSRLHSGVPSRFSGSGSGTEYSLTISNLEQEDIATYFCQQGSALPPTFGGGTKLEIN

SEQ ID NO: 3113 - protein, 113 aa, Artificial Sequence
  source: /note="Description of Artificial Sequence: Synthetic light chain variable domain"
QSALTQPASVSGSPGQSITISCTATGSDVGVYYYVSWYQQHPGKAPKVMIYDVGNRPPGVSNRFSGSKSGNTASLTISGLQAEDEADYYCASYTNRNSLGYVFGTGTKVTVLG

SEQ ID NO: 3114 - protein, 111 aa, Artificial Sequence
  source: /note="Description of Artificial Sequence: Synthetic light chain variable domain"
NFMLTQPHSVSESPGKTVTISCTRSSGSIASNYVQWYQQRPGSSPTTVIYEDNQRPSGVPDRFSGSIDSSSNSASLTISGLKTEDEADYYCQSYDSSTVVFGGGTKLTVLG

SEQ ID NO: 3115 - protein, 109 aa, Artificial Sequence
  source: /note="Description of Artificial Sequence: Synthetic light chain variable domain"
SYELTQPPSVSVAPGKTARITCGGDNIGTKSVTWYQQRPGQAPMMVIYYDTVRPSGIPERLSGSNSGNTATLTITRVEAGDEADYYCQVWDSSSDHPVFGGGTKLTVLG

SEQ ID NO: 3116 - protein, 109 aa, Artificial Sequence
  source: /note="Description of Artificial Sequence: Synthetic light chain variable domain"
QSVLTQPPSVSVAPGKTARITCGGNNIGSKSVHWYQQKPGQAPVLVIYYDSDRPSGIPERFSGSNSGNTATLTISRVEAGDEADYYCQVWDSSSDHVVFGGGTKLTVLG

SEQ ID NO: 3117 - protein, 110 aa, Artificial Sequence
  source: /note="Description of Artificial Sequence: Synthetic light chain variable domain"
QAVVTQEPSLTVSPGGTVTLTCGSSTGAVTSGHYPYWFQQKPGQAPRTLIYDASDKHSWTPARFSGSLLGGKAALTLSGAQPEDEAEYYCLLSYSDALVFGGGTKLTVLG

SEQ ID NO: 3118 - protein, 111 aa, Artificial Sequence
  source: /note="Description of Artificial Sequence: Synthetic light chain variable domain"
QSVLTQPASVSGSPGQSITISCTGTSSDVGGYNYVSWYQQHPGKAPKLMIYDVNNRPSEVSNRFSGSKSGNTASLTISGLQAEDEADYYCSSYTTGSRAVFGGGTKLTVLG

SEQ ID NO: 3119 - protein, 111 aa, Artificial Sequence
  source: /note="Description of Artificial Sequence: Synthetic light chain variable domain"
QSVVTQPPSVSAAPGQKVTISCSGSSSNIGNNYVSWYQQLPGTAPKLLIYDNNKRPSGIPDRFSGSKSGTSATLGITGLQTGDEADYYCGTWDGSLYTMLFGGGTKLTVLG

SEQ ID NO: 3120 - protein, 113 aa, Artificial Sequence
  source: /note="Description of Artificial Sequence: Synthetic light chain variable domain"
QSVLTQPPSVSGAPGQRVTISCTGSSSNIGAGYDVHWYQQLPGTAPKLLIFGNSNRPSGVPDRFSGFKSGTSASLAITGLQAEDEADYFCQSYDSSLSGSGVFGTGTKVTVLG

SEQ ID NO: 3121 - protein, 113 aa, Artificial Sequence
  source: /note="Description of Artificial Sequence: Synthetic light chain variable domain"
QSALTQPASVSGSPGQSITISCTATGSDVGVYYYVSWYQQHPGKAPKVMIYDVDNRPPGVSNRFSGSKSGNTASLTISGLQAEDEADYYCASYTNRNSLGYVFGTGTKVTVLG

SEQ ID NO: 3122 - protein, 108 aa, Artificial Sequence
  source: /note="Description of Artificial Sequence: Synthetic light chain variable domain"
QPGLTQPPSVSVAPGQTARITCGGNNIGSKSVHWYQQKPGQAPVLVVYDDSDRPSGIPERFSGSNSGNTATLTISRVEAGDEADYYCQVWDSSSDHYVFGTGTKVTVL

SEQ ID NO: 3123 - protein, 110 aa, Artificial Sequence
  source: /note="Description of Artificial Sequence: Synthetic light chain variable domain"
QPGLTQPPSVSVAPGQTARITCGGNNIGSKSVHWYQQKPGQAPVLVVYDDSDRPSGIPERFSGSNSGNTATLTISRVEAGDEADYYCQVWDSSSDHYVFGTGTKVTVLGQ

SEQ ID NO: 3124 - protein, 96 aa, Artificial Sequence
  source: /note="Description of Artificial Sequence: Synthetic light chain variable domain"
TLVGDRVNITCKASQDVSTAVAWYQQKPGLSPKLLIYWASTRHTGVPDRFTGSGSGTDYILTISSVQAEDLALYVCQQHYSTPFTFGSGTKLEIKR

SEQ ID NO: 3125 - protein, 108 aa, Artificial Sequence
  source: /note="Description of Artificial Sequence: Synthetic light chain variable domain"
DIVLTQSPATLSVTPGDSVSLSCRASQSVSNNLHWYQQKSHASPRLLIKYASQSISGIPSRFSGSGSGTDFTLSINSVETEDFGMVFCQQSYSWPRTFGGGTKLEIKR

SEQ ID NO: 3126 - protein, 112 aa, Artificial Sequence
  source: /note="Description of Artificial Sequence: Synthetic light chain variable domain"
DIVLTQSPASLAVSLGQRATISCRASESVDRYGNSFMHWYQQKPGQPPKLLIYRASNLESGIPARFSGSGSRTDFTLTINPVEADDVATYYCQQSNEVPDTFGGGTKLEIKR

SEQ ID NO: 3127 - protein, 108 aa, Artificial Sequence
  source: /note="Description of Artificial Sequence: Synthetic light chain variable domain"
DIVMTQSQKFMSTSVGDRVSITCKASQNVRTVVAWYQQKPGQSPKALIYLASNRHTGVPDRFTGSGSGTDFTLTISNVQSEDLADYFCLQHWNYPVTFGGGTKLEIKR

SEQ ID NO: 3128 - protein, 107 aa, Artificial Sequence
  source: /note="Description of Artificial Sequence: Synthetic light chain variable domain"
SIVMTQTPKFLLVSAGDRVTITCKASQSVSNAVAWYQQKPGQSPTMVIVHASNRYTGVPDRHGSGYGTDFTFTISSVQAEDLAVYFCQQDYSSPLTFGAGTKLELKR

SEQ ID NO: 3129 - protein, 107 aa, Artificial Sequence
  source: /note="Description of Artificial Sequence: Synthetic light chain variable domain"
DIQMTQTTSSLSASLGDRVTISCRASQGISNYLNWYQQKPDGTVKLLIYYTSSLHSGVPSRFSGSGSGTDFSLTISNLEPEDFATYYCQQYTKLPYTFGGGTKLEIR

SEQ ID NO: 3130 - protein, 106 aa, Artificial Sequence
  source: /note="Description of Artificial Sequence: Synthetic light chain variable domain"
ENVLTQSPAIMSASLGEKVTMSCRASSSVNYMYWYQQKSDASPKLWIVYTSNLAPGVPARFSGSGSGDSYSLTISSMEGEDAATYVCQQLTSSPYTFGGGTKLEIR

SEQ ID NO: 3131 - protein, 108 aa, Artificial Sequence
  source: /note="Description of Artificial Sequence: Synthetic light chain variable domain"
DTVMTQSQKFMSTTVGDRVSITCKASQNVGTAVAWYQQKPGQSPKLLIYLASNRYTGVPDRFTGSGSGTDFTLTISNMQSEDLADYFCQQYNSYPLTFGGGTKLEIKR

SEQ ID NO: 3132 - protein, 108 aa, Artificial Sequence
  source: /note="Description of Artificial Sequence: Synthetic light chain variable domain"
DIQMTQSSSYLSLSLGGRVTITCKASDHINNWLAWYQQKPGTAPRLLISGATSLETGVPSRFSGSGSGKDFTLSITSLQAEDVATYYCQQYWSTPYTFGGGTKLEIKR

SEQ ID NO: 3133 - protein, 111 aa, Artificial Sequence
  source: /note="Description of Artificial Sequence: Synthetic light chain variable domain"
DIVLTQSPASLAVSLGQRATISCRASESVDRDGNSLMNWYQQKPGQPPKLLIYRAFNLESGIPARFSGSGSRTDFTLTITPVEADDVATYYCQQSNEAPYTFGGGTKLQIK

SEQ ID NO: 3134 - protein, 107 aa, Artificial Sequence
  source: /note="Description of Artificial Sequence: Synthetic light chain variable domain"
DIQMTQSSSYLSLSLGGRVTITCKASDHINNWLAWYQQKPGTAPRLLISGATSLETGVPSRFSGSGSGKDHLSITSLQAEDVATYYCQQYWSTPYTFGGGTKLEIKR

SEQ ID NO: 3135 - protein, 107 aa, Artificial Sequence
  source: /note="Description of Artificial Sequence: Synthetic light chain variable domain"
DIVMTQSQKFMSTSVGDRVSITCKASQNVGNNVAWYQQKPGQSPKLLIYSASNRDSGVPDRFSGSGSGTDFTLTISNMQSEDLADYFCQQYNIYPFTFGGGTKLEIK

SEQ ID NO: 3136 - protein, 107 aa, Artificial Sequence
  source: /note="Description of Artificial Sequence: Synthetic light chain variable domain"
DIVMTQSQKFMPTSVGDRVSVTCKASQNVGNNVAWYQQKPGQSPKALIYSASNRDSGVPDRFTGSGSGTDFTLTITNVQSEDLAEYFCQQYNIYPFTFGAGTKLELK

SEQ ID NO: 3137 - protein, 107 aa, Artificial Sequence; identical to SEQ ID NO: 3135
  source: /note="Description of Artificial Sequence: Synthetic light chain variable domain"

SEQ ID NO: 3138 - protein, 107 aa, Artificial Sequence; identical to SEQ ID NO: 3136
  source: /note="Description of Artificial Sequence: Synthetic light chain variable domain"

SEQ ID NO: 3139 - protein, 107 aa, Artificial Sequence
  source: /note="Description of Artificial Sequence: Synthetic light chain variable domain"
EIVLTQSPSTQSASVGDRVTITCKASQNVGNNVAWYQQKPGKAPKLLIYSASNRDSGVPSRFSGSGSGTEFTLTISSLQPDDFATYYCQQYNIYPFTFGQGTKLEIK

SEQ ID NO: 3140 - protein, 107 aa, Artificial Sequence
  source: /note="Description of Artificial Sequence: Synthetic light chain variable domain"
DIVMTQSPSTLSASVGDRVTITCKASQNVGNNVAWYQQKPGKAPKLLIYSASNRDSGVPSRFSGSGSGTEFTLTISSLQPDDFATYYCQQYNIYPFTFGQGTKLEIK

SEQ ID NO: 3141 - protein, 107 aa, Artificial Sequence
  source: /note="Description of Artificial Sequence: Synthetic light chain variable domain"
DILMTQSQKIMPTSVGDRVSVTCKASQNVGNNVAWYQQKPGQSPKALIYSASNRDSGVPDRFTGSGSGTDFTLTITNVQSEDLAEYFCQQYNIYPFTFGAGTKLDLK

SEQ ID NO: 3142 - protein, 107 aa, Artificial Sequence
  source: /note="Description of Artificial Sequence: Synthetic light chain variable domain"
DIVMTQSPSTLSASVGDRVTITCKASQNVGNNVAWYQQKPGKAPKLLISSASNRDSGVPSRFSGSGSGTEFTLTISSLQPDDFATYFCQQYNIYPFTFGQGTKLEIK

SEQ ID NO: 3143 - protein, 107 aa, Artificial Sequence
  source: /note="Description of Artificial Sequence: Synthetic light chain variable domain"
DIVMTQSQKFKSTSVGDRVSVTCKASQNVGNNVAWYQQKAGQSPKALISSASNRDSGVPDRFTGSGSGTDFTLTISNVQSEDLADYFCQQYNIYPFTFGSGTKLEIK

SEQ ID NO: 3144 - protein, 214 aa, Artificial Sequence
  source: /note="Description of Artificial Sequence: Synthetic light chain variable domain"
DIVMTQSPSTLSASVGDRVTITCKASQNVGNNVAWYQQKPGKAPKLLISSASNRDSGVPSRFSGSGSGTEFTLTISSLQPDDFATYFCQQYNIYPFTFGQGTKLEIKRTVAAPSVFIFPPSDEQLKSGTASVVCLLNNFYPREAKVQWKVDNALQSGNSQESVTEQDSKDSTYSLSSTLTLSKADYEKHKVYACEVTHQGLSSPVTKSFNRGEC

SEQ ID NO: 3145 - protein, 112 aa, Artificial Sequence
  source: /note="Description of Artificial Sequence: Synthetic light chain variable domain"
DVLMTQTPLSLPVSLGDQASISCRSSQSLVHSNGIPYLHWYLQKPGQSPKLLIYRVSNRFSGVPDRFSGSGSGTDFTLKISRVEAEDLGVYFCSQGTHVPPTFGGGTKLEIK

SEQ ID NO: 3146 - protein, 112 aa, Artificial Sequence
  source: /note="Description of Artificial Sequence: Synthetic light chain variable domain"
DIVMTQAAPSGPVTPGESVSISCRSSKSLLHSNGNTYLYWFLQRPGQSPQLLIYRMSNLASGVPDRFSGSGSGTAFTLRISRVEAEDVGIYYCMQHREYPFTFGGGTKLEIK

SEQ ID NO: 3147 - protein, 110 aa, Artificial Sequence
  source: /note="Description of Artificial Sequence: Synthetic light chain variable domain"
DIQMTQSPASQSASLGESVTITCLASQTIGTWLAWYQQKPGKSPQLLIYAATSLADGVPSRFSGSGSGTKFSLKIRTLQAEDFVSYYCQQLYSKPYTFGGGTKLEIKRAD

SEQ ID NO: 3148 - protein, 108 aa, Artificial Sequence
  source: /note="Description of Artificial Sequence: Synthetic light chain variable domain"
EIVLTQSPGTLSLSPGERATLSCRASQSVSSNYLAWFQQKPGQAPRLLIFGTSSRATGIPDRFSGSGSGTDFTLTISRLEPEDFAVYYCQQYGSSIFTFGPGTKVDIK

SEQ ID NO: 3149 - protein, 107 aa, Artificial Sequence
  source: /note="Description of Artificial Sequence: Synthetic light chain variable domain"
DIQMTQSPSSVSASVGDRVTITCRASQGIRSWLAWYQQKPGKAPKLLIYAISRLQSGVPSRFSGSGSGTDFTLTISSLQPEDFATYYCQQANSFPLTFGGGTKVEIK

SEQ ID NO: 3150 - protein, 107 aa, Artificial Sequence
  source: /note="Description of Artificial Sequence: Synthetic light chain variable domain"
DIQMTQSPSSVSASVGDRVTITCRASQGISSWLAWYQQKSGKAPKLLIYAASGLQSGVPSRFSGSGSGTDFTLTISSLQPEDLATYYCQQSHSLPPTFGQGTKVEIK

SEQ ID NO: 3151 - protein, 108 aa, Artificial Sequence
  source: /note="Description of Artificial Sequence: Synthetic light chain variable domain"
SYVLTQPPSVSVAPGQTARITCGGNNIGSKSVHWYQQKPGQAPVLVVYDDSDRPSGIPERFSGSNSGNTATLTISRVEAGDEADYYCQVWDSSNDHVVFGGGTKLTVL

SEQ ID NO: 3152 - protein, 108 aa, Artificial Sequence
  source: /note="Description of Artificial Sequence: Synthetic light chain variable domain"
SYELTQPPSVSVSPGQAARITCSGDALPQKYVFWYQQKSGQAPVLVIYEDSKRPSGIPERFSGSSSGTMATLTISGAQVEDEADYYCYSTDRSGNHRVFGGGTRLTVL

SEQ ID NO: 3153 - protein, 108 aa, Artificial Sequence
  source: /note="Description of Artificial Sequence: Synthetic light chain variable domain"
EIVLTQSPGTLSLSPGERATLSCRASQRVSSSYLAWYQQKPGQAPRLLIYDASSRATGIPDRFSGSGSGTDFTLTISRLEPEDFAVYYCQQYGSLPWTFGQGTKVEIK

SEQ ID NO: 3154 - protein, 108 aa, Artificial Sequence
  source: /note="Description of Artificial Sequence: Synthetic light chain variable domain"
EIVLTQSPGTLSLSPGERATLSCRASQRVSSSYLAWYQQKPGQAPRLLIYDASSRATGIPDRFSGSGSGTDFTLTISRLEPEDFAVYYCQQYGSLPWTFGQGTEVEIK

SEQ ID NO: 3155 - protein, 108 aa, Artificial Sequence
  source: /note="Description of Artificial Sequence: Synthetic light chain variable domain"
SYELTQPPSVSVSPGQTARITCSGDALPQKYVFWYQQKSGQAPVLVIYEDSKRPSGIPERFSGSSSGTMATLTISGAQVEDEADYYCYSTDRSGNHRVFGGGTKLTVL

SEQ ID NO: 3156 - protein, 214 aa, Artificial Sequence
  source: /note="Description of Artificial Sequence: Synthetic light chain variable domain"
DIVMTQSPATLSVTPGDRVSLSCRASQSISDYLHWYQQKSHESPRLLIKYASQSISGIPSRFSGSGSGSDFTLSINSVEPEDVGVYYCQNGHSFPLTFGAGTKLELKRTVAAPSVFIFPPSDEQLKSGTASVVCLLNNFYPREAKVQWKVDNALQSGNSQESVTEQDSKDSTYSLSSTLTLSKADYEKHKVYACEVTHQGLSSPVTKSFNRGEC

SEQ ID NO: 3157 - protein, 214 aa, Artificial Sequence
  source: /note="Description of Artificial Sequence: Synthetic light chain variable domain"
EIVMTQSPATLSVSPGERVTLSCRASQSISDYLHWYQQKPGQAPRLLIKYASQSISGIPARFSGSGSGTEFTLTISSVQPEDVGVYYCQNGHSFPLTFGQGTKLEIKRTVAAPSVFIFPPSDEQLKSGTASVVCLLNNFYPREAKVQWKVDNALQSGNSQESVTEQDSKDSTYSLSSTLTLSKADYEKHKVYACEVTHQGLSSPVTKSFNRGEC

SEQ ID NO: 3158 - protein, 214 aa, Artificial Sequence
  source: /note="Description of Artificial Sequence: Synthetic light chain variable domain"
EIVMTQSPATLSVSPGERVTLSCRASQSISDYLHWYQQKSHESPRLLIKYASQSISGIPARFSGSGSGTEFTLTINSVEPEDVGVYYCQNGHSFPLTFGQGTKLEIKRTVAAPSVFIFPPSDEQLKSGTASVVCLLNNFYPREAKVQWKVDNALQSGNSQESVTEQDSKDSTYSLSSTLTLSKADYEKHKVYACEVTHQGLSSPVTKSFNRGEC

SEQ ID NO: 3159 - protein, 214 aa, Artificial Sequence
  source: /note="Description of Artificial Sequence: Synthetic light chain variable domain"
EIVMTQSPATLSVSPGERVSLSCRASQSISDYLHWYQQKSHESPRLLIKYASQSISGIPARFSGSGSGSEFTLTINSVEPEDVGVYYCQNGHSFPLTFGQGTKLELKRTVAAPSVFIFPPSDEQLKSGTASVVCLLNNFYPREAKVQWKVDNALQSGNSQESVTEQDSKDSTYSLSSTLTLSKADYEKHKVYACEVTHQGLSSPVTKSFNRGEC

SEQ ID NO: 3160 - protein, 214 aa, Artificial Sequence
  source: /note="Description of Artificial Sequence: Synthetic light chain variable domain"
EIVMTQSPATLSVSPGERVTLSCRASQSISDYLYWYQQKSHESPRLLIKYASQSISGIPARFSGSGSGSEFTLTINSVEPEDVGVYYCQNGHSFPLTFGQGTKLELKRTVAAPSVFIFPPSDEQLKSGTASVVCLLNNFYPREAKVQWKVDNALQSGNSQESVTEQDSKDSTYSLSSTLTLSKADYEKHKVYACEVTHQGLSSPVTKSFNRGEC

SEQ ID NO: 3161 - protein, 214 aa, Artificial Sequence
  source: /note="Description of Artificial Sequence: Synthetic light chain variable domain"
EIVMTQSPATLSVSPGERVTLSCRASQSISDYLHWYQQKSHQAPRLLIKYASQSISGIPARFSGSGSGSEFTLTISSLQPEDFGVYYCQNGHSFPLTFGQGTKLELKRTVAAPSVFIFPPSDEQLKSGTASVVCLLNNFYPREAKVQWKVDNALQSGNSQESVTEQDSKDSTYSLSSTLTLSKADYEKHKVYACEVTHQGLSSPVTKSFNRGEC

SEQ ID NO: 3162 - protein, 214 aa, Artificial Sequence
  source: /note="Description of Artificial Sequence: Synthetic light chain variable domain"
EIVMTQSPATLSVSPGERVTLSCRASQSISDYLYWYQQKSHQAPRLLIKYASQSISGIPARFSGSGSGSEFTLTISSLQPEDFGVYYCQNGHSFPLTFGQGTKLELKRTVAAPSVFIFPPSDEQLKSGTASVVCLLNNFYPREAKVQWKVDNALQSGNSQESVTEQDSKDSTYSLSSTLTLSKADYEKHKVYACEVTHQGLSSPVTKSFNRGEC

SEQ ID NO: 3163 - protein, 214 aa, Artificial Sequence
  source: /note="Description of Artificial Sequence: Synthetic light chain variable domain"
DIVMTQSPATLSVTPGDRVTLSCRASQSISDYLYWYQQKSHESPRLLIKYASQSISGIPSRFSGSGSGSDFTLSINSVEPEDVGVYYCQNGHSFPLTFGAGTKLELKRTVAAPSVFIFPPSDEQLKSGTASVVCLLNNFYPREAKVQWKVDNALQSGNSQESVTEQDSKDSTYSLSSTLTLSKADYEKHKVYACEVTHQGLSSPVTKSFNRGEC

SEQ ID NO: 3164 - protein, 109 aa, Artificial Sequence
  source: /note="Description of Artificial Sequence: Synthetic light chain variable domain"
EIVLTQSPATLSLSPGERATLSCRASQSVSSYLAWYQQKPGQAPRLLIYDASNRATGIPARFSGSGSGTDFTLTISSLEPEDFAVYYCQQRSNWPPSYTFGQGTKLEIK

SEQ ID NO: 3165 - protein, 109 aa, Artificial Sequence
  source: /note="Description of Artificial Sequence: Synthetic light chain variable domain"
EIVLTQSPATLSLSPGERATLSCRASQSVSSYLAWYQQKPGQAPRLLIYDASNRATGIPARFSGSGSGTDFTLTISSLEPEDFAVYYCQQRSNWPPRITFGQGTRLEIK

SEQ ID NO: 3166 - protein, 109 aa, Artificial Sequence
  source: /note="Description of Artificial Sequence: Synthetic light chain variable domain"
EIVLTQSPATLSLSPGERATLSCRASQSVSSNLAWYQQKPGQAPRLLIYDTSTRATGIPARFSGSGSGTEFTLTISSLQSEDFAVYYCQQYNNWPPAYTFGQGTKLEIK

SEQ ID NO: 3167 - protein, 106 aa, Artificial Sequence
  source: /note="Description of Artificial Sequence: Synthetic light chain variable domain"
DIQMTQSPSSLSASVGDRVTITCSATSSISYMHWYQQKPGKAPKGWIYDTSKLAHGVPSRFSGSGSGTDYTLTISSLQPEDFATYYCHQRRSYPFTFGQGTKVEIK

SEQ ID NO: 3168 - protein, 113 aa, Artificial Sequence
  source: /note="Description of Artificial Sequence: Synthetic light chain variable domain"
DIVMTQSPSSLIVTAGEKVTMSCRSSQSLFDSGSQRNYLTWFHQKPGRPPKLLIYWASTRESGVPDRFTGSGSGTDFTLTISSVQTEDLAVYFCQNDYSFPFTFGSGTKLEEK

SEQ ID NO: 3169 - protein, 108 aa, Artificial Sequence
  source: /note="Description of Artificial Sequence: Synthetic light chain variable domain"
DIQMTQSPSSLSASVGDRVTITCKASQGFNKYVAWYQQKPGKAPKLLIYYTSTLQPGVPSRFSGSGSGRDYTLTISSLQPEDFATYYCLQYGDLLYAFGQGTKVEIKR

SEQ ID NO: 3170 - protein, 214 aa, Artificial Sequence
  source: /note="Description of Artificial Sequence: Synthetic light chain variable domain"
DIQMTQSPSSLSASVGDRVTITCKASQGFNKYVAWYQQKPGKAPKLLIYYTSTLQPGVPSRFSGSGSGRDYTLTISSLQPEDFATYYCLQYGDLLYAFGQGTKVEIKRTVAAPSVFIFPPSDEQLKSGTASVVCLLNNFYPREAKVQWKVDNALQSGNSQESVTEQDSKDSTYSLSSTLTLSKADYEKHKVYACEVTHQGLSSPVTKSFNRGEC

SEQ ID NO: 3171 - protein, 213 aa, Artificial Sequence
  source: /note="Description of Artificial Sequence: Synthetic light chain variable domain"
DIQMTQSPSSLSASVGDRVTITCSATSSISYMHWYQQKPGKAPKGWIYDTSKLAHGVPSRFSGSGSGTDFTLTISSLQPEDFATYYCHQRRSYPFTFGQGTKVEIKRTVAAPSVFIFPPSDEQLKSGTASVVCLLNNFYPREAKVQWKVDNALQSGNSQESVTEQDSKDSTYSLSSTLTLSKADYEKHKVYACEVTHQGLSSPVTKSFNRGEC

SEQ ID NO: 3172 - protein, 107 aa, Artificial Sequence
  source: /note="Description of Artificial Sequence: Synthetic light chain variable domain"
QAVVTQESALTTSPGDTVTLTCRSSTGAVTTSNYANWVQEKPDHLFTGLIGGTNNRVPGVPARFSGSLIGDKAALTITGAQTEDEAMYFCALWYNNHWVFGGGTKLE

SEQ ID NO: 3173 - protein, 106 aa, Artificial Sequence
  source: /note="Description of Artificial Sequence: Synthetic light chain variable domain"
QIVLTQSPTIMSASPGEKVTLTCSATSSISYMHWYQQKPGTSPKGWIYDTSKLAHGVPARFSGSGSGTSYSLTISSMEAEDAATYYCHQRRSYPFTFGSGTKLEIK

SEQ ID NO: 3174 - protein, 108 aa, Artificial Sequence
  source: /note="Description of Artificial Sequence: Synthetic light chain variable domain"
DIQMTQSPSSLSASLGGKVTITCKASQGFNKYVAWYQHKPGQCPRLLIHYTSTLQPGIPARFSGSGSGRDYSFSISNLEPEDSATYFCLQYGNLLYAFGGGTKLEIKR

SEQ ID NO: 3175 - protein, 108 aa, Artificial Sequence
  source: /note="Description of Artificial Sequence: Synthetic light chain variable domain"
DIQMTQSPSSLSASVGDRVTITCKASQGFNKYVAWYQQKPGKAPKLLIYYTSTLQPGVPSRFSGSGSGRDYTLTISSLQPEDFATYYCLQYGNLLYAFGQGTKVEIKR

SEQ ID NO: 3176 - protein, 106 aa, Artificial Sequence
  source: /note="Description of Artificial Sequence: Synthetic light chain variable domain"
DIQMTQSPSSLSASVGDRVTITCSATSSISYMHWYQQKPGKAPKGWIYDTSKLAHGVPSRFSGSGSGTDFTLTISSLQPEDFATYYCHQRRSYPFTFGQGTKVEIK

SEQ ID NO: 3177 - protein, 108 aa, Artificial Sequence
  source: /note="Description of Artificial Sequence: Synthetic light chain variable domain"
DIQMTQSPSSLSASVGDRVTITCKASQGFNKYVAWYQQKPGKAPKLLIHYTSTLQPGVPSRFSGSGSGRDYTLTISSLQPEDFATYYCLQYGNLLYAFGQGTKVEIKR

SEQ ID NO: 3178 - protein, 108 aa, Artificial Sequence
  source: /note="Description of Artificial Sequence: Synthetic light chain variable domain"
DIQMTQSPSSLSASVGDRVTITCKASQGFNKYVAWYQQKPGKAPKLLIHYTSTLQPGVPSRFSGSGSGTDYTLTISSLQPEDFATYYCLQYGNLLYAFGQGTKVEIKR

SEQ ID NO: 3179 - protein, 108 aa, Artificial Sequence
  source: /note="Description of Artificial Sequence: Synthetic light chain variable domain"
DIQMTQSPSSLSASVGDRVTITCKASQGFNKYVAWYQQKPGKAPKLLIHYTSTLQPGVPSRFSGSGSGTDFTLTISSLQPEDFATYYCLQYGNLLYAFGQGTKVEIKR

SEQ ID NO: 3180 - protein, 108 aa, Artificial Sequence
  source: /note="Description of Artificial Sequence: Synthetic light chain variable domain"
DIQMTQSPSSLSASVGDRVTITCKASQGFNKYVAWYQQKPGKAPKLLIHYTSTLQPGIPSRFSGSGSGRDYTLTISSLQPEDFATYYCLQYGNLLYAFGQGTKVEIKR

SEQ ID NO: 3181 - protein, 214 aa, Artificial Sequence
  source: /note="Description of Artificial Sequence: Synthetic light chain variable domain"
DIQMTQSPSSLSASVGDRVTITCKASQGFNKYVAWYQQKPGKAPKLLIYYTSTLQPGVPSRFSGSGSGRDYTLTISSLQPEDFATYYCLQYGDLLYAFGQGTKVEIKRTVAAPSVFIFPPSDEQLKSGTASVVCLLNNFYPREAKVQWCVDNALQSGNSQESVTEQDSKDSTYSLSSTLTLSKADYEKHKVYACEVTHQGLSSPVTKSFNRGEC

SEQ ID NO: 3182 - protein, 214 aa, Artificial Sequence
  source: /note="Description of Artificial Sequence: Synthetic light chain variable domain"
DIQMTQSPSSLSASVGDRVTITCKASQGFNKYVAWYQQKPGKAPKLLIYYTSTLQPGVPSRFSGSGSGRDYTLTISSLQPEDFATYYCLQYGDLLYAFGQGTKVEIKRTVAAPSVFIFPPSDEQLKSGTASVVCLLNNFYPREAKVQWKVDNALQSGNSQESVTEQDSKDSTYSLSSTLTLSKADYEKHKVYACEVTHQGLSSPCTKSFNRGEC

SEQ ID NO: 3183 - protein, 213 aa, Artificial Sequence
  source: /note="Description of Artificial Sequence: Synthetic light chain variable domain"
DIQMTQSPSSLSASVGDRVTITCSATSSISYMHWYQQKPGKAPKGWIYDTSKLAHGVPSRFSGSGSGTDFTLTISSLQPEDFATYYCHQRRSYPFTFGQGTKVEIKRTVAAPSVFIFPPSDEQLKSGTASVVCLLNNFYPREAKVQWCVDNALQSGNSQESVTEQDSKDSTYSLSSTLTLSKADYEKHKVYACEVTHQGLSSPVTKSFNRGEC

SEQ ID NO: 3184 - protein, 213 aa, Artificial Sequence
  source: /note="Description of Artificial Sequence: Synthetic light chain variable domain"
DIQMTQSPSSLSASVGDRVTITCSATSSISYMHWYQQKPGKAPKGWIYDTSKLAHGVPSRFSGSGSGTDFTLTISSLQPEDFATYYCHQRRSYPFTFGQGTKVEIKRTVAAPSVFIFPPSDEQLKSGTASVVCLLNNFYPREAKVQWKVDNALQSGNSQESVTEQDSKDSTYSLSSTLTLSKADYEKHKVYACEVTHQGLSSPCTKSFNRGEC

SEQ ID NO: 3185 - protein, 112 aa, Artificial Sequence
  source: /note="Description of Artificial Sequence: Synthetic light chain variable domain"
DIVITQTPLSLPVSLGDQASISCRSSQSIVHRNGNTYLEWYLQQPGQSPKLLIYKVSNRFSGVPDRFSGSGSGTDFTLKISRVEAEDLGVYYCFQGSYVPPTFGGGTKLEIK

SEQ ID NO: 3186 - protein, 112 aa, Artificial Sequence
  source: /note="Description of Artificial Sequence: Synthetic light chain variable domain"
DVLMTQTPLSLPVSLGDQASISCRSSQSIVHSNGNTYLEWYLQKPGQSPKLLIYKVSNRFSGVPDRFSGSGSGTDFTLKISRVEAEDLGVYYCFQGSHVPLTFGAGTKLELK

SEQ ID NO: 3187 - protein, 107 aa, Artificial Sequence
  source: /note="Description of Artificial Sequence: Synthetic light chain variable domain"
DIQMTQSPASLSASVGETVTITCRASENIGSYLAWYQQKQGKSPQLLVYAATLLADGVPSRFSGSGSGTQFSLKINSLQSEDVARYYCQHYYSTLVTFGAGTKLELK

SEQ ID NO: 3188 - protein, 214 aa, Artificial Sequence
  source: /note="Description of Artificial Sequence: Synthetic light chain variable domain"
DIQMTQSPSSLSASVGDRVTITCRANQGISNNLNWYQQKPGKAPKPLIYYTSNLQSGVPSRFSGSGSGTDYTLTISSLQPEDFATYYCQQFTSLPYTFGQGTKLEIKRTVAAPSVFIFPPSDEQLKSGTASVVCLLNNFYPREAKVQWKVDNALQSGNSQESVTEQDSKDSTYSLSSTLTLSKADYEKHKVYACEVTHQGLSSPVTKSFNRGEC

SEQ ID NO: 3189 - protein, 116 aa, Artificial Sequence
  source: /note="Description of Artificial Sequence: Synthetic light chain variable domain"
DIVMTQTPLSLSVTPGEPASISCKSSQSLVHSNGNTYLHWYLQKPGQSPQLLIYKVSNRFSGVPDRFSGSGSGADFTLKISRVEAEDVGVYYCAETSHVPWTFGQGTKLEIKRSDP

SEQ ID NO: 3190 - protein, 109 aa, Artificial Sequence
  source: /note="Description of Artificial Sequence: Synthetic light chain variable domain"
DIVLTQSPGTLSLSPGERATLSCRASQSISSSFLAWYQQKPGQAPRLLIYGASRRATGIPDRFSGSGSGTDFTLTISRLEPEDSAVYYCQQYHSSPSWTFGQGTKLEIK

SEQ ID NO: 3191 - protein, 112 aa, Artificial Sequence
  source: /note="Description of Artificial Sequence: Synthetic light chain variable domain"
DIVMTQTPLSLPVTPGEPASISCRSSQSLLHSNGYNYLDWYLQKPGQSPQLLIYLGSNRASGVPDRFSGSGSGTDFTLKISRVEAEDVGVYYCMQALQTPYTFGQGTKVEIK

SEQ ID NO: 3192 - protein, 111 aa, Artificial Sequence
  source: /note="Description of Artificial Sequence: Synthetic light chain variable domain"
DIVMTQTPLSLSVTPGQPASISCKSSQSLLRNDGKTPLYWYLQKAGQPPQLLIYEVSNRFSGVPDRFSGSGSGTDFTLKISRVEAEDVGAYYCMQNIQFPSFGGGTKLEIK

SEQ ID NO: 3193 - protein, 112 aa, Artificial Sequence
  source: /note="Description of Artificial Sequence: Synthetic light chain variable domain"
DIVMTQTPLSLPVTPGEPASISCRSSQSLLHSNGYNYLNWYLQKPGQSPQLLIYLGSKRASGVPDRFSGSGSGTDFTLHITRVGAEDVGVYYCMQALQTPYTFGQGTKLEIK

SEQ ID NO: 3194 - protein, 106 aa, Artificial Sequence
  source: /note="Description of Artificial Sequence: Synthetic light chain variable domain"
DIQLTQSPSSLSASVGDRVTITCRASQSISSYLNWYQQKPGKAPKLLIYGASTLASGVPARFSGSGSGTHFTLTINSLQSEDSATYYCQQSYKRASFGQGTKVEIK

SEQ ID NO: 3195 - protein, 112 aa, Artificial Sequence
  source: /note="Description of Artificial Sequence: Synthetic light chain variable domain"
EIVMTQSPLSLPVTPGEPASISCRSSQSLLYSNGYNYVDWYLQKPGQSPQLLIYLGSNRASGVPDRFSGSGSGTDFKLQISRVEAEDVGIYYCMQGRQFPYSFGQGTKVEIK

SEQ ID NO: 3196 - protein, 106 aa, Artificial Sequence
  source: /note="Description of Artificial Sequence: Synthetic light chain variable domain"
EIVLTQSPATLSVSPGESATLSCRASQSVSSNLAWYQQKPGQAPRLLIYGASTRASGIPDRFSGSGSGTDFTLTISSLQAEDVAVYYCQQYGSSLTFGGGTKVEIK

SEQ ID NO: 3197 - protein, 107 aa, Artificial Sequence
  source: /note="Description of Artificial Sequence: Synthetic light chain variable domain"
EIVMTQSPATLSVSPGERATLSCRASQSVSSKLAWYQQKPGQAPRLLMYGASIRATGIPDRFSGSGSGTEFTLTISSLEPEDFAVYYCQQYGSSSWTFGQGTKVEIK

SEQ ID NO: 3198 - protein, 109 aa, Artificial Sequence
  source: /note="Description of Artificial Sequence: Synthetic light chain variable domain"
EIVLTQSPGTLSLSPGERATLSCRASQSVGSTNLAWYQQKPGQAPRLLIYDASNRATGIPDRFSGGGSGTDFTLTISRLEPEDFAVYYCQQYGSSPPWTFGQGTKVEIK

SEQ ID NO: 3199 - protein, 105 aa, Artificial Sequence
  source: /note="Description of Artificial Sequence: Synthetic light chain variable domain"
DIQMTQSPSSLSASVGDRVTITCRASQSISSYLNWYQQKPGKAPKLLIYAASSLQSGVPSRFSGSGSGTDFTLTISSLQPEDFATYYCQQSYTLAFGQGTKVDIK

SEQ ID NO: 3200 - protein, 107 aa, Artificial Sequence
  source: /note="Description of Artificial Sequence: Synthetic light chain variable domain"
DIQLTQSPSSLSASVGDRVTITCRASQSISSYLNWYQQKPGKAPKLLIYAASSLQSGVPSRFSGSGSGTDFTLTISSLQPEDFATYYCQQSYSTPYTFGQGTKVEIK

SEQ ID NO: 3201 - protein, 112 aa, Artificial Sequence
  source: /note="Description of Artificial Sequence: Synthetic light chain variable domain"
DIVLTQSPLSLPVTLGQPASISCKSSESLVHNSGKTYLNWFHQRPGQSPRRLIYEVSNRDSGVPDRFTGSGSGTDFTLKISRVEAEDVGVYYCMQGTHWPGTFGQGTKLEIK

SEQ ID NO: 3202 - protein, 107 aa, Artificial Sequence
  source: /note="Description of Artificial Sequence: Synthetic light chain variable domain"
DIRLTQSPSPLSASVGDRVTITCQASEDINKFLNWYHQTPGKAPKLLIYDASTLQTGVPSRFSGSGSGTDFTLTINSLQPEDIGTYYCQQYESLPLTFGGGTKVEIK

SEQ ID NO: 3203 - protein, 108 aa, Artificial Sequence
  source: /note="Description of Artificial Sequence: Synthetic light chain variable domain"
ETTLTQSPATLSVSPGERATLSCRASQSVGSNLAWYQQKPGQGPRLLIYGASTRATGIPARFSGSGSGTEFTLTISSLQPEDFAVYYCQQYNDWLPVTFGQGTKVEIK

SEQ ID NO: 3204 - protein, 109 aa, Artificial Sequence
  source: /note="Description of Artificial Sequence: Synthetic light chain variable domain"
EIVLTQSPGTLSLSPGERATLSCRASQSIGSSSLAWYQQKPGQAPRLLMYGASSRASGIPDRFSGSGSGTDFTLTISRLEPEDFAVYYCQQYAGSPPFTFGQGTKVEIK

SEQ ID NO: 3205 - protein, 107 aa, Artificial Sequence
  source: /note="Description of Artificial Sequence: Synthetic light chain variable domain"
ETTLTQSPAFMSATPGDKVIISCKASQDIDDAMNWYQQKPGEAPLFIIQSATSPVPGIPPRFSGSGFGTDFSLTINNIESEDAAYYFCLQHDNFPLTFGQGTKLEIK

SEQ ID NO: 3206 - protein, 107 aa, Artificial Sequence
  source: /note="Description of Artificial Sequence: Synthetic light chain variable domain"
DIQMTQSPSSLSASVGDRVTITCRASQDIYNNLAWFQLKPGSAPRSLMYAANKSQSGVPSRFSGSASGTDFTLTISSLQPEDFATYYCQHYYRFPYSFGQGTKLEIK

SEQ ID NO: 3207 - protein, 112 aa, Artificial Sequence
  source: /note="Description of Artificial Sequence: Synthetic light chain variable domain"
EIVLTQSPLSLPVTPEEPASISCRSSQSLLHSNGYNYLDWYLQKPGQSPQLLIYLGSNRASGVPDRFSGSGSGTDFTLKISRVEAEDVGVYYCMQALQTPYTFGQGTKLEIK

SEQ ID NO: 3208 - protein, 108 aa, Artificial Sequence
  source: /note="Description of Artificial Sequence: Synthetic light chain variable domain"
SYVLTQSPSVSAAPGYTATISCGGNNIGTKSVHWYQQKPGQAPLLVIRDDSVRPSKIPGRFSGSNSGNMATLTISGVQAGDEADFYCQVWDSDSEHVVFGGGTKLTVL

SEQ ID NO: 3209 - protein, 106 aa, Artificial Sequence
  source: /note="Description of Artificial Sequence: Synthetic light chain variable domain"
SYVLTQPPSVSVSPGQTASITCSGDGLSKKYVSWYQQKAGQSPVVLISRDKERPSGIPDRFSGSNSADTATLTISGTQAMDEADYYCQAWDDTTVVFGGGTKLTVL

SEQ ID NO: 3210 - protein, 107 aa, Artificial Sequence
  source: /note="Description of Artificial Sequence: Synthetic light chain variable domain"
DIVMTQSPSSVSASVGDRVIITCRASQGIRNWLAWYQQKPGKAPNLLIYAASNLQSGVPSRFSGSGSGADFTLTISSLQPEDVATYYCQKYNSAPFTFGPGTKVDIK

SEQ ID NO: 3211 - protein, 109 aa, Artificial Sequence
  source: /note="Description of Artificial Sequence: Synthetic light chain variable domain"
SYVLTQPPSVSVAPGQTARITCGGNNIGSKSVHWYQQKPGQAPVLVLYGKNNRPSGVPDRFSGSRSGTTASLTITGAQAEDEADYYCSSRDSSGDHLRVFGTGTKVTVL

SEQ ID NO: 3212 - protein, 108 aa, Artificial Sequence
  source: /note="Description of Artificial Sequence: Synthetic light chain variable domain"
SSELTQDPAVSVALGQTIRITCQGDSLGNYYATWYQQKPGQAPVLVIYGTNNRPSGIPDRFSASSSGNTASLTITGAQAEDEADYYCNSRDSSGHHLLFGTGTKVTVL

SEQ ID NO: 3213 - protein, 113 aa, Artificial Sequence
  source: /note="Description of Artificial Sequence: Synthetic light chain variable domain"
EIVMTQSPGTLSLSPGERATLSCRASQSVSSAYLAWYQQKPGQPPRLLISGASTRATGIPDRFGGSGSGTDFTLTISRLEPEDFAVYYCQHYGSSFNGSSLFTFGQGTRLEIK

SEQ ID NO: 3214 - protein, 108 aa, Artificial Sequence
  source: /note="Description of Artificial Sequence: Synthetic light chain variable domain"
EIVLTQSPATLSLSPGERATLSCRASQSVSNSLAWYQQKPGQAPRLLIYDASSRATGIPDRFSGSGSGTDFTLTISRLEPEDFAIYYCQQFGTSSGLTFGGGTKLEIK

SEQ ID NO: 3215 - protein, 109 aa, Artificial Sequence
  source: /note="Description of Artificial Sequence: Synthetic light chain variable domain"
EIVMTQSPGTVSLSPGERATLSCRASQSVSSSFLAWYQQKPGQAPRLLIYGASSRATGIPDRFSGSGSGTDFTLTISRLEPEDSAVYYCQQYHSSPSWTFGQGTRLEIK

SEQ ID NO: 3216 - protein, 109 aa, Artificial Sequence
  source: /note="Description of Artificial Sequence: Synthetic light chain variable domain"
EIVLTQSPSTLSLSPGESATLSCRASQSVSTTFLAWYQQKPGQAPRLLIYGSSNRATGIPDRFSGSGSGTDFTLTIRRLEPEDFAVYYCQQYHSSPSWTFGQGTKVEIK

SEQ ID NO: 3217 - protein, 107 aa, Artificial Sequence
  source: /note="Description of Artificial Sequence: Synthetic light chain variable domain"
DIVMTQTPSSLSASVGDRVTITCRASQSISSYLNWYQQKPGKAPKLLIYAASSLQSGVPSRFSGSGSGTDFTLTISSLQPEDFATYYCQQSYSTPYSFGQGTRLEIK

SEQ ID NO: 3218 - protein, 109 aa, Artificial Sequence
  source: /note="Description of Artificial Sequence: Synthetic light chain variable domain"
EIVLTQSPGTLSLSPGERATLSCRATQSIGSSFLAWYQQRPGQAPRLLIYGASQRATGIPDRFSGRGSGTDFTLTISRVEPEDSAVYYCQHYESSPSWTFGQGTKVEIK

SEQ ID NO: 3219 - protein, 109 aa, Artificial Sequence
  source: /note="Description of Artificial Sequence: Synthetic light chain variable domain"
EIVLTQSPATLSLSPGERATLSCRASQSVSSSYLAWYQQKPGQAPRLLIYGASSRATGIPDRFSGNGSGTDFTLTISRLEPEDFAVYYCQQYGSPPRFTFGPGTKVDIK

SEQ ID NO: 3220 - protein, 109 aa, Artificial Sequence
  source: /note="Description of Artificial Sequence: Synthetic light chain variable domain"
EIVLTQSPGTLSLSPGERATLSCRASQSVSSSYLAWYQQRPGQAPRLLIYGASSRATGIPDRFSGSGSGTDFTLTISRLEPEDFAVYYCQHYGSSPSWTFGQGTRLEIK

SEQ ID NO: 3221 - protein, 109 aa, Artificial Sequence
  source: /note="Description of Artificial Sequence: Synthetic light chain variable domain"
EIVMTQSPGTLSLSPGESATLSCRASQRVASNYLAWYQHKPGQAPSLLISGASSRATGVPDRFSGSGSGTDFTLAISRLEPEDSAVYYCQHYDSSPSWTFGQGTKVEIK

SEQ ID NO: 3222 - protein, 109 aa, Artificial Sequence
  source: /note="Description of Artificial Sequence: Synthetic light chain variable domain"
EIVLTQSPGTLSLSPGERATLSCRASQSLSSNFLAWYQQKPGQAPGLLIYGASNWATGTPDRFSGSGSGTDFTLTITRLEPEDFAVYYCQYYGTSPMYTFGQGTKVEIK

SEQ ID NO: 3223 - protein, 112 aa, Artificial Sequence
  source: /note="Description of Artificial Sequence: Synthetic light chain variable domain"
DIVLTQSPLSLPVTPGEPASISCRSSQSLLHSNGYNYLDWYLQKPGQSPQLLIYLGSNRASGVPDRFSGSGSGTDFTLKISRVEAEDVGVYYCMQALQTPLTFGGGTKVDIK

SEQ ID NO: 3224 - protein, 110 aa, Artificial Sequence
  source: /note="Description of Artificial Sequence: Synthetic light chain variable domain"
EIVLTQSPGTLSLSPGERATLSCRASQSVSSSYLAWYQQKPGQAPRLLIYGTSSRATGISDRFSGSGSGTDFTLTISRLEPEDFAVYYCQHYGNSPPKFTFGPGTKLEIK

SEQ ID NO: 3225 - protein, 109 aa, Artificial Sequence
  source: /note="Description of Artificial Sequence: Synthetic light chain variable domain"
EIVLTQSPGTLSLSPGERATLSCRASQSVASSFLAWYQQKPGQAPRLLIYGASGRATGIPDRFSGSGSGTDFTLTISRLEPEDFAVYYCQHYGGSPRLTFGGGTKVDIK

SEQ ID NO: 3226 - protein, 107 aa, Artificial Sequence; identical to SEQ ID NO: 3205
  source: /note="Description of Artificial Sequence: Synthetic light chain variable domain"

SEQ ID NO: 3227 - protein, 107 aa, Artificial Sequence; identical to SEQ ID NO: 3206
  source: /note="Description of Artificial Sequence: Synthetic light chain variable domain"

SEQ ID NO: 3228 - protein, 112 aa, Artificial Sequence; identical to SEQ ID NO: 3207
  source: /note="Description of Artificial Sequence: Synthetic light chain variable domain"

SEQ ID NO: 3229 - protein, 108 aa, Artificial Sequence; identical to SEQ ID NO: 3208
  source: /note="Description of Artificial Sequence: Synthetic light chain variable domain"

SEQ ID NO: 3230 - protein, 106 aa, Artificial Sequence; identical to SEQ ID NO: 3209
  source: /note="Description of Artificial Sequence: Synthetic light chain variable domain"

SEQ ID NO: 3231 - protein, 107 aa, Artificial Sequence; identical to SEQ ID NO: 3210
  source: /note="Description of Artificial Sequence: Synthetic light chain variable domain"

SEQ ID NO: 3232 - protein, 109 aa, Artificial Sequence; identical to SEQ ID NO: 3211
  source: /note="Description of Artificial Sequence: Synthetic light chain variable domain"

SEQ ID NO: 3233 - protein, 108 aa, Artificial Sequence; identical to SEQ ID NO: 3212
  source: /note="Description of Artificial Sequence: Synthetic light chain variable domain"

SEQ ID NO: 3234 - protein, 113 aa, Artificial Sequence; identical to SEQ ID NO: 3213
  source: /note="Description of Artificial Sequence: Synthetic light chain variable domain"

SEQ ID NO: 3235 - protein, 108 aa, Artificial Sequence; identical to SEQ ID NO: 3214
  source: /note="Description of Artificial Sequence: Synthetic light chain variable domain"

SEQ ID NO: 3236 - protein, 107 aa, Artificial Sequence; identical to SEQ ID NO: 3217
  source: /note="Description of Artificial Sequence: Synthetic light chain variable domain"

SEQ ID NO: 3237 - protein, 109 aa, Artificial Sequence; identical to SEQ ID NO: 3218
  source: /note="Description of Artificial Sequence: Synthetic light chain variable domain"

SEQ ID NO: 3238 - protein, 109 aa, Artificial Sequence; identical to SEQ ID NO: 3220
  source: /note="Description of Artificial Sequence: Synthetic light chain variable domain"

SEQ ID NO: 3239 - protein, 109 aa, Artificial Sequence; identical to SEQ ID NO: 3221
  source: /note="Description of Artificial Sequence: Synthetic light chain variable domain"

SEQ ID NO: 3240 - protein, 110 aa, Artificial Sequence; identical to SEQ ID NO: 3224
  source: /note="Description of Artificial Sequence: Synthetic light chain variable domain"

SEQ ID NO: 3241 - protein, 107 aa, Artificial Sequence
  source: /note="Description of Artificial Sequence: Synthetic light chain variable domain"
DVVMTQSHRFMSTSVGDRVSITCRASQDVNTAVSWYQQKPGQSPKLLIFSASYRYTGVPDRFTGSGSGADFTLTISSVQAEDLAVYYCQQHYSTPWTFGGGTKLDIK

SEQ ID NO: 3242 - protein, 111 aa, Artificial Sequence
  source: /note="Description of Artificial Sequence: Synthetic light chain variable domain"
DIVLTQSPASLAMSLGKRATISCRASESVSVIGAHLIHWYQQKPGQPPKLLIYLASNLETGVPARFSGSGSGTDFTLTIDPVEEDDVAIYSCLQSRIFPRTFGGGTKLEIK

SEQ ID NO: 3243 - protein, 109 aa, Artificial Sequence; identical to SEQ ID NO: 3190
  source: /note="Description of Artificial Sequence: Synthetic light chain variable domain"

SEQ ID NO: 3244 - protein, 112 aa, Artificial Sequence; identical to SEQ ID NO: 3191
  source: /note="Description of Artificial Sequence: Synthetic light chain variable domain"

SEQ ID NO: 3245 - protein, 111 aa, Artificial Sequence; identical to SEQ ID NO: 3192
  source: /note="Description of Artificial Sequence: Synthetic light chain variable domain"

SEQ ID NO: 3246 - protein, 112 aa, Artificial Sequence; identical to SEQ ID NO: 3193
  source: /note="Description of Artificial Sequence: Synthetic light chain variable domain"

SEQ ID NO: 3247 - protein, 106 aa, Artificial Sequence; identical to SEQ ID NO: 3194
  source: /note="Description of Artificial Sequence: Synthetic light chain variable domain"

SEQ ID NO: 3248 - protein, 112 aa, Artificial Sequence; identical to SEQ ID NO: 3195
  source: /note="Description of Artificial Sequence: Synthetic light chain variable domain"

SEQ ID NO: 3249 - protein, 106 aa, Artificial Sequence; identical to SEQ ID NO: 3196
  source: /note="Description of Artificial Sequence: Synthetic light chain variable domain"

SEQ ID NO: 3250 - protein, 107 aa, Artificial Sequence; identical to SEQ ID NO: 3197
  source: /note="Description of Artificial Sequence: Synthetic light chain variable domain"

SEQ ID NO: 3251 - protein, 109 aa, Artificial Sequence; identical to SEQ ID NO: 3198
  source: /note="Description of Artificial Sequence: Synthetic light chain variable domain"

SEQ ID NO: 3252 - protein, 105 aa, Artificial Sequence; identical to SEQ ID NO: 3199
  source: /note="Description of Artificial Sequence: Synthetic light chain variable domain"

SEQ ID NO: 3253 - protein, 107 aa, Artificial Sequence; identical to SEQ ID NO: 3200
  source: /note="Description of Artificial Sequence: Synthetic light chain variable domain"

SEQ ID NO: 3254 - protein, 112 aa, Artificial Sequence; identical to SEQ ID NO: 3201
  source: /note="Description of Artificial Sequence: Synthetic light chain variable domain"

SEQ ID NO: 3255 - protein, 107 aa, Artificial Sequence; identical to SEQ ID NO: 3202
  source: /note="Description of Artificial Sequence: Synthetic light chain variable domain"

SEQ ID NO: 3256 - protein, 108 aa, Artificial Sequence; identical to SEQ ID NO: 3203
  source: /note="Description of Artificial Sequence: Synthetic light chain variable domain"

SEQ ID NO: 3257 - protein, 109 aa, Artificial Sequence; identical to SEQ ID NO: 3204
  source: /note="Description of Artificial Sequence: Synthetic light chain variable domain"

SEQ ID NO: 3258 - protein, 113 aa, Artificial Sequence
  source: /note="Description of Artificial Sequence: Synthetic light chain variable domain"
DIVMTQTPLSLSVTPGEPASISCKSSQSLVHSNGNTYLHWYLQKPGQSPQLLIYKVSNRFSGVPDRFSGSGSGADFTLKISRVEAEDVGVYYCAETSHVPWTFGQGTKLEIKS

SEQ ID NO: 3259 - protein, 111 aa, Artificial Sequence
  source: /note="Description of Artificial Sequence: Synthetic light chain variable domain"
DIVLTQSPPSLAMSLGKRATISCRASESVTILGSHLIHWYQQKPGQPPTLLIQLASNVQTGVPARFSGSGSRTDFTLTIDPVEEDDVAVYYCLQSRTIPRTFGGGTKLEIK

SEQ ID NO: 3260 - protein, 111 aa, Artificial Sequence
  source: /note="Description of Artificial Sequence: Synthetic light chain variable domain"
LPVLTQPPSTSGTPGQRVTVSCSGSSSNIGSNVVFWYQQLPGTAPKLVIYRNNQRPSGVPDRFSVSKSGTSASLAISGLRSEDEADYYCAAWDDSLSGYVFGTGTKVTVLG

SEQ ID NO: 3261 - protein, 111 aa, Artificial Sequence
  source: /note="Description of Artificial Sequence: Synthetic light chain variable domain"
DIVLTGSPPSLAMSLGKRATISCRASESVTILGSHLIHWYQQKPGQPPTLLIQLASNVQTGVPARFSGSGSRTDFTLTIDPVEEDDVAVYYCLQSRTIPRTFGGGTKLEIK

SEQ ID NO: 3262 - protein, 111 aa, Artificial Sequence
  source: /note="Description of Artificial Sequence: Synthetic light chain variable domain"
DIVLTQSPPSLAMSLGKRATISCRASESVTILGSHLIYWYQQKPGQPPTLLIQLASNVQTGVPARFSGSGSRTDFTLTIDPVEEDDVAVYYCLQSRTIPRTFGGGTKLEIK

SEQ ID NO: 3263 - protein, 112 aa, Artificial Sequence
  source: /note="Description of Artificial Sequence: Synthetic light chain variable domain"
DIVMTQTPLSLSVTPGQPASISCKSSQSLVHSNGNTYLHWYLQKPGQSPQLLIYKVSNRFSGVPDRFSGSGSGTDFTLKISRVEAEDVGIYYCSQSSIYPWTFGQGTKLEIK

SEQ ID NO: 3264 - protein, 112 aa, Artificial Sequence
  source: /note="Description of Artificial Sequence: Synthetic light chain variable domain"
DIVMTQTPLSLSVTPGEPASISCKSSQSLVHSNGNTYLHWYLQKPGQSPQLLIYKVSNRFSGVPDRFSGSGSGADFTLKISRVEAEDVGVYYCAETSHVPWTFGQGTKLEIK

SEQ ID NO: 3265 - protein, 112 aa, Artificial Sequence
  source: /note="Description of Artificial Sequence: Synthetic light chain variable domain"
QSVVTQPPSVSGAPGQRVTISCSGSSSNIGARYDVQWYQQLPGTAPKLLIFGNNNRPSGVPDRFSGSKSGTSASLAITGLQAEDEADYYCQSYDSSLSASVFGGGTKLTVLG

SEQ ID NO: 3266 - protein, 111 aa, Artificial Sequence; identical to SEQ ID NO: 3261
  source: /note="Description of Artificial Sequence: Synthetic light chain variable domain"

SEQ ID NO: 3267 - protein, 108 aa, Artificial Sequence
  source: /note="Description of Artificial Sequence: Synthetic light chain variable domain"
EIVLTQSPGTLSLSPGSEATLSCRGGQSVSSSYLAWYQQKPGQAPRLLMYDASIRATGIPDRFSGSGSGTDFTLTISRLEPEDFAVYYCQQYQSWPLTFGQGTKVEIK

SEQ ID NO: 3268 - protein, 111 aa, Artificial Sequence; identical to SEQ ID NO: 3262
  source: /note="Description of Artificial Sequence: Synthetic light chain variable domain"

SEQ ID NO: 3269 - protein, 111 aa, Artificial Sequence
  source: /note="Description of Artificial Sequence: Synthetic light chain variable domain"
QAVLTQPPSASGTPGQRVTISCSGSSSNIGSNTVNWYRQLPGTAPKLLIYSNNQRPSGVPDRFSGSKSGTSASLAISGLQSEDEADYYCAAWDDSLNGVVFGGGTKLTVLG

SEQ ID NO: 3270 - protein, 111 aa, Artificial Sequence
  source: /note="Description of Artificial Sequence: Synthetic light chain variable domain"
QSVLTQPPSVSVAPRQRVTISCSGSSSNIGHNDVSWYQHLPGKAPRLLIYFDDLLPSGVSDRFSASKSGTSASLAISGLQSEDEADYYCAAWDGSLNAFVFGTGTKVTVLG

SEQ ID NO: 3271 - protein, 112 aa, Artificial Sequence
  source: /note="Description of Artificial Sequence: Synthetic light chain variable domain"
LPVLTQPPSASGTPGQRVTISCSGRSSNIGSNSVNWYRQLPGAAPKLLIYSNNQRPPGVPVRFSGSKSGTSASLAISGLQSEDEATYYCATWDDNLNVHYVFGTGTKVTVLG

SEQ ID NO: 3272 - protein, 117 aa, Artificial Sequence
  source: /note="Description of Artificial Sequence: Synthetic light chain variable domain"
QPVLTQPPSASASLGASVTLTCTLSSGYSNYKVDWYQQRPGKGPRFVMRVGTGGIVGSKGDGIPDRFSVLGSGLNRYLTIKNIQEEDEGDYHCGADHGSGSNFVYVFGTGTKVTVLG

SEQ ID NO: 3273 - protein, 108 aa, Artificial Sequence
  source: /note="Description of Artificial Sequence: Synthetic light chain variable domain"
DIQLTQSPSSLSASVGDRVTITCRASQSISSYLNWYQQKPGKAPKLLIYAASSLQSGVPSRFSGSGSGTDFTLTISSLQPEDFATYYCQQSYSTPPTFGQGTKVEIKR

SEQ ID NO: 3274 - protein, 117 aa, Artificial Sequence
  source: /note="Description of Artificial Sequence: Synthetic light chain variable domain"
QPVLTQPPSASASLGASVTLTCTLSNDYTNYKVDWYQQRPGKGPRFVMRVGPGGIVGSKGDGIPDRFSVLGSGLNRYLTIKNIQEEDESDYHCGADHGTGSNFVYVFGGGTKLTVLG

SEQ ID NO: 3275 - protein, 117 aa, Artificial Sequence
  source: /note="Description of Artificial Sequence: Synthetic light chain variable domain"
QPVLTQPPSASASLGASVTLTCTLSSGYSNYKVDWYQQRPGKGPRFLMRVDTGGIVGSKGDGIPDRFSVSGSGLNRYLTIKNIQEEDESDYHCGADHGSGSNFVWVFGGGTKLTVLG

SEQ ID NO: 3276 - protein, 113 aa, Artificial Sequence
  source: /note="Description of Artificial Sequence: Synthetic light chain variable domain"
DVVMTQSPLSLPVTPGEPASISCRSSQSLLHSNGYNYLDWYLQKPGQSPQLLIYLGSNRASGVPDRFSGSGSGTDFTLKISRVEAEDVGVYYCMQALQTPLTFGGGTKVEIKR

SEQ ID NO: 3277 - protein, 111 aa, Artificial Sequence
  source: /note="Description of Artificial Sequence: Synthetic light chain variable domain"
SYVLTQPPSASGTPGQRVTISCSGSSSNIGSNTVNWYQQVPGTAPKLLIYSNNQRPSGVPDRFSGSKSGASASLAISWLQSEDEADYYCAAWDDSLNGWVFGGGTKLTVLG

SEQ ID NO: 3278 - protein, 111 aa, Artificial Sequence
  source: /note="Description of Artificial Sequence: Synthetic light chain variable domain"
QAVLTQPPSASGTPGQRVTISCSGSSSNIGSYTVSWYQQLPGTAPKFLIYSNNQRPSGVPDRFSGSKSGTSASLAISGLQSEDEADYYCAAWDDSLNGYVFGTGTKVTVLG

SEQ ID NO: 3279 - protein, 105 aa, Artificial Sequence
  source: /note="Description of Artificial Sequence: Synthetic light chain variable domain"
QSALTQPASVSASPGQSIAISCTGTSSDVGWYQQHPGKAPKLMIYEDSKRPSGVSNRFSGSKSGNTASLTISGLQAEDEADYYCSSNTRSSTLVFGGGTKLTVLG

SEQ ID NO: 3280 - protein, 112 aa, Artificial Sequence
  source: /note="Description of Artificial Sequence: Synthetic light chain variable domain"
QSVLTQPPSVSGAPGQRVTISCTGSSSNIGAGFDVHWYQQLPGTAPKLLIYGNSNRPSGVPDRFSGSKSGTSASLAITGLQAEDEADYYCQSYDSSLSGYVFGTGTKVTVLG

SEQ ID NO: 3281 - protein, 111 aa, Artificial Sequence
  source: /note="Description of Artificial Sequence: Synthetic light chain variable domain"
QPVLTQPPSVSEAPRQRVTISCSGSSSNIGNNAVNWYQQLPGKAPKLLIYFDDLLSSGVSDRFSGSKSGTSASLAISGLQSEDEADYYCAAWDDSLNGYVFGTGTKVTVLG

SEQ ID NO: 3282 - protein, 112 aa, Artificial Sequence
  source: /note="Description of Artificial Sequence: Synthetic light chain variable domain"
QAVLTQPPSASGTPGQRVTISCSGSSSNIGSNYVFWYQQLPGTAPKLLIYSNNQRPSGVPDRFSGSKSGTSASLAISGLRSEDEADYYCAAWDDSLSASYVFGTGTKVTVLG

SEQ ID NO: 3283 - protein, 111 aa, Artificial Sequence
  source: /note="Description of Artificial Sequence: Synthetic light chain variable domain"
SYELTQPPSASGTPGQRVTMSCSGTSSNIGSHSVNWYQQLPGTAPKLLIYTNNQRPSGVPDRFSGSKSGTSASLAISGLQSEDEADYYCAAWDGSLNGLVFGGGTKLTVLG

SEQ ID NO: 3284 - protein, 111 aa, Artificial Sequence
  source: /note="Description of Artificial Sequence: Synthetic light chain variable domain"
DIVLTQSPASLAVSLGERATINCRASESVSVIGAHLIHWYQQKPGQPPKLLIYLASNLETGVPARFSGSGSGTDFTLTISSLQAEDAAIYYCLQSRIFPRTFGQGTKLEIK

SEQ ID NO: 3285 - protein, 111 aa, Artificial Sequence
  source: /note="Description of Artificial Sequence: Synthetic light chain variable domain"
DIVLTQSPASLAVSLGERATINCRASESVSVIGAHLIHWYQQKPGQPPKLLIYLASNLETGVPARFSGSGSGTDFTLTISSLQAEDAAIYSCLQSRIFPRTFGQGTKLEIK

SEQ ID NO: 3286 - protein, 111 aa, Artificial Sequence
  source: /note="Description of Artificial Sequence: Synthetic light chain variable domain"
DIVLTQSPASLAMSLGERATISCRASESVSVIGAHLIHWYQQKPGQPPKLLIYLASNLETGVPARFSGSGSGTDFTLTISRVQAEDAAIYSCLQSRIFPRTFGQGTKLEIK

SEQ ID NO: 3287 - protein, 112 aa, Artificial Sequence; identical to SEQ ID NO: 3263
  source: /note="Description of Artificial Sequence: Synthetic light chain variable domain"

SEQ ID NO: 3288 - protein, 112 aa, Artificial Sequence; identical to SEQ ID NO: 3264
  source: /note="Description of Artificial Sequence: Synthetic light chain variable domain"

SEQ ID NO: 3289 - protein, 107 aa, Artificial Sequence
  source: /note="Description of Artificial Sequence: Synthetic light chain variable domain"
DIQMTQSPSSLSASVGDRVTITCRANQGISNNLNWYQQKPGKAPKPLIYYTSNLQSGVPSRFSGSGSGTDYTLTISSLQPEDFATYYCQQFTSLPYTFGQGTKLEIK

SEQ ID NO: 3290 - protein, 214 aa, Artificial Sequence
  source: /note="Description of Artificial Sequence: Synthetic light chain variable domain"
DIQMTQSPILLSASVGDRVTITCKASQNIDKYLNWYQQRTNGSPRLLIYNTNNLQTGVPSRFSGSGSGTDFTFTISSLQPEDEADYYCLQHISRPRTFGQGTKVEIKRTVAAPSVFIFPPSDEQLKSGTASVVCLLNNFYPREAKVQWKVDNALQSGNSQESVTEQDSKDSTYSLSSTLTLSKADYEKHKVYACEVTHQGLSSPVTKSFNRGEC

SEQ ID NO: 3291 - protein, 214 aa, Artificial Sequence
  source: /note="Description of Artificial Sequence: Synthetic light chain variable domain"
DIQMTQSPILLSASVGDRVTITCKASQNIDKYLNWYQQRTNGSPRLLIYNTNNLQTGVPSRFSGSGSGTDFTFTISSLQPEDIADYYCLQHISRPRTFGQGTKVEIKRTVAAPSVFIFPPSDEQLKSGTASVVCLLNNFYPREAKVQWKVDNALQSGNSQESVTEQDSKDSTYSLSSTLTLSKADYEKHKVYACEVTHQGLSSPVTKSFNRGEC

SEQ ID NO: 3292 - protein, 214 aa, Artificial Sequence; identical to SEQ ID NO: 3290
  source: /note="Description of Artificial Sequence: Synthetic light chain variable domain"

SEQ ID NO: 3293 - protein, 106 aa, Artificial Sequence
  source: /note="Description of Artificial Sequence: Synthetic light chain variable domain"
QIVLSQSPAILSASPGEKVTMTCRASSSVSYMHWYQQKPGSSPKPWIYATSNLASGVPVRFSGSGSGTSYSLTISRVEAEDAATYYCQQWSSNPLTFGAGTKLELK

SEQ ID NO: 3294 - protein, 106 aa, Artificial Sequence
  source: /note="Description of Artificial Sequence: Synthetic light chain variable domain"
DIQLTQSPSSLSASVGDRATITCRASSSVSYMHWYQQKPGKAPKPWAYATSNLASGVPSRFSGSGSGTDYTLTISSLQPEDFATYYCQQWSSNPLTFGGGTKVEIK

SEQ ID NO: 3295 - protein, 106 aa, Artificial Sequence
  source: /note="Description of Artificial Sequence: Synthetic light chain variable domain"
DIQLTQSPSSLSASVGDRVTISCRASSSVSYMHWYQQKPGKAPKPWIYASSNLASGVPSRFSGSGSGTDYTLTISSLQPEDFATYYCQQWSSNPLTFGGGTKVEIK

SEQ ID NO: 3296 - protein, 106 aa, Artificial Sequence
  source: /note="Description of Artificial Sequence: Synthetic light chain variable domain"
DIQMTQSPSSLSASVGDRATITCRASSSVSYMHWYQQKPGKAPKPWIYASSNLASGVPSRFSGSGSGTDYTLTISSLQPEDFATYYCQQWSSNPLTFGGGTKVEIK

SEQ ID NO: 3297 - protein, 106 aa, Artificial Sequence
  source: /note="Description of Artificial Sequence: Synthetic light chain variable domain"
DIQMTQSPSSLSASVGDRVTISCRASSSVSYMHWYQQKPGKAPKPWAYATSNLASGVPSRFSGSGSGTDYTLTISSLQPEDFATYYCQQWSSNPLTFGGGTKVEIK

SEQ ID NO: 3298 - protein, 113 aa, Artificial Sequence; identical to SEQ ID NO: 2373
  source: /note="Description of Artificial Sequence: Synthetic light chain variable domain"

SEQ ID NO: 3299 - protein, 134 aa, Artificial Sequence
  source: /note="Description of Artificial Sequence: Synthetic light chain variable domain"
MESQTQVLMSLLFWVSGTCGDFVMTQSPSSLTVTAGEKVTMSCKSSQSLLNSGNQKNYLTWYLQKPGQPPKLLIYWASTRESGVPDRFTGSGSGTDFTLTISSVQAEDLAVYYCQNDYSYPYTFGGGTKLEIKR

SEQ ID NO: 3300 - protein, 107 aa, Artificial Sequence
  source: /note="Description of Artificial Sequence: Synthetic light chain variable domain"
DVQITQSPSYLAASPGETITINCRASKSISKDLAWYQEKPGKTNKLLIYSGSTLQSGIPSRFSGSGSGTDFTLTISSLEPEDFAMYYCQQHNKYPYTFGGGTKLEIK

SEQ ID NO: 3301 - protein, 111 aa, Artificial Sequence
  source: /note="Description of Artificial Sequence: Synthetic light chain variable domain"
DIVLTQSPASLAVSLGQRATISCRASESVDNYGNTFMHWYQQKPGQPPKLLIYRASNLESGIPARFSGSGSRTDFTLTINPVEADDVATYYCQQSNEDPPTFGAGTKLELK

SEQ ID NO: 3302 - protein, 113 aa, Artificial Sequence
  source: /note="Description of Artificial Sequence: Synthetic light chain variable domain"
MADYKDIVMTQSPSSVSASVGDRVTITCRASQNVDSAVAWYQQKPGKAPKALIYSASYRYSGVPSRFSGRGSGTDFTLTISSLQPEDFATYYCQQYYSTPWTFGQGTKVEIKR

SEQ ID NO: 3303 - protein, 127 aa, Artificial Sequence; identical to SEQ ID NO: 771
  source: /note="Description of Artificial Sequence: Synthetic light chain variable domain"

SEQ ID NO: 3304 - protein, 113 aa, Artificial Sequence
  source: /note="Description of Artificial Sequence: Synthetic light chain variable domain"
MADYKDIQMTQSPSSVSASVGDRVTITCRASQNVDSAVAWYQQKPGKAPKALIYSASYRYSGVPSRFSGRGSGTDFTLTISSLQPEDFATYYCQQYYSTPWTFGQGTKVEIKR

SEQ ID NO: 3305 - protein, 113 aa, Artificial Sequence
  source: /note="Description of Artificial Sequence: Synthetic light chain variable domain"
MADYKDIQMTQSPSSVSASVGDRVTITCRASQNVDSAVAWYQQKPGKAPKALIYSASYRYSGVPSRFSGSGSGTDFTLTISSLQPEDFATYYCQQYYSTPWTFGQGTKVEIKR

SEQ ID NO: 3306 - protein, 113 aa, Artificial Sequence
  source: /note="Description of Artificial Sequence: Synthetic light chain variable domain"
MADYKDIQMTQSPSSVSASVGDRVTITCRASQNVDSAVAWYQQKPGKAPKLLIYSASYRYSGVPSRFSGSGSGTDFTLTISSLQPEDFATYYCQQYYSTPWTFGQGTKVEIKR

SEQ ID NO: 3307 - protein, 111 aa, Artificial Sequence
  source: /note="Description of Artificial Sequence: Synthetic light chain variable domain"
MMSQSPSSLAVSVGEKFTMTCKSSQSLFFGSTQKNYLAWYQQKPGQSPKLLIYWASTRESGVPDRFTGSGSGTDFTLAISSVMPEDLAVYYCQQYYNYPWTFGGGTKLEIK

SEQ ID NO: 3308 - protein, 113 aa, Artificial Sequence
  source: /note="Description of Artificial Sequence: Synthetic light chain variable domain"
MADYKDIQMTQSPSSVSASVGDRVTITCRASQNVDSAVAWYQQKPGKAPKLLIYSASYRQSGVPSRFSGSGSGTDFTLTISSLQPEDFATYYCQQYYSTPWTFGQGTKVEIKR

SEQ ID NO: 3309 - protein, 113 aa, Artificial Sequence
  source: /note="Description of Artificial Sequence: Synthetic light chain variable domain"
MADYKDIQMTQSPSSVSASVGDRVTITCRASQNVDSAVAWYQQKPGKAPKLLIYSASYGQSGVPSRFSGSGSGTDFTLTISSLQPEDFATYYCQQYYSTPWTFGQGTKVEIKR

SEQ ID NO: 3310 - protein, 107 aa, Artificial Sequence
  source: /note="Description of Artificial Sequence: Synthetic light chain variable domain"
DIQMTQSPSSLSASVGDRVTITCRASQSISTYLNWYQQKPGKAPNLLIYAAFSLQSGVPSRFSGSGSGTDFTLTINSLQPEDFATYYCQQGDSVPLTFGGGTKLEIK

SEQ ID NO: 3311 - protein, 107 aa, Artificial Sequence
  source: /note="Description of Artificial Sequence: Synthetic light chain variable domain"
DIQMTQSPSSLSASVGDRVTITCRASQSISSYLNWYQQKPGKAPKLLIYAASSLQSGVPSRFSGSGSGTDFTLTVNSLQPEDFATYYCQQGDSVPLTFGGGTRLEIK

SEQ ID NO: 3312 - protein, 107 aa, Artificial Sequence
  source: /note="Description of Artificial Sequence: Synthetic light chain variable domain"
DIQLTQSPSSLSASVGDRVTITCRASQSISSYLNWYQQKPGKAPKLLIYAASSLQSGVPSRFSGSGSGTDFTLTVNSLQPEDFATYYCQQGDSVPLTFGGGTKVEIK

SEQ ID NO: 3313 - protein, 107 aa, Artificial Sequence
  source: /note="Description of Artificial Sequence: Synthetic light chain variable domain"
DIQMTQSPSSLSASVGDRVTITCRASQSISSYLNWYQQKPGKAPKLLIYAASSLQSGVPSRFSGSGSGTDFTLTISSLQPEDFATYYCQQGDSVPLTFGGGTKVEIK

SEQ ID NO: 3314 - protein, 107 aa, Artificial Sequence
  source: /note="Description of Artificial Sequence: Synthetic light chain variable domain"
EVVLTQSPATLSLSPGERATLSCRASKSISKDLAWYQQKPGQAPRLLIYSGSTLQSGIPARFSGSGSGTDFTLTISSLEPEDFAVYYCQQHNKYPYTFGGGTKVEIK

SEQ ID NO: 3315 - protein, 107 aa, Artificial Sequence
  source: /note="Description of Artificial Sequence: Synthetic light chain variable domain"
DVVMTQSPAFLSVTPGEKVTITCRASKSISKDLAWYQQKPDQAPKLLIYSGSTLQSGVPSRFSGSGSGTDFTFTISSLEAEDAATYYCQQHNKYPYTFGGGTKVEIK

SEQ ID NO: 3316 - protein, 107 aa, Artificial Sequence
  source: /note="Description of Artificial Sequence: Synthetic light chain variable domain"
DVVMTQSPDSLAVSLGERATINCRASKSISKDLAWYQQKPGQPPKLLIYSGSTLQSGVPDRFSGSGSGTDFTLTISSLQAEDVAVYYCQQHNKYPYTFGGGTKVEIK

SEQ ID NO: 3317 - protein, 107 aa, Artificial Sequence
  source: /note="Description of Artificial Sequence: Synthetic light chain variable domain"
DVQLTQSPSFLSASVGDRVTITCRASKSISKDLAWYQQKPGKAPKLLIYSGSTLQSGVPSRFSGSGSGTEFTLTISSLQPEDFATYYCQQHNKYPYTFGGGTKVEIK

SEQ ID NO: 3318 - protein, 114 aa, Artificial Sequence
  source: /note="Description of Artificial Sequence: Synthetic light chain variable domain"
DIVLTQSPASLAVSLGQRATISCRASESVDNYGNTFMHWYQQKPGQPPKLLIYRASNLESGIPARFSGSGSRTDFTLTINPVEADDVATYYCQQSNEDPPTFGAGTKLELKCDI

SEQ ID NO: 3319 - protein, 107 aa, Artificial Sequence
  source: /note="Description of Artificial Sequence: Synthetic light chain variable domain"
DIVMTQSPSSVSASVGDRVTITCRASQVDSAVAWYQQKPGKAPKALIYSASYRYSGVPSRFSGRGSGTDFTLTISSLQPEDFATYYCQQYYSTPWTFGQGTKVEIKR

SEQ ID NO: 3320 - protein, 107 aa, Artificial Sequence
  source: /note="Description of Artificial Sequence: Synthetic light chain variable domain"
DIQMTQSPSSVSASVGDRVTITCRASQNVDSAVAYQQKPGKAPKALIYSASYRYSGVPSRFSGRGSGTDFTLTISSLQPEDFATYYCQQYYSTPWTFGQGTKVEIKR

SEQ ID NO: 3321 - protein, 107 aa, Artificial Sequence
  source: /note="Description of Artificial Sequence: Synthetic light chain variable domain"
DIQMTQSPSSVSASVGDRVTITCRASQNVDSAVAYQQKPGKAPKALIYSASYRYSGVPSRFSGSGSGTDFTLTISSLQPEDFATYYCQQYYSTPWTFGQGTKVEIKR

SEQ ID NO: 3322 - protein, 107 aa, Artificial Sequence
  source: /note="Description of Artificial Sequence: Synthetic light chain variable domain"
DIQMTQSPSSVSASVGDRVTITCRASQNVDSAVAYQQKPGKAPKLLIYSASYRYSGVPSRFSGSGSGTDFTLTISSLQPEDFATYYCQQYYSTPWTFGQGTKVEIKR

SEQ ID NO: 3323 - protein, 107 aa, Artificial Sequence
  source: /note="Description of Artificial Sequence: Synthetic light chain variable domain"
DIQMTQSPSSVSASVGDRVTITCKASQNVDSAVAYQQKPGKAPKLLIYSASYRYSGVPSRFSGSGSGTDFTLTISSLQPEDFATYYCQQYYSTPWTFGQGTKVEIKR

SEQ ID NO: 3324 - protein, 107 aa, Artificial Sequence
  source: /note="Description of Artificial Sequence: Synthetic light chain variable domain"
DIQMTQSPSSVSASVGDRVTITCKASQNVDSAVAYQQKPGKAPKALIYSASYRYSGVPSRFSGSGSGTDFTLTISSLQPEDFATYYCQQYYSTPWTFGQGTKVEIKR

SEQ ID NO: 3325 - protein, 107 aa, Artificial Sequence
  source: /note="Description of Artificial Sequence: Synthetic light chain variable domain"
DIQMTQSPSSVSASVGDRVTITCRASQNVDSAVAYQQKPGKAPKALIYSASYRYSGVPSRFSGSGSGTDFTLTISSLQPEDLATYYCQQYYSTPWTFGQGTKVEIKR

SEQ ID NO: 3326 - protein, 107 aa, Artificial Sequence
  source: /note="Description of Artificial Sequence: Synthetic light chain variable domain"
DIQMTQSPSSVSASVGDRVTITCKASQVDSAVAWYQQKPGKAPKALIYSASYRYSGVPDRFSGSGSGTDFTLTISSLQPEDLATYYCQQYYSTPWTFGQGTKVEIKR

SEQ ID NO: 3327 - protein, 107 aa, Artificial Sequence
  source: /note="Description of Artificial Sequence: Synthetic light chain variable domain"
DIQMTQSPSTLSASIGDRVTITCRASEGIYHWLAWYQQKPGKAPKLLIYKASSLASGAPSRFSGSGSGTDFTLTISSLQPDDFATYYCQQYSNYPLTFGGGTKLEIK

SEQ ID NO: 3328 - protein, 108 aa, Artificial Sequence
  source: /note="Description of Artificial Sequence: Synthetic light chain variable domain"
SSELTQDPAVSVALGQTVRITCQGDSLRSYYTNWFQQKPGQAPLLVVYAKNKRPSGIPDRFSGSSSGNTASLTITGAQAEDEADYYCHSRDSGGNHVLFGGGTKLTVL

SEQ ID NO: 3329 - protein, 108 aa, Artificial Sequence
  source: /note="Description of Artificial Sequence: Synthetic light chain variable domain"
SSELTQDPAVSVALGQTVRITCQGDSLRSYYASWYQQKPGQAPVLVIYGKNNRPSGIPDRFSGSSSGNTASLTITGAQAEDEADYYCNSRDSSGNHVVFGGGTKLTVL

SEQ ID NO: 3330 - protein, 111 aa, Artificial Sequence
  source: /note="Description of Artificial Sequence: Synthetic light chain variable domain"
QSVLTQPPSASGTPGQRVTISCSGSSSNVGSNFVYWYQQFPGTAPKLLIYRNNQRPSGVPDRFSGSKSGTSASLAISGLRSEDEADYYCAAWDDTLNGHYVFGGGTKLTVL

SEQ ID NO: 3331 - protein, 110 aa, Artificial Sequence
  source: /note="Description of Artificial Sequence: Synthetic light chain variable domain"
RSVLTQPPSVSAAPGQKVTISCSGSTSNIGNNYVSWYQQHPGKAPKLMIYDVSKRPSGVPDRFSGSKSGNSASLDISGLQSEDEADYYCAAWDDSLSEFLFGTGTKLTVL

SEQ ID NO: 3332 - protein, 110 aa, Artificial Sequence
  source: /note="Description of Artificial Sequence: Synthetic light chain variable domain"
SYVLTQPPSASGTPGQRVTISCSGSSSNIGSNYVYWYQQLPGTAPKLLIYRNNQRPSGVPDRFSGSKSGTSASLAISGLQSEDEADYYCEAWDDNVDGPVFGGGTKLTVL

SEQ ID NO: 3333 - protein, 111 aa, Artificial Sequence
  source: /note="Description of Artificial Sequence: Synthetic light chain variable domain"
QAVLTQPSSVSGAPGQRVTISCTGSSSNIGAGYDVHWYQQLPGTAPKLLIYGNSNRPSGVPDRFSGSKSGTSASLAVTGLQAEDEADYYCQSYDSSLSDVVFGGGTKLTVL

SEQ ID NO: 3334 - protein, 107 aa, Artificial Sequence
  source: /note="Description of Artificial Sequence: Synthetic light chain variable domain"
EIVMTQSPSSLPASVGDRVTITCRASQNIKTYLHWYQQKPGKAPNLLIYAASNLQIGVPSRFSGSGSGTDFTLTISSLQPEDFATYFCQQSYITPPTFGQGTRLEIK

SEQ ID NO: 3335 - protein, 214 aa, Artificial Sequence
  source: /note="Description of Artificial Sequence: Synthetic light chain variable domain"
DIQMTQTTSSLSASLGDRVTISCRASQDISKYLNWYQQKPDGTVKLLIYHTSRLHSGVPSRFSGSGSGTDYSLTISNLEQEDIATYFCQQGNTLPYTFGGGTKLEIKRTVAAPSVFIFPPSDEQLKSGTASVVCLLNNFYPREAKVQWKVDNALQSGNSQESVTEQDSKDSTYSLSSTLTLSKADYEKHKVYACEVTHQGLSSPVTKSFNRGEC

SEQ ID NO: 3336 - protein, 237 aa, Artificial Sequence
  source: /note="Description of Artificial Sequence: Synthetic light chain variable domain"
DIQMTQTTSSLSASLGDRVTISCRASQDISKYLNWYQQKPDGTVKLLIYHTSRLHSGVPSRFSGSGSGTDYSLTISNLEQEDIATYFCQQGNTLPYTFGGGTKLEIKRTVAAPSVFIFPPSDEQLKSGTASVVCLLNNFYPREAKVQWKVDNALQSGNSQESVTEQDSGGGGSNYHLENEVARLKKLGGGGSDSTYSLSSTLTLSKADYEKHKVYACEVTHQGLSSPVTKSFNRGEC

SEQ ID NO: 3337 - protein, 107 aa, Artificial Sequence
  source: /note="Description of Artificial Sequence: Synthetic light chain variable domain"
DIQMTQTTSSLSASLGDRVTISCRASQDISKYLNWYQQKPDGTVKLLIYHTSRLHSGVPSRFSGSGSGTDYSLTISNLEQEDIATYFCQQGNTLPYTFGGGTKLEIT

SEQ ID NO: 3338 - protein, 107 aa, Artificial Sequence; identical to SEQ ID NO: 3337
  source: /note="Description of Artificial Sequence: Synthetic light chain variable domain"

SEQ ID NO: 3339 - protein, 115 aa, Artificial Sequence
  source: /note="Description of Artificial Sequence: Synthetic light chain variable domain"
DIVMTQAAPSIPVTPGESVSISCRSSKSLLNSNGNTYLYWFLQRPGQSPQLLIYRMSNLASGVPDRFSGSGSGTAFTLRISRVEAEDVGVYYCMQHLEYPFTFGAGTKLELKRAD

SEQ ID NO: 3340 - protein, 107 aa, Artificial Sequence; identical to SEQ ID NO: 3337
  source: /note="Description of Artificial Sequence: Synthetic light chain variable domain"

SEQ ID NO: 3341 - protein, 112 aa, Artificial Sequence
  source: /note="Description of Artificial Sequence: Synthetic light chain variable domain"
DIVMTQAAPSIPVTPGESVSISCRSSKSLLNSNGNTYLYWFLQRPGQSPQLLIYRMSNLASGVPDRFSGSGSGTAFTLRISRVEAEDVGVYYCMQHLEYPFTFGAGTKLELK

SEQ ID NO: 3342 - protein, 106 aa, Artificial Sequence
  source: /note="Description of Artificial Sequence: Synthetic light chain variable domain"
QSALTQPRSVSGFPGQSVTISCTGTTSDDVSWYQQHPGKAPQLMLYDVSKRPSGVPHRFSGSRSGRAASLIISGLQTEDEADYFCCSYAGRYNSVLFGGGTKLTVL

SEQ ID NO: 3343 - protein, 106 aa, Artificial Sequence
  source: /note="Description of Artificial Sequence: Synthetic light chain variable domain"
QSALTQPRSVSGFPGQSVTISCTGTTSDDVSWYQQHPGKAPQLMLYDVSKRPSGVPHRFSGSRSGRAASLIISGLQTEDEADYFCSSYAGRYNSVLFGGGTKLTVL

SEQ ID NO: 3344 - protein, 110 aa, Artificial Sequence
  source: /note="Description of Artificial Sequence: Synthetic light chain variable domain"
QSALTQPASVSGSPGQSITIFCTGTSSDVGGYNYVSWYQQLPGTAPKLLIYSNNQRPSGVPDRFSGSKSGTSASLAISGLRSEDEADYYCAAWDDSLSVVFGGGTKLTVL

SEQ ID NO: 3345 - protein, 109 aa, Artificial Sequence
  source: /note="Description of Artificial Sequence: Synthetic light chain variable domain"
QSVLTQPPSVSAAPGQEVTISCSGSSSNIGNNYVSWYQQLPGTAPKLLIYDNDKRPSGIPDRFSGSKSGTSATLGITGLQTGDEADYYCGTWDGNLSAVFGGGTKVTVL

SEQ ID NO: 3346 - protein, 108 aa, Artificial Sequence
  source: /note="Description of Artificial Sequence: Synthetic light chain variable domain"
SYELTQDPAVSVALGQTVRITCQGDSLRSYYASWYQQKPGQAPVLVIYDKNNRPSGIPDRFSGSSSGNTASLTITGAQAEDEADYYCNSRDSSGNNWVFGGGTKLTVL

SEQ ID NO: 3347 - protein, 107 aa, Artificial Sequence
  source: /note="Description of Artificial Sequence: Synthetic light chain variable domain"
AIQLTQSPSFLSASVGDRVTITCRASQGISSYLNWYQQRAGKAPELLIYAASNLQSGVPSRFSGSGSGTDFTLTITSVQPEDFATYFCQQGDAFPLTFGPGTKVTIR

SEQ ID NO: 3348 - protein, 109 aa, Artificial Sequence
  source: /note="Description of Artificial Sequence: Synthetic light chain variable domain"
EIVLTQSPATLSLSPGETATLSCRASQSINHYLAWYQQKPGQAPRLLIYDASNRATGIPARFSGSGSGTDFTLTISSLEPEDFATYYCQQSYSHPRMYTFGQGTKLEIK

SEQ ID NO: 3349 - protein, 109 aa, Artificial Sequence
  source: /note="Description of Artificial Sequence: Synthetic light chain variable domain"
AIRMTQSPSSLSASVGDRVTVTCQASQDISNYLNWYQQKPGRAPKLLIYDASNVKAGVPSRFSGGGSGTDFTLTISSLQPEDFATYYCQQSYSTPQAYTFGQGTKLDIK

SEQ ID NO: 3350 - protein, 111 aa, Artificial Sequence
  source: /note="Description of Artificial Sequence: Synthetic light chain variable domain"
QSVLTQPPSVSAAPGQKVTISCSGSSSNIGNNYVSWYQQLPGTAPKLLIYDNNKRPSGIPDRFSGSKSGTSATLGITGLQTGDEADYYCGTWDSSLNRDWVFGGGTKLTVL

SEQ ID NO: 3351 - protein, 109 aa, Artificial Sequence
  source: /note="Description of Artificial Sequence: Synthetic light chain variable domain"
  MOD_RES (5)..(6): Any amino acid
  MOD_RES (8)..(9): Any amino acid
  MOD_RES (93)..(93): Any amino acid
  MOD_RES (104)..(104): Any amino acid
QSVLXXPXXASGSPGQSVTVSCTGTGRDIGAYDYVSWYQQHPGKAPKLLIYGVNKRPSGVPDRFSGSKSDNTASLTVSGLQVEDEADYYCSSXAGRKYVFGTGXKVTVL

SEQ ID NO: 3352 - protein, 112 aa, Artificial Sequence
  source: /note="Description of Artificial Sequence: Synthetic light chain variable domain"
  MOD_RES (61)..(61): Any amino acid
QSALTQPASVSGSPGQSITISCTETSSDLGGYNYVSWYQHRPGKAPKLIIYDVTVRPSGVXDRFSGSKSGNTASLTISGLQAEDEADYYCGSYTSSSTLLWVFGGGTKLTVL

SEQ ID NO: 3353 - protein, 112 aa, Artificial Sequence
  source: /note="Description of Artificial Sequence: Synthetic light chain variable domain"
QSALTQPASVSGSPGQSITISCTGTSSDLGGYNYVSWYQHRPGKAPKLIIYDVTVRPSGVSDRFSGSKSGNTASLTISGLQAEDEADYYCGSYTSSSTLLWVFGGGTKLTVL

SEQ ID NO: 3354 - protein, 110 aa, Artificial Sequence
  source: /note="Description of Artificial Sequence: Synthetic light chain variable domain"
QSALTQPASVSGSPGHSITISCTGTRSDVGGFDYVSWYQHNPGKAPKLIIYDVTKRPSGVSNRFSGAKSGITASLTISGLQAEDEADYYCTSYRPGPTFVFGTGTKLDIK

SEQ ID NO: 3355 - protein, 112 aa, Artificial Sequence
  source: /note="Description of Artificial Sequence: Synthetic light chain variable domain"
QSALTQPASVSGSPGQSITISCTGTSSDLGGYNYVSWYQHRPGKAPKLIIYDVTVRPSGVSDRFSGSKSGNTASLTISGLQAEDEADYYCGSYTSSSTLLWVFGGGTKLDIK

SEQ ID NO: 3356 - protein, 111 aa, Artificial Sequence
  source: /note="Description of Artificial Sequence: Synthetic light chain variable domain"
QSVLTQPRSLSGSPGQSVTIACTGASTDVGGYNYVSWYQQHPGKAPKLMIYDVNKRPSGVPDRFSGSKSGNTAFLTISGLQAEDEADYYCCSYAGSYTFEVFGGGTKLTVL

SEQ ID NO: 3357 - protein, 111 aa, Artificial Sequence
  source: /note="Description of Artificial Sequence: Synthetic light chain variable domain"
QLVLTQPPSVSGSPGQSVTFSCTGASSDVGGYDHVSWYQHHPGKGPKLLIYDVSKRPSGVPDRFSGSKSGNTASLTISGLQAEDEADYYCCSFAGYYTYWLFGGGTKVTVL

SEQ ID NO: 3358 - protein, 106 aa, Artificial Sequence
  source: /note="Description of Artificial Sequence: Synthetic light chain variable domain"
QSALTQPRSVSGFPGQSVTISCTGTTSDDVSWYQQHPGKAPQLMLYDVSKRPSGVPHRFSGSRSGRAASLIISGLQTEDEADYFCCSYAGRYNSVPFGGGTKLTVL

SEQ ID NO: 3359 - protein, 99 aa, Artificial Sequence
  source: /note="Description of Artificial Sequence: Synthetic light chain variable domain"
SYVLTQPPSASGTPGQRVTISCSGSSSNIGSNTVNWYQQFPGTAPKLLIYSNNQRPSGVPDRFSGSKSGTSASLAISGLQSEDEAEYYCAAWDDSLNVV

SEQ ID NO: 3360 - protein, 110 aa, Artificial Sequence
  source: /note="Description of Artificial Sequence: Synthetic light chain variable domain"
QSVLTQPPSVSAAPGQKVTISCSGSSSNIGNNYVSWYQQLPGTAPKLLIYDNNKRPSGIPDRFSGSKSGTSATLGITGLQTGDEGDYYCGTWDISLRFGVFGGGTKVTVL

SEQ ID NO: 3361 - protein, 111 aa, Artificial Sequence
  source: /note="Description of Artificial Sequence: Synthetic light chain variable domain"
QSVLTQPRSVSGSPGQSVTISCTGPISGVGDYTSVSWYQHYPGKTPKLIIYDVTQRPSGVPNRFSGSKSGNTASLTISGLQADDEADYYCCSYEAPTHTYVFGTGTKLTVL

SEQ ID NO: 3362 - protein, 124 aa, Artificial Sequence
  source: /note="Description of Artificial Sequence: Synthetic light chain variable domain"
QVQLQQSGAELVRPGSSVKISCKASGYAFSSYWMNWVKQRPGQGLEWIGQIWPGDGDTNYNGKFKGKATLTADESSSTAYMQLSSLASEDSAVYFCARRETTTVGRYYYAMDYWGQGTTVTVSS

SEQ ID NO: 3363 - protein, 239 aa, Artificial Sequence
  source: /note="Description of Artificial Sequence: Synthetic light chain variable domain"
MRCLAEFLGLLVLWIPGAIGDIVMTQAAPSIPVTPGESVSISCRSSKSLLNSNGNTYLYWFLQRPGQSPQLLIYRMSNLASGVPDRFSGSGSGTAFTLRISRVEAEDVGVYYCMQHLEYPFTFGAGTKLELKRADAAPTVSIFPPSSEQLTSGGASVVCFLNNFYPKDINVKWKIDGSERQNGVLNSWTDQDSKDSTYSMSSTLTLTKDEYERHNSYTCEATHKTSTSPIVKSFNRNEC

SEQ ID NO: 3364 - protein, 111 aa, Artificial Sequence
  source: /note="Description of Artificial Sequence: Synthetic light chain variable domain"
QAVLTQPRSVSGSPGQSVTISCTGISSGVDSHRYVSWYQHHPGKAPKLMIYDFSKRPSGVPDRFSGSKSGNTASLTISGLQAEDEADYYCSSYAAISPNYVFGTGTKLTVL

SEQ ID NO: 3365 - protein, 110 aa, Artificial Sequence
  source: /note="Description of Artificial Sequence: Synthetic light chain variable domain"
QSALTQPASVSGSPGHSITISCTGTRSDVGGFDYVSWYQHNPGKAPKLIIYDVTKRPSGVSNRFSGAKSGITASLTISGLQAEDEADYYCTSYRPGPTFVFGTGTKLTVL

SEQ ID NO: 3366 - protein, 111 aa, Artificial Sequence
  source: /note="Description of Artificial Sequence: Synthetic light chain variable domain"
QSALTQPASVSGSPGQSITISCTGTSSDVGAYNFVSWYQQLPGTAPKFLIYDNNKRPPGIPDRFSGSKSGTSATLGITGLQTGDEADYYCATWDSGLSAVVFGGGTKLTVL

SEQ ID NO: 3367 - protein, 109 aa, Artificial Sequence
  source: /note="Description of Artificial Sequence: Synthetic light chain variable domain"
AIRMTQSPSSLSASVGDRVTVTCQASQDISNYLNWYQQKPGRAPKLLIYDASNVKAGVPSRFSGGGSGTDFTLTISSLQPEDFATYYCQQSYSTPQAYTFGQGTKLEIK

SEQ ID NO: 3368 - protein, 108 aa, Artificial Sequence
  source: /note="Description of Artificial Sequence: Synthetic light chain variable domain"
AIRMTQSPSTLSASVGDRVTITCRASQSISHYLAWYQQKPGKAPKLLIFDASRLASGVPSRFSGSGSGTDFTLTISSLQPEDFATYYCQQSYGAPMFTFGPGTRVDLK

SEQ ID NO: 3369 - protein, 107 aa, Artificial Sequence
  source: /note="Description of Artificial Sequence: Synthetic light chain variable domain"
DIQLTQSPSTLSASVGDRVTITCRASQSISRWLAWYQQKPGKAPKLLIYDASNLETGVPSRFSGSGSGTDFTFTISSLQPEDIATYYCQQYDNLPLTFGGGTKVEIK

SEQ ID NO: 3370 - protein, 109 aa, Artificial Sequence
  source: /note="Description of Artificial Sequence: Synthetic light chain variable domain"
EIVLTQSPATLSLSPGETATLSCRASQSINHYLAWYQQKPGQAPRLLIYDASNRATGIPARFSGSGSGTDFTLTISSLEPEDFATYYCQQSYSHPRMYTFGQGTKLDIK

SEQ ID NO: 3371 - protein, 111 aa, Artificial Sequence
  source: /note="Description of Artificial Sequence: Synthetic light chain variable domain"
QAVLTQPRSVSGSPGQSVTISCTGISSGVDSHRYVSWYQHHPGKAPKLMIYDFSKRPSGVPDRFSGSKSGNTASLTISGLQAEDEADYYCCSYAAISPNYVFGTGTKLTVL

SEQ ID NO: 3372 - protein, 121 aa, Artificial Sequence
  source: /note="Description of Artificial Sequence: Synthetic light chain variable domain"
EVQLQQSGPELIKPGASVKMSCKASGYTFTSYVMHWVKQKPGQGLEWIGYINPYNDGTKYNEKFKGKATLTSDKSSSTAYMELSSLTSEDSAVYYCARGTYYYGSRVFDYWGQGTTLTVSS

SEQ ID NO: 3373 - protein, 214 aa, Artificial Sequence
  source: /note="Description of Artificial Sequence: Synthetic light chain variable domain"
DIQMTQSPILLSASVGDRVTITCRASQDISKYLNWYQQRTNGSPRLLIYHTSRLHSGVPSRFSGSRSGTDFTLTISSLQPEDIADYYCQQGNTLPYTFGAGTKVEIKRTVAAPSVFIFPPSDEQLKSGTASVVCLLNNFYPREAKVQWKVDNALQSGNSQESVTEQDSKDSTYSLSSTLTLSKADYEKHKVYACEVTHQGLSSPVTKSFNRGEC

SEQ ID NO: 3374 - protein, 214 aa, Artificial Sequence
  source: /note="Description of Artificial Sequence: Synthetic light chain variable domain"
DIQMTQSPILLSASVGDRVTITCRASQDISKYLNWYQQRTNGSPRLLIYHTSRLHSGVPSRFSGSRSGTDFTLTISSLQPEDEADYYCQQGNTLPYTFGAGTKVEIKRTVAAPSVFIFPPSDEQLKSGTASVVCLLNNFYPREAKVQWKVDNALQSGNSQESVTEQDSKDSTYSLSSTLTLSKADYEKHKVYACEVTHQGLSSPVTKSFNRGEC

SEQ ID NO: 3375 - protein, 112 aa, Artificial Sequence
  source: /note="Description of Artificial Sequence: Synthetic light chain variable domain"
DVVLTQTPPTLLATIGQSVSISCRSSQSLLHSSGNTYLNWLLQRTGQSPQPLIYLVSKLESGVPNRFSGSGSGTDFTLKISGVEAEDLGVYYCMQFTHYPYTFGAGTKLELK

SEQ ID NO: 3376 - protein, 111 aa, Artificial Sequence
  source: /note="Description of Artificial Sequence: Synthetic light chain variable domain"
DTVLTQSPASLAVSLGQRATISCKASQSVDFDGDSFMNWYQQKPGQPPKLLIYTTSNLESGIPARFSASGSGTDFTLNIHPVEEEDTATYYCQQSNEDPYTFGGGTKLEIK

SEQ ID NO: 3377 - protein, 111 aa, Artificial Sequence
  source: /note="Description of Artificial Sequence: Synthetic light chain variable domain"
EIVLTQSPATLSLSPGERATLSCRASQSVSSYLAWYQQKPGQAPRLLIYDASNRATGIPARFSGSGSGTDFTLTISSLEPEDFAVYYCQQRSNWPITFGQGTRLEIKRSDP

SEQ ID NO: 3378 - protein, 219 aa, Artificial Sequence
  source: /note="Description of Artificial Sequence: Synthetic light chain variable domain"
DIVMTQTPLSLPVTPGEPASISCRSSKSLLHSNGITYLYWYLQKPGQSPQLLIYQMSNLVSGVPDRFSGSGSGTDFTLKISRVEAEDVGVYYCAQNLELPYTFGGGTKVEIKRTVAAPSVFIFPPSDEQLKSGTASVVCLLNNFYPREAKVQWKVDNALQSGNSQESVTEQDSKDSTYSLSSTLTLSKADYEKHKVYACEVTHQGLSSPVTKSFNRGEC

SEQ ID NO: 3379 - protein, 103 aa, Artificial Sequence
  source: /note="Description of Artificial Sequence: Synthetic light chain variable domain"
NPVTLGTSASISCRSSKSLLHSNGITYLYWYLQKPGQSPQLLIYQMSNLVSGVPDRFSSSGSGTDFTLRISRVEAEDVGVYYCAQNLELPYTFGGGTKLEIKR

SEQ ID NO: 3380 - protein, 115 aa, Artificial Sequence
  source: /note="Description of Artificial Sequence: Synthetic light chain variable domain"
DIVMTQTPLSLPVTPGEPASISCRSSKSLLHSNGITYLYWYLQKPGQSPQLLIYQMSNLVSGVPDRFSGSGSGTDFTLKISRVEAEDVGVYYCAQNLELPYTFGGGTKVEIKRTV

SEQ ID NO: 3381 - protein, 214 aa, Artificial Sequence
  source: /note="Description of Artificial Sequence: Synthetic light chain variable domain"
EIVLTQSPILLSLSPGERATLSCRASQSVSSYLAWYQQRTNGSPRLLIYDASNRATGIPARFSGSGSGTDFTLTISSLEPEDIADYYCQQRSNWPITFGQGTRLEIKRTVAAPSVFIFPPSDEQLKSGTASVVCLLNNFYPREAKVQWKVDNALQSGNSQESVTEQDSKDSTYSLSSTLTLSKADYEKHKVYACEVTHQGLSSPVTKSFNRGEC

SEQ ID NO: 3382 - protein, 107 aa, Artificial Sequence
  source: /note="Description of Artificial Sequence: Synthetic light chain variable domain"
DIQLTQTTSSLSASLGDRVTISCRASQDISNYLNWYQQKPDGTVKLLIYYTSILHSGVPSRFSGSGSGTDYSLTISNLEQEDFATYFCQQGNTLPWTFGGGTKLEIK

SEQ ID NO: 3383 - protein, 108 aa, Artificial Sequence
  source: /note="Description of Artificial Sequence: Synthetic light chain variable domain"
DIQLTQSPSSLSASVGDRVTISCRASQDISNYLNWYQQKPGKAPKLLIYYTSILHSGVPSRFSGSGSGTDYTFTISSLQPEDIATYYCQQGNTLPWTFGGGTKVQIKR

SEQ ID NO: 3384 - protein, 107 aa, Artificial Sequence
  source: /note="Description of Artificial Sequence: Synthetic light chain variable domain"
DIQMTQSPSSLSASVGDRVTITCRASQTIWSYLNWYQQRPGKAPNLLIYAASSLQSGVPSRFSGRGSGTDFTLTISSLQAEDFATYYCQQSYSIPQTFGQGTKLEIK

SEQ ID NO: 3385 - protein, 108 aa, Artificial Sequence
  source: /note="Description of Artificial Sequence: Synthetic light chain variable domain"
DIQMTQSPSSLSASVGDRVTITCQASQDIIKYLNWYQQTPGKAPKLLIYEASNLQAGVPSRFSGSGSGTDYTFTISSLQPEDIATYYCQQYQSLPYTFGQGTKLQITR

SEQ ID NO: 3386 - protein, 113 aa, Artificial Sequence
  source: /note="Description of Artificial Sequence: Synthetic light chain variable domain"
DIQLTQSPSSLAVSAGENVTMSCKSSQSVLYSANHKNYLAWFQQKPGQSPKLLIYWASTRESGVPDRFTGSGSGTDFTLTISRVQVEDLAIYYCHQYLSSWTFGGGTKLEIKR

SEQ ID NO: 3387 - protein, 112 aa, Artificial Sequence
  source: /note="Description of Artificial Sequence: Synthetic light chain variable domain"
QSALTQPASVSGSPGQSITISCTGTSSDVGGYNYVSWYQQHPGKAPKVIISEVNNRPSGVSHRFSGSKSGNTASLTISGLQAEDEADYFCSSYTSGRTLYVFGTGSKVTVLG

SEQ ID NO: 3388 - protein, 112 aa, Artificial Sequence
  source: /note="Description of Artificial Sequence: Synthetic light chain variable domain"
QSALTQPASVSGSPGQSITISCTGSRNDIGAYESVSWYQQHPGNAPKLIIHGVNNRPSGVFDRFSVSQSGNTASLTISGLQAEDEADYYCSSHTTTSTLYVFGTGTKVTVLG

SEQ ID NO: 3389 - protein, 111 aa, Artificial Sequence
  source: /note="Description of Artificial Sequence: Synthetic light chain variable domain"
QSALTQPASVSGSPGQSITISCTGSSSDVGGYNSVSWYQQHPGKAPKLMIYEVINRPSGVSHRFSGSKSGNTASLTISGLQAEDEADYYCSSYTSSSTYVFGTGTKVTVLG

SEQ ID NO: 3390 - protein, 112 aa, Artificial Sequence
  source: /note="Description of Artificial Sequence: Synthetic light chain variable domain"
QSALTQPASVSGSPGQSITISCTGSSSDIGGFNYVSWYQQHAGEAPKLMIYEVTNRPSGVSDRFSGSKSDNTASLTISGLQAEDEADYYCSSYASGSPLYVFGTGTKVTVLG

SEQ ID NO: 3391 - protein, 112 aa, Artificial Sequence
  source: /note="Description of Artificial Sequence: Synthetic light chain variable domain"
QSALTQPASVSGSPGQSITFSCTGTSSDIGGYNYVSWYQQHPGKAPKLMIYEVSNRPSGVSNRFSGTKSGNTASLTISGLQAEDEADYYCSSYTSSSTLYVFGTGTKLTVLG

SEQ ID NO: 3392 - protein, 112 aa, Artificial Sequence
  source: /note="Description of Artificial Sequence: Synthetic light chain variable domain"
QSALTQPASVSGSPGQSITISCTGTSSDVGGYNYVSWYQQHPGKAPKLMIYEVSNRPSGVSNRFSGSKSGNTASLTISGLQAEDEADYYCSSYTSSSTLYVFGTGTKVTVLG

SEQ ID NO: 3393 - protein, 112 aa, Artificial Sequence
  source: /note="Description of Artificial Sequence: Synthetic light chain variable domain"
QSALTQPASVSGSPGQSITISCTGTSSDVGGYNYVSWYQQHPGKAPKLMIYDVSNRPSGVSNRFSGSKSGNTASLTISGLQAEDEADYYCSSYTSSSTLYVFGTGTKVTVLG

SEQ ID NO: 3394 - protein, 112 aa, Artificial Sequence
  source: /note="Description of Artificial Sequence: Synthetic light chain variable domain"
QSALTQPASVSGSPGQSITISCTGTSSDVGGYNYVSWYQQHPGKAPKLMIYEVSNRPSGVSNRFSGSKSGNTASLTISGLQAEDEADYYCSSYTSSSTLYIFGTGTKVTVLG

SEQ ID NO: 3395 - protein, 111 aa, Artificial Sequence
  source: /note="Description of Artificial Sequence: Synthetic light chain variable domain"
QSALTQPASASGSPGQSVTISCTGTSSDVGGYNYVSWYQQHPGKAPKLMIYDVSNRPSGVSNRFSGSKSGNTASLTISGLQAEDEADYYCSSYTSSSTLYVFGTGTQLTVL

SEQ ID NO: 3396 - protein, 110 aa, Artificial Sequence
  source: /note="Description of Artificial Sequence: Synthetic light chain variable domain"
SYVLTQPPSASGTPGQRVTISCSGSSSNIGSNYVYWYQQLPGTAPKLLIYRNNQRPSGVPDRFSGSKSGTSASLAISGLRSEDEADYYCAAWDDSLSGYVFGTGTKLTVL

SEQ ID NO: 3397 - protein, 111 aa, Artificial Sequence
  source: /note="Description of Artificial Sequence: Synthetic light chain variable domain"
QSALTQPASVSGSPGQSITISCTGTSSDVGGYNYVSWYQQHPGKAPKLMIYDVSKRPSGVSNRFSGSKSGNTASLTISGLQAEDEADYYCSSYTSSSLNHVFGTGTKVTVL

SEQ ID NO: 3398 - protein, 111 aa, Artificial Sequence
  source: /note="Description of Artificial Sequence: Synthetic light chain variable domain"
QSALTQPASVSGSPGQSITISCTGTSSDVGGYNYVSWYQQHPGKAPKLMIYDVSNRPSGVSNRFSGSKSGNTASLTISGLQAEDEADYYCSSYTSSSTPYVFGTGTQLTVL

SEQ ID NO: 3399 - protein, 109 aa, Artificial Sequence
  source: /note="Description of Artificial Sequence: Synthetic light chain variable domain"
SSELTQDPAVSVALGQTVRITCQGDSLRSYYASWYQQKPGQAPVLVIYGKNNRPSGIPDRFSGSSSGNTASLTITGAQAEDEADYYCNSRDSSGNHLWVFGGGTKLTVL

SEQ ID NO: 3400 - protein, 106 aa, Artificial Sequence
  source: /note="Description of Artificial Sequence: Synthetic light chain variable domain"
SSELTQDPAVSVALGQTVRITCQGDSLRSYYASWYQQKPGQAPVLVIYGKNNRPSGIPDRFSGSSSGNTASLTITGAQAEDEADYYCNSRDSSGWVFGGGTKLTVL

SEQ ID NO: 3401 - protein, 111 aa, Artificial Sequence
  source: /note="Description of Artificial Sequence: Synthetic light chain variable domain"
QSALTQPASVSGSPGQSITISCTGTSSDVGGYNYVSWYQQHPGKAPKLMIYDVSNRPSGVSNRFSGSKSGNTASLTISGLQAEDEADYYCSSYTSSSTLYVFGTGTKVTVL

SEQ ID NO: 3402 - protein, 110 aa, Artificial Sequence
  source: /note="Description of Artificial Sequence: Synthetic light chain variable domain"
QSALTQPGSVSGSPGQSITISCTGTSSDVGGYNYVSWYQQHPGKAPKLIIYDVSSRPSGVSNRFSGSQSGNTASLTISGLQAEDEADYSCSSYAGSNTLVFGTGTKVTVL

SEQ ID NO: 3403 - protein, 111 aa, Artificial Sequence
  source: /note="Description of Artificial Sequence: Synthetic light chain variable domain"
NFMLTQPHSVSESPGKTVTISCTRSSGSIASNYVQWYQQRPGSSPTTVIYEDNQRPSGVPDRFSGSIDSSSNSASLTISGLKTEDEADYYCQSYDSSNPWVFGGGTKLTVL

SEQ ID NO: 3404 - protein, 110 aa, Artificial Sequence
  source: /note="Description of Artificial Sequence: Synthetic light chain variable domain"
SYVLTQPPSASGTPGQRVTISCSGSSSNIGSNYVYWYQQLPGTAPKLLIYRNNQRPSGVPDRFSGSKSGTSASLAISGLRSEDEADYYCAAWDDSLSGPVFGGGTKLTVL

SEQ ID NO: 3405 - protein, 112 aa, Artificial Sequence
  source: /note="Description of Artificial Sequence: Synthetic light chain variable domain"
QSALTQPASVSGSPGQSITISCTGTSSDVGGYNYVSWYQQHPGKAPKLMIYDVSNRPSGVSNRFSGSKSGNTASLTISGLQAEDEADYYCSSYTSSSTLVYVFGTGTKVTVL

SEQ ID NO: 3406 - protein, 107 aa, Artificial Sequence
  source: /note="Description of Artificial Sequence: Synthetic light chain variable domain"
SSELTQDPAVSVALGQTVRITCQGDSLRSYYASWYQQKPGQAPVLVIYGKNHRPSGIPDRFSGSSSGDTDSLTITGAQAEDEADYYCHSRDSSGNHLFGGGTKLTVL

SEQ ID NO: 3407 - protein, 110 aa, Artificial Sequence
  source: /note="Description of Artificial Sequence: Synthetic light chain variable domain"
NFMLTQPHSVSESPGKTVTIPCTGSSGSFASSYVQWYQQRPGSAPATVIYEDNQRPSGVPDRFSGSVDSSSNSASLTISGLKTEDEAVYYCQSYDGATWVFGGGTKLTVL

SEQ ID NO: 3408 - protein, 110 aa, Artificial Sequence
  source: /note="Description of Artificial Sequence: Synthetic light chain variable domain"
QSALTQPASVSGSPGQSITISCSGTSSDVGGYNSVSWYQQYPGKAPKLMIYDVNNRPSGVSSRFSGSKSGNTASLTISGLQAEDEADYYCSSYTSSSTLFFGAGTKVTVL

SEQ ID NO: 3409 - protein, 109 aa, Artificial Sequence
  source: /note="Description of Artificial Sequence: Synthetic light chain variable domain"
SSELTQDPAVSVALGQTVRITCQGDSLRTYYATWYQQKPGQAPVLVFYDENNRPSGIPDRFSGSSSGNTASLTITGTQAEDEADYYCSSRDSSGNPSCVFGGGTKLTVL

SEQ ID NO: 3410 - protein, 110 aa, Artificial Sequence
  source: /note="Description of Artificial Sequence: Synthetic light chain variable domain"
QSALTQPASVSGSPGQSITISCTGTSSDVGGYNYVSWYQQHPGKAPKLMIYDVSNRPSGVSNRFSGSKSGNTASLTISGLQAEDEADYYCSSYTSSSTWVFGGGTKLTVL

SEQ ID NO: 3411 - protein, 113 aa, Artificial Sequence
  source: /note="Description of Artificial Sequence: Synthetic light chain variable domain"
DVVMTQSPLSLPVTPGEPASISCRSSQSLLAGNGHNYLDWYLQKPGQSPQLLIYLGSNRASGVPDRFSGSGSGTDFTLKISRVEAEDVGVYYCMQALQNPLTFGGGTKLEIKR

SEQ ID NO: 3412 - protein, 110 aa, Artificial Sequence
  source: /note="Description of Artificial Sequence: Synthetic light chain variable domain"
QSALTQPASVSGSPGQSITISCTGSSSDVGGYNYVSWYQQHPGKAPKLMIYEVSNRPSGVSNRFSGSKSGNTASLTISGLQAEDEADYYCSSYTSSSTLVFGTGTKVTVL

SEQ ID NO: 3413 - protein, 110 aa, Artificial Sequence
  source: /note="Description of Artificial Sequence: Synthetic light chain variable domain"
QSALTQPASVSGSPGQSITISCTGTSSDVGGYNYVSWYQQHPGKAPKLMIYDVSNRPSGVSNRFSGSKSGNTASLTISGLQAEDEADYYCSSYASSSTLVFGGGTKVTVL

SEQ ID NO: 3414 - protein, 110 aa, Artificial Sequence
  source: /note="Description of Artificial Sequence: Synthetic light chain variable domain"
QSALTQPAYVSGSPGQSITISCTGTNSDVGRYNYVSWYQQHPGKAPKLMIYEVSYRPSGVSNRFSGSKSGNTASLTISGLQAEDEADYYCSSYTTSSTLDFGTGTKVTVL

SEQ ID NO: 3415 - protein, 110 aa, Artificial Sequence
  source: /note="Description of Artificial Sequence: Synthetic light chain variable domain"
QSALTQPASVSGSPGQSITISCTGTSSDVGGYKYVSWYQQHPGKAPKLMIYDVSNRPSGVSNRFSGSKSGNTASLTISGLQAEDEADYYCSSYTSSSTLVFGGGTKLTYL

SEQ ID NO: 3416 - protein, 111 aa, Artificial Sequence
  source: /note="Description of Artificial Sequence: Synthetic light chain variable domain"
HVILTQPPSASASLGASVKLTCTLSSGHSSYAIAWHQQQPEKGPRYLMKVNSDGSLSKGDGIPDRFSGSTSGAERYLTISSLQSEDEADYYCQTWGSGMAIFGGGTKLTVL

SEQ ID NO: 3417 - protein, 110 aa, Artificial Sequence
  source: /note="Description of Artificial Sequence: Synthetic light chain variable domain"
QSALTQPASASGSPGQSVTISCTGTSSDVGGYNYVSWYQQHPGKAPKLMIYEVSKRPSGVPDRFSGSKSGNTASLTISGLQAEDEADYYCSSYTSSGTLVFGGGTKLTVL

SEQ ID NO: 3418 - protein, 108 aa, Artificial Sequence
  source: /note="Description of Artificial Sequence: Synthetic light chain variable domain"
SSELTQDPAVSVALGQTVRITCQGDSLRSYYASWYQQKPGQAPVLVIYGKNNRPSGIPDRFSGSSSGNTASLTITGAQAEDEADYYRNSRDSSGNPYVFGTGTKVTVL

SEQ ID NO: 3419 - protein, 110 aa, Artificial Sequence
  source: /note="Description of Artificial Sequence: Synthetic light chain variable domain"
QSALTQPASVSGSPGQSITISCTGTSSDVGGYNYVSWYQQHPGKAPKLMIYEVSNRPSGVSNRFSGSKSGNTASLTISGLQAEDEADYYCSSYTSSSTLVFGTGTKLTVL

SEQ ID NO: 3420 - protein, 114 aa, Artificial Sequence
  source: /note="Description of Artificial Sequence: Synthetic light chain variable domain"
DIVMTQSPLSLPVTPGEPASISCRSSQSLLHSNGYNYLDWYLQKPGQSPQLLIYLGSNRASGVPDRFSGSGSGTDFTLKISRVEAEDVGVYYCMQALQTPPWTFGQGTKLEIKR

SEQ ID NO: 3421 - protein, 114 aa, Artificial Sequence
  source: /note="Description of Artificial Sequence: Synthetic light chain variable domain"
EIVLTQSPLSLPVTPGEPASISCRSSQSLLHSNGYNYLDWYLQKPGQSPQLLIYLGSNRASGVPDRFSGSGSGTDFTLKISRVEAEDVGVYYCMQVLQTPPLTFGGGTKVDIKR

SEQ ID NO: 3422 - protein, 108 aa, Artificial Sequence
  source: /note="Description of Artificial Sequence: Synthetic light chain variable domain"
SYVLTQPPSVSVAPGKTATITCGGTNIGSKNVHWYQQKPGQAPVLAIYYDSDRPSGIPERFSGSNSGNTATLTISRVEAGDEADYFCQVWDSSSDHWVFGGGTKLTVL

SEQ ID NO: 3423 - protein, 108 aa, Artificial Sequence
  source: /note="Description of Artificial Sequence: Synthetic light chain variable domain"
SYELTQPPSVSVAPGETASIACGGHNIRSKNVHWYQQKPGQAPVLVISYDGDRPSGIPERFSGSNLGSTATLTISRVEAGDEADYYCQVWDSDSDHYVFGTGTKVTVL

SEQ ID NO: 3424 - protein, 107 aa, Artificial Sequence
  source: /note="Description of Artificial Sequence: Synthetic light chain variable domain"
DIQMTQSPSSLSASVGDRVTITCRASQSINTYLNWYQQKPGKPPKLLIYAASNLQSGVPSRFSGSGSGTHFTLTISSLQPDDFATYYCQQSYSSLLTFGGGTKLEIK

SEQ ID NO: 3425 - protein, 110 aa, Artificial Sequence
  source: /note="Description of Artificial Sequence: Synthetic light chain variable domain"
QSVLTQPRSVSGSPGQSVTISCTGTSSDVGGYNYVSWYQQHPGEAPKLIIYDADKRPSGISNRFSSGKSGNTASLTISGLQVEDEADYYCCSYAGGSTWVFGGGTKVTVL

SEQ ID NO: 3426 - protein, 109 aa, Artificial Sequence
  source: /note="Description of Artificial Sequence: Synthetic light chain variable domain"
EIVLTQSPATLSVSPGERATLSCRASQSVTSNLAWYQQKPGQAPRLLIYAASTRATGIPARFSGSGSGTEFTLTISSMQSEDFAVYFCQQYHTWPPLTFGGGTKVEIKT

SEQ ID NO: 3427 - protein, 112 aa, Artificial Sequence
  source: /note="Description of Artificial Sequence: Synthetic light chain variable domain"
DVVMTQSPLSLPVTPGEPASISCRSSQSLLHSNGYNYLDWYLQKPGQSPQLLIYLGSNRASGVPDRFSGSGSGTDFTLKISRVEAEDVGVYYCMQALQTPWTFGQGTKLEIK

SEQ ID NO: 3428 - protein, 111 aa, Artificial Sequence
  source: /note="Description of Artificial Sequence: Synthetic light chain variable domain"
EIVLTQSPLSLPVTPGEPASISCRSSQSLLYSDGYNYLDWYLQKPGQSPQLLIYLGSNRASGVPDRFSGSGSGTDFTLQISGVETEDVGVYYCMQALQTQSFGQGTKLEIK

SEQ ID NO: 3429 - protein, 108 aa, Artificial Sequence
  source: /note="Description of Artificial Sequence: Synthetic light chain variable domain"
SSELTQDPAVSVALGQTARITCQGDSLRSYFTSWYHQKPGQAPVLVIYGNNNRPSGIPDRFSGSSSGNTASLTITGAQAEDEGDYYCDSRDSSGDHLVFGGGTKLTVL

SEQ ID NO: 3430 - protein, 109 aa, Artificial Sequence
  source: /note="Description of Artificial Sequence: Synthetic light chain variable domain"
SSELTQDPAVSVALGQTVRITCQGDSLRSYYASWYQQKPGQAPVLVIYGKNNRPSGIPDRFSGSSSGNTASLTITGAQAEDEADYYCNSRDSSGNHPVVFGGGTKLTVL

SEQ ID NO: 3431 - protein, 110 aa, Artificial Sequence
  source: /note="Description of Artificial Sequence: Synthetic light chain variable domain"
QSALTQPASVSGSPGQSITISCTGTSSDVGGYKHVSWYQHHPGKAPKLMIYDVSNRPSGVSNRFSGSKSGNTASLTVSGLQAEDEAHYYCVSYRNFNSLVFGTGTKVTVL

SEQ ID NO: 3432 - protein, 110 aa, Artificial Sequence
  source: /note="Description of Artificial Sequence: Synthetic light chain variable domain"
QSALTQPASVSGSPGQSITISCTGTSSDVGGYNYVSWYQQHPGKAPKLMIYEVSNRPSGVSNRFSGSKSGNTASLTISGLQAEDEADYYCSSYTSSSTLVFGTGTQLTVL

SEQ ID NO: 3433 - protein, 214 aa, Artificial Sequence
  source: /note="Description of Artificial Sequence: Synthetic light chain variable domain"
DIQMTQSPSSLSASVGDRVTITCRASQTIWSYLNWYQQRPGKAPNLLIYAASSLQSGVPSRFSGRGSGTDFTLTISSLQAEDFATYYCQQSYSIPQTFGQGTKLEIKRTVAAPSVFIFPPSDEQLKSGTASVVCLLNNFYPREAKVQWKVDNALQSGNSQESVTEQDSKDSTYSLSSTLTLSKADYEKHKVYACEVTHQGLSSPVTKSFNRGEC

SEQ ID NO: 3434 - protein, 113 aa, Artificial Sequence
  source: /note="Description of Artificial Sequence: Synthetic light chain variable domain"
DIQLTQSPSSLSASVGDRVTMSCKSSQSVLYSANHKNYLAWYQQKPGKAPKLLIYWASTRESGVPSRFSGSGSGTDFTFTISSLQPEDIATYYCHQYLSSWTFGGGTKVQIKR

SEQ ID NO: 3435 - protein, 110 aa, Artificial Sequence
  source: /note="Description of Artificial Sequence: Synthetic light chain variable domain"
QAVVTQEPSLTVSPGGTVTLTCRSSTGAVTTSNYANWVQQKPGQAPRGLIGGTNKRAPWTPARFSGSLLGGKAALTITGAQAEDEADYYCALWYSNLWVFGGGTKLTVLG

SEQ ID NO: 3436 - protein, 107 aa, Artificial Sequence
  source: /note="Description of Artificial Sequence: Synthetic light chain variable domain"
QIVLTQSPAIMSASPGEKVTMTCSASSSVSYMNWYQQKSGTSPKRWIYDTSKLASGVPAHFRGSGSGTSYSLTISGMEAEDAATYYCQQWSSNPFTFGSGTKLEINR

SEQ ID NO: 3437 - protein, 111 aa, Artificial Sequence
  source: /note="Description of Artificial Sequence: Synthetic light chain variable domain"
DIVMTQSPDSLAVSLGERATINCKASQSVDFDGDSYMNWYQQKPGQPPKLLIYAASNLESGVPDRFSGSGSGTDFTLTISSLQAEDVAVYYCQQSNEDPWTFGQGTKVEIK

SEQ ID NO: 3438 - protein, 107 aa, Artificial Sequence
  source: /note="Description of Artificial Sequence: Synthetic light chain variable domain"
DIQMTQSPTSLSASVGDRVTITCRASQGISSWLTWYQQKPEKAPKSLIYAASSLQSGVPSRFSGSGSGTDFTLTISSLQPEDFATYYCQQYDSYPITFGQGTRLEIK

SEQ ID NO: 3439 - protein, 106 aa, Artificial Sequence
  source: /note="Description of Artificial Sequence: Synthetic light chain variable domain"
QIVLTQSPALMSASPGEKVTMTCSASSSVRYMYWYQQKPRSSPKPWIHLTSNLASGVPARFSGSGSGTSYSLTISSMEAEDAATYYCQQWSSHPFTFGSGTKLEIK

SEQ ID NO: 3440 - protein, 113 aa, Artificial Sequence
  source: /note="Description of Artificial Sequence: Synthetic light chain variable domain"
DIVMSQSPSSLAVSVGEKVTMSCKSSQSLLYSNNQKNYLAWYQQKPGQSPKLLIYWASTRESGVPDRFTGSGSGTDFTLTISSVKAEDLAVYYCHQYYTSPYTFGGGTNLEIK

SEQ ID NO: 3441 - protein, 112 aa, Artificial Sequence
  source: /note="Description of Artificial Sequence: Synthetic light chain variable domain"
DVLMTQTPLSLPVSLGDQASISCRSSQSIVHSDGNTYLEWYLRKPGQSPRLLIYKVSNRFSGVPDRFSGSGSGTDFTLKISRVEAEDLGVYYCFQGSHAPWTFGGGTKLEIK

SEQ ID NO: 3442 - protein, 113 aa, Artificial Sequence
  source: /note="Description of Artificial Sequence: Synthetic light chain variable domain"
DIVMSQSPSSLTVSVGEKGTMSCKSSQSLLYSSNQKNYLAWYQQKPGQSPKLLIYWASTRESGVPDRFTGSGSGTDFSLTISSVLAEDLAVYFCHQYYSSPYTFGGGTKLEIK

SEQ ID NO: 3443 - protein, 108 aa, Artificial Sequence
  source: /note="Description of Artificial Sequence: Synthetic light chain variable domain"
QIVLTQSPAIMSASPGERVTLTCSASSSVSSSFLYWYQQKSGSSPKLWIYSTSTLASGVPARFSGSGSGTSYSLTISSMEAEDAASYFCHQWSSYPWTFGGGTKLEIK

SEQ ID NO: 3444 - protein, 113 aa, Artificial Sequence
  source: /note="Description of Artificial Sequence: Synthetic light chain variable domain"
DIVMTQSPSSLAMSVGQKVTMSCKSSQSLLNSSTQKNYLAWYQQKPGQSPKLLIYFASTRGSGVPDRFIGSGSGTDFTLTISSVQTEDLADYFCQQHYSIPCTFGGGTKLEIK

SEQ ID NO: 3445 - protein, 103 aa, Artificial Sequence
  source: /note="Description of Artificial Sequence: Synthetic light chain variable domain"
DIQMNQSPSSLSASLGDTITITCHVSQNINVWLTWYQQKPGNIPKLLLYKASNLQTGVPSRFSGSGSGTGFTLTISSLQPEDIATYYCQQGQSYPFTFGSGTK

SEQ ID NO: 3446 - protein, 111 aa, Artificial Sequence
  source: /note="Description of Artificial Sequence: Synthetic light chain variable domain"
DIVMSQSPSSLAVSVGEKVTMSCKSSQSLLYSNNQKNYLAWYQQKPGQSPKLLIYWASSRESGVPERFTGSGSGTDFTLTISSVKAEDLAVYYCQQYYSSPYTFGGGTKLK

SEQ ID NO: 3447 - protein, 107 aa, Artificial Sequence
  source: /note="Description of Artificial Sequence: Synthetic light chain variable domain"
DIVMTQSQKFMSTSVGDRVSVTCKASQNVAINVAWYQQKPGQSPKALIYSASYRYSVVPDRFTGSGSGTDFTLPISNVQSEGLADYFCLQYINYPYTFGGGTKLEIK

SEQ ID NO: 3448 - protein, 106 aa, Artificial Sequence
  source: /note="Description of Artificial Sequence: Synthetic light chain variable domain"
QIVLSQSPAILSASPGEKVTMTCRASSSVSYIHWYQQKAGSSPTSWIYATSNLASGVPTRFSGSGSGTSYSLTVNRVEAEDAATYYCQQWSTTPPTFGGGTRLEIK

SEQ ID NO: 3449 - protein, 110 aa, Artificial Sequence
  source: /note="Description of Artificial Sequence: Synthetic light chain variable domain"
DIVMTQSPSSLTVTAGEKVTMSCKSSQSLLKSGNQKNYLTWYQQKPGQPPKLLIYWASTRESGVPDRFTGSGFGTDFTLTISSVQAEDLAVYYCQSDYNYPTFGSGTKLK

SEQ ID NO: 3450 - protein, 106 aa, Artificial Sequence
  source: /note="Description of Artificial Sequence: Synthetic light chain variable domain"
QIVLTQSPAIMSASPGEKVTITCSASSSVSYMHWFQQKPGTSPKLWIYSTSNLASGVPARFSGSGSGTSYSLTISRMEAEDAATYYCQQRSTYPYTFGGGTKLEIK

SEQ ID NO: 3451 - protein, 106 aa, Artificial Sequence
  source: /note="Description of Artificial Sequence: Synthetic light chain variable domain"
QIVLSQSPAILSASPGEKVTMTCRASSSVSYMHWYQQKPGSSPKPWIYAASNLASGVPARFSATGSGTSYSLTISRVEAEDAATYCCQQWSNNPPTFGGGTKLEIK

SEQ ID NO: 3452 - protein, 111 aa, Artificial Sequence
  source: /note="Description of Artificial Sequence: Synthetic light chain variable domain"
DIVLTQSPASLAVSLGQRATISCRANESVEYYGTSLMQWYQQKPGQPPKLLIYAASSVKSGVPARFSGSGSGTDFSLNIHPVEEDDIAMYFCQQSRKVPSTFGGGTKLEIK

SEQ ID NO: 3453 - protein, 111 aa, Artificial Sequence
  source: /note="Description of Artificial Sequence: Synthetic light chain variable domain"
DIVLTQSPASLAVSLGQRATISCRAHESVEYYGTSLMQWYQQKPGQPPKLLIYAASSVKSGVPARFSGSGSGTDFSLNIHPVEEDDIAMYFCQQSRKVPSTFGGGTKLEIK

SEQ ID NO: 3454 - protein, 113 aa, Artificial Sequence
  source: /note="Description of Artificial Sequence: Synthetic light chain variable domain"
DIVMTQSPSSLAVSVGEKVTMSCKSSQSLLYSSNQKNYLAWYQQKPGQSPKLLIYWASTRESGVPDRFTGSGSGTDFTLTISSVKAEDLAVYYCQQYYNYPYTFGGGTKLEIK

SEQ ID NO: 3455 - protein, 109 aa, Artificial Sequence
  source: /note="Description of Artificial Sequence: Synthetic light chain variable domain"
DIVLTQSPASLAVSLGQRATISCRANENVEYYGTSLMQWYQQKPGQPPKLLIYAASNVKSGVPARFSGSGSGTDFSLNIHPVEEDDIAMYFCQQSRKVPSTFGGGTKLK

SEQ ID NO: 3456 - protein, 113 aa, Artificial Sequence
  source: /note="Description of Artificial Sequence: Synthetic light chain variable domain"
DIVMSQSPSSLAVSVGEKVTMSCKSSQSLLYSSNQKNYLAWYQQKPGQSPKLLIYWASTRESGVPDRFTGSGSGTDFTLTISTVKAEDLAVYYCHQYYSYPYTFGGGTKLEIK

SEQ ID NO: 3457 - protein, 111 aa, Artificial Sequence
  source: /note="Description of Artificial Sequence: Synthetic light chain variable domain"
DIVLTQSPGSLAVSLGQRATISCRASQSVSSSSYSYMHWYQQKPGQPPKLLIKFASNLESGVPARFSGSGSGTDFTLNIHPVEEEDTATYYCQHSWEIPLTFGAGTKLELK

SEQ ID NO: 3458 - protein, 107 aa, Artificial Sequence
  source: /note="Description of Artificial Sequence: Synthetic light chain variable domain"
DVQITQSPSYLAASPGETISINCRASKNISKYLAWYQEKPGKTNKLLIYSGSTLQSGIPSGFSGSGSGTDFTLTISSLEPEDFAMYYCQQHFEYPYTFGGGTKLEIK

SEQ ID NO: 3459 - protein, 105 aa, Artificial Sequence
  source: /note="Description of Artificial Sequence: Synthetic light chain variable domain"
QIVLTQSPAIMSASLGEEITLTCSATSSVGYIHWYQQTSGTSPRLLIYTTSNLASGVPSRFSGSGSGTFYSLTISSVEAEDAADYYCHQWSRYPTFGGGTKLEIK

SEQ ID NO: 3460 - protein, 107 aa, Artificial Sequence
  source: /note="Description of Artificial Sequence: Synthetic light chain variable domain"
DIKMTQSPSSTYASLGERVTITCKASQDINTYLYWFQQKPGKPPKTLIYRANRLIDGVPSRFSGSGSGQDYSLTISSLEYEDLGIYYCLQYDEFPYTFGGGTKLEIK

SEQ ID NO: 3461 - protein, 111 aa, Artificial Sequence
  source: /note="Description of Artificial Sequence: Synthetic light chain variable domain"
DIVLTQSPASLAVSLGQRATISCRADESVEYYGTSLMQWYQQKPGQPPKLLIYAASNVKSGVPARFSGSGSGTDFSLNIHPVEEDDIAIYFCQQSREVPSTFGGGTKLEIK

SEQ ID NO: 3462 - protein, 112 aa, Artificial Sequence
  source: /note="Description of Artificial Sequence: Synthetic light chain variable domain"
DIVMTQAAFSNPVTLGTSASISCRSSKSLLHSNGITYLYWYLQKPGQSPQLLIYQMSNLASGVPDRFSNSGSGTDFTLRISRVEAEDVGVYYCAQNLELPWTFGGGTKLEIK

SEQ ID NO: 3463 - protein, 108 aa, Artificial Sequence
  source: /note="Description of Artificial Sequence: Synthetic light chain variable domain"
DIVMTQSHKLMSASVGDRVSITCKASQDVGTAVAWYQQKPGRSPKLLIYWASNRHTGVPDRFTGSGSGTDFTLTISNVQSEDLADYFCQQFGSYPYTFGGGTKLEIKR

SEQ ID NO: 3464 - protein, 111 aa, Artificial Sequence
  source: /note="Description of Artificial Sequence: Synthetic light chain variable domain"
DIVLTQSPLSLLVSLGDQASISCRSSQSLVHSNGNTYLHWYLQKPGQSPNLLIFKVSNRFSGVPDRFSGSGSGTDFTLRISRVEAEDLGVYFCSQTTHVWTFGGGTKLEIK

SEQ ID NO: 3465 - protein, 107 aa, Artificial Sequence
  source: /note="Description of Artificial Sequence: Synthetic light chain variable domain"
DIQMTQSPSSLLAALGERVSLTCRASQEISGYLSWLQQKPDGTIKRLIYAASTLDSGVPKRFSGSESGSDYSLTISSLESEDFADYYCLQYFSYPLTFGAGTKLELK

SEQ ID NO: 3466 - protein, 111 aa, Artificial Sequence
  source: /note="Description of Artificial Sequence: Synthetic light chain variable domain"
DIVLTQSPASLAVSLGQRATISCRASESVDNYGISFMNWFQQKPGQPPKLLIYAASNQGSGVPARFSGSGSGTDFSLNIHPMEEDDTAMYFCQQSKEVPWTFGGGTKLEIK

SEQ ID NO: 3467 - protein, 108 aa, Artificial Sequence
  source: /note="Description of Artificial Sequence: Synthetic light chain variable domain"
DIKMTQSPSSMYASLGERVIINCKASQDINSYLSWFQQKPGKSPKTLIYRANRLVDGVPSRFSGSGSGQDYSLTISSLEYEDMGIYYCLQYDEFPLTFGAGTKLELKR

SEQ ID NO: 3468 - protein, 115 aa, Artificial Sequence
  source: /note="Description of Artificial Sequence: Synthetic light chain variable domain"
DIVLTQSPTIMSASPGERVTMTCTASSSVNYIHWYQQKSGDSPLRWIFDTSKVASGVPARFSGSGSGTSYSLTISTMEAEDAATYYCQQWRSYPLTFGDGTRLELKRADAAPTVS

SEQ ID NO: 3469 - protein, 113 aa, Artificial Sequence
  source: /note="Description of Artificial Sequence: Synthetic light chain variable domain"
NIMLTQSPSSLAVSAGEKVTMSCKSSQSVFFSSSQKNYLAWYQQIPGQSPKLLIYWASTRESGVPDRFTGSGSGTDFTLTISSVQSEDLAIYYCHQYLSSRTFGGGTKLEIKR

SEQ ID NO: 3470 - protein, 112 aa, Artificial Sequence
  source: /note="Description of Artificial Sequence: Synthetic light chain variable domain"
EIVLTQSPLSLPVTPGEPASISCRSSQSLLHSNGYNYLDWYLQKPGQSPQLLIYLGSNRASGVPDRFSGSGSGTDFTLKISRVEAEDVGVYYCMQALQTLITFGQGTKVDIK

SEQ ID NO: 3471 - protein, 111 aa, Artificial Sequence; identical to SEQ ID NO: 3466
  source: /note="Description of Artificial Sequence: Synthetic light chain variable domain"

SEQ ID NO: 3472 - protein, 107 aa, Artificial Sequence
  source: /note="Description of Artificial Sequence: Synthetic light chain variable domain"
DIRMTQSPPSLSASVGDRVTIPCQASQDINNHLNWYQQKPGKAPQLLIYDTSNLEIGVPSRFSGSGSGTDFTLTISSLQPEDIATYYCQQYENLPLTFGGGTKVEIK

SEQ ID NO: 3473 - protein, 107 aa, Artificial Sequence
  source: /note="Description of Artificial Sequence: Synthetic light chain variable domain"
ETTLTQSPSSVSASVGDRVSITCRASQDIDTWLAWYQLKPGKAPKLLMYAASNLQGGVPSRFSGSGSGTDFILTISSLQPEDFATYYCQQASIFPPTFGGGTKVDIK

SEQ ID NO: 3474 - protein, 108 aa, Artificial Sequence; identical to SEQ ID NO: 3467
  source: /note="Description of Artificial Sequence: Synthetic light chain variable domain"

SEQ ID NO: 3475 - protein, 112 aa, Artificial Sequence
  source: /note="Description of Artificial Sequence: Synthetic light chain variable domain"
EIVMTQSPLSLPVTPGEPASISCRSSQSLLHSNGYNYLDWYLQKPGQSPQLLIYLGSNRASGVPDRFSGSGSGTDFTLKISRVEAEDVGVYYCMQALQTPFTFGGGTKVEIK

SEQ ID NO: 3476 - protein, 107 aa, Artificial Sequence
  source: /note="Description of Artificial Sequence: Synthetic light chain variable domain"
DIQLTQSPSSLSAYVGGRVTITCQASQGISQFLNWFQQKPGKAPKLLISDASNLEPGVPSRFSGSGSGTDFTFTITNLQPEDIATYYCQQYDDLPLTFGGGTKVEIK

SEQ ID NO: 3477 - protein, 115 aa, Artificial Sequence; identical to SEQ ID NO: 3468
  source: /note="Description of Artificial Sequence: Synthetic light chain variable domain"

SEQ ID NO: 3478 - protein, 111 aa, Artificial Sequence
  source: /note="Description of Artificial Sequence: Synthetic light chain variable domain"
EIVMTQSPLSLPVTPGEPASISCRSSQSLLHSNGYNYLDWYLQKPGQSPQLLIYLGSNRASGVPDRFSGSGSGTDFTLKISRVEAEDVGVYYCMQALQTPTFGPGTKVDIK

SEQ ID NO: 3479 - protein, 107 aa, Artificial Sequence
  source: /note="Description of Artificial Sequence: Synthetic light chain variable domain"
DIQMTQSPSSLSASVGDRVTISCRASQGIGIYLAWYQQRSGKPPQLLIHGASTLQSGVPSRFSGSGSGTDFTLTISSLQPEDFASYWCQQSNNFPPTFGQGTKVEIK

SEQ ID NO: 3480 - protein, 113 aa, Artificial Sequence; identical to SEQ ID NO: 3469
  source: /note="Description of Artificial Sequence: Synthetic light chain variable domain"

SEQ ID NO: 3481 - protein, 107 aa, Artificial Sequence
  source: /note="Description of Artificial Sequence: Synthetic light chain variable domain"
DIQLTQSPSSLSASVGDRVTITCQASHDISNYLHWYQQKPGKAPKLLIYDASNLETGVPSRFTGSGSGTDFTLTIRSLQPEDVAAYYCQQSDDLPHTFGQGTKVDIK

SEQ ID NO: 3482 - protein, 107 aa, Artificial Sequence
  source: /note="Description of Artificial Sequence: Synthetic light chain variable domain"
DIRLTQSPSSLSASVGDRVTITCRASQSISSYLNWYQQKPGKAPKLLIYAASSLQSGVPSRFSGSGSGTDFTLTISSLQPEDFATYYCQQSYSTPLTFGGGTKVDIK

SEQ ID NO: 3483 - protein, 108 aa, Artificial Sequence
  source: /note="Description of Artificial Sequence: Synthetic light chain variable domain"
SIVMTQTPTFLLVSAGDRVTITCKASQSVSNDVAWYQQKPGQSPTLLISYTSSRYAGVPDRFIGSGYGTDFTFTISTLQAEDLAVYFCQQDYNSPPTFGGGTKLEIKR

SEQ ID NO: 3484 - protein, 107 aa, Artificial Sequence
  source: /note="Description of Artificial Sequence: Synthetic light chain variable domain"
SIVMTQTPKFLLVSAGDRVTITCKASQSVSNDVAWYQQKPGQSPKLLINFATNRYTGVPNRFTGSGYGTDFTFTISTVQAEDLALYFCQQDYSSPWTFGGGTKLEIK

SEQ ID NO: 3485 - protein, 108 aa, Artificial Sequence
  source: /note="Description of Artificial Sequence: Synthetic light chain variable domain"
QIVLTQSPAIMSASLGERVTLTCTASSSVNSNYLHWYQQKPGSSPKLWIYSTSNLASGVPARFSGSGSGTSYSLTISSMEAEDAATYYCHQYHRSPLTFGAGTKLELK

SEQ ID NO: 3486 - protein, 108 aa, Artificial Sequence
  source: /note="Description of Artificial Sequence: Synthetic light chain variable domain"
DIQMTQSPASLSVSVGETVTITCRASENIRSNLAWYQQKQGKSPQLLVNVATNLADGVPSRFSGSGSGTQYSLKINSLQSEDFGTYYCQHYWGTTWTFGGGTKLEIKR

SEQ ID NO: 3487 - protein, 108 aa, Artificial Sequence
  source: /note="Description of Artificial Sequence: Synthetic light chain variable domain"
DIQMTQSPSSLSVSVGERVTITCRASENIRSNLAWYQQKPGKSPKLLVNVATNLADGVPSRFSGSGSGTDYSLKINSLQPEDFGTYYCQHYWGTTWTFGQGTKLEIKR

SEQ ID NO: 3488 - protein, 448 aa, Artificial Sequence
  source: /note="Description of Artificial Sequence: Synthetic light chain variable domain"
QVQLQQSGSELMMPGASVKISCKATGYTFSNYWIEWVKQRPGHGLEWIGEILPGTGRTIYNEKFKGKATFTADISSNTVQMQLSSLTSEDSAVYYCARRDYYGNFYYAMDYWGQGTSVTVSSASTKGPSVFPLAPCSRSTSESTAALGCLVKDYFPEPVTVSWNSGALTSGVHTFPAVLQSSGLYSLSSVVTVPSSSLGTKTYTCNVDHKPSNTKVDKRVESKYGPPCPSCPAPEFLGGPSVFLFPPKPKDTLMISRTPEVTCVVVDVSQEDPEVQFNWYVDGVEVHNAKTKPREEQFNSTYRVVSVLTVLHQDWLNGKEYKCKVSNKGLPSSIEKTISKAKGQPREPQVYTLPPSQEEMTKNQVSLTCLVKGFYPSDIAVEWESNGQPENNYKTTPPVLDSDGSFFLYSRLTVDKSRWQEGNVFSCSVMHEALHNHYTQKSLSLSLG

SEQ ID NO: 3489 - protein, 214 aa, Artificial Sequence
  source: /note="Description of Artificial Sequence: Synthetic light chain variable domain"
EIVLTQSPATLSLSPGERATLSCRASQSVSSYLAWYQQKPGQAPRLLIYDASNRATGIPARFSGSGSGTDFTLTISSLEPEDFAVYYCQQRSNWPPTFGQGTKVEIKRTVAAPSVFIFPPSDEQLKSGTASVVCLLNNFYPREAKVQWKVDNALQSGNSQESVTEQDSKDSTYSLSSTLTLSKADYEKHKVYACEVTHQGLSSPVTKSFNRGEC

SEQ ID NO: 3490 - protein, 109 aa, Artificial Sequence
  source: /note="Description of Artificial Sequence: Synthetic light chain variable domain"
QTVVTQEPSLTVSPGGTVTLTCGSSTGAVTSGNYPNWVQQKPGQAPRGLIGGTKFLAPGTPARFSGSLLGGKAALTLSGVQPEDEAEYYCVLWYSNRWVFGGGTKLTVL

SEQ ID NO: 3491 - protein, 219 aa, Artificial Sequence
  source: /note="Description of Artificial Sequence: Synthetic light chain variable domain"
DIQMTQSPSSLSASVGDRVTITCRSSQSLVHSNGNTFLHWYQQKPGKAPKLLIYTVSNRFSGVPSRFSGSGSGTDFTLTISSLQPEDFATYFCSQTTHVPWTFGQGTKVEIKRTVAAPSVFIFPPSDEQLKSGTASVVCLLNNFYPREAKVQWKVDNALQSGNSQESVTEQDSKDSTYSLSSTLTLSKADYEKHKVYACEVTHQGLSSPVTKSFNRGEC

SEQ ID NO: 3492 - protein, 107 aa, Artificial Sequence
  source: /note="Description of Artificial Sequence: Synthetic light chain variable domain"
DIQMTQSPSSVSASVGDRVTITCRASQGIYSWLAWYQQKPGKAPNLLIYTASTLQSGVPSRFSGSGSGTDFTLTISSLQPEDFATYYCQQANIFPLTFGGGTKVEIK

SEQ ID NO: 3493 - protein, 111 aa, Artificial Sequence
  source: /note="Description of Artificial Sequence: Synthetic light chain variable domain"
DIVLTQSPASLAVSLGQRATISCRASKSVSTSGYSYLHWYQQKPGQPPKLLIYLASNLESGVPARFSGSGSGTDFTLNIHPVEEEDAATYYCQHSRELPFTFGSGTKLEIK

SEQ ID NO: 3494 - protein, 112 aa, Artificial Sequence
  source: /note="Description of Artificial Sequence: Synthetic light chain variable domain"
DIVMSQSPSSLAVSAGEKVTMSCKSSQSLLNSRTRKNYLAWYQQKPGQSPKLLIYWASTRESGVPDRFTGSGSGTDFTLTISSVQAEDLAVYYCKQSYNLWTFGGGTKLEIR

SEQ ID NO: 3495 - protein, 109 aa, Artificial Sequence
  source: /note="Description of Artificial Sequence: Synthetic light chain variable domain"
GIKMTQSPSSMVASLGERVTITCKASQDVNSYLSWFQQKPGKSPKTLIYRANRLVDGVPSRFSGSGSGQDVSLTISSLEVEDMGIVVCLQYDEFPYTFGGGTKLEIKRA

SEQ ID NO: 3496 - protein, 116 aa, Artificial Sequence
  source: /note="Description of Artificial Sequence: Synthetic light chain variable domain"
RCDIQMTQTTSSLSASLGDRVTISCSASQGISNYLNWYQQKPDGTVKLLIYVTSSLHSGVPSRFSGSGSGTDYSLTINNLEPEDIATVYCQQVSKLPWTFGGGTKLEIKRADAAPT

SEQ ID NO: 3497 - protein, 108 aa, Artificial Sequence
  source: /note="Description of Artificial Sequence: Synthetic light chain variable domain"
DIQMTQITSSLSASLGDRVTISCSASQGISNYLNWYQQKPDGTVKLLIYYTSSLHSGVPSRFRGSGSGTNYSLTISNLEPEDIATYYCQQYIKLPWTFGGGTKLEIKR

SEQ ID NO: 3498 - protein, 108 aa, Artificial Sequence
  source: /note="Description of Artificial Sequence: Synthetic light chain variable domain"
GIQMTQTTSSLSASLGDRVTISCSASQGISNYLNWYQQKPDGTVKLLIYYTSSLHSGVPSRFSGSGSGTDYSLTISNLEPEDIATYYCQQYIKLPFTFGSGTKLEIKR

SEQ ID NO: 3499 - protein, 120 aa, Artificial Sequence
  source: /note="Description of Artificial Sequence: Synthetic light chain variable domain"
DIQMTQTPSSLSASLGDRVTISCSASQGISNYLNWYQQKPDGTVKLLIYYTSSLHSGVPSRFSGSGSGTDYSLTISNLEPEDIATYYCQQYIKLPWTFGGGTKLAIKRADAAPTVSIFPP

SEQ ID NO: 3500 - protein, 113 aa, Artificial Sequence
  source: /note="Description of Artificial Sequence: Synthetic light chain variable domain"
DIVMSQSPSSLAVSAGEKVTMSCKSSQSLLNSRTRKNYLAWYQQKPGQSPKLLIYWASTRESGVPDRFTGSGSGTDFTLTISSVQAEDLAVYYCKQSYNLWTFGGGTKLEIKR

SEQ ID NO: 3501 - protein, 124 aa, Artificial Sequence
  source: /note="Description of Artificial Sequence: Synthetic light chain variable domain"
DIVVTQSPASLAVSLGQRATISCRASESVDNYGISFMNWFQQKPGQPPKLLIYAASNQGSGVPARFSGSGSGSDFSLNIHPMEEDDPAMYFCQQSKEVPFTFGSGTKLEIKRADAAPTVSIFPT

SEQ ID NO: 3502 - protein, 108 aa, Artificial Sequence
  source: /note="Description of Artificial Sequence: Synthetic light chain variable domain"
DIQMTQTTSSLSASLGDRVTISCSASQDINNYLNWYQQKPDGTVKLLIYYTSSLHSGVPSRFSGSGSGTDYSLTISNLEPEDIATYYCQQYIKLPWTFGGGTKLEIKR

SEQ ID NO: 3503 - protein, 113 aa, Artificial Sequence
  source: /note="Description of Artificial Sequence: Synthetic light chain variable domain"
DVLMTQSPLSLPVSLGDQASISCRSSQSIVHSNGNTYLEWYLQKPGQSPKLLIYKVSNRFSGVPDRFSGSGSGTDFTLKISRVEAEDLGVYFCFQGSHVPLTFGAGTKLELKR

SEQ ID NO: 3504 - protein, 108 aa, Artificial Sequence
  source: /note="Description of Artificial Sequence: Synthetic light chain variable domain"
NIVMTQSPKSVSMSVGERVTLSCKASENVNTFVSWFQQKPDQSPKLLIVGASNRYPGVPDRFTGSGSATEFTLTISSVQAEDLADVHCGQSYSYPYTFGGGTKLEIKR

SEQ ID NO: 3505 - protein, 111 aa, Artificial Sequence
  source: /note="Description of Artificial Sequence: Synthetic light chain variable domain"
VMTQSPLSLPVNIGDQASISCKSTKSLLNSDGFTYLDWYLQKPGQSPQLLIYLVSNRFSGVPDRFSGSGSGTDFTLKISRVEAEDLGVYYCFQSNSLPFTFGSGTKLEIKR

SEQ ID NO: 3506 - protein, 108 aa, Artificial Sequence
  source: /note="Description of Artificial Sequence: Synthetic light chain variable domain"
DIKMTQSPSSMYASLGERVTITCKASQDINSYLSWFHQKPGKSPKTLIYRANRLVDGVPSRFSGSGSGQDYSLTISSLEFEDMGIYYCLQYDDFPYTFGGGTKLEIKR

SEQ ID NO: 3507 - protein, 120 aa, Artificial Sequence
  source: /note="Description of Artificial Sequence: Synthetic light chain variable domain"
DIKMTQSPSSMYASLGERVTITCKASQDINSYSGWFQQKPGKSPKTLIYRTNRLVDGVPSRFSGSGSGQDYSLSISSLEYEDMGIYYCLQYDEFPYTFGGGTKLEIKRADAAPTVSIFPT

SEQ ID NO: 3508 - protein, 113 aa, Artificial Sequence
  source: /note="Description of Artificial Sequence: Synthetic light chain variable domain"
DIVMTQAAPSVPVTPGESVSISCRSSKSLLHSNGNTYLYWFLQRPGQSPQLLIYRMSNLASGVPDRFSGSGSGTTFTLRISGVEAEDVGVYYCMQHLEYPCTFGGGTKLEIKR

SEQ ID NO: 3509 - protein, 107 aa, Artificial Sequence
  source: /note="Description of Artificial Sequence: Synthetic light chain variable domain"
QIVLTQSPAIMSASPGEKVTLSCSATSSVTYMHWLQQKPGSSPKPWIYRTSNLASGVPARFRGSGSGTSYSLTISSMEAEDAATYYCQQYHSYPPTFGGGTKLEIKR

SEQ ID NO: 3510 - protein, 108 aa, Artificial Sequence
  source: /note="Description of Artificial Sequence: Synthetic light chain variable domain"
AIQMTQTTSSLSASLGDRVTISCSASQDISNYLNWYQQKPDGTVKLLIYYTSSLHSGVPSRFSGSGSGTDYSLTISNVEPEDVATYYCQQYSELPYTFGGGTKLEINR

SEQ ID NO: 3511 - protein, 108 aa, Artificial Sequence
  source: /note="Description of Artificial Sequence: Synthetic light chain variable domain"
DIVLTQFPAILSVSPGERVSFSCRASQSIGTSLHWYQQRTNGSPRLLMKYASESISGIPSRFSGSGSGTDFTLSINSVESEDIADVVCQQSVSWPLTFGAGTKLELKR

SEQ ID NO: 3512 - protein, 110 aa, Artificial Sequence
  source: /note="Description of Artificial Sequence: Synthetic light chain variable domain"
QSVLTTQPPSVSGAPGQRVTISCTGSSSNIGAGYDVHWYQQLPGTAPKLLIYGNNNRPSGVPDRFSGSKSGTSASLAITGLQAEDEADYYCSSYTSGTWLFGGGTKLTVL

SEQ ID NO: 3513 - protein, 110 aa, Artificial Sequence
  source: /note="Description of Artificial Sequence: Synthetic light chain variable domain"
QSVLTTQPPSVSGAPGQRVTISCTGSSSNIGAGYDVHWYQQLPGTAPKLLIYGDNNRPSGVPDRFSGSKSGTSASLAITGLQAEDEADYYCSSYTSGTWLFGGGTKLTVL

SEQ ID NO: 3514 - protein, 107 aa, Artificial Sequence
  source: /note="Description of Artificial Sequence: Synthetic light chain variable domain"
DIQMTQSPSFLSASVGDRVTITCRASQGISSYLAWYQQKPGKAPKLLIYAASTLQSGVPSSFSGSGSGTEFTLTISSLQPEDFATYYCQQLASYPLTFGGGTKVDIK

SEQ ID NO: 3515 - protein, 110 aa, Artificial Sequence
  source: /note="Description of Artificial Sequence: Synthetic light chain variable domain"
SSELTQDPAVSVALGQTVRITCQGDSLRSYYVSWFQQKPPGQAPVFVMYGQNNRPSGISERFSGSSSGNTASLIITGAQAEDEADYYCHSRDSSGTHLRVFGGGTKLTVL

SEQ ID NO: 3516 - protein, 110 aa, Artificial Sequence
  source: /note="Description of Artificial Sequence: Synthetic light chain variable domain"
QSALTQPPSASATPGQRVTISCSGRTSNIGSNHVYWYQQLPGTAPKLLIYRNNQRPSGVPDRFSGSKSGTSASLAISGLRSEDEADYYCATWDDSLSGEVFGGGTKLTVL

SEQ ID NO: 3517 - protein, 109 aa, Artificial Sequence
  source: /note="Description of Artificial Sequence: Synthetic light chain variable domain"
SSELTQDPAVSVALGQTVRITCQGDSLRSYYASWYQQKPGQAPVLVIYGKNNRPSGIPDRFSGSSSGNTASLTITGAQAEDEADYYCNSRDSSGTHLEVFGGGTKVTVL

SEQ ID NO: 3518 - protein, 107 aa, Artificial Sequence
  source: /note="Description of Artificial Sequence: Synthetic light chain variable domain"
SSELTQDPAVSVALGQTVRITCQGDSLRSYYANWYQQKPGQAPVLVIYGKNNRPSGIPDRFSGSSSGNTASLTITGAQAEDEADYYCHSRDISGNYLFASGTKLTVL

SEQ ID NO: 3519 - protein, 110 aa, Artificial Sequence
  source: /note="Description of Artificial Sequence: Synthetic light chain variable domain"
QSVLTQPPSASGTPGQRVTISCSGSSSNIGSNTVNWSRQLPGTAPKLLIYSNNQRPSGVPDRFSGSKSGTSASLAISGLQSEDEADYYCAAWDDSLNVYVFGTGTKVTVL

SEQ ID NO: 3520 - protein, 107 aa, Artificial Sequence
  source: /note="Description of Artificial Sequence: Synthetic light chain variable domain"
KIVLTQSPSSLSASVGDTVTIACRASRDIRNDLAWYQQKPGKAPKLLIYGASSLQSGVPSRFSGSGSGTEFILTISSLQPEDFATYYCHRLNSYPLTFGGGTKVDIK

SEQ ID NO: 3521 - protein, 111 aa, Artificial Sequence
  source: /note="Description of Artificial Sequence: Synthetic light chain variable domain"
NFMLTQPASLSGSPGQSITISCTGTSSDVGGYNYVSWYQQHPGYAPKLMIYDVSNRPSGVSNRFSGSKSGNTASLTISGLQAEDEADYYCSSYTSSSTPWVFGGGTKLTVL

SEQ ID NO: 3522 - protein, 106 aa, Artificial Sequence
  source: /note="Description of Artificial Sequence: Synthetic light chain variable domain"
SYVLTQDPAVSVALGQTVRITCQGDSLRSYYASWYQQKPGQAPVLVIYGKNNRPSGIPDRFSGSSSGNTASLTITGAQAEDEADYYCNSRDSSGNQFGGGTKLTVL

SEQ ID NO: 3523 - protein, 107 aa, Artificial Sequence
  source: /note="Description of Artificial Sequence: Synthetic light chain variable domain"
SSELTQDPAVSVALGQTVRITCQGDSLRTYYASWYQQRPGQAPILVLYGKNNRPSGIPDRFSGSSSGNTASLTITGAQAEDEADYYCNSRDSSGNHWFGGGTKLTVL

SEQ ID NO: 3524 - protein, 110 aa, Artificial Sequence
  source: /note="Description of Artificial Sequence: Synthetic light chain variable domain"
QSVLTQPASVSGSPGQSITISCTGTGSDVGSYNYVSWYQQNPGKAPKLMIYEVSNRPSGVSNRFSGSKSGNTASLTISGLQAEDEADYYCSSYTTSSTLVFGGGTKVTVL

SEQ ID NO: 3525 - protein, 106 aa, Artificial Sequence
  source: /note="Description of Artificial Sequence: Synthetic light chain variable domain"
SELTQDPAVSVALGQTVRITCQGDSLRSYYASWYQQKPGQAPVLVIYGENSRPSGIPDRFSGSSSGNTASLTITGAQAEDEADYYCNSWDSSGNHWFGGGTKLTVL

SEQ ID NO: 3526 - protein, 107 aa, Artificial Sequence
  source: /note="Description of Artificial Sequence: Synthetic light chain variable domain"
AIRMTQSPSSLSASVGDRVTITCRASQSISSYLNWYQQKPGKAPKLLIYAASSLQSGVPSRFSGSGSGTDFTLTISSLQPEDFATYYCQQSYSTPRTFGQGTKLEIK

SEQ ID NO: 3527 - protein, 111 aa, Artificial Sequence
  source: /note="Description of Artificial Sequence: Synthetic light chain variable domain"
DIVMTQSPLSLPVTPGEPASISCRSSQSLLHSNGYDYLDWYLQKPGQSPQLLIYLGSNRASGVPDRFSGSGSGTDFTLKISRVETEDVGIYYCMQGLQTPSFGQGTKLEIK

SEQ ID NO: 3528 - protein, 109 aa, Artificial Sequence
  source: /note="Description of Artificial Sequence: Synthetic light chain variable domain"
SSELTQDPAVSVALGQTVRITCQGDSLRSYYASWYQQKPGQAPVPVIYGKNNRPSGIPDRFSGSSSGNTASLTITGAQAEDEADYYCNSRDSSSTHRGVFGGGTKLTVL

SEQ ID NO: 3529 - protein, 107 aa, Artificial Sequence
  source: /note="Description of Artificial Sequence: Synthetic light chain variable domain"
DIQLTQSPSSLSASVGDRVTITCRASRSISTYLSWYQQKPGKAPKLLIYDASRLQNGVPSRFSGSGSDTDFTLTISSLQPEDFATYFCQQSYNPPWTFGQGTKLEIK

SEQ ID NO: 3530 - protein, 111 aa, Artificial Sequence
  source: /note="Description of Artificial Sequence: Synthetic light chain variable domain"
QSALTQPASVSGSPGQSITISCTGTSSDVGGYNYVSWYQQHPGKAPKLMIYDVSNRPSGVSNRFSGSKSGNTASLTISGLQAEDEAYYYCSSYTSSSDPWVFGGGTQLTVL

SEQ ID NO: 3531 - protein, 107 aa, Artificial Sequence
  source: /note="Description of Artificial Sequence: Synthetic light chain variable domain"
NIQMTQSPSSLSASVGDRVTITCRAGQPISTYVNWYQHKPGKAPKLLIYGASNLQSGVPSRFSGGGSATDFTLTISSLQPEDFATYYCQQSYSSLLTFGDGTKVEIK

SEQ ID NO: 3532 - protein, 120 aa, Artificial Sequence
  source: /note="Description of Artificial Sequence: Synthetic light chain variable domain"
DIKMTQSPSSMYASLGERVTITCKASQDINSYSGWFQQKPGKSPKTLIYRTNRLVDGVPSRFSGSGSGQDYSLSISSLEVEDMGIYVCLQYDEFPYTFGGGTKLEIKRADAAPTVSIFPT

SEQ ID NO: 3533 - protein, 113 aa, Artificial Sequence
  source: /note="Description of Artificial Sequence: Synthetic light chain variable domain"
DIVMTQAAPSVPVTPGESVSISCRSSKSLLHSNGNTYLVWFLQRPGQSPQLLIYRMSNLASGVPDRFSGSGSGTTFTLRISGVEAEDVGVVVCMQHLEVPCTFGGGTKLEIKR

SEQ ID NO: 3534 - protein, 105 aa, Artificial Sequence
  source: /note="Description of Artificial Sequence: Synthetic light chain variable domain"
DIQMTQSPSSLSASVGDTVTITCQANGYLNWYQQRRGKAPKLLIYDGSKLERGVPSRFSGRRWGQEYNLTINNLQPEDIATYFCQVYEFVVPGTRLDLKRTVAAP

SEQ ID NO: 3535 - protein, 104 aa, Artificial Sequence
  source: /note="Description of Artificial Sequence: Synthetic light chain variable domain"
EIVLTQSPGTLSLSPGETAIISCRTSQYGSLAWYQQRPGQAPRLVIYSGSTRAAGIPDRFSGSRWGPDYNLTISNLESGDFGVYYCQQYEFFGQGTKVQVDIKR

SEQ ID NO: 3536 - protein, 107 aa, Artificial Sequence
  source: /note="Description of Artificial Sequence: Synthetic light chain variable domain"
ELVLTQSPGTLSLSAGERATLSCRASQSVSSGSLAWYQQKPGQAPRLLIYGASTRATGIPDRFSGSGSGTDFTLTIGRLEPEDLAVYYCQQYGTSPYTFGQGTKLEI

SEQ ID NO: 3537 - protein, 113 aa, Artificial Sequence
  source: /note="Description of Artificial Sequence: Synthetic light chain variable domain"
DIVMTQTPLSLSVTPGQPASISCRSSQSLVHTNGNTYLHWYLQKPGQSPQLLIYMVSNRFSGVPDRFSGSGSGTDFTLKISRVEAEDVGVYYCSQSAHVPPLTFGQGTRLEIK

SEQ ID NO: 3538 - protein, 112 aa, Artificial Sequence
  source: /note="Description of Artificial Sequence: Synthetic light chain variable domain"
DIVMTQTPLSLSVTPGQPASISCRSSQSLVHTNGNSYLHWYLQKPGQSPQLLIYMVSNRFSGVPDRFSGSGSGTDFTLKISRVEAEDVGVYYCSQSTHVPFTFGQGTKLEIK

SEQ ID NO: 3539 - protein, 109 aa, Artificial Sequence
  source: /note="Description of Artificial Sequence: Synthetic light chain variable domain"
EIVLTQSPATLSLSPGERATLSCRASQSVSSYLAWYQQKPGQAPRLLIYDASSRATGIPARFGGSGSGGTDFTLTISSLEPEDFAVYYCQLRSNWPPYTFGQGTKLEIK

SEQ ID NO: 3540 - protein, 112 aa, Artificial Sequence
  source: /note="Description of Artificial Sequence: Synthetic light chain variable domain"
AAYKDIQMTQTTSSLSASLGDRVTISCSASQGISNYLNWYQQKPDGTVKLLIYYTSSLHSGVPSRFSGSGSGTDYSLTISNLEPEDIATYYCQQYSKLPYTFGGGTKLEIKR

SEQ ID NO: 3541 - protein, 108 aa, Artificial Sequence
  source: /note="Description of Artificial Sequence: Synthetic light chain variable domain"
DIELTQSPATLSVTPGDSVSLSCRASQSISNNLHWYQQKSHESPRLLIKSASQSISGIPSRFSGSGSGTDFTLSINSVETEDFGMYFCQQSNSWPYTFGGGTKLEIKR

SEQ ID NO: 3542 - protein, 112 aa, Artificial Sequence
  source: /note="Description of Artificial Sequence: Synthetic light chain variable domain"
DIVMTQSPLSLPVTPGEPASISCRSSQSLLNSNGYNYLDWYLQKPGQSPQFLIYLGSYRASGVPDRFSGSGSGTDFTLRISRVEAEDVGVYYCIQTLQTPFTFGPGTKVDIK

SEQ ID NO: 3543 - protein, 107 aa, Artificial Sequence
  source: /note="Description of Artificial Sequence: Synthetic light chain variable domain"
DIQMTQSPSSLSASVGDRVTITCRASQGISNYLAWFQQKPGKAPKSLIYAASSLQGGVPSKFSGSGSGTDFTLTISSLQPEDFATYYCQQYYNYPFTFGPGTTVDIK

SEQ ID NO: 3544 - protein, 112 aa, Artificial Sequence
  source: /note="Description of Artificial Sequence: Synthetic light chain variable domain"
DIVLTQSPASLAVSLGQRATISCRASKSVSTSGYSFMHWYQQKPGQPPKLLIYLASNLESGVPARFSGSGSGTDFTLNIHPVEEEDAATYYCQHSREVPWTFGGGTKLEIKR

SEQ ID NO: 3545 - protein, 108 aa, Artificial Sequence
  source: /note="Description of Artificial Sequence: Synthetic light chain variable domain"
DIVMTQTPAIMSASPGEKVTITCSASSSVYYMYWFQQKPGTSPKLWIYSTSNLASGVPVRFSGSGSGTSYSLTISRMEAEDAATYYCQQRRNYPYTFGGGTKLEIKRA

SEQ ID NO: 3546 - protein, 260 aa, Artificial Sequence
  source: /note="Description of Artificial Sequence: Synthetic light chain variable domain"
QGQSGQGQFCPWSYYLIGDCDIGGGSSGGSISSGLLSGRSDNHGGGSDIQMTQSPSSLSASVGDRVTITCSASSSVYYMYWFQQKPGKAPKLWIYSTSNLASGVPSRFSGSGSGTDYTLTISSMQPEDFATYYCQQRRNYPYTFGQGTKLEIKRTVAAPSVFIFPPSDEQLKSGTASVVCLLNNFYPREAKVQWKVDNALQSGNSQESVTEQDSKDSTYSLSSTLTLSKADYEKHKVYACEVTHQGLSSPVTKSFNRGEC

SEQ ID NO: 3547 - protein, 264 aa, Artificial Sequence
  source: /note="Description of Artificial Sequence: Synthetic light chain variable domain"
QGQSGQGQFCPWSYYLIGDCDIGGGSSGGSAVGLLAPPGGLSGRSDNHGGSDIQMTQSPSSLSASVGDRVTITCSASSSVYYMYWFQQKPGKAPKLWIYSTSNLASGVPSRFSGSGSGTDYTLTISSMQPEDFATYYCQQRRNYPYTFGQGTKLEIKRTVAAPSVFIFPPSDEQLKSGTASVVCLLNNFYPREAKVQWKVDNALQSGNSQESVTEQDSKDSTYSLSSTLTLSKADYEKHKVYACEVTHQGLSSPVTKSFNRGEC

SEQ ID NO: 3548 - protein, 260 aa, Artificial Sequence
  source: /note="Description of Artificial Sequence: Synthetic light chain variable domain"
QGQSGQGNLCTEHSAALDCRSYGGGSSGGSISSGLLSGRSDNHGGGSDIQMTQSPSSLSASVGDRVTITCSASSSVYYMYWFQQKPGKAPKLWIYSTSNLASGVPSRFSGSGSGTDYTLTISSMQPEDFATYYCQQRRNYPYTFGQGTKLEIKRTVAAPSVFIFPPSDEQLKSGTASVVCLLNNFYPREAKVQWKVDNALQSGNSQESVTEQDSKDSTYSLSSTLTLSKADYEKHKVYACEVTHQGLSSPVTKSFNRGEC

SEQ ID NO: 3549 - protein, 264 aa, Artificial Sequence
  source: /note="Description of Artificial Sequence: Synthetic light chain variable domain"
QGQSGQGNLCTEHSAALDCRSYGGGSSGGSAVGLLAPPGGLSGRSDNHGGSDIQMTQSPSSLSASVGDRVTITCSASSSVYYMYWFQQKPGKAPKLWIYSTSNLASGVPSRFSGSGSGTDYTLTISSMQPEDFATYYCQQRRNYPYTFGQGTKLEIKRTVAAPSVFIFPPSDEQLKSGTASVVCLLNNFYPREAKVQWKVDNALQSGNSQESVTEQDSKDSTYSLSSTLTLSKADYEKHKVYACEVTHQGLSSPVTKSFNRGEC

SEQ ID NO: 3550 - protein, 255 aa, Artificial Sequence
  source: /note="Description of Artificial Sequence: Synthetic light chain variable domain"
QGQSGQGCTEHSFALDCGGGSSGGSISSGLLSGRSDNHGGGSDIQMTQSPSSLSASVGDRVTITCSASSSVYYMYWFQQKPGKAPKLWIYSTSNLASGVPSRFSGSGSGTDYTLTISSMQPEDFATYYCQQRRNYPYTFGQGTKLEIKRTVAAPSVFIFPPSDEQLKSGTASVVCLLNNFYPREAKVQWKVDNALQSGNSQESVTEQDSKDSTYSLSSTLTLSKADYEKHKVYACEVTHQGLSSPVTKSFNRGEC

SEQ ID NO: 3551 - protein, 259 aa, Artificial Sequence
  source: /note="Description of Artificial Sequence: Synthetic light chain variable domain"
QGQSGQGCTEHSFALDCGGGSSGGSAVGLLAPPGGLSGRSDNHGGSDIQMTQSPSSLSASVGDRVTITCSASSSVYYMYWFQQKPGKAPKLWIYSTSNLASGVPSRFSGSGSGTDYTLTISSMQPEDFATYYCQQRRNYPYTFGQGTKLEIKRTVAAPSVFIFPPSDEQLKSGTASVVCLLNNFYPREAKVQWKVDNALQSGNSQESVTEQDSKDSTYSLSSTLTLSKADYEKHKVYACEVTHQGLSSPVTKSFNRGEC

SEQ ID NO: 3552 - protein, 106 aa, Artificial Sequence
  source: /note="Description of Artificial Sequence: Synthetic light chain variable domain"
DIQMTQSPSSLSASVGDRVTITCSASSSVYYMYWYQQKPGKAPKLLIYSTSNLASGVPSRFSGSGSGTDFTLTISSLQPEDFATYYCQQRRNYPYTFGQGTKLEIK

SEQ ID NO: 3553 - protein, 253 aa, Artificial Sequence
  source: /note="Description of Artificial Sequence: Synthetic light chain variable domain"
QFCPWSYYLIGDCDIGGGSSGGSISSGLLSGRSDNHGGGSDIQMTQSPSSLSASVGDRVTITCSASSSVYYMYWFQQKPGKAPKLWIYSTSNLASGVPSRFSGSGSGTDYTLTISSMQPEDFATYYCQQRRNYPYTFGQGTKLEIKRTVAAPSVFIFPPSDEQLKSGTASVVCLLNNFYPREAKVQWKVDNALQSGNSQESVTEQDSKDSTYSLSSTLTLSKADYEKHKVYACEVTHQGLSSPVTKSFNRGEC

SEQ ID NO: 3554 - protein, 257 aa, Artificial Sequence
  source: /note="Description of Artificial Sequence: Synthetic light chain variable domain"
QFCPWSYYLIGDCDIGGGSSGGSAVGLLAPPGGLSGRSDNHGGSDIQMTQSPSSLSASVGDRVTITCSASSSVYYMYWFQQKPGKAPKLWIYSTSNLASGVPSRFSGSGSGTDYTLTISSMQPEDFATYYCQQRRNYPYTFGQGTKLEIKRTVAAPSVFIFPPSDEQLKSGTASVVCLLNNFYPREAKVQWKVDNALQSGNSQESVTEQDSKDSTYSLSSTLTLSKADYEKHKVYACEVTHQGLSSPVTKSFNRGEC

SEQ ID NO: 3555 - protein, 253 aa, Artificial Sequence
  source: /note="Description of Artificial Sequence: Synthetic light chain variable domain"
NLCTEHSAALDCRSYGGGSSGGSISSGLLSGRSDNHGGGSDIQMTQSPSSLSASVGDRVTITCSASSSVYYMYWFQQKPGKAPKLWIYSTSNLASGVPSRFSGSGSGTDYTLTISSMQPEDFATYYCQQRRNYPYTFGQGTKLEIKRTVAAPSVFIFPPSDEQLKSGTASVVCLLNNFYPREAKVQWKVDNALQSGNSQESVTEQDSKDSTYSLSSTLTLSKADYEKHKVYACEVTHQGLSSPVTKSFNRGEC

SEQ ID NO: 3556 - protein, 257 aa, Artificial Sequence
  source: /note="Description of Artificial Sequence: Synthetic light chain variable domain"
NLCTEHSAALDCRSYGGGSSGGSAVGLLAPPGGLSGRSDNHGGSDIQMTQSPSSLSASVGDRVTITCSASSSVYYMYWFQQKPGKAPKLWIYSTSNLASGVPSRFSGSGSGTDYTLTISSMQPEDFATYYCQQRRNYPYTFGQGTKLEIKRTVAAPSVFIFPPSDEQLKSGTASVVCLLNNFYPREAKVQWKVDNALQSGNSQESVTEQDSKDSTYSLSSTLTLSKADYEKHKVYACEVTHQGLSSPVTKSFNRGEC

SEQ ID NO: 3557 - protein, 248 aa, Artificial Sequence
  source: /note="Description of Artificial Sequence: Synthetic light chain variable domain"
CTEHSFALDCGGGSSGGSISSGLLSGRSDNHGGGSDIQMTQSPSSLSASVGDRVTITCSASSSVYYMYWFQQKPGKAPKLWIYSTSNLASGVPSRFSGSGSGTDYTLTISSMQPEDFATYYCQQRRNYPYTFGQGTKLEIKRTVAAPSVFIFPPSDEQLKSGTASVVCLLNNFYPREAKVQWKVDNALQSGNSQESVTEQDSKDSTYSLSSTLTLSKADYEKHKVYACEVTHQGLSSPVTKSFNRGEC

SEQ ID NO: 3558 - protein, 252 aa, Artificial Sequence
  source: /note="Description of Artificial Sequence: Synthetic light chain variable domain"
CTEHSFALDCGGGSSGGSAVGLLAPPGGLSGRSDNHGGSDIQMTQSPSSLSASVGDRVTITCSASSSVYYMYWFQQKPGKAPKLWIYSTSNLASGVPSRFSGSGSGTDYTLTISSMQPEDFATYYCQQRRNYPYTFGQGTKLEIKRTVAAPSVFIFPPSDEQLKSGTASVVCLLNNFYPREAKVQWKVDNALQSGNSQESVTEQDSKDSTYSLSSTLTLSKADYEKHKVYACEVTHQGLSSPVTKSFNRGEC

SEQ ID NO: 3559 - protein, 253 aa, Artificial Sequence
  source: /note="Description of Artificial Sequence: Synthetic light chain variable domain"
NLCTEHSAALDCRSYGGGSSGGSISSGLLSGRSANPGGGSDIQMTQSPSSLSASVGDRVTITCSASSSVYYMYWFQQKPGKAPKLWIYSTSNLASGVPSRFSGSGSGTDYTLTISSMQPEDFATYYCQQRRNYPYTFGQGTKLEIKRTVAAPSVFIFPPSDEQLKSGTASVVCLLNNFYPREAKVQWKVDNALQSGNSQESVTEQDSKDSTYSLSSTLTLSKADYEKHKVYACEVTHQGLSSPVTKSFNRGEC

SEQ ID NO: 3560 - protein, 260 aa, Artificial Sequence
  source: /note="Description of Artificial Sequence: Synthetic light chain variable domain"
QGQSGQGNLCTEHSAALDCRSYGGGSSGGSISSGLLSGRSANPGGGSDIQMTQSPSSLSASVGDRVTITCSASSSVYYMYWFQQKPGKAPKLWIYSTSNLASGVPSRFSGSGSGTDYTLTISSMQPEDFATYYCQQRRNYPYTFGQGTKLEIKRTVAAPSVFIFPPSDEQLKSGTASVVCLLNNFYPREAKVQWKVDNALQSGNSQESVTEQDSKDSTYSLSSTLTLSKADYEKHKVYACEVTHQGLSSPVTKSFNRGEC

SEQ ID NO: 3561 - protein, 257 aa, Artificial Sequence
  source: /note="Description of Artificial Sequence: Synthetic light chain variable domain"
NLCTEHSAALDCRSYGGGSSGGSAVGLLAPPGGLSGRSDNPGGSDIQMTQSPSSLSASVGDRVTITCSASSSVYYMYWFQQKPGKAPKLWIYSTSNLASGVPSRFSGSGSGTDYTLTISSMQPEDFATYYCQQRRNYPYTFGQGTKLEIKRTVAAPSVFIFPPSDEQLKSGTASVVCLLNNFYPREAKVQWKVDNALQSGNSQESVTEQDSKDSTYSLSSTLTLSKADYEKHKVYACEVTHQGLSSPVTKSFNRGEC

SEQ ID NO: 3562 - protein, 264 aa, Artificial Sequence
  source: /note="Description of Artificial Sequence: Synthetic light chain variable domain"
QGQSGQGNLCTEHSAALDCRSYGGGSSGGSAVGLLAPPGGLSGRSDNPGGSDIQMTQSPSSLSASVGDRVTITCSASSSVYYMYWFQQKPGKAPKLWIYSTSNLASGVPSRFSGSGSGTDYTLTISSMQPEDFATYYCQQRRNYPYTFGQGTKLEIKRTVAAPSVFIFPPSDEQLKSGTASVVCLLNNFYPREAKVQWKVDNALQSGNSQESVTEQDSKDSTYSLSSTLTLSKADYEKHKVYACEVTHQGLSSPVTKSFNRGEC

SEQ ID NO: 3563 - protein, 106 aa, Artificial Sequence
  source: /note="Description of Artificial Sequence: Synthetic light chain variable domain"
DIQMTQSPSSLSASVGDRVTITCSASSSVYYMYWFQQKPGKAPKLWIYSTSNLASGVPSRFSGSGSGTDYTLTISSMQPEDFATYYCQQRRNYPYTFGQGTKLEIK

SEQ ID NO: 3564 - protein, 253 aa, Artificial Sequence
  source: /note="Description of Artificial Sequence: Synthetic light chain variable domain"
NLCTEHSAALDCRSYGGGSSGGSISSGLLSGRSDNPGGGSDIQMTQSPSSLSASVGDRVTITCSASSSVYYMYWFQQKPGKAPKLWIYSTSNLASGVPSRFSGSGSGTDYTLTISSMQPEDFATYYCQQRRNYPYTFGQGTKLEIKRTVAAPSVFIFPPSDEQLKSGTASVVCLLNNFYPREAKVQWKVDNALQSGNSQESVTEQDSKDSTYSLSSTLTLSKADYEKHKVYACEVTHQGLSSPVTKSFNRGEC

SEQ ID NO: 3565 - protein, 260 aa, Artificial Sequence
  source: /note="Description of Artificial Sequence: Synthetic light chain variable domain"
QGQSGQGNLCTEHSAALDCRSYGGGSSGGSISSGLLSGRSDNPGGGSDIQMTQSPSSLSASVGDRVTITCSASSSVYYMYWFQQKPGKAPKLWIYSTSNLASGVPSRFSGSGSGTDYTLTISSMQPEDFATYYCQQRRNYPYTFGQGTKLEIKRTVAAPSVFIFPPSDEQLKSGTASVVCLLNNFYPREAKVQWKVDNALQSGNSQESVTEQDSKDSTYSLSSTLTLSKADYEKHKVYACEVTHQGLSSPVTKSFNRGEC

SEQ ID NO: 3566 - protein, 257 aa, Artificial Sequence
  source: /note="Description of Artificial Sequence: Synthetic light chain variable domain"
NLCTEHSAALDCRSYGGGSSGGSAVGLLAPPGGLSGRSANPGGSDIQMTQSPSSLSASVGDRVTITCSASSSVYYMYWFQQKPGKAPKLWIYSTSNLASGVPSRFSGSGSGTDYTLTISSMQPEDFATYYCQQRRNYPYTFGQGTKLEIKRTVAAPSVFIFPPSDEQLKSGTASVVCLLNNFYPREAKVQWKVDNALQSGNSQESVTEQDSKDSTYSLSSTLTLSKADYEKHKVYACEVTHQGLSSPVTKSFNRGEC

SEQ ID NO: 3567 - protein, 264 aa, Artificial Sequence
  source: /note="Description of Artificial Sequence: Synthetic light chain variable domain"
QGQSGQGNLCTEHSAALDCRSYGGGSSGGSAVGLLAPPGGLSGRSANPGGSDIQMTQSPSSLSASVGDRVTITCSASSSVYYMYWFQQKPGKAPKLWIYSTSNLASGVPSRFSGSGSGTDYTLTISSMQPEDFATYYCQQRRNYPYTFGQGTKLEIKRTVAAPSVFIFPPSDEQLKSGTASVVCLLNNFYPREAKVQWKVDNALQSGNSQESVTEQDSKDSTYSLSSTLTLSKADYEKHKVYACEVTHQGLSSPVTKSFNRGEC

SEQ ID NO: 3568 - protein, 248 aa, Artificial Sequence
  source: /note="Description of Artificial Sequence: Synthetic light chain variable domain"
CTEHSFALDCGGGSSGGSISSGLLSGRSDNPGGGSDIQMTQSPSSLSASVGDRVTITCSASSSVYYMYWFQQKPGKAPKLWIYSTSNLASGVPSRFSGSGSGTDYTLTISSMQPEDFATYYCQQRRNYPYTFGQGTKLEIKRTVAAPSVFIFPPSDEQLKSGTASVVCLLNNFYPREAKVQWKVDNALQSGNSQESVTEQDSKDSTYSLSSTLTLSKADYEKHKVYACEVTHQGLSSPVTKSFNRGEC

SEQ ID NO: 3569 - protein, 255 aa, Artificial Sequence
  source: /note="Description of Artificial Sequence: Synthetic light chain variable domain"
QGQSGQGCTEHSFALDCGGGSSGGSISSGLLSGRSDNPGGGSDIQMTQSPSSLSASVGDRVTITCSASSSVYYMYWFQQKPGKAPKLWIYSTSNLASGVPSRFSGSGSGTDYTLTISSMQPEDFATYYCQQRRNYPYTFGQGTKLEIKRTVAAPSVFIFPPSDEQLKSGTASVVCLLNNFYPREAKVQWKVDNALQSGNSQESVTEQDSKDSTYSLSSTLTLSKADYEKHKVYACEVTHQGLSSPVTKSFNRGEC

SEQ ID NO: 3570 - protein, 252 aa, Artificial Sequence
  source: /note="Description of Artificial Sequence: Synthetic light chain variable domain"
CTEHSFALDCGGGSSGGSAVGLLAPPGGLSGRSANPGGSDIQMTQSPSSLSASVGDRVTITCSASSSVYYMYWFQQKPGKAPKLWIYSTSNLASGVPSRFSGSGSGTDYTLTISSMQPEDFATYYCQQRRNYPYTFGQGTKLEIKRTVAAPSVFIFPPSDEQLKSGTASVVCLLNNFYPREAKVQWKVDNALQSGNSQESVTEQDSKDSTYSLSSTLTLSKADYEKHKVYACEVTHQGLSSPVTKSFNRGEC

SEQ ID NO: 3571 - protein, 259 aa, Artificial Sequence
  source: /note="Description of Artificial Sequence: Synthetic light chain variable domain"
QGQSGQGCTEHSFALDCGGGSSGGSAVGLLAPPGGLSGRSANPGGSDIQMTQSPSSLSASVGDRVTITCSASSSVYYMYWFQQKPGKAPKLWIYSTSNLASGVPSRFSGSGSGTDYTLTISSMQPEDFATYYCQQRRNYPYTFGQGTKLEIKRTVAAPSVFIFPPSDEQLKSGTASVVCLLNNFYPREAKVQWKVDNALQSGNSQESVTEQDSKDSTYSLSSTLTLSKADYEKHKVYACEVTHQGLSSPVTKSFNRGEC

SEQ ID NO: 3572 - protein, 248 aa, Artificial Sequence
  source: /note="Description of Artificial Sequence: Synthetic light chain variable domain"
CTEHSFALDCGGGSSGGSISSGLLSGRSANPGGGSDIQMTQSPSSLSASVGDRVTITCSASSSVYYMYWFQQKPGKAPKLWIYSTSNLASGVPSRFSGSGSGTDYTLTISSMQPEDFATYYCQQRRNYPYTFGQGTKLEIKRTVAAPSVFIFPPSDEQLKSGTASVVCLLNNFYPREAKVQWKVDNALQSGNSQESVTEQDSKDSTYSLSSTLTLSKADYEKHKVYACEVTHQGLSSPVTKSFNRGEC

SEQ ID NO: 3573 - protein, 255 aa, Artificial Sequence
  source: /note="Description of Artificial Sequence: Synthetic light chain variable domain"
QGQSGQGCTEHSFALDCGGGSSGGSISSGLLSGRSANPGGGSDIQMTQSPSSLSASVGDRVTITCSASSSVYYMYWFQQKPGKAPKLWIYSTSNLASGVPSRFSGSGSGTDYTLTISSMQPEDFATYYCQQRRNYPYTFGQGTKLEIKRTVAAPSVFIFPPSDEQLKSGTASVVCLLNNFYPREAKVQWKVDNALQSGNSQESVTEQDSKDSTYSLSSTLTLSKADYEKHKVYACEVTHQGLSSPVTKSFNRGEC

SEQ ID NO: 3574 - protein, 252 aa, Artificial Sequence
  source: /note="Description of Artificial Sequence: Synthetic light chain variable domain"
CTEHSFALDCGGGSSGGSAVGLLAPPGGLSGRSDNPGGSDIQMTQSPSSLSASVGDRVTITCSASSSVYYMYWFQQKPGKAPKLWIYSTSNLASGVPSRFSGSGSGTDYTLTISSMQPEDFATYYCQQRRNYPYTFGQGTKLEIKRTVAAPSVFIFPPSDEQLKSGTASVVCLLNNFYPREAKVQWKVDNALQSGNSQESVTEQDSKDSTYSLSSTLTLSKADYEKHKVYACEVTHQGLSSPVTKSFNRGEC

SEQ ID NO: 3575 - protein, 259 aa, Artificial Sequence
  source: /note="Description of Artificial Sequence: Synthetic light chain variable domain"
QGQSGQGCTEHSFALDCGGGSSGGSAVGLLAPPGGLSGRSDNPGGSDIQMTQSPSSLSASVGDRVTITCSASSSVYYMYWFQQKPGKAPKLWIYSTSNLASGVPSRFSGSGSGTDYTLTISSMQPEDFATYYCQQRRNYPYTFGQGTKLEIKRTVAAPSVFIFPPSDEQLKSGTASVVCLLNNFYPREAKVQWKVDNALQSGNSQESVTEQDSKDSTYSLSSTLTLSKADYEKHKVYACEVTHQGLSSPVTKSFNRGEC

SEQ ID NO: 3576 - protein, 253 aa, Artificial Sequence
  source: /note="Description of Artificial Sequence: Synthetic light chain variable domain"
NLCTEHSAALDCRSYGGGSSGGSISSGLLSGRSDIHGGGSDIQMTQSPSSLSASVGDRVTITCSASSSVYYMYWFQQKPGKAPKLWIYSTSNLASGVPSRFSGSGSGTDYTLTISSMQPEDFATYYCQQRRNYPYTFGQGTKLEIKRTVAAPSVFIFPPSDEQLKSGTASVVCLLNNFYPREAKVQWKVDNALQSGNSQESVTEQDSKDSTYSLSSTLTLSKADYEKHKVYACEVTHQGLSSPVTKSFNRGEC

SEQ ID NO: 3577 - protein, 260 aa, Artificial Sequence
  source: /note="Description of Artificial Sequence: Synthetic light chain variable domain"
QGQSGQGNLCTEHSAALDCRSYGGGSSGGSISSGLLSGRSDIHGGGSDIQMTQSPSSLSASVGDRVTITCSASSSVYYMYWFQQKPGKAPKLWIYSTSNLASGVPSRFSGSGSGTDYTLTISSMQPEDFATYYCQQRRNYPYTFGQGTKLEIKRTVAAPSVFIFPPSDEQLKSGTASVVCLLNNFYPREAKVQWKVDNALQSGNSQESVTEQDSKDSTYSLSSTLTLSKADYEKHKVYACEVTHQGLSSPVTKSFNRGEC

SEQ ID NO: 3578 - protein, 253 aa, Artificial Sequence
  source: /note="Description of Artificial Sequence: Synthetic light chain variable domain"
NLCTEHSAALDCRSYGGGSSGGSISSGLLSGRSDQHGGGSDIQMTQSPSSLSASVGDRVTITCSASSSVYYMYWFQQKPGKAPKLWIYSTSNLASGVPSRFSGSGSGTDYTLTISSMQPEDFATYYCQQRRNYPYTFGQGTKLEIKRTVAAPSVFIFPPSDEQLKSGTASVVCLLNNFYPREAKVQWKVDNALQSGNSQESVTEQDSKDSTYSLSSTLTLSKADYEKHKVYACEVTHQGLSSPVTKSFNRGEC

SEQ ID NO: 3579 - protein, 260 aa, Artificial Sequence
  source: /note="Description of Artificial Sequence: Synthetic light chain variable domain"
QGQSGQGNLCTEHSAALDCRSYGGGSSGGSISSGLLSGRSDQHGGGSDIQMTQSPSSLSASVGDRVTITCSASSSVYYMYWFQQKPGKAPKLWIYSTSNLASGVPSRFSGSGSGTDYTLTISSMQPEDFATYYCQQRRNYPYTFGQGTKLEIKRTVAAPSVFIFPPSDEQLKSGTASVVCLLNNFYPREAKVQWKVDNALQSGNSQESVTEQDSKDSTYSLSSTLTLSKADYEKHKVYACEVTHQGLSSPVTKSFNRGEC

SEQ ID NO: 3580 - protein, 253 aa, Artificial Sequence
  source: /note="Description of Artificial Sequence: Synthetic light chain variable domain"
NLCTEHSAALDCRSYGGGSSGGSISSGLLSGRSANIGGGSDIQMTQSPSSLSASVGDRVTITCSASSSVYYMYWFQQKPGKAPKLWIYSTSNLASGVPSRFSGSGSGTDYTLTISSMQPEDFATYYCQQRRNYPYTFGQGTKLEIKRTVAAPSVFIFPPSDEQLKSGTASVVCLLNNFYPREAKVQWKVDNALQSGNSQESVTEQDSKDSTYSLSSTLTLSKADYEKHKVYACEVTHQGLSSPVTKSFNRGEC

SEQ ID NO: 3581 - protein, 260 aa, Artificial Sequence
  source: /note="Description of Artificial Sequence: Synthetic light chain variable domain"
QGQSGQGNLCTEHSAALDCRSYGGGSSGGSISSGLLSGRSANIGGGSDIQMTQSPSSLSASVGDRVTITCSASSSVYYMYWFQQKPGKAPKLWIYSTSNLASGVPSRFSGSGSGTDYTLTISSMQPEDFATYYCQQRRNYPYTFGQGTKLEIKRTVAAPSVFIFPPSDEQLKSGTASVVCLLNNFYPREAKVQWKVDNALQSGNSQESVTEQDSKDSTYSLSSTLTLSKADYEKHKVYACEVTHQGLSSPVTKSFNRGEC

SEQ ID NO: 3582 - protein, 257 aa, Artificial Sequence
  source: /note="Description of Artificial Sequence: Synthetic light chain variable domain"
NLCTEHSAALDCRSYGGGSSGGSAVGLLAPPGGLSGRSDIHGGSDIQMTQSPSSLSASVGDRVTITCSASSSVYYMYWFQQKPGKAPKLWIYSTSNLASGVPSRFSGSGSGTDYTLTISSMQPEDFATYYCQQRRNYPYTFGQGTKLEIKRTVAAPSVFIFPPSDEQLKSGTASVVCLLNNFYPREAKVQWKVDNALQSGNSQESVTEQDSKDSTYSLSSTLTLSKADYEKHKVYACEVTHQGLSSPVTKSFNRGEC

SEQ ID NO: 3583 - protein, 264 aa, Artificial Sequence
  source: /note="Description of Artificial Sequence: Synthetic light chain variable domain"
QGQSGQGNLCTEHSAALDCRSYGGGSSGGSAVGLLAPPGGLSGRSDIHGGSDIQMTQSPSSLSASVGDRVTITCSASSSVYYMYWFQQKPGKAPKLWIYSTSNLASGVPSRFSGSGSGTDYTLTISSMQPEDFATYYCQQRRNYPYTFGQGTKLEIKRTVAAPSVFIFPPSDEQLKSGTASVVCLLNNFYPREAKVQWKVDNALQSGNSQESVTEQDSKDSTYSLSSTLTLSKADYEKHKVYACEVTHQGLSSPVTKSFNRGEC

SEQ ID NO: 3584 - protein, 257 aa, Artificial Sequence
  source: /note="Description of Artificial Sequence: Synthetic light chain variable domain"
NLCTEHSAALDCRSYGGGSSGGSAVGLLAPPGGLSGRSDQHGGSDIQMTQSPSSLSASVGDRVTITCSASSSVYYMYWFQQKPGKAPKLWIYSTSNLASGVPSRFSGSGSGTDYTLTISSMQPEDFATYYCQQRRNYPYTFGQGTKLEIKRTVAAPSVFIFPPSDEQLKSGTASVVCLLNNFYPREAKVQWKVDNALQSGNSQESVTEQDSKDSTYSLSSTLTLSKADYEKHKVYACEVTHQGLSSPVTKSFNRGEC

SEQ ID NO: 3585 - protein, 264 aa, Artificial Sequence
  source: /note="Description of Artificial Sequence: Synthetic light chain variable domain"
QGQSGQGNLCTEHSAALDCRSYGGGSSGGSAVGLLAPPGGLSGRSDQHGGSDIQMTQSPSSLSASVGDRVTITCSASSSVYYMYWFQQKPGKAPKLWIYSTSNLASGVPSRFSGSGSGTDYTLTISSMQPEDFATYYCQQRRNYPYTFGQGTKLEIKRTVAAPSVFIFPPSDEQLKSGTASVVCLLNNFYPREAKVQWKVDNALQSGNSQESVTEQDSKDSTYSLSSTLTLSKADYEKHKVYACEVTHQGLSSPVTKSFNRGEC

SEQ ID NO: 3586 - protein, 257 aa, Artificial Sequence
  source: /note="Description of Artificial Sequence: Synthetic light chain variable domain"
NLCTEHSAALDCRSYGGGSSGGSAVGLLAPPGGLSGRSANIGGSDIQMTQSPSSLSASVGDRVTITCSASSSVYYMYWFQQKPGKAPKLWIYSTSNLASGVPSRFSGSGSGTDYTLTISSMQPEDFATYYCQQRRNYPYTFGQGTKLEIKRTVAAPSVFIFPPSDEQLKSGTASVVCLLNNFYPREAKVQWKVDNALQSGNSQESVTEQDSKDSTYSLSSTLTLSKADYEKHKVYACEVTHQGLSSPVTKSFNRGEC

SEQ ID NO: 3587 - protein, 264 aa, Artificial Sequence
  source: /note="Description of Artificial Sequence: Synthetic light chain variable domain"
QGQSGQGNLCTEHSAALDCRSYGGGSSGGSAVGLLAPPGGLSGRSANIGGSDIQMTQSPSSLSASVGDRVTITCSASSSVYYMYWFQQKPGKAPKLWIYSTSNLASGVPSRFSGSGSGTDYTLTISSMQPEDFATYYCQQRRNYPYTFGQGTKLEIKRTVAAPSVFIFPPSDEQLKSGTASVVCLLNNFYPREAKVQWKVDNALQSGNSQESVTEQDSKDSTYSLSSTLTLSKADYEKHKVYACEVTHQGLSSPVTKSFNRGEC

SEQ ID NO: 3588 - protein, 248 aa, Artificial Sequence
  source: /note="Description of Artificial Sequence: Synthetic light chain variable domain"
CTEHSFALDCGGGSSGGSISSGLLSGRSDIHGGGSDIQMTQSPSSLSASVGDRVTITCSASSSVYYMYWFQQKPGKAPKLWIYSTSNLASGVPSRFSGSGSGTDYTLTISSMQPEDFATYYCQQRRNYPYTFGQGTKLEIKRTVAAPSVFIFPPSDEQLKSGTASVVCLLNNFYPREAKVQWKVDNALQSGNSQESVTEQDSKDSTYSLSSTLTLSKADYEKHKVYACEVTHQGLSSPVTKSFNRGEC

SEQ ID NO: 3589 - protein, 255 aa, Artificial Sequence
  source: /note="Description of Artificial Sequence: Synthetic light chain variable domain"
QGQSGQGCTEHSFALDCGGGSSGGSISSGLLSGRSDIHGGGSDIQMTQSPSSLSASVGDRVTITCSASSSVYYMYWFQQKPGKAPKLWIYSTSNLASGVPSRFSGSGSGTDYTLTISSMQPEDFATYYCQQRRNYPYTFGQGTKLEIKRTVAAPSVFIFPPSDEQLKSGTASVVCLLNNFYPREAKVQWKVDNALQSGNSQESVTEQDSKDSTYSLSSTLTLSKADYEKHKVYACEVTHQGLSSPVTKSFNRGEC

SEQ ID NO: 3590 - protein, 248 aa, Artificial Sequence
  source: /note="Description of Artificial Sequence: Synthetic light chain variable domain"
CTEHSFALDCGGGSSGGSISSGLLSGRSDQHGGGSDIQMTQSPSSLSASVGDRVTITCSASSSVYYMYWFQQKPGKAPKLWIYSTSNLASGVPSRFSGSGSGTDYTLTISSMQPEDFATYYCQQRRNYPYTFGQGTKLEIKRTVAAPSVFIFPPSDEQLKSGTASVVCLLNNFYPREAKVQWKVDNALQSGNSQESVTEQDSKDSTYSLSSTLTLSKADYEKHKVYACEVTHQGLSSPVTKSFNRGEC

SEQ ID NO: 3591 - protein, 255 aa, Artificial Sequence
  source: /note="Description of Artificial Sequence: Synthetic light chain variable domain"
QGQSGQGCTEHSFALDCGGGSSGGSISSGLLSGRSDQHGGGSDIQMTQSPSSLSASVGDRVTITCSASSSVYYMYWFQQKPGKAPKLWIYSTSNLASGVPSRFSGSGSGTDYTLTISSMQPEDFATYYCQQRRNYPYTFGQGTKLEIKRTVAAPSVFIFPPSDEQLKSGTASVVCLLNNFYPREAKVQWKVDNALQSGNSQESVTEQDSKDSTYSLSSTLTLSKADYEKHKVYACEVTHQGLSSPVTKSFNRGEC

SEQ ID NO: 3592 - protein, 248 aa, Artificial Sequence
  source: /note="Description of Artificial Sequence: Synthetic light chain variable domain"
CTEHSFALDCGGGSSGGSISSGLLSGRSANIGGGSDIQMTQSPSSLSASVGDRVTITCSASSSVYYMYWFQQKPGKAPKLWIYSTSNLASGVPSRFSGSGSGTDYTLTISSMQPEDFATYYCQQRRNYPYTFGQGTKLEIKRTVAAPSVFIFPPSDEQLKSGTASVVCLLNNFYPREAKVQWKVDNALQSGNSQESVTEQDSKDSTYSLSSTLTLSKADYEKHKVYACEVTHQGLSSPVTKSFNRGEC

SEQ ID NO: 3593 - protein, 255 aa, Artificial Sequence
  source: /note="Description of Artificial Sequence: Synthetic light chain variable domain"
QGQSGQGCTEHSFALDCGGGSSGGSISSGLLSGRSANIGGGSDIQMTQSPSSLSASVGDRVTITCSASSSVYYMYWFQQKPGKAPKLWIYSTSNLASGVPSRFSGSGSGTDYTLTISSMQPEDFATYYCQQRRNYPYTFGQGTKLEIKRTVAAPSVFIFPPSDEQLKSGTASVVCLLNNFYPREAKVQWKVDNALQSGNSQESVTEQDSKDSTYSLSSTLTLSKADYEKHKVYACEVTHQGLSSPVTKSFNRGEC

SEQ ID NO: 3594 - protein, 252 aa, Artificial Sequence
  source: /note="Description of Artificial Sequence: Synthetic light chain variable domain"
CTEHSFALDCGGGSSGGSAVGLLAPPGGLSGRSDIHGGSDIQMTQSPSSLSASVGDRVTITCSASSSVYYMYWFQQKPGKAPKLWIYSTSNLASGVPSRFSGSGSGTDYTLTISSMQPEDFATYYCQQRRNYPYTFGQGTKLEIKRTVAAPSVFIFPPSDEQLKSGTASVVCLLNNFYPREAKVQWKVDNALQSGNSQESVTEQDSKDSTYSLSSTLTLSKADYEKHKVYACEVTHQGLSSPVTKSFNRGEC

SEQ ID NO: 3595 - protein, 259 aa, Artificial Sequence
  source: /note="Description of Artificial Sequence: Synthetic light chain variable domain"
QGQSGQGCTEHSFALDCGGGSSGGSAVGLLAPPGGLSGRSDIHGGSDIQMTQSPSSLSASVGDRVTITCSASSSVYYMYWFQQKPGKAPKLWIYSTSNLASGVPSRFSGSGSGTDYTLTISSMQPEDFATYYCQQRRNYPYTFGQGTKLEIKRTVAAPSVFIFPPSDEQLKSGTASVVCLLNNFYPREAKVQWKVDNALQSGNSQESVTEQDSKDSTYSLSSTLTLSKADYEKHKVYACEVTHQGLSSPVTKSFNRGEC

SEQ ID NO: 3596 - protein, 252 aa, Artificial Sequence
  source: /note="Description of Artificial Sequence: Synthetic light chain variable domain"
CTEHSFALDCGGGSSGGSAVGLLAPPGGLSGRSDQHGGSDIQMTQSPSSLSASVGDRVTITCSASSSVYYMYWFQQKPGKAPKLWIYSTSNLASGVPSRFSGSGSGTDYTLTISSMQPEDFATYYCQQRRNYPYTFGQGTKLEIKRTVAAPSVFIFPPSDEQLKSGTASVVCLLNNFYPREAKVQWKVDNALQSGNSQESVTEQDSKDSTYSLSSTLTLSKADYEKHKVYACEVTHQGLSSPVTKSFNRGEC

SEQ ID NO: 3597 - protein, 259 aa, Artificial Sequence
  source: /note="Description of Artificial Sequence: Synthetic light chain variable domain"
QGQSGQGCTEHSFALDCGGGSSGGSAVGLLAPPGGLSGRSDQHGGSDIQMTQSPSSLSASVGDRVTITCSASSSVYYMYWFQQKPGKAPKLWIYSTSNLASGVPSRFSGSGSGTDYTLTISSMQPEDFATYYCQQRRNYPYTFGQGTKLEIKRTVAAPSVFIFPPSDEQLKSGTASVVCLLNNFYPREAKVQWKVDNALQSGNSQESVTEQDSKDSTYSLSSTLTLSKADYEKHKVYACEVTHQGLSSPVTKSFNRGEC

SEQ ID NO: 3598 - protein, 252 aa, Artificial Sequence
  source: /note="Description of Artificial Sequence: Synthetic light chain variable domain"
CTEHSFALDCGGGSSGGSAVGLLAPPGGLSGRSANIGGSDIQMTQSPSSLSASVGDRVTITCSASSSVYYMYWFQQKPGKAPKLWIYSTSNLASGVPSRFSGSGSGTDYTLTISSMQPEDFATYYCQQRRNYPYTFGQGTKLEIKRTVAAPSVFIFPPSDEQLKSGTASVVCLLNNFYPREAKVQWKVDNALQSGNSQESVTEQDSKDSTYSLSSTLTLSKADYEKHKVYACEVTHQGLSSPVTKSFNRGEC

SEQ ID NO: 3599 - protein, 259 aa, Artificial Sequence
  source: /note="Description of Artificial Sequence: Synthetic light chain variable domain"
QGQSGQGCTEHSFALDCGGGSSGGSAVGLLAPPGGLSGRSANIGGSDIQMTQSPSSLSASVGDRVTITCSASSSVYYMYWFQQKPGKAPKLWIYSTSNLASGVPSRFSGSGSGTDYTLTISSMQPEDFATYYCQQRRNYPYTFGQGTKLEIKRTVAAPSVFIFPPSDEQLKSGTASVVCLLNNFYPREAKVQWKVDNALQSGNSQESVTEQDSKDSTYSLSSTLTLSKADYEKHKVYACEVTHQGLSSPVTKSFNRGEC

SEQ ID NO: 3600 - protein, 253 aa, Artificial Sequence
  source: /note="Description of Artificial Sequence: Synthetic light chain variable domain"
QFCPWSYYLIGDCDIGGGSSGGSISSGLLSGRSDIHGGGSDIQMTQSPSSLSASVGDRVTITCSASSSVYYMYWFQQKPGKAPKLWIYSTSNLASGVPSRFSGSGSGTDYTLTISSMQPEDFATYYCQQRRNYPYTFGQGTKLEIKRTVAAPSVFIFPPSDEQLKSGTASVVCLLNNFYPREAKVQWKVDNALQSGNSQESVTEQDSKDSTYSLSSTLTLSKADYEKHKVYACEVTHQGLSSPVTKSFNRGEC

SEQ ID NO: 3601 - protein, 260 aa, Artificial Sequence
  source: /note="Description of Artificial Sequence: Synthetic light chain variable domain"
QGQSGQGQFCPWSYYLIGDCDIGGGSSGGSISSGLLSGRSDIHGGGSDIQMTQSPSSLSASVGDRVTITCSASSSVYYMYWFQQKPGKAPKLWIYSTSNLASGVPSRFSGSGSGTDYTLTISSMQPEDFATYYCQQRRNYPYTFGQGTKLEIKRTVAAPSVFIFPPSDEQLKSGTASVVCLLNNFYPREAKVQWKVDNALQSGNSQESVTEQDSKDSTYSLSSTLTLSKADYEKHKVYACEVTHQGLSSPVTKSFNRGEC

SEQ ID NO: 3602 - protein, 257 aa, Artificial Sequence
  source: /note="Description of Artificial Sequence: Synthetic light chain variable domain"
QFCPWSYYLIGDCDIGGGSSGGSAVGLLAPPGGLSGRSDIHGGSDIQMTQSPSSLSASVGDRVTITCSASSSVYYMYWFQQKPGKAPKLWIYSTSNLASGVPSRFSGSGSGTDYTLTISSMQPEDFATYYCQQRRNYPYTFGQGTKLEIKRTVAAPSVFIFPPSDEQLKSGTASVVCLLNNFYPREAKVQWKVDNALQSGNSQESVTEQDSKDSTYSLSSTLTLSKADYEKHKVYACEVTHQGLSSPVTKSFNRGEC

SEQ ID NO: 3603 - protein, 264 aa, Artificial Sequence
  source: /note="Description of Artificial Sequence: Synthetic light chain variable domain"
QGQSGQGQFCPWSYYLIGDCDIGGGSSGGSAVGLLAPPGGLSGRSDIHGGSDIQMTQSPSSLSASVGDRVTITCSASSSVYYMYWFQQKPGKAPKLWIYSTSNLASGVPSRFSGSGSGTDYTLTISSMQPEDFATYYCQQRRNYPYTFGQGTKLEIKRTVAAPSVFIFPPSDEQLKSGTASVVCLLNNFYPREAKVQWKVDNALQSGNSQESVTEQDSKDSTYSLSSTLTLSKADYEKHKVYACEVTHQGLSSPVTKSFNRGEC

SEQ ID NO: 3604 - protein, 253 aa, Artificial Sequence
  source: /note="Description of Artificial Sequence: Synthetic light chain variable domain"
QFCPWSYYLIGDCDIGGGSSGGSISSGLLSGRSDQHGGGSDIQMTQSPSSLSASVGDRVTITCSASSSVYYMYWFQQKPGKAPKLWIYSTSNLASGVPSRFSGSGSGTDYTLTISSMQPEDFATYYCQQRRNYPYTFGQGTKLEIKRTVAAPSVFIFPPSDEQLKSGTASVVCLLNNFYPREAKVQWKVDNALQSGNSQESVTEQDSKDSTYSLSSTLTLSKADYEKHKVYACEVTHQGLSSPVTKSFNRGEC

SEQ ID NO: 3605 - protein, 260 aa, Artificial Sequence
  source: /note="Description of Artificial Sequence: Synthetic light chain variable domain"
QGQSGQGQFCPWSYYLIGDCDIGGGSSGGSISSGLLSGRSDQHGGGSDIQMTQSPSSLSASVGDRVTITCSASSSVYYMYWFQQKPGKAPKLWIYSTSNLASGVPSRFSGSGSGTDYTLTISSMQPEDFATYYCQQRRNYPYTFGQGTKLEIKRTVAAPSVFIFPPSDEQLKSGTASVVCLLNNFYPREAKVQWKVDNALQSGNSQESVTEQDSKDSTYSLSSTLTLSKADYEKHKVYACEVTHQGLSSPVTKSFNRGEC

SEQ ID NO: 3606 - protein, 257 aa, Artificial Sequence
  source: /note="Description of Artificial Sequence: Synthetic light chain variable domain"
QFCPWSYYLIGDCDIGGGSSGGSAVGLLAPPGGLSGRSDQHGGSDIQMTQSPSSLSASVGDRVTITCSASSSVYYMYWFQQKPGKAPKLWIYSTSNLASGVPSRFSGSGSGTDYTLTISSMQPEDFATYYCQQRRNYPYTFGQGTKLEIKRTVAAPSVFIFPPSDEQLKSGTASVVCLLNNFYPREAKVQWKVDNALQSGNSQESVTEQDSKDSTYSLSSTLTLSKADYEKHKVYACEVTHQGLSSPVTKSFNRGEC

SEQ ID NO: 3607 - protein, 264 aa, Artificial Sequence
  source: /note="Description of Artificial Sequence: Synthetic light chain variable domain"
QGQSGQGQFCPWSYYLIGDCDIGGGSSGGSAVGLLAPPGGLSGRSDQHGGSDIQMTQSPSSLSASVGDRVTITCSASSSVYYMYWFQQKPGKAPKLWIYSTSNLASGVPSRFSGSGSGTDYTLTISSMQPEDFATYYCQQRRNYPYTFGQGTKLEIKRTVAAPSVFIFPPSDEQLKSGTASVVCLLNNFYPREAKVQWKVDNALQSGNSQESVTEQDSKDSTYSLSSTLTLSKADYEKHKVYACEVTHQGLSSPVTKSFNRGEC

SEQ ID NO: 3608 - protein, 253 aa, Artificial Sequence
  source: /note="Description of Artificial Sequence: Synthetic light chain variable domain"
QFCPWSYYLIGDCDIGGGSSGGSISSGLLSGRSDNPGGGSDIQMTQSPSSLSASVGDRVTITCSASSSVYYMYWFQQKPGKAPKLWIYSTSNLASGVPSRFSGSGSGTDYTLTISSMQPEDFATYYCQQRRNYPYTFGQGTKLEIKRTVAAPSVFIFPPSDEQLKSGTASVVCLLNNFYPREAKVQWKVDNALQSGNSQESVTEQDSKDSTYSLSSTLTLSKADYEKHKVYACEVTHQGLSSPVTKSFNRGEC

SEQ ID NO: 3609 - protein, 260 aa, Artificial Sequence
  source: /note="Description of Artificial Sequence: Synthetic light chain variable domain"
QGQSGQGQFCPWSYYLIGDCDIGGGSSGGSISSGLLSGRSDNPGGGSDIQMTQSPSSLSASVGDRVTITCSASSSVYYMYWFQQKPGKAPKLWIYSTSNLASGVPSRFSGSGSGTDYTLTISSMQPEDFATYYCQQRRNYPYTFGQGTKLEIKRTVAAPSVFIFPPSDEQLKSGTASVVCLLNNFYPREAKVQWKVDNALQSGNSQESVTEQDSKDSTYSLSSTLTLSKADYEKHKVYACEVTHQGLSSPVTKSFNRGEC

SEQ ID NO: 3610 - protein, 257 aa, Artificial Sequence
  source: /note="Description of Artificial Sequence: Synthetic light chain variable domain"
QFCPWSYYLIGDCDIGGGSSGGSAVGLLAPPGGLSGRSDNPGGSDIQMTQSPSSLSASVGDRVTITCSASSSVYYMYWFQQKPGKAPKLWIYSTSNLASGVPSRFSGSGSGTDYTLTISSMQPEDFATYYCQQRRNYPYTFGQGTKLEIKRTVAAPSVFIFPPSDEQLKSGTASVVCLLNNFYPREAKVQWKVDNALQSGNSQESVTEQDSKDSTYSLSSTLTLSKADYEKHKVYACEVTHQGLSSPVTKSFNRGEC

SEQ ID NO: 3611 - protein, 264 aa, Artificial Sequence
  source: /note="Description of Artificial Sequence: Synthetic light chain variable domain"
QGQSGQGQFCPWSYYLIGDCDIGGGSSGGSAVGLLAPPGGLSGRSDNPGGSDIQMTQSPSSLSASVGDRVTITCSASSSVYYMYWFQQKPGKAPKLWIYSTSNLASGVPSRFSGSGSGTDYTLTISSMQPEDFATYYCQQRRNYPYTFGQGTKLEIKRTVAAPSVFIFPPSDEQLKSGTASVVCLLNNFYPREAKVQWKVDNALQSGNSQESVTEQDSKDSTYSLSSTLTLSKADYEKHKVYACEVTHQGLSSPVTKSFNRGEC

SEQ ID NO: 3612 - protein, 253 aa, Artificial Sequence
  source: /note="Description of Artificial Sequence: Synthetic light chain variable domain"
QFCPWSYYLIGDCDIGGGSSGGSISSGLLSGRSANPGGGSDIQMTQSPSSLSASVGDRVTITCSASSSVYYMYWFQQKPGKAPKLWIYSTSNLASGVPSRFSGSGSGTDYTLTISSMQPEDFATYYCQQRRNYPYTFGQGTKLEIKRTVAAPSVFIFPPSDEQLKSGTASVVCLLNNFYPREAKVQWKVDNALQSGNSQESVTEQDSKDSTYSLSSTLTLSKADYEKHKVYACEVTHQGLSSPVTKSFNRGEC

SEQ ID NO: 3613 - protein, 260 aa, Artificial Sequence
  source: /note="Description of Artificial Sequence: Synthetic light chain variable domain"
QGQSGQGQFCPWSYYLIGDCDIGGGSSGGSISSGLLSGRSANPGGGSDIQMTQSPSSLSASVGDRVTITCSASSSVYYMYWFQQKPGKAPKLWIYSTSNLASGVPSRFSGSGSGTDYTLTISSMQPEDFATYYCQQRRNYPYTFGQGTKLEIKRTVAAPSVFIFPPSDEQLKSGTASVVCLLNNFYPREAKVQWKVDNALQSGNSQESVTEQDSKDSTYSLSSTLTLSKADYEKHKVYACEVTHQGLSSPVTKSFNRGEC

SEQ ID NO: 3614 - protein, 257 aa, Artificial Sequence
  source: /note="Description of Artificial Sequence: Synthetic light chain variable domain"
QFCPWSYYLIGDCDIGGGSSGGSAVGLLAPPGGLSGRSANPGGSDIQMTQSPSSLSASVGDRVTITCSASSSVYYMYWFQQKPGKAPKLWIYSTSNLASGVPSRFSGSGSGTDYTLTISSMQPEDFATYYCQQRRNYPYTFGQGTKLEIKRTVAAPSVFIFPPSDEQLKSGTASVVCLLNNFYPREAKVQWKVDNALQSGNSQESVTEQDSKDSTYSLSSTLTLSKADYEKHKVYACEVTHQGLSSPVTKSFNRGEC

SEQ ID NO: 3615 - protein, 264 aa, Artificial Sequence
  source: /note="Description of Artificial Sequence: Synthetic light chain variable domain"
QGQSGQGQFCPWSYYLIGDCDIGGGSSGGSAVGLLAPPGGLSGRSANPGGSDIQMTQSPSSLSASVGDRVTITCSASSSVYYMYWFQQKPGKAPKLWIYSTSNLASGVPSRFSGSGSGTDYTLTISSMQPEDFATYYCQQRRNYPYTFGQGTKLEIKRTVAAPSVFIFPPSDEQLKSGTASVVCLLNNFYPREAKVQWKVDNALQSGNSQESVTEQDSKDSTYSLSSTLTLSKADYEKHKVYACEVTHQGLSSPVTKSFNRGEC

SEQ ID NO: 3616 - protein, 253 aa, Artificial Sequence
  source: /note="Description of Artificial Sequence: Synthetic light chain variable domain"
QFCPWSYYLIGDCDIGGGSSGGSISSGLLSGRSANIGGGSDIQMTQSPSSLSASVGDRVTITCSASSSVYYMYWFQQKPGKAPKLWIYSTSNLASGVPSRFSGSGSGTDYTLTISSMQPEDFATYYCQQRRNYPYTFGQGTKLEIKRTVAAPSVFIFPPSDEQLKSGTASVVCLLNNFYPREAKVQWKVDNALQSGNSQESVTEQDSKDSTYSLSSTLTLSKADYEKHKVYACEVTHQGLSSPVTKSFNRGEC

SEQ ID NO: 3617 - protein, 260 aa, Artificial Sequence
  source: /note="Description of Artificial Sequence: Synthetic light chain variable domain"
QGQSGQGQFCPWSYYLIGDCDIGGGSSGGSISSGLLSGRSANIGGGSDIQMTQSPSSLSASVGDRVTITCSASSSVYYMYWFQQKPGKAPKLWIYSTSNLASGVPSRFSGSGSGTDYTLTISSMQPEDFATYYCQQRRNYPYTFGQGTKLEIKRTVAAPSVFIFPPSDEQLKSGTASVVCLLNNFYPREAKVQWKVDNALQSGNSQESVTEQDSKDSTYSLSSTLTLSKADYEKHKVYACEVTHQGLSSPVTKSFNRGEC

SEQ ID NO: 3618 - protein, 257 aa, Artificial Sequence
  source: /note="Description of Artificial Sequence: Synthetic light chain variable domain"
QFCPWSYYLIGDCDIGGGSSGGSAVGLLAPPGGLSGRSANIGGSDIQMTQSPSSLSASVGDRVTITCSASSSVYYMYWFQQKPGKAPKLWIYSTSNLASGVPSRFSGSGSGTDYTLTISSMQPEDFATYYCQQRRNYPYTFGQGTKLEIKRTVAAPSVFIFPPSDEQLKSGTASVVCLLNNFYPREAKVQWKVDNALQSGNSQESVTEQDSKDSTYSLSSTLTLSKADYEKHKVYACEVTHQGLSSPVTKSFNRGEC

SEQ ID NO: 3619 - protein, 264 aa, Artificial Sequence
  source: /note="Description of Artificial Sequence: Synthetic light chain variable domain"
QGQSGQGQFCPWSYYLIGDCDIGGGSSGGSAVGLLAPPGGLSGRSANIGGSDIQMTQSPSSLSASVGDRVTITCSASSSVYYMYWFQQKPGKAPKLWIYSTSNLASGVPSRFSGSGSGTDYTLTISSMQPEDFATYYCQQRRNYPYTFGQGTKLEIKRTVAAPSVFIFPPSDEQLKSGTASVVCLLNNFYPREAKVQWKVDNALQSGNSQESVTEQDSKDSTYSLSSTLTLSKADYEKHKVYACEVTHQGLSSPVTKSFNRGEC

SEQ ID NO: 3620 - protein, 253 aa, Artificial Sequence
  source: /note="Description of Artificial Sequence: Synthetic light chain variable domain"
NLCTEHSFALDCRSYGGGSSGGSISSGLLSGRSDNHGGGSDIQMTQSPSSLSASVGDRVTITCSASSSVYYMYWFQQKPGKAPKLWIYSTSNLASGVPSRFSGSGSGTDYTLTISSMQPEDFATYYCQQRRNYPYTFGQGTKLEIKRTVAAPSVFIFPPSDEQLKSGTASVVCLLNNFYPREAKVQWKVDNALQSGNSQESVTEQDSKDSTYSLSSTLTLSKADYEKHKVYACEVTHQGLSSPVTKSFNRGEC

SEQ ID NO: 3621 - protein, 260 aa, Artificial Sequence
  source: /note="Description of Artificial Sequence: Synthetic light chain variable domain"
QGQSGQGNLCTEHSFALDCRSYGGGSSGGSISSGLLSGRSDNHGGGSDIQMTQSPSSLSASVGDRVTITCSASSSVYYMYWFQQKPGKAPKLWIYSTSNLASGVPSRFSGSGSGTDYTLTISSMQPEDFATYYCQQRRNYPYTFGQGTKLEIKRTVAAPSVFIFPPSDEQLKSGTASVVCLLNNFYPREAKVQWKVDNALQSGNSQESVTEQDSKDSTYSLSSTLTLSKADYEKHKVYACEVTHQGLSSPVTKSFNRGEC

SEQ ID NO: 3622 - protein, 257 aa, Artificial Sequence
  source: /note="Description of Artificial Sequence: Synthetic light chain variable domain"
NLCTEHSFALDCRSYGGGSSGGSAVGLLAPPGGLSGRSDNHGGSDIQMTQSPSSLSASVGDRVTITCSASSSVYYMYWFQQKPGKAPKLWIYSTSNLASGVPSRFSGSGSGTDYTLTISSMQPEDFATYYCQQRRNYPYTFGQGTKLEIKRTVAAPSVFIFPPSDEQLKSGTASVVCLLNNFYPREAKVQWKVDNALQSGNSQESVTEQDSKDSTYSLSSTLTLSKADYEKHKVYACEVTHQGLSSPVTKSFNRGEC

SEQ ID NO: 3623 - protein, 264 aa, Artificial Sequence
  source: /note="Description of Artificial Sequence: Synthetic light chain variable domain"
QGQSGQGNLCTEHSFALDCRSYGGGSSGGSAVGLLAPPGGLSGRSDNHGGSDIQMTQSPSSLSASVGDRVTITCSASSSVYYMYWFQQKPGKAPKLWIYSTSNLASGVPSRFSGSGSGTDYTLTISSMQPEDFATYYCQQRRNYPYTFGQGTKLEIKRTVAAPSVFIFPPSDEQLKSGTASVVCLLNNFYPREAKVQWKVDNALQSGNSQESVTEQDSKDSTYSLSSTLTLSKADYEKHKVYACEVTHQGLSSPVTKSFNRGEC

SEQ ID NO: 3624 - protein, 253 aa, Artificial Sequence
  source: /note="Description of Artificial Sequence: Synthetic light chain variable domain"
NLCTEHSFALDCRSYGGGSSGGSISSGLLSGRSDIHGGGSDIQMTQSPSSLSASVGDRVTITCSASSSVYYMYWFQQKPGKAPKLWIYSTSNLASGVPSRFSGSGSGTDYTLTISSMQPEDFATYYCQQRRNYPYTFGQGTKLEIKRTVAAPSVFIFPPSDEQLKSGTASVVCLLNNFYPREAKVQWKVDNALQSGNSQESVTEQDSKDSTYSLSSTLTLSKADYEKHKVYACEVTHQGLSSPVTKSFNRGEC

SEQ ID NO: 3625 - protein, 260 aa, Artificial Sequence
  source: /note="Description of Artificial Sequence: Synthetic light chain variable domain"
QGQSGQGNLCTEHSFALDCRSYGGGSSGGSISSGLLSGRSDIHGGGSDIQMTQSPSSLSASVGDRVTITCSASSSVYYMYWFQQKPGKAPKLWIYSTSNLASGVPSRFSGSGSGTDYTLTISSMQPEDFATYYCQQRRNYPYTFGQGTKLEIKRTVAAPSVFIFPPSDEQLKSGTASVVCLLNNFYPREAKVQWKVDNALQSGNSQESVTEQDSKDSTYSLSSTLTLSKADYEKHKVYACEVTHQGLSSPVTKSFNRGEC

SEQ ID NO: 3626 - protein, 257 aa, Artificial Sequence
  source: /note="Description of Artificial Sequence: Synthetic light chain variable domain"
NLCTEHSFALDCRSYGGGSSGGSAVGLLAPPGGLSGRSDIHGGSDIQMTQSPSSLSASVGDRVTITCSASSSVYYMYWFQQKPGKAPKLWIYSTSNLASGVPSRFSGSGSGTDYTLTISSMQPEDFATYYCQQRRNYPYTFGQGTKLEIKRTVAAPSVFIFPPSDEQLKSGTASVVCLLNNFYPREAKVQWKVDNALQSGNSQESVTEQDSKDSTYSLSSTLTLSKADYEKHKVYACEVTHQGLSSPVTKSFNRGEC

SEQ ID NO: 3627 - protein, 264 aa, Artificial Sequence
  source: /note="Description of Artificial Sequence: Synthetic light chain variable domain"
QGQSGQGNLCTEHSFALDCRSYGGGSSGGSAVGLLAPPGGLSGRSDIHGGSDIQMTQSPSSLSASVGDRVTITCSASSSVYYMYWFQQKPGKAPKLWIYSTSNLASGVPSRFSGSGSGTDYTLTISSMQPEDFATYYCQQRRNYPYTFGQGTKLEIKRTVAAPSVFIFPPSDEQLKSGTASVVCLLNNFYPREAKVQWKVDNALQSGNSQESVTEQDSKDSTYSLSSTLTLSKADYEKHKVYACEVTHQGLSSPVTKSFNRGEC

SEQ ID NO: 3628 - protein, 253 aa, Artificial Sequence
  source: /note="Description of Artificial Sequence: Synthetic light chain variable domain"
NLCTEHSFALDCRSYGGGSSGGSISSGLLSGRSDQHGGGSDIQMTQSPSSLSASVGDRVTITCSASSSVYYMYWFQQKPGKAPKLWIYSTSNLASGVPSRFSGSGSGTDYTLTISSMQPEDFATYYCQQRRNYPYTFGQGTKLEIKRTVAAPSVFIFPPSDEQLKSGTASVVCLLNNFYPREAKVQWKVDNALQSGNSQESVTEQDSKDSTYSLSSTLTLSKADYEKHKVYACEVTHQGLSSPVTKSFNRGEC

SEQ ID NO: 3629 - protein, 260 aa, Artificial Sequence
  source: /note="Description of Artificial Sequence: Synthetic light chain variable domain"
QGQSGQGNLCTEHSFALDCRSYGGGSSGGSISSGLLSGRSDQHGGGSDIQMTQSPSSLSASVGDRVTITCSASSSVYYMYWFQQKPGKAPKLWIYSTSNLASGVPSRFSGSGSGTDYTLTISSMQPEDFATYYCQQRRNYPYTFGQGTKLEIKRTVAAPSVFIFPPSDEQLKSGTASVVCLLNNFYPREAKVQWKVDNALQSGNSQESVTEQDSKDSTYSLSSTLTLSKADYEKHKVYACEVTHQGLSSPVTKSFNRGEC

SEQ ID NO: 3630 - protein, 257 aa, Artificial Sequence
  source: /note="Description of Artificial Sequence: Synthetic light chain variable domain"
NLCTEHSFALDCRSYGGGSSGGSAVGLLAPPGGLSGRSDQHGGSDIQMTQSPSSLSASVGDRVTITCSASSSVYYMYWFQQKPGKAPKLWIYSTSNLASGVPSRFSGSGSGTDYTLTISSMQPEDFATYYCQQRRNYPYTFGQGTKLEIKRTVAAPSVFIFPPSDEQLKSGTASVVCLLNNFYPREAKVQWKVDNALQSGNSQESVTEQDSKDSTYSLSSTLTLSKADYEKHKVYACEVTHQGLSSPVTKSFNRGEC

SEQ ID NO: 3631 - protein, 264 aa, Artificial Sequence
  source: /note="Description of Artificial Sequence: Synthetic light chain variable domain"
QGQSGQGNLCTEHSFALDCRSYGGGSSGGSAVGLLAPPGGLSGRSDQHGGSDIQMTQSPSSLSASVGDRVTITCSASSSVYYMYWFQQKPGKAPKLWIYSTSNLASGVPSRFSGSGSGTDYTLTISSMQPEDFATYYCQQRRNYPYTFGQGTKLEIKRTVAAPSVFIFPPSDEQLKSGTASVVCLLNNFYPREAKVQWKVDNALQSGNSQESVTEQDSKDSTYSLSSTLTLSKADYEKHKVYACEVTHQGLSSPVTKSFNRGEC

SEQ ID NO: 3632 - protein, 253 aa, Artificial Sequence
  source: /note="Description of Artificial Sequence: Synthetic light chain variable domain"
NLCTEHSFALDCRSYGGGSSGGSISSGLLSGRSDNPGGGSDIQMTQSPSSLSASVGDRVTITCSASSSVYYMYWFQQKPGKAPKLWIYSTSNLASGVPSRFSGSGSGTDYTLTISSMQPEDFATYYCQQRRNYPYTFGQGTKLEIKRTVAAPSVFIFPPSDEQLKSGTASVVCLLNNFYPREAKVQWKVDNALQSGNSQESVTEQDSKDSTYSLSSTLTLSKADYEKHKVYACEVTHQGLSSPVTKSFNRGEC

SEQ ID NO: 3633 - protein, 260 aa, Artificial Sequence
  source: /note="Description of Artificial Sequence: Synthetic light chain variable domain"
QGQSGQGNLCTEHSFALDCRSYGGGSSGGSISSGLLSGRSDNPGGGSDIQMTQSPSSLSASVGDRVTITCSASSSVYYMYWFQQKPGKAPKLWIYSTSNLASGVPSRFSGSGSGTDYTLTISSMQPEDFATYYCQQRRNYPYTFGQGTKLEIKRTVAAPSVFIFPPSDEQLKSGTASVVCLLNNFYPREAKVQWKVDNALQSGNSQESVTEQDSKDSTYSLSSTLTLSKADYEKHKVYACEVTHQGLSSPVTKSFNRGEC

SEQ ID NO: 3634 - protein, 257 aa, Artificial Sequence
  source: /note="Description of Artificial Sequence: Synthetic light chain variable domain"
NLCTEHSFALDCRSYGGGSSGGSAVGLLAPPGGLSGRSDNPGGSDIQMTQSPSSLSASVGDRVTITCSASSSVYYMYWFQQKPGKAPKLWIYSTSNLASGVPSRFSGSGSGTDYTLTISSMQPEDFATYYCQQRRNYPYTFGQGTKLEIKRTVAAPSVFIFPPSDEQLKSGTASVVCLLNNFYPREAKVQWKVDNALQSGNSQESVTEQDSKDSTYSLSSTLTLSKADYEKHKVYACEVTHQGLSSPVTKSFNRGEC

SEQ ID NO: 3635 - protein, 264 aa, Artificial Sequence
  source: /note="Description of Artificial Sequence: Synthetic light chain variable domain"
QGQSGQGNLCTEHSFALDCRSYGGGSSGGSAVGLLAPPGGLSGRSDNPGGSDIQMTQSPSSLSASVGDRVTITCSASSSVYYMYWFQQKPGKAPKLWIYSTSNLASGVPSRFSGSGSGTDYTLTISSMQPEDFATYYCQQRRNYPYTFGQGTKLEIKRTVAAPSVFIFPPSDEQLKSGTASVVCLLNNFYPREAKVQWKVDNALQSGNSQESVTEQDSKDSTYSLSSTLTLSKADYEKHKVYACEVTHQGLSSPVTKSFNRGEC

SEQ ID NO: 3636 - protein, 253 aa, Artificial Sequence
  source: /note="Description of Artificial Sequence: Synthetic light chain variable domain"
NLCTEHSFALDCRSYGGGSSGGSISSGLLSGRSANPGGGSDIQMTQSPSSLSASVGDRVTITCSASSSVYYMYWFQQKPGKAPKLWIYSTSNLASGVPSRFSGSGSGTDYTLTISSMQPEDFATYYCQQRRNYPYTFGQGTKLEIKRTVAAPSVFIFPPSDEQLKSGTASVVCLLNNFYPREAKVQWKVDNALQSGNSQESVTEQDSKDSTYSLSSTLTLSKADYEKHKVYACEVTHQGLSSPVTKSFNRGEC

SEQ ID NO: 3637 - protein, 260 aa, Artificial Sequence
  source: /note="Description of Artificial Sequence: Synthetic light chain variable domain"
QGQSGQGNLCTEHSFALDCRSYGGGSSGGSISSGLLSGRSANPGGGSDIQMTQSPSSLSASVGDRVTITCSASSSVYYMYWFQQKPGKAPKLWIYSTSNLASGVPSRFSGSGSGTDYTLTISSMQPEDFATYYCQQRRNYPYTFGQGTKLEIKRTVAAPSVFIFPPSDEQLKSGTASVVCLLNNFYPREAKVQWKVDNALQSGNSQESVTEQDSKDSTYSLSSTLTLSKADYEKHKVYACEVTHQGLSSPVTKSFNRGEC

SEQ ID NO: 3638 - protein, 257 aa, Artificial Sequence
  source: /note="Description of Artificial Sequence: Synthetic light chain variable domain"
NLCTEHSFALDCRSYGGGSSGGSAVGLLAPPGGLSGRSANPGGSDIQMTQSPSSLSASVGDRVTITCSASSSVYYMYWFQQKPGKAPKLWIYSTSNLASGVPSRFSGSGSGTDYTLTISSMQPEDFATYYCQQRRNYPYTFGQGTKLEIKRTVAAPSVFIFPPSDEQLKSGTASVVCLLNNFYPREAKVQWKVDNALQSGNSQESVTEQDSKDSTYSLSSTLTLSKADYEKHKVYACEVTHQGLSSPVTKSFNRGEC

SEQ ID NO: 3639 - protein, 264 aa, Artificial Sequence
  source: /note="Description of Artificial Sequence: Synthetic light chain variable domain"
QGQSGQGNLCTEHSFALDCRSYGGGSSGGSAVGLLAPPGGLSGRSANPGGSDIQMTQSPSSLSASVGDRVTITCSASSSVYYMYWFQQKPGKAPKLWIYSTSNLASGVPSRFSGSGSGTDYTLTISSMQPEDFATYYCQQRRNYPYTFGQGTKLEIKRTVAAPSVFIFPPSDEQLKSGTASVVCLLNNFYPREAKVQWKVDNALQSGNSQESVTEQDSKDSTYSLSSTLTLSKADYEKHKVYACEVTHQGLSSPVTKSFNRGEC

SEQ ID NO: 3640 - protein, 253 aa, Artificial Sequence
  source: /note="Description of Artificial Sequence: Synthetic light chain variable domain"
NLCTEHSFALDCRSYGGGSSGGSISSGLLSGRSANIGGGSDIQMTQSPSSLSASVGDRVTITCSASSSVYYMYWFQQKPGKAPKLWIYSTSNLASGVPSRFSGSGSGTDYTLTISSMQPEDFATYYCQQRRNYPYTFGQGTKLEIKRTVAAPSVFIFPPSDEQLKSGTASVVCLLNNFYPREAKVQWKVDNALQSGNSQESVTEQDSKDSTYSLSSTLTLSKADYEKHKVYACEVTHQGLSSPVTKSFNRGEC

SEQ ID NO: 3641 - protein, 260 aa, Artificial Sequence
  source: /note="Description of Artificial Sequence: Synthetic light chain variable domain"
QGQSGQGNLCTEHSFALDCRSYGGGSSGGSISSGLLSGRSANIGGGSDIQMTQSPSSLSASVGDRVTITCSASSSVYYMYWFQQKPGKAPKLWIYSTSNLASGVPSRFSGSGSGTDYTLTISSMQPEDFATYYCQQRRNYPYTFGQGTKLEIKRTVAAPSVFIFPPSDEQLKSGTASVVCLLNNFYPREAKVQWKVDNALQSGNSQESVTEQDSKDSTYSLSSTLTLSKADYEKHKVYACEVTHQGLSSPVTKSFNRGEC

SEQ ID NO: 3642 - protein, 257 aa, Artificial Sequence
  source: /note="Description of Artificial Sequence: Synthetic light chain variable domain"
NLCTEHSFALDCRSYGGGSSGGSAVGLLAPPGGLSGRSANIGGSDIQMTQSPSSLSASVGDRVTITCSASSSVYYMYWFQQKPGKAPKLWIYSTSNLASGVPSRFSGSGSGTDYTLTISSMQPEDFATYYCQQRRNYPYTFGQGTKLEIKRTVAAPSVFIFPPSDEQLKSGTASVVCLLNNFYPREAKVQWKVDNALQSGNSQESVTEQDSKDSTYSLSSTLTLSKADYEKHKVYACEVTHQGLSSPVTKSFNRGEC

SEQ ID NO: 3643 - protein, 264 aa, Artificial Sequence
  source: /note="Description of Artificial Sequence: Synthetic light chain variable domain"
QGQSGQGNLCTEHSFALDCRSYGGGSSGGSAVGLLAPPGGLSGRSANIGGSDIQMTQSPSSLSASVGDRVTITCSASSSVYYMYWFQQKPGKAPKLWIYSTSNLASGVPSRFSGSGSGTDYTLTISSMQPEDFATYYCQQRRNYPYTFGQGTKLEIKRTVAAPSVFIFPPSDEQLKSGTASVVCLLNNFYPREAKVQWKVDNALQSGNSQESVTEQDSKDSTYSLSSTLTLSKADYEKHKVYACEVTHQGLSSPVTKSFNRGEC

SEQ ID NO: 3644 - protein, 106 aa, Artificial Sequence
  source: /note="Description of Artificial Sequence: Synthetic light chain variable domain"
DIQMTQSPSSLSASVGDRVTITCRASSSVYYMYWFQQKPGKAPKLWIYSTSNLASGVPSRFSGSGSGTDYTLTISSMQPEDFATYYCQQRRNYPYTFGQGTKLEIK

SEQ ID NO: 3645 - protein, 153 aa, Artificial Sequence
  source: /note="Description of Artificial Sequence: Synthetic light chain variable domain"
QGQSGQGQFCPWSYYLIGDCDIGGGSSGGSISSGLLSGRSDNHGGGSDIQMTQSPSSLSASVGDRVTITCSASSSVYYMYWFQQKPGKAPKLWIYSTSNLASGVPSRFSGSGSGTDYTLTISSMQPEDFATYYCQQRRNYPYTFGQGTKLEIK

SEQ ID NO: 3646 - protein, 150 aa, Artificial Sequence
  source: /note="Description of Artificial Sequence: Synthetic light chain variable domain"
QFCPWSYYLIGDCDIGGGSSGGSAVGLLAPPGGLSGRSDNHGGSDIQMTQSPSSLSASVGDRVTITCSASSSVYYMYWFQQKPGKAPKLWIYSTSNLASGVPSRFSGSGSGTDYTLTISSMQPEDFATYYCQQRRNYPYTFGQGTKLEIK

SEQ ID NO: 3647 - protein, 157 aa, Artificial Sequence
  source: /note="Description of Artificial Sequence: Synthetic light chain variable domain"
QGQSGQGQFCPWSYYLIGDCDIGGGSSGGSAVGLLAPPGGLSGRSDNHGGSDIQMTQSPSSLSASVGDRVTITCSASSSVYYMYWFQQKPGKAPKLWIYSTSNLASGVPSRFSGSGSGTDYTLTISSMQPEDFATYYCQQRRNYPYTFGQGTKLEIK

SEQ ID NO: 3648 - protein, 146 aa, Artificial Sequence
  source: /note="Description of Artificial Sequence: Synthetic light chain variable domain"
NLCTEHSAALDCRSYGGGSSGGSISSGLLSGRSDNHGGGSDIQMTQSPSSLSASVGDRVTITCSASSSVYYMYWFQQKPGKAPKLWIYSTSNLASGVPSRFSGSGSGTDYTLTISSMQPEDFATYYCQQRRNYPYTFGQGTKLEIK

SEQ ID NO: 3649 - protein, 153 aa, Artificial Sequence
  source: /note="Description of Artificial Sequence: Synthetic light chain variable domain"
QGQSGQGNLCTEHSAALDCRSYGGGSSGGSISSGLLSGRSDNHGGGSDIQMTQSPSSLSASVGDRVTITCSASSSVYYMYWFQQKPGKAPKLWIYSTSNLASGVPSRFSGSGSGTDYTLTISSMQPEDFATYYCQQRRNYPYTFGQGTKLEIK

SEQ ID NO: 3650 - protein, 150 aa, Artificial Sequence
  source: /note="Description of Artificial Sequence: Synthetic light chain variable domain"
NLCTEHSAALDCRSYGGGSSGGSAVGLLAPPGGLSGRSDNHGGSDIQMTQSPSSLSASVGDRVTITCSASSSVYYMYWFQQKPGKAPKLWIYSTSNLASGVPSRFSGSGSGTDYTLTISSMQPEDFATYYCQQRRNYPYTFGQGTKLEIK

SEQ ID NO: 3651 - protein, 157 aa, Artificial Sequence
  source: /note="Description of Artificial Sequence: Synthetic light chain variable domain"
QGQSGQGNLCTEHSAALDCRSYGGGSSGGSAVGLLAPPGGLSGRSDNHGGSDIQMTQSPSSLSASVGDRVTITCSASSSVYYMYWFQQKPGKAPKLWIYSTSNLASGVPSRFSGSGSGTDYTLTISSMQPEDFATYYCQQRRNYPYTFGQGTKLEIK

SEQ ID NO: 3652 - protein, 141 aa, Artificial Sequence
  source: /note="Description of Artificial Sequence: Synthetic light chain variable domain"
CTEHSFALDCGGGSSGGSISSGLLSGRSDNHGGGSDIQMTQSPSSLSASVGDRVTITCSASSSVYYMYWFQQKPGKAPKLWIYSTSNLASGVPSRFSGSGSGTDYTLTISSMQPEDFATYYCQQRRNYPYTFGQGTKLEIK

SEQ ID NO: 3653 - protein, 148 aa, Artificial Sequence
  source: /note="Description of Artificial Sequence: Synthetic light chain variable domain"
QGQSGQGCTEHSFALDCGGGSSGGSISSGLLSGRSDNHGGGSDIQMTQSPSSLSASVGDRVTITCSASSSVYYMYWFQQKPGKAPKLWIYSTSNLASGVPSRFSGSGSGTDYTLTISSMQPEDFATYYCQQRRNYPYTFGQGTKLEIK

SEQ ID NO: 3654 - protein, 145 aa, Artificial Sequence
  source: /note="Description of Artificial Sequence: Synthetic light chain variable domain"
CTEHSFALDCGGGSSGGSAVGLLAPPGGLSGRSDNHGGSDIQMTQSPSSLSASVGDRVTITCSASSSVYYMYWFQQKPGKAPKLWIYSTSNLASGVPSRFSGSGSGTDYTLTISSMQPEDFATYYCQQRRNYPYTFGQGTKLEIK

SEQ ID NO: 3655 - protein, 152 aa, Artificial Sequence
  source: /note="Description of Artificial Sequence: Synthetic light chain variable domain"
QGQSGQGCTEHSFALDCGGGSSGGSAVGLLAPPGGLSGRSDNHGGSDIQMTQSPSSLSASVGDRVTITCSASSSVYYMYWFQQKPGKAPKLWIYSTSNLASGVPSRFSGSGSGTDYTLTISSMQPEDFATYYCQQRRNYPYTFGQGTKLEIK

SEQ ID NO: 3656 - protein, 146 aa, Artificial Sequence
  source: /note="Description of Artificial Sequence: Synthetic light chain variable domain"
NLCTEHSAALDCRSYGGGSSGGSISSGLLSGRSANPGGGSDIQMTQSPSSLSASVGDRVTITCSASSSVYYMYWFQQKPGKAPKLWIYSTSNLASGVPSRFSGSGSGTDYTLTISSMQPEDFATYYCQQRRNYPYTFGQGTKLEIK

SEQ ID NO: 3657 - protein, 153 aa, Artificial Sequence
  source: /note="Description of Artificial Sequence: Synthetic light chain variable domain"
QGQSGQGNLCTEHSAALDCRSYGGGSSGGSISSGLLSGRSANPGGGSDIQMTQSPSSLSASVGDRVTITCSASSSVYYMYWFQQKPGKAPKLWIYSTSNLASGVPSRFSGSGSGTDYTLTISSMQPEDFATYYCQQRRNYPYTFGQGTKLEIK

SEQ ID NO: 3658 - protein, 150 aa, Artificial Sequence
  source: /note="Description of Artificial Sequence: Synthetic light chain variable domain"
NLCTEHSAALDCRSYGGGSSGGSAVGLLAPPGGLSGRSDNPGGSDIQMTQSPSSLSASVGDRVTITCSASSSVYYMYWFQQKPGKAPKLWIYSTSNLASGVPSRFSGSGSGTDYTLTISSMQPEDFATYYCQQRRNYPYTFGQGTKLEIK

SEQ ID NO: 3659 - protein, 157 aa, Artificial Sequence
  source: /note="Description of Artificial Sequence: Synthetic light chain variable domain"
QGQSGQGNLCTEHSAALDCRSYGGGSSGGSAVGLLAPPGGLSGRSDNPGGSDIQMTQSPSSLSASVGDRVTITCSASSSVYYMYWFQQKPGKAPKLWIYSTSNLASGVPSRFSGSGSGTDYTLTISSMQPEDFATYYCQQRRNYPYTFGQGTKLEIK

SEQ ID NO: 3660 - protein, 146 aa, Artificial Sequence
  source: /note="Description of Artificial Sequence: Synthetic light chain variable domain"
NLCTEHSAALDCRSYGGGSSGGSISSGLLSGRSDNPGGGSDIQMTQSPSSLSASVGDRVTITCSASSSVYYMYWFQQKPGKAPKLWIYSTSNLASGVPSRFSGSGSGTDYTLTISSMQPEDFATYYCQQRRNYPYTFGQGTKLEIK

SEQ ID NO: 3661 - protein, 153 aa, Artificial Sequence
  source: /note="Description of Artificial Sequence: Synthetic light chain variable domain"
QGQSGQGNLCTEHSAALDCRSYGGGSSGGSISSGLLSGRSDNPGGGSDIQMTQSPSSLSASVGDRVTITCSASSSVYYMYWFQQKPGKAPKLWIYSTSNLASGVPSRFSGSGSGTDYTLTISSMQPEDFATYYCQQRRNYPYTFGQGTKLEIK

SEQ ID NO: 3662 - protein, 150 aa, Artificial Sequence
  source: /note="Description of Artificial Sequence: Synthetic light chain variable domain"
NLCTEHSAALDCRSYGGGSSGGSAVGLLAPPGGLSGRSANPGGSDIQMTQSPSSLSASVGDRVTITCSASSSVYYMYWFQQKPGKAPKLWIYSTSNLASGVPSRFSGSGSGTDYTLTISSMQPEDFATYYCQQRRNYPYTFGQGTKLEIK

SEQ ID NO: 3663 - protein, 157 aa, Artificial Sequence
  source: /note="Description of Artificial Sequence: Synthetic light chain variable domain"
QGQSGQGNLCTEHSAALDCRSYGGGSSGGSAVGLLAPPGGLSGRSANPGGSDIQMTQSPSSLSASVGDRVTITCSASSSVYYMYWFQQKPGKAPKLWIYSTSNLASGVPSRFSGSGSGTDYTLTISSMQPEDFATYYCQQRRNYPYTFGQGTKLEIK

SEQ ID NO: 3664 - protein, 141 aa, Artificial Sequence
  source: /note="Description of Artificial Sequence: Synthetic light chain variable domain"
CTEHSFALDCGGGSSGGSISSGLLSGRSDNPGGGSDIQMTQSPSSLSASVGDRVTITCSASSSVYYMYWFQQKPGKAPKLWIYSTSNLASGVPSRFSGSGSGTDYTLTISSMQPEDFATYYCQQRRNYPYTFGQGTKLEIK

SEQ ID NO: 3665 - protein, 148 aa, Artificial Sequence
  source: /note="Description of Artificial Sequence: Synthetic light chain variable domain"
QGQSGQGCTEHSFALDCGGGSSGGSISSGLLSGRSDNPGGGSDIQMTQSPSSLSASVGDRVTITCSASSSVYYMYWFQQKPGKAPKLWIYSTSNLASGVPSRFSGSGSGTDYTLTISSMQPEDFATYYCQQRRNYPYTFGQGTKLEIK

SEQ ID NO: 3666 - protein, 145 aa, Artificial Sequence
  source: /note="Description of Artificial Sequence: Synthetic light chain variable domain"
CTEHSFALDCGGGSSGGSAVGLLAPPGGLSGRSANPGGSDIQMTQSPSSLSASVGDRVTITCSASSSVYYMYWFQQKPGKAPKLWIYSTSNLASGVPSRFSGSGSGTDYTLTISSMQPEDFATYYCQQRRNYPYTFGQGTKLEIK

SEQ ID NO: 3667 - protein, 152 aa, Artificial Sequence
  source: /note="Description of Artificial Sequence: Synthetic light chain variable domain"
QGQSGQGCTEHSFALDCGGGSSGGSAVGLLAPPGGLSGRSANPGGSDIQMTQSPSSLSASVGDRVTITCSASSSVYYMYWFQQKPGKAPKLWIYSTSNLASGVPSRFSGSGSGTDYTLTISSMQPEDFATYYCQQRRNYPYTFGQGTKLEIK

SEQ ID NO: 3668 - protein, 141 aa, Artificial Sequence
  source: /note="Description of Artificial Sequence: Synthetic light chain variable domain"
CTEHSFALDCGGGSSGGSISSGLLSGRSANPGGGSDIQMTQSPSSLSASVGDRVTITCSASSSVYYMYWFQQKPGKAPKLWIYSTSNLASGVPSRFSGSGSGTDYTLTISSMQPEDFATYYCQQRRNYPYTFGQGTKLEIK

SEQ ID NO: 3669 - protein, 148 aa, Artificial Sequence
  source: /note="Description of Artificial Sequence: Synthetic light chain variable domain"
QGQSGQGCTEHSFALDCGGGSSGGSISSGLLSGRSANPGGGSDIQMTQSPSSLSASVGDRVTITCSASSSVYYMYWFQQKPGKAPKLWIYSTSNLASGVPSRFSGSGSGTDYTLTISSMQPEDFATYYCQQRRNYPYTFGQGTKLEIK

SEQ ID NO: 3670 - protein, 145 aa, Artificial Sequence
  source: /note="Description of Artificial Sequence: Synthetic light chain variable domain"
CTEHSFALDCGGGSSGGSAVGLLAPPGGLSGRSDNPGGSDIQMTQSPSSLSASVGDRVTITCSASSSVYYMYWFQQKPGKAPKLWIYSTSNLASGVPSRFSGSGSGTDYTLTISSMQPEDFATYYCQQRRNYPYTFGQGTKLEIK

SEQ ID NO: 3671 - protein, 152 aa, Artificial Sequence
  source: /note="Description of Artificial Sequence: Synthetic light chain variable domain"
QGQSGQGCTEHSFALDCGGGSSGGSAVGLLAPPGGLSGRSDNPGGSDIQMTQSPSSLSASVGDRVTITCSASSSVYYMYWFQQKPGKAPKLWIYSTSNLASGVPSRFSGSGSGTDYTLTISSMQPEDFATYYCQQRRNYPYTFGQGTKLEIK

SEQ ID NO: 3672 - protein, 146 aa, Artificial Sequence
  source: /note="Description of Artificial Sequence: Synthetic light chain variable domain"
NLCTEHSAALDCRSYGGGSSGGSISSGLLSGRSDIHGGGSDIQMTQSPSSLSASVGDRVTITCSASSSVYYMYWFQQKPGKAPKLWIYSTSNLASGVPSRFSGSGSGTDYTLTISSMQPEDFATYYCQQRRNYPYTFGQGTKLEIK

SEQ ID NO: 3673 - protein, 153 aa, Artificial Sequence
  source: /note="Description of Artificial Sequence: Synthetic light chain variable domain"
QGQSGQGNLCTEHSAALDCRSYGGGSSGGSISSGLLSGRSDIHGGGSDIQMTQSPSSLSASVGDRVTITCSASSSVYYMYWFQQKPGKAPKLWIYSTSNLASGVPSRFSGSGSGTDYTLTISSMQPEDFATYYCQQRRNYPYTFGQGTKLEIK

SEQ ID NO: 3674 - protein, 146 aa, Artificial Sequence
  source: /note="Description of Artificial Sequence: Synthetic light chain variable domain"
NLCTEHSAALDCRSYGGGSSGGSISSGLLSGRSDQHGGGSDIQMTQSPSSLSASVGDRVTITCSASSSVYYMYWFQQKPGKAPKLWIYSTSNLASGVPSRFSGSGSGTDYTLTISSMQPEDFATYYCQQRRNYPYTFGQGTKLEIK

SEQ ID NO: 3675 - protein, 153 aa, Artificial Sequence
  source: /note="Description of Artificial Sequence: Synthetic light chain variable domain"
QGQSGQGNLCTEHSAALDCRSYGGGSSGGSISSGLLSGRSDQHGGGSDIQMTQSPSSLSASVGDRVTITCSASSSVYYMYWFQQKPGKAPKLWIYSTSNLASGVPSRFSGSGSGTDYTLTISSMQPEDFATYYCQQRRNYPYTFGQGTKLEIK

SEQ ID NO: 3676 - protein, 146 aa, Artificial Sequence
  source: /note="Description of Artificial Sequence: Synthetic light chain variable domain"
NLCTEHSAALDCRSYGGGSSGGSISSGLLSGRSANIGGGSDIQMTQSPSSLSASVGDRVTITCSASSSVYYMYWFQQKPGKAPKLWIYSTSNLASGVPSRFSGSGSGTDYTLTISSMQPEDFATYYCQQRRNYPYTFGQGTKLEIK

SEQ ID NO: 3677 - protein, 153 aa, Artificial Sequence
  source: /note="Description of Artificial Sequence: Synthetic light chain variable domain"
QGQSGQGNLCTEHSAALDCRSYGGGSSGGSISSGLLSGRSANIGGGSDIQMTQSPSSLSASVGDRVTITCSASSSVYYMYWFQQKPGKAPKLWIYSTSNLASGVPSRFSGSGSGTDYTLTISSMQPEDFATYYCQQRRNYPYTFGQGTKLEIK

SEQ ID NO: 3678 - protein, 150 aa, Artificial Sequence
  source: /note="Description of Artificial Sequence: Synthetic light chain variable domain"
NLCTEHSAALDCRSYGGGSSGGSAVGLLAPPGGLSGRSDIHGGSDIQMTQSPSSLSASVGDRVTITCSASSSVYYMYWFQQKPGKAPKLWIYSTSNLASGVPSRFSGSGSGTDYTLTISSMQPEDFATYYCQQRRNYPYTFGQGTKLEIK

SEQ ID NO: 3679 - protein, 157 aa, Artificial Sequence
  source: /note="Description of Artificial Sequence: Synthetic light chain variable domain"
QGQSGQGNLCTEHSAALDCRSYGGGSSGGSAVGLLAPPGGLSGRSDIHGGSDIQMTQSPSSLSASVGDRVTITCSASSSVYYMYWFQQKPGKAPKLWIYSTSNLASGVPSRFSGSGSGTDYTLTISSMQPEDFATYYCQQRRNYPYTFGQGTKLEIK

SEQ ID NO: 3680 - protein, 150 aa, Artificial Sequence
  source: /note="Description of Artificial Sequence: Synthetic light chain variable domain"
NLCTEHSAALDCRSYGGGSSGGSAVGLLAPPGGLSGRSDQHGGSDIQMTQSPSSLSASVGDRVTITCSASSSVYYMYWFQQKPGKAPKLWIYSTSNLASGVPSRFSGSGSGTDYTLTISSMQPEDFATYYCQQRRNYPYTFGQGTKLEIK

SEQ ID NO: 3681 - protein, 157 aa, Artificial Sequence
  source: /note="Description of Artificial Sequence: Synthetic light chain variable domain"
QGQSGQGNLCTEHSAALDCRSYGGGSSGGSAVGLLAPPGGLSGRSDQHGGSDIQMTQSPSSLSASVGDRVTITCSASSSVYYMYWFQQKPGKAPKLWIYSTSNLASGVPSRFSGSGSGTDYTLTISSMQPEDFATYYCQQRRNYPYTFGQGTKLEIK

SEQ ID NO: 3682 - protein, 150 aa, Artificial Sequence
  source: /note="Description of Artificial Sequence: Synthetic light chain variable domain"
NLCTEHSAALDCRSYGGGSSGGSAVGLLAPPGGLSGRSANIGGSDIQMTQSPSSLSASVGDRVTITCSASSSVYYMYWFQQKPGKAPKLWIYSTSNLASGVPSRFSGSGSGTDYTLTISSMQPEDFATYYCQQRRNYPYTFGQGTKLEIK

SEQ ID NO: 3683 - protein, 157 aa, Artificial Sequence
  source: /note="Description of Artificial Sequence: Synthetic light chain variable domain"
QGQSGQGNLCTEHSAALDCRSYGGGSSGGSAVGLLAPPGGLSGRSANIGGSDIQMTQSPSSLSASVGDRVTITCSASSSVYYMYWFQQKPGKAPKLWIYSTSNLASGVPSRFSGSGSGTDYTLTISSMQPEDFATYYCQQRRNYPYTFGQGTKLEIK

SEQ ID NO: 3684 - protein, 141 aa, Artificial Sequence
  source: /note="Description of Artificial Sequence: Synthetic light chain variable domain"
CTEHSFALDCGGGSSGGSISSGLLSGRSDIHGGGSDIQMTQSPSSLSASVGDRVTITCSASSSVYYMYWFQQKPGKAPKLWIYSTSNLASGVPSRFSGSGSGTDYTLTISSMQPEDFATYYCQQRRNYPYTFGQGTKLEIK

SEQ ID NO: 3685 - protein, 148 aa, Artificial Sequence
  source: /note="Description of Artificial Sequence: Synthetic light chain variable domain"
QGQSGQGCTEHSFALDCGGGSSGGSISSGLLSGRSDIHGGGSDIQMTQSPSSLSASVGDRVTITCSASSSVYYMYWFQQKPGKAPKLWIYSTSNLASGVPSRFSGSGSGTDYTLTISSMQPEDFATYYCQQRRNYPYTFGQGTKLEIK

SEQ ID NO: 3686 - protein, 141 aa, Artificial Sequence
  source: /note="Description of Artificial Sequence: Synthetic light chain variable domain"
CTEHSFALDCGGGSSGGSISSGLLSGRSDQHGGGSDIQMTQSPSSLSASVGDRVTITCSASSSVYYMYWFQQKPGKAPKLWIYSTSNLASGVPSRFSGSGSGTDYTLTISSMQPEDFATYYCQQRRNYPYTFGQGTKLEIK

SEQ ID NO: 3687 - protein, 148 aa, Artificial Sequence
  source: /note="Description of Artificial Sequence: Synthetic light chain variable domain"
QGQSGQGCTEHSFALDCGGGSSGGSISSGLLSGRSDQHGGGSDIQMTQSPSSLSASVGDRVTITCSASSSVYYMYWFQQKPGKAPKLWIYSTSNLASGVPSRFSGSGSGTDYTLTISSMQPEDFATYYCQQRRNYPYTFGQGTKLEIK

SEQ ID NO: 3688 - protein, 141 aa, Artificial Sequence
  source: /note="Description of Artificial Sequence: Synthetic light chain variable domain"
CTEHSFALDCGGGSSGGSISSGLLSGRSANIGGGSDIQMTQSPSSLSASVGDRVTITCSASSSVYYMYWFQQKPGKAPKLWIYSTSNLASGVPSRFSGSGSGTDYTLTISSMQPEDFATYYCQQRRNYPYTFGQGTKLEIK

SEQ ID NO: 3689 - protein, 148 aa, Artificial Sequence
  source: /note="Description of Artificial Sequence: Synthetic light chain variable domain"
QGQSGQGCTEHSFALDCGGGSSGGSISSGLLSGRSANIGGGSDIQMTQSPSSLSASVGDRVTITCSASSSVYYMYWFQQKPGKAPKLWIYSTSNLASGVPSRFSGSGSGTDYTLTISSMQPEDFATYYCQQRRNYPYTFGQGTKLEIK

SEQ ID NO: 3690 - protein, 145 aa, Artificial Sequence
  source: /note="Description of Artificial Sequence: Synthetic light chain variable domain"
CTEHSFALDCGGGSSGGSAVGLLAPPGGLSGRSDIHGGSDIQMTQSPSSLSASVGDRVTITCSASSSVYYMYWFQQKPGKAPKLWIYSTSNLASGVPSRFSGSGSGTDYTLTISSMQPEDFATYYCQQRRNYPYTFGQGTKLEIK

SEQ ID NO: 3691 - protein, 152 aa, Artificial Sequence
  source: /note="Description of Artificial Sequence: Synthetic light chain variable domain"
QGQSGQGCTEHSFALDCGGGSSGGSAVGLLAPPGGLSGRSDIHGGSDIQMTQSPSSLSASVGDRVTITCSASSSVYYMYWFQQKPGKAPKLWIYSTSNLASGVPSRFSGSGSGTDYTLTISSMQPEDFATYYCQQRRNYPYTFGQGTKLEIK

SEQ ID NO: 3692 - protein, 145 aa, Artificial Sequence
  source: /note="Description of Artificial Sequence: Synthetic light chain variable domain"
CTEHSFALDCGGGSSGGSAVGLLAPPGGLSGRSDQHGGSDIQMTQSPSSLSASVGDRVTITCSASSSVYYMYWFQQKPGKAPKLWIYSTSNLASGVPSRFSGSGSGTDYTLTISSMQPEDFATYYCQQRRNYPYTFGQGTKLEIK

SEQ ID NO: 3693 - protein, 152 aa, Artificial Sequence
  source: /note="Description of Artificial Sequence: Synthetic light chain variable domain"
QGQSGQGCTEHSFALDCGGGSSGGSAVGLLAPPGGLSGRSDQHGGSDIQMTQSPSSLSASVGDRVTITCSASSSVYYMYWFQQKPGKAPKLWIYSTSNLASGVPSRFSGSGSGTDYTLTISSMQPEDFATYYCQQRRNYPYTFGQGTKLEIK

SEQ ID NO: 3694 - protein, 145 aa, Artificial Sequence
  source: /note="Description of Artificial Sequence: Synthetic light chain variable domain"
CTEHSFALDCGGGSSGGSAVGLLAPPGGLSGRSANIGGSDIQMTQSPSSLSASVGDRVTITCSASSSVYYMYWFQQKPGKAPKLWIYSTSNLASGVPSRFSGSGSGTDYTLTISSMQPEDFATYYCQQRRNYPYTFGQGTKLEIK

SEQ ID NO: 3695 - protein, 152 aa, Artificial Sequence
  source: /note="Description of Artificial Sequence: Synthetic light chain variable domain"
QGQSGQGCTEHSFALDCGGGSSGGSAVGLLAPPGGLSGRSANIGGSDIQMTQSPSSLSASVGDRVTITCSASSSVYYMYWFQQKPGKAPKLWIYSTSNLASGVPSRFSGSGSGTDYTLTISSMQPEDFATYYCQQRRNYPYTFGQGTKLEIK

SEQ ID NO: 3696 - protein, 146 aa, Artificial Sequence
  source: /note="Description of Artificial Sequence: Synthetic light chain variable domain"
QFCPWSYYLIGDCDIGGGSSGGSISSGLLSGRSDIHGGGSDIQMTQSPSSLSASVGDRVTITCSASSSVYYMYWFQQKPGKAPKLWIYSTSNLASGVPSRFSGSGSGTDYTLTISSMQPEDFATYYCQQRRNYPYTFGQGTKLEIK

SEQ ID NO: 3697 - protein, 153 aa, Artificial Sequence
  source: /note="Description of Artificial Sequence: Synthetic light chain variable domain"
QGQSGQGQFCPWSYYLIGDCDIGGGSSGGSISSGLLSGRSDIHGGGSDIQMTQSPSSLSASVGDRVTITCSASSSVYYMYWFQQKPGKAPKLWIYSTSNLASGVPSRFSGSGSGTDYTLTISSMQPEDFATYYCQQRRNYPYTFGQGTKLEIK

SEQ ID NO: 3698 - protein, 150 aa, Artificial Sequence
  source: /note="Description of Artificial Sequence: Synthetic light chain variable domain"
QFCPWSYYLIGDCDIGGGSSGGSAVGLLAPPGGLSGRSDIHGGSDIQMTQSPSSLSASVGDRVTITCSASSSVYYMYWFQQKPGKAPKLWIYSTSNLASGVPSRFSGSGSGTDYTLTISSMQPEDFATYYCQQRRNYPYTFGQGTKLEIK

SEQ ID NO: 3699 - protein, 157 aa, Artificial Sequence
  source: /note="Description of Artificial Sequence: Synthetic light chain variable domain"
QGQSGQGQFCPWSYYLIGDCDIGGGSSGGSAVGLLAPPGGLSGRSDIHGGSDIQMTQSPSSLSASVGDRVTITCSASSSVYYMYWFQQKPGKAPKLWIYSTSNLASGVPSRFSGSGSGTDYTLTISSMQPEDFATYYCQQRRNYPYTFGQGTKLEIK

SEQ ID NO: 3700 - protein, 146 aa, Artificial Sequence
  source: /note="Description of Artificial Sequence: Synthetic light chain variable domain"
QFCPWSYYLIGDCDIGGGSSGGSISSGLLSGRSDQHGGGSDIQMTQSPSSLSASVGDRVTITCSASSSVYYMYWFQQKPGKAPKLWIYSTSNLASGVPSRFSGSGSGTDYTLTISSMQPEDFATYYCQQRRNYPYTFGQGTKLEIK

SEQ ID NO: 3701 - protein, 153 aa, Artificial Sequence
  source: /note="Description of Artificial Sequence: Synthetic light chain variable domain"
QGQSGQGQFCPWSYYLIGDCDIGGGSSGGSISSGLLSGRSDQHGGGSDIQMTQSPSSLSASVGDRVTITCSASSSVYYMYWFQQKPGKAPKLWIYSTSNLASGVPSRFSGSGSGTDYTLTISSMQPEDFATYYCQQRRNYPYTFGQGTKLEIK

SEQ ID NO: 3702 - protein, 150 aa, Artificial Sequence
  source: /note="Description of Artificial Sequence: Synthetic light chain variable domain"
QFCPWSYYLIGDCDIGGGSSGGSAVGLLAPPGGLSGRSDQHGGSDIQMTQSPSSLSASVGDRVTITCSASSSVYYMYWFQQKPGKAPKLWIYSTSNLASGVPSRFSGSGSGTDYTLTISSMQPEDFATYYCQQRRNYPYTFGQGTKLEIK

SEQ ID NO: 3703 - protein, 157 aa, Artificial Sequence
  source: /note="Description of Artificial Sequence: Synthetic light chain variable domain"
QGQSGQGQFCPWSYYLIGDCDIGGGSSGGSAVGLLAPPGGLSGRSDQHGGSDIQMTQSPSSLSASVGDRVTITCSASSSVYYMYWFQQKPGKAPKLWIYSTSNLASGVPSRFSGSGSGTDYTLTISSMQPEDFATYYCQQRRNYPYTFGQGTKLEIK

SEQ ID NO: 3704 - protein, 146 aa, Artificial Sequence
  source: /note="Description of Artificial Sequence: Synthetic light chain variable domain"
QFCPWSYYLIGDCDIGGGSSGGSISSGLLSGRSDNPGGGSDIQMTQSPSSLSASVGDRVTITCSASSSVYYMYWFQQKPGKAPKLWIYSTSNLASGVPSRFSGSGSGTDYTLTISSMQPEDFATYYCQQRRNYPYTFGQGTKLEIK

SEQ ID NO: 3705 - protein, 153 aa, Artificial Sequence
  source: /note="Description of Artificial Sequence: Synthetic light chain variable domain"
QGQSGQGQFCPWSYYLIGDCDIGGGSSGGSISSGLLSGRSDNPGGGSDIQMTQSPSSLSASVGDRVTITCSASSSVYYMYWFQQKPGKAPKLWIYSTSNLASGVPSRFSGSGSGTDYTLTISSMQPEDFATYYCQQRRNYPYTFGQGTKLEIK

SEQ ID NO: 3706 - protein, 150 aa, Artificial Sequence
  source: /note="Description of Artificial Sequence: Synthetic light chain variable domain"
QFCPWSYYLIGDCDIGGGSSGGSAVGLLAPPGGLSGRSDNPGGSDIQMTQSPSSLSASVGDRVTITCSASSSVYYMYWFQQKPGKAPKLWIYSTSNLASGVPSRFSGSGSGTDYTLTISSMQPEDFATYYCQQRRNYPYTFGQGTKLEIK

SEQ ID NO: 3707 - protein, 157 aa, Artificial Sequence
  source: /note="Description of Artificial Sequence: Synthetic light chain variable domain"
QGQSGQGQFCPWSYYLIGDCDIGGGSSGGSAVGLLAPPGGLSGRSDNPGGSDIQMTQSPSSLSASVGDRVTITCSASSSVYYMYWFQQKPGKAPKLWIYSTSNLASGVPSRFSGSGSGTDYTLTISSMQPEDFATYYCQQRRNYPYTFGQGTKLEIK

SEQ ID NO: 3708 - protein, 146 aa, Artificial Sequence
  source: /note="Description of Artificial Sequence: Synthetic light chain variable domain"
QFCPWSYYLIGDCDIGGGSSGGSISSGLLSGRSANPGGGSDIQMTQSPSSLSASVGDRVTITCSASSSVYYMYWFQQKPGKAPKLWIYSTSNLASGVPSRFSGSGSGTDYTLTISSMQPEDFATYYCQQRRNYPYTFGQGTKLEIK

SEQ ID NO: 3709 - protein, 153 aa, Artificial Sequence
  source: /note="Description of Artificial Sequence: Synthetic light chain variable domain"
QGQSGQGQFCPWSYYLIGDCDIGGGSSGGSISSGLLSGRSANPGGGSDIQMTQSPSSLSASVGDRVTITCSASSSVYYMYWFQQKPGKAPKLWIYSTSNLASGVPSRFSGSGSGTDYTLTISSMQPEDFATYYCQQRRNYPYTFGQGTKLEIK

SEQ ID NO: 3710 - protein, 150 aa, Artificial Sequence
  source: /note="Description of Artificial Sequence: Synthetic light chain variable domain"
QFCPWSYYLIGDCDIGGGSSGGSAVGLLAPPGGLSGRSANPGGSDIQMTQSPSSLSASVGDRVTITCSASSSVYYMYWFQQKPGKAPKLWIYSTSNLASGVPSRFSGSGSGTDYTLTISSMQPEDFATYYCQQRRNYPYTFGQGTKLEIK

SEQ ID NO: 3711 - protein, 157 aa, Artificial Sequence
  source: /note="Description of Artificial Sequence: Synthetic light chain variable domain"
QGQSGQGQFCPWSYYLIGDCDIGGGSSGGSAVGLLAPPGGLSGRSANPGGSDIQMTQSPSSLSASVGDRVTITCSASSSVYYMYWFQQKPGKAPKLWIYSTSNLASGVPSRFSGSGSGTDYTLTISSMQPEDFATYYCQQRRNYPYTFGQGTKLEIK

SEQ ID NO: 3712 - protein, 146 aa, Artificial Sequence
  source: /note="Description of Artificial Sequence: Synthetic light chain variable domain"
QFCPWSYYLIGDCDIGGGSSGGSISSGLLSGRSANIGGGSDIQMTQSPSSLSASVGDRVTITCSASSSVYYMYWFQQKPGKAPKLWIYSTSNLASGVPSRFSGSGSGTDYTLTISSMQPEDFATYYCQQRRNYPYTFGQGTKLEIK

SEQ ID NO: 3713 - protein, 153 aa, Artificial Sequence
  source: /note="Description of Artificial Sequence: Synthetic light chain variable domain"
QGQSGQGQFCPWSYYLIGDCDIGGGSSGGSISSGLLSGRSANIGGGSDIQMTQSPSSLSASVGDRVTITCSASSSVYYMYWFQQKPGKAPKLWIYSTSNLASGVPSRFSGSGSGTDYTLTISSMQPEDFATYYCQQRRNYPYTFGQGTKLEIK

SEQ ID NO: 3714 - protein, 150 aa, Artificial Sequence
  source: /note="Description of Artificial Sequence: Synthetic light chain variable domain"
QFCPWSYYLIGDCDIGGGSSGGSAVGLLAPPGGLSGRSANIGGSDIQMTQSPSSLSASVGDRVTITCSASSSVYYMYWFQQKPGKAPKLWIYSTSNLASGVPSRFSGSGSGTDYTLTISSMQPEDFATYYCQQRRNYPYTFGQGTKLEIK

SEQ ID NO: 3715 - protein, 157 aa, Artificial Sequence
  source: /note="Description of Artificial Sequence: Synthetic light chain variable domain"
QGQSGQGQFCPWSYYLIGDCDIGGGSSGGSAVGLLAPPGGLSGRSANIGGSDIQMTQSPSSLSASVGDRVTITCSASSSVYYMYWFQQKPGKAPKLWIYSTSNLASGVPSRFSGSGSGTDYTLTISSMQPEDFATYYCQQRRNYPYTFGQGTKLEIK

SEQ ID NO: 3716 - protein, 146 aa, Artificial Sequence
  source: /note="Description of Artificial Sequence: Synthetic light chain variable domain"
NLCTEHSFALDCRSYGGGSSGGSISSGLLSGRSDNHGGGSDIQMTQSPSSLSASVGDRVTITCSASSSVYYMYWFQQKPGKAPKLWIYSTSNLASGVPSRFSGSGSGTDYTLTISSMQPEDFATYYCQQRRNYPYTFGQGTKLEIK

SEQ ID NO: 3717 - protein, 153 aa, Artificial Sequence
  source: /note="Description of Artificial Sequence: Synthetic light chain variable domain"
QGQSGQGNLCTEHSFALDCRSYGGGSSGGSISSGLLSGRSDNHGGGSDIQMTQSPSSLSASVGDRVTITCSASSSVYYMYWFQQKPGKAPKLWIYSTSNLASGVPSRFSGSGSGTDYTLTISSMQPEDFATYYCQQRRNYPYTFGQGTKLEIK

SEQ ID NO: 3718 - protein, 150 aa, Artificial Sequence
  source: /note="Description of Artificial Sequence: Synthetic light chain variable domain"
NLCTEHSFALDCRSYGGGSSGGSAVGLLAPPGGLSGRSDNHGGSDIQMTQSPSSLSASVGDRVTITCSASSSVYYMYWFQQKPGKAPKLWIYSTSNLASGVPSRFSGSGSGTDYTLTISSMQPEDFATYYCQQRRNYPYTFGQGTKLEIK

SEQ ID NO: 3719 - protein, 157 aa, Artificial Sequence
  source: /note="Description of Artificial Sequence: Synthetic light chain variable domain"
QGQSGQGNLCTEHSFALDCRSYGGGSSGGSAVGLLAPPGGLSGRSDNHGGSDIQMTQSPSSLSASVGDRVTITCSASSSVYYMYWFQQKPGKAPKLWIYSTSNLASGVPSRFSGSGSGTDYTLTISSMQPEDFATYYCQQRRNYPYTFGQGTKLEIK

SEQ ID NO: 3720 - protein, 146 aa, Artificial Sequence
  source: /note="Description of Artificial Sequence: Synthetic light chain variable domain"
NLCTEHSFALDCRSYGGGSSGGSISSGLLSGRSDIHGGGSDIQMTQSPSSLSASVGDRVTITCSASSSVYYMYWFQQKPGKAPKLWIYSTSNLASGVPSRFSGSGSGTDYTLTISSMQPEDFATYYCQQRRNYPYTFGQGTKLEIK

SEQ ID NO: 3721 - protein, 153 aa, Artificial Sequence
  source: /note="Description of Artificial Sequence: Synthetic light chain variable domain"
QGQSGQGNLCTEHSFALDCRSYGGGSSGGSISSGLLSGRSDIHGGGSDIQMTQSPSSLSASVGDRVTITCSASSSVYYMYWFQQKPGKAPKLWIYSTSNLASGVPSRFSGSGSGTDYTLTISSMQPEDFATYYCQQRRNYPYTFGQGTKLEIK

SEQ ID NO: 3722 - protein, 150 aa, Artificial Sequence
  source: /note="Description of Artificial Sequence: Synthetic light chain variable domain"
NLCTEHSFALDCRSYGGGSSGGSAVGLLAPPGGLSGRSDIHGGSDIQMTQSPSSLSASVGDRVTITCSASSSVYYMYWFQQKPGKAPKLWIYSTSNLASGVPSRFSGSGSGTDYTLTISSMQPEDFATYYCQQRRNYPYTFGQGTKLEIK

SEQ ID NO: 3723 - protein, 157 aa, Artificial Sequence
  source: /note="Description of Artificial Sequence: Synthetic light chain variable domain"
QGQSGQGNLCTEHSFALDCRSYGGGSSGGSAVGLLAPPGGLSGRSDIHGGSDIQMTQSPSSLSASVGDRVTITCSASSSVYYMYWFQQKPGKAPKLWIYSTSNLASGVPSRFSGSGSGTDYTLTISSMQPEDFATYYCQQRRNYPYTFGQGTKLEIK

SEQ ID NO: 3724 - protein, 146 aa, Artificial Sequence
  source: /note="Description of Artificial Sequence: Synthetic light chain variable domain"
NLCTEHSFALDCRSYGGGSSGGSISSGLLSGRSDQHGGGSDIQMTQSPSSLSASVGDRVTITCSASSSVYYMYWFQQKPGKAPKLWIYSTSNLASGVPSRFSGSGSGTDYTLTISSMQPEDFATYYCQQRRNYPYTFGQGTKLEIK

SEQ ID NO: 3725 - protein, 153 aa, Artificial Sequence
  source: /note="Description of Artificial Sequence: Synthetic light chain variable domain"
QGQSGQGNLCTEHSFALDCRSYGGGSSGGSISSGLLSGRSDQHGGGSDIQMTQSPSSLSASVGDRVTITCSASSSVYYMYWFQQKPGKAPKLWIYSTSNLASGVPSRFSGSGSGTDYTLTISSMQPEDFATYYCQQRRNYPYTFGQGTKLEIK

SEQ ID NO: 3726 - protein, 150 aa, Artificial Sequence
  source: /note="Description of Artificial Sequence: Synthetic light chain variable domain"
NLCTEHSFALDCRSYGGGSSGGSAVGLLAPPGGLSGRSDQHGGSDIQMTQSPSSLSASVGDRVTITCSASSSVYYMYWFQQKPGKAPKLWIYSTSNLASGVPSRFSGSGSGTDYTLTISSMQPEDFATYYCQQRRNYPYTFGQGTKLEIK

SEQ ID NO: 3727 - protein, 157 aa, Artificial Sequence
  source: /note="Description of Artificial Sequence: Synthetic light chain variable domain"
QGQSGQGNLCTEHSFALDCRSYGGGSSGGSAVGLLAPPGGLSGRSDQHGGSDIQMTQSPSSLSASVGDRVTITCSASSSVYYMYWFQQKPGKAPKLWIYSTSNLASGVPSRFSGSGSGTDYTLTISSMQPEDFATYYCQQRRNYPYTFGQGTKLEIK

SEQ ID NO: 3728 - protein, 146 aa, Artificial Sequence
  source: /note="Description of Artificial Sequence: Synthetic light chain variable domain"
NLCTEHSFALDCRSYGGGSSGGSISSGLLSGRSDNPGGGSDIQMTQSPSSLSASVGDRVTITCSASSSVYYMYWFQQKPGKAPKLWIYSTSNLASGVPSRFSGSGSGTDYTLTISSMQPEDFATYYCQQRRNYPYTFGQGTKLEIK

SEQ ID NO: 3729 - protein, 153 aa, Artificial Sequence
  source: /note="Description of Artificial Sequence: Synthetic light chain variable domain"
QGQSGQGNLCTEHSFALDCRSYGGGSSGGSISSGLLSGRSDNPGGGSDIQMTQSPSSLSASVGDRVTITCSASSSVYYMYWFQQKPGKAPKLWIYSTSNLASGVPSRFSGSGSGTDYTLTISSMQPEDFATYYCQQRRNYPYTFGQGTKLEIK

SEQ ID NO: 3730 - protein, 150 aa, Artificial Sequence
  source: /note="Description of Artificial Sequence: Synthetic light chain variable domain"
NLCTEHSFALDCRSYGGGSSGGSAVGLLAPPGGLSGRSDNPGGSDIQMTQSPSSLSASVGDRVTITCSASSSVYYMYWFQQKPGKAPKLWIYSTSNLASGVPSRFSGSGSGTDYTLTISSMQPEDFATYYCQQRRNYPYTFGQGTKLEIK

SEQ ID NO: 3731 - protein, 157 aa, Artificial Sequence
  source: /note="Description of Artificial Sequence: Synthetic light chain variable domain"
QGQSGQGNLCTEHSFALDCRSYGGGSSGGSAVGLLAPPGGLSGRSDNPGGSDIQMTQSPSSLSASVGDRVTITCSASSSVYYMYWFQQKPGKAPKLWIYSTSNLASGVPSRFSGSGSGTDYTLTISSMQPEDFATYYCQQRRNYPYTFGQGTKLEIK

SEQ ID NO: 3732 - protein, 146 aa, Artificial Sequence
  source: /note="Description of Artificial Sequence: Synthetic light chain variable domain"
NLCTEHSFALDCRSYGGGSSGGSISSGLLSGRSANPGGGSDIQMTQSPSSLSASVGDRVTITCSASSSVYYMYWFQQKPGKAPKLWIYSTSNLASGVPSRFSGSGSGTDYTLTISSMQPEDFATYYCQQRRNYPYTFGQGTKLEIK

SEQ ID NO: 3733 - protein, 153 aa, Artificial Sequence
  source: /note="Description of Artificial Sequence: Synthetic light chain variable domain"
QGQSGQGNLCTEHSFALDCRSYGGGSSGGSISSGLLSGRSANPGGGSDIQMTQSPSSLSASVGDRVTITCSASSSVYYMYWFQQKPGKAPKLWIYSTSNLASGVPSRFSGSGSGTDYTLTISSMQPEDFATYYCQQRRNYPYTFGQGTKLEIK

SEQ ID NO: 3734 - protein, 150 aa, Artificial Sequence
  source: /note="Description of Artificial Sequence: Synthetic light chain variable domain"
NLCTEHSFALDCRSYGGGSSGGSAVGLLAPPGGLSGRSANPGGSDIQMTQSPSSLSASVGDRVTITCSASSSVYYMYWFQQKPGKAPKLWIYSTSNLASGVPSRFSGSGSGTDYTLTISSMQPEDFATYYCQQRRNYPYTFGQGTKLEIK

SEQ ID NO: 3735 - protein, 157 aa, Artificial Sequence
  source: /note="Description of Artificial Sequence: Synthetic light chain variable domain"
QGQSGQGNLCTEHSFALDCRSYGGGSSGGSAVGLLAPPGGLSGRSANPGGSDIQMTQSPSSLSASVGDRVTITCSASSSVYYMYWFQQKPGKAPKLWIYSTSNLASGVPSRFSGSGSGTDYTLTISSMQPEDFATYYCQQRRNYPYTFGQGTKLEIK

SEQ ID NO: 3736 - protein, 146 aa, Artificial Sequence
  source: /note="Description of Artificial Sequence: Synthetic light chain variable domain"
NLCTEHSFALDCRSYGGGSSGGSISSGLLSGRSANIGGGSDIQMTQSPSSLSASVGDRVTITCSASSSVYYMYWFQQKPGKAPKLWIYSTSNLASGVPSRFSGSGSGTDYTLTISSMQPEDFATYYCQQRRNYPYTFGQGTKLEIK

SEQ ID NO: 3737 - protein, 153 aa, Artificial Sequence
  source: /note="Description of Artificial Sequence: Synthetic light chain variable domain"
QGQSGQGNLCTEHSFALDCRSYGGGSSGGSISSGLLSGRSANIGGGSDIQMTQSPSSLSASVGDRVTITCSASSSVYYMYWFQQKPGKAPKLWIYSTSNLASGVPSRFSGSGSGTDYTLTISSMQPEDFATYYCQQRRNYPYTFGQGTKLEIK

SEQ ID NO: 3738 - protein, 150 aa, Artificial Sequence
  source: /note="Description of Artificial Sequence: Synthetic light chain variable domain"
NLCTEHSFALDCRSYGGGSSGGSAVGLLAPPGGLSGRSANIGGSDIQMTQSPSSLSASVGDRVTITCSASSSVYYMYWFQQKPGKAPKLWIYSTSNLASGVPSRFSGSGSGTDYTLTISSMQPEDFATYYCQQRRNYPYTFGQGTKLEIK

SEQ ID NO: 3739 - protein, 157 aa, Artificial Sequence
  source: /note="Description of Artificial Sequence: Synthetic light chain variable domain"
QGQSGQGNLCTEHSFALDCRSYGGGSSGGSAVGLLAPPGGLSGRSANIGGSDIQMTQSPSSLSASVGDRVTITCSASSSVYYMYWFQQKPGKAPKLWIYSTSNLASGVPSRFSGSGSGTDYTLTISSMQPEDFATYYCQQRRNYPYTFGQGTKLEIK

SEQ ID NO: 3740 - protein, 107 aa, Artificial Sequence
  source: /note="Description of Artificial Sequence: Synthetic light chain variable domain"
DIQMTQSPSSLSASVGDRVTITCRASQGISSWLAWYQQKPEKAPKSLIYAASSLQSGVPSRFSGSGSGTDFTLTISSLQPEDFATYYCQQYNSYPLTFGGGTKVEIK

SEQ ID NO: 3741 - protein, 107 aa, Artificial Sequence
  source: /note="Description of Artificial Sequence: Synthetic light chain variable domain"
EIVLTQSPGTLSLSPGERATLSCRASQSVSSYLAWYQQKPGQAPRLLIYGASSRATGIPDRFSGSGSGTDFTLTISRLEPEDFAVYYCQQYGSSPLTFGGGTKVEIK

SEQ ID NO: 3742 - protein, 106 aa, Artificial Sequence
  source: /note="Description of Artificial Sequence: Synthetic light chain variable domain"
AIQLTQSPSSLSASVGDRVTITCRASQGISSALAWYQQKPGKAPKLLIYDASSLESGVPSRFSGSGSGTDFTLTISSLQPEDFATYYCQQFNSYPTFGGGTKVEIK

SEQ ID NO: 3743 - protein, 107 aa, Artificial Sequence
  source: /note="Description of Artificial Sequence: Synthetic light chain variable domain"
AIQLTQSPSSLSASVGDRVTITCRASQGISSALAWYQQKPGKAPKLLIYDASSLESGVPSRFSGSGSGTDFTLTISSLQPEDFATYYCQQFSSYPRTFGQGTKVEIK

SEQ ID NO: 3744 - protein, 107 aa, Artificial Sequence
  source: /note="Description of Artificial Sequence: Synthetic light chain variable domain"
DIQMTQSPSSLSASVGDRVTITCRASQGISSWLAWYQQKPEKAPKSLIYAASSLQSGVPSRFSGSGSGTGFTLTISSLQPEDFATYYCQQYNSYPRTFGQGTKVEIK

SEQ ID NO: 3745 - protein, 107 aa, Artificial Sequence
  source: /note="Description of Artificial Sequence: Synthetic light chain variable domain"
EIVLTQSPATLSLSPGERATLSCRASQGVSSYLAWYQQKPGQAPRLLIYDASNRATGIPARFSGSGPGTDFTLTISSLEPEDFAVYYCQQRSNWHLTFGGGTKVEIK

SEQ ID NO: 3746 - protein, 107 aa, Artificial Sequence
  source: /note="Description of Artificial Sequence: Synthetic light chain variable domain"
EIVLTQSPGTLSLSPGERATLSCRASQSVSSSYLAWYQQKPGQAPRLLIYGASSRATGIPDRFSGSGSGTDFTLTISRLEPEDFAVYYCQHYGSSFTFGPGTKVDIK

SEQ ID NO: 3747 - protein, 107 aa, Artificial Sequence
  source: /note="Description of Artificial Sequence: Synthetic light chain variable domain"
DIQMTQSPSSLSASVGDRVTITCRASQYISSWLAWYQQKPEKAPKSLIYAASSLQSGVPSRFSGSGSGTDFTLTISSLQPEDFATYYCQQYHSYPPTFGQGTRLEIK

SEQ ID NO: 3748 - protein, 106 aa, Artificial Sequence
  source: /note="Description of Artificial Sequence: Synthetic light chain variable domain"
SIVMTQTPKFLLVSAGDRVTITCKASQSVTNDVAWYQQKPGQSPKLLIYYASNRYTGVPDRFTGSGYGTDFTFTISTMQAEDLAVYFCQQDYSSLTFGAGTKLELK

SEQ ID NO: 3749 - protein, 112 aa, Artificial Sequence
  source: /note="Description of Artificial Sequence: Synthetic light chain variable domain"
SIVMTPTPKFLLVSAGDRVTITCKASQSVSNDVAWYQQKPGQSPKLLIYYASTRYTGVPDRFTGSGYGTDFTFTISTVQAEDLAVYFCQQDYSSLTFGAGTKLELKRTVAAP

SEQ ID NO: 3750 - protein, 112 aa, Artificial Sequence
  source: /note="Description of Artificial Sequence: Synthetic light chain variable domain"
DVVMTQTPKFLLVSAGDRVTITCKASQSVSNDVAWYQQKPGQSPKLLIYYASTRYTGVPDRFTGSGYGTDFTFTISTVQAEDLAVYFCQQDYSSLTFGAGTKLELKRTVAAP

SEQ ID NO: 3751 - protein, 106 aa, Artificial Sequence
  source: /note="Description of Artificial Sequence: Synthetic light chain variable domain"
DAVMTQTPKFLLVSAGDRVTITCKASQSVTNDVAWYQQKPGQSPKLLIYYASNRYTGVPDRFTGSGYGTDFTFTISTVQAEDLAVYFCQQDYSSLTFGAGTKLELK

SEQ ID NO: 3752 - protein, 93 aa, Artificial Sequence
  source: /note="Description of Artificial Sequence: Synthetic light chain variable domain"
DVVMTQTPLSLPVSLGDQASISCRSSQSLVHRNGNTYLHWYLQGVPDRFSGSGSGTDFTLKISRVEAEDLGLYFCSQSSHVPPTFGAGTKLEI

SEQ ID NO: 3753 - protein, 112 aa, Artificial Sequence
  source: /note="Description of Artificial Sequence: Synthetic light chain variable domain"
DIQLTQTPLSLPVSLGDQASISCRSSQSLVHRNGNTYLHWYLQKPGQSPKLLIYTVSNRFGVPDRFSGSGSGTDFTLKISRVEAEDLGLYFCSQSSHVPPTFGAGTKLEIKR

SEQ ID NO: 3754 - protein, 113 aa, Artificial Sequence
  source: /note="Description of Artificial Sequence: Synthetic light chain variable domain"
DIQLTQSPLSLPVTLGQPASISCRSSQSLVCHRNGNTYLHWFQQRPGQSPRLLIYTVSNRFGVPDRFSGSGSGTDFTLKISRVEAEDVGVYFCSQSSHVPPTFGAGTRLEIKR

SEQ ID NO: 3755 - protein, 111 aa, Artificial Sequence
  source: /note="Description of Artificial Sequence: Synthetic light chain variable domain"
DVVMTQSPLSLPVTLGQPASISCRSSQSLVHSDGNTYLNWFQQRPGQSPRRLIYKVSNRDSGVPDRFSGSGSGTDFTLKISRVEAEDVGVYYCMQGTHWPFTFGQGTRLEI

SEQ ID NO: 3756 - protein, 113 aa, Artificial Sequence
  source: /note="Description of Artificial Sequence: Synthetic light chain variable domain"
DIQLTQTPLSLPVSLDQPASISCRSSQSLVHRNGNTYLHWYLQRPGQSPKLLIYTVSNRFSGVPDRFSGSGSGTDFTLKISRVEAEDLGVYFCSQSSHVPPTFGAGTKLEIKR

SEQ ID NO: 3757 - protein, 113 aa, Artificial Sequence
  source: /note="Description of Artificial Sequence: Synthetic light chain variable domain"
DIQLTQSPLSLPVTLGQPASISCRSSQSLVHRNGNTYLHWFQQRPGQSPRLLIYTVSNRFSGVPDRFSGSGSGTDFTLKISRVEAEDVGVYFCSQSSHVPPTFGAGTRLEIKR

SEQ ID NO: 3758 - protein, 120 aa, Artificial Sequence; identical to SEQ ID NO: 3008
  source: /note="Description of Artificial Sequence: Synthetic light chain variable domain"

SEQ ID NO: 3759 - protein, 111 aa, Artificial Sequence
  source: /note="Description of Artificial Sequence: Synthetic light chain variable domain"
DVVMTQTPLSLPVSLGDQASISCRSSQSLVHRNGNTYLHWYLQKPGQSPKLLIYTVSNRFSGVPDRFSGSGSGTDFTLKISRVEAEDLGLYFCSQSSHVPPTFGAGTKLEI

SEQ ID NO: 3760 - protein, 112 aa, Artificial Sequence
  source: /note="Description of Artificial Sequence: Synthetic light chain variable domain"
DVVMTQTPLTLSVTIGQPASISCKSSQSLLDSDGKTYLNWLLQRPGQSPKCLIYLVSKLDSGVPDRFTGSGSGTDFTLKISRVEAEDLGVYYCWQGTHFPQTFGGGTKLEIK

SEQ ID NO: 3761 - protein, 112 aa, Artificial Sequence
  source: /note="Description of Artificial Sequence: Synthetic light chain variable domain"
DIVMTQTPLSLPVTPGQPASISCKSSQSLLDSDGKTYLNWLLQKPGQSPQSLIYLVSKLDSGVPDRFSGSGSGTDFTLKISRVEAEDVGVYYCWQGTHFPQTFGQGTKVEIK

SEQ ID NO: 3762 - protein, 112 aa, Artificial Sequence
  source: /note="Description of Artificial Sequence: Synthetic light chain variable domain"
DVVMTQTPLSLPVTPGQPASISCKSSQSLLDSDGKTYLNWLLQKPGQSPQSLIYLVSKLDSGVPDRFSGSGSGTDFTLKISRVEAEDVGVYYCWQGTHFPQTFGQGTKVEIK

SEQ ID NO: 3763 - protein, 111 aa, Artificial Sequence
  source: /note="Description of Artificial Sequence: Synthetic light chain variable domain"
DIQMTQSPSSLSASVGDRVTITCKASQSVDYDGDSFLNWYQQKPGKAPKLLIYAARKLGRGVPSRFSGSGSGTDFTLTISSLQPEDFATYYCQQSNEDPLTFGQGTKVEIK

SEQ ID NO: 3764 - protein, 112 aa, Artificial Sequence
  source: /note="Description of Artificial Sequence: Synthetic light chain variable domain"
DIVMTQSPDSLAVSLGERATINCKSSQSLLNSRTRKNYLAWYQQKPGQPPKLLIYWASTRESGVPDRFSGSGSGTDFTLTISSLQAEDVAVYYCTQSFILRTFGQGTKVEIK

SEQ ID NO: 3765 - protein, 112 aa, Artificial Sequence
  source: /note="Description of Artificial Sequence: Synthetic light chain variable domain"
DIVMTQSPDSLAVSLGERATINCKSSQSLLNSRTRKNYLAWYQQKPGQSPKLLIYWTSTRKSGVPDRFSGSGSGTDFTLTISSLQAEDVAVYYCKQSFILRTFGQGTKVEIK

SEQ ID NO: 3766 - protein, 107 aa, Artificial Sequence
  source: /note="Description of Artificial Sequence: Synthetic light chain variable domain"
DIQMTQSPSSLSASVGDRVTITCRASQDIRNYLNWYQQKPGKAPKLLIYYTSRLESGVPSRFSGSGSGTDYTLTISSLQPEDFATYYCQQGNTLPWTFGQGTKLELK

SEQ ID NO: 3767 - protein, 112 aa, Artificial Sequence
  source: /note="Description of Artificial Sequence: Synthetic light chain variable domain"
DVVMTQTPLTLSVNIGQPASISCKSSQSLLDTDGKTYLNWLLQRPQGSPNRLIYLVSKLDSGVPDRFTGSGSGTDFTLKISRVEAEDLGIYYCWQGTHFPLTFGAGTKLELK

SEQ ID NO: 3768 - protein, 574 aa, Artificial Sequence
  source: /note="Description of Artificial Sequence: Synthetic light chain variable domain"
QVQLQQWGAGLLKPSETLSLTCAVYGGSFSGYYWSWIRQPPGKGLEWIGEINHSGSTNYNPSLKSRVTISVDTSKNQFSLKLSSVTAADTAVYYCARGRMAWGASVNFDYWGQGTLVTVSSGSASAPTLFPLVSCENSPSDTSSVAVGCLAQDFLPDSITFSWKYKNNSDISSTRGFPSVLRGGKYAATSQVLLPSKDVMQGTDEHVVCKVQHPNGNKEKNVPLPVIAELPPKVSVFVPPRDGFFGNPRKSKLICQATGFSPRQIQVSWLREGKQVGSGVTTDQVQAEAKESGPTTYKVTSTLTIKESDWLSQSMFTCRVDHRGLTFQQNASSMCVPDQDTAIRVFAIPPSFASIFLTKSTKLTCLVTDLTTYDSVTISWTRQNGEAVKTHTNISESHPNATFSAVGEASICEDDWNSGERFTCTVTHTDLPSPLKQTISRPKGVALHRPDVYLLPPAREQLNLRESATITCLVTGFSPADVFVQWMQRGQPLSPEKYVTSAPMPEPQAPGRYFAHSILTVSEEEWNTGETYTCVVAHEALPNRVTERTVDKSTGKPTLYNVSLVMSDTAGTCY

SEQ ID NO: 3769 - protein, 574 aa, Artificial Sequence
  source: /note="Description of Artificial Sequence: Synthetic light chain variable domain"
QVQLQQWGAGLLKPSETLSLTCAVYGGSFSGYYWSWIRQPPGKGLEWIGEINHSGSTNYNPSLKSRVTISVDTSKNQFSLKLSSVTAADTAVYYCARGRRAWGASVNFDYWGQGTLVTVSSGSASAPTLFPLVSCENSPSDTSSVAVGCLAQDFLPDSITFSWKYKNNSDISSTRGFPSVLRGGKYAATSQVLLPSKDVMQGTDEHVVCKVQHPNGNKEKNVPLPVIAELPPKVSVFVPPRDGFFGNPRKSKLICQATGFSPRQIQVSWLREGKQVGSGVTTDQVQAEAKESGPTTYKVTSTLTIKESDWLSQSMFTCRVDHRGLTFQQNASSMCVPDQDTAIRVFAIPPSFASIFLTKSTKLTCLVTDLTTYDSVTISWTRQNGEAVKTHTNISESHPNATFSAVGEASICEDDWNSGERFTCTVTHTDLPSPLKQTISRPKGVALHRPDVYLLPPAREQLNLRESATITCLVTGFSPADVFVQWMQRGQPLSPEKYVTSAPMPEPQAPGRYFAHSILTVSEEEWNTGETYTCVVAHEALPNRVTERTVDKSTGKPTLYNVSLVMSDTAGTCY

SEQ ID NO: 3770 - protein, 574 aa, Artificial Sequence
  source: /note="Description of Artificial Sequence: Synthetic light chain variable domain"
QVQLQQWGAGLLKPSETLSLTCAVYGGSFSGYYWSWIRQPPGKGLEWIGEINHSGSTNYNPSLKSRVTISVDTSKNQFSLKLSSVTAADTAVYYCARGRMARGASVNFDYWGQGTLVTVSSGSASAPTLFPLVSCENSPSDTSSVAVGCLAQDFLPDSITFSWKYKNNSDISSTRGFPSVLRGGKYAATSQVLLPSKDVMQGTDEHVVCKVQHPNGNKEKNVPLPVIAELPPKVSVFVPPRDGFFGNPRKSKLICQATGFSPRQIQVSWLREGKQVGSGVTTDQVQAEAKESGPTTYKVTSTLTIKESDWLSQSMFTCRVDHRGLTFQQNASSMCVPDQDTAIRVFAIPPSFASIFLTKSTKLTCLVTDLTTYDSVTISWTRQNGEAVKTHTNISESHPNATFSAVGEASICEDDWNSGERFTCTVTHTDLPSPLKQTISRPKGVALHRPDVYLLPPAREQLNLRESATITCLVTGFSPADVFVQWMQRGQPLSPEKYVTSAPMPEPQAPGRYFAHSILTVSEEEWNTGETYTCVVAHEALPNRVTERTVDKSTGKPTLYNVSLVMSDTAGTCY

SEQ ID NO: 3771 - protein, 574 aa, Artificial Sequence
  source: /note="Description of Artificial Sequence: Synthetic light chain variable domain"
QVQLQQWGAGLLKPSETLSLTCAVYGGSFSGYYWSWIRQPPGKGLEWIGEINHSGSTNYNPSLKSRVTISVDTSKNQFSLKLSSVTAADTAVYYCARGRRARGASVNFDYWGQGTLVTVSSGSASAPTLFPLVSCENSPSDTSSVAVGCLAQDFLPDSITFSWKYKNNSDISSTRGFPSVLRGGKYAATSQVLLPSKDVMQGTDEHVVCKVQHPNGNKEKNVPLPVIAELPPKVSVFVPPRDGFFGNPRKSKLICQATGFSPRQIQVSWLREGKQVGSGVTTDQVQAEAKESGPTTYKVTSTLTIKESDWLSQSMFTCRVDHRGLTFQQNASSMCVPDQDTAIRVFAIPPSFASIFLTKSTKLTCLVTDLTTYDSVTISWTRQNGEAVKTHTNISESHPNATFSAVGEASICEDDWNSGERFTCTVTHTDLPSPLKQTISRPKGVALHRPDVYLLPPAREQLNLRESATITCLVTGFSPADVFVQWMQRGQPLSPEKYVTSAPMPEPQAPGRYFAHSILTVSEEEWNTGETYTCVVAHEALPNRVTERTVDKSTGKPTLYNVSLVMSDTAGTCY

SEQ ID NO: 3772 - protein, 574 aa, Artificial Sequence
  source: /note="Description of Artificial Sequence: Synthetic light chain variable domain"
QVQLQQWGAGLLKPSETLSLTCAVYGGSFSGYYWSWIRQPPGKGLEWIGEINHSGSTNYNPSLKSRVTISVDTSKNQFSLKLSSVTAADTAVYYCARRGMAWGASVNFDYWGQGTLVTVSSGSASAPTLFPLVSCENSPSDTSSVAVGCLAQDFLPDSITFSWKYKNNSDISSTRGFPSVLRGGKYAATSQVLLPSKDVMQGTDEHVVCKVQHPNGNKEKNVPLPVIAELPPKVSVFVPPRDGFFGNPRKSKLICQATGFSPRQIQVSWLREGKQVGSGVTTDQVQAEAKESGPTTYKVTSTLTIKESDWLSQSMFTCRVDHRGLTFQQNASSMCVPDQDTAIRVFAIPPSFASIFLTKSTKLTCLVTDLTTYDSVTISWTRQNGEAVKTHTNISESHPNATFSAVGEASICEDDWNSGERFTCTVTHTDLPSPLKQTISRPKGVALHRPDVYLLPPAREQLNLRESATITCLVTGFSPADVFVQWMQRGQPLSPEKYVTSAPMPEPQAPGRYFAHSILTVSEEEWNTGETYTCVVAHEALPNRVTERTVDKSTGKPTLYNVSLVMSDTAGTCY

SEQ ID NO: 3773 - protein, 573 aa, Artificial Sequence
  source: /note="Description of Artificial Sequence: Synthetic light chain variable domain"
VQLQQWGAGLLKPSETLSLTCAVYGGSFSGYYWSWIRQPPGKGLEWIGEINHSGSTNYNPSLKSRVTISVDTSKNQFSLKLSSVTAADTAVYYCARRRMAWGASVNFDYWGQGTLVTVSSGSASAPTLFPLVSCENSPSDTSSVAVGCLAQDFLPDSITFSWKYKNNSDISSTRGFPSVLRGGKYAATSQVLLPSKDVMQGTDEHVVCKVQHPNGNKEKNVPLPVIAELPPKVSVFVPPRDGFFGNPRKSKLICQATGFSPRQIQVSWLREGKQVGSGVTTDQVQAEAKESGPTTYKVTSTLTIKESDWLSQSMFTCRVDHRGLTFQQNASSMCVPDQDTAIRVFAIPPSFASIFLTKSTKLTCLVTDLTTYDSVTISWTRQNGEAVKTHTNISESHPNATFSAVGEASICEDDWNSGERFTCTVTHTDLPSPLKQTISRPKGVALHRPDVYLLPPAREQLNLRESATITCLVTGFSPADVFVQWMQRGQPLSPEKYVTSAPMPEPQAPGRYFAHSILTVSEEEWNTGETYTCVVAHEALPNRVTERTVDKSTGKPTLYNVSLVMSDTAGTCY

SEQ ID NO: 3774 - protein, 574 aa, Artificial Sequence
  source: /note="Description of Artificial Sequence: Synthetic light chain variable domain"
QVQLQQWGAGLLKPSETLSLTCAVYGGSFSGYYWSWIRQPPGKGLEWIGEINHSGSTNYNPSLKSRVTISVDTSKNQFSLKLSSVTAADTAVYYCARRGMARGASVNFDYWGQGTLVTVSSGSASAPTLFPLVSCENSPSDTSSVAVGCLAQDFLPDSITFSWKYKNNSDISSTRGFPSVLRGGKYAATSQVLLPSKDVMQGTDEHVVCKVQHPNGNKEKNVPLPVIAELPPKVSVFVPPRDGFFGNPRKSKLICQATGFSPRQIQVSWLREGKQVGSGVTTDQVQAEAKESGPTTYKVTSTLTIKESDWLSQSMFTCRVDHRGLTFQQNASSMCVPDQDTAIRVFAIPPSFASIFLTKSTKLTCLVTDLTTYDSVTISWTRQNGEAVKTHTNISESHPNATFSAVGEASICEDDWNSGERFTCTVTHTDLPSPLKQTISRPKGVALHRPDVYLLPPAREQLNLRESATITCLVTGFSPADVFVQWMQRGQPLSPEKYVTSAPMPEPQAPGRYFAHSILTVSEEEWNTGETYTCVVAHEALPNRVTERTVDKSTGKPTLYNVSLVMSDTAGTCY

SEQ ID NO: 3775 - protein, 574 aa, Artificial Sequence
  source: /note="Description of Artificial Sequence: Synthetic light chain variable domain"
QVQLQQWGAGLLKPSETLSLTCAVYGGSFSGYYWSWIRQPPGKGLEWIGEINHSGSTNYNPSLKSRVTISVDTSKNQFSLKLSSVTAADTAVYYCARRGRARGASVNFDYWGQGTLVTVSSGSASAPTLFPLVSCENSPSDTSSVAVGCLAQDFLPDSITFSWKYKNNSDISSTRGFPSVLRGGKYAATSQVLLPSKDVMQGTDEHVVCKVQHPNGNKEKNVPLPVIAELPPKVSVFVPPRDGFFGNPRKSKLICQATGFSPRQIQVSWLREGKQVGSGVTTDQVQAEAKESGPTTYKVTSTLTIKESDWLSQSMFTCRVDHRGLTFQQNASSMCVPDQDTAIRVFAIPPSFASIFLTKSTKLTCLVTDLTTYDSVTISWTRQNGEAVKTHTNISESHPNATFSAVGEASICEDDWNSGERFTCTVTHTDLPSPLKQTISRPKGVALHRPDVYLLPPAREQLNLRESATITCLVTGFSPADVFVQWMQRGQPLSPEKYVTSAPMPEPQAPGRYFAHSILTVSEEEWNTGETYTCVVAHEALPNRVTERTVDKSTGKPTLYNVSLVMSDTAGTCY

SEQ ID NO: 3776 - protein, 574 aa, Artificial Sequence
  source: /note="Description of Artificial Sequence: Synthetic light chain variable domain"
QVQLQQWGAGLLKPSETLSLTCAVYGGSFSGYYWSWIRQPPGKGLEWIGEINHSGSTNYNPSLKSRVTISVDTSKNQFSLKLSSVTAADTAVYYCARRRGARGASVNFDYWGQGTLVTVSSGSASAPTLFPLVSCENSPSDTSSVAVGCLAQDFLPDSITFSWKYKNNSDISSTRGFPSVLRGGKYAATSQVLLPSKDVMQGTDEHVVCKVQHPNGNKEKNVPLPVIAELPPKVSVFVPPRDGFFGNPRKSKLICQATGFSPRQIQVSWLREGKQVGSGVTTDQVQAEAKESGPTTYKVTSTLTIKESDWLSQSMFTCRVDHRGLTFQQNASSMCVPDQDTAIRVFAIPPSFASIFLTKSTKLTCLVTDLTTYDSVTISWTRQNGEAVKTHTNISESHPNATFSAVGEASICEDDWNSGERFTCTVTHTDLPSPLKQTISRPKGVALHRPDVYLLPPAREQLNLRESATITCLVTGFSPADVFVQWMQRGQPLSPEKYVTSAPMPEPQAPGRYFAHSILTVSEEEWNTGETYTCVVAHEALPNRVTERTVDKSTGKPTLYNVSLVMSDTAGTCY

SEQ ID NO: 3777 - protein, 574 aa, Artificial Sequence
  source: /note="Description of Artificial Sequence: Synthetic light chain variable domain"
QVQLQQWGAGLLKPSETLSLTCAVYGGSFSGYYWSWIRQPPGKGLEWIGEINHSGSTNYNPSLKSRVTISVDTSKNQFSLKLSSVTAADTAVYYCARAGRAWGASVNFDYWGQGTLVTVSSGSASAPTLFPLVSCENSPSDTSSVAVGCLAQDFLPDSITFSWKYKNNSDISSTRGFPSVLRGGKYAATSQVLLPSKDVMQGTDEHVVCKVQHPNGNKEKNVPLPVIAELPPKVSVFVPPRDGFFGNPRKSKLICQATGFSPRQIQVSWLREGKQVGSGVTTDQVQAEAKESGPTTYKVTSTLTIKESDWLSQSMFTCRVDHRGLTFQQNASSMCVPDQDTAIRVFAIPPSFASIFLTKSTKLTCLVTDLTTYDSVTISWTRQNGEAVKTHTNISESHPNATFSAVGEASICEDDWNSGERFTCTVTHTDLPSPLKQTISRPKGVALHRPDVYLLPPAREQLNLRESATITCLVTGFSPADVFVQWMQRGQPLSPEKYVTSAPMPEPQAPGRYFAHSILTVSEEEWNTGETYTCVVAHEALPNRVTERTVDKSTGKPTLYNVSLVMSDTAGTCY

SEQ ID NO: 3778 - protein, 574 aa, Artificial Sequence
  source: /note="Description of Artificial Sequence: Synthetic light chain variable domain"
QVQLQQWGAGLLKPSETLSLTCAVYGGSFSGYYWSWIRQPPGKGLEWIGEINHSGSTNYNPSLKSRVTISVDTSKNQFSLKLSSVTAADTAVYYCARRGRAWGASVNFDYWGQGTLVTVSSGSASAPTLFPLVSCENSPSDTSSVAVGCLAQDFLPDSITFSWKYKNNSDISSTRGFPSVLRGGKYAATSQVLLPSKDVMQGTDEHVVCKVQHPNGNKEKNVPLPVIAELPPKVSVFVPPRDGFFGNPRKSKLICQATGFSPRQIQVSWLREGKQVGSGVTTDQVQAEAKESGPTTYKVTSTLTIKESDWLSQSMFTCRVDHRGLTFQQNASSMCVPDQDTAIRVFAIPPSFASIFLTKSTKLTCLVTDLTTYDSVTISWTRQNGEAVKTHTNISESHPNATFSAVGEASICEDDWNSGERFTCTVTHTDLPSPLKQTISRPKGVALHRPDVYLLPPAREQLNLRESATITCLVTGFSPADVFVQWMQRGQPLSPEKYVTSAPMPEPQAPGRYFAHSILTVSEEEWNTGETYTCVVAHEALPNRVTERTVDKSTGKPTLYNVSLVMSDTAGTCY

SEQ ID NO: 3779 - protein, 573 aa, Artificial Sequence
  source: /note="Description of Artificial Sequence: Synthetic light chain variable domain"
QVQLQQWGAGLLKPSETLSLTCAVYGGSFSGYYWSWIRQPPGKGLEWIGEINHSGSTNYNPSLKSRVTISVDTSKNQFSLKLSSVTAADTAVYYCARARTAWGSSIFDYWGQGTLVTVSSGSASAPTLFPLVSCENSPSDTSSVAVGCLAQDFLPDSITFSWKYKNNSDISSTRGFPSVLRGGKYAATSQVLLPSKDVMQGTDEHVVCKVQHPNGNKEKNVPLPVIAELPPKVSVFVPPRDGFFGNPRKSKLICQATGFSPRQIQVSWLREGKQVGSGVTTDQVQAEAKESGPTTYKVTSTLTIKESDWLSQSMFTCRVDHRGLTFQQNASSMCVPDQDTAIRVFAIPPSFASIFLTKSTKLTCLVTDLTTYDSVTISWTRQNGEAVKTHTNISESHPNATFSAVGEASICEDDWNSGERFTCTVTHTDLPSPLKQTISRPKGVALHRPDVYLLPPAREQLNLRESATITCLVTGFSPADVFVQWMQRGQPLSPEKYVTSAPMPEPQAPGRYFAHSILTVSEEEWNTGETYTCVVAHEALPNRVTERTVDKSTGKPTLYNVSLVMSDTAGTCY

SEQ ID NO: 3780 - protein, 573 aa, Artificial Sequence
  source: /note="Description of Artificial Sequence: Synthetic light chain variable domain"
QVQLQQWGAGLLKPSETLSLTCAVYGGSFSGYYWSWIRQPPGKGLEWIGEINHSGSTNYNPSLKSRVTISVDTSKNQFSLKLSSVTAADTAVYYCARARRAWGSSIFDYWGQGTLVTVSSGSASAPTLFPLVSCENSPSDTSSVAVGCLAQDFLPDSITFSWKYKNNSDISSTRGFPSVLRGGKYAATSQVLLPSKDVMQGTDEHVVCKVQHPNGNKEKNVPLPVIAELPPKVSVFVPPRDGFFGNPRKSKLICQATGFSPRQIQVSWLREGKQVGSGVTTDQVQAEAKESGPTTYKVTSTLTIKESDWLSQSMFTCRVDHRGLTFQQNASSMCVPDQDTAIRVFAIPPSFASIFLTKSTKLTCLVTDLTTYDSVTISWTRQNGEAVKTHTNISESHPNATFSAVGEASICEDDWNSGERFTCTVTHTDLPSPLKQTISRPKGVALHRPDVYLLPPAREQLNLRESATITCLVTGFSPADVFVQWMQRGQPLSPEKYVTSAPMPEPQAPGRYFAHSILTVSEEEWNTGETYTCVVAHEALPNRVTERTVDKSTGKPTLYNVSLVMSDTAGTCY

SEQ ID NO: 3781 - protein, 573 aa, Artificial Sequence; identical to SEQ ID NO: 3780
  source: /note="Description of Artificial Sequence: Synthetic light chain variable domain"

SEQ ID NO: 3782 - protein, 573 aa, Artificial Sequence
  source: /note="Description of Artificial Sequence: Synthetic light chain variable domain"
QVQLQQWGAGLLKPSETLSLTCAVYGGSFSGYYWSWIRQPPGKGLEWIGEINHSGSTNYNPSLKSRVTISVDTSKNQFSLKLSSVTAADTAVYYCARARRARGSSIFDYWGQGTLVTVSSGSASAPTLFPLVSCENSPSDTSSVAVGCLAQDFLPDSITFSWKYKNNSDISSTRGFPSVLRGGKYAATSQVLLPSKDVMQGTDEHVVCKVQHPNGNKEKNVPLPVIAELPPKVSVFVPPRDGFFGNPRKSKLICQATGFSPRQIQVSWLREGKQVGSGVTTDQVQAEAKESGPTTYKVTSTLTIKESDWLSQSMFTCRVDHRGLTFQQNASSMCVPDQDTAIRVFAIPPSFASIFLTKSTKLTCLVTDLTTYDSVTISWTRQNGEAVKTHTNISESHPNATFSAVGEASICEDDWNSGERFTCTVTHTDLPSPLKQTISRPKGVALHRPDVYLLPPAREQLNLRESATITCLVTGFSPADVFVQWMQRGQPLSPEKYVTSAPMPEPQAPGRYFAHSILTVSEEEWNTGETYTCVVAHEALPNRVTERTVDKSTGKPTLYNVSLVMSDTAGTCY

SEQ ID NO: 3783 - protein, 573 aa, Artificial Sequence
  source: /note="Description of Artificial Sequence: Synthetic light chain variable domain"
QVQLQQWGAGLLKPSETLSLTCAVYGGSFSGYYWSWIRQPPGKGLEWIGEINHSGSTNYNPSLKSRVTISVDTSKNQFSLKLSSVTAADTAVYYCARRATAWGSSIFDYWGQGTLVTVSSGSASAPTLFPLVSCENSPSDTSSVAVGCLAQDFLPDSITFSWKYKNNSDISSTRGFPSVLRGGKYAATSQVLLPSKDVMQGTDEHVVCKVQHPNGNKEKNVPLPVIAELPPKVSVFVPPRDGFFGNPRKSKLICQATGFSPRQIQVSWLREGKQVGSGVTTDQVQAEAKESGPTTYKVTSTLTIKESDWLSQSMFTCRVDHRGLTFQQNASSMCVPDQDTAIRVFAIPPSFASIFLTKSTKLTCLVTDLTTYDSVTISWTRQNGEAVKTHTNISESHPNATFSAVGEASICEDDWNSGERFTCTVTHTDLPSPLKQTISRPKGVALHRPDVYLLPPAREQLNLRESATITCLVTGFSPADVFVQWMQRGQPLSPEKYVTSAPMPEPQAPGRYFAHSILTVSEEEWNTGETYTCVVAHEALPNRVTERTVDKSTGKPTLYNVSLVMSDTAGTCY

SEQ ID NO: 3784 - protein, 573 aa, Artificial Sequence
  source: /note="Description of Artificial Sequence: Synthetic light chain variable domain"
QVQLQQWGAGLLKPSETLSLTCAVYGGSFSGYYWSWIRQPPGKGLEWIGEINHSGSTNYNPSLKSRVTISVDTSKNQFSLKLSSVTAADTAVYYCARRRTAWGSSIFDYWGQGTLVTVSSGSASAPTLFPLVSCENSPSDTSSVAVGCLAQDFLPDSITFSWKYKNNSDISSTRGFPSVLRGGKYAATSQVLLPSKDVMQGTDEHVVCKVQHPNGNKEKNVPLPVIAELPPKVSVFVPPRDGFFGNPRKSKLICQATGFSPRQIQVSWLREGKQVGSGVTTDQVQAEAKESGPTTYKVTSTLTIKESDWLSQSMFTCRVDHRGLTFQQNASSMCVPDQDTAIRVFAIPPSFASIFLTKSTKLTCLVTDLTTYDSVTISWTRQNGEAVKTHTNISESHPNATFSAVGEASICEDDWNSGERFTCTVTHTDLPSPLKQTISRPKGVALHRPDVYLLPPAREQLNLRESATITCLVTGFSPADVFVQWMQRGQPLSPEKYVTSAPMPEPQAPGRYFAHSILTVSEEEWNTGETYTCVVAHEALPNRVTERTVDKSTGKPTLYNVSLVMSDTAGTCY

SEQ ID NO: 3785 - protein, 573 aa, Artificial Sequence
  source: /note="Description of Artificial Sequence: Synthetic light chain variable domain"
QVQLQQWGAGLLKPSETLSLTCAVYGGSFSGYYWSWIRQPPGKGLEWIGEINHSGSTNYNPSLKSRVTISVDTSKNQFSLKLSSVTAADTAVYYCARRATARGSSIFDYWGQGTLVTVSSGSASAPTLFPLVSCENSPSDTSSVAVGCLAQDFLPDSITFSWKYKNNSDISSTRGFPSVLRGGKYAATSQVLLPSKDVMQGTDEHVVCKVQHPNGNKEKNVPLPVIAELPPKVSVFVPPRDGFFGNPRKSKLICQATGFSPRQIQVSWLREGKQVGSGVTTDQVQAEAKESGPTTYKVTSTLTIKESDWLSQSMFTCRVDHRGLTFQQNASSMCVPDQDTAIRVFAIPPSFASIFLTKSTKLTCLVTDLTTYDSVTISWTRQNGEAVKTHTNISESHPNATFSAVGEASICEDDWNSGERFTCTVTHTDLPSPLKQTISRPKGVALHRPDVYLLPPAREQLNLRESATITCLVTGFSPADVFVQWMQRGQPLSPEKYVTSAPMPEPQAPGRYFAHSILTVSEEEWNTGETYTCVVAHEALPNRVTERTVDKSTGKPTLYNVSLVMSDTAGTCY

SEQ ID NO: 3786 - protein, 573 aa, Artificial Sequence
  source: /note="Description of Artificial Sequence: Synthetic light chain variable domain"
QVQLQQWGAGLLKPSETLSLTCAVYGGSFSGYYWSWIRQPPGKGLEWIGEINHSGSTNYNPSLKSRVTISVDTSKNQFSLKLSSVTAADTAVYYCARRARARGSSIFDYWGQGTLVTVSSGSASAPTLFPLVSCENSPSDTSSVAVGCLAQDFLPDSITFSWKYKNNSDISSTRGFPSVLRGGKYAATSQVLLPSKDVMQGTDEHVVCKVQHPNGNKEKNVPLPVIAELPPKVSVFVPPRDGFFGNPRKSKLICQATGFSPRQIQVSWLREGKQVGSGVTTDQVQAEAKESGPTTYKVTSTLTIKESDWLSQSMFTCRVDHRGLTFQQNASSMCVPDQDTAIRVFAIPPSFASIFLTKSTKLTCLVTDLTTYDSVTISWTRQNGEAVKTHTNISESHPNATFSAVGEASICEDDWNSGERFTCTVTHTDLPSPLKQTISRPKGVALHRPDVYLLPPAREQLNLRESATITCLVTGFSPADVFVQWMQRGQPLSPEKYVTSAPMPEPQAPGRYFAHSILTVSEEEWNTGETYTCVVAHEALPNRVTERTVDKSTGKPTLYNVSLVMSDTAGTCY

SEQ ID NO: 3787 - protein, 573 aa, Artificial Sequence
  source: /note="Description of Artificial Sequence: Synthetic light chain variable domain"
QVQLQQWGAGLLKPSETLSLTCAVYGGSFSGYYWSWIRQPPGKGLEWIGEINHSGSTNYNPSLKSRVTISVDTSKNQFSLKLSSVTAADTAVYYCARRRTARGSSIFDYWGQGTLVTVSSGSASAPTLFPLVSCENSPSDTSSVAVGCLAQDFLPDSITFSWKYKNNSDISSTRGFPSVLRGGKYAATSQVLLPSKDVMQGTDEHVVCKVQHPNGNKEKNVPLPVIAELPPKVSVFVPPRDGFFGNPRKSKLICQATGFSPRQIQVSWLREGKQVGSGVTTDQVQAEAKESGPTTYKVTSTLTIKESDWLSQSMFTCRVDHRGLTFQQNASSMCVPDQDTAIRVFAIPPSFASIFLTKSTKLTCLVTDLTTYDSVTISWTRQNGEAVKTHTNISESHPNATFSAVGEASICEDDWNSGERFTCTVTHTDLPSPLKQTISRPKGVALHRPDVYLLPPAREQLNLRESATITCLVTGFSPADVFVQWMQRGQPLSPEKYVTSAPMPEPQAPGRYFAHSILTVSEEEWNTGETYTCVVAHEALPNRVTERTVDKSTGKPTLYNVSLVMSDTAGTCY

SEQ ID NO: 3788 - protein, 573 aa, Artificial Sequence
  source: /note="Description of Artificial Sequence: Synthetic light chain variable domain"
QVQLQQWGAGLLKPSETLSLTCAVYGGSFSGYYWSWIRQPPGKGLEWIGEINHSGSTNYNPSLKSRVTISVDTSKNQFSLKLSSVTAADTAVYYCARGARAWGSSIFDYWGQGTLVTVSSGSASAPTLFPLVSCENSPSDTSSVAVGCLAQDFLPDSITFSWKYKNNSDISSTRGFPSVLRGGKYAATSQVLLPSKDVMQGTDEHVVCKVQHPNGNKEKNVPLPVIAELPPKVSVFVPPRDGFFGNPRKSKLICQATGFSPRQIQVSWLREGKQVGSGVTTDQVQAEAKESGPTTYKVTSTLTIKESDWLSQSMFTCRVDHRGLTFQQNASSMCVPDQDTAIRVFAIPPSFASIFLTKSTKLTCLVTDLTTYDSVTISWTRQNGEAVKTHTNISESHPNATFSAVGEASICEDDWNSGERFTCTVTHTDLPSPLKQTISRPKGVALHRPDVYLLPPAREQLNLRESATITCLVTGFSPADVFVQWMQRGQPLSPEKYVTSAPMPEPQAPGRYFAHSILTVSEEEWNTGETYTCVVAHEALPNRVTERTVDKSTGKPTLYNVSLVMSDTAGTCY

SEQ ID NO: 3789 - protein, 573 aa, Artificial Sequence
  source: /note="Description of Artificial Sequence: Synthetic light chain variable domain"
QVQLQQWGAGLLKPSETLSLTCAVYGGSFSGYYWSWIRQPPGKGLEWIGEINHSGSTNYNPSLKSRVTISVDTSKNQFSLKLSSVTAADTAVYYCARRARAWGSSIFDYWGQGTLVTVSSGSASAPTLFPLVSCENSPSDTSSVAVGCLAQDFLPDSITFSWKYKNNSDISSTRGFPSVLRGGKYAATSQVLLPSKDVMQGTDEHVVCKVQHPNGNKEKNVPLPVIAELPPKVSVFVPPRDGFFGNPRKSKLICQATGFSPRQIQVSWLREGKQVGSGVTTDQVQAEAKESGPTTYKVTSTLTIKESDWLSQSMFTCRVDHRGLTFQQNASSMCVPDQDTAIRVFAIPPSFASIFLTKSTKLTCLVTDLTTYDSVTISWTRQNGEAVKTHTNISESHPNATFSAVGEASICEDDWNSGERFTCTVTHTDLPSPLKQTISRPKGVALHRPDVYLLPPAREQLNLRESATITCLVTGFSPADVFVQWMQRGQPLSPEKYVTSAPMPEPQAPGRYFAHSILTVSEEEWNTGETYTCVVAHEALPNRVTERTVDKSTGKPTLYNVSLVMSDTAGTCY

SEQ ID NO: 3790 - protein, 121 aa, Artificial Sequence
  source: /note="Description of Artificial Sequence: Synthetic light chain variable domain"
EVRLVESGGGLVQGPGSLRLSCAASGFALTDYYMSWVRQSPGKTLEWLGFIANKANGHTTDYSPSVKGRFTISRDNSQTILYLQMNTLRTEDSATYYCARDMGIRWNFDVWGQGTTVTVSS

SEQ ID NO: 3791 - protein, 126 aa, Artificial Sequence
  source: /note="Description of Artificial Sequence: Synthetic light chain variable domain"
EVQLVESGGGVVQPGRSLRLSCSSSGFIFSSYAMYWVRQAPGKGLEWVAIIWDDGSDQHYADSVKGRFTISRDNSKNTLFLQMDSLRPEDTGVYFCARDGGHGFCSSASCFGPDYWGQGTPVTVSS

SEQ ID NO: 3792 - protein, 107 aa, Artificial Sequence
  source: /note="Description of Artificial Sequence: Synthetic light chain variable domain"
DIQLTQSPSSLSASVGDRVTITCQASQDIIKYLNWYQQKPGKAPKLLIYEASNLQAGVPSRFSGSGSGTDFTFTISSLQPEDIATYYCQQYQSLPYTFGQGTKVEIK

SEQ ID NO: 3793 - protein, 107 aa, Artificial Sequence
  source: /note="Description of Artificial Sequence: Synthetic light chain variable domain"
DIQLTQSPSSLSASVGDRVTMTCSASSRVSYIHWYQQKPGKAPKRWIYGTSTLASGVPARFSGSGSGTDFTFTISSLQPEDIATYYCQQWSYNPPTFGQGTKVEIKR

SEQ ID NO: 3794 - protein, 107 aa, Artificial Sequence
  source: /note="Description of Artificial Sequence: Synthetic light chain variable domain"
DIQLTQSPAIMSASPGEKVTMTCSASSRVSYIHWYQQKSGTSPKRWIYGTSTLASGVPARFSGSGSGTSYSLTISSMEAEDAATYYCQQWSYNPPTFGAGTKLELKR

SEQ ID NO: 3795 - protein, 214 aa, Artificial Sequence
  source: /note="Description of Artificial Sequence: Synthetic light chain variable domain"
DIQMTQSPSSVSASVGDRVTITCKASEDIYNRLAWYQQKPGKAPKLLIYGATSLETGVPSRFSGSGSGTDYTLTISSLQPEDFATYYCQQYWSTPLTFGQGTKLEIKRTVAAPSVFIFPPSDEQLKSGTASVVCLLNNFYPREAKVQWKVDNALQSGNSQESVTEQDSKDSTYSLSSTLTLSKADYEKHKVYACEVTHQGLSSPVTKSFNRGEC

SEQ ID NO: 3796 - protein, 217 aa, Artificial Sequence
  source: /note="Description of Artificial Sequence: Synthetic light chain variable domain"
DIVMTQSPDSLAVSLGERATINCRASQTVSTSSYSYMHWYQQKPGQPPKLLIYFASNVESGVPDRFSGSGSGTDFTLTISSLQAEDVAVYYCQHSWEIPWTFGQGTKLEIKRTVAAPSVFIFPPSDEQLKSGTASVVCLLNNFYPREAKVQWKVDNALQSGNSQESVTEQDSKDSTYSLSSTLTLSKADYEKHKVYACEVTHQGLSSPVTKSFNRGE

SEQ ID NO: 3797 - protein, 215 aa, Artificial Sequence
  source: /note="Description of Artificial Sequence: Synthetic light chain variable domain"
EIVLTQSPATLSLSPGERATLSCSVSSSISSSNLHWYQQKPGQAPRLLIYGTSNLASGIPARFSGSGSGTDFTLTISSLEPEDFAVYYCQQWSSYPHTFGGGTKVEIKRTVAAPSVFIFPPSDEQLKSGTASVVCLLNNFYPREAKVQWKVDNALQSGNSQESVTEQDSKDSTYSLSSTLTLSKADYEKHKVYACEVTHQGLSSPVTKSFNRGEC

SEQ ID NO: 3798 - protein, 214 aa, Artificial Sequence
  source: /note="Description of Artificial Sequence: Synthetic light chain variable domain"
DIQMTQSPSSLSASVGDRVTITCKAGQNVGTSVAWFQQKPGKAPKSLIYSASYRYSGVPSRFSGSGSGTDFTLTISSLQPEDFATYYCQQYITYPYTFGGGTKVEIKRTVAAPSVFIFPPSDEQLKSGTASVVCLLNNFYPREAKVQWKVDNALQSGNSQESVTEQDSKDSTYSLSSTLTLSKADYEKHKVYACEVTHQGLSSPVTKSFNRGEC

SEQ ID NO: 3799 - protein, 107 aa, Artificial Sequence
  source: /note="Description of Artificial Sequence: Synthetic light chain variable domain"
DIQMTQSSSSFSVSLGDRVTITCKASEDIYNRLAWYQQKPGNAPRLLISGATSLETGTPSRFSGSGSGKDYTLSITSLRTEDAATYYCQQYWSTPLTFGTGTKLELK

SEQ ID NO: 3800 - protein, 111 aa, Artificial Sequence
  source: /note="Description of Artificial Sequence: Synthetic light chain variable domain"
DIVLTQSPASLAVSLGQRATISCRASQTVSTSSYSYMHWFQQKPGQPPKLLIKFASNVESGVPARFSGSGSGTDFTLNIHPVEEEDISTYYCQHSWEIPWTFGGGTKLEIK

SEQ ID NO: 3801 - protein, 108 aa, Artificial Sequence
  source: /note="Description of Artificial Sequence: Synthetic light chain variable domain"
QIVLTQSPAIMSASLGERVTMTCTASSSVSSSYLHWYQQKPGSSPTLWIYRTSDLASGVPARFSGSGSGTSYSLTISSMEAEDAATYYCHQYHRSPWTFGGGTRLEIK

SEQ ID NO: 3802 - protein, 107 aa, Artificial Sequence
  source: /note="Description of Artificial Sequence: Synthetic light chain variable domain"
DIQMTQSSSSFSVSLGDRVTITCKASEDIYNRLAWYQQKPGNAPRLLISGATSLETGVPSRFSGSGSGKDYTLSITSLQTEDVATYYCQQYWSNPPTFGGGTKLEIK

SEQ ID NO: 3803 - protein, 106 aa, Artificial Sequence
  source: /note="Description of Artificial Sequence: Synthetic light chain variable domain"
DVQMTQSPSSLSASLGERVSLTCQASQSVSNNLNWYQQTPGKAPRLLIYGASKLEDGVSSRFSGTGYGTDFTFTISSLEEEDVATYFCLQHRYLWTFGGGTKLEIK

SEQ ID NO: 3804 - protein, 107 aa, Artificial Sequence
  source: /note="Description of Artificial Sequence: Synthetic light chain variable domain"
DIQMTQSSSSFSVSLGDRVTITCKASEDIYNRLAWYQQKPGNAPRLLICGATSLETGVPSRFSGSGSGKDYTLSITSLQTEDVATYYCQQYWSTPLTFGAGTKLELK

SEQ ID NO: 3805 - protein, 108 aa, Artificial Sequence
  source: /note="Description of Artificial Sequence: Synthetic light chain variable domain"
EIVLTQSPALMAASPGEKVTITCSVSSSISSSNLHWYQQKSGTSPKLWIYGTSNLASGVPVRFSGSGSGTSYSLTISNMEAEDAATYYCQQWSSYPHTFGGGTKLEIK

SEQ ID NO: 3806 - protein, 107 aa, Artificial Sequence
  source: /note="Description of Artificial Sequence: Synthetic light chain variable domain"
DIQMTQSSSSFSVSLGDRVTITCKASEDIYNRLAWYQQKPGNAPRLLISGATSLEAGVPSGFSGSGSGKDYTLSITSLQTEDVATYYCQQYWSTPPTFGGGTKLELK

SEQ ID NO: 3807 - protein, 107 aa, Artificial Sequence
  source: /note="Description of Artificial Sequence: Synthetic light chain variable domain"
DIQMTQSSSSFSVSLGDRVTITCKASEDIYNRLAWYQQNPGNTPRLLMSGATSLETGVPSRFSGSGSGKDYTLSITSLQIEDVSTYYCQQYWSTPPTFGGGTRLEIK

SEQ ID NO: 3808 - protein, 107 aa, Artificial Sequence
  source: /note="Description of Artificial Sequence: Synthetic light chain variable domain"
DIVMTQSQKFMSTSVGDRVSVACKAGQNVGTSVAWYQQKPGHSPKSLIYSASYRYSGVPNRFTGSGSGTDFTLTISNVQSEDLADYFCQQYITYPYTFGGGTKLEII

SEQ ID NO: 3809 - protein, 107 aa, Artificial Sequence
  source: /note="Description of Artificial Sequence: Synthetic light chain variable domain"
DIQMTQSPSSVSASVGDRVTITCKASEDIYNRLAWYQQKPGKAPKLLIYGATSLETGVPSRFSGSGSGTDYTLTISSLQPEDFATYYCQQYWSTPLTFGQGTKLEIK

SEQ ID NO: 3810 - protein, 111 aa, Artificial Sequence
  source: /note="Description of Artificial Sequence: Synthetic light chain variable domain"
DIVMTQSPDSLAVSLGERATINCRASQTVSTSSYSYMHWYQQKPGQPPKLLIYFASNVESGVPDRFSGSGSGTDFTLTISSLQAEDVAVYYCQHSWEIPWTFGQGTKLEIK

SEQ ID NO: 3811 - protein, 108 aa, Artificial Sequence
  source: /note="Description of Artificial Sequence: Synthetic light chain variable domain"
EIVLTQSPATLSLSPGERATLSCSVSSSISSSNLHWYQQKPGQAPRLLIYGTSNLASGIPARFSGSGSGTDFTLTISSLEPEDFAVYYCQQWSSYPHTFGGGTKVEIK

SEQ ID NO: 3812 - protein, 107 aa, Artificial Sequence
  source: /note="Description of Artificial Sequence: Synthetic light chain variable domain"
DIQMTQSPSSLSASVGDRVTITCKAGQNVGTSVAWFQQKPGKAPKSLIYSASYRYSGVPSRFSGSGSGTDFTLTISSLQPEDFATYYCQQYITYPYTFGGGTKVEIK

SEQ ID NO: 3813 - protein, 108 aa, Artificial Sequence
  source: /note="Description of Artificial Sequence: Synthetic light chain variable domain"
EIVLTQSPDFQSVTPKEKVTITCSVSSSISSSNLHWYQQKPDQSPKLWIYGTSNLASGVPSRFSGSGSGTDFTLTINSLEAEDAATYYCQQWSSYPHTFGGGTKVEIK

SEQ ID NO: 3814 - protein, 240 aa, Artificial Sequence
  source: /note="Description of Artificial Sequence: Synthetic light chain variable domain"
MESQTQVLMSLLFWVSGTCGDIVMTQSPSSLTVTAGEKVTMSCKSSQSLLNSGNQKNYLTWYQQKPGQPPKLLIYWASTRESGVPDRFTGSGSGTDFTLTISSVQAEDLAVYYCQNDYSYPFTFGSGTKLEIKRTVAAPSVFIFPPSDEQLKSGTASVVCLLNNFYPREAKVQWKVDNALQSGNSQESVTEQDSKDSTYSLSSTLTLSKADYEKHKVYACEVTHQGLSSPVTKSFNRGEC

SEQ ID NO: 3815 - protein, 113 aa, Artificial Sequence
  source: /note="Description of Artificial Sequence: Synthetic light chain variable domain"
DIVMTQSPSSLTVTAGEKVTMSCKSSQSLLNSGNQKNYLTWYQQKPGQPPKLLIYWASTRESGVPDRFTGSGSGTDFTLTISSVQAEDLAVYYCQNDYSYPFTFGSGTKLEIK

SEQ ID NO: 3816 - protein, 107 aa, Artificial Sequence
  source: /note="Description of Artificial Sequence: Synthetic light chain variable domain"
DIQMTQSPSSLSASVGDRVTITCRASQSISSYLNWYQQKPGKAPKLLIYAASSLQSGVPSRFSGSGSGTDFTLTISSLQPEDFATYYCQQSYSTPPTFGQGTKVEIK

SEQ ID NO: 3817 - protein, 108 aa, Artificial Sequence
  source: /note="Description of Artificial Sequence: Synthetic light chain variable domain"
DIQMTQSPSSLSASLGERVSLTCRATQELSGYLSWLQQKPDGTIKRLIYAASTLDSGVPKRFSGNRSGSDYSLTISSLESEDFADYYCLQYAIYPYTFGGGTKLEIKR

SEQ ID NO: 3818 - protein, 108 aa, Artificial Sequence
  source: /note="Description of Artificial Sequence: Synthetic light chain variable domain"
EIVLTQSPGTLSLSPGERATLSCRASQSVSSSYLAWYQQKPGQAPRLLIYGASSRATGIPDRFSGSGSGTDFTLTISRLEPEDFAVYYCQQYGSSPLTFGGGTKVDIK

SEQ ID NO: 3819 - protein, 111 aa, Artificial Sequence
  source: /note="Description of Artificial Sequence: Synthetic light chain variable domain"
TIVLTQSPASLAVSLGQRATISCRASESVDSYGNSFMHWYQQKPGQPPKLLIYLASNLESGVPARFSGSGSRTDFTLTIDPVEADDAATYYCQQNNYDPWTFGGGTKLEIK

SEQ ID NO: 3820 - protein, 107 aa, Artificial Sequence
  source: /note="Description of Artificial Sequence: Synthetic light chain variable domain"
EIQMTQTPSSLSASLGDRVTISCRASHDISNYLNWYQQKPDGTLKLLIYYTSRLHSGVPSRFSGSGSGTDYSLTISNLEQEDIATYFCQQGKTLLWTFGGGTKLEIK

SEQ ID NO: 3821 - protein, 113 aa, Artificial Sequence
  source: /note="Description of Artificial Sequence: Synthetic light chain variable domain"
DIVMTQSPSSLTVTAGEKVTMSCKSSQNLLNSGNQKKYLNWYQQKPGQPPKLLIYWASTRESGVPDRFTGSGSGTDFTLTISSVQAEDLAVYFCQNDYSYPFTFGAGTKLELK

SEQ ID NO: 3822 - protein, 106 aa, Artificial Sequence
  source: /note="Description of Artificial Sequence: Synthetic light chain variable domain"
DIQMTQSPSSLSASLGGKVTITCKASQDINKYIAWYQHKPGKGPRLLIHYTSTLQPGIPSRFSGSGSGRDYSFSISNLEPEDIATYYCLQYDYLWTFGGGTKLEIK

SEQ ID NO: 3823 - protein, 108 aa, Artificial Sequence
  source: /note="Description of Artificial Sequence: Synthetic light chain variable domain"
DIQMTQSPSSLSASLGERVSLTCRASQEISVYLSWLQQKPDGTIKRLIYAASTLDSGVPERFSGSRSGSDYSLTISSLESEDFADYYCLQYASYPYTFGGGTKLEIKR

SEQ ID NO: 3824 - protein, 112 aa, Artificial Sequence
  source: /note="Description of Artificial Sequence: Synthetic light chain variable domain"
DIVMSQSPSSLAVSVGEKVTMSCKSSQSLLYSSNQKNNLAWYQQKPGQSPKLLIYWASTRESGVPDRFTGSGSGTDFTLTISSVQAEDLAVYYCQQYYSYRTFGGGTKLEIK

SEQ ID NO: 3825 - protein, 112 aa, Artificial Sequence
  source: /note="Description of Artificial Sequence: Synthetic light chain variable domain"
NIVLTQSPASLAVSLGQRATISCRASESVDGYGDIFMLWYQQKPGQPPKLLIYFASNLESGVPARFSGSGSRTDFTLTIDPVEADDAATYYCQQNNEDPYTFGGGTKLEIKR

SEQ ID NO: 3826 - protein, 106 aa, Artificial Sequence
  source: /note="Description of Artificial Sequence: Synthetic light chain variable domain"
QIVLSQSPAILSASPGEKVTMTCRASSSINYMHWYQQKPGSSPKPWIFATSNLASGVPSRFSGSGSGTSYSLTISRVEAEDAATYYCQQWRSDRALTFGAGTKLEL

SEQ ID NO: 3827 - protein, 107 aa, Artificial Sequence
  source: /note="Description of Artificial Sequence: Synthetic light chain variable domain"
ENVLTQSPAIMSASPGEKVTMTCRASSNVISSYVHWYQQRSGASPKLWIYSTSNLASGVPARFSGSGSGTSYSLTISSVEAEDAATYYCQQYSGYPLTFGAGTKLEL

SEQ ID NO: 3828 - protein, 112 aa, Artificial Sequence
  source: /note="Description of Artificial Sequence: Synthetic light chain variable domain"
QSALTQPASVSGSPGQSITISCTGTSSDVGGYNYVSWYQQHPGKAPKLMIYDVSNRPSGVSNRFSGSKSGNTASLTISGLQAEDEADYYCSSYTSSSTLDVVFGGGTKLTVL

SEQ ID NO: 3829 - protein, 112 aa, Artificial Sequence
  source: /note="Description of Artificial Sequence: Synthetic light chain variable domain"
EIVLTQSPLSLPVTPGQPASISCRSSQSLVYTDGNTYLNWFQQRPGQSPRRLIYKVSNRDSGVPDRFSGSGSDTDFTLKISRVEAEDVGIYYCMQGTHWSFTFGQGTRLEIK

SEQ ID NO: 3830 - protein, 107 aa, Artificial Sequence
  source: /note="Description of Artificial Sequence: Synthetic light chain variable domain"
DIVMTQSPSSLSASVGDRVTITCRASQGISSYLAWYQQKPGKAPKLLIYAASTLQSGVPSRFSGSGSGTDFTLTISSLQPEDFATYYCQQLNSYPYTFGQGTKLEIK

SEQ ID NO: 3831 - protein, 108 aa, Artificial Sequence
  source: /note="Description of Artificial Sequence: Synthetic light chain variable domain"
EIVLTQSPGTLSLSPGGRATLSCRASQSISGSFLAWYQQKPGQAPRLLIYGASSRATGIPDRFSGSGSGTDFTLTISRLEPEDFAVYYCQQYGSSPPTFGLGTKLEIK

SEQ ID NO: 3832 - protein, 107 aa, Artificial Sequence
  source: /note="Description of Artificial Sequence: Synthetic light chain variable domain"
DIQMTQSPSSLSASIGDRVTITCRASQSISSYLNWYQQKPGKAPKLLIYAASSLQSGVPSRFSGSGSGTDFTLTISSLQPEDFATYYCQQSYSTPWTFGQGTKLEIK

SEQ ID NO: 3833 - protein, 108 aa, Artificial Sequence
  source: /note="Description of Artificial Sequence: Synthetic light chain variable domain"
DIQMTQSPSSLSASVGDRVTITCRASQSISSYLNWYQQKPGKAPKLLMYAASSLQSGVPSRFSGSGSGTDFTLTISSLQPEDFATYYCQQSYSTPPWTFGQGTKVDIK

SEQ ID NO: 3834 - protein, 111 aa, Artificial Sequence
  source: /note="Description of Artificial Sequence: Synthetic light chain variable domain"
NFMLTQPHSVSESPGKTVTISCTGSSGSIASNYVQWYQQRPGSAPTTVIYEDNQRPSGVPDRFSGSIDSSSNSASLTISGLKTEDEADYYCQSYDSSNQVVFGGGTKLTVL

SEQ ID NO: 3835 - protein, 107 aa, Artificial Sequence
  source: /note="Description of Artificial Sequence: Synthetic light chain variable domain"
DIQMTQSPSSLSASVGDRVTITCQASQDISNYLNWYQQKPGKAPKLLIYDASNLETGVPSRFSGSGSGTDFTFTISSLQPEDIATYYCQQYDNLPLTFGGGTKLEIK

SEQ ID NO: 3836 - protein, 107 aa, Artificial Sequence
  source: /note="Description of Artificial Sequence: Synthetic light chain variable domain"
DIVMTQSPSSVSASVGDRVTITCRASQDISSWLAWYQQKPGKAPKLLIYAASSLQSGVPSRFNGSGSGTDFTLTISSLQPEDFATYYCQQSYSTPLTFGGGTKVEIK

SEQ ID NO: 3837 - protein, 107 aa, Artificial Sequence
  source: /note="Description of Artificial Sequence: Synthetic light chain variable domain"
DIVLTQSPSSLSASVGDRVTITCQASQDISNYLNWYQQKPGKAPKLLIYDASNLETGVPSRFSGSGSGTDFTFTISSLQPEDFATYYCQQAYSTPFTFGPGTKVEIK

SEQ ID NO: 3838 - protein, 107 aa, Artificial Sequence
  source: /note="Description of Artificial Sequence: Synthetic light chain variable domain"
EIVLTQSPSSLSASVGDRVTITCQASQFIKKNLNWYQHKPGKAPKLLIYDASSLQTGVPSRFSGNRSGTTFSFTISSLQPEDVATYYCQQHDNLPLTFGGGTKVEIK

SEQ ID NO: 3839 - protein, 108 aa, Artificial Sequence
  source: /note="Description of Artificial Sequence: Synthetic light chain variable domain"
DIQVTQSPSSLSASVGDRVTITCRASQSISSYLNWYQQKPGKAPKLLIYAASSLQSGVPSRFSGSGSGTDFTLTISSLQPEDFATYYCQQSYSTPPLTFGQGTKVEIK

SEQ ID NO: 3840 - protein, 107 aa, Artificial Sequence
  source: /note="Description of Artificial Sequence: Synthetic light chain variable domain"
DIQMTQSPSSLSASVGDRVTFTCRASQGISSALAWYQQKPGKPPKLLIYDASSLESGVPSRFSGSGSGTDFTLTISSLQPEDFATYYCQQFNNYPLTFGGGTKVEIK

SEQ ID NO: 3841 - protein, 111 aa, Artificial Sequence
  source: /note="Description of Artificial Sequence: Synthetic light chain variable domain"
DIVLTQSPSSLIVSLGQRATISCRASQSVSTSSYNYMHWYQQKPGQPPKLLLKYASNLESGVPARFSGSGSGTDFTLNIHPVEEEDTATYYCQHSWEIPLTFGAGTKLEIK

SEQ ID NO: 3842 - protein, 111 aa, Artificial Sequence
  source: /note="Description of Artificial Sequence: Synthetic light chain variable domain"
DIQMTQSPSSLSASVGDRVTITCRASQSVSTSSYNYMHWYQQKPGKPPKLLIKYASNLESGVPSRFSGSGSGTDFTLTISSLQPEDFATYYCQHSWEIPLTFGQGTKVEIK

SEQ ID NO: 3843 - protein, 104 aa, Artificial Sequence
  source: /note="Description of Artificial Sequence: Synthetic light chain variable domain"
DIVLTQSPAIMSASPGEKVTMTCSASSSISYMYWYQQKPGTSPKRWIYDTSKLASGVPARFSGSGSGTSYSLTISSMEAEDAATYYCHQRSSWTFGGGTKLEIK

SEQ ID NO: 3844 - protein, 107 aa, Artificial Sequence
  source: /note="Description of Artificial Sequence: Synthetic light chain variable domain"
DIQMTQSHKFMSTSVGDRVSITCKASQDVSTAVAWFQQKPGQSPKLLIYSPSYRYTGVPDRFTGSGSGTDFTFTISSVQAEDLAVYYCQQLYSTPYTFGGGTKLEIK

SEQ ID NO: 3845 - protein, 107 aa, Artificial Sequence
  source: /note="Description of Artificial Sequence: Synthetic light chain variable domain"
DIQMTQSPSSLSASVGDRVTITCKASQDVSTAVAWFQQKPGKAPKLLIYSPSYRYTGVPSRFSGSGSGTDFTLTISSLQPEDFATYYCQQLYSTPYTFGQGTKVEIK

SEQ ID NO: 3846 - protein, 111 aa, Artificial Sequence
  source: /note="Description of Artificial Sequence: Synthetic light chain variable domain"
DIQMTQSPASLAVSLGQRATISCRASQSVSSSSYSYMHWYQQKPGQPPKLLIKYASNLESGVPARFSGRGSGTDFTLNIHPVEEEDTATYYCQHSWEIPYTFGGGTRLEIK

SEQ ID NO: 3847 - protein, 108 aa, Artificial Sequence
  source: /note="Description of Artificial Sequence: Synthetic light chain variable domain"
DIQMTQSPSSLSASVGDRVTLTCRATQELSGYLSWLQQKPGKAIKRLIYAASTLDSGVPSRFSGNRAGTDYTLTISSLQPEDFATYYCLQYAIYPYTFGQGTKLEIKR

SEQ ID NO: 3848 - protein, 108 aa, Artificial Sequence; identical to SEQ ID NO: 3817
  source: /note="Description of Artificial Sequence: Synthetic light chain variable domain"

SEQ ID NO: 3849 - protein, 111 aa, Artificial Sequence; identical to SEQ ID NO: 3819
  source: /note="Description of Artificial Sequence: Synthetic light chain variable domain"

SEQ ID NO: 3850 - protein, 107 aa, Artificial Sequence; identical to SEQ ID NO: 3820
  source: /note="Description of Artificial Sequence: Synthetic light chain variable domain"

SEQ ID NO: 3851 - protein, 112 aa, Artificial Sequence
  source: /note="Description of Artificial Sequence: Synthetic light chain variable domain"
DIVMTQSPSSLTVTAGEKVTMSCKSSQNLLNSGNQKKYLNWYQQKPGQPPKLLIYWASTRESGVPDRFTGSGSGTDFTLTISSVQAEDLAVYFCQNDYSYPFTFGAGTKLEL

SEQ ID NO: 3852 - protein, 106 aa, Artificial Sequence; identical to SEQ ID NO: 3822
  source: /note="Description of Artificial Sequence: Synthetic light chain variable domain"

SEQ ID NO: 3853 - protein, 108 aa, Artificial Sequence; identical to SEQ ID NO: 3823
  source: /note="Description of Artificial Sequence: Synthetic light chain variable domain"

SEQ ID NO: 3854 - protein, 112 aa, Artificial Sequence; identical to SEQ ID NO: 3824
  source: /note="Description of Artificial Sequence: Synthetic light chain variable domain"

SEQ ID NO: 3855 - protein, 112 aa, Artificial Sequence; identical to SEQ ID NO: 3825
  source: /note="Description of Artificial Sequence: Synthetic light chain variable domain"

SEQ ID NO: 3856 - protein, 107 aa, Artificial Sequence
  source: /note="Description of Artificial Sequence: Synthetic light chain variable domain"
ETTVTQSPAFLSVATGEKVTIRCITSTDIDDDMNWYQQKPGEPPNVLISEGNTLRPGVPSRFSSSGYGTDFVFTIENTLSEDVADYYCLQSDNMPLTFGAGTKLELK

SEQ ID NO: 3857 - protein, 107 aa, Artificial Sequence
  source: /note="Description of Artificial Sequence: Synthetic light chain variable domain"
ENVLTQSPAIMSASLGEKVTMSCRASSSVNYMSWYQQKSDASPKLWIYYTSNLAPGVPARFSGSGSGNSYSLTISSMEGEDAATYYCQQFTSSPYTFGGGTKLEIKR

SEQ ID NO: 3858 - protein, 107 aa, Artificial Sequence
  source: /note="Description of Artificial Sequence: Synthetic light chain variable domain"
DIQMTQSPSSLSASLGERVSLTCRASQDIGYSLNWLQQEPDGTIKRLIYATSSLDSGVPKRFSGSRSGSDYSLTISSLESEDFVDYYCLQYASSPWTFGGGTKLEIK

SEQ ID NO: 3859 - protein, 107 aa, Artificial Sequence
  source: /note="Description of Artificial Sequence: Synthetic light chain variable domain"
DIKMTQSPSSMYASLGERVTITCKASQDINSYLSWFQQKPGRSPKTLIYRANRLVDGVPSRFSGSGSGQDYSLTISSLDYEDMGIYYCLQYDEFPFTFGSGTKLEIK

SEQ ID NO: 3860 - protein, 113 aa, Artificial Sequence
  source: /note="Description of Artificial Sequence: Synthetic light chain variable domain"
DIVMSQSPSSLAVSAGEKVTMSCKSSQSLLNSRTRKNYLAWYQQKPGQSPKLLIYWASTRESGVPDRFTGSGSGTDFTLTISSVQAEDLAVYYCKQSYNLYTFGGGTKLKIKR

SEQ ID NO: 3861 - protein, 108 aa, Artificial Sequence
  source: /note="Description of Artificial Sequence: Synthetic light chain variable domain"
ETTVTQSPASLSMAIGEKVTIRCITSTDIDDDMIWYQQKPGEPPKLLISEGNTLRPGVPSRFSSSGYGTDFVFTIENMLSEDVADYYCLKRDDLPYTFGGGTQVEIKR

SEQ ID NO: 3862 - protein, 108 aa, Artificial Sequence
  source: /note="Description of Artificial Sequence: Synthetic light chain variable domain"
QIVLTQSPAIMSASLGERVTLTCTASSSVSSSYLHWYQQKPGSSPKLWIYSTSNLASGVPTRFSGSGSGTSYSLRISSMEAEDAATYYCHQYNRSPLTFGAGTKLELK

SEQ ID NO: 3863 - protein, 106 aa, Artificial Sequence
  source: /note="Description of Artificial Sequence: Synthetic light chain variable domain"
DIQMTQSPSSLSASLGGKVTITCKASQDIKKYIAWYQHKPGKGPRLLIHYTSTLEPGIPSRFSGSGSGRDYSFSISNLEPEDIATYYCLQYDILWTFGGGTKLEIK

SEQ ID NO: 3864 - protein, 108 aa, Artificial Sequence
  source: /note="Description of Artificial Sequence: Synthetic light chain variable domain"
ENVLTQSPAIMAASLGQKVTMTCSASSSVSSSYLHWYQQKSGASPKPLIHRTSNLASGVPARFSGSGSGTSYSLTISSVEAEDDATYYCRQWSGYPWTFGGGTKLEIK

SEQ ID NO: 3865 - protein, 108 aa, Artificial Sequence
  source: /note="Description of Artificial Sequence: Synthetic light chain variable domain"
QIVLTQSPAIMSASLGERVTMTCTASSSVSSSYLHWYQQKPGSSPKLWIYSTSNLASGVPARFSGSESGTSYSLTISNMEAEDAATYYCHQYHRSPFTFGSGTKLEIK

SEQ ID NO: 3866 - protein, 111 aa, Artificial Sequence
  source: /note="Description of Artificial Sequence: Synthetic light chain variable domain"
DIVLTQSPASLAVSLGQRATISCRASKSVSTSGYSYMHWYQQKPGQPPKLLIYLASNLESGVPARFSGSGSGTDFTLNIHPVEEEDAATYYCQHSRELPLTFGAGTKLELK

SEQ ID NO: 3867 - protein, 106 aa, Artificial Sequence
  source: /note="Description of Artificial Sequence: Synthetic light chain variable domain"
QIVLSQSPAILSASPGEKVTMTCRASSSVSYIHWYRQKPGSSPKPWIYATSNLASGVPARFSGSGSGTSYSLTISRVEAEDAATYYCQQWSSNPPTFGAGTKLELK

SEQ ID NO: 3868 - protein, 106 aa, Artificial Sequence
  source: /note="Description of Artificial Sequence: Synthetic light chain variable domain"
DIVMTQSHKFMSTSVGDRVSITKASQDVGTAVAWYQQKPGQSPKLLIYWASIRHTGVPDRFTGSGSGTDFTLTISNVQSEDLADYFCQQYSSYPLTFGAGTKLELK

SEQ ID NO: 3869 - protein, 107 aa, Artificial Sequence
  source: /note="Description of Artificial Sequence: Synthetic light chain variable domain"
DIKMTQSPSSMYASLGERVTITCKASQDINSYLSWFQQKPGKSPKTLIYRANRLVDGVPSRFSGSGSGQDYSLTISSLEYEDMGIYYCLQYDEFPFTFGSGTKLEIK

SEQ ID NO: 3870 - protein, 108 aa, Artificial Sequence
  source: /note="Description of Artificial Sequence: Synthetic light chain variable domain"
DIVMTQSHKFMSTSVGDRVSITCKASQDVNTAVGWYQQKPGQSPKLLIYSASYRYTGVPDRFTGSGSGTDFTFTISSVQAEDLAVYYCQQHYSSPYTFGGGTKLEIKR

SEQ ID NO: 3871 - protein, 108 aa, Artificial Sequence
  source: /note="Description of Artificial Sequence: Synthetic light chain variable domain"
DIQMTQSPASLSASVGETVTITCRASENIYSYLAWYQQKQGKSPQLLVYNAKTLAEGVPSRFSGSRSGSQFSLKINSLQPEDFGSYYCQHHYGTPYTFGGGTKLEIKR

SEQ ID NO: 3872 - protein, 106 aa, Artificial Sequence
  source: /note="Description of Artificial Sequence: Synthetic light chain variable domain"
QIVLTQSPAIMSASPGEKVTMTCSASSSVSYMYWYQQKPGSSPRLLIYDTSNLASGVPVRFSGSGSGTSFSLTISRMEAEDTATYYCQEWSGNPLTFGDGTKLELK

SEQ ID NO: 3873 - protein, 107 aa, Artificial Sequence
  source: /note="Description of Artificial Sequence: Synthetic light chain variable domain"
NIVMTQTPKFLLVSAGDRVTITCKASQSVSNDVAWYQQKPGQSPKLLIYYASNRYTGVPDRFTGSGYGTDFTFTISTVQAEDLAVYFCQQDYSSPPTFGGGTKLEIK

SEQ ID NO: 3874 - protein, 107 aa, Artificial Sequence
  source: /note="Description of Artificial Sequence: Synthetic light chain variable domain"
DIQMTQSPASLAASVGETVTITCRASENIYYSLAWYQQKQGKSPQLLIYNANSLEDGVPSRFSGSGSGTQYSMKINSMQPEDTATYFCKQTYDVPLTFGAGTKLELK

SEQ ID NO: 3875 - protein, 112 aa, Artificial Sequence
  source: /note="Description of Artificial Sequence: Synthetic light chain variable domain"
DVVMTQTPLTLSVTIGQPASISCKSSQSLLDSDGTTYLNWLLQRPGQSPKRLIYLVSKLDSGVPDRFTGSGSGTDFTLKISRVEAEDLGVYYCWQGTHFPLTFGAGTKLELK

SEQ ID NO: 3876 - protein, 107 aa, Artificial Sequence
  source: /note="Description of Artificial Sequence: Synthetic light chain variable domain"
QIVLSQSPAILSASPGEKVTMTCRASSSVSYMHWYQQKPGSSPKPWIYATSNLASGVPARFSGSGSGTSYSLTISRVEAEDAATYYCQQWSSNPYTFGGGTKLEIKR

SEQ ID NO: 3877 - protein, 111 aa, Artificial Sequence
  source: /note="Description of Artificial Sequence: Synthetic light chain variable domain"
DIVMTQSPSSLTVTAGEKVTMSCTSSQSLLTSGNQKNYLTWYQQKPGQPPKLLIYWASTRESGVPDRFTGSGSGTDFTLTISSLQAEDLAVYYCQNDYSLTFGAGTKLELK

SEQ ID NO: 3878 - protein, 107 aa, Artificial Sequence
  source: /note="Description of Artificial Sequence: Synthetic light chain variable domain"
DIQMNQSPSSLSASLGDTITITCHVSQNINVWLSWYQQKPGNIPKLLIQKASNLHTGVPSRFSGSGSGTGFTLTISSLQPEDIATYYCQQGQSYPFTFGSGTKLEIK

SEQ ID NO: 3879 - protein, 112 aa, Artificial Sequence
  source: /note="Description of Artificial Sequence: Synthetic light chain variable domain"
DIVLTQSPASLAVSLGQRATISCKASQSVDYDGDSYLTWYQQKPGQPPKLLIYAASNLESGIPARFSGSGSGTDFTLNIHPVEEEDAATYYCQQSNEDPYTFGGGTKLEIKR

SEQ ID NO: 3880 - protein, 114 aa, Artificial Sequence
  source: /note="Description of Artificial Sequence: Synthetic light chain variable domain"
DIVMSQSPSSLAVSVGEKVTMSCKSSQSLLYSSTQKNYLAWYQQKPGQSPKLLIYWASTRESGVPDRFTGSGSGTDFTLTISSVKAEDLAVYYCQQYYSYPYTFGGGTKLEIKR

SEQ ID NO: 3881 - protein, 107 aa, Artificial Sequence
  source: /note="Description of Artificial Sequence: Synthetic light chain variable domain"
QIVLTQSPAIMSASPGEKVTITCSASSSVSYMHWFQQKPGTSPKLWIYSTSNLASGVPARFSGSGSGTSYSLTISRMEAEDAATYYCQQRSSYPPTFGGGTKLEIKR

SEQ ID NO: 3882 - protein, 107 aa, Artificial Sequence
  source: /note="Description of Artificial Sequence: Synthetic light chain variable domain"
DIVMTQSQKFMSTSVGDRVSVTCKASQNVGTNVAWYQQKPGQSPKVLIYSASYRYSGVPDRFTGSGSGTDFTLTISNVQSEDLAEFFCQQYNSYPLTFGGGTKLEIK

SEQ ID NO: 3883 - protein, 108 aa, Artificial Sequence
  source: /note="Description of Artificial Sequence: Synthetic light chain variable domain"
QIVLTQSPAIMSASLGERVTMTCTASSSVSSSYLHWYQQKPGSSPKLWIYSTSNLASGVPARFSGSGSGTSYSLTISSMETEDAATYYCHQYHRSPFTFGSGTKLEIK

SEQ ID NO: 3884 - protein, 107 aa, Artificial Sequence
  source: /note="Description of Artificial Sequence: Synthetic light chain variable domain"
DIQMTQSPASQSASLGESVTITCLASQTIGTWLAWYQQKPGKSPQLLISAATSLADGVPSRFSGSGSGTKFSFKISSLQAEDFVSYYCQQLYSTPWTFGGGTKLEIK

SEQ ID NO: 3885 - protein, 107 aa, Artificial Sequence
  source: /note="Description of Artificial Sequence: Synthetic light chain variable domain"
DIQMNQSPSSLSASLGDTITITCHASQNINVWLSWYQQKPGNIPKLLIYKASILHTGVPSRFSGSGSGTGFTLTISSLQPEDIATYSCQQGQSYPYTFGGGTKLEIK

SEQ ID NO: 3886 - protein, 107 aa, Artificial Sequence
  source: /note="Description of Artificial Sequence: Synthetic light chain variable domain"
DIQMNQSPSSLSASLGDTITITCHASQNINVWLSWYQQKPGNIPKLLIYKASNLHTGVPSRFSGSGSGTGFTLTISSLQPEDIATYYCQQGQSYPFTFGSGTKLEIK

SEQ ID NO: 3887 - protein, 108 aa, Artificial Sequence
  source: /note="Description of Artificial Sequence: Synthetic light chain variable domain"
DIQMTQSPASQSASLGESVTITCLASQTIGTWLAWYQQKPGKSPQLLIYAATSLADGVPSRFSGSGSGTKFSFKISSLQAEDFVSYYCQQLYSTPYTFGGGTKLEIKR

SEQ ID NO: 3888 - protein, 107 aa, Artificial Sequence
  source: /note="Description of Artificial Sequence: Synthetic light chain variable domain"
DIQLTQSPASLSASVGETVTITCRASGSIHNYLAWYQQKQGKSPQLLVYNAKTLVDGVPSRFSGSGSGTQYSLKINSLQPEDFGYYYCQHFWTTPWTFGGGTKLEIK

SEQ ID NO: 3889 - protein, 107 aa, Artificial Sequence
  source: /note="Description of Artificial Sequence: Synthetic light chain variable domain"
DIQMTQSPASQSASLGESVTITCLASQTIGTWLAWYQQKPGKSPQLLIYAATSLADGVPSRFSGSGSGTKFSFKISSLQAEDFVSYYCQQLYSTPWTFGGGTKLEIK

SEQ ID NO: 3890 - protein, 107 aa, Artificial Sequence
  source: /note="Description of Artificial Sequence: Synthetic light chain variable domain"
SIVMTQTPKFLLVSAGDRVTITCKASQSVSNDVAWYQQKPGQSPKLLIYCASNRYTGVPDRFTGSGYGTDFTFTISTVQAEDLAVYFCQQDYSSPLTFGAGTKLELK

SEQ ID NO: 3891 - protein, 112 aa, Artificial Sequence
  source: /note="Description of Artificial Sequence: Synthetic light chain variable domain"
DIVLTQSPASLAVSLGQRATISCKASQSVDHAGDSYMNWYQQKPGQPPKLLIYAASNLESGIPARFSGSGSGTDFTLNIHPVEEEDAATYYCQQSNEDPYTFGGGTKLEIKR

SEQ ID NO: 3892 - protein, 107 aa, Artificial Sequence
  source: /note="Description of Artificial Sequence: Synthetic light chain variable domain"
DIKMTQSPSSMYASLGERVTITCKASQDINRYLSWFQQKPGKSPKTLIYRANRLVDGVPSRFSGSGSGQDYSLTISSLEYEDMGIYYCLQYDEFPFTFGSGTKLEIK

SEQ ID NO: 3893 - protein, 107 aa, Artificial Sequence
  source: /note="Description of Artificial Sequence: Synthetic light chain variable domain"
DIQMTQSPASLSASVGETVTITCRASGNIHNYLAWYQQKQGKSPHLLVYNAKTLADGVPSRFSGSGSGTQYSLKINSLQPEDFGSYYCQHFWSTPWTFGGGTKLEIK

SEQ ID NO: 3894 - protein, 106 aa, Artificial Sequence
  source: /note="Description of Artificial Sequence: Synthetic light chain variable domain"
QIVLTQSPAIMSASLGEEITLTCSASSSVSYMHWYQQKSGTSPKLLIYSTSNLASGVPSRFSGSGSGTFYSLTISSVEAEDAADYYCHQWSSYHTFGGGTKLEIKR

SEQ ID NO: 3895 - protein, 107 aa, Artificial Sequence
  source: /note="Description of Artificial Sequence: Synthetic light chain variable domain"
DIQMTQSPASQSASLGESVTITCLASQTIGTWLAWYQQKPGKSPQLLIYSATSLADGVPSRFSGSGSGTKFSFKISSLQAEDFVSYYCQQLYSTPWTFGGGTKLEIK

SEQ ID NO: 3896 - protein, 107 aa, Artificial Sequence
  source: /note="Description of Artificial Sequence: Synthetic light chain variable domain"
DIVMTQSHKFMSTSVGDRVSITCKASQDVNTAVGWYQQKPGQSPKLLIYSASYRYTGVPDRFTGSGSGTDFTFTISSVQAEDLAVYYCQQHYSSPYTFGGGTKLEIK

SEQ ID NO: 3897 - protein, 112 aa, Artificial Sequence
  source: /note="Description of Artificial Sequence: Synthetic light chain variable domain"
DIVLTQSLASLAVSLGQRATISCRASKSVSTSGYSYMHWYQQKPGQPPKLLIYLASNLESGVPARFSGSGSGTDFTLNIHPVEDEDAATYYCQHSRELPFTFGGGTKLEIKR

SEQ ID NO: 3898 - protein, 108 aa, Artificial Sequence
  source: /note="Description of Artificial Sequence: Synthetic light chain variable domain"
DIKMTQSPSSMYASLGERVTITCKASQDINNYLSWFQQKPGKSPKTLIYRANRLVDGVPSRFSGSGSGQDYSLTISSLEYEDMGIYYCLQYDEFPYTFGGGTKLEIKR

SEQ ID NO: 3899 - protein, 112 aa, Artificial Sequence; identical to SEQ ID NO: 3186
  source: /note="Description of Artificial Sequence: Synthetic light chain variable domain"

SEQ ID NO: 3900 - protein, 107 aa, Artificial Sequence
  source: /note="Description of Artificial Sequence: Synthetic light chain variable domain"
SIVMTQTPKFLLVSAGDRVTITCKASQSVSNDVGWYQQKPGQSPKLLIYYASNRYNGVPDRFTGSGYGTDFTFTISTVQAEDLAVYFCQQDYSSPWTFGGGTKLEIK

SEQ ID NO: 3901 - protein, 107 aa, Artificial Sequence
  source: /note="Description of Artificial Sequence: Synthetic light chain variable domain"
DIQMTQTASSLSASLGDRVTISCRASQDINNYLNWYQQKPDGTVKLLIYYTSRLHSGVPSRFSGSGSGTDYSLTISILEQEDIATYFCQQGDTLPWTFGGGTKLEIK

SEQ ID NO: 3902 - protein, 106 aa, Artificial Sequence
  source: /note="Description of Artificial Sequence: Synthetic light chain variable domain"
QIVLTQSPAIMSASPGEKVTMTCSASSSVSYMYWYQQKPGSSPRLLIYDTSNLASGVPVRFSGSGSGTSYSLTISRMEAEDTATYYCQEWSNNPLTFGDGTKLELK

SEQ ID NO: 3903 - protein, 108 aa, Artificial Sequence
  source: /note="Description of Artificial Sequence: Synthetic light chain variable domain"
QIVLTQSPAIMSVSLGERVTMTCTASSSVSSSYLHWYQQKPGSSPKLWIYSTSNLASGVPARFSGSGSGTSYFFTISSMEAEDAATYYCHQYHRSPFTFGAGTKLKIR

SEQ ID NO: 3904 - protein, 107 aa, Artificial Sequence
  source: /note="Description of Artificial Sequence: Synthetic light chain variable domain"
DIQMNQSPSSLSASLGDTITITCHASQNINVWLSWYQQKPGNIPKLLIYKASHLHTGVPSRLSGSGSGTGFTLTISSLQPEDIATYYCQQGQSYPFTFGSGTTLEIK

SEQ ID NO: 3905 - protein, 114 aa, Artificial Sequence
  source: /note="Description of Artificial Sequence: Synthetic light chain variable domain"
DIVMSQSPSSLTVSVGEKVTMSCMSSQSLLYSSTQKNYLAWYQQKPGQSPKLLIYWASTRESGVPDRFTGSGSGTDFTLTISSVKAEDLAVYYCQQYYSYPYTFGGGTKLEIKR

SEQ ID NO: 3906 - protein, 107 aa, Artificial Sequence
  source: /note="Description of Artificial Sequence: Synthetic light chain variable domain"
DIQMTQSPSSLSASVGDRVTITCSASSSVSYMYWYQQKPGKAPKLLIYLTSNLASGVPSRFSGSGSGTDFTLTISSLQPEDFATYYCQQWRSNPFTFGQGTKLEIKR

SEQ ID NO: 3907 - protein, 107 aa, Artificial Sequence
  source: /note="Description of Artificial Sequence: Synthetic light chain variable domain"
AIQLTQSPSSLSASVGDRVTITCRASENIYYNLAWYQQKPGKAPKLLIYTANSLEDGVPSRFSGSGSGTDFTLTISSLQPEDFATYFCKQAYDVPPTFGGGTKLEIK

SEQ ID NO: 3908 - protein, 106 aa, Artificial Sequence
  source: /note="Description of Artificial Sequence: Synthetic light chain variable domain"
EIVLTQSPDFQSVTPKEKVTITCSASSSVSYMHWYQQKPDQSPKLLIKDSSKLASGVPSRFSGSGSGTDFTLTINSLEAEDAATYYCQQWSSNPLTFGQGTKLEIK

SEQ ID NO: 3909 - protein, 107 aa, Artificial Sequence
  source: /note="Description of Artificial Sequence: Synthetic light chain variable domain"
DIQMTQSPSSLSASVGDRVTITCKASQSVSNDVAWYQQKPGKVPKLLIYYASNRYSGVPSRFSGSGSGTDFTLTISSLQPEDVATYFCQQDYSSPWTFGGGTKVEIK

SEQ ID NO: 3910 - protein, 108 aa, Artificial Sequence
  source: /note="Description of Artificial Sequence: Synthetic light chain variable domain"
EIVMTQSPATLSVSPGERATLSCKASQSVSNDVVWYQQKPGQAPRLLIYYASNRYTGIPARFSGSGSGTEFTLTISSLQSEDFAVYYCQQDYTSPWTFGQGTKLEIKR

SEQ ID NO: 3911 - protein, 107 aa, Artificial Sequence
  source: /note="Description of Artificial Sequence: Synthetic light chain variable domain"
DIQMTQTTSSLSASLGDRVTISCRASQDISNYLNWYQQKPDGTVKLLIYYTSRLHSGVPSRFSGSGSGTDYSLTISNLELEDIATYFCQQGDMLPWTFGGGTKLEIK

SEQ ID NO: 3912 - protein, 106 aa, Artificial Sequence
  source: /note="Description of Artificial Sequence: Synthetic light chain variable domain"
QIVLTQSPAIMSASPGEKVTMTCSASSSVSYMHWYQQKSGTSPKRWIYDTSKLASGVPARFSGSGSGTSYSLTISSMEAEDAATYYCQQWTRNPLTFGAGTKLELK

SEQ ID NO: 3913 - protein, 112 aa, Artificial Sequence
  source: /note="Description of Artificial Sequence: Synthetic light chain variable domain"
NIMMTQSPSSLAVSAGEKVTMSCKSSQSVLYSSNQKNYLAWYQQKPGQSPKLLIYWASTRESGVPDRFTGSGSGTDFTLTISTVQVEDLAVYYCHQYLSSWTFGGGTKLEIK

SEQ ID NO: 3914 - protein, 107 aa, Artificial Sequence
  source: /note="Description of Artificial Sequence: Synthetic light chain variable domain"
EIQMTQSPSSMSASLGDRITITCQATQDIVKNLNWYQQKPGKPPSFLIYYAIELAEGVPSRFSGSGSGSDYSLTISNLESEDFADYYCLQFYEFPFTFGAGTKLELK

SEQ ID NO: 3915 - protein, 108 aa, Artificial Sequence
  source: /note="Description of Artificial Sequence: Synthetic light chain variable domain"
QIVLTQSPAIMSASLGERVTMTCTASSSVSSSYLHWYQQKPGSSPKLWIYSTSNLASGVPTRFSGSGSGTSYSLTISSMEAEDAATYYCHQYHRSPFTFGSGTKLEIK

SEQ ID NO: 3916 - protein, 112 aa, Artificial Sequence
  source: /note="Description of Artificial Sequence: Synthetic light chain variable domain"
DVEMTQTPLTLSVTIGQPASISCKSSQSLSDSDGKTYLNWMFQRPGRSPKRLIYLVSKLDSGVPDRFTGSGSGTDFTLKISRVEAEDLGVYYCWQGKHFPWTFGGGTKLEIK

SEQ ID NO: 3917 - protein, 106 aa, Artificial Sequence
  source: /note="Description of Artificial Sequence: Synthetic light chain variable domain"
QIVLTQSPALVSASPGEKVTMTCSASSSVSYMYWYQQKPRSSPKPWIYLTSNLASGVPARFSGSGSGTSYSLTISSMEAEDAATYYCQQWRSNPFTFGSGTKLEIK

SEQ ID NO: 3918 - protein, 107 aa, Artificial Sequence
  source: /note="Description of Artificial Sequence: Synthetic light chain variable domain"
DIQMTQSPASLAASVGETVAITCRASENIYYNLAWYQQKQGKSPQLLIYTANSLEDGVPSRFSGSGSGTQYSLKINSMQPEDSATYFCKQAYDVPPTFGGGTKLEIK

SEQ ID NO: 3919 - protein, 108 aa, Artificial Sequence
  source: /note="Description of Artificial Sequence: Synthetic light chain variable domain"
DIQMTQTTSSLSASLGDRVTISCRASQNIINYLNWYQQKPDGTVKLLIYYTSRLHSGVPSRFSGSGSGTDYSLTISNLEPEDIATYYCQQYSERPYTFGGGTKLEIKR

SEQ ID NO: 3920 - protein, 107 aa, Artificial Sequence
  source: /note="Description of Artificial Sequence: Synthetic light chain variable domain"
DIQMTQSPSSLSASLGGKVTFTCKASQDIHKYVAWYQHKPGKGPRLLIHYTSTLQPGISSRFSGSGSGRDYSFSISNLEPEDIATYYCLQYNNLYTFGGGTKLEIKR

SEQ ID NO: 3921 - protein, 107 aa, Artificial Sequence
  source: /note="Description of Artificial Sequence: Synthetic light chain variable domain"
EIQMTQSPSSMSASLGDRITITCQATQDIVKNLNWYQQKPGKPPSFLIYYATELAEGVPSRFSGSGSGSDYSLTIRNLESEDFADHYCLQFYEFPFTFGAGTKLELK

SEQ ID NO: 3922 - protein, 113 aa, Artificial Sequence
  source: /note="Description of Artificial Sequence: Synthetic light chain variable domain"
DIVMTQSPSSLAMSVGQKVTMSCKSSQSLLNSSNQKNYLAWYQQEPGQSPKLLVSFASTRESGVPDRFTGSGSGTDFTLTISGVQAEDLAVYYCQQHYSIPLTFGAGTKLELK

SEQ ID NO: 3923 - protein, 105 aa, Artificial Sequence
  source: /note="Description of Artificial Sequence: Synthetic light chain variable domain"
DIQMTQTTSSLSASLGDRVTISCRASQDIKNYLNWYQQKPDGTVKPLIYYTSRVHSGVPSRFSGSGSGTDYSLTISNLEQEDIATYFCQQGYTLPFTFGSGTKLE

SEQ ID NO: 3924 - protein, 108 aa, Artificial Sequence
  source: /note="Description of Artificial Sequence: Synthetic light chain variable domain"
QIVLTQSPAIMSASPGEKVTLTCSASSSVSSRYLYWYQQKPGSSPKLWIYSTSNLASGVPARFSGSGSGTSYSLIISSMEAEDAASYFCHQWSNYPLTFGAGTKLELK

SEQ ID NO: 3925 - protein, 106 aa, Artificial Sequence
  source: /note="Description of Artificial Sequence: Synthetic light chain variable domain"
QIVLTQSPAIMSASPGEKVTMTCSASSSVSYMHWYQQKSGTSPKRWIYDSSKLASGVPARFSGSGSGTSYSLTISSMEAEDAATYYCQQWSSNPLTFGAGTKLELK

SEQ ID NO: 3926 - protein, 106 aa, Artificial Sequence
  source: /note="Description of Artificial Sequence: Synthetic light chain variable domain"
QIVLTQSPAIMSASPGEKVTITCSASSSVSYMHWFQQKPGTSPKLWIYTTSNLASGVPARFSGSGSGTSYSLTVSRMEAEDAATYYCQQRSLYPYTFGGGTKVEIK

SEQ ID NO: 3927 - protein, 108 aa, Artificial Sequence
  source: /note="Description of Artificial Sequence: Synthetic light chain variable domain"
QIVLTQSPTIMSASLGERVTMTCTASSSVTSSYLHWYQQKPGSSPKLWIYSTSNLASGVPARFSGSGSGTSYSLTISSMEAEDAATYYCHQFHRSPFTFGSGTKLEIK

SEQ ID NO: 3928 - protein, 112 aa, Artificial Sequence
  source: /note="Description of Artificial Sequence: Synthetic light chain variable domain"
DIVLTQSPLSLPVNIGDQASISCKSTKSLLNSDGFTYLDWYLQRPGQSPQFLIYLVSNRFSGVPDRFSGSGSGTDFTLKISRVEAEDLGVYYCFQSNYLPLTFGAGTKLELR

SEQ ID NO: 3929 - protein, 107 aa, Artificial Sequence
  source: /note="Description of Artificial Sequence: Synthetic light chain variable domain"
SIVMTQTPKFLLVSAGDRVTITCKASQSVSNDVAWYQQKPGQSPKLLIYYASNRYSGVPDRFTGSGYGTDFTFTISTVQAEDLAVYFCQQDYSSPWTFGGGTKLEIK

SEQ ID NO: 3930 - protein, 107 aa, Artificial Sequence
  source: /note="Description of Artificial Sequence: Synthetic light chain variable domain"
DIQMTQTTSSLSASLGDRVTISCRASQDISNYLNWYQQKPDGTVKLLIYYTSRLHSGVPSRFSGSGSGTDYSLTISNLEQEDIATYFCQQGNTLPYTFGGGTKLEIK

SEQ ID NO: 3931 - protein, 107 aa, Artificial Sequence
  source: /note="Description of Artificial Sequence: Synthetic light chain variable domain"
ETTVTQSPASLSVTTGEKVTIRCITTPDIDDDMNWYQQKPGEPPNLLISEGNSLRPGVPSRFSSSGYGTNFVFTIENTLSEDVADYYCLQSDNMPFTFGSGTKLEIK

SEQ ID NO: 3932 - protein, 104 aa, Artificial Sequence
  source: /note="Description of Artificial Sequence: Synthetic light chain variable domain"
QIVLTQSPAIMSASPGEKVTMTCSASSSINYMHWYQQKPGTSPKRWIYDTSKLASGVPARFSGSGSGTSYSLTISSMEAEDAATYYCHQRSTWTFGGGTKLEIK

SEQ ID NO: 3933 - protein, 108 aa, Artificial Sequence
  source: /note="Description of Artificial Sequence: Synthetic light chain variable domain"
DIQMTQTTSSLSASLGDRVTISCRASQDVINYLNWYQQKPDGTVKLLIYYTSRLHSGVPSRFSGSGSRTDYSLTISNLEPEDIATYYCQQYSERPYTFGGGTKLEIKR

SEQ ID NO: 3934 - protein, 112 aa, Artificial Sequence
  source: /note="Description of Artificial Sequence: Synthetic light chain variable domain"
DVLMTQSPLSLSVSLGDQASISCRSSQNIVHSDRYTYLEWYLQKPGQSPKLLIYGVSNRFSGVPDRFSGSGSGTDFTLKISRVEAEDMGVYYCFQGTHVPYTFGGGTKLEIK

SEQ ID NO: 3935 - protein, 107 aa, Artificial Sequence
  source: /note="Description of Artificial Sequence: Synthetic light chain variable domain"
EIQMTQSPSSMSASLGDRITITCQATQDIVKNLNWYQQKPGKPPSFLIYYATELAEGVPARFSGSGSGSDYSLTISNLESEDFADYHCLQFYEFPFTFGAGTKLELK

SEQ ID NO: 3936 - protein, 112 aa, Artificial Sequence
  source: /note="Description of Artificial Sequence: Synthetic light chain variable domain"
DVVLTQSPLSLPVNIGDQASISCKSTKSLLNSDGFTYLDWYLQRPGQSPQFLIYLVSNRFSGVPDRFSGSGSGTDFTLKISRVEAEDLGVYYCFQSNYLPLTFGAGTKLELR

SEQ ID NO: 3937 - protein, 107 aa, Artificial Sequence
  source: /note="Description of Artificial Sequence: Synthetic light chain variable domain"
DIKMTQSPSSMYASLGERVTITCKASQDINSYLSWFQQKPGKSPKTLIYRANRLVDGVPSRFSGSGSGQDYSLTITSLEYEDMGIYYCLQYDEFPLTFGAGTKLELK

SEQ ID NO: 3938 - protein, 106 aa, Artificial Sequence
  source: /note="Description of Artificial Sequence: Synthetic light chain variable domain"
DIQMTQTTSSLSASLGDRVTISCRASQDISNYLNWYQQKPDGTVKLLIYYTSRLHSGVPSRFSGSGSGTDYSLTISNLEQEDIATYFCQQGNTLRTFGGGTKLEIK

SEQ ID NO: 3939 - protein, 107 aa, Artificial Sequence
  source: /note="Description of Artificial Sequence: Synthetic light chain variable domain"
DIQMIQSPSSMFASLGDRVSLSCRASQGIRGTLDWYQQKPNGTIKLLIYSTSNLNSGVPSRFSGSGSGSDYSLTISSLESEDFADYYCLQRNAYPLTFGAGTKLELK

SEQ ID NO: 3940 - protein, 108 aa, Artificial Sequence
  source: /note="Description of Artificial Sequence: Synthetic light chain variable domain"
DIKMTQSPSSMYASLGERVTITCKASQDINSYLNWFQQKPGKSPKTLIYRANRLVDGVPSRFSGSGSGQDYSLTISSLEYEDMGIYYCLQYDEFPYTFGGGTKLEIKR

SEQ ID NO: 3941 - protein, 107 aa, Artificial Sequence
  source: /note="Description of Artificial Sequence: Synthetic light chain variable domain"
SIVMTQTPKFLLVSAGDRVTITCKASQSVSNDVVWYQQKPGQSPKLLIYYASNRYTGVPDRFAGSGYGTDFSFTISTVQAEDLAVYFCQQDYTSPWTFGGGTKLEIR

SEQ ID NO: 3942 - protein, 107 aa, Artificial Sequence
  source: /note="Description of Artificial Sequence: Synthetic light chain variable domain"
DIVMTQSHKFMSISVGDRVSITCKASQDVSIFVAWYQQKPGQSPKLLIYSASYRYTGVPDRFTGSGSGTDFIFTISSVQAEDLAVYYCQQHYGTPFTFGSGTKLKIR

SEQ ID NO: 3943 - protein, 107 aa, Artificial Sequence
  source: /note="Description of Artificial Sequence: Synthetic light chain variable domain"
DIQMTQSPASLSSSVGETVTITCRASENIYSYLAWYQQKQGKSPQLLVYNAKTLAEGVPSRFSGSGSGTQFSLKINSLQPEDFGTYYCQHHYDSPLTFGAGTKLELR

SEQ ID NO: 3944 - protein, 113 aa, Artificial Sequence
  source: /note="Description of Artificial Sequence: Synthetic light chain variable domain"
DIVMTQSTSSLAMSVGQKVTMSCKSSQSLLNSSNQKNYLAWYQQEPGQSPKLLVSFASTRESGVPDRFTGSGSGTDFTLTISGVQAEDLAVYYCQQHYSIPLTFGAGTKLELK

SEQ ID NO: 3945 - protein, 108 aa, Artificial Sequence
  source: /note="Description of Artificial Sequence: Synthetic light chain variable domain"
DIKMTQSPSSMYASLGERVTITCKASQDINSFLSWFQRKPGKSPKTLIYRANRLVDGVPSRFTGSGSGQEFSLTISSLEYEDLGIYYCLQYDEFPYTFGGGTKLEIKR

SEQ ID NO: 3946 - protein, 106 aa, Artificial Sequence
  source: /note="Description of Artificial Sequence: Synthetic light chain variable domain"
QIVLTQSPAIMSASPGEKVTMTCSASSSVSYMYWYQQKSGTSPKRWIYDTSKLASGVPARFSGSGSGTSYSLTISSMEAEDAATYYCQQWSSNPYTFGGGTKLEIK

SEQ ID NO: 3947 - protein, 106 aa, Artificial Sequence
  source: /note="Description of Artificial Sequence: Synthetic light chain variable domain"
QIVLTQSPALMSASPGEKVTMTCSVTSSVSYMYWYQQKPRSSPKPWIYLTSNLASGVPARFSGSGSGTSYSLTISSVEAEDAATYYCQQWRNNPFTFGSGTKVEIK

SEQ ID NO: 3948 - protein, 109 aa, Artificial Sequence
  source: /note="Description of Artificial Sequence: Synthetic light chain variable domain"
QAVVTQESALTTSPGETVTLTCRSSTGAVTTSNYANWIQEKPDHLFTGLIGGTNNRAPGVPARFSGSLIGDKAALTITGAQTEDEAIYFCGLWYSNHLVFGGGTKLTVL

SEQ ID NO: 3949 - protein, 112 aa, Artificial Sequence
  source: /note="Description of Artificial Sequence: Synthetic light chain variable domain"
DIVMTQTPLSLPVTLGEPASISCRSSQSIVHSNGNTYLEWYLQKPGQSPQLLIYKVSNRFSGVPDRFSGSGSGTDFTLKISRVEAEDVGVYYCFQGSHVPWTFGQGTKVEIK

SEQ ID NO: 3950 - protein, 112 aa, Artificial Sequence
  source: /note="Description of Artificial Sequence: Synthetic light chain variable domain"
DIVMTQTPLSLPVTLGEPASISCRSSQSIVSSWGNTYLEWYLQKPGQSPQLLIYKVSNRFSGVPDRFSGSGSGTDFTLKISRVEAEDVGVYYCFQGSHVPWTFGQGTKVEIK

SEQ ID NO: 3951 - protein, 112 aa, Artificial Sequence
  source: /note="Description of Artificial Sequence: Synthetic light chain variable domain"
DIVMTQTPLSLPVTPGEPASISCRSSQSIVSSWGNTYLEWYLQKPGQSPQLLIYKVSNRFSGVPDRFSGSGSGTDFTLKISRVEAEDVGVYYCFQGSHVPWTFGQGTKVEIK

SEQ ID NO: 3952 - protein, 113 aa, Artificial Sequence
  source: /note="Description of Artificial Sequence: Synthetic light chain variable domain"
DIVMTQSPDSLAVSLGERATINCKSSQSVLYSSNNKNYLAWYQQKPGQPPKLLIYWASTRESGVPDRFSGSGSGTDFTLTISSLQAEDVAVYYCQQDHSYPYTFGQGTKLEIK

SEQ ID NO: 3953 - protein, 113 aa, Artificial Sequence
  source: /note="Description of Artificial Sequence: Synthetic light chain variable domain"
DIVMTQSPDSLAVSAGERATINCKSSQSLLNSGNQKNYLAWYQQKPGQPPKLLIYGASTRESGVPDRFSGSGSGTDFTLIISSLQAEDVAVYYCQNDHQYPYTFGQGTKLEIK

SEQ ID NO: 3954 - protein, 113 aa, Artificial Sequence
  source: /note="Description of Artificial Sequence: Synthetic light chain variable domain"
DIVMTQSPDSLAVSAGERATINCKSSQSLLNWYNQKNYLAWYQQKPGQPPKLLIYGASTRESGVPDRFSGSGSGTDFTLTISSLQAEDVAVYYCQNDHQYPYTFGQGTKLEIK

SEQ ID NO: 3955 - protein, 113 aa, Artificial Sequence
  source: /note="Description of Artificial Sequence: Synthetic light chain variable domain"
DIVMTQSPDSLAVSLGERATINCKSSQSLLNWYNQKNYLAWYQQKPGQPPKLLIYGASTRESGVPDRFSGSGSGTDFTLTISSLQAEDVAVYYCQNDHQYPYTFGQGTKLEIK

SEQ ID NO: 3956 - protein, 112 aa, Artificial Sequence
  source: /note="Description of Artificial Sequence: Synthetic light chain variable domain"
DVLMTQTPLSLPVSLGDQASISCRSSQSIVHSNGNTYLEWYLQKPGQSPKLLIYKVSNRFSGVPDRFSGSGSGTDFTLKISRVEAEDLGVYYCFQGSHVPWTFGGGTKLEIK

SEQ ID NO: 3957 - protein, 112 aa, Artificial Sequence
  source: /note="Description of Artificial Sequence: Synthetic light chain variable domain"
DIVMTQTPLSLPVTPGEPASISCRSSQSLLDSDDGNTYLDWYLQKPGQSPQLLIYTLSYRASGVPDRFSGSGSGTDFTLKISRVEAEDVGVYYCMQGSHVPWTFGQGTKVEI

SEQ ID NO: 3958 - protein, 107 aa, Artificial Sequence
  source: /note="Description of Artificial Sequence: Synthetic light chain variable domain"
DIVMTQSHKFMSTSVGDRVSITCKASQDVGIAVAWYQQKPGQSPKLLIYWASTRHTGVPDRFTGSGSGTDFTLTISNVQSEDLADYFCQQYSSYPYTFGGGTKLEIK

SEQ ID NO: 3959 - protein, 107 aa, Artificial Sequence
  source: /note="Description of Artificial Sequence: Synthetic light chain variable domain"
DIVMTQSQKSMSTSVGDRVSITCKASQDVITGVAWYQQKPGQSPKLLIYSASYRYTGVPDRFTGSGSGTDFTFTISNVQAEDLAVYYCQQHYSTPLTFGAGTKLELK

SEQ ID NO: 3960 - protein, 107 aa, Artificial Sequence
  source: /note="Description of Artificial Sequence: Synthetic light chain variable domain"
DIQMTQSSSYLSVSLGGRVTITCKASDHINNWLAWYQQKPGNAPRLLISGATSLETGVPSRFSGSGSGKDYTLSITSLQTEDVATYYCQQYWSTPWTFGGGTKLEIK

SEQ ID NO: 3961 - protein, 107 aa, Artificial Sequence; identical to SEQ ID NO: 3958
  source: /note="Description of Artificial Sequence: Synthetic light chain variable domain"

SEQ ID NO: 3962 - protein, 107 aa, Artificial Sequence; identical to SEQ ID NO: 3959
  source: /note="Description of Artificial Sequence: Synthetic light chain variable domain"

SEQ ID NO: 3963 - protein, 107 aa, Artificial Sequence; identical to SEQ ID NO: 3960
  source: /note="Description of Artificial Sequence: Synthetic light chain variable domain"

SEQ ID NO: 3964 - protein, 107 aa, Artificial Sequence
  source: /note="Description of Artificial Sequence: Synthetic light chain variable domain"
ETTVTQSPASLSMAIGEKVTIRCITSTDIDDDMNWYQQKPGEPPKLLISEGNTLRPGVPSRFSSSGYGTDFVFTIENMLSEDVADYYCLQSDNLPLTFGGGTKLEIK

SEQ ID NO: 3965 - protein, 108 aa, Artificial Sequence
  source: /note="Description of Artificial Sequence: Synthetic light chain variable domain"
DIVMTQSHKFMSTSVGDRVSITCKASQDVSTAVAWYQQKPGQSPKLLIYSASYRYTGVPDRFTGSGSGTDFTFTISSVQAEDLAVYYCQQHYSTPPYTFGGGTKLEIK

SEQ ID NO: 3966 - protein, 107 aa, Artificial Sequence; identical to SEQ ID NO: 3958
  source: /note="Description of Artificial Sequence: Synthetic light chain variable domain"

SEQ ID NO: 3967 - protein, 107 aa, Artificial Sequence; identical to SEQ ID NO: 3959
  source: /note="Description of Artificial Sequence: Synthetic light chain variable domain"

SEQ ID NO: 3968 - protein, 107 aa, Artificial Sequence; identical to SEQ ID NO: 3960
  source: /note="Description of Artificial Sequence: Synthetic light chain variable domain"

SEQ ID NO: 3969 - protein, 107 aa, Artificial Sequence; identical to SEQ ID NO: 3964
  source: /note="Description of Artificial Sequence: Synthetic light chain variable domain"

SEQ ID NO: 3970 - protein, 108 aa, Artificial Sequence; identical to SEQ ID NO: 3965
  source: /note="Description of Artificial Sequence: Synthetic light chain variable domain"

SEQ ID NO: 3971 - protein, 234 aa, Artificial Sequence
  source: /note="Description of Artificial Sequence: Synthetic light chain variable domain"
MEAPAQLLFLLLLWLPDTTGEIVMTQSPATLSVSPGERATLSCRASQSVSSNLAWYQQKPGQAPRLLIYGASTRASGIPDRISGSGSGTEFTLIISSLQSEDFAVYYCQQSNNWPFTFGPGTKVDIKRTVAAPSVFIFPPSDEQLKSGTASVVCLLNNFYPREAKVQWKVDNALQSGNSQESVTEQDSKDSTYSLSSTLTLSKADYEKHKVYACEVTHQGLSSPVTKSFNRGEC

SEQ ID NO: 3972 - protein, 232 aa, Artificial Sequence
  source: /note="Description of Artificial Sequence: Synthetic light chain variable domain"
PAQLLFLLLLWLPDTTGEFVLTQSPGTLSLSPGERATLSCRASQSVSSSYLAWYQQKPGQAPRLLIYGASSRATGIPDRFSGSGSGTDFTLTISRLEPEDFAVYYCQQYGSSPLTFGGGTKVEIKRTVAAPSVFIFPPSDEQLKSGTASVVCLLNNFYPREAKVQWKVDNALQSGNSQESVTEQDSKDSTYSLSSTLTLSKADYEKHKVYACEVTHQGLSSPVTKSFNRGEC

SEQ ID NO: 3973 - protein, 232 aa, Artificial Sequence
  source: /note="Description of Artificial Sequence: Synthetic light chain variable domain"
PAQLLFLLLLWLPDTTGEFVLTQSPGTLSLSPGERATLSCRASQSVSSSYLAWYQQKPGQAPRLLIYGASSRATGIPDRFSGSGSGTDFTLTISRLEPEDFVVYYCQQYGSSPLTFGGGTKVEIKRTVAAPSVFIFPPSDEQLKSGTASVVCLLNNFYPREAKVQWKVDNALQSGNSQESVTEQDSKDSTYSLSSTLTLSKADYEKHKVYACEVTHQGLSSPVTKSFNRGEC

SEQ ID NO: 3974 - protein, 236 aa, Artificial Sequence
  source: /note="Description of Artificial Sequence: Synthetic light chain variable domain"
MDMRVPAQLLGLLLLWLRGARCDIQMTQSPSSLSASVGDRVTITCRASQSISGFLIWYQQRPGKAPKLLIYATSSLQSGVPLRFSGSESGTDFTLTISSLQPEDFATYYCQQSYSTPFTFGPGTKVDIKRTVAAPSVFIFPPSDEQLKSGTASVVCLLNNFYPREAKVQWKVDNALQSGNSQESVTEQDSKDSTYSLSSTLTLSKADYEKHKVYACEVTHQGLSSPVTKSFNRGEC

SEQ ID NO: 3975 - protein, 232 aa, Artificial Sequence
  source: /note="Description of Artificial Sequence: Synthetic light chain variable domain"
PAQLLFLLLLWLPDTTGEIVLTQSPGTLSLSPGERATLSCRASQSVSSSYLAWYQQKPGQAPRLLIYGASSRATGIPDRFSGSGSGTDFTLTISRLEPEDFAVYYCQQYGSSPLTFGGGTKVEIKRTVAAPSVFIFPPSDEQLKSGTASVVCLLNNFYPREAKVQWKVDNALQSGNSQESVTEQDSKDSTYSLSSTLTLSKADYEKHKVYACEVTHQGLSSPVTKSFNRGEC

SEQ ID NO: 3976 - protein, 108 aa, Artificial Sequence
  source: /note="Description of Artificial Sequence: Synthetic light chain variable domain"
EIELTQSPATLSLSPGERATLSCRASQSVSSYLAWYQQKPGQAPRLLIYDASNRATGIPARFSGSGSGTDFTLTISSLEPEDFAVYYCQQRSNWPPAFGGGTKVEIKR

SEQ ID NO: 3977 - protein, 106 aa, Artificial Sequence
  source: /note="Description of Artificial Sequence: Synthetic light chain variable domain"
QIVLTQSPAILSLSPGERATMSCSASSSVTYMHWFQQKPGKAPKLWIYSTSILASGVPARFSGSGSGTSYTLTISRLEAEDFATYYCQQRTSYPLTFGQGTKLEIK

SEQ ID NO: 3978 - protein, 106 aa, Artificial Sequence
  source: /note="Description of Artificial Sequence: Synthetic light chain variable domain"
QIVLTQSPATLSLSPGERATLSCSASSSVTYMHWFQQKPGKAPKLWIYSTSILASGVPARFSGSGSGTSYTLTISRLEAEDFATYYCQQRTSYPLTFGQGTKLEIK

SEQ ID NO: 3979 - protein, 106 aa, Artificial Sequence
  source: /note="Description of Artificial Sequence: Synthetic light chain variable domain"
EIVLTQSPATLSLSPGERATLSCSASSSVTYMHWFQQKPGKAPKLWIYSTSILASGVPARFSGSGSGTDYTLTISRLEAEDFATYYCQQRTSYPLTFGQGTKLEIK

SEQ ID NO: 3980 - protein, 106 aa, Artificial Sequence
  source: /note="Description of Artificial Sequence: Synthetic light chain variable domain"
EIVLTQSPATLSLSPGERATLSCSASSSVTYMHWFQQKPGKAPKLWIYSTSILASGVPARFSGSGSGTDYTLTISRLEPEDFATYYCQQRTSYPLTFGQGTKLEIK

SEQ ID NO: 3981 - protein, 106 aa, Artificial Sequence
  source: /note="Description of Artificial Sequence: Synthetic light chain variable domain"
EIVLTQSPATLSLSPGERATMSCSASSSVTYMHWFQQKPGKAPKLLIYSTSILASGVPARFSGSGSGTDYTLTISRLEPEDFATYYCQQRTSYPLTFGQGTKLEIK

SEQ ID NO: 3982 - protein, 107 aa, Artificial Sequence
  source: /note="Description of Artificial Sequence: Synthetic light chain variable domain"
QIVLTQSPAILSLSPGERATMSCSASSSISYMHWFQQRPGQSPKRWIYDTSKLASGVPARFSGSGSGTSYTLTISSLEAEDFATYYCHQRTSYPLTFGQGTKLEIKR

SEQ ID NO: 3983 - protein, 107 aa, Artificial Sequence
  source: /note="Description of Artificial Sequence: Synthetic light chain variable domain"
QIVLTQSPATLSLSPGERATLSCSASSSISYMHWFQQRPGQSPRRWIYDTSKLASGVPARFSGSGSGTSYTLTISSLEAEDFATYYCHQRTSYPLTFGQGTKLEIKR

SEQ ID NO: 3984 - protein, 107 aa, Artificial Sequence
  source: /note="Description of Artificial Sequence: Synthetic light chain variable domain"
EIVLTQSPATLSLSPGERATLSCSASSSISYMHWFQQRPGQSPRRWIYDTSKLASGVPARFSGSGSGTDYTLTISSLEAEDFATYYCHQRTSYPLTFGQGTKLEIKR

SEQ ID NO: 3985 - protein, 107 aa, Artificial Sequence
  source: /note="Description of Artificial Sequence: Synthetic light chain variable domain"
EIVLTQSPATLSLSPGERATLSCSASSSISYMHWFQQRPGQSPRRWIYDTSKLASGVPARFSGSGSGTDYTLTISSLEPEDFATYYCHQRTSYPLTFGQGTKLEIKR

SEQ ID NO: 3986 - protein, 107 aa, Artificial Sequence
  source: /note="Description of Artificial Sequence: Synthetic light chain variable domain"
EIVLTQSPATLSLSPGERATMSCSASSSISYMHWFQQRPGQSPRRLIYDTSKLASGVPARFSGSGSGTDYTLTISSLEPEDFATYYCHQRTSYPLTFGQGTKLEIKR

SEQ ID NO: 3987 - protein, 106 aa, Artificial Sequence
  source: /note="Description of Artificial Sequence: Synthetic light chain variable domain"
QIVLTQSPAIMSASPGEKVTMTCSASSSISYMHWFQQKPGTSPKRWIYDTSKLASGVPARFSGSGSGTSYSLTINSMEAEDAATYYCHQRTSYPLTFGAGTKLELK

SEQ ID NO: 3988 - protein, 107 aa, Artificial Sequence
  source: /note="Description of Artificial Sequence: Synthetic light chain variable domain"
QAVVTQESAFTTSPGGTVILTCRSSTGAVTTNNYANWVQEKPDHLFTGLIGGTSNRAPGVPVRFSGSLIGDKAALTITGAQTEDDGMYFCALWYTTHFVFGGGTKVT

SEQ ID NO: 3989 - protein, 106 aa, Artificial Sequence
  source: /note="Description of Artificial Sequence: Synthetic light chain variable domain"
QIVLTQSPAIMSASPGEKVTMTCSASSSVTYMHWFQQKPGTSPKLWIYSTSILASGVPARFSGSGSGTSYSLTISRMEAEDAATYYCQQRTSYPLTFGTGTKLELK

SEQ ID NO: 3990 - protein, 108 aa, Artificial Sequence
  source: /note="Description of Artificial Sequence: Synthetic light chain variable domain"
EIVLTQSPGTLSLSPGERATLSCRASQSVGSSYLAWYQQKPGQAPRLLIYGAFSRATGIPDRFSGSGSGTDFTLTISRLEPEDFAVYYCQQYGSSPWTFGQGTKVEIK

SEQ ID NO: 3991 - protein, 215 aa, Artificial Sequence
  source: /note="Description of Artificial Sequence: Synthetic light chain variable domain"
EIVLTQSPGTLSLSPGERATLSCRASQSVGSSYLAWYQQKPGQAPRLLIYGAFSRATGIPDRFSGSGSGTDFTLTISRLEPEDFAVYYCQQYGSSPWTFGQGTKVEIKRTVAAPSVFIFPPSDEQLKSGTASVVCLLNNFYPREAKVQWKVDNALQSGNSQESVTEQDSKDSTYSLSSTLTLSKADYEKHKVYACEVTHQGLSSPVTKSFNRGEC

SEQ ID NO: 3992 - protein, 112 aa, Artificial Sequence
  source: /note="Description of Artificial Sequence: Synthetic light chain variable domain"
DIVMTQSPDSLAVSLGERATINCKSSQSLFNSRTRKNYLAWYQQKPGQPPKLLIYWASTRESGVPDRFSGSGSGTDFTLTISSLQAEDVAVYYCMQSFNLRTFGQGTKVEIK

SEQ ID NO: 3993 - protein, 112 aa, Artificial Sequence
  source: /note="Description of Artificial Sequence: Synthetic light chain variable domain"
DIVMTQSPDSLAVSLGERATINCKSSQSLFNSRTRKNYLAWYQQKPGQPPKLLIYWASARDSGVPDRFSGSGSGTDFTLTISSLQAEDVAVYYCMQSFNLRTFGQGTKVEIK

SEQ ID NO: 3994 - protein, 112 aa, Artificial Sequence
  source: /note="Description of Artificial Sequence: Synthetic light chain variable domain"
DIVMTQSPSSLAVSLGERATMSCKSSQSLFNSRTRKNYLAWYQQKPGQSPKLLIYWASARDSGVPARFTGSGSETYFTLTISRVQAEDLAVYYCMQSFNLRTFGQGTKVEIK

SEQ ID NO: 3995 - protein, 112 aa, Artificial Sequence
  source: /note="Description of Artificial Sequence: Synthetic light chain variable domain"
DIVMTQSPDSLAVSLGERATMSCKSSQSLFNSRTRKNYLAWYQQKPGQPPKLLIYWASARDSGVPDRFSGSGSETYFTLTISRVQAEDLAVYYCMQSFNLRTFGQGTKVEIK

SEQ ID NO: 3996 - protein, 112 aa, Artificial Sequence
  source: /note="Description of Artificial Sequence: Synthetic light chain variable domain"
DIVMTQSPDSLAVSLGERATMSCKSSQSLFNSRTRKNYLAWYQQKPGQPPKLLIYWASARDSGVPDRFTGSGSETYFTLTISRVQAEDVAVYYCMQSFNLRTFGQGTKVEIK

SEQ ID NO: 3997 - protein, 112 aa, Artificial Sequence
  source: /note="Description of Artificial Sequence: Synthetic light chain variable domain"
DIVMTQSPDSLAVSLGERATMSCKSSQSLFNSRTRKNYLAWYQQKPGQPPKLLIYWASARDSGVPDRFTGSGSETYFTLTISSLQAEDLAVYYCMQSFNLRTFGQGTKVEIK

SEQ ID NO: 3998 - protein, 112 aa, Artificial Sequence
  source: /note="Description of Artificial Sequence: Synthetic light chain variable domain"
DIVMTQSPDSLAVSLGERATINCKSSQSLFNSRTRKNYLAWYQQKPGQPPKLLIYWASARDSGVPDRFTGSGSETYFTLTISSLQAEDVAVYYCMQSFNLRTFGQGTKVEIK

SEQ ID NO: 3999 - protein, 219 aa, Artificial Sequence
  source: /note="Description of Artificial Sequence: Synthetic light chain variable domain"
DIVMTQSPDSLAVSLGERATINCKSSQSLFNSRTRKNYLAWYQQKPGQPPKLLIYWASTRESGVPDRFSGSGSGTDFTLTISSLQAEDVAVYYCMQSFNLRTFGQGTKVEIKRTVAAPSVFIFPPSDEQLKSGTASVVCLLNNFYPREAKVQWKVDNALQSGNSQESVTEQDSKDSTYSLSSTLTLSKADYEKHKVYACEVTHQGLSSPVTKSFNRGEC

SEQ ID NO: 4000 - protein, 219 aa, Artificial Sequence
  source: /note="Description of Artificial Sequence: Synthetic light chain variable domain"
DIVMTQSPDSLAVSLGERATINCKSSQSLFNSRTRKNYLAWYQQKPGQPPKLLIYWASARDSGVPDRFSGSGSGTDFTLTISSLQAEDVAVYYCMQSFNLRTFGQGTKVEIKRTVAAPSVFIFPPSDEQLKSGTASVVCLLNNFYPREAKVQWKVDNALQSGNSQESVTEQDSKDSTYSLSSTLTLSKADYEKHKVYACEVTHQGLSSPVTKSFNRGEC

SEQ ID NO: 4001 - protein, 219 aa, Artificial Sequence
  source: /note="Description of Artificial Sequence: Synthetic light chain variable domain"
DIVMTQSPDSLAVSLGERATMSCKSSQSLFNSRTRKNYLAWYQQKPGQPPKLLIYWASARDSGVPDRFSGSGSETYFTLTISRVQAEDLAVYYCMQSFNLRTFGQGTKVEIKRTVAAPSVFIFPPSDEQLKSGTASVVCLLNNFYPREAKVQWKVDNALQSGNSQESVTEQDSKDSTYSLSSTLTLSKADYEKHKVYACEVTHQGLSSPVTKSFNRGEC

SEQ ID NO: 4002 - protein, 219 aa, Artificial Sequence
  source: /note="Description of Artificial Sequence: Synthetic light chain variable domain"
DIVMTQSPDSLAVSLGERATMSCKSSQSLFNSRTRKNYLAWYQQKPGQPPKLLIYWASARDSGVPDRFTGSGSETYFTLTISRVQAEDVAVYYCMQSFNLRTFGQGTKVEIKRTVAAPSVFIFPPSDEQLKSGTASVVCLLNNFYPREAKVQWKVDNALQSGNSQESVTEQDSKDSTYSLSSTLTLSKADYEKHKVYACEVTHQGLSSPVTKSFNRGEC

SEQ ID NO: 4003 - protein, 219 aa, Artificial Sequence
  source: /note="Description of Artificial Sequence: Synthetic light chain variable domain"
DIVMTQSPDSLAVSLGERATMSCKSSQSLFNSRTRKNYLAWYQQKPGQPPKLLIYWASARDSGVPDRFTGSGSETYFTLTISSLQAEDLAVYYCMQSFNLRTFGQGTKVEIKRTVAAPSVFIFPPSDEQLKSGTASVVCLLNNFYPREAKVQWKVDNALQSGNSQESVTEQDSKDSTYSLSSTLTLSKADYEKHKVYACEVTHQGLSSPVTKSFNRGEC

SEQ ID NO: 4004 - protein, 219 aa, Artificial Sequence
  source: /note="Description of Artificial Sequence: Synthetic light chain variable domain"
DIVMTQSPDSLAVSLGERATINCKSSQSLFNSRTRKNYLAWYQQKPGQPPKLLIYWASARDSGVPDRFTGSGSETYFTLTISSLQAEDVAVYYCMQSFNLRTFGQGTKVEIKRTVAAPSVFIFPPSDEQLKSGTASVVCLLNNFYPREAKVQWKVDNALQSGNSQESVTEQDSKDSTYSLSSTLTLSKADYEKHKVYACEVTHQGLSSPVTKSFNRGEC

SEQ ID NO: 4005 - protein, 213 aa, Artificial Sequence
  source: /note="Description of Artificial Sequence: Synthetic light chain variable domain"
DIQMTQSPILLSASVGDRVTITCSASSSISYMHWYQQRTNGSPRLLIYTTSNLASGVPARFSGSGSGTEFTLTISSLQPDDIADYYCHQRSTYPLTFGQGTKVEVKRTVAAPSVFIFPPSDEQLKSGTASVVCLLNNFYPREAKVQWKVDNALQSGNSQESVTEQDSKDSTYSLSSTLTLSKADYEKHKVYACEVTHQGLSSPVTKSFNRGEC

SEQ ID NO: 4006 - protein, 213 aa, Artificial Sequence
  source: /note="Description of Artificial Sequence: Synthetic light chain variable domain"
DIQMTQSPILLSASVGDRVTITCSASSSISYMHWYQQRTNGSPRLLIYTTSNLASGVPARFSGSGSGTEFTLTISSLQPDDEADYYCHQRSTYPLTFGQGTKVEVKRTVAAPSVFIFPPSDEQLKSGTASVVCLLNNFYPREAKVQWKVDNALQSGNSQESVTEQDSKDSTYSLSSTLTLSKADYEKHKVYACEVTHQGLSSPVTKSFNRGEC

SEQ ID NO: 4007 - protein, 107 aa, Artificial Sequence
  source: /note="Description of Artificial Sequence: Synthetic light chain variable domain"
DIVMTQSHKFMSTSVGDRVSITCKASQDVNTAVAWYQQKPGQSPKLLIYWASTRHTGVPDRFTGSGSGTDYTLTIKSVQAEDLTLYYCQQHYITPWTFGGGTKLEIK

SEQ ID NO: 4008 - protein, 107 aa, Artificial Sequence
  source: /note="Description of Artificial Sequence: Synthetic light chain variable domain"
DIQMTQSPSFLSASVGDRVTITCKASQDVNTAVAWYQQKPGKAPKLLIYWASTRHTGVPSRFSGSGSGTDFTLTISSLQPEDVATYYCQQHYITPWTFGGGTKLEIK

SEQ ID NO: 4009 - protein, 107 aa, Artificial Sequence
  source: /note="Description of Artificial Sequence: Synthetic light chain variable domain"
DIQMTQSPSFLSASVGDRVTITCRASQDVNTAVAWYQQKPGKAPKLLIYWASTRHTGVPDRFSGSGSGTDFTLTISSLQPEDVATYYCQQHYITPWTFGGGTKLEIK

SEQ ID NO: 4010 - protein, 107 aa, Artificial Sequence
  source: /note="Description of Artificial Sequence: Synthetic light chain variable domain"
DIQMTQSPSFLSASVGDRVTITCRASQDVNTAVAWYQQKPGKAPKLLIYWASTRHTGVPSRFSGSGSGTDFTLTISSLQPEDIATYYCQQHYITPWTFGGGTKLEIK

SEQ ID NO: 4011 - protein, 111 aa, Artificial Sequence
  source: /note="Description of Artificial Sequence: Synthetic light chain variable domain"
DIVLTQSPASLAVSLGQRATISCRASKSVSSSGYSYMHWYQQKPGQPPKVLIFLSSNLDSGVPARFSGSGSGTDFTLNIHPVEDGDAATYYCQHSRDLPPTFGGGTKLEIK

SEQ ID NO: 4012 - protein, 109 aa, Artificial Sequence
  source: /note="Description of Artificial Sequence: Synthetic light chain variable domain"
DIAMTQSHKFMSTLVGDRVSITCKASQDVNTAIAWYQQKPGQSPKLLIYWASTRHTGVPDRFYGSGSGTDYTLTISSMEAEDAATYYCQQWSSNPLTFGAGTKLELKRA

SEQ ID NO: 4013 - protein, 104 aa, Artificial Sequence
  source: /note="Description of Artificial Sequence: Synthetic light chain variable domain"
DIVMTQSHKFMSTSVGDRVSITCKASQDVNTAIAWYQQKPGQSPKLLIYWASTRHTGVPDRFTGSGSGTDYTLTISSVQAEDLALYYCQQHYTTPFTFGSGTKL

SEQ ID NO: 4014 - protein, 108 aa, Artificial Sequence
  source: /note="Description of Artificial Sequence: Synthetic light chain variable domain"
EIVLTQSPATLSLSPGERATLSCRASQSVSSYLAWYQQKPGQAPRLLIYDASNRATGIPARFSGSGSGTDFTLTISSLEPEDFAVYYCQQRSNWPLTFGGGTKVEIKR

SEQ ID NO: 4015 - protein, 107 aa, Artificial Sequence
  source: /note="Description of Artificial Sequence: Synthetic light chain variable domain"
DIQMTQSPSFLSASVGDRVTITCRASQDVNTAVAWYQQKPGKAPKLLIYWASTRHTGVPDRFSGSGSGTDFTLTISSLQPEDIATYYCQQHYITPWTFGGGTKLEIK

SEQ ID NO: 4016 - protein, 108 aa, Artificial Sequence
  source: /note="Description of Artificial Sequence: Synthetic light chain variable domain"
EIVLTQSPGTLSLSPGERATLSCRASQGISRSYLAWYQQKPGQAPSLLIYGASSRATGIPDRFSGSGSGTDFTLTISRLEPEDFAVYYCQQFGSSPWTFGQGTKVEIK

SEQ ID NO: 4017 - protein, 108 aa, Artificial Sequence
  source: /note="Description of Artificial Sequence: Synthetic light chain variable domain"
SELTQDPAVSVALGQTVRITCSGDSLRSYYASWYQQKPGQAPVLVIYGANNRPSGIPDRFSGSSSGNTASLTITGAQAEDEADYYCNSADSSGNHVVFGGGTKLTVLG

SEQ ID NO: 4018 - protein, 106 aa, Artificial Sequence [sequence omitted]

SEQ ID NO: 4019 - protein, 111 aa, Artificial Sequence
  source: /note="Description of Artificial Sequence: Synthetic light chain variable domain"
SYELTQPPSVSGTPGQRVAISCSGSSSNIGTRMVTWYQHVPGTAPKLLIFNNNQRPSGVPDRFSASKSGTSASLAIIGLQSDDEADYYCATWDENPKSYVFGTGTKVTVLG

SEQ ID NO: 4020 - protein, 111 aa, Artificial Sequence
  source: /note="Description of Artificial Sequence: Synthetic light chain variable domain"
SYELTQPPSVSGTPGQRVAISCSGSSSNIGTRMVTWYQHVPGTAPKLLIFNNNQRPSGVPDRFSASKSGTSASLAIIGLQSDDEADYYCATWEDNRKSYVFGTGTKVTVLG

SEQ ID NO: 4021 - protein, 111 aa, Artificial Sequence
  source: /note="Description of Artificial Sequence: Synthetic light chain variable domain"
SYELTQPPSVSGTPGQRVAISCSGSSSNIGTRVVTWYQHVPGTAPKLLIFNNNQRPSGVPDRFSASKSGTSASLAIIGLQSDDEADYYCAAWDDNLKSYVFGTGTKVTVLG

SEQ ID NO: 4022 - protein, 111 aa, Artificial Sequence
  source: /note="Description of Artificial Sequence: Synthetic light chain variable domain"
SYELTQPPSVSGTPGQRVAISCSGSSSNIGTRMVTWYQHVPGTAPKLLIFNNNQRPSGVPDRFSASKSGTSASLAIIGLQSDDEADYYCATWDDNVKSYVFGTGTKVTVLG

SEQ ID NO: 4023 - protein, 111 aa, Artificial Sequence
  source: /note="Description of Artificial Sequence: Synthetic light chain variable domain"
SYELTQPPSVSGTPGQRVAISCSGSSSNIGTRMVTWYQHVPGTAPKLLIFNNNQRPSGVPDRFSASKSGTSASLAIIGLQSDDEADYYCAAWDDNPKSYHFGTGTKVTVLG

SEQ ID NO: 4024 - protein, 111 aa, Artificial Sequence
  source: /note="Description of Artificial Sequence: Synthetic light chain variable domain"
SYELTQPPSVSGTPGQRVAISCSGSSSNIGTRMVTWYQHVPGTAPKLLIFNNNQRPSGVPDRFSASKSGTSASLTIIGLQSDDEADYYCAAWDDNLKSYVFGTGTKVTVLG

SEQ ID NO: 4025 - protein, 111 aa, Artificial Sequence
  source: /note="Description of Artificial Sequence: Synthetic light chain variable domain"
QAVLTQPPSASGTPGQRVTISCSGSSSNIGTNPVTWYQHLPGTAPKLLIYGNYQRPSGVPDRFSGSKSGTSASLAISGLQSEDEADYYCAAWDDSLTGYVFGTGTKVTVLG

SEQ ID NO: 4026 - protein, 111 aa, Artificial Sequence
  source: /note="Description of Artificial Sequence: Synthetic light chain variable domain"
QSVLTQPPSLSVAPGKTASITCGGNNIGMKSVHWYQQRPGQAPVLVIYYDSDRPSGIPGRFSGSNSGNTATLTISRVEAGDEADYYCQVWDTTGDHPGYVFGTGTKVTVLG

SEQ ID NO: 4027 - protein, 111 aa, Artificial Sequence
  source: /note="Description of Artificial Sequence: Synthetic light chain variable domain"
QSVVTQPPSVSAAPGQKVTISCSGSSSNIGNNYVSWYQHFPGAAPKLLIYDNYKRPSGIPDRFSGSKSGTSATLGITGLQTGDEAEYYCGTWDSSLSAYVFGTGTKVTVLG

SEQ ID NO: 4028 - protein, 109 aa, Artificial Sequence
  source: /note="Description of Artificial Sequence: Synthetic light chain variable domain"
SYELTQPPSVSVAPGKTARITCGGNNIGSKSVHWYQQKPGQAPVLVIYYNSDRPSGIPERFSGSNSGNTATLTISRVEAGDEADYYCQVWDSSSDHWVFGGGTKLTVLG

SEQ ID NO: 4029 - protein, 111 aa, Artificial Sequence
  source: /note="Description of Artificial Sequence: Synthetic light chain variable domain"
QSVLTQPPSASGTPGQRVTISCSGHNSNIETNPVSWYQQVPGTTPKLLIYSYYYRPSGVPDRFSGSKSGTSASLAISGLQSEDEADYFCASWDDSVQGYVFGSGTKVTVLG

SEQ ID NO: 4030 - protein, 109 aa, Artificial Sequence
  source: /note="Description of Artificial Sequence: Synthetic light chain variable domain"
SSELTQDPAVSVALGQTVRITCQGDSLRSYYASWYQQKPGQAPVLVIYGKNNRPSGIPDRFSGSSSGNTASLTITGAQAEDEADYYCNSRDSSGNHQVFGTGTKVTVLG

SEQ ID NO: 4031 - protein, 109 aa, Artificial Sequence
  source: /note="Description of Artificial Sequence: Synthetic light chain variable domain"
QSVLTQPPSVSVAPGKTARITCGGNNIGSKNVHWYQQKPGQAPVLVVYDDHDGPSGIPERFSGSNSGNTATLTISRVEAGDEADYYCQVWDSSSDHVVFGGGTKLTVLG

SEQ ID NO: 4032 - protein, 110 aa, Artificial Sequence
  source: /note="Description of Artificial Sequence: Synthetic light chain variable domain"
QAVLTQPPSASGTPGQRVTISCSGSSSNIGINTVNWYQQLPGTAPKLLIYGNSHRPSGVPDRFSGSKSGASASLAITGLQADDEGAYFCQSYDTSLTVIFGGGTKLTVLG

SEQ ID NO: 4033 - protein, 112 aa, Artificial Sequence
  source: /note="Description of Artificial Sequence: Synthetic light chain variable domain"
QTVVTQEPSLTVSPGGTVTLTCASSTGAVTSGYYPNWFQQKPGQAPRALIYSTNNKHSWTPARFSGSLLGGKAALTLSGVQPEDEAEYYCLLYYGGAQLWVFGGGTKLTVLG

SEQ ID NO: 4034 - protein, 108 aa, Artificial Sequence
  source: /note="Description of Artificial Sequence: Synthetic light chain variable domain"
DIQMTQSPSSLSASVGDRVTITCRASQSISSYLNWYQQKPGQAPNLLIYGASSFQSGVPSRFSGSGSGTDFTLTISSLQPEDFATYYCQQSYSAPLTFGGGTKVDIKR

SEQ ID NO: 4035 - protein, 111 aa, Artificial Sequence
  source: /note="Description of Artificial Sequence: Synthetic light chain variable domain"
QAVLTQPPSASGTPGQRVTISCSGSSSNIGSNSVNWYQQVPGTAPKLLIYSNNQRPSGVPDRFSGSKSGTSASLAITKLQSEDEADYYCAAWDDSLNGYVFGTGTKVTVLG

SEQ ID NO: 4036 - protein, 111 aa, Artificial Sequence
  source: /note="Description of Artificial Sequence: Synthetic light chain variable domain"
QSVLTQPPSVSGAPGQRVTISCTGSSSNIGAGYDVHWYQQLPGTAPKLLIYESNNRPSGVPDRFSGSKSGTSASLAITGLQAEDEADYYCQSYDTSLKGVFGPGTKVTVLG

SEQ ID NO: 4037 - protein, 109 aa, Artificial Sequence
  source: /note="Description of Artificial Sequence: Synthetic light chain variable domain"
SSELTQDPAVSVALGQTVTITCQGDILRNYYATWYQQKPGQAPSLVLYGQNNRPSGIPDRFSGSTSGNTASLTITGAQAEDEGDYYCDSRDSSGNHWVFGGGTKLTVLG

SEQ ID NO: 4038 - protein, 110 aa, Artificial Sequence
  source: /note="Description of Artificial Sequence: Synthetic light chain variable domain"
SSELTQDPALSVALGQTVTITCRGDNLRNSYASWYQQKPGQAPVVVLYGKNRRPSGIPDRFSGSSSGNTASLTITGAQADDEADYYCNSRDSSGFPPYVFGPGTKVTVLG

SEQ ID NO: 4039 - protein, 108 aa, Artificial Sequence
  source: /note="Description of Artificial Sequence: Synthetic light chain variable domain"
SYVLTQPPSVSVSPGQTASITCSGDKLGEKYVYWYQQRPGQSPVLVIFQNDKRPSGIPERLSGSRSGNTATLTISGTQAMDEADYYCQSWASSSVYVFGTGTKLTVLG

SEQ ID NO: 4040 - protein, 109 aa, Artificial Sequence
  source: /note="Description of Artificial Sequence: Synthetic light chain variable domain"
SSELTQDPAVSVALGQTVRITCQGDSLRNYYASWYQQKPGQAPVLVLYGKDNRPSGIPDRFSGSSSGNTASLTITGAQAEDEADYYCNSRDSSGNHRVFGGGTKLTVLG

SEQ ID NO: 4041 - protein, 111 aa, Artificial Sequence
  source: /note="Description of Artificial Sequence: Synthetic light chain variable domain"
QAVLTQPPSASGTPGQRVTISCSGSSSNIGSNHVNWYQQLPGTAPKLLISNNNQRPSGVPDRFSGSKSGTSASLAISGLQSEDEADYYCAAWDDSLNVPVFGGGTQLTVLS

SEQ ID NO: 4042 - protein, 109 aa, Artificial Sequence
  source: /note="Description of Artificial Sequence: Synthetic light chain variable domain"
SSELTQDPAVSVALGQTVRITCQGDTLRSFYASWYQQKPGQAPVLVFYGKNNRPSGIPERFSGSNSENTASLTIAGAQAEDEADYYCNSRDSGGDPVVFGGGTKLTVLG

SEQ ID NO: 4043 - protein, 110 aa, Artificial Sequence
  source: /note="Description of Artificial Sequence: Synthetic light chain variable domain"
QAVVTQEPSLTVSPGGTVTLTCASSTGAVTSSYYPNWFQQKPGQAPRALIYSTSNTHSWTPARFSGSLLGGKAALTVSGVQPEDEAEYYCLLYYGGARVFGGGTKLTVLG

SEQ ID NO: 4044 - protein, 111 aa, Artificial Sequence
  source: /note="Description of Artificial Sequence: Synthetic light chain variable domain"
SYELTQPPSVSGTPGQRVAISCSGSSSNIGTRMVTWYQHVPGTAPKLLIFNNNQRPSGVPDRFSASKSGTSASLAIIGLQSDDEADYYCAAWDDNLKSYVFGTGTKVTVLG

SEQ ID NO: 4045 - protein, 107 aa, Artificial Sequence
  source: /note="Description of Artificial Sequence: Synthetic light chain variable domain"
DIQMTQSPSSLSASVGDRVTITCRASQNVGTNVAWFQQKPGKAPKSLIHSASYRYSGVPSRFSGSGSGTDFTLTISSLQPEDFATYYCQQYKRYPYTFGGGTKLEIK

SEQ ID NO: 4046 - protein, 107 aa, Artificial Sequence
  source: /note="Description of Artificial Sequence: Synthetic light chain variable domain"
EIVLTQSPGTLSLSPGERATLSCKASQSVGNNVAWYQQKPGQAPRLLIYYASNRYTGIPDRFSGSGSGTDFTLTISRLEPEDFAVYYCQQHYSSPLTFGAGTKLEIK

SEQ ID NO: 4047 - protein, 112 aa, Artificial Sequence
  source: /note="Description of Artificial Sequence: Synthetic light chain variable domain"
DIVMTQTPLSLSVTPGQPASISCRSSQSLVHSNGNTFLYWYLQKPGQSPQLLIYRVSNRFSGVPDRFSGSGSGTDFTLKISRVEAEDVGVYYCFQATHVPWTFGGGTKVEIK

SEQ ID NO: 4048 - protein, 111 aa, Artificial Sequence
  source: /note="Description of Artificial Sequence: Synthetic light chain variable domain"
EIVLTQSPATLSLSPGERATLSCRASQSVSSSSYTYIHWYQQKPGQAPRLLINFASNLESGIPARFSGSGSGTDFTLTISSLEPEDFAVYYCQHSWEIPPTFGGGTKLEIK

SEQ ID NO: 4049 - protein, 112 aa, Artificial Sequence; identical to SEQ ID NO: 4047
  source: /note="Description of Artificial Sequence: Synthetic light chain variable domain"

SEQ ID NO: 4050 - protein, 111 aa, Artificial Sequence; identical to SEQ ID NO: 4048
  source: /note="Description of Artificial Sequence: Synthetic light chain variable domain"

SEQ ID NO: 4051 - protein, 445 aa, Artificial Sequence
  source: /note="Description of Artificial Sequence: Synthetic light chain variable domain"
EVQLQESGPGLVKPSQTLSLTCTVSGYSISRDFAWNWIRQPPGKGLEWMGYISYNGNTRYQPSLKSRITISRDTSKNQFFLKLNSVTAADTATYYCVTASRGFPYWGQGTLVTVSSASTKGPSVFPLAPSSKSTSGGTAALGCLVKDYFPEPVTVSWNSGALTSGVHTFPAVLQSSGLYSLSSVVTVPSSSLGTQTYICNVNHKPSNTKVDKKVEPKSCDKTHTCPPCPAPELLGGPSVFLFPPKPKDTLMISRTPEVTCVVVDVSHEDPEVKFNWYVDGVEVHNAKTKPREEQYNSTYRVVSVLTVLHQDWLNGKEYKCKVSNKALPAPIEKTISKAKGQPREPQVYTLPPSREEMTKNQVSLTCLVKGFYPSDIAVEWESNGQPENNYKTTPPVLDSDGSFFLYSKLTVDKSRWQQGNVFSCSVMHEALHNHYTQKSLSLSPG

SEQ ID NO: 4052 - protein, 330 aa, Artificial Sequence [sequence omitted]

SEQ ID NO: 4053 - protein, 108 aa, Artificial Sequence
  source: /note="Description of Artificial Sequence: Synthetic light chain variable domain"
DIQMTQSPSSLSASLGGKVTITCKASQDINNYIAWYQHKPGKGPRLLIHYTSTLHPGIPSRFSGSGSGRDYSFSISNLEPEDIATYYCLQYDNLLYTFGGGTKLEIKR

SEQ ID NO: 4054 - protein, 108 aa, Artificial Sequence
  source: /note="Description of Artificial Sequence: Synthetic light chain variable domain"
DIQMTQSPSSLSASLGGKVTITCKASQDINNYLAWYQHKPGKGPRLLIHYTSTLHPGIPSRFSGSGSGRDYSFSISNLEPEDIATYYCLQYDNLLYTFGGGTKLEIKR

SEQ ID NO: 4055 - protein, 108 aa, Artificial Sequence
  source: /note="Description of Artificial Sequence: Synthetic light chain variable domain"
DIQMTQSPSSLSASVGDRVTITCKASQDINNYLAWYQHKPGKGPKLLIHYTSTLHPGIPSRFSGSGSGRDYSFSISSLEPEDIATYYCLQYDNLLYTFGQGTKLEIKR

SEQ ID NO: 4056 - protein, 108 aa, Artificial Sequence
  source: /note="Description of Artificial Sequence: Synthetic light chain variable domain"
DIQMTQSPSSLSASVGDRVTITCRASQDINNYLAWYQHKPGKGPKLLIHYTSTLHPGIPSRFSGSGSGRDYSFSISSLEPEDIATYYCLQYDNLLYTFGQGTKLEIKR

SEQ ID NO: 4057 - protein, 108 aa, Artificial Sequence
  source: /note="Description of Artificial Sequence: Synthetic light chain variable domain"
DVQITQSPSSLAASVGERITINCRASKSISKYLAWYQEKPGKTNKLLIYSGSTLQSGIPSRFSGSGSGTDFTLTISSLEPEDFAMYYCQQHNEYPWTFGQGTKLEIKR

SEQ ID NO: 4058 - protein, 108 aa, Artificial Sequence
  source: /note="Description of Artificial Sequence: Synthetic light chain variable domain"
DVQITQSPSSLAASVGERITINCRASQSISRYLAWYQEKPGKTNKLLIYSGSTLQSGIPSRFSGSGSGTDFTLTISSLEPEDFAMYYCQQHNEYPWTFGQGTKLEIKR

SEQ ID NO: 4059 - protein, 108 aa, Artificial Sequence
  source: /note="Description of Artificial Sequence: Synthetic light chain variable domain"
DVQITQSPSYLAASPGETITINCRASKSISKYLAWYQEKPGKTNKLLIYSGSTLQSGIPSRFSGSGSGTDFTLTISSLEPEDFAMYYCQQHNEYPWTFGGGTKLEIKR

SEQ ID NO: 4060 - protein, 108 aa, Artificial Sequence
  source: /note="Description of Artificial Sequence: Synthetic light chain variable domain"
DILLTQSPVILSVSPGERVSFSCRASQSIGTNIHWYQQRTNGSPRLLIKYASESISGIPSRFSGSGSGTDFTLSINSVESEDIADYYCQQNNNWPTTFGAGTKLELKR

SEQ ID NO: 4061 - protein, 107 aa, Artificial Sequence
  source: /note="Description of Artificial Sequence: Synthetic light chain variable domain"
EIVLTQSPDFQSVTPKEKVTITCRASQSIGTNIHWYQQKPDQSPKLLIKYASESISGVPSRFSGSGSGTDFTLTINSLEAEDAADYYCQQNNNWPTTFGAGTKLEIK

SEQ ID NO: 4062 - protein, 108 aa, Artificial Sequence
  source: /note="Description of Artificial Sequence: Synthetic light chain variable domain"
EIVLTQSPDFQSVTPKEKVTITCRASQSIGTNIHWYQQKPDQSPKLLIKYASESISGVPSRFSGSGSGTDFTLTINSLEAEDAADYYCQQNNNWPTTFGQGTKLEIKR

SEQ ID NO: 4063 - protein, 108 aa, Artificial Sequence
  source: /note="Description of Artificial Sequence: Synthetic light chain variable domain"
EIVLTQSPDFQSVTPKEKVTITCRASQSIGTNIHWYQQKPDQSPKLLIKYASESISGVPSRFSGSGSGTDFTLTINSLEAEDAATYYCQQNNNWPTTFGQGTKLEIKR

SEQ ID NO: 4064 - protein, 108 aa, Artificial Sequence
  source: /note="Description of Artificial Sequence: Synthetic light chain variable domain"
  MOD_RES (11)..(11): Any amino acid
  MOD_RES (21)..(21): Any amino acid
  MOD_RES (45)..(45): Any amino acid
  MOD_RES (83)..(83): Any amino acid
  MOD_RES (85)..(85): Any amino acid
  MOD_RES (100)..(100): Any amino acid
EIVLTQSPDFXSVTPKEKVTXTCRASQSIGTNIHWYQQKPDQSPXLLIKYASESISGVPSRFSGSGSGTDFTLTINSLEAEDXAXYYCQQNNNWPTTFGXGTKLEIKR

SEQ ID NO: 4065 - protein, 113 aa, Artificial Sequence
  source: /note="Description of Artificial Sequence: Synthetic light chain variable domain"
DIVMTQTPLSLPVTPGEPASISCRSNQDLTHSNGNTYLEWYLQKPGQSPRLLIYKVSNRFSGVPDRFSGSGAGTDFTLRISRVEAEDVGVYYCMQGTHWPWTFGQGTKVDIKR

SEQ ID NO: 4066 - protein, 113 aa, Artificial Sequence
  source: /note="Description of Artificial Sequence: Synthetic light chain variable domain"
DIVMTQTPLSLPVTPGEPASISCRSSQSVDMGIGNNYLEWYLQKPGQSPRLLIYKVSNRFSGVPDRFSGSGAGTDFTLRISRVEAEDVGVYYCMQGTHWPWTFGQGTKVDIKR

SEQ ID NO: 4067 - protein, 107 aa, Artificial Sequence
  source: /note="Description of Artificial Sequence: Synthetic light chain variable domain"
DIQMTQSPSSLSASVGDRVTITCRASQDIGNYLAWYQQKPGKVPKLLIYYTSTLQSGVPSRFSGSGSGTDFTLTISSLQPEDVATYYCQHYNTVPPTFGGGTKVEIK

SEQ ID NO: 4068 - protein, 219 aa, Artificial Sequence
  source: /note="Description of Artificial Sequence: Synthetic light chain variable domain"
DIVMTQAAFSNPVTLGTSASISCRSSKSLLHSNGITYLYWYLQKPGQSPQLLIYQMSNLASGVPDRFSSSGSRTDFTLRISRVEAEDVGVYYCAQNLELPYTFGGGTKLEIKRTVAAPSVFIFPPSDEQLKSGTASVVCLLNNFYPREAKVQWKVDNALQSGNSQESVTEQDSKDSTYSLSSTLTLSKADYEKHKVYACEVTHQGLSSPVTKSFNRGEC

SEQ ID NO: 4069 - protein, 112 aa, Artificial Sequence
  source: /note="Description of Artificial Sequence: Synthetic light chain variable domain"
DIVMTQSPLSLPVTPGEPASISCRSSKSLLHSNGITYLDWYLQKPGQSPQLLIYQMSNLASGVPDRFSSSGSGTDFTLRISRVEAEDVGVYYCAQNLELPYTFGGGTKLEIK

SEQ ID NO: 4070 - protein, 216 aa, Artificial Sequence
  source: /note="Description of Artificial Sequence: Synthetic light chain variable domain"
LADIQMTQTTSSLSASLGDRVTISCRASQDISNYLNWYQQKPDGTVKVLIYYTSRLHSGVPSRFSGSGSGTDYSLTISNLEQEDIATYFCQQGNTLPYTFGGGTKLEIKRTVAAPSVFIFPPSDEQLKSGTASVVCLLNNFYPREAKVQWKVDNALQSGNSQESVTEQDSKDSTYSLSSTLTLSKADYEKHKVYACEVTHQGLSSPVTKSFNRGEC

SEQ ID NO: 4071 - protein, 216 aa, Artificial Sequence
  source: /note="Description of Artificial Sequence: Synthetic light chain variable domain"
LADIQMTQTTSSLSASLGDRVTISCRTSQDIGNYLNWYQQKPDGTVKLLIYYTSRLHSGVPSRFSGSGSGTDFSLTINNVEQEDVATYFCQHYNTVPPTFGGGTKLEIKRTVAAPSVFIFPPSDEQLKSGTASVVCLLNNFYPREAKVQWKVDNALQSGNSQESVTEQDSKDSTYSLSSTLTLSKADYEKHKVYACEVTHQGLSSPVTKSFNRGEC

SEQ ID NO: 4072 - protein, 216 aa, Artificial Sequence
  source: /note="Description of Artificial Sequence: Synthetic light chain variable domain"
LADIQMTQTTSSLSASLGDRVTISCSASQDISNYLNWYQQKPDGTVKLLIYHTSTLHSGVPSRFSGSGSGTDYSLTISNLEPEDIATYYCQQYSKLPWTFGGGTKLEIKRTVAAPSVFIFPPSDEQLKSGTASVVCLLNNFYPREAKVQWKVDNALQSGNSQESVTEQDSKDSTYSLSSTLTLSKADYEKHKVYACEVTHQGLSSPVTKSFNRGEC

SEQ ID NO: 4073 - protein, 216 aa, Artificial Sequence
  source: /note="Description of Artificial Sequence: Synthetic light chain variable domain"
LADIQMTQTTSSLSASLGDRVTISCSASQGISNYLNWYQQKPDGTVKLLIYYTSSLHSGVPSRFSGSGSGTDYSLTISNLEPEDIATYYCQQYSKLPYTFGGGTKLEIKRTVAAPSVFIFPPSDEQLKSGTASVVCLLNNFYPREAKVQWKVDNALQSGNSQESVTEQDSKDSTYSLSSTLTLSKADYEKHKVYACEVTHQGLSSPVTKSFNRGEC

SEQ ID NO: 4074 - protein, 216 aa, Artificial Sequence
  source: /note="Description of Artificial Sequence: Synthetic light chain variable domain"
LADIQMTQTTSSLSASLGDRVTISCSASQGITNYLNWYQQKPDGTVKLLIYYSSSLHSGVPSRFSGSGSGTDYSLTISNLEPEDIATYYCQQYSEIPYTFGGGTKLELKRTVAAPSVFIFPPSDEQLKSGTASVVCLLNNFYPREAKVQWKVDNALQSGNSQESVTEQDSKDSTYSLSSTLTLSKADYEKHKVYACEVTHQGLSSPVTKSFNRGEC

SEQ ID NO: 4075 - protein, 220 aa, Artificial Sequence
  source: /note="Description of Artificial Sequence: Synthetic light chain variable domain"
LADIVLTQSPASLAVSLGQRATISCRASKSVSTSGYSFMHWYQLKPGQPPKLLIYLASNLESGVPARFSGSGSGTDFTLNIHPVEEEDAATYYCQHSREFPLTFGGGTKLEIKRTVAAPSVFIFPPSDEQLKSGTASVVCLLNNFYPREAKVQWKVDNALQSGNSQESVTEQDSKDSTYSLSSTLTLSKADYEKHKVYACEVTHQGLSSPVTKSFNRGEC

SEQ ID NO: 4076 - protein, 220 aa, Artificial Sequence
  source: /note="Description of Artificial Sequence: Synthetic light chain variable domain"
LADIVLTQSPASLAVSLGQRATISCRASQSVSTSTYSYMHWYQQKSGQPPKLLIKYASNLESGVPARFSGSGSGTDFTLNIHPVEEEDTATYYCQHSWEIPWTFGGGTKLEIKRTVAAPSVFIFPPSDEQLKSGTASVVCLLNNFYPREAKVQWKVDNALQSGNSQESVTEQDSKDSTYSLSSTLTLSKADYEKHKVYACEVTHQGLSSPVTKSFNRGEC

SEQ ID NO: 4077 - protein, 221 aa, Artificial Sequence
  source: /note="Description of Artificial Sequence: Synthetic light chain variable domain"
LADIVMTQAAFSNPVTLGTSASISCRSSKSLLHSNGITYLYWYLQKPGQSPQLLIYQMSNLASGVPDRFSSSGSGTDFTLRISRVEAEDVGVYYCAQNLELPYTFGGGTKLEIKRTVAAPSVFIFPPSDEQLKSGTASVVCLLNNFYPREAKVQWKVDNALQSGNSQESVTEQDSKDSTYSLSSTLTLSKADYEKHKVYACEVTHQGLSSPVTKSFNRGEC

SEQ ID NO: 4078 - protein, 216 aa, Artificial Sequence
  source: /note="Description of Artificial Sequence: Synthetic light chain variable domain"
LADIVMTQSHKFMSTSVGDRVSITCKASQDVTNAVAWYQQKPGQSPKLLIYWASIRHTGVPDRFTGSRSGTDYTLTINSVQAEDLALYYCQQHYNTPLTFGAGTKLEIKRTVAAPSVFIFPPSDEQLKSGTASVVCLLNNFYPREAKVQWKVDNALQSGNSQESVTEQDSKDSTYSLSSTLTLSKADYEKHKVYACEVTHQGLSSPVTKSFNRGEC

SEQ ID NO: 4079 - protein, 220 aa, Artificial Sequence
  source: /note="Description of Artificial Sequence: Synthetic light chain variable domain"
LADVVMTQTPLSLPVSLGDQASISCRSSQSLVHSNGNTYLHWYLQKPGQSPKLLIYKVSNRFSGVPDRFSGSGSGTDFTLKISRVEAEDLGVYFCSQSTHVPTFGGGTKLEIKRTVAAPSVFIFPPSDEQLKSGTASVVCLLNNFYPREAKVQWKVDNALQSGNSQESVTEQDSKDSTYSLSSTLTLSKADYEKHKVYACEVTHQGLSSPVTKSFNRGEC

SEQ ID NO: 4080 - protein, 220 aa, Artificial Sequence
  source: /note="Description of Artificial Sequence: Synthetic light chain variable domain"
LADVVMTQTPLSLPVSLGDQASISCRSSQSLVHSNGNTYLHWYLQKPGQSPKLLLYKVSNRFSGVPDRFSGSGSGTDFTLKISRVESEDLGVYFCSQNTHVYTFGGGTKLEIKRTVAAPSVFIFPPSDEQLKSGTASVVCLLNNFYPREAKVQWKVDNALQSGNSQESVTEQDSKDSTYSLSSTLTLSKADYEKHKVYACEVTHQGLSSPVTKSFNRGEC

SEQ ID NO: 4081 - protein, 217 aa, Artificial Sequence
  source: /note="Description of Artificial Sequence: Synthetic light chain variable domain"
LAENVLTQSPAIMSASPGEKVTMTCRASSSVSSSYLHWYQQKSGASPKLWIYSTSNLASGVPARFSGSGSGTSYSLTVNSVETEDAATYYCHQYSGFPFTFGSGTKLELKRTVAAPSVFIFPPSDEQLKSGTASVVCLLNNFYPREAKVQWKVDNALQSGNSQESVTEQDSKDSTYSLSSTLTLSKADYEKHKVYACEVTHQGLSSPVTKSFNRGEC

SEQ ID NO: 4082 - protein, 215 aa, Artificial Sequence
  source: /note="Description of Artificial Sequence: Synthetic light chain variable domain"
LAQIVLTQSPAIMSASPGEKVTITCSASSSVSYMHWFQQKPGTSPKLWIYSTSNLASGVPARFSGSGSGTSYSLTISRMEAEDAATYYCQQRSSYPYTFGGGTKLELKRTVAAPSVFIFPPSDEQLKSGTASVVCLLNNFYPREAKVQWKVDNALQSGNSQESVTEQDSKDSTYSLSSTLTLSKADYEKHKVYACEVTHQGLSSPVTKSFNRGEC

SEQ ID NO: 4083 - protein, 215 aa, Artificial Sequence
  source: /note="Description of Artificial Sequence: Synthetic light chain variable domain"
LAQIVLTQSPAIMSASPGEKVTMTCSASSSVSYIYWYQQKPGSSPRLLIYDASNLASGVPVRFSGSGSGTSYSLTISRMEAEDAATYYCQQWSSYPITFGSGTKLEIKRTVAAPSVFIFPPSDEQLKSGTASVVCLLNNFYPREAKVQWKVDNALQSGNSQESVTEQDSKDSTYSLSSTLTLSKADYEKHKVYACEVTHQGLSSPVTKSFNRGEC

SEQ ID NO: 4084 - protein, 616 aa, Artificial Sequence
  source: /note="Description of Artificial Sequence: Synthetic light chain variable domain"
LEEKKVCQGTSNKLTQLGTFEDHFLSLQRMFNNCEVVLGNLEITYVQRNYDLSFLKTIQEVAGYVLIALNTVERIPLENLQIIRGNMYYENSYALAVLSNYDANKTGLKELPMRNLQEILHGAVRFSNNPALCNVESIQWRDIVSSDFLSNMSMDFQNHLGSCQKCDPSCPNGSCWGAGEENCQKLTKIICAQQCSGRCRGKSPSDCCHNQCAAGCTGPRESDCLVCRKFRDEATCKDTCPPLMLYNPTTYQMDVNPEGKYSFGATCVKKCPRNYVVTDHGSCVRACGADSYEMEEDGVRKCKKCEGPCRKVCNGIGIGEFKDSLSINATNIKHFKNCTSISGDLHILPVAFRGDSFTHTPPLDPQELDILKTVKEITGFLLIQAWPENRTDLHAFENLEIIRGRTKQHGQFSLAVVSLNITSLGLRSLKEISDGDVIISGNKNLCYANTINWKKLFGTSQKTKIISNRGENSCKATGQVCHALCSPEGCWGPEPKDCVSCNVSRGRECVDKCNILEGEPREFVENSECIQCHPECLPQMNITCTGRGPDNCIQCAHYIDGPHCVKTCPAGVMGENNTLVWKYADAGHVCHLCHPNCTYGCTGPGLEGCNGPKIPS

SEQ ID NO: 4085 - protein, 107 aa, Artificial Sequence
  source: /note="Description of Artificial Sequence: Synthetic light chain variable domain"
DIQMTQTTSSLSASLGDRVTISCRSSQDIRNYLNWYQQKPDGTVKLLIYYTSRSHSGVPSRFSGSGSGTDYSLTISNLEQEDIATYFCQQGNMFPFTFGGGTKLEIK

SEQ ID NO: 4086 - protein, 107 aa, Artificial Sequence
  source: /note="Description of Artificial Sequence: Synthetic light chain variable domain"
AIQLTQSPSSLSASVGDRVTITCRASQSIGTNIHWYLQKPGQSPQLLIYYASESISGIPDRFSGSGSGTDFTLTISRLEPEDFAVYYCQQNNNWPTTFGAGTKLELK

SEQ ID NO: 4087 - protein, 107 aa, Artificial Sequence
  source: /note="Description of Artificial Sequence: Synthetic light chain variable domain"
AIQLTQSPSSLSASVGDRVTITCRASQSIGTNIHWYLQKPGQSPQLLIYYASESISGIPDRFSGSGSGTDFTLTISRLEPEDFAVYYCQQNNNWPTTFGQGTKLELK

SEQ ID NO: 4088 - protein, 107 aa, Artificial Sequence
  source: /note="Description of Artificial Sequence: Synthetic light chain variable domain"
AIQLTQSPSSLSASVGDRVTITCRASQSIGTNIHWYLQKPGQSPQLLIYYASESISGIPDRFSGSGSGTDFTLTISRLEPEDFAVYYCQQNNNWPTTFGQGTKVEIK

SEQ ID NO: 4089 - protein, 214 aa, Artificial Sequence
  source: /note="Description of Artificial Sequence: Synthetic light chain variable domain"
AIQLTQSPSSLSASVGDRVTITCRASQSIGTNIHWYLQKPGQSPQLLIYYASESISGIPDRFSGSGSGTDFTLTISRLEPEDFAVYYCQQNNNWPTTFGQGTKVEIKRTVAAPSVFIFPPSDEQLKSGTASVVCLLNNFYPREAKVQWKVDNALQSGNSQESVTEQDSKDSTYSLSSTLTLSKADYEKHKVYACEVTHQGLSSPVTKSFNRGEC

SEQ ID NO: 4090 - protein, 107 aa, Artificial Sequence
  source: /note="Description of Artificial Sequence: Synthetic light chain variable domain"
AIQLTQSPSSLSASVGDRVTITCRASQSIGTNIHWYLQKPGQSPQLLIYYASESISGVPSRFSGSGSGTDFTLTISSLQPEDFATYYCQQNNNWPTTFGAGTKLELK

SEQ ID NO: 4091 - protein, 107 aa, Artificial Sequence
  source: /note="Description of Artificial Sequence: Synthetic light chain variable domain"
AIQLTQSPSSLSASVGDRVTITCRASQSIGTNIHWYLQKPGQSPQLLIYYASESISGVPSRFSGSGSGTDFTLTISSLQPEDFATYYCQQNNNWPTTFGQGTKLELK

SEQ ID NO: 4092 - protein, 107 aa, Artificial Sequence
  source: /note="Description of Artificial Sequence: Synthetic light chain variable domain"
AIQLTQSPSSLSASVGDRVTITCRASQSIGTNIHWYLQKPGQSPQLLIYYASESISGVPSRFSGSGSGTDFTLTISSLQPEDFATYYCQQNNNWPTTFGQGTKVEIK

SEQ ID NO: 4093 - protein, 107 aa, Artificial Sequence
  source: /note="Description of Artificial Sequence: Synthetic light chain variable domain"
AIQLTQSPSSLSASVGDRVTITCRASQSIGTNIHWYQQKPGKAPKLLIYYASESISGVPSRFSGSGSGTDFTLTISSLQPEDFATYYCQQNNNWPTTFGAGTKLELK

SEQ ID NO: 4094 - protein, 107 aa, Artificial Sequence
  source: /note="Description of Artificial Sequence: Synthetic light chain variable domain"
AIQLTQSPSSLSASVGDRVTITCRASQSIGTNIHWYQQKPGKAPKLLIYYASESISGVPSRFSGSGSGTDFTLTISSLQPEDFATYYCQQNNNWPTTFGQGTKLELK

SEQ ID NO: 4095 - protein, 107 aa, Artificial Sequence
  source: /note="Description of Artificial Sequence: Synthetic light chain variable domain"
AIQLTQSPSSLSASVGDRVTITCRASQSIGTNIHWYQQKPGKAPKLLIYYASESISGVPSRFSGSGSGTDFTLTISSLQPEDFATYYCQQNNNWPTTFGQGTKVEIK

SEQ ID NO: 4096 - protein, 107 aa, Artificial Sequence
  source: /note="Description of Artificial Sequence: Synthetic light chain variable domain"
AIQLTQSPSSLSASVGDRVTITCRASQSIGTNIHWYQQKPGQAPRLLIYYASESISGIPARFSGSGSGTEFTLTISSLQSEDFAVYYCQQNNNWPTTFGAGTKLELK

SEQ ID NO: 4097 - protein, 107 aa, Artificial Sequence
  source: /note="Description of Artificial Sequence: Synthetic light chain variable domain"
AIQLTQSPSSLSASVGDRVTITCRASQSIGTNIHWYQQKPGQAPRLLIYYASESISGIPARFSGSGSGTEFTLTISSLQSEDFAVYYCQQNNNWPTTFGQGTKLELK

SEQ ID NO: 4098 - protein, 107 aa, Artificial Sequence
  source: /note="Description of Artificial Sequence: Synthetic light chain variable domain"
AIQLTQSPSSLSASVGDRVTITCRASQSIGTNIHWYQQKPGQAPRLLIYYASESISGIPARFSGSGSGTEFTLTISSLQSEDFAVYYCQQNNNWPTTFGQGTKVEIK

SEQ ID NO: 4099 - protein, 107 aa, Artificial Sequence
  source: /note="Description of Artificial Sequence: Synthetic light chain variable domain"
AIQLTQSPSSLSASVGDRVTITCRASQSIGTNIHWYQQKPGQAPRLLIYYASESISGIPDRFSGSGSGTDFTLTISRLEPEDFAVYYCQQNNNWPTTFGQGTKLELK

SEQ ID NO: 4100 - protein, 107 aa, Artificial Sequence
  source: /note="Description of Artificial Sequence: Synthetic light chain variable domain"
AIQLTQSPSSLSASVGDRVTITCRASQSIGTNIHWYQQKPGQAPRLLIYYASESISGIPDRFSGSGSGTDFTLTISRLEPEDFAVYYCQQNNNWPTTFGQGTKVEIK

SEQ ID NO: 4101 - protein, 214 aa, Artificial Sequence
  source: /note="Description of Artificial Sequence: Synthetic light chain variable domain"
AIQLTQSPSSLSASVGDRVTITCRASQSIGTNIHWYQQKPGQAPRLLIYYASESISGIPDRFSGSGSGTDFTLTISRLEPEDFAVYYCQQNNNWPTTFGQGTKVEIKRTVAAPSVFIFPPSDEQLKSGTASVVCLLNNFYPREAKVQWKVDNALQSGNSQESVTEQDSKDSTYSLSSTLTLSKADYEKHKVYACEVTHQGLSSPVTKSFNRGEC

SEQ ID NO: 4102 - protein, 107 aa, Artificial Sequence
  source: /note="Description of Artificial Sequence: Synthetic light chain variable domain"
AIQLTQSPSSLSASVGDRVTITCRASQSIGTNIHWYQQKPGQAPRLLIYYASESISGIPPRFSGSGSGTDFTLTISRLEPEDFAVYYCQQNNNWPTTFGQGTKLELK

SEQ ID NO: 4103 - protein, 107 aa, Artificial Sequence
  source: /note="Description of Artificial Sequence: Synthetic light chain variable domain"
AIQLTQSPSSLSASVGDRVTITCRASQSIGTNIHWYQQKPGQAPRLLIYYASESISGIPPRFSGSGSGTDFTLTISRLEPEDFAVYYCQQNNNWPTTFGQGTKVEIK

SEQ ID NO: 4104 - protein, 214 aa, Artificial Sequence
  source: /note="Description of Artificial Sequence: Synthetic light chain variable domain"
AIQLTQSPSSLSASVGDRVTITCRASQSIGTNIHWYQQKPGQAPRLLIYYASESISGIPPRFSGSGSGTDFTLTISRLEPEDFAVYYCQQNNNWPTTFGQGTKVEIKRTVAAPSVFIFPPSDEQLKSGTASVVCLLNNFYPREAKVQWKVDNALQSGNSQESVTEQDSKDSTYSLSSTLTLSKADYEKHKVYACEVTHQGLSSPVTKSFNRGEC

SEQ ID NO: 4105 - protein, 107 aa, Artificial Sequence
  source: /note="Description of Artificial Sequence: Synthetic light chain variable domain"
AIQLTQSPSSLSASVGDRVTITCRASQSIGTNIHWYQQKPGQAPRLLIYYASESISGVPSRFSGSGSGTDFTLTISSLQPEDFATYYCQQNNNWPTTFGAGTKLELK

SEQ ID NO: 4106 - protein, 107 aa, Artificial Sequence
  source: /note="Description of Artificial Sequence: Synthetic light chain variable domain"
AIQLTQSPSSLSASVGDRVTITCRASQSIGTNIHWYQQKPGQAPRLLIYYASESISGVPSRFSGSGSGTDFTLTISSLQPEDFATYYCQQNNNWPTTFGQGTKLELK

SEQ ID NO: 4107 - protein, 107 aa, Artificial Sequence
  source: /note="Description of Artificial Sequence: Synthetic light chain variable domain"
AIQLTQSPSSLSASVGDRVTITCRASQSIGTNIHWYQQKPGQAPRLLIYYASESISGVPSRFSGSGSGTDFTLTISSLQPEDFATYYCQQNNNWPTTFGQGTKVEIK

SEQ ID NO: 4108 - protein, 107 aa, Artificial Sequence
  source: /note="Description of Artificial Sequence: Synthetic light chain variable domain"
DILLTQSPVILSVSPGERVSFSCRASQSIGTNIHWYQQRTNGSPRLLIKYASESISGIPSRFSGSGSGTDFTLSINSVESEDIADYYCQQNNNWPTTFGAGTKLELK

SEQ ID NO: 4109 - protein, 107 aa, Artificial Sequence
  source: /note="Description of Artificial Sequence: Synthetic light chain variable domain"
DILLTQSPVILSVSPGERVSFSCRASQSIGTNIHWYQQRTNGSPRLLIKYASESISGIPSRFSGSGSGTDFTLSINSVESEDIADYYCQQNNNWPTTFGQGTKLELK

SEQ ID NO: 4110 - protein, 107 aa, Artificial Sequence
  source: /note="Description of Artificial Sequence: Synthetic light chain variable domain"
DILLTQSPVILSVSPGERVSFSCRASQSIGTNIHWYQQRTNGSPRLLIKYASESISGIPSRFSGSGSGTDFTLSINSVESEDIADYYCQQNNNWPTTFGQGTKVEIK

SEQ ID NO: 4111 - protein, 107 aa, Artificial Sequence
  source: /note="Description of Artificial Sequence: Synthetic light chain variable domain"
DILLTQSPVILSVSPGERVSFSCRASQSSGTNIHWYQQRTNGSPRLLIKYASESISGIPSRFSGSGSGTDFTLSINSVESEDIADYYCQQNNNWPTTFGEGTKLELK

SEQ ID NO: 4112 - protein, 107 aa, Artificial Sequence
  source: /note="Description of Artificial Sequence: Synthetic light chain variable domain"
DILLTQSPVILSVSPGERVSFSCRASQSSGTNIHWYQQRTNGSPRLLIKYASESISGIPSRFSGSGSGTDFTLSINSVESEDIADYYCQQNNNWPTTFGQGTKVEIK

SEQ ID NO: 4113 - protein, 107 aa, Artificial Sequence
  source: /note="Description of Artificial Sequence: Synthetic light chain variable domain"
DIQMTQSPSSLSASVGDRVTITCRASQSIGTNIHWYQQKPGQAPRLLIYYASESISGIPDRFSGSGSGTDFTLTISRLEPEDFAVYYCQQNNNWPTTFGAGTKLELK

SEQ ID NO: 4114 - protein, 107 aa, Artificial Sequence
  source: /note="Description of Artificial Sequence: Synthetic light chain variable domain"
DIQMTQSPSSLSASVGDRVTITCRASQSIGTNIHWYQQKPGQAPRLLIYYASESISGIPDRFSGSGSGTDFTLTISRLEPEDFAVYYCQQNNNWPTTFGQGTKLELK

SEQ ID NO: 4115 - protein, 107 aa, Artificial Sequence
  source: /note="Description of Artificial Sequence: Synthetic light chain variable domain"
DIQMTQSPSSLSASVGDRVTITCRASQSIGTNIHWYQQKPGQAPRLLIYYASESISGIPDRFSGSGSGTDFTLTISRLEPEDFAVYYCQQNNNWPTTFGQGTKVEIK

SEQ ID NO: 4116 - protein, 107 aa, Artificial Sequence
  source: /note="Description of Artificial Sequence: Synthetic light chain variable domain"
EIVLTQSPATLSLSPGERATLSCRASQSIGTNIHWYQQKPGKAPKLLIYYASESISGIPDRFSGSGSGTDFTLTISRLEPEDFAVYYCQQNNNWPTTFGQGTKLELK

SEQ ID NO: 4117 - protein, 107 aa, Artificial Sequence
  source: /note="Description of Artificial Sequence: Synthetic light chain variable domain"
EIVLTQSPATLSLSPGERATLSCRASQSIGTNIHWYQQKPGKAPKLLIYYASESISGIPDRFSGSGSGTDFTLTISRLEPEDFAVYYCQQNNNWPTTFGQGTKVEIK

SEQ ID NO: 4118 - protein, 214 aa, Artificial Sequence
  source: /note="Description of Artificial Sequence: Synthetic light chain variable domain"
EIVLTQSPATLSLSPGERATLSCRASQSIGTNIHWYQQKPGKAPKLLIYYASESISGIPDRFSGSGSGTDFTLTISRLEPEDFAVYYCQQNNNWPTTFGQGTKVEIKRTVAAPSVFIFPPSDEQLKSGTASVVCLLNNFYPREAKVQWKVDNALQSGNSQESVTEQDSKDSTYSLSSTLTLSKADYEKHKVYACEVTHQGLSSPVTKSFNRGEC

SEQ ID NO: 4119 - protein, 107 aa, Artificial Sequence
  source: /note="Description of Artificial Sequence: Synthetic light chain variable domain"
EIVLTQSPATLSLSPGERATLSCRASQSIGTNIHWYQQKPGQAPRLLIYYASESISGIPARFSGSGSGTEFTLTISSLQSEDFAVYYCQQNNNWPTTFGQGTKLELK

SEQ ID NO: 4120 - protein, 107 aa, Artificial Sequence
  source: /note="Description of Artificial Sequence: Synthetic light chain variable domain"
EIVLTQSPATLSLSPGERATLSCRASQSIGTNIHWYQQKPGQAPRLLIYYASESISGIPARFSGSGSGTEFTLTISSLQSEDFAVYYCQQNNNWPTTFGQGTKVEIK

SEQ ID NO: 4121 - protein, 214 aa, Artificial Sequence
  source: /note="Description of Artificial Sequence: Synthetic light chain variable domain"
EIVLTQSPATLSLSPGERATLSCRASQSIGTNIHWYQQKPGQAPRLLIYYASESISGIPARFSGSGSGTEFTLTISSLQSEDFAVYYCQQNNNWPTTFGQGTKVEIKRTVAAPSVFIFPPSDEQLKSGTASVVCLLNNFYPREAKVQWKVDNALQSGNSQESVTEQDSKDSTYSLSSTLTLSKADYEKHKVYACEVTHQGLSSPVTKSFNRGEC

SEQ ID NO: 4122 - protein, 107 aa, Artificial Sequence
  source: /note="Description of Artificial Sequence: Synthetic light chain variable domain"
EIVLTQSPATLSLSPGERATLSCRASQSIGTNIHWYQQKPGQAPRLLIYYASESISGVPSRFSGSGSGTDFTLTISSLQPEDFATYYCQQNNNWPTTFGQGTKLELK

SEQ ID NO: 4123 - protein, 107 aa, Artificial Sequence
  source: /note="Description of Artificial Sequence: Synthetic light chain variable domain"
EIVLTQSPATLSLSPGERATLSCRASQSIGTNIHWYQQKPGQAPRLLIYYASESISGVPSRFSGSGSGTDFTLTISSLQPEDFATYYCQQNNNWPTTFGQGTKVEIK

SEQ ID NO: 4124 - protein, 214 aa, Artificial Sequence
  source: /note="Description of Artificial Sequence: Synthetic light chain variable domain"
EIVLTQSPATLSLSPGERATLSCRASQSIGTNIHWYQQKPGQAPRLLIYYASESISGVPSRFSGSGSGTDFTLTISSLQPEDFATYYCQQNNNWPTTFGQGTKVEIKRTVAAPSVFIFPPSDEQLKSGTASVVCLLNNFYPREAKVQWKVDNALQSGNSQESVTEQDSKDSTYSLSSTLTLSKADYEKHKVYACEVTHQGLSSPVTKSFNRGEC

SEQ ID NO: 4125 - protein, 107 aa, Artificial Sequence
  source: /note="Description of Artificial Sequence: Synthetic light chain variable domain"
EIVLTQSPATLSLSPGERATLSCRASQSIGTNIHWYQQKPGQAPRLLIYYASESISGVPSRFSGSGSGTEFTLTISSLQPDDFATYYCQQNNNWPTTFGAGTKLELK

SEQ ID NO: 4126 - protein, 107 aa, Artificial Sequence
  source: /note="Description of Artificial Sequence: Synthetic light chain variable domain"
EIVLTQSPATLSLSPGERATLSCRASQSIGTNIHWYQQKPGQAPRLLIYYASESISGVPSRFSGSGSGTEFTLTISSLQPDDFATYYCQQNNNWPTTFGQGTKLELK

SEQ ID NO: 4127 - protein, 107 aa, Artificial Sequence
  source: /note="Description of Artificial Sequence: Synthetic light chain variable domain"
EIVLTQSPATLSLSPGERATLSCRASQSIGTNIHWYQQKPGQAPRLLIYYASESISGVPSRFSGSGSGTEFTLTISSLQPDDFATYYCQQNNNWPTTFGQGTKVEIK

SEQ ID NO: 4128 - protein, 107 aa, Artificial Sequence
  source: /note="Description of Artificial Sequence: Synthetic light chain variable domain"
EIVLTQSPATLSLSPGERATLSCRASQSIGTNIHWYQQRPGQAPRLLIKYASESISGIPARFSGSGSGTDFTLTISSLEPEDFAVYYCQQNNNWPTTFGGGTKVEIK

SEQ ID NO: 4129 - protein, 107 aa, Artificial Sequence
  source: /note="Description of Artificial Sequence: Synthetic light chain variable domain"
DIQMTQSPSSMSVSVGDRVTITCHSSQDINMNVGWLQQKPGKSFKGLIYHGAILDDGVPSRFSGSGSGTDYTLTISSLQPEDFATYYCVQYAEFPWTFGGGTKLEIK

SEQ ID NO: 4130 - protein, 107 aa, Artificial Sequence
  source: /note="Description of Artificial Sequence: Synthetic light chain variable domain"
DIQMTQSPSSMSVSVGDRVTITCHSSQDINSNIGWLQQKPGKSFKGLIYHGTNLDDGVPSRFSGSGSGTDYTLTISSLQPEDFATYYCVQYAQFPWTFGGGTKLEIK

SEQ ID NO: 4131 - protein, 107 aa, Artificial Sequence
  source: /note="Description of Artificial Sequence: Synthetic light chain variable domain"
DIQMTQSPSSMSVSVGDRVTITCHSSQDINSNIGWLQQKPGKSFKGLIYHGTNLDDGVPSRFSGSGSGTDYTLTISSLQPEDFATYYCVQYEQFPWTFGGGTKLEIK

SEQ ID NO: 4132 - protein, 107 aa, Artificial Sequence
  source: /note="Description of Artificial Sequence: Synthetic light chain variable domain"
DIQMTQSPSSMSVSVGDRVTITCHSSQDINSNLGWLQQKPGKSFKGLIYHGANLHDGVPSRFSGSGSGTDYTLTISSLQPEDFATYYCVQYAEFPWTFGGGTKLEIK

SEQ ID NO: 4133 - protein, 107 aa, Artificial Sequence
  source: /note="Description of Artificial Sequence: Synthetic light chain variable domain"
DIQMTQSPSSMSVSVGDRVTITCHSSQDINSNLGWLQQKPGKSFKGLIYHGSNLDHGVPSRFSGSGSGTDYTLTISSLQPEDFATYYCVQYDQFPWTFGGGTKLEIK

SEQ ID NO: 4134 - protein, 107 aa, Artificial Sequence
  source: /note="Description of Artificial Sequence: Synthetic light chain variable domain"
DIQMTQSPSSMSVSVGDRVTITCHSSQDITYNIGWLQQKPGKSFKGLIYHGANLDDGVPSRFSGSGSGTDYTLTISSLQPEDFATYYCVQYDEFPWTFGGGTKLEIK

SEQ ID NO: 4135 - protein, 107 aa, Artificial Sequence
  source: /note="Description of Artificial Sequence: Synthetic light chain variable domain"
DIQMTQSPSSMSVSVGDRVTITCHSSQDITYNVGWLQQKPGKSFKGLIYHGSNLDHGVPSRFSGSGSGTDYTLTISSLQPEDFATYYCVQYDDFPWTFGGGTKLEIK

SEQ ID NO: 4136 - protein, 108 aa, Artificial Sequence
  source: /note="Description of Artificial Sequence: Synthetic light chain variable domain"
EIVLTQSPATLSLSPGERATLSCRASQSVSSYLAWYQQKPGQAPRLLIFDASNRATGIPARFSGSGSGTDFTLTISSLEPEDFAVYYCQQRSNWPPWTFGQGTKVEIK

SEQ ID NO: 4137 - protein, 107 aa, Artificial Sequence [sequence omitted]

SEQ ID NO: 4138 - protein, 107 aa, Artificial Sequence
  source: /note="Description of Artificial Sequence: Synthetic light chain variable domain"
EIVLTQSPATLSLSPGERATLSCRASQSVSSYLAWYQQKPGQAPRLLIYDASNRATGIPARFSGSGSGTDFTLTISSLEPEDFAVYYCQQRSNWPWTFGQGTKVEIK

SEQ ID NO: 4139 - protein, 106 aa, Artificial Sequence
  source: /note="Description of Artificial Sequence: Synthetic light chain variable domain"
EIVLTQSPATLSLSPGERATLSCRASQSVSSYLAWYQQKPGQAPRLLIYDASNRATGIPARFSGSGSGTDFTLTISSLEPEDFAVYYCQQRSNWWTFGQGTKVEIK

SEQ ID NO: 4140 - protein, 113 aa, Artificial Sequence
  source: /note="Description of Artificial Sequence: Synthetic light chain variable domain"
DIQMTQSPSSLSASVGDRVTITCKSSQSLLASGNQNNYLAWHQQKPGKAPKMLIIWASTRVSGVPDRFIGSGSGTDFTLTISSLQAEDVAVYYCQQSYSAPLTFGQGTKLEIK

SEQ ID NO: 4141 - protein, 113 aa, Artificial Sequence
  source: /note="Description of Artificial Sequence: Synthetic light chain variable domain"
DIQMTQSPSSLSASVGDRVTITCKSSQSLLASGNQNNYLAWHQQKPGKAPKMLIIWASTRVSGVPDRFSGSGSGTDFTLTISSLQAEDVAVYYCQQSYSAPLTFGQGTKLEIK

SEQ ID NO: 4142 - protein, 114 aa, Artificial Sequence
  source: /note="Description of Artificial Sequence: Synthetic light chain variable domain"
DIQMTQSPSSLSASVGDRVTITCKSSQSLLASGNQNNYLAWHQQKPGKAPKMLIIWASTRVSGVPSRFSGSGSGTDFTLTISSLQPEDFATYYCQQSYSAPLTFGQGTKVEIKR

SEQ ID NO: 4143 - protein, 106 aa, Artificial Sequence
  source: /note="Description of Artificial Sequence: Synthetic light chain variable domain"
MTQSPSSLSASLGERVSLTCQASQGISNNLNWYQQTPGKAPRLLIYDASKLEDGVPSRFSGTGYRTDFNFTISSLEEEDVATYFCLQHRYLPVHVRRGDQVGNKTG

SEQ ID NO: 4144 - protein, 107 aa, Artificial Sequence
  source: /note="Description of Artificial Sequence: Synthetic light chain variable domain"
DCLLTQSPVILSVSPGERVSFSCRASQSIGTNIHWYQQRTNGSPRLLIKYASESISGIPSRFSGSGSGTDFTLSINSVESEDIADYYCQQNNNWPTTFGAGTKLELK

SEQ ID NO: 4145 - protein, 107 aa, Artificial Sequence
  source: /note="Description of Artificial Sequence: Synthetic light chain variable domain"
DCLLTQSPVILSVSPGERVSFSCRASQSIGTNIHWYQQRTNGSPRLLIKYASESISGIPSRFSGSGSGTDFTLSINSVESEDIADYYCQQNNNWPTTFGQGTKLELK

SEQ ID NO: 4146 - protein, 107 aa, Artificial Sequence
  source: /note="Description of Artificial Sequence: Synthetic light chain variable domain"
DIDLTQSPVILSVSPGERVSFSCRASQSIGTNIHWYQQRTNGSPRLLIKYASESISGIPSRFSGSGSGTDFTLSINSVESEDIADYYCQQNNNWPTTFGAGTKLELK

SEQ ID NO: 4147 - protein, 107 aa, Artificial Sequence
  source: /note="Description of Artificial Sequence: Synthetic light chain variable domain"
DIDLTQSPVILSVSPGERVSFSCRASQSIGTNIHWYQQRTNGSPRLLIKYASESISGIPSRFSGSGSGTDFTLSINSVESEDIADYYCQQNNNWPTTFGQGTKLELK

SEQ ID NO: 4148 - protein, 107 aa, Artificial Sequence
  source: /note="Description of Artificial Sequence: Synthetic light chain variable domain"
DIFLTQSPVILSVSPGERVSFSCRASQSIGTNIHWYQQRTNGSPRLLIKYASESISGIPSRFSGSGSGTDFTLSINSVESEDIADYYCQQNNNWPTTFGAGTKLELK

SEQ ID NO: 4149 - protein, 107 aa, Artificial Sequence
  source: /note="Description of Artificial Sequence: Synthetic light chain variable domain"
DIFLTQSPVILSVSPGERVSFSCRASQSIGTNIHWYQQRTNGSPRLLIKYASESISGIPSRFSGSGSGTDFTLSINSVESEDIADYYCQQNNNWPTTFGQGTKLELK

SEQ ID NO: 4150 - protein, 107 aa, Artificial Sequence
  source: /note="Description of Artificial Sequence: Synthetic light chain variable domain"
DIGLTQSPVILSVSPGERVSFSCRASQSIGTNIHWYQQRTNGSPRLLIKYASESISGIPSRFSGSGSGTDFTLSINSVESEDIADYYCQQNNNWPTTFGAGTKLELK

SEQ ID NO: 4151 - protein, 107 aa, Artificial Sequence
  source: /note="Description of Artificial Sequence: Synthetic light chain variable domain"
DIGLTQSPVILSVSPGERVSFSCRASQSIGTNIHWYQQRTNGSPRLLIKYASESISGIPSRFSGSGSGTDFTLSINSVESEDIADYYCQQNNNWPTTFGQGTKLELK

SEQ ID NO: 4152 - protein, 107 aa, Artificial Sequence
  source: /note="Description of Artificial Sequence: Synthetic light chain variable domain"
DILCTQSPVILSVSPGERVSFSCRASQSIGTNIHWYQQRTNGSPRLLIKYASESISGIPSRFSGSGSGTDFTLSINSVESEDIADYYCQQNNNWPTTFGAGTKLELK

SEQ ID NO: 4153 - protein, 107 aa, Artificial Sequence
  source: /note="Description of Artificial Sequence: Synthetic light chain variable domain"
DILCTQSPVILSVSPGERVSFSCRASQSIGTNIHWYQQRTNGSPRLLIKYASESISGIPSRFSGSGSGTDFTLSINSVESEDIADYYCQQNNNWPTTFGQGTKLELK

SEQ ID NO: 4154 - protein, 107 aa, Artificial Sequence
  source: /note="Description of Artificial Sequence: Synthetic light chain variable domain"
DILETQSPVILSVSPGERVSFSCRASQSIGTNIHWYQQRTNGSPRLLIKYASESISGIPSRFSGSGSGTDFTLSINSVESEDIADYYCQQNNNWPTTFGAGTKLELK

SEQ ID NO: 4155 - protein, 107 aa, Artificial Sequence
  source: /note="Description of Artificial Sequence: Synthetic light chain variable domain"
DILETQSPVILSVSPGERVSFSCRASQSIGTNIHWYQQRTNGSPRLLIKYASESISGIPSRFSGSGSGTDFTLSINSVESEDIADYYCQQNNNWPTTFGQGTKLELK

SEQ ID NO: 4156 - protein, 107 aa, Artificial Sequence
  source: /note="Description of Artificial Sequence: Synthetic light chain variable domain"
DILFTQSPVILSVSPGERVSFSCRASQSIGTNIHWYQQRTNGSPRLLIKYASESISGIPSRFSGSGSGTDFTLSINSVESEDIADYYCQQNNNWPTTFGAGTKLELK

SEQ ID NO: 4157 - protein, 107 aa, Artificial Sequence
  source: /note="Description of Artificial Sequence: Synthetic light chain variable domain"
DILFTQSPVILSVSPGERVSFSCRASQSIGTNIHWYQQRTNGSPRLLIKYASESISGIPSRFSGSGSGTDFTLSINSVESEDIADYYCQQNNNWPTTFGQGTKLELK

SEQ ID NO: 4158 - protein, 107 aa, Artificial Sequence
  source: /note="Description of Artificial Sequence: Synthetic light chain variable domain"
DILHTQSPVILSVSPGERVSFSCRASQSIGTNIHWYQQRTNGSPRLLIKYASESISGIPSRFSGSGSGTDFTLSINSVESEDIADYYCQQNNNWPTTFGAGTKLELK

SEQ ID NO: 4159 - protein, 107 aa, Artificial Sequence
  source: /note="Description of Artificial Sequence: Synthetic light chain variable domain"
DILHTQSPVILSVSPGERVSFSCRASQSIGTNIHWYQQRTNGSPRLLIKYASESISGIPSRFSGSGSGTDFTLSINSVESEDIADYYCQQNNNWPTTFGQGTKLELK

SEQ ID NO: 4160 - protein, 107 aa, Artificial Sequence
  source: /note="Description of Artificial Sequence: Synthetic light chain variable domain"
DILITQSPVILSVSPGERVSFSCRASQSIGTNIHWYQQRTNGSPRLLIKYASESISGIPSRFSGSGSGTDFTLSINSVESEDIADYYCQQNNNWPTTFGAGTKLELK

SEQ ID NO: 4161 - protein, 107 aa, Artificial Sequence
  source: /note="Description of Artificial Sequence: Synthetic light chain variable domain"
DILITQSPVILSVSPGERVSFSCRASQSIGTNIHWYQQRTNGSPRLLIKYASESISGIPSRFSGSGSGTDFTLSINSVESEDIADYYCQQNNNWPTTFGQGTKLELK

SEQ ID NO: 4162 - protein, 107 aa, Artificial Sequence
  source: /note="Description of Artificial Sequence: Synthetic light chain variable domain"
DILKTQSPVILSVSPGERVSFSCRASQSIGTNIHWYQQRTNGSPRLLIKYASESISGIPSRFSGSGSGTDFTLSINSVESEDIADYYCQQNNNWPTTFGAGTKLELK

SEQ ID NO: 4163 - protein, 107 aa, Artificial Sequence
  source: /note="Description of Artificial Sequence: Synthetic light chain variable domain"
DILKTQSPVILSVSPGERVSFSCRASQSIGTNIHWYQQRTNGSPRLLIKYASESISGIPSRFSGSGSGTDFTLSINSVESEDIADYYCQQNNNWPTTFGQGTKLELK

SEQ ID NO: 4164 - protein, 107 aa, Artificial Sequence
  source: /note="Description of Artificial Sequence: Synthetic light chain variable domain"
DILLAQSPVILSVSPGERVSFSCRASQSIGTNIHWYQQRTNGSPRLLIKYASESISGIPSRFSGSGSGTDFTLSINSVESEDIADYYCQQNNNWPTTFGAGTKLELK

SEQ ID NO: 4165 - protein, 107 aa, Artificial Sequence
  source: /note="Description of Artificial Sequence: Synthetic light chain variable domain"
DILLAQSPVILSVSPGERVSFSCRASQSIGTNIHWYQQRTNGSPRLLIKYASESISGIPSRFSGSGSGTDFTLSINSVESEDIADYYCQQNNNWPTTFGQGTKLELK

SEQ ID NO: 4166 - protein, 107 aa, Artificial Sequence
  source: /note="Description of Artificial Sequence: Synthetic light chain variable domain"
DILLCQSPVILSVSPGERVSFSCRASQSIGTNIHWYQQRTNGSPRLLIKYASESISGIPSRFSGSGSGTDFTLSINSVESEDIADYYCQQNNNWPTTFGAGTKLELK

SEQ ID NO: 4167 - protein, 107 aa, Artificial Sequence
  source: /note="Description of Artificial Sequence: Synthetic light chain variable domain"
DILLCQSPVILSVSPGERVSFSCRASQSIGTNIHWYQQRTNGSPRLLIKYASESISGIPSRFSGSGSGTDFTLSINSVESEDIADYYCQQNNNWPTTFGQGTKLELK

SEQ ID NO: 4168 - protein, 107 aa, Artificial Sequence
  source: /note="Description of Artificial Sequence: Synthetic light chain variable domain"
DILLDQSPVILSVSPGERVSFSCRASQSIGTNIHWYQQRTNGSPRLLIKYASESISGIPSRFSGSGSGTDFTLSINSVESEDIADYYCQQNNNWPTTFGAGTKLELK

SEQ ID NO: 4169 - protein, 107 aa, Artificial Sequence
  source: /note="Description of Artificial Sequence: Synthetic light chain variable domain"
DILLDQSPVILSVSPGERVSFSCRASQSIGTNIHWYQQRTNGSPRLLIKYASESISGIPSRFSGSGSGTDFTLSINSVESEDIADYYCQQNNNWPTTFGQGTKLELK

SEQ ID NO: 4170 - protein, 107 aa, Artificial Sequence
  source: /note="Description of Artificial Sequence: Synthetic light chain variable domain"
DILLEQSPVILSVSPGERVSFSCRASQSIGTNIHWYQQRTNGSPRLLIKYASESISGIPSRFSGSGSGTDFTLSINSVESEDIADYYCQQNNNWPTTFGAGTKLELK

SEQ ID NO: 4171 - protein, 107 aa, Artificial Sequence
  source: /note="Description of Artificial Sequence: Synthetic light chain variable domain"
DILLEQSPVILSVSPGERVSFSCRASQSIGTNIHWYQQRTNGSPRLLIKYASESISGIPSRFSGSGSGTDFTLSINSVESEDIADYYCQQNNNWPTTFGQGTKLELK

SEQ ID NO: 4172 - protein, 107 aa, Artificial Sequence
  source: /note="Description of Artificial Sequence: Synthetic light chain variable domain"
DILLFQSPVILSVSPGERVSFSCRASQSIGTNIHWYQQRTNGSPRLLIKYASESISGIPSRFSGSGSGTDFTLSINSVESEDIADYYCQQNNNWPTTFGAGTKLELK

SEQ ID NO: 4173 - protein, 107 aa, Artificial Sequence
  source: /note="Description of Artificial Sequence: Synthetic light chain variable domain"
DILLFQSPVILSVSPGERVSFSCRASQSIGTNIHWYQQRTNGSPRLLIKYASESISGIPSRFSGSGSGTDFTLSINSVESEDIADYYCQQNNNWPTTFGQGTKLELK

SEQ ID NO: 4174 - protein, 107 aa, Artificial Sequence
  source: /note="Description of Artificial Sequence: Synthetic light chain variable domain"
DILLGQSPVILSVSPGERVSFSCRASQSIGTNIHWYQQRTNGSPRLLIKYASESISGIPSRFSGSGSGTDFTLSINSVESEDIADYYCQQNNNWPTTFGAGTKLELK

SEQ ID NO: 4175 - protein, 107 aa, Artificial Sequence
  source: /note="Description of Artificial Sequence: Synthetic light chain variable domain"
DILLGQSPVILSVSPGERVSFSCRASQSIGTNIHWYQQRTNGSPRLLIKYASESISGIPSRFSGSGSGTDFTLSINSVESEDIADYYCQQNNNWPTTFGQGTKLELK

SEQ ID NO: 4176 - protein, 107 aa, Artificial Sequence
  source: /note="Description of Artificial Sequence: Synthetic light chain variable domain"
DILLHQSPVILSVSPGERVSFSCRASQSIGTNIHWYQQRTNGSPRLLIKYASESISGIPSRFSGSGSGTDFTLSINSVESEDIADYYCQQNNNWPTTFGAGTKLELK

SEQ ID NO: 4177 - protein, 107 aa, Artificial Sequence
  source: /note="Description of Artificial Sequence: Synthetic light chain variable domain"
DILLHQSPVILSVSPGERVSFSCRASQSIGTNIHWYQQRTNGSPRLLIKYASESISGIPSRFSGSGSGTDFTLSINSVESEDIADYYCQQNNNWPTTFGQGTKLELK

SEQ ID NO: 4178 - protein, 107 aa, Artificial Sequence
  source: /note="Description of Artificial Sequence: Synthetic light chain variable domain"
DILLKQSPVILSVSPGERVSFSCRASQSIGTNIHWYQQRTNGSPRLLIKYASESISGIPSRFSGSGSGTDFTLSINSVESEDIADYYCQQNNNWPTTFGAGTKLELK

SEQ ID NO: 4179 - protein, 107 aa, Artificial Sequence
  source: /note="Description of Artificial Sequence: Synthetic light chain variable domain"
DILLKQSPVILSVSPGERVSFSCRASQSIGTNIHWYQQRTNGSPRLLIKYASESISGIPSRFSGSGSGTDFTLSINSVESEDIADYYCQQNNNWPTTFGQGTKLELK

SEQ ID NO: 4180 - protein, 107 aa, Artificial Sequence
  source: /note="Description of Artificial Sequence: Synthetic light chain variable domain"
DILLLQSPVILSVSPGERVSFSCRASQSIGTNIHWYQQRTNGSPRLLIKYASESISGIPSRFSGSGSGTDFTLSINSVESEDIADYYCQQNNNWPTTFGAGTKLELK

SEQ ID NO: 4181 - protein, 107 aa, Artificial Sequence
  source: /note="Description of Artificial Sequence: Synthetic light chain variable domain"
DILLLQSPVILSVSPGERVSFSCRASQSIGTNIHWYQQRTNGSPRLLIKYASESISGIPSRFSGSGSGTDFTLSINSVESEDIADYYCQQNNNWPTTFGQGTKLELK

SEQ ID NO: 4182 - protein, 107 aa, Artificial Sequence
  source: /note="Description of Artificial Sequence: Synthetic light chain variable domain"
DILLNQSPVILSVSPGERVSFSCRASQSIGTNIHWYQQRTNGSPRLLIKYASESISGIPSRFSGSGSGTDFTLSINSVESEDIADYYCQQNNNWPTTFGAGTKLELK

SEQ ID NO: 4183 - protein, 107 aa, Artificial Sequence
  source: /note="Description of Artificial Sequence: Synthetic light chain variable domain"
DILLNQSPVILSVSPGERVSFSCRASQSIGTNIHWYQQRTNGSPRLLIKYASESISGIPSRFSGSGSGTDFTLSINSVESEDIADYYCQQNNNWPTTFGQGTKLELK

SEQ ID NO: 4184 - protein, 107 aa, Artificial Sequence
  source: /note="Description of Artificial Sequence: Synthetic light chain variable domain"
DILLPQSPVILSVSPGERVSFSCRASQSIGTNIHWYQQRTNGSPRLLIKYASESISGIPSRFSGSGSGTDFTLSINSVESEDIADYYCQQNNNWPTTFGAGTKLELK

SEQ ID NO: 4185 - protein, 107 aa, Artificial Sequence
  source: /note="Description of Artificial Sequence: Synthetic light chain variable domain"
DILLRQSPVILSVSPGERVSFSCRASQSIGTNIHWYQQRTNGSPRLLIKYASESISGIPSRFSGSGSGTDFTLSINSVESEDIADYYCQQNNNWPTTFGAGTKLELK

SEQ ID NO: 4186 - protein, 107 aa, Artificial Sequence
  source: /note="Description of Artificial Sequence: Synthetic light chain variable domain"
DILLRQSPVILSVSPGERVSFSCRASQSIGTNIHWYQQRTNGSPRLLIKYASESISGIPSRFSGSGSGTDFTLSINSVESEDIADYYCQQNNNWPTTFGQGTKLELK

SEQ ID NO: 4187 - protein, 107 aa, Artificial Sequence
  source: /note="Description of Artificial Sequence: Synthetic light chain variable domain"
DILLSQSPVILSVSPGERVSFSCRASQSIGTNIHWYQQRTNGSPRLLIKYASESISGIPSRFSGSGSGTDFTLSINSVESEDIADYYCQQNNNWPTTFGAGTKLELK

SEQ ID NO: 4188 - protein, 107 aa, Artificial Sequence
  source: /note="Description of Artificial Sequence: Synthetic light chain variable domain"
DILLSQSPVILSVSPGERVSFSCRASQSIGTNIHWYQQRTNGSPRLLIKYASESISGIPSRFSGSGSGTDFTLSINSVESEDIADYYCQQNNNWPTTFGQGTKLELK

SEQ ID NO: 4189 - protein, 107 aa, Artificial Sequence
  source: /note="Description of Artificial Sequence: Synthetic light chain variable domain"
DILLTQSPGTLSLSPGERATLSCRASQSIGTNIHWYQQKPGQAPRLLIKYASESISGIPDRFSGSGSGTDFTLTISRLEPEDFAVYYCQQNNNWPTTFGQGTKLEIK

SEQ ID NO: 4190 - protein, 107 aa, Artificial Sequence
  source: /note="Description of Artificial Sequence: Synthetic light chain variable domain"
DILLTQSPVILSVSPGERVSFSCAASQSIGTNIHWYQQRTNGSPRLLIKYASESISGIPSRFSGSGSGTDFTLSINSVESEDIADYYCQQNNNWPTTFGAGTKLELK

SEQ ID NO: 4191 - protein, 107 aa, Artificial Sequence
  source: /note="Description of Artificial Sequence: Synthetic light chain variable domain"
DILLTQSPVILSVSPGERVSFSCAASQSIGTNIHWYQQRTNGSPRLLIKYASESISGIPSRFSGSGSGTDFTLSINSVESEDIADYYCQQNNNWPTTFGQGTKLELK

SEQ ID NO: 4192 - protein, 107 aa, Artificial Sequence
  source: /note="Description of Artificial Sequence: Synthetic light chain variable domain"
DILLTQSPVILSVSPGERVSFSCCASQSIGTNIHWYQQRTNGSPRLLIKYASESISGIPSRFSGSGSGTDFTLSINSVESEDIADYYCQQNNNWPTTFGAGTKLELK

SEQ ID NO: 4193 - protein, 107 aa, Artificial Sequence
  source: /note="Description of Artificial Sequence: Synthetic light chain variable domain"
DILLTQSPVILSVSPGERVSFSCCASQSIGTNIHWYQQRTNGSPRLLIKYASESISGIPSRFSGSGSGTDFTLSINSVESEDIADYYCQQNNNWPTTFGQGTKLELK

SEQ ID NO: 4194 - protein, 107 aa, Artificial Sequence
  source: /note="Description of Artificial Sequence: Synthetic light chain variable domain"
DILLTQSPVILSVSPGERVSFSCFASQSIGTNIHWYQQRTNGSPRLLIKYASESISGIPSRFSGSGSGTDFTLSINSVESEDIADYYCQQNNNWPTTFGAGTKLELK

SEQ ID NO: 4195 - protein, 107 aa, Artificial Sequence
  source: /note="Description of Artificial Sequence: Synthetic light chain variable domain"
DILLTQSPVILSVSPGERVSFSCFASQSIGTNIHWYQQRTNGSPRLLIKYASESISGIPSRFSGSGSGTDFTLSINSVESEDIADYYCQQNNNWPTTFGQGTKLELK

SEQ ID NO: 4196 - protein, 107 aa, Artificial Sequence
  source: /note="Description of Artificial Sequence: Synthetic light chain variable domain"
DILLTQSPVILSVSPGERVSFSCGASQSIGTNIHWYQQRTNGSPRLLIKYASESISGIPSRFSGSGSGTDFTLSINSVESEDIADYYCQQNNNWPTTFGAGTKLELK

SEQ ID NO: 4197 - protein, 107 aa, Artificial Sequence
  source: /note="Description of Artificial Sequence: Synthetic light chain variable domain"
DILLTQSPVILSVSPGERVSFSCLASQSIGTNIHWYQQRTNGSPRLLIKYASESISGIPSRFSGSGSGTDFTLSINSVESEDIADYYCQQNNNWPTTFGAGTKLELK

SEQ ID NO: 4198 - protein, 107 aa, Artificial Sequence
  source: /note="Description of Artificial Sequence: Synthetic light chain variable domain"
DILLTQSPVILSVSPGERVSFSCLASQSIGTNIHWYQQRTNGSPRLLIKYASESISGIPSRFSGSGSGTDFTLSINSVESEDIADYYCQQNNNWPTTFGQGTKLELK

SEQ ID NO: 4199 - protein, 107 aa, Artificial Sequence
  source: /note="Description of Artificial Sequence: Synthetic light chain variable domain"
DILLTQSPVILSVSPGERVSFSCMASQSIGTNIHWYQQRTNGSPRLLIKYASESISGIPSRFSGSGSGTDFTLSINSVESEDIADYYCQQNNNWPTTFGAGTKLELK

SEQ ID NO: 4200 - protein, 107 aa, Artificial Sequence
  source: /note="Description of Artificial Sequence: Synthetic light chain variable domain"
DILLTQSPVILSVSPGERVSFSCMASQSIGTNIHWYQQRTNGSPRLLIKYASESISGIPSRFSGSGSGTDFTLSINSVESEDIADYYCQQNNNWPTTFGQGTKLELK

SEQ ID NO: 4201 - protein, 107 aa, Artificial Sequence
  source: /note="Description of Artificial Sequence: Synthetic light chain variable domain"
DILLTQSPVILSVSPGERVSFSCRAAQSIGTNIHWYQQRTNGSPRLLIKYASESISGIPSRFSGSGSGTDFTLSINSVESEDIADYYCQQNNNWPTTFGAGTKLELK

SEQ ID NO: 4202 - protein, 107 aa, Artificial Sequence
  source: /note="Description of Artificial Sequence: Synthetic light chain variable domain"
DILLTQSPVILSVSPGERVSFSCRAAQSIGTNIHWYQQRTNGSPRLLIKYASESISGIPSRFSGSGSGTDFTLSINSVESEDIADYYCQQNNNWPTTFGQGTKLELK

SEQ ID NO: 4203 - protein, 107 aa, Artificial Sequence
  source: /note="Description of Artificial Sequence: Synthetic light chain variable domain"
DILLTQSPVILSVSPGERVSFSCRACQSIGTNIHWYQQRTNGSPRLLIKYASESISGIPSRFSGSGSGTDFTLSINSVESEDIADYYCQQNNNWPTTFGAGTKLELK

SEQ ID NO: 4204 - protein, 107 aa, Artificial Sequence
  source: /note="Description of Artificial Sequence: Synthetic light chain variable domain"
DILLTQSPVILSVSPGERVSFSCRACQSIGTNIHWYQQRTNGSPRLLIKYASESISGIPSRFSGSGSGTDFTLSINSVESEDIADYYCQQNNNWPTTFGQGTKLELK

SEQ ID NO: 4205 - protein, 107 aa, Artificial Sequence
  source: /note="Description of Artificial Sequence: Synthetic light chain variable domain"
DILLTQSPVILSVSPGERVSFSCRADQSIGTNIHWYQQRTNGSPRLLIKYASESISGIPSRFSGSGSGTDFTLSINSVESEDIADYYCQQNNNWPTTFGAGTKLELK

SEQ ID NO: 4206 - protein, 107 aa, Artificial Sequence
  source: /note="Description of Artificial Sequence: Synthetic light chain variable domain"
DILLTQSPVILSVSPGERVSFSCRADQSIGTNIHWYQQRTNGSPRLLIKYASESISGIPSRFSGSGSGTDFTLSINSVESEDIADYYCQQNNNWPTTFGQGTKLELK

SEQ ID NO: 4207 - protein, 107 aa, Artificial Sequence
  source: /note="Description of Artificial Sequence: Synthetic light chain variable domain"
DILLTQSPVILSVSPGERVSFSCRAGQSIGTNIHWYQQRTNGSPRLLIKYASESISGIPSRFSGSGSGTDFTLSINSVESEDIADYYCQQNNNWPTTFGAGTKLELK

SEQ ID NO: 4208 - protein, 107 aa, Artificial Sequence
  source: /note="Description of Artificial Sequence: Synthetic light chain variable domain"
DILLTQSPVILSVSPGERVSFSCRAGQSIGTNIHWYQQRTNGSPRLLIKYASESISGIPSRFSGSGSGTDFTLSINSVESEDIADYYCQQNNNWPTTFGQGTKLELK

SEQ ID NO: 4209 - protein, 107 aa, Artificial Sequence
  source: /note="Description of Artificial Sequence: Synthetic light chain variable domain"
DILLTQSPVILSVSPGERVSFSCRAHQSIGTNIHWYQQRTNGSPRLLIKYASESISGIPSRFSGSGSGTDFTLSINSVESEDIADYYCQQNNNWPTTFGAGTKLELK

SEQ ID NO: 4210 - protein, 107 aa, Artificial Sequence
  source: /note="Description of Artificial Sequence: Synthetic light chain variable domain"
DILLTQSPVILSVSPGERVSFSCRAHQSIGTNIHWYQQRTNGSPRLLIKYASESISGIPSRFSGSGSGTDFTLSINSVESEDIADYYCQQNNNWPTTFGQGTKLELK

SEQ ID NO: 4211 - protein, 107 aa, Artificial Sequence
  source: /note="Description of Artificial Sequence: Synthetic light chain variable domain"
DILLTQSPVILSVSPGERVSFSCRAIQSIGTNIHWYQQRTNGSPRLLIKYASESISGIPSRFSGSGSGTDFTLSINSVESEDIADYYCQQNNNWPTTFGAGTKLELK

SEQ ID NO: 4212 - protein, 107 aa, Artificial Sequence
  source: /note="Description of Artificial Sequence: Synthetic light chain variable domain"
DILLTQSPVILSVSPGERVSFSCRAIQSIGTNIHWYQQRTNGSPRLLIKYASESISGIPSRFSGSGSGTDFTLSINSVESEDIADYYCQQNNNWPTTFGQGTKLELK

SEQ ID NO: 4213 - protein, 107 aa, Artificial Sequence
  source: /note="Description of Artificial Sequence: Synthetic light chain variable domain"
DILLTQSPVILSVSPGERVSFSCRALQSIGTNIHWYQQRTNGSPRLLIKYASESISGIPSRFSGSGSGTDFTLSINSVESEDIADYYCQQNNNWPTTFGAGTKLELK

SEQ ID NO: 4214 - protein, 107 aa, Artificial Sequence
  source: /note="Description of Artificial Sequence: Synthetic light chain variable domain"
DILLTQSPVILSVSPGERVSFSCRALQSIGTNIHWYQQRTNGSPRLLIKYASESISGIPSRFSGSGSGTDFTLSINSVESEDIADYYCQQNNNWPTTFGQGTKLELK

SEQ ID NO: 4215 - protein, 107 aa, Artificial Sequence
  source: /note="Description of Artificial Sequence: Synthetic light chain variable domain"
DILLTQSPVILSVSPGERVSFSCRAMQSIGTNIHWYQQRTNGSPRLLIKYASESISGIPSRFSGSGSGTDFTLSINSVESEDIADYYCQQNNNWPTTFGAGTKLELK

SEQ ID NO: 4216 - protein, 107 aa, Artificial Sequence
  source: /note="Description of Artificial Sequence: Synthetic light chain variable domain"
DILLTQSPVILSVSPGERVSFSCRAMQSIGTNIHWYQQRTNGSPRLLIKYASESISGIPSRFSGSGSGTDFTLSINSVESEDIADYYCQQNNNWPTTFGQGTKLELK

SEQ ID NO: 4217 - protein, 107 aa, Artificial Sequence
  source: /note="Description of Artificial Sequence: Synthetic light chain variable domain"
DILLTQSPVILSVSPGERVSFSCRANQSIGTNIHWYQQRTNGSPRLLIKYASESISGIPSRFSGSGSGTDFTLSINSVESEDIADYYCQQNNNWPTTFGAGTKLELK

SEQ ID NO: 4218 - protein, 107 aa, Artificial Sequence
  source: /note="Description of Artificial Sequence: Synthetic light chain variable domain"
DILLTQSPVILSVSPGERVSFSCRANQSIGTNIHWYQQRTNGSPRLLIKYASESISGIPSRFSGSGSGTDFTLSINSVESEDIADYYCQQNNNWPTTFGQGTKLELK

SEQ ID NO: 4219 - protein, 107 aa, Artificial Sequence
  source: /note="Description of Artificial Sequence: Synthetic light chain variable domain"
DILLTQSPVILSVSPGERVSFSCRARQSIGTNIHWYQQRTNGSPRLLIKYASESISGIPSRFSGSGSGTDFTLSINSVESEDIADYYCQQNNNWPTTFGAGTKLELK

SEQ ID NO: 4220 - protein, 107 aa, Artificial Sequence
  source: /note="Description of Artificial Sequence: Synthetic light chain variable domain"
DILLTQSPVILSVSPGERVSFSCRARQSIGTNIHWYQQRTNGSPRLLIKYASESISGIPSRFSGSGSGTDFTLSINSVESEDIADYYCQQNNNWPTTFGQGTKLELK

SEQ ID NO: 4221 - protein, 107 aa, Artificial Sequence
  source: /note="Description of Artificial Sequence: Synthetic light chain variable domain"
DILLTQSPVILSVSPGERVSFSCRASASIGTNIHWYQQRTNGSPRLLIKYASESISGIPSRFSGSGSGTDFTLSINSVESEDIADYYCQQNNNWPTTFGAGTKLELK

SEQ ID NO: 4222 - protein, 107 aa, Artificial Sequence
  source: /note="Description of Artificial Sequence: Synthetic light chain variable domain"
DILLTQSPVILSVSPGERVSFSCRASASIGTNIHWYQQRTNGSPRLLIKYASESISGIPSRFSGSGSGTDFTLSINSVESEDIADYYCQQNNNWPTTFGQGTKLELK

SEQ ID NO: 4223 - protein, 107 aa, Artificial Sequence
  source: /note="Description of Artificial Sequence: Synthetic light chain variable domain"
DILLTQSPVILSVSPGERVSFSCRASDSIGTNIHWYQQRTNGSPRLLIKYASESISGIPSRFSGSGSGTDFTLSINSVESEDIADYYCQQNNNWPTTFGAGTKLELK

SEQ ID NO: 4224 - protein, 107 aa, Artificial Sequence
  source: /note="Description of Artificial Sequence: Synthetic light chain variable domain"
DILLTQSPVILSVSPGERVSFSCRASDSIGTNIHWYQQRTNGSPRLLIKYASESISGIPSRFSGSGSGTDFTLSINSVESEDIADYYCQQNNNWPTTFGQGTKLELK

SEQ ID NO: 4225 - protein, 107 aa, Artificial Sequence
  source: /note="Description of Artificial Sequence: Synthetic light chain variable domain"
DILLTQSPVILSVSPGERVSFSCRASESIGTNIHWYQQRTNGSPRLLIKYASESISGIPSRFSGSGSGTDFTLSINSVESEDIADYYCQQNNNWPTTFGAGTKLELK

SEQ ID NO: 4226 - protein, 107 aa, Artificial Sequence
  source: /note="Description of Artificial Sequence: Synthetic light chain variable domain"
DILLTQSPVILSVSPGERVSFSCRASESIGTNIHWYQQRTNGSPRLLIKYASESISGIPSRFSGSGSGTDFTLSINSVESEDIADYYCQQNNNWPTTFGQGTKLELK

SEQ ID NO: 4227 - protein, 107 aa, Artificial Sequence
  source: /note="Description of Artificial Sequence: Synthetic light chain variable domain"
DILLTQSPVILSVSPGERVSFSCRASFSIGTNIHWYQQRTNGSPRLLIKYASESISGIPSRFSGSGSGTDFTLSINSVESEDIADYYCQQNNNWPTTFGAGTKLELK

SEQ ID NO: 4228 - protein, 107 aa, Artificial Sequence
  source: /note="Description of Artificial Sequence: Synthetic light chain variable domain"
DILLTQSPVILSVSPGERVSFSCRASFSIGTNIHWYQQRTNGSPRLLIKYASESISGIPSRFSGSGSGTDFTLSINSVESEDIADYYCQQNNNWPTTFGQGTKLELK

SEQ ID NO: 4229 - protein, 107 aa, Artificial Sequence
  source: /note="Description of Artificial Sequence: Synthetic light chain variable domain"
DILLTQSPVILSVSPGERVSFSCRASISIGTNIHWYQQRTNGSPRLLIKYASESISGIPSRFSGSGSGTDFTLSINSVESEDIADYYCQQNNNWPTTFGAGTKLELK

SEQ ID NO: 4230 - protein, 107 aa, Artificial Sequence
  source: /note="Description of Artificial Sequence: Synthetic light chain variable domain"
DILLTQSPVILSVSPGERVSFSCRASISIGTNIHWYQQRTNGSPRLLIKYASESISGIPSRFSGSGSGTDFTLSINSVESEDIADYYCQQNNNWPTTFGQGTKLELK

SEQ ID NO: 4231 - protein, 107 aa, Artificial Sequence
  source: /note="Description of Artificial Sequence: Synthetic light chain variable domain"
DILLTQSPVILSVSPGERVSFSCRASMSIGTNIHWYQQRTNGSPRLLIKYASESISGIPSRFSGSGSGTDFTLSINSVESEDIADYYCQQNNNWPTTFGAGTKLELK

SEQ ID NO: 4232 - protein, 107 aa, Artificial Sequence
  source: /note="Description of Artificial Sequence: Synthetic light chain variable domain"
DILLTQSPVILSVSPGERVSFSCRASMSIGTNIHWYQQRTNGSPRLLIKYASESISGIPSRFSGSGSGTDFTLSINSVESEDIADYYCQQNNNWPTTFGQGTKLELK

SEQ ID NO: 4233 - protein, 107 aa, Artificial Sequence
  source: /note="Description of Artificial Sequence: Synthetic light chain variable domain"
DILLTQSPVILSVSPGERVSFSCRASNSIGTNIHWYQQRTNGSPRLLIKYASESISGIPSRFSGSGSGTDFTLSINSVESEDIADYYCQQNNNWPTTFGAGTKLELK

SEQ ID NO: 4234 - protein, 107 aa, Artificial Sequence
  source: /note="Description of Artificial Sequence: Synthetic light chain variable domain"
DILLTQSPVILSVSPGERVSFSCRASNSIGTNIHWYQQRTNGSPRLLIKYASESISGIPSRFSGSGSGTDFTLSINSVESEDIADYYCQQNNNWPTTFGQGTKLELK

SEQ ID NO: 4235 - protein, 107 aa, Artificial Sequence
  source: /note="Description of Artificial Sequence: Synthetic light chain variable domain"
DILLTQSPVILSVSPGERVSFSCRASPSIGTNIHWYQQRTNGSPRLLIKYASESISGIPSRFSGSGSGTDFTLSINSVESEDIADYYCQQNNNWPTTFGAGTKLELK

SEQ ID NO: 4236 - protein, 107 aa, Artificial Sequence
  source: /note="Description of Artificial Sequence: Synthetic light chain variable domain"
DILLTQSPVILSVSPGERVSFSCRASPSIGTNIHWYQQRTNGSPRLLIKYASESISGIPSRFSGSGSGTDFTLSINSVESEDIADYYCQQNNNWPTTFGQGTKLELK

SEQ ID NO: 4237 - protein, 107 aa, Artificial Sequence
  source: /note="Description of Artificial Sequence: Synthetic light chain variable domain"
DILLTQSPVILSVSPGERVSFSCRASQAIGTNIHWYQQRTNGSPRLLIKYASESISGIPSRFSGSGSGTDFTLSINSVESEDIADYYCQQNNNWPTTFGAGTKLELK

SEQ ID NO: 4238 - protein, 107 aa, Artificial Sequence
  source: /note="Description of Artificial Sequence: Synthetic light chain variable domain"
DILLTQSPVILSVSPGERVSFSCRASQAIGTNIHWYQQRTNGSPRLLIKYASESISGIPSRFSGSGSGTDFTLSINSVESEDIADYYCQQNNNWPTTFGQGTKLELK

SEQ ID NO: 4239 - protein, 107 aa, Artificial Sequence
  source: /note="Description of Artificial Sequence: Synthetic light chain variable domain"
DILLTQSPVILSVSPGERVSFSCRASQDIGTNIHWYQQRTNGSPRLLIKYASESISGIPSRFSGSGSGTDFTLSINSVESEDIADYYCQQNNNWPTTFGAGTKLELK

SEQ ID NO: 4240 - protein, 107 aa, Artificial Sequence
  source: /note="Description of Artificial Sequence: Synthetic light chain variable domain"
DILLTQSPVILSVSPGERVSFSCRASQDIGTNIHWYQQRTNGSPRLLIKYASESISGIPSRFSGSGSGTDFTLSINSVESEDIADYYCQQNNNWPTTFGQGTKLELK

SEQ ID NO: 4241 - protein, 107 aa, Artificial Sequence
  source: /note="Description of Artificial Sequence: Synthetic light chain variable domain"
DILLTQSPVILSVSPGERVSFSCRASQHIGTNIHWYQQRTNGSPRLLIKYASESISGIPSRFSGSGSGTDFTLSINSVESEDIADYYCQQNNNWPTTFGAGTKLELK

SEQ ID NO: 4242 - protein, 107 aa, Artificial Sequence
  source: /note="Description of Artificial Sequence: Synthetic light chain variable domain"
DILLTQSPVILSVSPGERVSFSCRASQHIGTNIHWYQQRTNGSPRLLIKYASESISGIPSRFSGSGSGTDFTLSINSVESEDIADYYCQQNNNWPTTFGQGTKLELK

SEQ ID NO: 4243 - protein, 107 aa, Artificial Sequence
  source: /note="Description of Artificial Sequence: Synthetic light chain variable domain"
DILLTQSPVILSVSPGERVSFSCRASQKIGTNIHWYQQRTNGSPRLLIKYASESISGIPSRFSGSGSGTDFTLSINSVESEDIADYYCQQNNNWPTTFGAGTKLELK

SEQ ID NO: 4244 - protein, 107 aa, Artificial Sequence
  source: /note="Description of Artificial Sequence: Synthetic light chain variable domain"
DILLTQSPVILSVSPGERVSFSCRASQKIGTNIHWYQQRTNGSPRLLIKYASESISGIPSRFSGSGSGTDFTLSINSVESEDIADYYCQQNNNWPTTFGQGTKLELK

SEQ ID NO: 4245 - protein, 107 aa, Artificial Sequence
  source: /note="Description of Artificial Sequence: Synthetic light chain variable domain"
DILLTQSPVILSVSPGERVSFSCRASQLIGTNIHWYQQRTNGSPRLLIKYASESISGIPSRFSGSGSGTDFTLSINSVESEDIADYYCQQNNNWPTTFGAGTKLELK

SEQ ID NO: 4246 - protein, 107 aa, Artificial Sequence
  source: /note="Description of Artificial Sequence: Synthetic light chain variable domain"
DILLTQSPVILSVSPGERVSFSCRASQLIGTNIHWYQQRTNGSPRLLIKYASESISGIPSRFSGSGSGTDFTLSINSVESEDIADYYCQQNNNWPTTFGQGTKLELK

SEQ ID NO: 4247 - protein, 107 aa, Artificial Sequence
  source: /note="Description of Artificial Sequence: Synthetic light chain variable domain"
DILLTQSPVILSVSPGERVSFSCRASQNIGTNIHWYQQRTNGSPRLLIKYASESISGIPSRFSGSGSGTDFTLSINSVESEDIADYYCQQNNNWPTTFGAGTKLELK

SEQ ID NO: 4248 - protein, 107 aa, Artificial Sequence
  source: /note="Description of Artificial Sequence: Synthetic light chain variable domain"
DILLTQSPVILSVSPGERVSFSCRASQNIGTNIHWYQQRTNGSPRLLIKYASESISGIPSRFSGSGSGTDFTLSINSVESEDIADYYCQQNNNWPTTFGQGTKLELK

SEQ ID NO: 4249 - protein, 107 aa, Artificial Sequence
  source: /note="Description of Artificial Sequence: Synthetic light chain variable domain"
DILLTQSPVILSVSPGERVSFSCRASQQIGTNIHWYQQRTNGSPRLLIKYASESISGIPSRFSGSGSGTDFTLSINSVESEDIADYYCQQNNNWPTTFGAGTKLELK

SEQ ID NO: 4250 - protein, 107 aa, Artificial Sequence
  source: /note="Description of Artificial Sequence: Synthetic light chain variable domain"
DILLTQSPVILSVSPGERVSFSCRASQQIGTNIHWYQQRTNGSPRLLIKYASESISGIPSRFSGSGSGTDFTLSINSVESEDIADYYCQQNNNWPTTFGQGTKLELK

SEQ ID NO: 4251 - protein, 107 aa, Artificial Sequence
  source: /note="Description of Artificial Sequence: Synthetic light chain variable domain"
DILLTQSPVILSVSPGERVSFSCRASQSAGTNIHWYQQRTNGSPRLLIKYASESISGIPSRFSGSGSGTDFTLSINSVESEDIADYYCQQNNNWPTTFGAGTKLELK

SEQ ID NO: 4252 - protein, 107 aa, Artificial Sequence
  source: /note="Description of Artificial Sequence: Synthetic light chain variable domain"
DILLTQSPVILSVSPGERVSFSCRASQSAGTNIHWYQQRTNGSPRLLIKYASESISGIPSRFSGSGSGTDFTLSINSVESEDIADYYCQQNNNWPTTFGQGTKLELK

SEQ ID NO: 4253 - protein, 107 aa, Artificial Sequence
  source: /note="Description of Artificial Sequence: Synthetic light chain variable domain"
DILLTQSPVILSVSPGERVSFSCRASQSEGTNIHWYQQRTNGSPRLLIKYASESISGIPSRFSGSGSGTDFTLSINSVESEDIADYYCQQNNNWPTTFGAGTKLELK

SEQ ID NO: 4254 - protein, 107 aa, Artificial Sequence
  source: /note="Description of Artificial Sequence: Synthetic light chain variable domain"
DILLTQSPVILSVSPGERVSFSCRASQSEGTNIHWYQQRTNGSPRLLIKYASESISGIPSRFSGSGSGTDFTLSINSVESEDIADYYCQQNNNWPTTFGQGTKLELK

SEQ ID NO: 4255 - protein, 107 aa, Artificial Sequence
  source: /note="Description of Artificial Sequence: Synthetic light chain variable domain"
DILLTQSPVILSVSPGERVSFSCRASQSFGTNIHWYQQRTNGSPRLLIKYASESISGIPSRFSGSGSGTDFTLSINSVESEDIADYYCQQNNNWPTTFGAGTKLELK

SEQ ID NO: 4256 - protein, 107 aa, Artificial Sequence
  source: /note="Description of Artificial Sequence: Synthetic light chain variable domain"
DILLTQSPVILSVSPGERVSFSCRASQSFGTNIHWYQQRTNGSPRLLIKYASESISGIPSRFSGSGSGTDFTLSINSVESEDIADYYCQQNNNWPTTFGQGTKLELK

SEQ ID NO: 4257 - protein, 107 aa, Artificial Sequence
  source: /note="Description of Artificial Sequence: Synthetic light chain variable domain"
DILLTQSPVILSVSPGERVSFSCRASQSIATNIHWYQQRTNGSPRLLIKYASESISGIPSRFSGSGSGTDFTLSINSVESEDIADYYCQQNNNWPTTFGAGTKLELK

SEQ ID NO: 4258 - protein, 107 aa, Artificial Sequence
  source: /note="Description of Artificial Sequence: Synthetic light chain variable domain"
DILLTQSPVILSVSPGERVSFSCRASQSIATNIHWYQQRTNGSPRLLIKYASESISGIPSRFSGSGSGTDFTLSINSVESEDIADYYCQQNNNWPTTFGQGTKLELK

SEQ ID NO: 4259 - protein, 107 aa, Artificial Sequence
  source: /note="Description of Artificial Sequence: Synthetic light chain variable domain"
DILLTQSPVILSVSPGERVSFSCRASQSIETNIHWYQQRTNGSPRLLIKYASESISGIPSRFSGSGSGTDFTLSINSVESEDIADYYCQQNNNWPTTFGAGTKLELK

SEQ ID NO: 4260 - protein, 107 aa, Artificial Sequence
  source: /note="Description of Artificial Sequence: Synthetic light chain variable domain"
DILLTQSPVILSVSPGERVSFSCRASQSIETNIHWYQQRTNGSPRLLIKYASESISGIPSRFSGSGSGTDFTLSINSVESEDIADYYCQQNNNWPTTFGQGTKLELK

SEQ ID NO: 4261 - protein, 107 aa, Artificial Sequence
  source: /note="Description of Artificial Sequence: Synthetic light chain variable domain"
DILLTQSPVILSVSPGERVSFSCRASQSIFTNIHWYQQRTNGSPRLLIKYASESISGIPSRFSGSGSGTDFTLSINSVESEDIADYYCQQNNNWPTTFGAGTKLELK

SEQ ID NO: 4262 - protein, 107 aa, Artificial Sequence
  source: /note="Description of Artificial Sequence: Synthetic light chain variable domain"
DILLTQSPVILSVSPGERVSFSCRASQSIFTNIHWYQQRTNGSPRLLIKYASESISGIPSRFSGSGSGTDFTLSINSVESEDIADYYCQQNNNWPTTFGQGTKLELK

SEQ ID NO: 4263 - protein, 107 aa, Artificial Sequence
  source: /note="Description of Artificial Sequence: Synthetic light chain variable domain"
DILLTQSPVILSVSPGERVSFSCRASQSIGANIHWYQQRTNGSPRLLIKYASESISGIPSRFSGSGSGTDFTLSINSVESEDIADYYCQQNNNWPTTFGAGTKLELK

SEQ ID NO: 4264 - protein, 107 aa, Artificial Sequence
  source: /note="Description of Artificial Sequence: Synthetic light chain variable domain"
DILLTQSPVILSVSPGERVSFSCRASQSIGANIHWYQQRTNGSPRLLIKYASESISGIPSRFSGSGSGTDFTLSINSVESEDIADYYCQQNNNWPTTFGQGTKLELK

SEQ ID NO: 4265 - protein, 107 aa, Artificial Sequence
  source: /note="Description of Artificial Sequence: Synthetic light chain variable domain"
DILLTQSPVILSVSPGERVSFSCRASQSIGFNIHWYQQRTNGSPRLLIKYASESISGIPSRFSGSGSGTDFTLSINSVESEDIADYYCQQNNNWPTTFGAGTKLELK

SEQ ID NO: 4266 - protein, 107 aa, Artificial Sequence
  source: /note="Description of Artificial Sequence: Synthetic light chain variable domain"
DILLTQSPVILSVSPGERVSFSCRASQSIGFNIHWYQQRTNGSPRLLIKYASESISGIPSRFSGSGSGTDFTLSINSVESEDIADYYCQQNNNWPTTFGQGTKLELK

SEQ ID NO: 4267 - protein, 107 aa, Artificial Sequence
  source: /note="Description of Artificial Sequence: Synthetic light chain variable domain"
DILLTQSPVILSVSPGERVSFSCRASQSIGGNIHWYQQRTNGSPRLLIKYASESISGIPSRFSGSGSGTDFTLSINSVESEDIADYYCQQNNNWPTTFGAGTKLELK

SEQ ID NO: 4268 - protein, 107 aa, Artificial Sequence
  source: /note="Description of Artificial Sequence: Synthetic light chain variable domain"
DILLTQSPVILSVSPGERVSFSCRASQSIGGNIHWYQQRTNGSPRLLIKYASESISGIPSRFSGSGSGTDFTLSINSVESEDIADYYCQQNNNWPTTFGQGTKLELK

SEQ ID NO: 4269 - protein, 107 aa, Artificial Sequence
  source: /note="Description of Artificial Sequence: Synthetic light chain variable domain"
DILLTQSPVILSVSPGERVSFSCRASQSIGHNIHWYQQRTNGSPRLLIKYASESISGIPSRFSGSGSGTDFTLSINSVESEDIADYYCQQNNNWPTTFGAGTKLELK

SEQ ID NO: 4270 - protein, 107 aa, Artificial Sequence
  source: /note="Description of Artificial Sequence: Synthetic light chain variable domain"
DILLTQSPVILSVSPGERVSFSCRASQSIGHNIHWYQQRTNGSPRLLIKYASESISGIPSRFSGSGSGTDFTLSINSVESEDIADYYCQQNNNWPTTFGQGTKLELK

SEQ ID NO: 4271 - protein, 107 aa, Artificial Sequence
  source: /note="Description of Artificial Sequence: Synthetic light chain variable domain"
DILLTQSPVILSVSPGERVSFSCRASQSIGKNIHWYQQRTNGSPRLLIKYASESISGIPSRFSGSGSGTDFTLSINSVESEDIADYYCQQNNNWPTTFGAGTKLELK

SEQ ID NO: 4272 - protein, 107 aa, Artificial Sequence
  source: /note="Description of Artificial Sequence: Synthetic light chain variable domain"
DILLTQSPVILSVSPGERVSFSCRASQSIGKNIHWYQQRTNGSPRLLIKYASESISGIPSRFSGSGSGTDFTLSINSVESEDIADYYCQQNNNWPTTFGQGTKLELK

SEQ ID NO: 4273 - protein, 107 aa, Artificial Sequence
  source: /note="Description of Artificial Sequence: Synthetic light chain variable domain"
DILLTQSPVILSVSPGERVSFSCRASQSIGLNIHWYQQRTNGSPRLLIKYASESISGIPSRFSGSGSGTDFTLSINSVESEDIADYYCQQNNNWPTTFGAGTKLELK

SEQ ID NO: 4274 - protein, 107 aa, Artificial Sequence
  source: /note="Description of Artificial Sequence: Synthetic light chain variable domain"
DILLTQSPVILSVSPGERVSFSCRASQSIGLNIHWYQQRTNGSPRLLIKYASESISGIPSRFSGSGSGTDFTLSINSVESEDIADYYCQQNNNWPTTFGQGTKLELK

SEQ ID NO: 4275 - protein, 107 aa, Artificial Sequence
  source: /note="Description of Artificial Sequence: Synthetic light chain variable domain"
DILLTQSPVILSVSPGERVSFSCRASQSIGMNIHWYQQRTNGSPRLLIKYASESISGIPSRFSGSGSGTDFTLSINSVESEDIADYYCQQNNNWPTTFGAGTKLELK

SEQ ID NO: 4276 - protein, 107 aa, Artificial Sequence
  source: /note="Description of Artificial Sequence: Synthetic light chain variable domain"
DILLTQSPVILSVSPGERVSFSCRASQSIGMNIHWYQQRTNGSPRLLIKYASESISGIPSRFSGSGSGTDFTLSINSVESEDIADYYCQQNNNWPTTFGQGTKLELK

SEQ ID NO: 4277 - protein, 107 aa, Artificial Sequence
  source: /note="Description of Artificial Sequence: Synthetic light chain variable domain"
DILLTQSPVILSVSPGERVSFSCRASQSIGSNIHWYQQRTNGSPRLLIKYASESISGIPSRFSGSGSGTDFTLSINSVESEDIADYYCQQNNNWPTTFGAGTKLELK

SEQ ID NO: 4278 - protein, 107 aa, Artificial Sequence
  source: /note="Description of Artificial Sequence: Synthetic light chain variable domain"
DILLTQSPVILSVSPGERVSFSCRASQSIGSNIHWYQQRTNGSPRLLIKYASESISGIPSRFSGSGSGTDFTLSINSVESEDIADYYCQQNNNWPTTFGQGTKLELK

SEQ ID NO: 4279 - protein, 107 aa, Artificial Sequence
  source: /note="Description of Artificial Sequence: Synthetic light chain variable domain"
DILLTQSPVILSVSPGERVSFSCRASQSIGTGIHWYQQRTNGSPRLLIKYASESISGIPSRFSGSGSGTDFTLSINSVESEDIADYYCQQNNNWPTTFGAGTKLELK

SEQ ID NO: 4280 - protein, 107 aa, Artificial Sequence
  source: /note="Description of Artificial Sequence: Synthetic light chain variable domain"
DILLTQSPVILSVSPGERVSFSCRASQSIGTGIHWYQQRTNGSPRLLIKYASESISGIPSRFSGSGSGTDFTLSINSVESEDIADYYCQQNNNWPTTFGQGTKLELK

SEQ ID NO: 4281 - protein, 107 aa, Artificial Sequence
  source: /note="Description of Artificial Sequence: Synthetic light chain variable domain"
DILLTQSPVILSVSPGERVSFSCRASQSIGTNFHWYQQRTNGSPRLLIKYASESISGIPSRFSGSGSGTDFTLSINSVESEDIADYYCQQNNNWPTTFGAGTKLELK

SEQ ID NO: 4282 - protein, 107 aa, Artificial Sequence
  source: /note="Description of Artificial Sequence: Synthetic light chain variable domain"
DILLTQSPVILSVSPGERVSFSCRASQSIGTNFHWYQQRTNGSPRLLIKYASESISGIPSRFSGSGSGTDFTLSINSVESEDIADYYCQQNNNWPTTFGQGTKLELK

SEQ ID NO: 4283 - protein, 107 aa, Artificial Sequence
  source: /note="Description of Artificial Sequence: Synthetic light chain variable domain"
DILLTQSPVILSVSPGERVSFSCRASQSIGTNGHWYQQRTNGSPRLLIKYASESISGIPSRFSGSGSGTDFTLSINSVESEDIADYYCQQNNNWPTTFGAGTKLELK

SEQ ID NO: 4284 - protein, 107 aa, Artificial Sequence
  source: /note="Description of Artificial Sequence: Synthetic light chain variable domain"
DILLTQSPVILSVSPGERVSFSCRASQSIGTNGHWYQQRTNGSPRLLIKYASESISGIPSRFSGSGSGTDFTLSINSVESEDIADYYCQQNNNWPTTFGQGTKLELK

SEQ ID NO: 4285 - protein, 107 aa, Artificial Sequence
  source: /note="Description of Artificial Sequence: Synthetic light chain variable domain"
DILLTQSPVILSVSPGERVSFSCRASQSIGTNHHWYQQRTNGSPRLLIKYASESISGIPSRFSGSGSGTDFTLSINSVESEDIADYYCQQNNNWPTTFGAGTKLELK

SEQ ID NO: 4286 - protein, 107 aa, Artificial Sequence
  source: /note="Description of Artificial Sequence: Synthetic light chain variable domain"
DILLTQSPVILSVSPGERVSFSCRASQSIGTNHHWYQQRTNGSPRLLIKYASESISGIPSRFSGSGSGTDFTLSINSVESEDIADYYCQQNNNWPTTFGQGTKLELK

SEQ ID NO: 4287 - protein, 107 aa, Artificial Sequence
  source: /note="Description of Artificial Sequence: Synthetic light chain variable domain"
DILLTQSPVILSVSPGERVSFSCRASQSIGTNIHWYQQRTNGSPRLLIAYASESISGIPSRFSGSGSGTDFTLSINSVESEDIADYYCQQNNNWPTTFGAGTKLELK

SEQ ID NO: 4288 - protein, 107 aa, Artificial Sequence
  source: /note="Description of Artificial Sequence: Synthetic light chain variable domain"
DILLTQSPVILSVSPGERVSFSCRASQSIGTNIHWYQQRTNGSPRLLIAYASESISGIPSRFSGSGSGTDFTLSINSVESEDIADYYCQQNNNWPTTFGQGTKLELK

SEQ ID NO: 4289 - protein, 107 aa, Artificial Sequence
  source: /note="Description of Artificial Sequence: Synthetic light chain variable domain"
DILLTQSPVILSVSPGERVSFSCRASQSIGTNIHWYQQRTNGSPRLLIEYASESISGIPSRFSGSGSGTDFTLSINSVESEDIADYYCQQNNNWPTTFGAGTKLELK

SEQ ID NO: 4290 - protein, 107 aa, Artificial Sequence
  source: /note="Description of Artificial Sequence: Synthetic light chain variable domain"
DILLTQSPVILSVSPGERVSFSCRASQSIGTNIHWYQQRTNGSPRLLIEYASESISGIPSRFSGSGSGTDFTLSINSVESEDIADYYCQQNNNWPTTFGQGTKLELK

SEQ ID NO: 4291 - protein, 107 aa, Artificial Sequence
  source: /note="Description of Artificial Sequence: Synthetic light chain variable domain"
DILLTQSPVILSVSPGERVSFSCRASQSIGTNIHWYQQRTNGSPRLLIFYASESISGIPSRFSGSGSGTDFTLSINSVESEDIADYYCQQNNNWPTTFGAGTKLELK

SEQ ID NO: 4292 - protein, 107 aa, Artificial Sequence
  source: /note="Description of Artificial Sequence: Synthetic light chain variable domain"
DILLTQSPVILSVSPGERVSFSCRASQSIGTNIHWYQQRTNGSPRLLIFYASESISGIPSRFSGSGSGTDFTLSINSVESEDIADYYCQQNNNWPTTFGQGTKLELK

SEQ ID NO: 4293 - protein, 107 aa, Artificial Sequence
  source: /note="Description of Artificial Sequence: Synthetic light chain variable domain"
DILLTQSPVILSVSPGERVSFSCRASQSIGTNIHWYQQRTNGSPRLLIGYASESISGIPSRFSGSGSGTDFTLSINSVESEDIADYYCQQNNNWPTTFGAGTKLELK

SEQ ID NO: 4294 - protein, 107 aa, Artificial Sequence
  source: /note="Description of Artificial Sequence: Synthetic light chain variable domain"
DILLTQSPVILSVSPGERVSFSCRASQSIGTNIHWYQQRTNGSPRLLIGYASESISGIPSRFSGSGSGTDFTLSINSVESEDIADYYCQQNNNWPTTFGQGTKLELK

SEQ ID NO: 4295 - protein, 107 aa, Artificial Sequence
  source: /note="Description of Artificial Sequence: Synthetic light chain variable domain"
DILLTQSPVILSVSPGERVSFSCRASQSIGTNIHWYQQRTNGSPRLLIHYASESISGIPSRFSGSGSGTDFTLSINSVESEDIADYYCQQNNNWPTTFGAGTKLELK

SEQ ID NO: 4296 - protein, 107 aa, Artificial Sequence
  source: /note="Description of Artificial Sequence: Synthetic light chain variable domain"
DILLTQSPVILSVSPGERVSFSCRASQSIGTNIHWYQQRTNGSPRLLIHYASESISGIPSRFSGSGSGTDFTLSINSVESEDIADYYCQQNNNWPTTFGQGTKLELK

SEQ ID NO: 4297 - protein, 107 aa, Artificial Sequence
  source: /note="Description of Artificial Sequence: Synthetic light chain variable domain"
DILLTQSPVILSVSPGERVSFSCRASQSIGTNIHWYQQRTNGSPRLLIKYAAESISGIPSRFSGSGSGTDFTLSINSVESEDIADYYCQQNNNWPTTFGAGTKLELK

SEQ ID NO: 4298 - protein, 107 aa, Artificial Sequence
  source: /note="Description of Artificial Sequence: Synthetic light chain variable domain"
DILLTQSPVILSVSPGERVSFSCRASQSIGTNIHWYQQRTNGSPRLLIKYAAESISGIPSRFSGSGSGTDFTLSINSVESEDIADYYCQQNNNWPTTFGQGTKLELK

SEQ ID NO: 4299 - protein, 107 aa, Artificial Sequence
  source: /note="Description of Artificial Sequence: Synthetic light chain variable domain"
DILLTQSPVILSVSPGERVSFSCRASQSIGTNIHWYQQRTNGSPRLLIKYACESISGIPSRFSGSGSGTDFTLSINSVESEDIADYYCQQNNNWPTTFGAGTKLELK

SEQ ID NO: 4300 - protein, 107 aa, Artificial Sequence
  source: /note="Description of Artificial Sequence: Synthetic light chain variable domain"
DILLTQSPVILSVSPGERVSFSCRASQSIGTNIHWYQQRTNGSPRLLIKYACESISGIPSRFSGSGSGTDFTLSINSVESEDIADYYCQQNNNWPTTFGQGTKLELK

SEQ ID NO: 4301 - protein, 107 aa, Artificial Sequence
  source: /note="Description of Artificial Sequence: Synthetic light chain variable domain"
DILLTQSPVILSVSPGERVSFSCRASQSIGTNIHWYQQRTNGSPRLLIKYADESISGIPSRFSGSGSGTDFTLSINSVESEDIADYYCQQNNNWPTTFGAGTKLELK

SEQ ID NO: 4302 - protein, 107 aa, Artificial Sequence
  source: /note="Description of Artificial Sequence: Synthetic light chain variable domain"
DILLTQSPVILSVSPGERVSFSCRASQSIGTNIHWYQQRTNGSPRLLIKYADESISGIPSRFSGSGSGTDFTLSINSVESEDIADYYCQQNNNWPTTFGQGTKLELK

SEQ ID NO: 4303 - protein, 107 aa, Artificial Sequence
  source: /note="Description of Artificial Sequence: Synthetic light chain variable domain"
DILLTQSPVILSVSPGERVSFSCRASQSIGTNIHWYQQRTNGSPRLLIKYAEESISGIPSRFSGSGSGTDFTLSINSVESEDIADYYCQQNNNWPTTFGAGTKLELK

SEQ ID NO: 4304 - protein, 107 aa, Artificial Sequence
  source: /note="Description of Artificial Sequence: Synthetic light chain variable domain"
DILLTQSPVILSVSPGERVSFSCRASQSIGTNIHWYQQRTNGSPRLLIKYAEESISGIPSRFSGSGSGTDFTLSINSVESEDIADYYCQQNNNWPTTFGQGTKLELK

SEQ ID NO: 4305 - protein, 107 aa, Artificial Sequence
  source: /note="Description of Artificial Sequence: Synthetic light chain variable domain"
DILLTQSPVILSVSPGERVSFSCRASQSIGTNIHWYQQRTNGSPRLLIKYAGESISGIPSRFSGSGSGTDFTLSINSVESEDIADYYCQQNNNWPTTFGAGTKLELK

SEQ ID NO: 4306 - protein, 107 aa, Artificial Sequence
  source: /note="Description of Artificial Sequence: Synthetic light chain variable domain"
DILLTQSPVILSVSPGERVSFSCRASQSIGTNIHWYQQRTNGSPRLLIKYAGESISGIPSRFSGSGSGTDFTLSINSVESEDIADYYCQQNNNWPTTFGQGTKLELK

SEQ ID NO: 4307 - protein, 107 aa, Artificial Sequence
  source: /note="Description of Artificial Sequence: Synthetic light chain variable domain"
DILLTQSPVILSVSPGERVSFSCRASQSIGTNIHWYQQRTNGSPRLLIKYAIESISGIPSRFSGSGSGTDFTLSINSVESEDIADYYCQQNNNWPTTFGAGTKLELK

SEQ ID NO: 4308 - protein, 107 aa, Artificial Sequence
  source: /note="Description of Artificial Sequence: Synthetic light chain variable domain"
DILLTQSPVILSVSPGERVSFSCRASQSIGTNIHWYQQRTNGSPRLLIKYAIESISGIPSRFSGSGSGTDFTLSINSVESEDIADYYCQQNNNWPTTFGQGTKLELK

SEQ ID NO: 4309 - protein, 107 aa, Artificial Sequence
  source: /note="Description of Artificial Sequence: Synthetic light chain variable domain"
DILLTQSPVILSVSPGERVSFSCRASQSIGTNIHWYQQRTNGSPRLLIKYAKESISGIPSRFSGSGSGTDFTLSINSVESEDIADYYCQQNNNWPTTFGAGTKLELK

SEQ ID NO: 4310 - protein, 107 aa, Artificial Sequence
  source: /note="Description of Artificial Sequence: Synthetic light chain variable domain"
DILLTQSPVILSVSPGERVSFSCRASQSIGTNIHWYQQRTNGSPRLLIKYAKESISGIPSRFSGSGSGTDFTLSINSVESEDIADYYCQQNNNWPTTFGQGTKLELK

SEQ ID NO: 4311 - protein, 107 aa, Artificial Sequence
  source: /note="Description of Artificial Sequence: Synthetic light chain variable domain"
DILLTQSPVILSVSPGERVSFSCRASQSIGTNIHWYQQRTNGSPRLLIKYAMESISGIPSRFSGSGSGTDFTLSINSVESEDIADYYCQQNNNWPTTFGAGTKLELK

SEQ ID NO: 4312 - protein, 107 aa, Artificial Sequence
  source: /note="Description of Artificial Sequence: Synthetic light chain variable domain"
DILLTQSPVILSVSPGERVSFSCRASQSIGTNIHWYQQRTNGSPRLLIKYAMESISGIPSRFSGSGSGTDFTLSINSVESEDIADYYCQQNNNWPTTFGQGTKLELK

SEQ ID NO: 4313 - protein, 107 aa, Artificial Sequence
  source: /note="Description of Artificial Sequence: Synthetic light chain variable domain"
DILLTQSPVILSVSPGERVSFSCRASQSIGTNIHWYQQRTNGSPRLLIKYAQESISGIPSRFSGSGSGTDFTLSINSVESEDIADYYCQQNNNWPTTFGAGTKLELK

SEQ ID NO: 4314 - protein, 107 aa, Artificial Sequence
  source: /note="Description of Artificial Sequence: Synthetic light chain variable domain"
DILLTQSPVILSVSPGERVSFSCRASQSIGTNIHWYQQRTNGSPRLLIKYAQESISGIPSRFSGSGSGTDFTLSINSVESEDIADYYCQQNNNWPTTFGQGTKLELK

SEQ ID NO: 4315 - protein, 107 aa, Artificial Sequence
  source: /note="Description of Artificial Sequence: Synthetic light chain variable domain"
DILLTQSPVILSVSPGERVSFSCRASQSIGTNIHWYQQRTNGSPRLLIKYARESISGIPSRFSGSGSGTDFTLSINSVESEDIADYYCQQNNNWPTTFGAGTKLELK

SEQ ID NO: 4316 - protein, 107 aa, Artificial Sequence
  source: /note="Description of Artificial Sequence: Synthetic light chain variable domain"
DILLTQSPVILSVSPGERVSFSCRASQSIGTNIHWYQQRTNGSPRLLIKYARESISGIPSRFSGSGSGTDFTLSINSVESEDIADYYCQQNNNWPTTFGQGTKLELK

SEQ ID NO: 4317 - protein, 107 aa, Artificial Sequence
  source: /note="Description of Artificial Sequence: Synthetic light chain variable domain"
DILLTQSPVILSVSPGERVSFSCRASQSIGTNIHWYQQRTNGSPRLLIKYASEMISGIPSRFSGSGSGTDFTLSINSVESEDIADYYCQQNNNWPTTFGAGTKLELK

SEQ ID NO: 4318 - protein, 107 aa, Artificial Sequence
  source: /note="Description of Artificial Sequence: Synthetic light chain variable domain"
DILLTQSPVILSVSPGERVSFSCRASQSIGTNIHWYQQRTNGSPRLLIKYASEMISGIPSRFSGSGSGTDFTLSINSVESEDIADYYCQQNNNWPTTFGQGTKLELK

SEQ ID NO: 4319 - protein, 107 aa, Artificial Sequence
  source: /note="Description of Artificial Sequence: Synthetic light chain variable domain"
DILLTQSPVILSVSPGERVSFSCRASQSIGTNIHWYQQRTNGSPRLLIKYASESASGIPSRFSGSGSGTDFTLSINSVESEDIADYYCQQNNNWPTTFGAGTKLELK

SEQ ID NO: 4320 - protein, 107 aa, Artificial Sequence
  source: /note="Description of Artificial Sequence: Synthetic light chain variable domain"
DILLTQSPVILSVSPGERVSFSCRASQSIGTNIHWYQQRTNGSPRLLIKYASESASGIPSRFSGSGSGTDFTLSINSVESEDIADYYCQQNNNWPTTFGQGTKLELK

SEQ ID NO: 4321 - protein, 107 aa, Artificial Sequence
  source: /note="Description of Artificial Sequence: Synthetic light chain variable domain"
DILLTQSPVILSVSPGERVSFSCRASQSIGTNIHWYQQRTNGSPRLLIKYASESFSGIPSRFSGSGSGTDFTLSINSVESEDIADYYCQQNNNWPTTFGAGTKLELK

SEQ ID NO: 4322 - protein, 107 aa, Artificial Sequence
  source: /note="Description of Artificial Sequence: Synthetic light chain variable domain"
DILLTQSPVILSVSPGERVSFSCRASQSIGTNIHWYQQRTNGSPRLLIKYASESFSGIPSRFSGSGSGTDFTLSINSVESEDIADYYCQQNNNWPTTFGQGTKLELK

SEQ ID NO: 4323 - protein, 107 aa, Artificial Sequence
  source: /note="Description of Artificial Sequence: Synthetic light chain variable domain"
DILLTQSPVILSVSPGERVSFSCRASQSIGTNIHWYQQRTNGSPRLLIKYASESIAGIPSRFSGSGSGTDFTLSINSVESEDIADYYCQQNNNWPTTFGAGTKLELK

SEQ ID NO: 4324 - protein, 107 aa, Artificial Sequence
  source: /note="Description of Artificial Sequence: Synthetic light chain variable domain"
DILLTQSPVILSVSPGERVSFSCRASQSIGTNIHWYQQRTNGSPRLLIKYASESIAGIPSRFSGSGSGTDFTLSINSVESEDIADYYCQQNNNWPTTFGQGTKLELK

SEQ ID NO: 4325 - protein, 107 aa, Artificial Sequence
  source: /note="Description of Artificial Sequence: Synthetic light chain variable domain"
DILLTQSPVILSVSPGERVSFSCRASQSIGTNIHWYQQRTNGSPRLLIKYASESICGIPSRFSGSGSGTDFTLSINSVESEDIADYYCQQNNNWPTTFGAGTKLELK

SEQ ID NO: 4326 - protein, 107 aa, Artificial Sequence
  source: /note="Description of Artificial Sequence: Synthetic light chain variable domain"
DILLTQSPVILSVSPGERVSFSCRASQSIGTNIHWYQQRTNGSPRLLIKYASESICGIPSRFSGSGSGTDFTLSINSVESEDIADYYCQQNNNWPTTFGQGTKLELK

SEQ ID NO: 4327 - protein, 107 aa, Artificial Sequence
  source: /note="Description of Artificial Sequence: Synthetic light chain variable domain"
DILLTQSPVILSVSPGERVSFSCRASQSIGTNIHWYQQRTNGSPRLLIKYASESIDGIPSRFSGSGSGTDFTLSINSVESEDIADYYCQQNNNWPTTFGAGTKLELK

SEQ ID NO: 4328 - protein, 107 aa, Artificial Sequence
  source: /note="Description of Artificial Sequence: Synthetic light chain variable domain"
DILLTQSPVILSVSPGERVSFSCRASQSIGTNIHWYQQRTNGSPRLLIKYASESIDGIPSRFSGSGSGTDFTLSINSVESEDIADYYCQQNNNWPTTFGQGTKLELK

SEQ ID NO: 4329 - protein, 107 aa, Artificial Sequence
  source: /note="Description of Artificial Sequence: Synthetic light chain variable domain"
DILLTQSPVILSVSPGERVSFSCRASQSIGTNIHWYQQRTNGSPRLLIKYASESIEGIPSRFSGSGSGTDFTLSINSVESEDIADYYCQQNNNWPTTFGAGTKLELK

SEQ ID NO: 4330 - protein, 107 aa, Artificial Sequence
  source: /note="Description of Artificial Sequence: Synthetic light chain variable domain"
DILLTQSPVILSVSPGERVSFSCRASQSIGTNIHWYQQRTNGSPRLLIKYASESIEGIPSRFSGSGSGTDFTLSINSVESEDIADYYCQQNNNWPTTFGQGTKLELK

SEQ ID NO: 4331 - protein, 107 aa, Artificial Sequence
  source: /note="Description of Artificial Sequence: Synthetic light chain variable domain"
DILLTQSPVILSVSPGERVSFSCRASQSIGTNIHWYQQRTNGSPRLLIKYASESIFGIPSRFSGSGSGTDFTLSINSVESEDIADYYCQQNNNWPTTFGAGTKLELK

SEQ ID NO: 4332 - protein, 107 aa, Artificial Sequence
  source: /note="Description of Artificial Sequence: Synthetic light chain variable domain"
DILLTQSPVILSVSPGERVSFSCRASQSIGTNIHWYQQRTNGSPRLLIKYASESIFGIPSRFSGSGSGTDFTLSINSVESEDIADYYCQQNNNWPTTFGQGTKLELK

SEQ ID NO: 4333 - protein, 107 aa, Artificial Sequence
  source: /note="Description of Artificial Sequence: Synthetic light chain variable domain"
DILLTQSPVILSVSPGERVSFSCRASQSIGTNIHWYQQRTNGSPRLLIKYASESIGGIPSRFSGSGSGTDFTLSINSVESEDIADYYCQQNNNWPTTFGAGTKLELK

SEQ ID NO: 4334 - protein, 107 aa, Artificial Sequence
  source: /note="Description of Artificial Sequence: Synthetic light chain variable domain"
DILLTQSPVILSVSPGERVSFSCRASQSIGTNIHWYQQRTNGSPRLLIKYASESIGGIPSRFSGSGSGTDFTLSINSVESEDIADYYCQQNNNWPTTFGQGTKLELK

SEQ ID NO: 4335 - protein, 107 aa, Artificial Sequence
  source: /note="Description of Artificial Sequence: Synthetic light chain variable domain"
DILLTQSPVILSVSPGERVSFSCRASQSIGTNIHWYQQRTNGSPRLLIKYASESIHGIPSRFSGSGSGTDFTLSINSVESEDIADYYCQQNNNWPTTFGAGTKLELK

SEQ ID NO: 4336 - protein, 107 aa, Artificial Sequence
  source: /note="Description of Artificial Sequence: Synthetic light chain variable domain"
DILLTQSPVILSVSPGERVSFSCRASQSIGTNIHWYQQRTNGSPRLLIKYASESIHGIPSRFSGSGSGTDFTLSINSVESEDIADYYCQQNNNWPTTFGQGTKLELK

SEQ ID NO: 4337 - protein, 107 aa, Artificial Sequence
  source: /note="Description of Artificial Sequence: Synthetic light chain variable domain"
DILLTQSPVILSVSPGERVSFSCRASQSIGTNIHWYQQRTNGSPRLLIKYASESIKGIPSRFSGSGSGTDFTLSINSVESEDIADYYCQQNNNWPTTFGAGTKLELK

SEQ ID NO: 4338 - protein, 107 aa, Artificial Sequence
  source: /note="Description of Artificial Sequence: Synthetic light chain variable domain"
DILLTQSPVILSVSPGERVSFSCRASQSIGTNIHWYQQRTNGSPRLLIKYASESIKGIPSRFSGSGSGTDFTLSINSVESEDIADYYCQQNNNWPTTFGQGTKLELK

SEQ ID NO: 4339 - protein, 107 aa, Artificial Sequence
  source: /note="Description of Artificial Sequence: Synthetic light chain variable domain"
DILLTQSPVILSVSPGERVSFSCRASQSIGTNIHWYQQRTNGSPRLLIKYASESILGIPSRFSGSGSGTDFTLSINSVESEDIADYYCQQNNNWPTTFGAGTKLELK

SEQ ID NO: 4340 - protein, 107 aa, Artificial Sequence
  source: /note="Description of Artificial Sequence: Synthetic light chain variable domain"
DILLTQSPVILSVSPGERVSFSCRASQSIGTNIHWYQQRTNGSPRLLIKYASESILGIPSRFSGSGSGTDFTLSINSVESEDIADYYCQQNNNWPTTFGQGTKLELK

SEQ ID NO: 4341 - protein, 107 aa, Artificial Sequence
  source: /note="Description of Artificial Sequence: Synthetic light chain variable domain"
DILLTQSPVILSVSPGERVSFSCRASQSIGTNIHWYQQRTNGSPRLLIKYASESINGIPSRFSGSGSGTDFTLSINSVESEDIADYYCQQNNNWPTTFGAGTKLELK

SEQ ID NO: 4342 - protein, 107 aa, Artificial Sequence
  source: /note="Description of Artificial Sequence: Synthetic light chain variable domain"
DILLTQSPVILSVSPGERVSFSCRASQSIGTNIHWYQQRTNGSPRLLIKYASESINGIPSRFSGSGSGTDFTLSINSVESEDIADYYCQQNNNWPTTFGQGTKLELK

SEQ ID NO: 4343 - protein, 107 aa, Artificial Sequence
  source: /note="Description of Artificial Sequence: Synthetic light chain variable domain"
DILLTQSPVILSVSPGERVSFSCRASQSIGTNIHWYQQRTNGSPRLLIKYASESIPGIPSRFSGSGSGTDFTLSINSVESEDIADYYCQQNNNWPTTFGAGTKLELK

SEQ ID NO: 4344 - protein, 107 aa, Artificial Sequence
  source: /note="Description of Artificial Sequence: Synthetic light chain variable domain"
DILLTQSPVILSVSPGERVSFSCRASQSIGTNIHWYQQRTNGSPRLLIKYASESIPGIPSRFSGSGSGTDFTLSINSVESEDIADYYCQQNNNWPTTFGQGTKLELK

SEQ ID NO: 4345 - protein, 107 aa, Artificial Sequence
  source: /note="Description of Artificial Sequence: Synthetic light chain variable domain"
DILLTQSPVILSVSPGERVSFSCRASQSIGTNIHWYQQRTNGSPRLLIKYASESIQGIPSRFSGSGSGTDFTLSINSVESEDIADYYCQQNNNWPTTFGAGTKLELK

SEQ ID NO: 4346 - protein, 107 aa, Artificial Sequence
  source: /note="Description of Artificial Sequence: Synthetic light chain variable domain"
DILLTQSPVILSVSPGERVSFSCRASQSIGTNIHWYQQRTNGSPRLLIKYASESIQGIPSRFSGSGSGTDFTLSINSVESEDIADYYCQQNNNWPTTFGQGTKLELK

SEQ ID NO: 4347 - protein, 107 aa, Artificial Sequence
  source: /note="Description of Artificial Sequence: Synthetic light chain variable domain"
DILLTQSPVILSVSPGERVSFSCRASQSIGTNIHWYQQRTNGSPRLLIKYASESIRGIPSRFSGSGSGTDFTLSINSVESEDIADYYCQQNNNWPTTFGAGTKLELK

SEQ ID NO: 4348 - protein, 107 aa, Artificial Sequence
  source: /note="Description of Artificial Sequence: Synthetic light chain variable domain"
DILLTQSPVILSVSPGERVSFSCRASQSIGTNIHWYQQRTNGSPRLLIKYASESIRGIPSRFSGSGSGTDFTLSINSVESEDIADYYCQQNNNWPTTFGQGTKLELK

SEQ ID NO: 4349 - protein, 107 aa, Artificial Sequence
  source: /note="Description of Artificial Sequence: Synthetic light chain variable domain"
DILLTQSPVILSVSPGERVSFSCRASQSIGTNIHWYQQRTNGSPRLLIKYASESISGIPSRFSGSGSGTDFTLSINSVESEDIADFYCQQNNNWPTTFGAGTKLELK

SEQ ID NO: 4350 - protein, 107 aa, Artificial Sequence
  source: /note="Description of Artificial Sequence: Synthetic light chain variable domain"
DILLTQSPVILSVSPGERVSFSCRASQSIGTNIHWYQQRTNGSPRLLIKYASESISGIPSRFSGSGSGTDFTLSINSVESEDIADFYCQQNNNWPTTFGQGTKLELK

SEQ ID NO: 4351 - protein, 107 aa, Artificial Sequence
  source: /note="Description of Artificial Sequence: Synthetic light chain variable domain"
DILLTQSPVILSVSPGERVSFSCRASQSIGTNIHWYQQRTNGSPRLLIKYASESISGIPSRFSGSGSGTDFTLSINSVESEDIADHYCQQNNNWPTTFGAGTKLELK

SEQ ID NO: 4352 - protein, 107 aa, Artificial Sequence
  source: /note="Description of Artificial Sequence: Synthetic light chain variable domain"
DILLTQSPVILSVSPGERVSFSCRASQSIGTNIHWYQQRTNGSPRLLIKYASESISGIPSRFSGSGSGTDFTLSINSVESEDIADHYCQQNNNWPTTFGQGTKLELK

SEQ ID NO: 4353 - protein, 107 aa, Artificial Sequence
  source: /note="Description of Artificial Sequence: Synthetic light chain variable domain"
DILLTQSPVILSVSPGERVSFSCRASQSIGTNIHWYQQRTNGSPRLLIKYASESISGIPSRFSGSGSGTDFTLSINSVESEDIADMYCQQNNNWPTTFGAGTKLELK

SEQ ID NO: 4354 - protein, 107 aa, Artificial Sequence
  source: /note="Description of Artificial Sequence: Synthetic light chain variable domain"
DILLTQSPVILSVSPGERVSFSCRASQSIGTNIHWYQQRTNGSPRLLIKYASESISGIPSRFSGSGSGTDFTLSINSVESEDIADMYCQQNNNWPTTFGQGTKLELK

SEQ ID NO: 4355 - protein, 107 aa, Artificial Sequence
  source: /note="Description of Artificial Sequence: Synthetic light chain variable domain"
DILLTQSPVILSVSPGERVSFSCRASQSIGTNIHWYQQRTNGSPRLLIKYASESISGIPSRFSGSGSGTDFTLSINSVESEDIADYCCQQNNNWPTTFGAGTKLELK

SEQ ID NO: 4356 - protein, 107 aa, Artificial Sequence
  source: /note="Description of Artificial Sequence: Synthetic light chain variable domain"
DILLTQSPVILSVSPGERVSFSCRASQSIGTNIHWYQQRTNGSPRLLIKYASESISGIPSRFSGSGSGTDFTLSINSVESEDIADYCCQQNNNWPTTFGQGTKLELK

SEQ ID NO: 4357 - protein, 107 aa, Artificial Sequence
  source: /note="Description of Artificial Sequence: Synthetic light chain variable domain"
DILLTQSPVILSVSPGERVSFSCRASQSIGTNIHWYQQRTNGSPRLLIKYASESISGIPSRFSGSGSGTDFTLSINSVESEDIADYDCQQNNNWPTTFGAGTKLELK

SEQ ID NO: 4358 - protein, 107 aa, Artificial Sequence
  source: /note="Description of Artificial Sequence: Synthetic light chain variable domain"
DILLTQSPVILSVSPGERVSFSCRASQSIGTNIHWYQQRTNGSPRLLIKYASESISGIPSRFSGSGSGTDFTLSINSVESEDIADYDCQQNNNWPTTFGQGTKLELK

SEQ ID NO: 4359 - protein, 107 aa, Artificial Sequence
  source: /note="Description of Artificial Sequence: Synthetic light chain variable domain"
DILLTQSPVILSVSPGERVSFSCRASQSIGTNIHWYQQRTNGSPRLLIKYASESISGIPSRFSGSGSGTDFTLSINSVESEDIADYFCQQNNNWPTTFGAGTKLELK

SEQ ID NO: 4360 - protein, 107 aa, Artificial Sequence
  source: /note="Description of Artificial Sequence: Synthetic light chain variable domain"
DILLTQSPVILSVSPGERVSFSCRASQSIGTNIHWYQQRTNGSPRLLIKYASESISGIPSRFSGSGSGTDFTLSINSVESEDIADYFCQQNNNWPTTFGQGTKLELK

SEQ ID NO: 4361 - protein, 107 aa, Artificial Sequence
  source: /note="Description of Artificial Sequence: Synthetic light chain variable domain"
DILLTQSPVILSVSPGERVSFSCRASQSIGTNIHWYQQRTNGSPRLLIKYASESISGIPSRFSGSGSGTDFTLSINSVESEDIADYGCQQNNNWPTTFGAGTKLELK

SEQ ID NO: 4362 - protein, 107 aa, Artificial Sequence
  source: /note="Description of Artificial Sequence: Synthetic light chain variable domain"
DILLTQSPVILSVSPGERVSFSCRASQSIGTNIHWYQQRTNGSPRLLIKYASESISGIPSRFSGSGSGTDFTLSINSVESEDIADYGCQQNNNWPTTFGQGTKLELK

SEQ ID NO: 4363 - protein, 107 aa, Artificial Sequence
  source: /note="Description of Artificial Sequence: Synthetic light chain variable domain"
DILLTQSPVILSVSPGERVSFSCRASQSIGTNIHWYQQRTNGSPRLLIKYASESISGIPSRFSGSGSGTDFTLSINSVESEDIADYHCQQNNNWPTTFGAGTKLELK

SEQ ID NO: 4364 - protein, 107 aa, Artificial Sequence
  source: /note="Description of Artificial Sequence: Synthetic light chain variable domain"
DILLTQSPVILSVSPGERVSFSCRASQSIGTNIHWYQQRTNGSPRLLIKYASESISGIPSRFSGSGSGTDFTLSINSVESEDIADYHCQQNNNWPTTFGQGTKLELK

SEQ ID NO: 4365 - protein, 107 aa, Artificial Sequence
  source: /note="Description of Artificial Sequence: Synthetic light chain variable domain"
DILLTQSPVILSVSPGERVSFSCRASQSIGTNIHWYQQRTNGSPRLLIKYASESISGIPSRFSGSGSGTDFTLSINSVESEDIADYICQQNNNWPTTFGAGTKLELK

SEQ ID NO: 4366 - protein, 107 aa, Artificial Sequence
  source: /note="Description of Artificial Sequence: Synthetic light chain variable domain"
DILLTQSPVILSVSPGERVSFSCRASQSIGTNIHWYQQRTNGSPRLLIKYASESISGIPSRFSGSGSGTDFTLSINSVESEDIADYICQQNNNWPTTFGQGTKLELK

SEQ ID NO: 4367 - protein, 107 aa, Artificial Sequence
  source: /note="Description of Artificial Sequence: Synthetic light chain variable domain"
DILLTQSPVILSVSPGERVSFSCRASQSIGTNIHWYQQRTNGSPRLLIKYASESISGIPSRFSGSGSGTDFTLSINSVESEDIADYKCQQNNNWPTTFGAGTKLELK

SEQ ID NO: 4368 - protein, 107 aa, Artificial Sequence
  source: /note="Description of Artificial Sequence: Synthetic light chain variable domain"
DILLTQSPVILSVSPGERVSFSCRASQSIGTNIHWYQQRTNGSPRLLIKYASESISGIPSRFSGSGSGTDFTLSINSVESEDIADYKCQQNNNWPTTFGQGTKLELK

SEQ ID NO: 4369 - protein, 107 aa, Artificial Sequence
  source: /note="Description of Artificial Sequence: Synthetic light chain variable domain"
DILLTQSPVILSVSPGERVSFSCRASQSIGTNIHWYQQRTNGSPRLLIKYASESISGIPSRFSGSGSGTDFTLSINSVESEDIADYLCQQNNNWPTTFGAGTKLELK

SEQ ID NO: 4370 - protein, 107 aa, Artificial Sequence
  source: /note="Description of Artificial Sequence: Synthetic light chain variable domain"
DILLTQSPVILSVSPGERVSFSCRASQSIGTNIHWYQQRTNGSPRLLIKYASESISGIPSRFSGSGSGTDFTLSINSVESEDIADYLCQQNNNWPTTFGQGTKLELK

SEQ ID NO: 4371 - protein, 107 aa, Artificial Sequence
  source: /note="Description of Artificial Sequence: Synthetic light chain variable domain"
DILLTQSPVILSVSPGERVSFSCRASQSIGTNIHWYQQRTNGSPRLLIKYASESISGIPSRFSGSGSGTDFTLSINSVESEDIADYNCQQNNNWPTTFGAGTKLELK

SEQ ID NO: 4372 - protein, 107 aa, Artificial Sequence
  source: /note="Description of Artificial Sequence: Synthetic light chain variable domain"
DILLTQSPVILSVSPGERVSFSCRASQSIGTNIHWYQQRTNGSPRLLIKYASESISGIPSRFSGSGSGTDFTLSINSVESEDIADYNCQQNNNWPTTFGQGTKLELK

SEQ ID NO: 4373 - protein, 107 aa, Artificial Sequence
  source: /note="Description of Artificial Sequence: Synthetic light chain variable domain"
DILLTQSPVILSVSPGERVSFSCRASQSIGTNIHWYQQRTNGSPRLLIKYASESISGIPSRFSGSGSGTDFTLSINSVESEDIADYPCQQNNNWPTTFGAGTKLELK

SEQ ID NO: 4374 - protein, 107 aa, Artificial Sequence
  source: /note="Description of Artificial Sequence: Synthetic light chain variable domain"
DILLTQSPVILSVSPGERVSFSCRASQSIGTNIHWYQQRTNGSPRLLIKYASESISGIPSRFSGSGSGTDFTLSINSVESEDIADYPCQQNNNWPTTFGQGTKLELK

SEQ ID NO: 4375 - protein, 107 aa, Artificial Sequence
  source: /note="Description of Artificial Sequence: Synthetic light chain variable domain"
DILLTQSPVILSVSPGERVSFSCRASQSIGTNIHWYQQRTNGSPRLLIKYASESISGIPSRFSGSGSGTDFTLSINSVESEDIADYRCQQNNNWPTTFGAGTKLELK

SEQ ID NO: 4376 - protein, 107 aa, Artificial Sequence
  source: /note="Description of Artificial Sequence: Synthetic light chain variable domain"
DILLTQSPVILSVSPGERVSFSCRASQSIGTNIHWYQQRTNGSPRLLIKYASESISGIPSRFSGSGSGTDFTLSINSVESEDIADYRCQQNNNWPTTFGQGTKLELK

SEQ ID NO: 4377 - protein, 107 aa, Artificial Sequence
  source: /note="Description of Artificial Sequence: Synthetic light chain variable domain"
DILLTQSPVILSVSPGERVSFSCRASQSIGTNIHWYQQRTNGSPRLLIKYASESISGIPSRFSGSGSGTDFTLSINSVESEDIADYSCQQNNNWPTTFGAGTKLELK

SEQ ID NO: 4378 - protein, 107 aa, Artificial Sequence
  source: /note="Description of Artificial Sequence: Synthetic light chain variable domain"
DILLTQSPVILSVSPGERVSFSCRASQSIGTNIHWYQQRTNGSPRLLIKYASESISGIPSRFSGSGSGTDFTLSINSVESEDIADYSCQQNNNWPTTFGQGTKLELK

SEQ ID NO: 4379 - protein, 107 aa, Artificial Sequence
  source: /note="Description of Artificial Sequence: Synthetic light chain variable domain"
DILLTQSPVILSVSPGERVSFSCRASQSIGTNIHWYQQRTNGSPRLLIKYASESISGIPSRFSGSGSGTDFTLSINSVESEDIADYTCQQNNNWPTTFGAGTKLELK

SEQ ID NO: 4380 - protein, 107 aa, Artificial Sequence
  source: /note="Description of Artificial Sequence: Synthetic light chain variable domain"
DILLTQSPVILSVSPGERVSFSCRASQSIGTNIHWYQQRTNGSPRLLIKYASESISGIPSRFSGSGSGTDFTLSINSVESEDIADYTCQQNNNWPTTFGQGTKLELK

SEQ ID NO: 4381 - protein, 107 aa, Artificial Sequence
  source: /note="Description of Artificial Sequence: Synthetic light chain variable domain"
DILLTQSPVILSVSPGERVSFSCRASQSIGTNIHWYQQRTNGSPRLLIKYASESISGIPSRFSGSGSGTDFTLSINSVESEDIADYVCQQNNNWPTTFGAGTKLELK

SEQ ID NO: 4382 - protein, 107 aa, Artificial Sequence
  source: /note="Description of Artificial Sequence: Synthetic light chain variable domain"
DILLTQSPVILSVSPGERVSFSCRASQSIGTNIHWYQQRTNGSPRLLIKYASESISGIPSRFSGSGSGTDFTLSINSVESEDIADYVCQQNNNWPTTFGQGTKLELK

SEQ ID NO: 4383 - protein, 107 aa, Artificial Sequence
  source: /note="Description of Artificial Sequence: Synthetic light chain variable domain"
DILLTQSPVILSVSPGERVSFSCRASQSIGTNIHWYQQRTNGSPRLLIKYASESISGIPSRFSGSGSGTDFTLSINSVESEDIADYWCQQNNNWPTTFGAGTKLELK

SEQ ID NO: 4384 - protein, 107 aa, Artificial Sequence
  source: /note="Description of Artificial Sequence: Synthetic light chain variable domain"
DILLTQSPVILSVSPGERVSFSCRASQSIGTNIHWYQQRTNGSPRLLIKYASESISGIPSRFSGSGSGTDFTLSINSVESEDIADYWCQQNNNWPTTFGQGTKLELK

SEQ ID NO: 4385 - protein, 107 aa, Artificial Sequence
  source: /note="Description of Artificial Sequence: Synthetic light chain variable domain"
DILLTQSPVILSVSPGERVSFSCRASQSIGTNIHWYQQRTNGSPRLLIKYASESISGIPSRFSGSGSGTDFTLSINSVESEDIADYYCEQNNNWPTTFGAGTKLELK

SEQ ID NO: 4386 - protein, 107 aa, Artificial Sequence
  source: /note="Description of Artificial Sequence: Synthetic light chain variable domain"
DILLTQSPVILSVSPGERVSFSCRASQSIGTNIHWYQQRTNGSPRLLIKYASESISGIPSRFSGSGSGTDFTLSINSVESEDIADYYCEQNNNWPTTFGQGTKLELK

SEQ ID NO: 4387 - protein, 107 aa, Artificial Sequence
  source: /note="Description of Artificial Sequence: Synthetic light chain variable domain"
DILLTQSPVILSVSPGERVSFSCRASQSIGTNIHWYQQRTNGSPRLLIKYASESISGIPSRFSGSGSGTDFTLSINSVESEDIADYYCQQANNWPTTFGAGTKLELK

SEQ ID NO: 4388 - protein, 107 aa, Artificial Sequence
  source: /note="Description of Artificial Sequence: Synthetic light chain variable domain"
DILLTQSPVILSVSPGERVSFSCRASQSIGTNIHWYQQRTNGSPRLLIKYASESISGIPSRFSGSGSGTDFTLSINSVESEDIADYYCQQANNWPTTFGQGTKLELK

SEQ ID NO: 4389 - protein, 107 aa, Artificial Sequence
  source: /note="Description of Artificial Sequence: Synthetic light chain variable domain"
DILLTQSPVILSVSPGERVSFSCRASQSIGTNIHWYQQRTNGSPRLLIKYASESISGIPSRFSGSGSGTDFTLSINSVESEDIADYYCQQCNNWPTTFGAGTKLELK

SEQ ID NO: 4390 - protein, 107 aa, Artificial Sequence
  source: /note="Description of Artificial Sequence: Synthetic light chain variable domain"
DILLTQSPVILSVSPGERVSFSCRASQSIGTNIHWYQQRTNGSPRLLIKYASESISGIPSRFSGSGSGTDFTLSINSVESEDIADYYCQQCNNWPTTFGQGTKLELK

SEQ ID NO: 4391 - protein, 107 aa, Artificial Sequence
  source: /note="Description of Artificial Sequence: Synthetic light chain variable domain"
DILLTQSPVILSVSPGERVSFSCRASQSIGTNIHWYQQRTNGSPRLLIKYASESISGIPSRFSGSGSGTDFTLSINSVESEDIADYYCQQHNNWPTTFGAGTKLELK

SEQ ID NO: 4392 - protein, 107 aa, Artificial Sequence
  source: /note="Description of Artificial Sequence: Synthetic light chain variable domain"
DILLTQSPVILSVSPGERVSFSCRASQSIGTNIHWYQQRTNGSPRLLIKYASESISGIPSRFSGSGSGTDFTLSINSVESEDIADYYCQQHNNWPTTFGQGTKLELK

SEQ ID NO: 4393 - protein, 107 aa, Artificial Sequence
  source: /note="Description of Artificial Sequence: Synthetic light chain variable domain"
DILLTQSPVILSVSPGERVSFSCRASQSIGTNIHWYQQRTNGSPRLLIKYASESISGIPSRFSGSGSGTDFTLSINSVESEDIADYYCQQINNWPTTFGAGTKLELK

SEQ ID NO: 4394 - protein, 107 aa, Artificial Sequence
  source: /note="Description of Artificial Sequence: Synthetic light chain variable domain"
DILLTQSPVILSVSPGERVSFSCRASQSIGTNIHWYQQRTNGSPRLLIKYASESISGIPSRFSGSGSGTDFTLSINSVESEDIADYYCQQINNWPTTFGQGTKLELK

SEQ ID NO: 4395 - protein, 107 aa, Artificial Sequence
  source: /note="Description of Artificial Sequence: Synthetic light chain variable domain"
DILLTQSPVILSVSPGERVSFSCRASQSIGTNIHWYQQRTNGSPRLLIKYASESISGIPSRFSGSGSGTDFTLSINSVESEDIADYYCQQLNNWPTTFGAGTKLELK

SEQ ID NO: 4396 - protein, 107 aa, Artificial Sequence
  source: /note="Description of Artificial Sequence: Synthetic light chain variable domain"
DILLTQSPVILSVSPGERVSFSCRASQSIGTNIHWYQQRTNGSPRLLIKYASESISGIPSRFSGSGSGTDFTLSINSVESEDIADYYCQQLNNWPTTFGQGTKLELK

SEQ ID NO: 4397 - protein, 107 aa, Artificial Sequence
  source: /note="Description of Artificial Sequence: Synthetic light chain variable domain"
DILLTQSPVILSVSPGERVSFSCRASQSIGTNIHWYQQRTNGSPRLLIKYASESISGIPSRFSGSGSGTDFTLSINSVESEDIADYYCQQMNNWPTTFGAGTKLELK

SEQ ID NO: 4398 - protein, 107 aa, Artificial Sequence
  source: /note="Description of Artificial Sequence: Synthetic light chain variable domain"
DILLTQSPVILSVSPGERVSFSCRASQSIGTNIHWYQQRTNGSPRLLIKYASESISGIPSRFSGSGSGTDFTLSINSVESEDIADYYCQQMNNWPTTFGQGTKLELK

SEQ ID NO: 4399 - protein, 107 aa, Artificial Sequence
  source: /note="Description of Artificial Sequence: Synthetic light chain variable domain"
DILLTQSPVILSVSPGERVSFSCRASQSIGTNIHWYQQRTNGSPRLLIKYASESISGIPSRFSGSGSGTDFTLSINSVESEDIADYYCQQNCNWPTTFGAGTKLELK

SEQ ID NO: 4400 - protein, 107 aa, Artificial Sequence
  source: /note="Description of Artificial Sequence: Synthetic light chain variable domain"
DILLTQSPVILSVSPGERVSFSCRASQSIGTNIHWYQQRTNGSPRLLIKYASESISGIPSRFSGSGSGTDFTLSINSVESEDIADYYCQQNCNWPTTFGQGTKLELK

SEQ ID NO: 4401 - protein, 107 aa, Artificial Sequence
  source: /note="Description of Artificial Sequence: Synthetic light chain variable domain"
DILLTQSPVILSVSPGERVSFSCRASQSIGTNIHWYQQRTNGSPRLLIKYASESISGIPSRFSGSGSGTDFTLSINSVESEDIADYYCQQNDNWPTTFGAGTKLELK

SEQ ID NO: 4402 - protein, 107 aa, Artificial Sequence
  source: /note="Description of Artificial Sequence: Synthetic light chain variable domain"
DILLTQSPVILSVSPGERVSFSCRASQSIGTNIHWYQQRTNGSPRLLIKYASESISGIPSRFSGSGSGTDFTLSINSVESEDIADYYCQQNDNWPTTFGQGTKLELK

SEQ ID NO: 4403 - protein, 107 aa, Artificial Sequence
  source: /note="Description of Artificial Sequence: Synthetic light chain variable domain"
DILLTQSPVILSVSPGERVSFSCRASQSIGTNIHWYQQRTNGSPRLLIKYASESISGIPSRFSGSGSGTDFTLSINSVESEDIADYYCQQNHNWPTTFGAGTKLELK

SEQ ID NO: 4404 - protein, 107 aa, Artificial Sequence
  source: /note="Description of Artificial Sequence: Synthetic light chain variable domain"
DILLTQSPVILSVSPGERVSFSCRASQSIGTNIHWYQQRTNGSPRLLIKYASESISGIPSRFSGSGSGTDFTLSINSVESEDIADYYCQQNHNWPTTFGQGTKLELK

SEQ ID NO: 4405 - protein, 107 aa, Artificial Sequence
  source: /note="Description of Artificial Sequence: Synthetic light chain variable domain"
DILLTQSPVILSVSPGERVSFSCRASQSIGTNIHWYQQRTNGSPRLLIKYASESISGIPSRFSGSGSGTDFTLSINSVESEDIADYYCQQNKNWPTTFGAGTKLELK

SEQ ID NO: 4406 - protein, 107 aa, Artificial Sequence
  source: /note="Description of Artificial Sequence: Synthetic light chain variable domain"
DILLTQSPVILSVSPGERVSFSCRASQSIGTNIHWYQQRTNGSPRLLIKYASESISGIPSRFSGSGSGTDFTLSINSVESEDIADYYCQQNKNWPTTFGQGTKLELK

SEQ ID NO: 4407 - protein, 107 aa, Artificial Sequence
  source: /note="Description of Artificial Sequence: Synthetic light chain variable domain"
DILLTQSPVILSVSPGERVSFSCRASQSIGTNIHWYQQRTNGSPRLLIKYASESISGIPSRFSGSGSGTDFTLSINSVESEDIADYYCQQNLNWPTTFGAGTKLELK

SEQ ID NO: 4408 - protein, 107 aa, Artificial Sequence
  source: /note="Description of Artificial Sequence: Synthetic light chain variable domain"
DILLTQSPVILSVSPGERVSFSCRASQSIGTNIHWYQQRTNGSPRLLIKYASESISGIPSRFSGSGSGTDFTLSINSVESEDIADYYCQQNLNWPTTFGQGTKLELK

SEQ ID NO: 4409 - protein, 107 aa, Artificial Sequence
  source: /note="Description of Artificial Sequence: Synthetic light chain variable domain"
DILLTQSPVILSVSPGERVSFSCRASQSIGTNIHWYQQRTNGSPRLLIKYASESISGIPSRFSGSGSGTDFTLSINSVESEDIADYYCQQNMNWPTTFGAGTKLELK

SEQ ID NO: 4410 - protein, 107 aa, Artificial Sequence
  source: /note="Description of Artificial Sequence: Synthetic light chain variable domain"
DILLTQSPVILSVSPGERVSFSCRASQSIGTNIHWYQQRTNGSPRLLIKYASESISGIPSRFSGSGSGTDFTLSINSVESEDIADYYCQQNMNWPTTFGQGTKLELK

SEQ ID NO: 4411 - protein, 107 aa, Artificial Sequence
  source: /note="Description of Artificial Sequence: Synthetic light chain variable domain"
DILLTQSPVILSVSPGERVSFSCRASQSIGTNIHWYQQRTNGSPRLLIKYASESISGIPSRFSGSGSGTDFTLSINSVESEDIADYYCQQNNNWPCTFGAGTKLELK

SEQ ID NO: 4412 - protein, 107 aa, Artificial Sequence
  source: /note="Description of Artificial Sequence: Synthetic light chain variable domain"
DILLTQSPVILSVSPGERVSFSCRASQSIGTNIHWYQQRTNGSPRLLIKYASESISGIPSRFSGSGSGTDFTLSINSVESEDIADYYCQQNNNWPCTFGQGTKLELK

SEQ ID NO: 4413 - protein, 107 aa, Artificial Sequence
  source: /note="Description of Artificial Sequence: Synthetic light chain variable domain"
DILLTQSPVILSVSPGERVSFSCRASQSIGTNIHWYQQRTNGSPRLLIKYASESISGIPSRFSGSGSGTDFTLSINSVESEDIADYYCQQNNNWPLTFGAGTKLELK

SEQ ID NO: 4414 - protein, 107 aa, Artificial Sequence
  source: /note="Description of Artificial Sequence: Synthetic light chain variable domain"
DILLTQSPVILSVSPGERVSFSCRASQSIGTNIHWYQQRTNGSPRLLIKYASESISGIPSRFSGSGSGTDFTLSINSVESEDIADYYCQQNNNWPLTFGQGTKLELK

SEQ ID NO: 4415 - protein, 107 aa, Artificial Sequence
  source: /note="Description of Artificial Sequence: Synthetic light chain variable domain"
DILLTQSPVILSVSPGERVSFSCRASQSIGTNIHWYQQRTNGSPRLLIKYASESISGIPSRFSGSGSGTDFTLSINSVESEDIADYYCQQNNNWPMTFGAGTKLELK

SEQ ID NO: 4416 - protein, 107 aa, Artificial Sequence
  source: /note="Description of Artificial Sequence: Synthetic light chain variable domain"
DILLTQSPVILSVSPGERVSFSCRASQSIGTNIHWYQQRTNGSPRLLIKYASESISGIPSRFSGSGSGTDFTLSINSVESEDIADYYCQQNNNWPMTFGQGTKLELK

SEQ ID NO: 4417 - protein, 107 aa, Artificial Sequence
  source: /note="Description of Artificial Sequence: Synthetic light chain variable domain"
DILLTQSPVILSVSPGERVSFSCRASQSIGTNIHWYQQRTNGSPRLLIKYASESISGIPSRFSGSGSGTDFTLSINSVESEDIADYYCQQNNNWPTAFGAGTKLELK

SEQ ID NO: 4418 - protein, 107 aa, Artificial Sequence
  source: /note="Description of Artificial Sequence: Synthetic light chain variable domain"
DILLTQSPVILSVSPGERVSFSCRASQSIGTNIHWYQQRTNGSPRLLIKYASESISGIPSRFSGSGSGTDFTLSINSVESEDIADYYCQQNNNWPTAFGQGTKLELK

SEQ ID NO: 4419 - protein, 107 aa, Artificial Sequence
  source: /note="Description of Artificial Sequence: Synthetic light chain variable domain"
DILLTQSPVILSVSPGERVSFSCRASQSIGTNIHWYQQRTNGSPRLLIKYASESISGIPSRFSGSGSGTDFTLSINSVESEDIADYYCQQNNNWPTDFGAGTKLELK

SEQ ID NO: 4420 - protein, 107 aa, Artificial Sequence
  source: /note="Description of Artificial Sequence: Synthetic light chain variable domain"
DILLTQSPVILSVSPGERVSFSCRASQSIGTNIHWYQQRTNGSPRLLIKYASESISGIPSRFSGSGSGTDFTLSINSVESEDIADYYCQQNNNWPTDFGQGTKLELK

SEQ ID NO: 4421 - protein, 107 aa, Artificial Sequence
  source: /note="Description of Artificial Sequence: Synthetic light chain variable domain"
DILLTQSPVILSVSPGERVSFSCRASQSIGTNIHWYQQRTNGSPRLLIKYASESISGIPSRFSGSGSGTDFTLSINSVESEDIADYYCQQNNNWPTGFGAGTKLELK

SEQ ID NO: 4422 - protein, 107 aa, Artificial Sequence
  source: /note="Description of Artificial Sequence: Synthetic light chain variable domain"
DILLTQSPVILSVSPGERVSFSCRASQSIGTNIHWYQQRTNGSPRLLIKYASESISGIPSRFSGSGSGTDFTLSINSVESEDIADYYCQQNNNWPTGFGQGTKLELK

SEQ ID NO: 4423 - protein, 107 aa, Artificial Sequence
  source: /note="Description of Artificial Sequence: Synthetic light chain variable domain"
DILLTQSPVILSVSPGERVSFSCRASQSIGTNIHWYQQRTNGSPRLLIKYASESISGIPSRFSGSGSGTDFTLSINSVESEDIADYYCQQNNNWPTKFGAGTKLELK

SEQ ID NO: 4424 - protein, 107 aa, Artificial Sequence
  source: /note="Description of Artificial Sequence: Synthetic light chain variable domain"
DILLTQSPVILSVSPGERVSFSCRASQSIGTNIHWYQQRTNGSPRLLIKYASESISGIPSRFSGSGSGTDFTLSINSVESEDIADYYCQQNNNWPTKFGQGTKLELK

SEQ ID NO: 4425 - protein, 107 aa, Artificial Sequence
  source: /note="Description of Artificial Sequence: Synthetic light chain variable domain"
DILLTQSPVILSVSPGERVSFSCRASQSIGTNIHWYQQRTNGSPRLLIKYASESISGIPSRFSGSGSGTDFTLSINSVESEDIADYYCQQNNNWPTLFGAGTKLELK

SEQ ID NO: 4426 - protein, 107 aa, Artificial Sequence
  source: /note="Description of Artificial Sequence: Synthetic light chain variable domain"
DILLTQSPVILSVSPGERVSFSCRASQSIGTNIHWYQQRTNGSPRLLIKYASESISGIPSRFSGSGSGTDFTLSINSVESEDIADYYCQQNNNWPTLFGQGTKLELK

SEQ ID NO: 4427 - protein, 107 aa, Artificial Sequence
  source: /note="Description of Artificial Sequence: Synthetic light chain variable domain"
DILLTQSPVILSVSPGERVSFSCRASQSIGTNIHWYQQRTNGSPRLLIKYASESISGIPSRFSGSGSGTDFTLSINSVESEDIADYYCQQNNNWPTQFGAGTKLELK

SEQ ID NO: 4428 - protein, 107 aa, Artificial Sequence
  source: /note="Description of Artificial Sequence: Synthetic light chain variable domain"
DILLTQSPVILSVSPGERVSFSCRASQSIGTNIHWYQQRTNGSPRLLIKYASESISGIPSRFSGSGSGTDFTLSINSVESEDIADYYCQQNNNWPTQFGQGTKLELK

SEQ ID NO: 4429 - protein, 107 aa, Artificial Sequence
  source: /note="Description of Artificial Sequence: Synthetic light chain variable domain"
DILLTQSPVILSVSPGERVSFSCRASQSIGTNIHWYQQRTNGSPRLLIKYASESISGIPSRFSGSGSGTDFTLSINSVESEDIADYYCQQNNNWPTRFGAGTKLELK

SEQ ID NO: 4430 - protein, 107 aa, Artificial Sequence
  source: /note="Description of Artificial Sequence: Synthetic light chain variable domain"
DILLTQSPVILSVSPGERVSFSCRASQSIGTNIHWYQQRTNGSPRLLIKYASESISGIPSRFSGSGSGTDFTLSINSVESEDIADYYCQQNNNWPTRFGQGTKLELK

SEQ ID NO: 4431 - protein, 107 aa, Artificial Sequence
  source: /note="Description of Artificial Sequence: Synthetic light chain variable domain"
DILLTQSPVILSVSPGERVSFSCRASQSIGTNIHWYQQRTNGSPRLLIKYASESISGIPSRFSGSGSGTDFTLSINSVESEDIADYYCQQNNNWPTSFGAGTKLELK

SEQ ID NO: 4432 - protein, 107 aa, Artificial Sequence
  source: /note="Description of Artificial Sequence: Synthetic light chain variable domain"
DILLTQSPVILSVSPGERVSFSCRASQSIGTNIHWYQQRTNGSPRLLIKYASESISGIPSRFSGSGSGTDFTLSINSVESEDIADYYCQQNNNWPTSFGQGTKLELK

SEQ ID NO: 4433 - protein, 107 aa, Artificial Sequence
  source: /note="Description of Artificial Sequence: Synthetic light chain variable domain"
DILLTQSPVILSVSPGERVSFSCRASQSIGTNIHWYQQRTNGSPRLLIKYASESISGIPSRFSGSGSGTDFTLSINSVESEDIADYYCQQNNNWPTTAGAGTKLELK

SEQ ID NO: 4434 - protein, 107 aa, Artificial Sequence
  source: /note="Description of Artificial Sequence: Synthetic light chain variable domain"
DILLTQSPVILSVSPGERVSFSCRASQSIGTNIHWYQQRTNGSPRLLIKYASESISGIPSRFSGSGSGTDFTLSINSVESEDIADYYCQQNNNWPTTAGQGTKLELK

SEQ ID NO: 4435 - protein, 107 aa, Artificial Sequence
  source: /note="Description of Artificial Sequence: Synthetic light chain variable domain"
DILLTQSPVILSVSPGERVSFSCRASQSIGTNIHWYQQRTNGSPRLLIKYASESISGIPSRFSGSGSGTDFTLSINSVESEDIADYYCQQNNNWPTTFDAGTKLELK

SEQ ID NO: 4436 - protein, 107 aa, Artificial Sequence
  source: /note="Description of Artificial Sequence: Synthetic light chain variable domain"
DILLTQSPVILSVSPGERVSFSCRASQSIGTNIHWYQQRTNGSPRLLIKYASESISGIPSRFSGSGSGTDFTLSINSVESEDIADYYCQQNNNWPTTFDQGTKLELK

SEQ ID NO: 4437 - protein, 107 aa, Artificial Sequence
  source: /note="Description of Artificial Sequence: Synthetic light chain variable domain"
DILLTQSPVILSVSPGERVSFSCRASQSIGTNIHWYQQRTNGSPRLLIKYASESISGIPSRFSGSGSGTDFTLSINSVESEDIADYYCQQNNNWPTTFEAGTKLELK

SEQ ID NO: 4438 - protein, 107 aa, Artificial Sequence
  source: /note="Description of Artificial Sequence: Synthetic light chain variable domain"
DILLTQSPVILSVSPGERVSFSCRASQSIGTNIHWYQQRTNGSPRLLIKYASESISGIPSRFSGSGSGTDFTLSINSVESEDIADYYCQQNNNWPTTFEQGTKLELK

SEQ ID NO: 4439 - protein, 107 aa, Artificial Sequence
  source: /note="Description of Artificial Sequence: Synthetic light chain variable domain"
DILLTQSPVILSVSPGERVSFSCRASQSIGTNIHWYQQRTNGSPRLLIKYASESISGIPSRFSGSGSGTDFTLSINSVESEDIADYYCQQNNNWPTTFFAGTKLELK

SEQ ID NO: 4440 - protein, 107 aa, Artificial Sequence
  source: /note="Description of Artificial Sequence: Synthetic light chain variable domain"
DILLTQSPVILSVSPGERVSFSCRASQSIGTNIHWYQQRTNGSPRLLIKYASESISGIPSRFSGSGSGTDFTLSINSVESEDIADYYCQQNNNWPTTFFQGTKLELK

SEQ ID NO: 4441 - protein, 107 aa, Artificial Sequence
  source: /note="Description of Artificial Sequence: Synthetic light chain variable domain"
DILLTQSPVILSVSPGERVSFSCRASQSIGTNIHWYQQRTNGSPRLLIKYASESISGIPSRFSGSGSGTDFTLSINSVESEDIADYYCQQNNNWPTTFGDGTKLELK

SEQ ID NO: 4442 - protein, 107 aa, Artificial Sequence
  source: /note="Description of Artificial Sequence: Synthetic light chain variable domain"
DILLTQSPVILSVSPGERVSFSCRASQSIGTNIHWYQQRTNGSPRLLIKYASESISGIPSRFSGSGSGTDFTLSINSVESEDIADYYCQQNNNWPTTFGEGTKLELK

SEQ ID NO: 4443 - protein, 107 aa, Artificial Sequence
  source: /note="Description of Artificial Sequence: Synthetic light chain variable domain"
DILLTQSPVILSVSPGERVSFSCRASQSIGTNIHWYQQRTNGSPRLLIKYASESISGIPSRFSGSGSGTDFTLSINSVESEDIADYYCQQNNNWPTTFGFGTKLELK

SEQ ID NO: 4444 - protein, 107 aa, Artificial Sequence
  source: /note="Description of Artificial Sequence: Synthetic light chain variable domain"
DILLTQSPVILSVSPGERVSFSCRASQSIGTNIHWYQQRTNGSPRLLIKYASESISGIPSRFSGSGSGTDFTLSINSVESEDIADYYCQQNNNWPTTFGHGTKLELK

SEQ ID NO: 4445 - protein, 107 aa, Artificial Sequence
  source: /note="Description of Artificial Sequence: Synthetic light chain variable domain"
DILLTQSPVILSVSPGERVSFSCRASQSIGTNIHWYQQRTNGSPRLLIKYASESISGIPSRFSGSGSGTDFTLSINSVESEDIADYYCQQNNNWPTTFGIGTKLELK

SEQ ID NO: 4446 - protein, 107 aa, Artificial Sequence
  source: /note="Description of Artificial Sequence: Synthetic light chain variable domain"
DILLTQSPVILSVSPGERVSFSCRASQSIGTNIHWYQQRTNGSPRLLIKYASESISGIPSRFSGSGSGTDFTLSINSVESEDIADYYCQQNNNWPTTFGKGTKLELK

SEQ ID NO: 4447 - protein, 107 aa, Artificial Sequence
  source: /note="Description of Artificial Sequence: Synthetic light chain variable domain"
DILLTQSPVILSVSPGERVSFSCRASQSIGTNIHWYQQRTNGSPRLLIKYASESISGIPSRFSGSGSGTDFTLSINSVESEDIADYYCQQNNNWPTTFGMGTKLELK

SEQ ID NO: 4448 - protein, 107 aa, Artificial Sequence
  source: /note="Description of Artificial Sequence: Synthetic light chain variable domain"
DILLTQSPVILSVSPGERVSFSCRASQSIGTNIHWYQQRTNGSPRLLIKYASESISGIPSRFSGSGSGTDFTLSINSVESEDIADYYCQQNNNWPTTFGNGTKLELK

SEQ ID NO: 4449 - protein, 107 aa, Artificial Sequence
  source: /note="Description of Artificial Sequence: Synthetic light chain variable domain"
DILLTQSPVILSVSPGERVSFSCRASQSIGTNIHWYQQRTNGSPRLLIKYASESISGIPSRFSGSGSGTDFTLSINSVESEDIADYYCQQNNNWPTTFGPGTKLELK

SEQ ID NO: 4450 - protein, 107 aa, Artificial Sequence
  source: /note="Description of Artificial Sequence: Synthetic light chain variable domain"
DILLTQSPVILSVSPGERVSFSCRASQSIGTNIHWYQQRTNGSPRLLIKYASESISGIPSRFSGSGSGTDFTLSINSVESEDIADYYCQQNNNWPTTFGRGTKLELK

SEQ ID NO: 4451 - protein, 107 aa, Artificial Sequence
  source: /note="Description of Artificial Sequence: Synthetic light chain variable domain"
DILLTQSPVILSVSPGERVSFSCRASQSIGTNIHWYQQRTNGSPRLLIKYASESISGIPSRFSGSGSGTDFTLSINSVESEDIADYYCQQNNNWPTTFGTGTKLELK

SEQ ID NO: 4452 - protein, 107 aa, Artificial Sequence
  source: /note="Description of Artificial Sequence: Synthetic light chain variable domain"
DILLTQSPVILSVSPGERVSFSCRASQSIGTNIHWYQQRTNGSPRLLIKYASESISGIPSRFSGSGSGTDFTLSINSVESEDIADYYCQQNNNWPTTFGVGTKLELK

SEQ ID NO: 4453 - protein, 107 aa, Artificial Sequence
  source: /note="Description of Artificial Sequence: Synthetic light chain variable domain"
DILLTQSPVILSVSPGERVSFSCRASQSIGTNIHWYQQRTNGSPRLLIKYASESISGIPSRFSGSGSGTDFTLSINSVESEDIADYYCQQNNNWPTTFGWGTKLELK

SEQ ID NO: 4454 - protein, 107 aa, Artificial Sequence
  source: /note="Description of Artificial Sequence: Synthetic light chain variable domain"
DILLTQSPVILSVSPGERVSFSCRASQSIGTNIHWYQQRTNGSPRLLIKYASESISGIPSRFSGSGSGTDFTLSINSVESEDIADYYCQQNNNWPTTFGYGTKLELK

SEQ ID NO: 4455 - protein, 107 aa, Artificial Sequence
  source: /note="Description of Artificial Sequence: Synthetic light chain variable domain"
DILLTQSPVILSVSPGERVSFSCRASQSIGTNIHWYQQRTNGSPRLLIKYASESISGIPSRFSGSGSGTDFTLSINSVESEDIADYYCQQNNNWPTTFHAGTKLELK

SEQ ID NO: 4456 - protein, 107 aa, Artificial Sequence
  source: /note="Description of Artificial Sequence: Synthetic light chain variable domain"
DILLTQSPVILSVSPGERVSFSCRASQSIGTNIHWYQQRTNGSPRLLIKYASESISGIPSRFSGSGSGTDFTLSINSVESEDIADYYCQQNNNWPTTFHQGTKLELK

SEQ ID NO: 4457 - protein, 107 aa, Artificial Sequence
  source: /note="Description of Artificial Sequence: Synthetic light chain variable domain"
DILLTQSPVILSVSPGERVSFSCRASQSIGTNIHWYQQRTNGSPRLLIKYASESISGIPSRFSGSGSGTDFTLSINSVESEDIADYYCQQNNNWPTTFIAGTKLELK

SEQ ID NO: 4458 - protein, 107 aa, Artificial Sequence
  source: /note="Description of Artificial Sequence: Synthetic light chain variable domain"
DILLTQSPVILSVSPGERVSFSCRASQSIGTNIHWYQQRTNGSPRLLIKYASESISGIPSRFSGSGSGTDFTLSINSVESEDIADYYCQQNNNWPTTFIQGTKLELK

SEQ ID NO: 4459 - protein, 107 aa, Artificial Sequence
  source: /note="Description of Artificial Sequence: Synthetic light chain variable domain"
DILLTQSPVILSVSPGERVSFSCRASQSIGTNIHWYQQRTNGSPRLLIKYASESISGIPSRFSGSGSGTDFTLSINSVESEDIADYYCQQNNNWPTTFKAGTKLELK

SEQ ID NO: 4460 - protein, 107 aa, Artificial Sequence
  source: /note="Description of Artificial Sequence: Synthetic light chain variable domain"
DILLTQSPVILSVSPGERVSFSCRASQSIGTNIHWYQQRTNGSPRLLIKYASESISGIPSRFSGSGSGTDFTLSINSVESEDIADYYCQQNNNWPTTFKQGTKLELK

SEQ ID NO: 4461 - protein, 107 aa, Artificial Sequence
  source: /note="Description of Artificial Sequence: Synthetic light chain variable domain"
DILLTQSPVILSVSPGERVSFSCRASQSIGTNIHWYQQRTNGSPRLLIKYASESISGIPSRFSGSGSGTDFTLSINSVESEDIADYYCQQNNNWPTTFLAGTKLELK

SEQ ID NO: 4462 - protein, 107 aa, Artificial Sequence
  source: /note="Description of Artificial Sequence: Synthetic light chain variable domain"
DILLTQSPVILSVSPGERVSFSCRASQSIGTNIHWYQQRTNGSPRLLIKYASESISGIPSRFSGSGSGTDFTLSINSVESEDIADYYCQQNNNWPTTFLQGTKLELK

SEQ ID NO: 4463 - protein, 107 aa, Artificial Sequence
  source: /note="Description of Artificial Sequence: Synthetic light chain variable domain"
DILLTQSPVILSVSPGERVSFSCRASQSIGTNIHWYQQRTNGSPRLLIKYASESISGIPSRFSGSGSGTDFTLSINSVESEDIADYYCQQNNNWPTTFMAGTKLELK

SEQ ID NO: 4464 - protein, 107 aa, Artificial Sequence
  source: /note="Description of Artificial Sequence: Synthetic light chain variable domain"
DILLTQSPVILSVSPGERVSFSCRASQSIGTNIHWYQQRTNGSPRLLIKYASESISGIPSRFSGSGSGTDFTLSINSVESEDIADYYCQQNNNWPTTFMQGTKLELK

SEQ ID NO: 4465 - protein, 107 aa, Artificial Sequence
  source: /note="Description of Artificial Sequence: Synthetic light chain variable domain"
DILLTQSPVILSVSPGERVSFSCRASQSIGTNIHWYQQRTNGSPRLLIKYASESISGIPSRFSGSGSGTDFTLSINSVESEDIADYYCQQNNNWPTTFNAGTKLELK

SEQ ID NO: 4466 - protein, 107 aa, Artificial Sequence
  source: /note="Description of Artificial Sequence: Synthetic light chain variable domain"
DILLTQSPVILSVSPGERVSFSCRASQSIGTNIHWYQQRTNGSPRLLIKYASESISGIPSRFSGSGSGTDFTLSINSVESEDIADYYCQQNNNWPTTFNQGTKLELK

SEQ ID NO: 4467 - protein, 107 aa, Artificial Sequence
  source: /note="Description of Artificial Sequence: Synthetic light chain variable domain"
DILLTQSPVILSVSPGERVSFSCRASQSIGTNIHWYQQRTNGSPRLLIKYASESISGIPSRFSGSGSGTDFTLSINSVESEDIADYYCQQNNNWPTTFSAGTKLELK

SEQ ID NO: 4468 - protein, 107 aa, Artificial Sequence
  source: /note="Description of Artificial Sequence: Synthetic light chain variable domain"
DILLTQSPVILSVSPGERVSFSCRASQSIGTNIHWYQQRTNGSPRLLIKYASESISGIPSRFSGSGSGTDFTLSINSVESEDIADYYCQQNNNWPTTFSQGTKLELK

SEQ ID NO: 4469 - protein, 107 aa, Artificial Sequence
  source: /note="Description of Artificial Sequence: Synthetic light chain variable domain"
DILLTQSPVILSVSPGERVSFSCRASQSIGTNIHWYQQRTNGSPRLLIKYASESISGIPSRFSGSGSGTDFTLSINSVESEDIADYYCQQNNNWPTTFTAGTKLELK

SEQ ID NO: 4470 - protein, 107 aa, Artificial Sequence
  source: /note="Description of Artificial Sequence: Synthetic light chain variable domain"
DILLTQSPVILSVSPGERVSFSCRASQSIGTNIHWYQQRTNGSPRLLIKYASESISGIPSRFSGSGSGTDFTLSINSVESEDIADYYCQQNNNWPTTFTQGTKLELK

SEQ ID NO: 4471 - protein, 107 aa, Artificial Sequence
  source: /note="Description of Artificial Sequence: Synthetic light chain variable domain"
DILLTQSPVILSVSPGERVSFSCRASQSIGTNIHWYQQRTNGSPRLLIKYASESISGIPSRFSGSGSGTDFTLSINSVESEDIADYYCQQNNNWPTTFVAGTKLELK

SEQ ID NO: 4472 - protein, 107 aa, Artificial Sequence
  source: /note="Description of Artificial Sequence: Synthetic light chain variable domain"
DILLTQSPVILSVSPGERVSFSCRASQSIGTNIHWYQQRTNGSPRLLIKYASESISGIPSRFSGSGSGTDFTLSINSVESEDIADYYCQQNNNWPTTFVQGTKLELK

SEQ ID NO: 4473 - protein, 107 aa, Artificial Sequence
  source: /note="Description of Artificial Sequence: Synthetic light chain variable domain"
DILLTQSPVILSVSPGERVSFSCRASQSIGTNIHWYQQRTNGSPRLLIKYASESISGIPSRFSGSGSGTDFTLSINSVESEDIADYYCQQNNNWPTTMGAGTKLELK

SEQ ID NO: 4474 - protein, 107 aa, Artificial Sequence
  source: /note="Description of Artificial Sequence: Synthetic light chain variable domain"
DILLTQSPVILSVSPGERVSFSCRASQSIGTNIHWYQQRTNGSPRLLIKYASESISGIPSRFSGSGSGTDFTLSINSVESEDIADYYCQQNNNWPTTMGQGTKLELK

SEQ ID NO: 4475 - protein, 107 aa, Artificial Sequence
  source: /note="Description of Artificial Sequence: Synthetic light chain variable domain"
DILLTQSPVILSVSPGERVSFSCRASQSIGTNIHWYQQRTNGSPRLLIKYASESISGIPSRFSGSGSGTDFTLSINSVESEDIADYYCQQNNNWPTTSGAGTKLELK

SEQ ID NO: 4476 - protein, 107 aa, Artificial Sequence
  source: /note="Description of Artificial Sequence: Synthetic light chain variable domain"
DILLTQSPVILSVSPGERVSFSCRASQSIGTNIHWYQQRTNGSPRLLIKYASESISGIPSRFSGSGSGTDFTLSINSVESEDIADYYCQQNNNWPTTSGQGTKLELK

SEQ ID NO: 4477 - protein, 107 aa, Artificial Sequence
  source: /note="Description of Artificial Sequence: Synthetic light chain variable domain"
DILLTQSPVILSVSPGERVSFSCRASQSIGTNIHWYQQRTNGSPRLLIKYASESISGIPSRFSGSGSGTDFTLSINSVESEDIADYYCQQNNNWPTTVGAGTKLELK

SEQ ID NO: 4478 - protein, 107 aa, Artificial Sequence
  source: /note="Description of Artificial Sequence: Synthetic light chain variable domain"
DILLTQSPVILSVSPGERVSFSCRASQSIGTNIHWYQQRTNGSPRLLIKYASESISGIPSRFSGSGSGTDFTLSINSVESEDIADYYCQQNNNWPTTVGQGTKLELK

SEQ ID NO: 4479 - protein, 107 aa, Artificial Sequence
  source: /note="Description of Artificial Sequence: Synthetic light chain variable domain"
DILLTQSPVILSVSPGERVSFSCRASQSIGTNIHWYQQRTNGSPRLLIKYASESISGIPSRFSGSGSGTDFTLSINSVESEDIADYYCQQNNNWPTTYGAGTKLELK

SEQ ID NO: 4480 - protein, 107 aa, Artificial Sequence
  source: /note="Description of Artificial Sequence: Synthetic light chain variable domain"
DILLTQSPVILSVSPGERVSFSCRASQSIGTNIHWYQQRTNGSPRLLIKYASESISGIPSRFSGSGSGTDFTLSINSVESEDIADYYCQQNNNWPTTYGQGTKLELK

SEQ ID NO: 4481 - protein, 107 aa, Artificial Sequence
  source: /note="Description of Artificial Sequence: Synthetic light chain variable domain"
DILLTQSPVILSVSPGERVSFSCRASQSIGTNIHWYQQRTNGSPRLLIKYASESISGIPSRFSGSGSGTDFTLSINSVESEDIADYYCQQNNNWPTVFGAGTKLELK

SEQ ID NO: 4482 - protein, 107 aa, Artificial Sequence
  source: /note="Description of Artificial Sequence: Synthetic light chain variable domain"
DILLTQSPVILSVSPGERVSFSCRASQSIGTNIHWYQQRTNGSPRLLIKYASESISGIPSRFSGSGSGTDFTLSINSVESEDIADYYCQQNNNWPTVFGQGTKLELK

SEQ ID NO: 4483 - protein, 107 aa, Artificial Sequence
  source: /note="Description of Artificial Sequence: Synthetic light chain variable domain"
DILLTQSPVILSVSPGERVSFSCRASQSIGTNIHWYQQRTNGSPRLLIKYASESISGIPSRFSGSGSGTDFTLSINSVESEDIADYYCQQNNNWPVTFGAGTKLELK

SEQ ID NO: 4484 - protein, 107 aa, Artificial Sequence
  source: /note="Description of Artificial Sequence: Synthetic light chain variable domain"
DILLTQSPVILSVSPGERVSFSCRASQSIGTNIHWYQQRTNGSPRLLIKYASESISGIPSRFSGSGSGTDFTLSINSVESEDIADYYCQQNNNWPVTFGQGTKLELK

SEQ ID NO: 4485 - protein, 107 aa, Artificial Sequence
  source: /note="Description of Artificial Sequence: Synthetic light chain variable domain"
DILLTQSPVILSVSPGERVSFSCRASQSIGTNIHWYQQRTNGSPRLLIKYASESISGIPSRFSGSGSGTDFTLSINSVESEDIADYYCQQNNTWPTTFGAGTKLELK

SEQ ID NO: 4486 - protein, 107 aa, Artificial Sequence
  source: /note="Description of Artificial Sequence: Synthetic light chain variable domain"
DILLTQSPVILSVSPGERVSFSCRASQSIGTNIHWYQQRTNGSPRLLIKYASESISGIPSRFSGSGSGTDFTLSINSVESEDIADYYCQQNNTWPTTFGQGTKLELK

SEQ ID NO: 4487 - protein, 107 aa, Artificial Sequence
  source: /note="Description of Artificial Sequence: Synthetic light chain variable domain"
DILLTQSPVILSVSPGERVSFSCRASQSIGTNIHWYQQRTNGSPRLLIKYASESISGIPSRFSGSGSGTDFTLSINSVESEDIADYYCQQNRNWPTTFGAGTKLELK

SEQ ID NO: 4488 - protein, 107 aa, Artificial Sequence
  source: /note="Description of Artificial Sequence: Synthetic light chain variable domain"
DILLTQSPVILSVSPGERVSFSCRASQSIGTNIHWYQQRTNGSPRLLIKYASESISGIPSRFSGSGSGTDFTLSINSVESEDIADYYCQQNRNWPTTFGQGTKLELK

SEQ ID NO: 4489 - protein, 107 aa, Artificial Sequence
  source: /note="Description of Artificial Sequence: Synthetic light chain variable domain"
DILLTQSPVILSVSPGERVSFSCRASQSIGTNIHWYQQRTNGSPRLLIKYASESISGIPSRFSGSGSGTDFTLSINSVESEDIADYYCQQNSNWPTTFGAGTKLELK

SEQ ID NO: 4490 - protein, 107 aa, Artificial Sequence
  source: /note="Description of Artificial Sequence: Synthetic light chain variable domain"
DILLTQSPVILSVSPGERVSFSCRASQSIGTNIHWYQQRTNGSPRLLIKYASESISGIPSRFSGSGSGTDFTLSINSVESEDIADYYCQQNSNWPTTFGQGTKLELK

SEQ ID NO: 4491 - protein, 107 aa, Artificial Sequence
  source: /note="Description of Artificial Sequence: Synthetic light chain variable domain"
DILLTQSPVILSVSPGERVSFSCRASQSIGTNIHWYQQRTNGSPRLLIKYASESISGIPSRFSGSGSGTDFTLSINSVESEDIADYYCQQNTNWPTTFGAGTKLELK

SEQ ID NO: 4492 - protein, 107 aa, Artificial Sequence
  source: /note="Description of Artificial Sequence: Synthetic light chain variable domain"
DILLTQSPVILSVSPGERVSFSCRASQSIGTNIHWYQQRTNGSPRLLIKYASESISGIPSRFSGSGSGTDFTLSINSVESEDIADYYCQQNTNWPTTFGQGTKLELK

SEQ ID NO: 4493 - protein, 107 aa, Artificial Sequence
  source: /note="Description of Artificial Sequence: Synthetic light chain variable domain"
DILLTQSPVILSVSPGERVSFSCRASQSIGTNIHWYQQRTNGSPRLLIKYASESISGIPSRFSGSGSGTDFTLSINSVESEDIADYYCQQNVNWPTTFGAGTKLELK

SEQ ID NO: 4494 - protein, 107 aa, Artificial Sequence
  source: /note="Description of Artificial Sequence: Synthetic light chain variable domain"
DILLTQSPVILSVSPGERVSFSCRASQSIGTNIHWYQQRTNGSPRLLIKYASESISGIPSRFSGSGSGTDFTLSINSVESEDIADYYCQQNVNWPTTFGQGTKLELK

SEQ ID NO: 4495 - protein, 107 aa, Artificial Sequence
  source: /note="Description of Artificial Sequence: Synthetic light chain variable domain"
DILLTQSPVILSVSPGERVSFSCRASQSIGTNIHWYQQRTNGSPRLLIKYASESISGIPSRFSGSGSGTDFTLSINSVESEDIADYYCQQNWNWPTTFGAGTKLELK

SEQ ID NO: 4496 - protein, 107 aa, Artificial Sequence
  source: /note="Description of Artificial Sequence: Synthetic light chain variable domain"
DILLTQSPVILSVSPGERVSFSCRASQSIGTNIHWYQQRTNGSPRLLIKYASESISGIPSRFSGSGSGTDFTLSINSVESEDIADYYCQQNWNWPTTFGQGTKLELK

SEQ ID NO: 4497 - protein, 107 aa, Artificial Sequence
  source: /note="Description of Artificial Sequence: Synthetic light chain variable domain"
DILLTQSPVILSVSPGERVSFSCRASQSIGTNIHWYQQRTNGSPRLLIKYASESISGIPSRFSGSGSGTDFTLSINSVESEDIADYYCQQNYNWPTTFGAGTKLELK

SEQ ID NO: 4498 - protein, 107 aa, Artificial Sequence
  source: /note="Description of Artificial Sequence: Synthetic light chain variable domain"
DILLTQSPVILSVSPGERVSFSCRASQSIGTNIHWYQQRTNGSPRLLIKYASESISGIPSRFSGSGSGTDFTLSINSVESEDIADYYCQQNYNWPTTFGQGTKLELK

SEQ ID NO: 4499 - protein, 107 aa, Artificial Sequence
  source: /note="Description of Artificial Sequence: Synthetic light chain variable domain"
DILLTQSPVILSVSPGERVSFSCRASQSIGTNIHWYQQRTNGSPRLLIKYASESISGIPSRFSGSGSGTDFTLSINSVESEDIADYYCQQRNNWPTTFGAGTKLELK

SEQ ID NO: 4500 - protein, 107 aa, Artificial Sequence
  source: /note="Description of Artificial Sequence: Synthetic light chain variable domain"
DILLTQSPVILSVSPGERVSFSCRASQSIGTNIHWYQQRTNGSPRLLIKYASESISGIPSRFSGSGSGTDFTLSINSVESEDIADYYCQQRNNWPTTFGQGTKLELK

SEQ ID NO: 4501 - protein, 107 aa, Artificial Sequence
  source: /note="Description of Artificial Sequence: Synthetic light chain variable domain"
DILLTQSPVILSVSPGERVSFSCRASQSIGTNIHWYQQRTNGSPRLLIKYASESISGIPSRFSGSGSGTDFTLSINSVESEDIADYYCQQSNNWPTTFGAGTKLELK

SEQ ID NO: 4502 - protein, 107 aa, Artificial Sequence
  source: /note="Description of Artificial Sequence: Synthetic light chain variable domain"
DILLTQSPVILSVSPGERVSFSCRASQSIGTNIHWYQQRTNGSPRLLIKYASESISGIPSRFSGSGSGTDFTLSINSVESEDIADYYCQQSNNWPTTFGQGTKLELK

SEQ ID NO: 4503 - protein, 107 aa, Artificial Sequence
  source: /note="Description of Artificial Sequence: Synthetic light chain variable domain"
DILLTQSPVILSVSPGERVSFSCRASQSIGTNIHWYQQRTNGSPRLLIKYASESISGIPSRFSGSGSGTDFTLSINSVESEDIADYYCQQTNNWPTTFGAGTKLELK

SEQ ID NO: 4504 - protein, 107 aa, Artificial Sequence
  source: /note="Description of Artificial Sequence: Synthetic light chain variable domain"
DILLTQSPVILSVSPGERVSFSCRASQSIGTNIHWYQQRTNGSPRLLIKYASESISGIPSRFSGSGSGTDFTLSINSVESEDIADYYCQQTNNWPTTFGQGTKLELK

SEQ ID NO: 4505 - protein, 107 aa, Artificial Sequence
  source: /note="Description of Artificial Sequence: Synthetic light chain variable domain"
DILLTQSPVILSVSPGERVSFSCRASQSIGTNIHWYQQRTNGSPRLLIKYASESISGIPSRFSGSGSGTDFTLSINSVESEDIADYYCQQVNNWPTTFGAGTKLELK

SEQ ID NO: 4506 - protein, 107 aa, Artificial Sequence
  source: /note="Description of Artificial Sequence: Synthetic light chain variable domain"
DILLTQSPVILSVSPGERVSFSCRASQSIGTNIHWYQQRTNGSPRLLIKYASESISGIPSRFSGSGSGTDFTLSINSVESEDIADYYCQQVNNWPTTFGQGTKLELK

SEQ ID NO: 4507 - protein, 107 aa, Artificial Sequence
  source: /note="Description of Artificial Sequence: Synthetic light chain variable domain"
DILLTQSPVILSVSPGERVSFSCRASQSIGTNIHWYQQRTNGSPRLLIKYASESIVGIPSRFSGSGSGTDFTLSINSVESEDIADYYCQQNNNWPTTFGAGTKLELK

SEQ ID NO: 4508 - protein, 107 aa, Artificial Sequence
  source: /note="Description of Artificial Sequence: Synthetic light chain variable domain"
DILLTQSPVILSVSPGERVSFSCRASQSIGTNIHWYQQRTNGSPRLLIKYASESIVGIPSRFSGSGSGTDFTLSINSVESEDIADYYCQQNNNWPTTFGQGTKLELK

SEQ ID NO: 4509 - protein, 107 aa, Artificial Sequence
  source: /note="Description of Artificial Sequence: Synthetic light chain variable domain"
DILLTQSPVILSVSPGERVSFSCRASQSIGTNIHWYQQRTNGSPRLLIKYASESIWGIPSRFSGSGSGTDFTLSINSVESEDIADYYCQQNNNWPTTFGAGTKLELK

SEQ ID NO: 4510 - protein, 107 aa, Artificial Sequence
  source: /note="Description of Artificial Sequence: Synthetic light chain variable domain"
DILLTQSPVILSVSPGERVSFSCRASQSIGTNIHWYQQRTNGSPRLLIKYASESIWGIPSRFSGSGSGTDFTLSINSVESEDIADYYCQQNNNWPTTFGQGTKLELK

SEQ ID NO: 4511 - protein, 107 aa, Artificial Sequence
  source: /note="Description of Artificial Sequence: Synthetic light chain variable domain"
DILLTQSPVILSVSPGERVSFSCRASQSIGTNIHWYQQRTNGSPRLLIKYASGSISGIPSRFSGSGSGTDFTLSINSVESEDIADYYCQQNNNWPTTFGAGTKLELK

SEQ ID NO: 4512 - protein, 107 aa, Artificial Sequence
  source: /note="Description of Artificial Sequence: Synthetic light chain variable domain"
DILLTQSPVILSVSPGERVSFSCRASQSIGTNIHWYQQRTNGSPRLLIKYASGSISGIPSRFSGSGSGTDFTLSINSVESEDIADYYCQQNNNWPTTFGQGTKLELK

SEQ ID NO: 4513 - protein, 107 aa, Artificial Sequence
  source: /note="Description of Artificial Sequence: Synthetic light chain variable domain"
DILLTQSPVILSVSPGERVSFSCRASQSIGTNIHWYQQRTNGSPRLLIKYAVESISGIPSRFSGSGSGTDFTLSINSVESEDIADYYCQQNNNWPTTFGAGTKLELK

SEQ ID NO: 4514 - protein, 107 aa, Artificial Sequence
  source: /note="Description of Artificial Sequence: Synthetic light chain variable domain"
DILLTQSPVILSVSPGERVSFSCRASQSIGTNIHWYQQRTNGSPRLLIKYAVESISGIPSRFSGSGSGTDFTLSINSVESEDIADYYCQQNNNWPTTFGQGTKLELK

SEQ ID NO: 4515 - protein, 107 aa, Artificial Sequence
  source: /note="Description of Artificial Sequence: Synthetic light chain variable domain"
DILLTQSPVILSVSPGERVSFSCRASQSIGTNIHWYQQRTNGSPRLLIKYAWESISGIPSRFSGSGSGTDFTLSINSVESEDIADYYCQQNNNWPTTFGAGTKLELK

SEQ ID NO: 4516 - protein, 107 aa, Artificial Sequence
  source: /note="Description of Artificial Sequence: Synthetic light chain variable domain"
DILLTQSPVILSVSPGERVSFSCRASQSIGTNIHWYQQRTNGSPRLLIKYAWESISGIPSRFSGSGSGTDFTLSINSVESEDIADYYCQQNNNWPTTFGQGTKLELK

SEQ ID NO: 4517 - protein, 107 aa, Artificial Sequence
  source: /note="Description of Artificial Sequence: Synthetic light chain variable domain"
DILLTQSPVILSVSPGERVSFSCRASQSIGTNIHWYQQRTNGSPRLLIKYLSESISGIPSRFSGSGSGTDFTLSINSVESEDIADYYCQQNNNWPTTFGAGTKLELK

SEQ ID NO: 4518 - protein, 107 aa, Artificial Sequence
  source: /note="Description of Artificial Sequence: Synthetic light chain variable domain"
DILLTQSPVILSVSPGERVSFSCRASQSIGTNIHWYQQRTNGSPRLLIKYLSESISGIPSRFSGSGSGTDFTLSINSVESEDIADYYCQQNNNWPTTFGQGTKLELK

SEQ ID NO: 4519 - protein, 107 aa, Artificial Sequence
  source: /note="Description of Artificial Sequence: Synthetic light chain variable domain"
DILLTQSPVILSVSPGERVSFSCRASQSIGTNIHWYQQRTNGSPRLLIKYTSESISGIPSRFSGSGSGTDFTLSINSVESEDIADYYCQQNNNWPTTFGAGTKLELK

SEQ ID NO: 4520 - protein, 107 aa, Artificial Sequence
  source: /note="Description of Artificial Sequence: Synthetic light chain variable domain"
DILLTQSPVILSVSPGERVSFSCRASQSIGTNIHWYQQRTNGSPRLLIKYTSESISGIPSRFSGSGSGTDFTLSINSVESEDIADYYCQQNNNWPTTFGQGTKLELK

SEQ ID NO: 4521 - protein, 107 aa, Artificial Sequence
  source: /note="Description of Artificial Sequence: Synthetic light chain variable domain"
DILLTQSPVILSVSPGERVSFSCRASQSIGTNIHWYQQRTNGSPRLLILYASESISGIPSRFSGSGSGTDFTLSINSVESEDIADYYCQQNNNWPTTFGAGTKLELK

SEQ ID NO: 4522 - protein, 107 aa, Artificial Sequence
  source: /note="Description of Artificial Sequence: Synthetic light chain variable domain"
DILLTQSPVILSVSPGERVSFSCRASQSIGTNIHWYQQRTNGSPRLLILYASESISGIPSRFSGSGSGTDFTLSINSVESEDIADYYCQQNNNWPTTFGQGTKLELK

SEQ ID NO: 4523 - protein, 107 aa, Artificial Sequence
  source: /note="Description of Artificial Sequence: Synthetic light chain variable domain"
DILLTQSPVILSVSPGERVSFSCRASQSIGTNIHWYQQRTNGSPRLLINYASESISGIPSRFSGSGSGTDFTLSINSVESEDIADYYCQQNNNWPTTFGAGTKLELK

SEQ ID NO: 4524 - protein, 107 aa, Artificial Sequence
  source: /note="Description of Artificial Sequence: Synthetic light chain variable domain"
DILLTQSPVILSVSPGERVSFSCRASQSIGTNIHWYQQRTNGSPRLLINYASESISGIPSRFSGSGSGTDFTLSINSVESEDIADYYCQQNNNWPTTFGQGTKLELK

SEQ ID NO: 4525 - protein, 107 aa, Artificial Sequence
  source: /note="Description of Artificial Sequence: Synthetic light chain variable domain"
DILLTQSPVILSVSPGERVSFSCRASQSIGTNIHWYQQRTNGSPRLLIQYASESISGIPSRFSGSGSGTDFTLSINSVESEDIADYYCQQNNNWPTTFGAGTKLELK

SEQ ID NO: 4526 - protein, 107 aa, Artificial Sequence
  source: /note="Description of Artificial Sequence: Synthetic light chain variable domain"
DILLTQSPVILSVSPGERVSFSCRASQSIGTNIHWYQQRTNGSPRLLIQYASESISGIPSRFSGSGSGTDFTLSINSVESEDIADYYCQQNNNWPTTFGQGTKLELK

SEQ ID NO: 4527 - protein, 107 aa, Artificial Sequence
  source: /note="Description of Artificial Sequence: Synthetic light chain variable domain"
DILLTQSPVILSVSPGERVSFSCRASQSIGTNIHWYQQRTNGSPRLLIRYASESISGIPSRFSGSGSGTDFTLSINSVESEDIADYYCQQNNNWPTTFGAGTKLELK

SEQ ID NO: 4528 - protein, 107 aa, Artificial Sequence
  source: /note="Description of Artificial Sequence: Synthetic light chain variable domain"
DILLTQSPVILSVSPGERVSFSCRASQSIGTNIHWYQQRTNGSPRLLIRYASESISGIPSRFSGSGSGTDFTLSINSVESEDIADYYCQQNNNWPTTFGQGTKLELK

SEQ ID NO: 4529 - protein, 107 aa, Artificial Sequence
  source: /note="Description of Artificial Sequence: Synthetic light chain variable domain"
DILLTQSPVILSVSPGERVSFSCRASQSIGTNIHWYQQRTNGSPRLLISYASESISGIPSRFSGSGSGTDFTLSINSVESEDIADYYCQQNNNWPTTFGAGTKLELK

SEQ ID NO: 4530 - protein, 107 aa, Artificial Sequence
  source: /note="Description of Artificial Sequence: Synthetic light chain variable domain"
DILLTQSPVILSVSPGERVSFSCRASQSIGTNIHWYQQRTNGSPRLLISYASESISGIPSRFSGSGSGTDFTLSINSVESEDIADYYCQQNNNWPTTFGQGTKLELK

SEQ ID NO: 4531 - protein, 107 aa, Artificial Sequence
  source: /note="Description of Artificial Sequence: Synthetic light chain variable domain"
DILLTQSPVILSVSPGERVSFSCRASQSIGTNIHWYQQRTNGSPRLLITYASESISGIPSRFSGSGSGTDFTLSINSVESEDIADYYCQQNNNWPTTFGAGTKLELK

SEQ ID NO: 4532 - protein, 107 aa, Artificial Sequence
  source: /note="Description of Artificial Sequence: Synthetic light chain variable domain"
DILLTQSPVILSVSPGERVSFSCRASQSIGTNIHWYQQRTNGSPRLLITYASESISGIPSRFSGSGSGTDFTLSINSVESEDIADYYCQQNNNWPTTFGQGTKLELK

SEQ ID NO: 4533 - protein, 107 aa, Artificial Sequence
  source: /note="Description of Artificial Sequence: Synthetic light chain variable domain"
DILLTQSPVILSVSPGERVSFSCRASQSIGTNIHWYQQRTNGSPRLLIVYASESISGIPSRFSGSGSGTDFTLSINSVESEDIADYYCQQNNNWPTTFGAGTKLELK

SEQ ID NO: 4534 - protein, 107 aa, Artificial Sequence
  source: /note="Description of Artificial Sequence: Synthetic light chain variable domain"
DILLTQSPVILSVSPGERVSFSCRASQSIGTNIHWYQQRTNGSPRLLIVYASESISGIPSRFSGSGSGTDFTLSINSVESEDIADYYCQQNNNWPTTFGQGTKLELK

SEQ ID NO: 4535 - protein, 107 aa, Artificial Sequence
  source: /note="Description of Artificial Sequence: Synthetic light chain variable domain"
DILLTQSPVILSVSPGERVSFSCRASQSIGTNIHWYQQRTNGSPRLLIYYASESISGIPSRFSGSGSGTDFTLSINSVESEDIADYYCQQNNNWPTTFGAGTKLELK

SEQ ID NO: 4536 - protein, 107 aa, Artificial Sequence
  source: /note="Description of Artificial Sequence: Synthetic light chain variable domain"
DILLTQSPVILSVSPGERVSFSCRASQSIGTNIHWYQQRTNGSPRLLIYYASESISGIPSRFSGSGSGTDFTLSINSVESEDIADYYCQQNNNWPTTFGQGTKLELK

SEQ ID NO: 4537 - protein, 107 aa, Artificial Sequence
  source: /note="Description of Artificial Sequence: Synthetic light chain variable domain"
DILLTQSPVILSVSPGERVSFSCRASQSIGTNIHWYQQRTNGSPRLLKKYASESISGIPSRFSGSGSGTDFTLSINSVESEDIADYYCQQNNNWPTTFGAGTKLELK

SEQ ID NO: 4538 - protein, 107 aa, Artificial Sequence
  source: /note="Description of Artificial Sequence: Synthetic light chain variable domain"
DILLTQSPVILSVSPGERVSFSCRASQSIGTNIHWYQQRTNGSPRLLKKYASESISGIPSRFSGSGSGTDFTLSINSVESEDIADYYCQQNNNWPTTFGQGTKLELK

SEQ ID NO: 4539 - protein, 107 aa, Artificial Sequence
  source: /note="Description of Artificial Sequence: Synthetic light chain variable domain"
DILLTQSPVILSVSPGERVSFSCRASQSIGTNIHWYQQRTNGSPRLLLKYASESISGIPSRFSGSGSGTDFTLSINSVESEDIADYYCQQNNNWPTTFGAGTKLELK

SEQ ID NO: 4540 - protein, 107 aa, Artificial Sequence
  source: /note="Description of Artificial Sequence: Synthetic light chain variable domain"
DILLTQSPVILSVSPGERVSFSCRASQSIGTNIHWYQQRTNGSPRLLLKYASESISGIPSRFSGSGSGTDFTLSINSVESEDIADYYCQQNNNWPTTFGQGTKLELK

SEQ ID NO: 4541 - protein, 107 aa, Artificial Sequence
  source: /note="Description of Artificial Sequence: Synthetic light chain variable domain"
DILLTQSPVILSVSPGERVSFSCRASQSIGTNIHWYQQRTNGSPRLLMKYASESISGIPSRFSGSGSGTDFTLSINSVESEDIADYYCQQNNNWPTTFGAGTKLELK

SEQ ID NO: 4542 - protein, 107 aa, Artificial Sequence
  source: /note="Description of Artificial Sequence: Synthetic light chain variable domain"
DILLTQSPVILSVSPGERVSFSCRASQSIGTNIHWYQQRTNGSPRLLMKYASESISGIPSRFSGSGSGTDFTLSINSVESEDIADYYCQQNNNWPTTFGQGTKLELK

SEQ ID NO: 4543 - protein, 107 aa, Artificial Sequence
  source: /note="Description of Artificial Sequence: Synthetic light chain variable domain"
DILLTQSPVILSVSPGERVSFSCRASQSIGTNIHWYQQRTNGSPRLLSKYASESISGIPSRFSGSGSGTDFTLSINSVESEDIADYYCQQNNNWPTTFGAGTKLELK

SEQ ID NO: 4544 - protein, 107 aa, Artificial Sequence
  source: /note="Description of Artificial Sequence: Synthetic light chain variable domain"
DILLTQSPVILSVSPGERVSFSCRASQSIGTNIHWYQQRTNGSPRLLSKYASESISGIPSRFSGSGSGTDFTLSINSVESEDIADYYCQQNNNWPTTFGQGTKLELK

SEQ ID NO: 4545 - protein, 107 aa, Artificial Sequence
  source: /note="Description of Artificial Sequence: Synthetic light chain variable domain"
DILLTQSPVILSVSPGERVSFSCRASQSIGTNMHWYQQRTNGSPRLLIKYASESISGIPSRFSGSGSGTDFTLSINSVESEDIADYYCQQNNNWPTTFGAGTKLELK

SEQ ID NO: 4546 - protein, 107 aa, Artificial Sequence
  source: /note="Description of Artificial Sequence: Synthetic light chain variable domain"
DILLTQSPVILSVSPGERVSFSCRASQSIGTNMHWYQQRTNGSPRLLIKYASESISGIPSRFSGSGSGTDFTLSINSVESEDIADYYCQQNNNWPTTFGQGTKLELK

SEQ ID NO: 4547 - protein, 107 aa, Artificial Sequence
  source: /note="Description of Artificial Sequence: Synthetic light chain variable domain"
DILLTQSPVILSVSPGERVSFSCRASQSIGTNTHWYQQRTNGSPRLLIKYASESISGIPSRFSGSGSGTDFTLSINSVESEDIADYYCQQNNNWPTTFGAGTKLELK

SEQ ID NO: 4548 - protein, 107 aa, Artificial Sequence
  source: /note="Description of Artificial Sequence: Synthetic light chain variable domain"
DILLTQSPVILSVSPGERVSFSCRASQSIGTNTHWYQQRTNGSPRLLIKYASESISGIPSRFSGSGSGTDFTLSINSVESEDIADYYCQQNNNWPTTFGQGTKLELK

SEQ ID NO: 4549 - protein, 107 aa, Artificial Sequence
  source: /note="Description of Artificial Sequence: Synthetic light chain variable domain"
DILLTQSPVILSVSPGERVSFSCRASQSIGTNVHWYQQRTNGSPRLLIKYASESISGIPSRFSGSGSGTDFTLSINSVESEDIADYYCQQNNNWPTTFGAGTKLELK

SEQ ID NO: 4550 - protein, 107 aa, Artificial Sequence
  source: /note="Description of Artificial Sequence: Synthetic light chain variable domain"
DILLTQSPVILSVSPGERVSFSCRASQSIGTNVHWYQQRTNGSPRLLIKYASESISGIPSRFSGSGSGTDFTLSINSVESEDIADYYCQQNNNWPTTFGQGTKLELK

SEQ ID NO: 4551 - protein, 107 aa, Artificial Sequence
  source: /note="Description of Artificial Sequence: Synthetic light chain variable domain"
DILLTQSPVILSVSPGERVSFSCRASQSIGVNIHWYQQRTNGSPRLLIKYASESISGIPSRFSGSGSGTDFTLSINSVESEDIADYYCQQNNNWPTTFGAGTKLELK

SEQ ID NO: 4552 - protein, 107 aa, Artificial Sequence
  source: /note="Description of Artificial Sequence: Synthetic light chain variable domain"
DILLTQSPVILSVSPGERVSFSCRASQSIGVNIHWYQQRTNGSPRLLIKYASESISGIPSRFSGSGSGTDFTLSINSVESEDIADYYCQQNNNWPTTFGQGTKLELK

SEQ ID NO: 4553 - protein, 107 aa, Artificial Sequence
  source: /note="Description of Artificial Sequence: Synthetic light chain variable domain"
DILLTQSPVILSVSPGERVSFSCRASQSIGWNIHWYQQRTNGSPRLLIKYASESISGIPSRFSGSGSGTDFTLSINSVESEDIADYYCQQNNNWPTTFGAGTKLELK

SEQ ID NO: 4554 - protein, 107 aa, Artificial Sequence
  source: /note="Description of Artificial Sequence: Synthetic light chain variable domain"
DILLTQSPVILSVSPGERVSFSCRASQSIGWNIHWYQQRTNGSPRLLIKYASESISGIPSRFSGSGSGTDFTLSINSVESEDIADYYCQQNNNWPTTFGQGTKLELK

SEQ ID NO: 4555 - protein, 107 aa, Artificial Sequence
  source: /note="Description of Artificial Sequence: Synthetic light chain variable domain"
DILLTQSPVILSVSPGERVSFSCRASQSIHTNIHWYQQRTNGSPRLLIKYASESISGIPSRFSGSGSGTDFTLSINSVESEDIADYYCQQNNNWPTTFGAGTKLELK

SEQ ID NO: 4556 - protein, 107 aa, Artificial Sequence
  source: /note="Description of Artificial Sequence: Synthetic light chain variable domain"
DILLTQSPVILSVSPGERVSFSCRASQSIHTNIHWYQQRTNGSPRLLIKYASESISGIPSRFSGSGSGTDFTLSINSVESEDIADYYCQQNNNWPTTFGQGTKLELK

SEQ ID NO: 4557 - protein, 107 aa, Artificial Sequence
  source: /note="Description of Artificial Sequence: Synthetic light chain variable domain"
DILLTQSPVILSVSPGERVSFSCRASQSIITNIHWYQQRTNGSPRLLIKYASESISGIPSRFSGSGSGTDFTLSINSVESEDIADYYCQQNNNWPTTFGAGTKLELK

SEQ ID NO: 4558 - protein, 107 aa, Artificial Sequence
  source: /note="Description of Artificial Sequence: Synthetic light chain variable domain"
DILLTQSPVILSVSPGERVSFSCRASQSIITNIHWYQQRTNGSPRLLIKYASESISGIPSRFSGSGSGTDFTLSINSVESEDIADYYCQQNNNWPTTFGQGTKLELK

SEQ ID NO: 4559 - protein, 107 aa, Artificial Sequence
  source: /note="Description of Artificial Sequence: Synthetic light chain variable domain"
DILLTQSPVILSVSPGERVSFSCRASQSIKTNIHWYQQRTNGSPRLLIKYASESISGIPSRFSGSGSGTDFTLSINSVESEDIADYYCQQNNNWPTTFGAGTKLELK

SEQ ID NO: 4560 - protein, 107 aa, Artificial Sequence
  source: /note="Description of Artificial Sequence: Synthetic light chain variable domain"
DILLTQSPVILSVSPGERVSFSCRASQSIKTNIHWYQQRTNGSPRLLIKYASESISGIPSRFSGSGSGTDFTLSINSVESEDIADYYCQQNNNWPTTFGQGTKLELK

SEQ ID NO: 4561 - protein, 107 aa, Artificial Sequence
  source: /note="Description of Artificial Sequence: Synthetic light chain variable domain"
DILLTQSPVILSVSPGERVSFSCRASQSILTNIHWYQQRTNGSPRLLIKYASESISGIPSRFSGSGSGTDFTLSINSVESEDIADYYCQQNNNWPTTFGAGTKLELK

SEQ ID NO: 4562 - protein, 107 aa, Artificial Sequence
  source: /note="Description of Artificial Sequence: Synthetic light chain variable domain"
DILLTQSPVILSVSPGERVSFSCRASQSILTNIHWYQQRTNGSPRLLIKYASESISGIPSRFSGSGSGTDFTLSINSVESEDIADYYCQQNNNWPTTFGQGTKLELK

SEQ ID NO: 4563 - protein, 107 aa, Artificial Sequence
  source: /note="Description of Artificial Sequence: Synthetic light chain variable domain"
DILLTQSPVILSVSPGERVSFSCRASQSIMTNIHWYQQRTNGSPRLLIKYASESISGIPSRFSGSGSGTDFTLSINSVESEDIADYYCQQNNNWPTTFGAGTKLELK

SEQ ID NO: 4564 - protein, 107 aa, Artificial Sequence
  source: /note="Description of Artificial Sequence: Synthetic light chain variable domain"
DILLTQSPVILSVSPGERVSFSCRASQSIMTNIHWYQQRTNGSPRLLIKYASESISGIPSRFSGSGSGTDFTLSINSVESEDIADYYCQQNNNWPTTFGQGTKLELK

SEQ ID NO: 4565 - protein, 107 aa, Artificial Sequence
  source: /note="Description of Artificial Sequence: Synthetic light chain variable domain"
DILLTQSPVILSVSPGERVSFSCRASQSIPTNIHWYQQRTNGSPRLLIKYASESISGIPSRFSGSGSGTDFTLSINSVESEDIADYYCQQNNNWPTTFGAGTKLELK

SEQ ID NO: 4566 - protein, 107 aa, Artificial Sequence
  source: /note="Description of Artificial Sequence: Synthetic light chain variable domain"
DILLTQSPVILSVSPGERVSFSCRASQSIPTNIHWYQQRTNGSPRLLIKYASESISGIPSRFSGSGSGTDFTLSINSVESEDIADYYCQQNNNWPTTFGQGTKLELK

SEQ ID NO: 4567 - protein, 107 aa, Artificial Sequence
  source: /note="Description of Artificial Sequence: Synthetic light chain variable domain"
DILLTQSPVILSVSPGERVSFSCRASQSIQTNIHWYQQRTNGSPRLLIKYASESISGIPSRFSGSGSGTDFTLSINSVESEDIADYYCQQNNNWPTTFGAGTKLELK

SEQ ID NO: 4568 - protein, 107 aa, Artificial Sequence
  source: /note="Description of Artificial Sequence: Synthetic light chain variable domain"
DILLTQSPVILSVSPGERVSFSCRASQSIQTNIHWYQQRTNGSPRLLIKYASESISGIPSRFSGSGSGTDFTLSINSVESEDIADYYCQQNNNWPTTFGQGTKLELK

SEQ ID NO: 4569 - protein, 107 aa, Artificial Sequence
  source: /note="Description of Artificial Sequence: Synthetic light chain variable domain"
DILLTQSPVILSVSPGERVSFSCRASQSIRTNIHWYQQRTNGSPRLLIKYASESISGIPSRFSGSGSGTDFTLSINSVESEDIADYYCQQNNNWPTTFGAGTKLELK

SEQ ID NO: 4570 - protein, 107 aa, Artificial Sequence
  source: /note="Description of Artificial Sequence: Synthetic light chain variable domain"
DILLTQSPVILSVSPGERVSFSCRASQSIRTNIHWYQQRTNGSPRLLIKYASESISGIPSRFSGSGSGTDFTLSINSVESEDIADYYCQQNNNWPTTFGQGTKLELK

SEQ ID NO: 4571 - protein, 107 aa, Artificial Sequence
  source: /note="Description of Artificial Sequence: Synthetic light chain variable domain"
DILLTQSPVILSVSPGERVSFSCRASQSISTNIHWYQQRTNGSPRLLIKYASESISGIPSRFSGSGSGTDFTLSINSVESEDIADYYCQQNNNWPTTFGAGTKLELK

SEQ ID NO: 4572 - protein, 107 aa, Artificial Sequence
  source: /note="Description of Artificial Sequence: Synthetic light chain variable domain"
DILLTQSPVILSVSPGERVSFSCRASQSISTNIHWYQQRTNGSPRLLIKYASESISGIPSRFSGSGSGTDFTLSINSVESEDIADYYCQQNNNWPTTFGQGTKLELK

SEQ ID NO: 4573 - protein, 107 aa, Artificial Sequence
  source: /note="Description of Artificial Sequence: Synthetic light chain variable domain"
DILLTQSPVILSVSPGERVSFSCRASQSIVTNIHWYQQRTNGSPRLLIKYASESISGIPSRFSGSGSGTDFTLSINSVESEDIADYYCQQNNNWPTTFGAGTKLELK

SEQ ID NO: 4574 - protein, 107 aa, Artificial Sequence
  source: /note="Description of Artificial Sequence: Synthetic light chain variable domain"
DILLTQSPVILSVSPGERVSFSCRASQSIVTNIHWYQQRTNGSPRLLIKYASESISGIPSRFSGSGSGTDFTLSINSVESEDIADYYCQQNNNWPTTFGQGTKLELK

SEQ ID NO: 4575 - protein, 107 aa, Artificial Sequence
  source: /note="Description of Artificial Sequence: Synthetic light chain variable domain"
DILLTQSPVILSVSPGERVSFSCRASQSIYTNIHWYQQRTNGSPRLLIKYASESISGIPSRFSGSGSGTDFTLSINSVESEDIADYYCQQNNNWPTTFGAGTKLELK

SEQ ID NO: 4576 - protein, 107 aa, Artificial Sequence
  source: /note="Description of Artificial Sequence: Synthetic light chain variable domain"
DILLTQSPVILSVSPGERVSFSCRASQSIYTNIHWYQQRTNGSPRLLIKYASESISGIPSRFSGSGSGTDFTLSINSVESEDIADYYCQQNNNWPTTFGQGTKLELK

SEQ ID NO: 4577 - protein, 107 aa, Artificial Sequence
  source: /note="Description of Artificial Sequence: Synthetic light chain variable domain"
DILLTQSPVILSVSPGERVSFSCRASQSRGTNIHWYQQRTNGSPRLLIKYASESISGIPSRFSGSGSGTDFTLSINSVESEDIADYYCQQNNNWPTTFGAGTKLELK

SEQ ID NO: 4578 - protein, 107 aa, Artificial Sequence
  source: /note="Description of Artificial Sequence: Synthetic light chain variable domain"
DILLTQSPVILSVSPGERVSFSCRASQSRGTNIHWYQQRTNGSPRLLIKYASESISGIPSRFSGSGSGTDFTLSINSVESEDIADYYCQQNNNWPTTFGQGTKLELK

SEQ ID NO: 4579 - protein, 107 aa, Artificial Sequence
  source: /note="Description of Artificial Sequence: Synthetic light chain variable domain"
DILLTQSPVILSVSPGERVSFSCRASQSSGTNIHWYQQRTNGSPRLLIKYASESISGIPSRFSGSGSGTDFTLSINSVESEDIADYYCQQNNNWPTTFGAGTKLELK

SEQ ID NO: 4580 - protein, 107 aa, Artificial Sequence
  source: /note="Description of Artificial Sequence: Synthetic light chain variable domain"
DILLTQSPVILSVSPGERVSFSCRASQSSGTNIHWYQQRTNGSPRLLIKYASESISGIPSRFSGSGSGTDFTLSINSVESEDIADYYCQQNNNWPTTFGQGTKLELK

SEQ ID NO: 4581 - protein, 107 aa, Artificial Sequence
  source: /note="Description of Artificial Sequence: Synthetic light chain variable domain"
DILLTQSPVILSVSPGERVSFSCRASQSTGTNIHWYQQRTNGSPRLLIKYASESISGIPSRFSGSGSGTDFTLSINSVESEDIADYYCQQNNNWPTTFGAGTKLELK

SEQ ID NO: 4582 - protein, 107 aa, Artificial Sequence
  source: /note="Description of Artificial Sequence: Synthetic light chain variable domain"
DILLTQSPVILSVSPGERVSFSCRASQSTGTNIHWYQQRTNGSPRLLIKYASESISGIPSRFSGSGSGTDFTLSINSVESEDIADYYCQQNNNWPTTFGQGTKLELK

SEQ ID NO: 4583 - protein, 107 aa, Artificial Sequence
  source: /note="Description of Artificial Sequence: Synthetic light chain variable domain"
DILLTQSPVILSVSPGERVSFSCRASTSIGTNIHWYQQRTNGSPRLLIKYASESISGIPSRFSGSGSGTDFTLSINSVESEDIADYYCQQNNNWPTTFGAGTKLELK

SEQ ID NO: 4584 - protein, 107 aa, Artificial Sequence
  source: /note="Description of Artificial Sequence: Synthetic light chain variable domain"
DILLTQSPVILSVSPGERVSFSCRASTSIGTNIHWYQQRTNGSPRLLIKYASESISGIPSRFSGSGSGTDFTLSINSVESEDIADYYCQQNNNWPTTFGQGTKLELK

SEQ ID NO: 4585 - protein, 107 aa, Artificial Sequence
  source: /note="Description of Artificial Sequence: Synthetic light chain variable domain"
DILLTQSPVILSVSPGERVSFSCRAVQSIGTNIHWYQQRTNGSPRLLIKYASESISGIPSRFSGSGSGTDFTLSINSVESEDIADYYCQQNNNWPTTFGAGTKLELK

SEQ ID NO: 4586 - protein, 107 aa, Artificial Sequence
  source: /note="Description of Artificial Sequence: Synthetic light chain variable domain"
DILLTQSPVILSVSPGERVSFSCRAVQSIGTNIHWYQQRTNGSPRLLIKYASESISGIPSRFSGSGSGTDFTLSINSVESEDIADYYCQQNNNWPTTFGQGTKLELK

SEQ ID NO: 4587 - protein, 107 aa, Artificial Sequence
  source: /note="Description of Artificial Sequence: Synthetic light chain variable domain"
DILLTQSPVILSVSPGERVSFSCRAWQSIGTNIHWYQQRTNGSPRLLIKYASESISGIPSRFSGSGSGTDFTLSINSVESEDIADYYCQQNNNWPTTFGAGTKLELK

SEQ ID NO: 4588 - protein, 107 aa, Artificial Sequence
  source: /note="Description of Artificial Sequence: Synthetic light chain variable domain"
DILLTQSPVILSVSPGERVSFSCRAWQSIGTNIHWYQQRTNGSPRLLIKYASESISGIPSRFSGSGSGTDFTLSINSVESEDIADYYCQQNNNWPTTFGQGTKLELK

SEQ ID NO: 4589 - protein, 107 aa, Artificial Sequence
  source: /note="Description of Artificial Sequence: Synthetic light chain variable domain"
DILLTQSPVILSVSPGERVSFSCRCSQSIGTNIHWYQQRTNGSPRLLIKYASESISGIPSRFSGSGSGTDFTLSINSVESEDIADYYCQQNNNWPTTFGAGTKLELK

SEQ ID NO: 4590 - protein, 107 aa, Artificial Sequence
  source: /note="Description of Artificial Sequence: Synthetic light chain variable domain"
DILLTQSPVILSVSPGERVSFSCRCSQSIGTNIHWYQQRTNGSPRLLIKYASESISGIPSRFSGSGSGTDFTLSINSVESEDIADYYCQQNNNWPTTFGQGTKLELK

SEQ ID NO: 4591 - protein, 107 aa, Artificial Sequence
  source: /note="Description of Artificial Sequence: Synthetic light chain variable domain"
DILLTQSPVILSVSPGERVSFSCRGSQSIGTNIHWYQQRTNGSPRLLIKYASESISGIPSRFSGSGSGTDFTLSINSVESEDIADYYCQQNNNWPTTFGAGTKLELK

SEQ ID NO: 4592 - protein, 107 aa, Artificial Sequence
  source: /note="Description of Artificial Sequence: Synthetic light chain variable domain"
DILLTQSPVILSVSPGERVSFSCRGSQSIGTNIHWYQQRTNGSPRLLIKYASESISGIPSRFSGSGSGTDFTLSINSVESEDIADYYCQQNNNWPTTFGQGTKLELK

SEQ ID NO: 4593 - protein, 107 aa, Artificial Sequence
  source: /note="Description of Artificial Sequence: Synthetic light chain variable domain"
DILLTQSPVILSVSPGERVSFSCRLSQSIGTNIHWYQQRTNGSPRLLIKYASESISGIPSRFSGSGSGTDFTLSINSVESEDIADYYCQQNNNWPTTFGAGTKLELK

SEQ ID NO: 4594 - protein, 107 aa, Artificial Sequence
  source: /note="Description of Artificial Sequence: Synthetic light chain variable domain"
DILLTQSPVILSVSPGERVSFSCRLSQSIGTNIHWYQQRTNGSPRLLIKYASESISGIPSRFSGSGSGTDFTLSINSVESEDIADYYCQQNNNWPTTFGQGTKLELK

SEQ ID NO: 4595 - protein, 107 aa, Artificial Sequence
  source: /note="Description of Artificial Sequence: Synthetic light chain variable domain"
DILLTQSPVILSVSPGERVSFSCRVSQSIGTNIHWYQQRTNGSPRLLIKYASESISGIPSRFSGSGSGTDFTLSINSVESEDIADYYCQQNNNWPTTFGAGTKLELK

SEQ ID NO: 4596 - protein, 107 aa, Artificial Sequence
  source: /note="Description of Artificial Sequence: Synthetic light chain variable domain"
DILLTQSPVILSVSPGERVSFSCRVSQSIGTNIHWYQQRTNGSPRLLIKYASESISGIPSRFSGSGSGTDFTLSINSVESEDIADYYCQQNNNWPTTFGQGTKLELK

SEQ ID NO: 4597 - protein, 107 aa, Artificial Sequence
  source: /note="Description of Artificial Sequence: Synthetic light chain variable domain"
DILLTQSPVILSVSPGERVSFSCSASQSIGTNIHWYQQRTNGSPRLLIKYASESISGIPSRFSGSGSGTDFTLSINSVESEDIADYYCQQNNNWPTTFGAGTKLELK

SEQ ID NO: 4598 - protein, 107 aa, Artificial Sequence
  source: /note="Description of Artificial Sequence: Synthetic light chain variable domain"
DILLTQSPVILSVSPGERVSFSCSASQSIGTNIHWYQQRTNGSPRLLIKYASESISGIPSRFSGSGSGTDFTLSINSVESEDIADYYCQQNNNWPTTFGQGTKLELK

SEQ ID NO: 4599 - protein, 107 aa, Artificial Sequence
  source: /note="Description of Artificial Sequence: Synthetic light chain variable domain"
DILLTQSPVILSVSPGERVSFSCWASQSIGTNIHWYQQRTNGSPRLLIKYASESISGIPSRFSGSGSGTDFTLSINSVESEDIADYYCQQNNNWPTTFGAGTKLELK

SEQ ID NO: 4600 - protein, 107 aa, Artificial Sequence
  source: /note="Description of Artificial Sequence: Synthetic light chain variable domain"
DILLTQSPVILSVSPGERVSFSCWASQSIGTNIHWYQQRTNGSPRLLIKYASESISGIPSRFSGSGSGTDFTLSINSVESEDIADYYCQQNNNWPTTFGQGTKLELK

SEQ ID NO: 4601 - protein, 107 aa, Artificial Sequence
  source: /note="Description of Artificial Sequence: Synthetic light chain variable domain"
DILLTQSPVILSVSPGERVSFSCYASQSIGTNIHWYQQRTNGSPRLLIKYASESISGIPSRFSGSGSGTDFTLSINSVESEDIADYYCQQNNNWPTTFGAGTKLELK

SEQ ID NO: 4602 - protein, 107 aa, Artificial Sequence
  source: /note="Description of Artificial Sequence: Synthetic light chain variable domain"
DILLTQSPVILSVSPGERVSFSCYASQSIGTNIHWYQQRTNGSPRLLIKYASESISGIPSRFSGSGSGTDFTLSINSVESEDIADYYCQQNNNWPTTFGQGTKLELK

SEQ ID NO: 4603 - protein, 107 aa, Artificial Sequence
  source: /note="Description of Artificial Sequence: Synthetic light chain variable domain"
DILLWQSPVILSVSPGERVSFSCRASQSIGTNIHWYQQRTNGSPRLLIKYASESISGIPSRFSGSGSGTDFTLSINSVESEDIADYYCQQNNNWPTTFGAGTKLELK

SEQ ID NO: 4604 - protein, 107 aa, Artificial Sequence
  source: /note="Description of Artificial Sequence: Synthetic light chain variable domain"
DILLWQSPVILSVSPGERVSFSCRASQSIGTNIHWYQQRTNGSPRLLIKYASESISGIPSRFSGSGSGTDFTLSINSVESEDIADYYCQQNNNWPTTFGQGTKLELK

SEQ ID NO: 4605 - protein, 107 aa, Artificial Sequence
  source: /note="Description of Artificial Sequence: Synthetic light chain variable domain"
DILPTQSPVILSVSPGERVSFSCRASQSIGTNIHWYQQRTNGSPRLLIKYASESISGIPSRFSGSGSGTDFTLSINSVESEDIADYYCQQNNNWPTTFGAGTKLELK

SEQ ID NO: 4606 - protein, 107 aa, Artificial Sequence
  source: /note="Description of Artificial Sequence: Synthetic light chain variable domain"
DILPTQSPVILSVSPGERVSFSCRASQSIGTNIHWYQQRTNGSPRLLIKYASESISGIPSRFSGSGSGTDFTLSINSVESEDIADYYCQQNNNWPTTFGQGTKLELK

SEQ ID NO: 4607 - protein, 107 aa, Artificial Sequence
  source: /note="Description of Artificial Sequence: Synthetic light chain variable domain"
DILRTQSPVILSVSPGERVSFSCRASQSIGTNIHWYQQRTNGSPRLLIKYASESISGIPSRFSGSGSGTDFTLSINSVESEDIADYYCQQNNNWPTTFGAGTKLELK

SEQ ID NO: 4608 - protein, 107 aa, Artificial Sequence
  source: /note="Description of Artificial Sequence: Synthetic light chain variable domain"
DILRTQSPVILSVSPGERVSFSCRASQSIGTNIHWYQQRTNGSPRLLIKYASESISGIPSRFSGSGSGTDFTLSINSVESEDIADYYCQQNNNWPTTFGQGTKLELK

SEQ ID NO: 4609 - protein, 107 aa, Artificial Sequence
  source: /note="Description of Artificial Sequence: Synthetic light chain variable domain"
DILSTQSPVILSVSPGERVSFSCRASQSIGTNIHWYQQRTNGSPRLLIKYASESISGIPSRFSGSGSGTDFTLSINSVESEDIADYYCQQNNNWPTTFGAGTKLELK

SEQ ID NO: 4610 - protein, 107 aa, Artificial Sequence
  source: /note="Description of Artificial Sequence: Synthetic light chain variable domain"
DILSTQSPVILSVSPGERVSFSCRASQSIGTNIHWYQQRTNGSPRLLIKYASESISGIPSRFSGSGSGTDFTLSINSVESEDIADYYCQQNNNWPTTFGQGTKLELK

SEQ ID NO: 4611 - protein, 107 aa, Artificial Sequence
  source: /note="Description of Artificial Sequence: Synthetic light chain variable domain"
DILTTQSPVILSVSPGERVSFSCRASQSIGTNIHWYQQRTNGSPRLLIKYASESISGIPSRFSGSGSGTDFTLSINSVESEDIADYYCQQNNNWPTTFGAGTKLELK

SEQ ID NO: 4612 - protein, 107 aa, Artificial Sequence
  source: /note="Description of Artificial Sequence: Synthetic light chain variable domain"
DILTTQSPVILSVSPGERVSFSCRASQSIGTNIHWYQQRTNGSPRLLIKYASESISGIPSRFSGSGSGTDFTLSINSVESEDIADYYCQQNNNWPTTFGQGTKLELK

SEQ ID NO: 4613 - protein, 107 aa, Artificial Sequence
  source: /note="Description of Artificial Sequence: Synthetic light chain variable domain"
DILVTQSPVILSVSPGERVSFSCRASQSIGTNIHWYQQRTNGSPRLLIKYASESISGIPSRFSGSGSGTDFTLSINSVESEDIADYYCQQNNNWPTTFGAGTKLELK

SEQ ID NO: 4614 - protein, 107 aa, Artificial Sequence
  source: /note="Description of Artificial Sequence: Synthetic light chain variable domain"
DILVTQSPVILSVSPGERVSFSCRASQSIGTNIHWYQQRTNGSPRLLIKYASESISGIPSRFSGSGSGTDFTLSINSVESEDIADYYCQQNNNWPTTFGQGTKLELK

SEQ ID NO: 4615 - protein, 107 aa, Artificial Sequence
  source: /note="Description of Artificial Sequence: Synthetic light chain variable domain"
DILWTQSPVILSVSPGERVSFSCRASQSIGTNIHWYQQRTNGSPRLLIKYASESISGIPSRFSGSGSGTDFTLSINSVESEDIADYYCQQNNNWPTTFGAGTKLELK

SEQ ID NO: 4616 - protein, 107 aa, Artificial Sequence
  source: /note="Description of Artificial Sequence: Synthetic light chain variable domain"
DILWTQSPVILSVSPGERVSFSCRASQSIGTNIHWYQQRTNGSPRLLIKYASESISGIPSRFSGSGSGTDFTLSINSVESEDIADYYCQQNNNWPTTFGQGTKLELK

SEQ ID NO: 4617 - protein, 107 aa, Artificial Sequence
  source: /note="Description of Artificial Sequence: Synthetic light chain variable domain"
DIRLTQSPVILSVSPGERVSFSCRASQSIGTNIHWYQQRTNGSPRLLIKYASESISGIPSRFSGSGSGTDFTLSINSVESEDIADYYCQQNNNWPTTFGAGTKLELK

SEQ ID NO: 4618 - protein, 107 aa, Artificial Sequence
  source: /note="Description of Artificial Sequence: Synthetic light chain variable domain"
DIRLTQSPVILSVSPGERVSFSCRASQSIGTNIHWYQQRTNGSPRLLIKYASESISGIPSRFSGSGSGTDFTLSINSVESEDIADYYCQQNNNWPTTFGQGTKLELK

SEQ ID NO: 4619 - protein, 107 aa, Artificial Sequence
  source: /note="Description of Artificial Sequence: Synthetic light chain variable domain"
DISLTQSPVILSVSPGERVSFSCRASQSIGTNIHWYQQRTNGSPRLLIKYASESISGIPSRFSGSGSGTDFTLSINSVESEDIADYYCQQNNNWPTTFGAGTKLELK

SEQ ID NO: 4620 - protein, 107 aa, Artificial Sequence
  source: /note="Description of Artificial Sequence: Synthetic light chain variable domain"
DISLTQSPVILSVSPGERVSFSCRASQSIGTNIHWYQQRTNGSPRLLIKYASESISGIPSRFSGSGSGTDFTLSINSVESEDIADYYCQQNNNWPTTFGQGTKLELK

SEQ ID NO: 4621 - protein, 107 aa, Artificial Sequence
  source: /note="Description of Artificial Sequence: Synthetic light chain variable domain"
DITLTQSPVILSVSPGERVSFSCRASQSIGTNIHWYQQRTNGSPRLLIKYASESISGIPSRFSGSGSGTDFTLSINSVESEDIADYYCQQNNNWPTTFGAGTKLELK

SEQ ID NO: 4622 - protein, 107 aa, Artificial Sequence
  source: /note="Description of Artificial Sequence: Synthetic light chain variable domain"
DITLTQSPVILSVSPGERVSFSCRASQSIGTNIHWYQQRTNGSPRLLIKYASESISGIPSRFSGSGSGTDFTLSINSVESEDIADYYCQQNNNWPTTFGQGTKLELK

SEQ ID NO: 4623 - protein, 107 aa, Artificial Sequence
  source: /note="Description of Artificial Sequence: Synthetic light chain variable domain"
DIVLTQSPVILSVSPGERVSFSCRASQSIGTNIHWYQQRTNGSPRLLIKYASESISGIPSRFSGSGSGTDFTLSINSVESEDIADYYCQQNNNWPTTFGAGTKLELK

SEQ ID NO: 4624 - protein, 107 aa, Artificial Sequence
  source: /note="Description of Artificial Sequence: Synthetic light chain variable domain"
DIVLTQSPVILSVSPGERVSFSCRASQSIGTNIHWYQQRTNGSPRLLIKYASESISGIPSRFSGSGSGTDFTLSINSVESEDIADYYCQQNNNWPTTFGQGTKLELK

SEQ ID NO: 4625 - protein, 107 aa, Artificial Sequence
  source: /note="Description of Artificial Sequence: Synthetic light chain variable domain"
DIWLTQSPVILSVSPGERVSFSCRASQSIGTNIHWYQQRTNGSPRLLIKYASESISGIPSRFSGSGSGTDFTLSINSVESEDIADYYCQQNNNWPTTFGAGTKLELK

SEQ ID NO: 4626 - protein, 107 aa, Artificial Sequence
  source: /note="Description of Artificial Sequence: Synthetic light chain variable domain"
DIWLTQSPVILSVSPGERVSFSCRASQSIGTNIHWYQQRTNGSPRLLIKYASESISGIPSRFSGSGSGTDFTLSINSVESEDIADYYCQQNNNWPTTFGQGTKLELK

SEQ ID NO: 4627 - protein, 107 aa, Artificial Sequence
  source: /note="Description of Artificial Sequence: Synthetic light chain variable domain"
DIYLTQSPVILSVSPGERVSFSCRASQSIGTNIHWYQQRTNGSPRLLIKYASESISGIPSRFSGSGSGTDFTLSINSVESEDIADYYCQQNNNWPTTFGAGTKLELK

SEQ ID NO: 4628 - protein, 107 aa, Artificial Sequence
  source: /note="Description of Artificial Sequence: Synthetic light chain variable domain"
DIYLTQSPVILSVSPGERVSFSCRASQSIGTNIHWYQQRTNGSPRLLIKYASESISGIPSRFSGSGSGTDFTLSINSVESEDIADYYCQQNNNWPTTFGQGTKLELK

SEQ ID NO: 4629 - protein, 107 aa, Artificial Sequence
  source: /note="Description of Artificial Sequence: Synthetic light chain variable domain"
DVLLTQSPVILSVSPGERVSFSCRASQSIGTNIHWYQQRTNGSPRLLIKYASESISGIPSRFSGSGSGTDFTLSINSVESEDIADYYCQQNNNWPTTFGAGTKLELK

SEQ ID NO: 4630 - protein, 107 aa, Artificial Sequence
  source: /note="Description of Artificial Sequence: Synthetic light chain variable domain"
DVLLTQSPVILSVSPGERVSFSCRASQSIGTNIHWYQQRTNGSPRLLIKYASESISGIPSRFSGSGSGTDFTLSINSVESEDIADYYCQQNNNWPTTFGQGTKLELK

SEQ ID NO: 4631 - protein, 107 aa, Artificial Sequence
  source: /note="Description of Artificial Sequence: Synthetic light chain variable domain"
DWLLTQSPVILSVSPGERVSFSCRASQSIGTNIHWYQQRTNGSPRLLIKYASESISGIPSRFSGSGSGTDFTLSINSVESEDIADYYCQQNNNWPTTFGAGTKLELK

SEQ ID NO: 4632 - protein, 107 aa, Artificial Sequence
  source: /note="Description of Artificial Sequence: Synthetic light chain variable domain"
DWLLTQSPVILSVSPGERVSFSCRASQSIGTNIHWYQQRTNGSPRLLIKYASESISGIPSRFSGSGSGTDFTLSINSVESEDIADYYCQQNNNWPTTFGQGTKLELK

SEQ ID NO: 4633 - protein, 119 aa, Artificial Sequence
  source: /note="Description of Artificial Sequence: Synthetic light chain variable domain"
  MOD_RES (58)..(58): Any amino acid
  MOD_RES (101)..(103): Any amino acid
  MOD_RES (105)..(105): Any amino acid
QVQLKQSGPGLVQPSQSLSITCTVSGFSLTNYGVHWVRQSPGKGLEWLGVIWSGGNTXYNTPFTSRLSINKDNSKSQVFFKMNSLQSNDTAIYYCARALTXXXYXFAYWGQGTLVTVSA

SEQ ID NO: 4634 - protein, 123 aa, Artificial Sequence
  source: /note="Description of Artificial Sequence: Synthetic light chain variable domain"
MDMRAPTQLLGLLLLWLPGATFAQVLTQTPSPVSAAVGSTVTIKCQSSPSVYSNYLSWYQQKSGQPPKQLIYDASHLASGVPSRFSGSGSGTQFTLTISGVQCDDAATYYCLGSYDCSSVDCH

SEQ ID NO: 4635 - protein, 108 aa, Artificial Sequence
  source: /note="Description of Artificial Sequence: Synthetic light chain variable domain"
DIQMTQSPSFLSASVGDRVTINCKASQNINNYLNWYQQKLGEAPKRLIYNTNNLQTGIPSRFSGSGSGTDYTLTISSLQPEDFATYFCLQHNSFPTFGAGTKLELKRT

SEQ ID NO: 4636 - protein, 108 aa, Artificial Sequence
  source: /note="Description of Artificial Sequence: Synthetic light chain variable domain"
DIQMTQSPSSLSASVGDRVTITCRASQGINNYLNWYQQKPGKAPKRLIYNTNNLQTGVPSRFSGSGSGTEFTLTISSLQPEDFATYYCLQHNSFPTFGQGTKLEIKRT

SEQ ID NO: 4637 - protein, 108 aa, Artificial Sequence
  source: /note="Description of Artificial Sequence: Synthetic light chain variable domain"
EIVLTQSPATLSLSPGERATLSCRASQSVSSYLAWYQQKPGQAPRLLIYDASKRATGIPARFSGSGSGTDFTLTISSLEPEDFAVYYCQQRSKWPPWTFGQGTKVESK

SEQ ID NO: 4638 - protein, 108 aa, Artificial Sequence
  source: /note="Description of Artificial Sequence: Synthetic light chain variable domain"
EIVLTQSPATLSLSPGERATLSCRASQSVSSYLAWYQQKPGQAPRLLIYDASNRATGIPARFSGSGSGTDFTLTISSLEPEDFAVYYCQQRSKWPPWTFGQGTKVEIK

SEQ ID NO: 4639 - protein, 108 aa, Artificial Sequence
  source: /note="Description of Artificial Sequence: Synthetic light chain variable domain"
DIQMTQSPSSMSVSVGDRVTITCHSSQDINSNIGWLQQKPGKSFKGLIYHGTNLDDGVPSRFSGSGSGTDYTLTISSLQPEDFATYYCVQYAQFPWTFGGGTKLEIKR

SEQ ID NO: 4640 - protein, 127 aa, Artificial Sequence
  source: /note="Description of Artificial Sequence: Synthetic light chain variable domain"
MDWTWRILFLVAAATGVHSDIQMTQSPSSMSVSVGDRVTITCHSSQDINSNIGWLQQKPGKSFKGLIYHGTNLDDGVPSRFSGSGSGTDYTLTISSLQPEDFATYYCVQYAQFPWTFGGGTKLEIKR

SEQ ID NO: 4641 - protein, 128 aa, Artificial Sequence
  source: /note="Description of Artificial Sequence: Synthetic light chain variable domain"
MVSTAQFLAFLLLWFPGARCDILMTQSPSSMSVSLGDTVSITCHSSQDINSNIGWLQQRPGKSFKGLIYHGTNLDDEVPSRFSGSGSGADYSLTISSLESEDFADYYCVQYAQFPWTFGGGTKLEIKR

SEQ ID NO: 4642 - protein, 107 aa, Artificial Sequence
  source: /note="Description of Artificial Sequence: Synthetic light chain variable domain"
AIQLTQSPSSLSASVGDRVTITCRASQGIGNDLGWYQLRPGKAPKLLIYATSSLQSGVPSRFSGSGSGTDFTLTISSLQPEDFATYYCLQDYNYPWTFGQGTKVEIK

SEQ ID NO: 4643 - protein, 107 aa, Artificial Sequence
  source: /note="Description of Artificial Sequence: Synthetic light chain variable domain"
AIQMTQSPSSLSASVGDRVTITCRASQGIGNDLGWYQQKPGKAPNLLIYATSSLQSGVPSRFSGSGSGTDFTLTISSLQPEDFATYYCLQDYNYPWTFGQGTKVEIK

SEQ ID NO: 4644 - protein, 107 aa, Artificial Sequence
  source: /note="Description of Artificial Sequence: Synthetic light chain variable domain"
AIQMTQSPSSLSASVGDRVTITCRASQGIGYDLGWYQQKPGKAPKLLIYAASSLQSGVPSRFSGSGSGTDFTLTISSLQPEDFATYYCLQDYNYPWTFGQGTKVDIK

SEQ ID NO: 4645 - protein, 107 aa, Artificial Sequence
  source: /note="Description of Artificial Sequence: Synthetic light chain variable domain"
DIQLTQSPSFLSASVGDRVTITCWASQGINNYLAWYQQKPGKAPKLLIYAASTLQTGVPSRFSGSGSGTEFTLTISSLQPEDFATYYCQQLNSYPLTFGGGTKVEIK

SEQ ID NO: 4646 - protein, 108 aa, Artificial Sequence
  source: /note="Description of Artificial Sequence: Synthetic light chain variable domain"
DIQMTQSPSSVSASVGDRVTITCRASQGISSWLAWYQQQPGKAPKLLIYAASSLQSGVPSRFSGSGSGTDFTLTISSLQPEDFATYYCQQTNSFPLTFGGGTKVEIKR

SEQ ID NO: 4647 - protein, 107 aa, Artificial Sequence
  source: /note="Description of Artificial Sequence: Synthetic light chain variable domain"
DIQMTQSPSTLSASVGDRVTITCRASQSTSSWLAWYQQKPGKAPTLLIYKASSLESGVPSKFSGSGSGTEFTLTISSLQPDDFATYYCQQYNRYSRTFGQGTKVEIK

SEQ ID NO: 4648 - protein, 114 aa, Artificial Sequence
  source: /note="Description of Artificial Sequence: Synthetic light chain variable domain"
DIVMTQSPDSLAVSLGERATINCKSSQSVLYSSNNKNYLAWYQHKPGQPPNLLIYWASTRESGVPDRFSGSGSGTDFTLTISSLQAEDVAVYYCHQYYSTPFTFGPGTKVDIKR

SEQ ID NO: 4649 - protein, 113 aa, Artificial Sequence
  source: /note="Description of Artificial Sequence: Synthetic light chain variable domain"
DVVMTQSPLSLPVALGQPASISCRSSQSLVYTDGNTYLNWFHQRPGQSPRRLIYKVSNRDSGVPDRFTGSGSGTDFTLKISRVEAEDVGVFYCMQGSHWPPYTFGQGTKLEIK

SEQ ID NO: 4650 - protein, 108 aa, Artificial Sequence
  source: /note="Description of Artificial Sequence: Synthetic light chain variable domain"
EIALTQSPGTLSLSPGERATLSCRASQSVSSTYLAWYQQKPGQAPRLLIYGASSRATGIPDRFSGSGSGTDFTLTISRLEPEDFAVYYCQQYDSSPITFGQGTRLEIK

SEQ ID NO: 4651 - protein, 112 aa, Artificial Sequence
  source: /note="Description of Artificial Sequence: Synthetic light chain variable domain"
AIVLTQTPLSSPVTLGQPASISCRSSQSLVHRDGNTYLSWLQQRPGQPPRLLIYKISNRFSGVPDRFSGSGAGTDFTLKISRVEPDDVGVYYCMHTTQLPWTFGQGTKVEIK

SEQ ID NO: 4652 - protein, 107 aa, Artificial Sequence
  source: /note="Description of Artificial Sequence: Synthetic light chain variable domain"
DIQMTQSPSSLSASVGDSVTITCRTSQGIRKNLGWYQQKPGKAPKRLIYAASSLQSGVPSRFSGSGSGTEFTLTISRLQPEDFATYYCLQHHSYPLTFGGGTRVEIR

SEQ ID NO: 4653 - protein, 112 aa, Artificial Sequence
  source: /note="Description of Artificial Sequence: Synthetic light chain variable domain"
DIVMTQSPLSLPVTPGEPASISCRSSQSLLYRNGNNYLDWYLQKPGQSPQLLIYLGSNRASGVPDRFSGSGSGTDFTLNISRVEAEDVGHYYCMQALQTPRTFGQGTKVEIK

SEQ ID NO: 4654 - protein, 112 aa, Artificial Sequence
  source: /note="Description of Artificial Sequence: Synthetic light chain variable domain"
DIVMTQSPLSLPVTPGEPASISCRSSQSLLYRNGNNYLDWYLQRPGQSPQLLIYLGSNRASGVPDRFSGSGSGTDFTLKISRVEAEDVGVYYCMQALQTPRTFGQGTKVEIK

SEQ ID NO: 4655 - protein, 112 aa, Artificial Sequence
  source: /note="Description of Artificial Sequence: Synthetic light chain variable domain"
DIVMTQTPLSSPVTLGQPASISCRSSQSLIHTDGNIYLSWLQQRPGQPPRLLIYKISNRFSGVPDRFSGSGAGTDFTLKISRVEAEDVGVYYCMQGTQFPITFGQGTRLEIK

SEQ ID NO: 4656 - protein, 112 aa, Artificial Sequence
  source: /note="Description of Artificial Sequence: Synthetic light chain variable domain"
DIVMTQTPLSSPVTLGQPASISCRSSQSLVHRDGNTYLSWLQQRPGQPPRLLIYKISNRFSGVPDRFSGSGAGTDFTLKISRVEAEDVGIYFCMHTTQFPWTFGQGTRVEIK

SEQ ID NO: 4657 - protein, 113 aa, Artificial Sequence
  source: /note="Description of Artificial Sequence: Synthetic light chain variable domain"
DIVMTQTPLSSPVTLGQPASISCRSSQSLVHSDGNTYLSWLHQRPGQPPRLLIYKISNRFSGVPDRFSGSGAGTAFTLKISRVEAEDVGVYYCMQATQLPRTFGQGTKVEIKR

SEQ ID NO: 4658 - protein, 165 aa, Artificial Sequence
  source: /note="Description of Artificial Sequence: Synthetic light chain variable domain"
DIVMTQTPLSSPVTLGQPASISCRSSQSLVHSDGNTYLSWLHQRPGQPPRLLIYKISNRFSGVPDRFSGSGAGTAFTLKISRVEAEDVGVYYCMQATQLPRTFGQGTKVEIKRTVAAPSVFIFPPSDEQLKSGTASVVCLLNNFYPREAKVQWKVDNALQSGNSQ

SEQ ID NO: 4659 - protein, 113 aa, Artificial Sequence
  source: /note="Description of Artificial Sequence: Synthetic light chain variable domain"
DIVMTQTPLSSPVTLGQPASISCRSSQSLVHSDGNTYLSWLQQRPGQPPRLLIYKISNRFSGVPDRFSGSGAGTDFTLKISRVEAEDVGVYYCMQATQFPRTFGQGTKVEIKR

SEQ ID NO: 4660 - protein, 112 aa, Artificial Sequence
  source: /note="Description of Artificial Sequence: Synthetic light chain variable domain"
DTVMTQTPLSSHVTLGQPASISCRSSQSLVHSDGNTYLSWLQQRPGQPPRLLIYRISRRFSGVPDRFSGSGAGTDFTLEISRVEAEDVGVYYCMQSTHVPRTFGQGTKVEIK

SEQ ID NO: 4661 - protein, 108 aa, Artificial Sequence
  source: /note="Description of Artificial Sequence: Synthetic light chain variable domain"
DIELTQSPASLSVATGEKVTIRCMTSTDIDDDMNWYQQKPGEPPKFLISEGNTLRPGVPSRFSSSGTGTDFVFTIENTLSEDVGDYYCLQSFNVPLTFGDGTKLEKAL

SEQ ID NO: 4662 - protein, 214 aa, Artificial Sequence
  source: /note="Description of Artificial Sequence: Synthetic light chain variable domain"
DIQMTQSPSSMSVSVGDRVTITCHSSQDINSNIGWLQQKPGKSFKGLIYHGTNLDDGVPSRFSGSGSGTDYTLTISSLQPEDFATYYCVQYAQFPWTFGGGTKLEIKRTVAAPSVFIFPPSDEQLKSGTASVVCLLNNFYPREAKVQWKVDNALQSGNSQESVTEQDSKDSTYSLSSTLTLSKADYEKHKVYACEVTHQGLSSPVTKSFNRGEC

SEQ ID NO: 4663 - protein, 107 aa, Artificial Sequence; identical to SEQ ID NO: 4645
  source: /note="Description of Artificial Sequence: Synthetic light chain variable domain"

SEQ ID NO: 4664 - protein, 107 aa, Artificial Sequence
  source: /note="Description of Artificial Sequence: Synthetic light chain variable domain"
DIQMTQSPSSLSASVGDRVTITCRASQGIRNNLAWYQQKPGKAPKRLIYAASNLQSGVPSRFTGSGSGTEFTLIVSSLQPEDFATYYCLQHHSYPLTSGGGTKVEIK

SEQ ID NO: 4665 - protein, 106 aa, Artificial Sequence
  source: /note="Description of Artificial Sequence: Synthetic light chain variable domain"
DIQMTQSPSSLSASVGDRVTISCRASSSVSYMHWYQQKPGKAPKPWAYATSNLASGVPSRFSGSGSGTDYTLTFSSLQPEDFATYYCQQWSSNPLTFGGGTKVEIK

SEQ ID NO: 4666 - protein, 119 aa, Artificial Sequence
  source: /note="Description of Artificial Sequence: Synthetic light chain variable domain"
EVQLVESGGGLVKPGGSLRLSCAASGFTFSDAWMDWVRQAPGTYKGLEWVAEIRSKASNHAYYAESVKGRFTISRDDSKNTLYLQMNSLKTEDTAVYYCTRWRRFFDSWGQGTLVTVSS

SEQ ID NO: 4667 - protein, 118 aa, Artificial Sequence; identical to SEQ ID NO: 2158
  source: /note="Description of Artificial Sequence: Synthetic light chain variable domain"

SEQ ID NO: 4668 - protein, 118 aa, Artificial Sequence
  source: /note="Description of Artificial Sequence: Synthetic light chain variable domain"
EVQLVESQGGLVKPGGSLRLSCAASGFTFSDAWMDWVRQAPGKGLEWVGEIRSQASNHATYYAESVKGRFTISRDDSKNTLYLQMNSLKTEDTAVYYCTRWRRFFDSWGQGTLVTVSS

SEQ ID NO: 4669 - protein, 118 aa, Artificial Sequence; identical to SEQ ID NO: 2160
  source: /note="Description of Artificial Sequence: Synthetic light chain variable domain"

SEQ ID NO: 4670 - protein, 120 aa, Artificial Sequence
  source: /note="Description of Artificial Sequence: Synthetic light chain variable domain"
EVQLVESGGGLVKPGGSLRLSCAASGFTFSDAWMDWVRQAPGKGLEWVSEIRSKASNHATYYAESVKGRFTFSRDDSKNTLYLQMNSLKTEDTAVYYCTRWRRPLEFDSWGQGTLVTVSS

SEQ ID NO: 4671 - protein, 106 aa, Artificial Sequence
  source: /note="Description of Artificial Sequence: Synthetic light chain variable domain"
DIQMTQSPSSLSASVGDRATITCRASSSVSYMHWYQQKPGKAPKPWAYATSNLASGVPSRFSGSGSGTDYTLTISSLQPEDFATYYCQQWSSNPLTFGGGTKVEIK

SEQ ID NO: 4672 - protein, 106 aa, Artificial Sequence
  source: /note="Description of Artificial Sequence: Synthetic light chain variable domain"
DIQLTQSPSSLSASVGDRATITCRASSSVSYMHWYQQKPGKAPKPWAYATSNLASGVPSRFSGSGSGTDYWLTISSLQPEDFATYYCQQWSSNPLTFGGGTKVEIK

SEQ ID NO: 4673 - protein, 106 aa, Artificial Sequence
  source: /note="Description of Artificial Sequence: Synthetic light chain variable domain"
DIQLTQSPSSLSASVGDRATITCRASSSVSYMHWYQQKPGKAPKPWIYASSNLASGVPSRFSGSGSGTDYTLTISSLQPEDFATYYCQQWSSNPLTFGGGTKVEIK

SEQ ID NO: 4674 - protein, 106 aa, Artificial Sequence
  source: /note="Description of Artificial Sequence: Synthetic light chain variable domain"
DIQLTQSPSSLSASVGDRVTISCRASSSVSYMHWYQQKPGKAPKPWAYATSNLASGVPSRFSGSGSGTDYTLTISSLQPEDFATYYCQQWSSNPLTFGGGTKVEIK

SEQ ID NO: 4675 - protein, 180 aa, Artificial Sequence
  source: /note="Description of Artificial Sequence: Synthetic light chain variable domain"
DIQLTQSPSSLSASVGDRVTISCRASSSVSYMHWYQQKPGKAPKPWIYASSNLASGVPSRFSGSGSGTDYTLTISSLQPEDFATYYCQQWSSNPLTFGGGTKVEIKHWYQQKPGKAPKPWIYASSNLASGVPSRFSGSGSGTDYTLTISSLQPEDFATYYCQQWSSNPLTFGGGTKVQIL

SEQ ID NO: 4676 - protein, 106 aa, Artificial Sequence
  source: /note="Description of Artificial Sequence: Synthetic light chain variable domain"
DIQMTQSPSSLSASVGDRATITCRASSSVSYMHWYQQKPGKAPKPWIYASSNLASGVPSRFSGSGSGTDYWLTISSLQPEDFATYYCQQWSSNPLTFGGGTKVEIK

SEQ ID NO: 4677 - protein, 106 aa, Artificial Sequence
  source: /note="Description of Artificial Sequence: Synthetic light chain variable domain"
DIQMTQSPSSLSASVGDRVTISCRASSSVSYMHWYQQKPGKAPKPWIYASSNLASGVPSRFSGSGSGTDYTLTISSLQPEDFATYYCQQWSSNPLTFGGGTKVEIK

SEQ ID NO: 4678 - protein, 106 aa, Artificial Sequence; identical to SEQ ID NO: 4677
  source: /note="Description of Artificial Sequence: Synthetic light chain variable domain"

SEQ ID NO: 4679 - protein, 106 aa, Artificial Sequence; identical to SEQ ID NO: 3296
  source: /note="Description of Artificial Sequence: Synthetic light chain variable domain"

SEQ ID NO: 4680 - protein, 106 aa, Artificial Sequence; identical to SEQ ID NO: 3297
  source: /note="Description of Artificial Sequence: Synthetic light chain variable domain"

SEQ ID NO: 4681 - protein, 106 aa, Artificial Sequence
  source: /note="Description of Artificial Sequence: Synthetic light chain variable domain"
DIQMTQSPSSLSASVGDRVTITCRASSSVSYMHWYQQKPGKAPKLLIYATSNLASGVPSRFSGSGSGTDFTLTISSLQPEDFATYYCQQWSSNPLTFGGGTKVEIK

SEQ ID NO: 4682 - protein, 106 aa, Artificial Sequence
  source: /note="Description of Artificial Sequence: Synthetic light chain variable domain"
DIQMTQSPSSLSASVGDRVTITCRASSSVSYMHWYQQKPGKAPKPWIYATSNLASGVPSRFSGSGSGTDYTLTISSLQPEDFATYYCQQWSSNPLTFGGGTKVEIK

SEQ ID NO: 4683 - protein, 106 aa, Artificial Sequence
  source: /note="Description of Artificial Sequence: Synthetic light chain variable domain"
DIQLTQSPSSLSASVGDRVTITCRASSSVSYMHWYQQKPGKAPKPWIYATSNLASGVPSRFSGSGSGTDYTLTISSLQPEDFATYYCQQWSSNPLTFGGGTKVEIK

SEQ ID NO: 4684 - protein, 106 aa, Artificial Sequence
  source: /note="Description of Artificial Sequence: Synthetic light chain variable domain"
EIVLTQSPATLSLSPGERATLSCRASSSVSYMHWYQQKPGQAPRLLIYATSNLASGIPARFSGSGSGTDFTLTISSLEPEDFAVYYCQQWSSNPLTFGGGTKVEIK

SEQ ID NO: 4685 - protein, 106 aa, Artificial Sequence
  source: /note="Description of Artificial Sequence: Synthetic light chain variable domain"
EIVLTQSPATLSLSPGERATLSCRASSSVSYMHWYQQKPGQAPRPWIYATSNLASGVPARFSGSGSGTDYTLTISSLEPEDFAVYYCQQWSSNPLTFGGGTKVEIK

SEQ ID NO: 4686 - protein, 118 aa, Artificial Sequence
  source: /note="Description of Artificial Sequence: Synthetic light chain variable domain"
EVQLVESGGGLVQPGGSLKLSCAASGFTFSDAWMDWVRQASGKGLEWVGEIRSKASNHATYYAESVKGRFTISRDDSKNTAYLQMNSLKTEDTAVYYCTRWRRFFDSWGQGTLVTVSS

SEQ ID NO: 4687 - protein, 106 aa, Artificial Sequence; identical to SEQ ID NO: 4671
  source: /note="Description of Artificial Sequence: Synthetic light chain variable domain"

SEQ ID NO: 4688 - protein, 106 aa, Artificial Sequence; identical to SEQ ID NO: 3294
  source: /note="Description of Artificial Sequence: Synthetic light chain variable domain"

SEQ ID NO: 4689 - protein, 106 aa, Artificial Sequence; identical to SEQ ID NO: 4673
  source: /note="Description of Artificial Sequence: Synthetic light chain variable domain"

SEQ ID NO: 4690 - protein, 106 aa, Artificial Sequence; identical to SEQ ID NO: 4674
  source: /note="Description of Artificial Sequence: Synthetic light chain variable domain"

SEQ ID NO: 4691 - protein, 106 aa, Artificial Sequence; identical to SEQ ID NO: 3295
  source: /note="Description of Artificial Sequence: Synthetic light chain variable domain"

SEQ ID NO: 4692 - protein, 111 aa, Artificial Sequence
  source: /note="Description of Artificial Sequence: Synthetic light chain variable domain"
QIVLTQSPAIMSASLGERVTMTCTVSSSVNSSYLHWYQQKPGSSPKLWIYSTSNLPSGVPARFSGSGSGTSYSLTISTIESEDAATYYCHQYHRSPQFTFGSGTKLEIKRA

SEQ ID NO: 4693 - protein, 112 aa, Artificial Sequence
  source: /note="Description of Artificial Sequence: Synthetic light chain variable domain"
DIVLTQSPASLAVSLGQRATISCRASESVDTFGYSFIYWYQQKPGQPPRLLIYRASNLESGIPARFSGSGSRTDFTLTINPVEADDVATYYCQQSNEDPPTFGGGTKLEIKR

SEQ ID NO: 4694 - protein, 113 aa, Artificial Sequence
  source: /note="Description of Artificial Sequence: Synthetic light chain variable domain"
DVVMSQIPLTLSVTIGQPASISCKSSQSLIHSDGKTYLNWLLQRPGQSPKRLIYLVSRLDSGVPDRFTGSGSGTDFTLKISRVEAEDLGVYYCWQGSHFPRTFGGGTKLEIKR

SEQ ID NO: 4695 - protein, 110 aa, Artificial Sequence
  source: /note="Description of Artificial Sequence: Synthetic light chain variable domain"
EIVLTQSPATMSASPGERVTMTCTVSSSVNSSYLHWYQQKPGSSPKLWIYSTSNLPSGVPARFSGSGSGTSYSLTISTIESEDAATYYCHQYHRSPQFTFGGGTKLEIKR

SEQ ID NO: 4696 - protein, 112 aa, Artificial Sequence
  source: /note="Description of Artificial Sequence: Synthetic light chain variable domain"
DIVLTQSPDSLAVSLGERATISCRASESVDTFGYSFIYWYQQKPGQPPRLLIYRASNLESGIPDRFSGSGSRTDFTLTINPVEAEDVATYYCQQSNEDPPTFGGGTKLEIKR

SEQ ID NO: 4697 - protein, 112 aa, Artificial Sequence
  source: /note="Description of Artificial Sequence: Synthetic light chain variable domain"
DIVLTQSPDSLAVSLGERATISCRASESVDTFGYSFIYWYQQKPGQPPRLLIYRASNLESGIPARFSGSGSRTDFTLTINPVEAEDVATYYCQQSNEDPPTFGGGTKLEIKR

SEQ ID NO: 4698 - protein, 112 aa, Artificial Sequence
  source: /note="Description of Artificial Sequence: Synthetic light chain variable domain"
DIVLTQSPDSLAVSLGERATISCRASESVDTFGYSFIYWYQQKPGQPPRLLIYRASNLESGIPDRFSGSGSRTDFTLTINPVEADDVATYYCQQSNEDPPTFGGGTKLEIKR

SEQ ID NO: 4699 - protein, 113 aa, Artificial Sequence
  source: /note="Description of Artificial Sequence: Synthetic light chain variable domain"
DVVMTQTPLSLSVTLGQPASISCKSSQSLIHSDGKTYLNWLLQRPGQSPKRLIYLVSRLDSGVPDRFTGSGAGTDFTLKISRVEAEDLGVYYCWQGSHFPRTFGGGTKLEIKR

SEQ ID NO: 4700 - protein, 112 aa, Artificial Sequence
  source: /note="Description of Artificial Sequence: Synthetic light chain variable domain"
DIVLTQSPGSLAVSLGQRATISCRASESVDTYGNSFMHWYQQKAGQPPRLLIYRASNLESGIPARFSGSGSRTDFTLTINPVEADDVATYYCQQSNEDPLTFGAGTKLELKR

SEQ ID NO: 4701 - protein, 107 aa, Artificial Sequence
  source: /note="Description of Artificial Sequence: Synthetic light chain variable domain"
QIVLTQSPALMSASPGEKVTMTCSASSSVSYMYWYQQKPRSSPKPWIYITSNLASGVPARFSGSGSGTSYSLTISSMEAEDAATYYCQQWSSNPPTFGGGTKLEIKR

SEQ ID NO: 4702 - protein, 107 aa, Artificial Sequence
  source: /note="Description of Artificial Sequence: Synthetic light chain variable domain"
DTVMTQSHKIMSTSVGDRVSITCKASQDVSIGVAWYQQRPGQSPKLLIYSASYRYTGVPDRFTGSGSGTDFTFTISSVQAEDLAVYYCQQYYIYPYTFGGGTKLEIK

SEQ ID NO: 4703 - protein, 107 aa, Artificial Sequence
  source: /note="Description of Artificial Sequence: Synthetic light chain variable domain"
DIQMTQSPSSLSASVGDRVTITCRASQGISNHLAWFQQKPGKAPKSLIYGASSLQTGVPSKFSGSGSGTDFTLTISSLQPEDFASYFCQQYKGYPITFGQGTRLEIK

SEQ ID NO: 4704 - protein, 113 aa, Artificial Sequence
  source: /note="Description of Artificial Sequence: Synthetic light chain variable domain"
DIVMTQSPDSLAVSLGERATITCKSSQSVFFRSNNKNCLTWYQQRPGQPPNLLIYWASTRESGVPDRFSGSGSGTDFTLTINNLQAEDVAVYYCQQYFGSPFTFGPGTKVDIK

SEQ ID NO: 4705 - protein, 113 aa, Artificial Sequence
  source: /note="Description of Artificial Sequence: Synthetic light chain variable domain"
DIVMTQSPDSLAVSLGERATITCKSSQSVFFRSNNKNCLAWYQQRPGQPPNLLIYWASTRESGVPDRFSGSGCGTDFTLTISSLQAEDVAVYYCQQYFGSPFTFGPGTKVDIK

SEQ ID NO: 4706 - protein, 113 aa, Artificial Sequence
  source: /note="Description of Artificial Sequence: Synthetic light chain variable domain"
DIVMTQSPDSLAVSLGERATITCKSSQSVFFRSNNKNCLAWYQQRPGQPPNLLFYWASTRESGVPDRFSGSGSGTDFTLTISSLQAEDVAVYYCQQYFGSPFTLGPGTKVDIK

SEQ ID NO: 4707 - protein, 113 aa, Artificial Sequence
  source: /note="Description of Artificial Sequence: Synthetic light chain variable domain"
DIVMTQSPGSLVVSLGERATITCKSSQSVFFRSNNKNCLAWYQQRPGQSPNLLIYWASTRESGVPDRFSGSGSGTDFTLTISSLQAEDVAVYYCQQYFGSPFTFGPGTKVDIK

SEQ ID NO: 4708 - protein, 113 aa, Artificial Sequence
  source: /note="Description of Artificial Sequence: Synthetic light chain variable domain"
DIVMTQSPDSLAVSLGERATITCKSSQSVFFRSNNKNCLAWYQQRPGQPPNLLIYWASSRESGVPDRFSGSGSGTDFALTISSLQTEDVAVYYCQQYFGSPFTFGPGTKVDIK

SEQ ID NO: 4709 - protein, 112 aa, Artificial Sequence
  source: /note="Description of Artificial Sequence: Synthetic light chain variable domain"
DVVMTQSPLSLPVTLGQPASISCRSSQSLVYSDGNTYLNWFQQRPGQSPRRLIYKVSNWDSGVPDRFSGSGSGTDFTLKISRVEAEDVGVYYCMQGTHWPLTFGGGTKVEIK

SEQ ID NO: 4710 - protein, 107 aa, Artificial Sequence
  source: /note="Description of Artificial Sequence: Synthetic light chain variable domain"
DIQMTQSPSSLSASVGDRVTITCRASQGISNYLAWFQQKPGKAPKSLIYAASSLQSGVPSRFSGSGSGTDFTLTISSLQPEDFATYYCQQYNSYPITFGQGTRLEIK

SEQ ID NO: 4711 - protein, 113 aa, Artificial Sequence
  source: /note="Description of Artificial Sequence: Synthetic light chain variable domain"
DIVMTQSPDSLAVSLGERATINCKSSQSVLYSSNNKNYLAWYQQKPGQPPKLLIYWASTRESGVPDRFSGSGSGTDFTLTISSLQAEDVAVYYCQQYYSTPFTFGPGTKVDIK

SEQ ID NO: 4712 - protein, 112 aa, Artificial Sequence
  source: /note="Description of Artificial Sequence: Synthetic light chain variable domain"
  MOD_RES (100)..(101): Any amino acid
DVVMTQSPLSLPVTLGQPASISCRSSQSLVYSDGNTYLNWFQQRPGQSPRRLIYKVSNWDSGVPDRFSGSGSGTDFTLKISRVEAEDVGVYYCMQGTHWXXTFGGGTKVEIK

SEQ ID NO: 4713 - protein, 113 aa, Artificial Sequence
  source: /note="Description of Artificial Sequence: Synthetic light chain variable domain"
DIVMTQSPDSLAVSLGERATITCKSSQSVFFRSNNKNCLAWYQQRPGQPPNLLIYWASTRESGVPDRFSGSGSGTDFTLTISSLQAEDVAVYYCQQYFGSPFTFGPGTKVDIK

SEQ ID NO: 4714 - protein, 107 aa, Artificial Sequence
  source: /note="Description of Artificial Sequence: Synthetic light chain variable domain"
  MOD_RES (30)..(30): Any amino acid
  MOD_RES (53)..(53): Any amino acid
  MOD_RES (92)..(92): Any amino acid
DIQMTQSPSSLSASVGDRVTITCRASQDVXTAVAWYQQKPGKAPKLLIYSASXLYSGVPSRFSGSRSGTDFTLTISSLQPEDFATYYCQQHXTTPPTFGQGTKVEIK

SEQ ID NO: 4715 - protein, 107 aa, Artificial Sequence
  source: /note="Description of Artificial Sequence: Synthetic light chain variable domain"
DIQVTQSPSSLSASVGDRVTITCITSTDIESDMNWYQQKPGKVPKLLISGGNTLRPGVPSRFSGSGSGTDFTLTISSLQPEDVATYYCLQSDSLPYTFGQGTKVEIK

SEQ ID NO: 4716 - protein, 107 aa, Artificial Sequence
  source: /note="Description of Artificial Sequence: Synthetic light chain variable domain"
DIQVTQSPSSLSASVGDRVTITCITSTDIESDMNWYQQKPGKVPKLLISGGNTLRPGVPSRFSGSGSGTDFTLTISSLQPEDVATYYCLQSESLPYTFGQGTKVEIK

SEQ ID NO: 4717 - protein, 107 aa, Artificial Sequence
  source: /note="Description of Artificial Sequence: Synthetic light chain variable domain"
DIQVTQSPSSLSASVGDRVTITCITSTSIESDMNWYQQKPGKVPKLLISGGNTLRPGVPSRFSGSGSGTDFTLTISSLQPEDVATYYCLQSDSLPYTFGQGTKVEIK

SEQ ID NO: 4718 - protein, 214 aa, Artificial Sequence
  source: /note="Description of Artificial Sequence: Synthetic light chain variable domain"
DIQVTQSPSSLSASVGDRVTITCITSTSIESDMNWYQQKPGKVPKLLISGGNTLRPGVPSRFSGSGSGTDFTLTISSLQPEDVATYYCLQSDSLPYTFGQGTKVEIKRTVAAPSVFIFPPSDEQLKSGTASVVCLLNNFYPREAKVQWKVDNALQSGNSQESVTEQDSKDSTYSLSSTLTLSKADYEKHKVYACEVTHQGLSSPVTKSFNRGEC

SEQ ID NO: 4719 - protein, 107 aa, Artificial Sequence [sequence omitted]

SEQ ID NO: 4720 - protein, 454 aa, Artificial Sequence
  source: /note="Description of Artificial Sequence: Synthetic light chain variable domain"
EVQLQQSGAELVRPGASVKLSCTASGFNIKDDYMHWVKQRPEQGLEWIGWIDPENGDTEYASKFQGKATITSDTSSNTAYLQLSSLTSEDTAVYYCTENYYGSSFFAYWGQGTLVTVSAAKTTAPSVYPLAPVCGGTTGSSVTLGCLVKGYFPEPVTLTWNSGSLSSGVHTFPALLQSGLYTLSSSVTVTSNTWPSQTITCNVAHPASSTKVDKKIEPRVPITQNPCPPLKECPPCAAPDLLGGPSVFIFPPKIKDVLMISLSPMVTCVVVDVSEDDPDVQISWFVNNVEVHTAQTQTHREDYNSTLRVVSALPIQHQDWMSGKEFKCKVNNRALPSPIEKTISKPRGPVRAPQVYVLPPPAEEMTKKEFSLTCMITGFLPAEIAVDWTSNGRTEQNYKNTATVLDSDGSYFMYSKLRVQKSTWERGSLFACSVVHEGLHNHLTTKTISRSLGK

SEQ ID NO: 4721 - protein, 238 aa, Artificial Sequence
  source: /note="Description of Artificial Sequence: Synthetic light chain variable domain"
METDTLLLWVLLLWVPGSTGDIQMTQSPSSLSASVGDRVTITCRASKSVSTSAYSYMHWYQQKPGKAPKLLIYLASNLESGVPSRFSGSGSGTDFTLTISSLQPEDFATYYCQHSRELPYTFGQGTKLEIKRTVAAPSVFIFPPSDEQLKSGTASVVCLLNNFYPREAKVQWKVDNALQSGNSQESVTEQDSKDSTYSLSSTLTLSKADYEKHKVYACEVTHQGLSSPVTKSFNRGEC

SEQ ID NO: 4722 - protein, 112 aa, Artificial Sequence
  source: /note="Description of Artificial Sequence: Synthetic light chain variable domain"
DIQMTQSPSSLSASVGDRVTITCRASKSVSTSAYSYMHWYQQKPGKAPKLLIYLASNLESGVPSRFSGSGSGTDFTLTISSLQPEDFATYYCQHSRELPYTFGQGTKLEIKR

SEQ ID NO: 4723 - protein, 113 aa, Artificial Sequence
  source: /note="Description of Artificial Sequence: Synthetic light chain variable domain"
DIVMTQSPDSLAVSLGERATINCKSSQSLLYSRNQKNYLAWYQQKPGQPPKLLIFWASTRESGVPDRFSGSGFGTDFTLTISSLQAEDVAVYYCQQYFSYPLTFGQGTKVEIK

SEQ ID NO: 4724 - protein, 107 aa, Artificial Sequence
  source: /note="Description of Artificial Sequence: Synthetic light chain variable domain"
QIVLTQSPAIMSASPGEKVTMTCSASSGVNFMHWYQQKSGTSPKRWIFDTSKLASGVPARFSGSGSGTSYSLTISSMEAEDAATYYCQQWSFNPPTFGGGTKLEIKR

SEQ ID NO: 4725 - protein, 112 aa, Artificial Sequence
  source: /note="Description of Artificial Sequence: Synthetic light chain variable domain"
DVLMTQTPLWLPVSLGDQASISCRSSQSIVHSNGNTYLEWYLQKPGQSPKLLIYKVSNRFSGVPDRFSGSGSGTDFTVKISRVEAEDLGVYYCFGGSHVPYTFGGGTKLEIK

SEQ ID NO: 4726 - protein, 108 aa, Artificial Sequence
  source: /note="Description of Artificial Sequence: Synthetic light chain variable domain"
QSVLTQPPSVSVSPGQTASISCSGNKLGTKYVYWYQKRPGQSPVLVMYEDNQRPSGIPERFSGSNSGNTATLTIRGTQTVDEADYYCQAWDSDTFVVFGGGTKVTVLG

SEQ ID NO: 4727 - protein, 110 aa, Artificial Sequence
  source: /note="Description of Artificial Sequence: Synthetic light chain variable domain"
SYVLTQPPSVSVAPGKTARITCGGNNIGSKSVHWYQQKPGQAPVVVIHYDSDRPSGIPERFSGSNSGNTATLTISRVEAGDEADYYCQVWDSSSDHPYVFGTGTKVTVLG

SEQ ID NO: 4728 - protein, 109 aa, Artificial Sequence
  source: /note="Description of Artificial Sequence: Synthetic light chain variable domain"
SYVLTQPLSVSVAPGKTARITCGGNNIGSKTVHWYQQKPGQAPVLVIYYDSDRPSGIPERFSGSNSGNTATLTISRVEAGDEADYYCQVWDSSSDHRVFGGGTKLTVLG

SEQ ID NO: 4729 - protein, 110 aa, Artificial Sequence
  source: /note="Description of Artificial Sequence: Synthetic light chain variable domain"
QSALTQPASVSGSPGQSMSCTGTSSDVGGYNYVSWYQQHPGKAPKLMIYDVSNRPSGVSNRFSGSKSGNTASLTISGLQAEDEADYYCSSYTSSSTSKVFGGGTKLTVLG

SEQ ID NO: 4730 - protein, 111 aa, Artificial Sequence
  source: /note="Description of Artificial Sequence: Synthetic light chain variable domain"
QSVLTQPPSASGTPGQTVTISCSGSNSNIGSNYVYWYQQLPGTAPKLLIYRNNQRPSGVPDRFSGSKSGTSASLAISGLRSEDEADYYCAAWDDSLSAYVFGTGTKVTVLG

SEQ ID NO: 4731 - protein, 111 aa, Artificial Sequence
  source: /note="Description of Artificial Sequence: Synthetic light chain variable domain"
QSVLTQPPSASGTPGQRVTISCSGSSSNIGSNTVNWYQQLPGTAPKLLIYSNNQRPSGVPDRFSGSKSGTSASLAISGLQSEDEADYYCAAWDDSLNGYVFGTGTKVTVLG

SEQ ID NO: 4732 - protein, 110 aa, Artificial Sequence
  source: /note="Description of Artificial Sequence: Synthetic light chain variable domain"
QSALTQPASVSGSPGQSMSCTGTSSDVGGYNSVSWYQQHPGKAPRLMIYDVSNRPSGVSNRFSGSKSGNTASLTISGLQAEDEADYYCSSYTSSSTPLVFGTGTKVTVLG

SEQ ID NO: 4733 - protein, 111 aa, Artificial Sequence
  source: /note="Description of Artificial Sequence: Synthetic light chain variable domain"
QSVVTQPPSVSAAPGQRVTISCSGSSSNISIYDVSWYQQLPGTAPKLLIYGNNKRPSGIADRFSGSTSGTSATLGITGLQTGDEADYYCGTWDDSLSGGVFGGGTKLTVLG

SEQ ID NO: 4734 - protein, 111 aa, Artificial Sequence
  source: /note="Description of Artificial Sequence: Synthetic light chain variable domain"
QSVLTQPPSVSAAAGQKVTISCSGSDSNIGNNYVSWYQHLPGTAPKLLIYDVKNRPSGIPDRFSGSKSGSSATLGIAGLQPGDEADYYCGTWDSRLDAYVFGTGTKVTVLG

SEQ ID NO: 4735 - protein, 112 aa, Artificial Sequence
  source: /note="Description of Artificial Sequence: Synthetic light chain variable domain"
QSVVTQPPSVSGAPGQRVTISCTGSTSNIGAGYDVHWYQQLPGTAPKLLIYTNNFRPSGVPDRFSASKSGTSASLAITGLQAEDEADYYCGTWDSSLSAVVFGGGTKLTVLG

SEQ ID NO: 4736 - protein, 109 aa, Artificial Sequence
  source: /note="Description of Artificial Sequence: Synthetic light chain variable domain"
SYVLTQPPSVSVAPGKTARITCGGNNIGSKSVHWYQQKPGQAPVLVIYYDSDRPSGIPERFSGSNSGNTATLTISRVEAGDEADYYCQVWDSSSDHYVFGTGTKVTVLG

SEQ ID NO: 4737 - protein, 112 aa, Artificial Sequence
  source: /note="Description of Artificial Sequence: Synthetic light chain variable domain"
NFMLTQPHSVSESPGKTVTISCTRSSGSIASNYVQWYQQRPGSAPTTVIYEDNQRPSGVPDRFSGSIDSSSNSASLTISGLKTEDEADYYCQSYDSSNSVVFGGGTKLTVLG

SEQ ID NO: 4738 - protein, 107 aa, Artificial Sequence
  source: /note="Description of Artificial Sequence: Synthetic light chain variable domain"
DIELTQSPAIMSVSPGEKVTMTCRASSSVSSSYLHWYQQRSGASPKIWIYSTSNLASGVPARFSGSGTGTSYSLTISSVEAEDAATYYCQQYSGYPWTFGGGTKLEI

SEQ ID NO: 4739 - protein, 106 aa, Artificial Sequence
  source: /note="Description of Artificial Sequence: Synthetic light chain variable domain"
DIELTQSPKFMSTSVGDRVSVTCKASQNVGTNVAWYQQKPGQSPKPLIYSATYRNSGVPDRFTGSGSGTDFTLTITNVQSKDLADYFCQQYNRYPYTSGGGTKLEI

SEQ ID NO: 4740 - protein, 108 aa, Artificial Sequence
  source: /note="Description of Artificial Sequence: Synthetic light chain variable domain"
DIQMTQSPSSLSASVGDRVTITCRASQDVDTSLAWYQQKPGKAPKLLIYSASFLYSGVPSRFSGSGSGTDFTLTISSLQPEDFATYYCQQSTGHPQTFGQGTKVEIKR

SEQ ID NO: 4741 - protein, 108 aa, Artificial Sequence
  source: /note="Description of Artificial Sequence: Synthetic light chain variable domain"
DIQMTQSPSSLSASVGDRVTITCRASQDVDISLAWYQQKPGKAPKLLIYSASFLYSGVPSRFSGSGSGTDFTLTISSLQPEDFATYYCQQGAGNPYTFGQGTKVEIKR

SEQ ID NO: 4742 - protein, 108 aa, Artificial Sequence
  source: /note="Description of Artificial Sequence: Synthetic light chain variable domain"
DIQMTQSPSSLSASVGDRVTITCRASQDVSTAVAWYQQKPGKAPKLLIYSASFLYSGVPSRFSGSGSGTDFTLTISSLQPEDFATYYCQQTYTTSLTFGQGTKVEIKR

SEQ ID NO: 4743 - protein, 108 aa, Artificial Sequence
  source: /note="Description of Artificial Sequence: Synthetic light chain variable domain"
DIQMTQSPSSLSASVGDRVTITCRASQDVETSLAWYQQKPGKAPKLLIYSASFLYSGVPSRFSGSGSGTDFTLTISSLQPEDFATYYCQQSTGHPQTFGQGTKVEIKR

SEQ ID NO: 4744 - protein, 108 aa, Artificial Sequence
  source: /note="Description of Artificial Sequence: Synthetic light chain variable domain"
DIELTQPPSVSVAPGQTARISCSGDKLGKKYASWYQQKPGQAPVLVIYEKDNRPSGIPERFSGSNSGNTATLTISGTQAEDEADYYCSSFAGNSLEVFGGGTKLTVLG

SEQ ID NO: 4745 - protein, 108 aa, Artificial Sequence
  source: /note="Description of Artificial Sequence: Synthetic light chain variable domain"
DIELTQPPSVSVAPGQTARISCSGDNIGSFYVHWYQQKPGQAPVLVIYDKSNRPSGIPERFSGSNSGNTATLTISGTQAEDEADYYCQSYANTLSLVFGGGTKLTVLG

SEQ ID NO: 4746 - protein, 114 aa, Artificial Sequence
  source: /note="Description of Artificial Sequence: Synthetic light chain variable domain"
DIVMTQSPDSLAVSLGERATINCKSSQSVLYNSNNKKYLAWYQQKPGQPPKLLIYWASTRESGVPDRFSGSGSGTDFTLTISSLQAEDVAVYYCQQYYSTPWTFGQGTKVEIKR

SEQ ID NO: 4747 - protein, 108 aa, Artificial Sequence
  source: /note="Description of Artificial Sequence: Synthetic light chain variable domain"
DIDILMTQSPATLSVTPGDRVSLSCRASQSIRDYLHWYQHRSHESPRLLIKYASQSISGIPSRFSGSGSGSDFTLTINSVEPEDVGVYYCQNGHSFPTFGGGTKLEIK

SEQ ID NO: 4748 - protein, 109 aa, Artificial Sequence
  source: /note="Description of Artificial Sequence: Synthetic light chain variable domain"
DIDILMTQSPSSMYASLGERVTITCKASHDIKSYLSWYQQKPWRSPKTLIYYTTALADGVPSRFSGSGSGQDYSLTISSLESDDTATYYCLQHGESPYTFGGGTKLEIK

SEQ ID NO: 4749 - protein, 211 aa, Artificial Sequence
  source: /note="Description of Artificial Sequence: Synthetic light chain variable domain"
SIVMTQTPAFLLVSAGERVTITCRASQSVSNDVTWYQQKAGQAPRLLIYSASNRYTGIPARFSGSGYGTEFTFTISSVQSEDFAVYFCQQDYSSFGGGTKLEIKRTVAAPSVFIFPPSDEQLKSGTASVVCLLNNFYPREAKVQWKVDNALQSGNSQESVTEQDSKDSTYSLSSTLTLSKADYEKHKVYACEVTHQGLSSPVTKSFNRGEC

SEQ ID NO: 4750 - protein, 108 aa, Artificial Sequence
  source: /note="Description of Artificial Sequence: Synthetic light chain variable domain"
ENVLTQSPAIMSASPGEKVTMTCRASSSVSSSYLHWYQQKSGASPKVWIYSTSNLASGVPGRFSGSGSGTSYSLTISSVEAEDAATYYCQQYSGYPITFGAGTKVEVK

SEQ ID NO: 4751 - protein, 108 aa, Artificial Sequence
  source: /note="Description of Artificial Sequence: Synthetic light chain variable domain"
ENQMTQSPSSLSASVGDRVTMTCRASSSVSSSYLHWYQQKSGKAPKVWIYSTSNLASGVPSRFSGSGSGTDYTLTISSLQPEDFATYYCQQYSGYPITFGQGTKVEIK

SEQ ID NO: 4752 - protein, 104 aa, Artificial Sequence
  source: /note="Description of Artificial Sequence: Synthetic light chain variable domain"
EIVMTQTPATLSVSAGERVTITCKASQSVSNDVTWYQQKPGQAPRLLIYSASNRYSGVPARFSGSGYGTEFTFTISSVQSEDFAVYFCQQDYSSFGQGTKLEIK

SEQ ID NO: 4753 - protein, 211 aa, Artificial Sequence
  source: /note="Description of Artificial Sequence: Synthetic light chain variable domain"
SIVMTQTPKFLLVSAGDRVTITCKASQSVSNDVTWYQQKAGQSPKLLIYSASNRYSGVPDRFTGSGYGTAFTFTISTVQAEDLAVYFCQQDYSSFGGGTKLEIKRTVAAPSVFIFPPSDEQLKSGTASVVCLLNNFYPREAKVQWKVDNALQSGNSQESVTEQDSKDSTYSLSSTLTLSKADYEKHKVYACEVTHQGLSSPVTKSFNRGEC

SEQ ID NO: 4754 - protein, 211 aa, Artificial Sequence
  source: /note="Description of Artificial Sequence: Synthetic light chain variable domain"
EIVMTQTPATLSVSAGERVTITCKASQSVSNDVTWYQQKPGQAPRLLIYSASNRYSGVPARFSGSGYGTEFTFTISSVQSEDFAVYFCQQDYSSFGQGTKLEIKRTVAAPSVFIFPPSDEQLKSGTASVVCLLNNFYPREAKVQWKVDNALQSGNSQESVTEQDSKDSTYSLSSTLTLSKADYEKHKVYACEVTHQGLSSPVTKSFNRGEC

SEQ ID NO: 4755 - protein, 211 aa, Artificial Sequence
  source: /note="Description of Artificial Sequence: Synthetic light chain variable domain"
SIVMTQTPKTLSVSAGERVTITCKASQSVSNDVTWYQQKPGQSPKLLIYSASNRYSGVPDRFSGSGYGTAFTFTISSVQAEDFAVYFCQQDYSSFGQGTKLEIKRTVAAPSVFIFPPSDEQLKSGTASVVCLLNNFYPREAKVQWKVDNALQSGNSQESVTEQDSKDSTYSLSSTLTLSKADYEKHKVYACEVTHQGLSSPVTKSFNRGEC

SEQ ID NO: 4756 - protein, 449 aa, Artificial Sequence
  source: /note="Description of Artificial Sequence: Synthetic light chain variable domain"
QVQLVESGPGLVQPGRSLRLTCAVSGFSVTNYGVHWVRQPPGKGLEWLGVIWAGGITNYNSAFMSRLTISKDNSKNTVYLQMNSLRAEDTAVYYCASRGGHYGYALDYWGQGTLVTVSSASTKGPSVFPLAPSSKSTSGGTAALGCLVKDYFPEPVTVSWNSGALTSGVHTFPAVLQSSGLYSLSSVVTVPSSSLGTQTYICNVNHKPSNTKVDKRVEPKSCDKTHTCPPCPAPELLGGPSVFLFPPKPKDTLMISRTPEVTCVVVDVSHEDPEVKFNWYVDGVEVHNAKTKPREEQYNSTYRVVSVLTVLHQDWLNGKEYKCKVSNKALPAPIEKTISKAKGQPREPQVYTLPPSRDELTKNQVSLTCLVKGFYPSDIAVEWESNGQPENNYKTTPPVLDSDGSFFLYSKLTVDKSRWQQGNVFSCSVMHEALHNHYTQKSLSLSPGK

SEQ ID NO: 4757 - protein, 107 aa, Artificial Sequence
  source: /note="Description of Artificial Sequence: Synthetic light chain variable domain"
DIQMTQITSSLSVSLGDRVIISCRASQDIGNFLNWYQQKPDGSLKLLIYYTSRLQSGVPSRFSGWGSGTDYSLTISNLEEEDIATFFCQQGKTLPYTFGGGTKLEIK

SEQ ID NO: 4758 - protein, 108 aa, Artificial Sequence
  source: /note="Description of Artificial Sequence: Synthetic light chain variable domain"
DIVLTQSPATLSVTPGDSVSLSCRASQIISNNLHWYQQKSHESPRLLIKYASQSISGIPSRFSGSGSGTDFTLSINSVETEDFGMYFCQQSNSWPLTFGSGTKLEIKR

SEQ ID NO: 4759 - protein, 107 aa, Artificial Sequence
  source: /note="Description of Artificial Sequence: Synthetic light chain variable domain"
DIQMTQTASSLPASLGDRVTISCSASQDISNYLNWYQQKPDGTVKLLIFYSSNLHSGVPSRFSGGGSGTDYSLTISNLEPEDIATYFCHQYSKLPWTFGGGTKLEIK

SEQ ID NO: 4760 - protein, 106 aa, Artificial Sequence
  source: /note="Description of Artificial Sequence: Synthetic light chain variable domain"
DIQLTQSPAILSVSPGERVSFSCWASQSIGTSIHWYQQRTNGSPRLLIKYSSESISGIPSRFSGSGSGTDFTLSINSLESEDIADYYCQQTYSWPFTFGSGTKLEI

SEQ ID NO: 4761 - protein, 112 aa, Artificial Sequence
  source: /note="Description of Artificial Sequence: Synthetic light chain variable domain"
DIVMTQSPLSLPVTPGEPASISCRSSQSIVHSNGNTYLEWYLQKPGQSPQLLISKVSNRFSGVPDRFSGSGSGTDFTLKISRVEAEDVGVYYCFQGSHVPFTFGQGTKLEIK

SEQ ID NO: 4762 - protein, 107 aa, Artificial Sequence
  source: /note="Description of Artificial Sequence: Synthetic light chain variable domain"
QIVLTQSPAIMSASPGEKVTITCSASSSVSYMHWFQQKPGTSPKLWIYSTSNLASGVPARFSGSGSGTSYSLTISRMEAEDAATYYCQQRSSYPYTFGGGTKLEIKR

SEQ ID NO: 4763 - protein, 108 aa, Artificial Sequence
  source: /note="Description of Artificial Sequence: Synthetic light chain variable domain"
DIQLTQSPSSLSASVGDRVTITCSASSSVSYMHWYQQKPGKAPKLLIYSTSNLASGVPSRFSGSGSGTDFTFTISSLQPEDIATYYCQQRSSYPYTFGGGTKVEIKRT

SEQ ID NO: 4764 - protein, 108 aa, Artificial Sequence
  source: /note="Description of Artificial Sequence: Synthetic light chain variable domain"
DIQMTQSPSSLSASVGDRVTITCSASSSVSYMHWYQQKPGKAPKLLIYSTSNLASGVPSRFSGSGSGTDFTLTISSLQPEDFATYYCQQRSSYPYTFGQGTKVEIKRT

SEQ ID NO: 4765 - protein, 108 aa, Artificial Sequence
  source: /note="Description of Artificial Sequence: Synthetic light chain variable domain"
DIQLTQSPSSLSASPGDRVTITCSASSSVSYMHWFQQKPGKAPKLWIYSTSNLASGVPARFSGSGSGTSYSLTISRLQPEDIATYYCQQRSSYPYTFGGGTKVEIKRT

SEQ ID NO: 4766 - protein, 108 aa, Artificial Sequence
  source: /note="Description of Artificial Sequence: Synthetic light chain variable domain"
DIQLTQSPSSLSASPGDRVTITCSASSSVSYMHWFQQKPGKAPKLWIYSTSNLASGVPSRFSGSGSGTSYSLTISRLQPEDIATYYCQQRSSYPYTFGGGTKVEIKRT

SEQ ID NO: 4767 - protein, 108 aa, Artificial Sequence
  source: /note="Description of Artificial Sequence: Synthetic light chain variable domain"
DIQLTQSPSSLSASPGDRVTITCSASSSVSYMHWFQQKPGKAPKLWIYSTSNLASGVPSRFSGSGSGTSYSFTISSLQPEDIATYYCQQRSSYPYTFGGGTKVEIKRT

SEQ ID NO: 4768 - protein, 108 aa, Artificial Sequence
  source: /note="Description of Artificial Sequence: Synthetic light chain variable domain"
DIQLTQSPSSLSASPGDRVTITCSASSSVSYMHWYQQKPGKAPKLWIYSTSNLASGVPSRFSGSGSGTSYSLTISRLQPEDIATYYCQQRSSYPYTFGGGTKVEIKRT

SEQ ID NO: 4769 - protein, 108 aa, Artificial Sequence
  source: /note="Description of Artificial Sequence: Synthetic light chain variable domain"
DIQLTQSPSSMSASPGDRVTITCSASSSVSYMHWFQQKPGKSPKLWIYSTSNLASGVPSRFSGSGSGTSYSLTISSMQPEDFATYYCQQRSSYPYTFGQGTKLEIKRT

SEQ ID NO: 4770 - protein, 113 aa, Artificial Sequence
  source: /note="Description of Artificial Sequence: Synthetic light chain variable domain"
DIVMSQSPSSLVVSIGEKVTMTCKSSQSLLYSSNQKNYLAWYQQKPGQSPKLLIYWASSRESGVPDRFTGSGSGTDFTLTISSVKAEDLAVYYCQQYYNYPLTFGAGTKLELK

SEQ ID NO: 4771 - protein, 113 aa, Artificial Sequence
  source: /note="Description of Artificial Sequence: Synthetic light chain variable domain"
DIVMSQSPSSLAVSVGERVTMNCKSSQSLLYSSNQKNYLAWYQQKPGQSPKLLIYWASTRESGVPDRFTGSVSGTDFTLTISSVKAEDLAVYYCQQYYNYPLTFGAGTKLELK

SEQ ID NO: 4772 - protein, 107 aa, Artificial Sequence
  source: /note="Description of Artificial Sequence: Synthetic light chain variable domain"
DIQMTQSPSSLSASVGDRVTITCRASQSISSYLNWYQQKPGKAPKLLIYNASMLQSGVPSRFSGSGSGTDFTLTISSLQPEDFATYYCQQNRGFPLTFGQGTKVEIK

SEQ ID NO: 4773 - protein, 113 aa, Artificial Sequence
  source: /note="Description of Artificial Sequence: Synthetic light chain variable domain"
DIVMSQSPSSLAVSVGEKVTVNCKSSQSLLYSNNQKNYLAWYQQKPGQSPKLLIYWASTREYGVPDRFTGSGSGTDFTLTISSVKAEDLAVYYCQQYYNYPLTFGAGTKLELK

SEQ ID NO: 4774 - protein, 113 aa, Artificial Sequence
  source: /note="Description of Artificial Sequence: Synthetic light chain variable domain"
DIVMSQSPSSLAVSVGEKVTMSCKSSQSLLYSNNQKNYLAWYHQKPGQSPKLLIYWASTRESGVPDRFTGSGSGTDFTLTISSVKAEDLAVYYCQQYYSYPLTFGAGTKLELK

SEQ ID NO: 4775 - protein, 113 aa, Artificial Sequence
  source: /note="Description of Artificial Sequence: Synthetic light chain variable domain"
DIVMSQSPSSLAVSVGEKVTMSCKSSQSLLYSNNQKNYLAWYHQKPGQSPKLLIYWASTRESGVPDRFTGSGSGTDFTLTISSVKAEDLAVYYCQQYYIYPLTFGAGTKLELK

SEQ ID NO: 4776 - protein, 113 aa, Artificial Sequence
  source: /note="Description of Artificial Sequence: Synthetic light chain variable domain"
DIVMSQSPSSLAVSVGEKVTMSCKSSQSLLYSNNQKNYLAWYHQKPGQSPKLLIYWASTRESGVPDRFTGSGSGTDFTLTISSVKAEDLAVYYCQQYYSYPLTFGAGTKLEIK

SEQ ID NO: 4777 - protein, 107 aa, Artificial Sequence
  source: /note="Description of Artificial Sequence: Synthetic light chain variable domain"
DIQMTQSPSSLSASVGDRVTITCRASQSISSYLNWYQQKPGKAPKLLIYAASMLQSGVPSRFSGSGSGTDFTLTISSLQPEDFATYYCQQNRGFPLTFGQGTKVEIK

SEQ ID NO: 4778 - protein, 108 aa, Artificial Sequence
  source: /note="Description of Artificial Sequence: Synthetic light chain variable domain"
DIQLTQSPSSLSASVGDRVTITCRASQSISSYLNWYQQKPGKAPKLLIYAASSLQSGVPSRFSGSGSGTDFTLTISSLQPADFATYYCQQSYSVPYTFGQGTKLEIKR

SEQ ID NO: 4779 - protein, 111 aa, Artificial Sequence
  source: /note="Description of Artificial Sequence: Synthetic light chain variable domain"
QSALTQPASVSGSPGQSITISCTGTSSDVGGYNFVSWYQQHPGKAPKVMIYDVSKRPSGISNRFSGSKSGNTASLTISGLQVEDEAEYYCSSYTSTRTVIFAGGTKVTVLG

SEQ ID NO: 4780 - protein, 111 aa, Artificial Sequence
  source: /note="Description of Artificial Sequence: Synthetic light chain variable domain"
  MOD_RES (37)..(37): Any amino acid
QSVLTQPPSLSGAPGQRVTISCSGSRSNIGTNYVSWXQQLPGTAPKLLIYRNHQWPSGVPDRFTGSKSGTSASLAISGLRSEDEADYYCAAWDDNLSGVVFGGGTKLTVLG

SEQ ID NO: 4781 - protein, 111 aa, Artificial Sequence
  source: /note="Description of Artificial Sequence: Synthetic light chain variable domain"
QSVLTQPPSVSAAPGQKVTIPCSGSRSNVGNYYVSWYQQLPGTAPKLLIYDNNKRPSGIPDRFSGSKSGTSATLGITGLQTGDEADYFCGTWDGSLSAHVFGTGTKVTVLG

SEQ ID NO: 4782 - protein, 111 aa, Artificial Sequence
  source: /note="Description of Artificial Sequence: Synthetic light chain variable domain"
QAVLTQPPSASGTPGQRVTISCSGSSSNIGSNYVYWYQQLPGTAPKLLIYRNNQRPSGVPDRFSGSKSGTSASLAISGLRSEDEADYYCAAWDDSLSGYVFGTGTKVTVLG

SEQ ID NO: 4783 - protein, 111 aa, Artificial Sequence
  source: /note="Description of Artificial Sequence: Synthetic light chain variable domain"
QSALTQPASVSGSPGQSITISCTGTSRDVGGYNYVSWYQQYPGKAPKLMIYEVSKRPSGVSNRFSGSKSGNTASLTISGLQAEDEADYYCSSYTSSSTLDFGTGTKVTVLG

SEQ ID NO: 4784 - protein, 111 aa, Artificial Sequence
  source: /note="Description of Artificial Sequence: Synthetic light chain variable domain"
SYELTQPPSASGTPGQRVTISCSGSSSNIGSNYVSWYQQLPGTAPKLLIYRNNQRPSGVPDRFSGSKSGTSASLAISGLRSEDEADYYCAAWDDSLSGVVFGGGTKLTVLG

SEQ ID NO: 4785 - protein, 136 aa, Artificial Sequence
  source: /note="Description of Artificial Sequence: Synthetic light chain variable domain"
MKKTAIAIAVALAGFATVAQAAELQSALTQPPSASGSPGQSVTISCTGTSRDAGGYNYFSWYQQHPGKAPKLLIYEVTKRPSGVPDRFSGSKSGKTASLTVSGLQADDEAVYYCSSYGGSNNFRVFGGGTKLTVLG

SEQ ID NO: 4786 - protein, 135 aa, Artificial Sequence
  source: /note="Description of Artificial Sequence: Synthetic light chain variable domain"
MKKTAIAIAVALAGFATVAQAAELSYELTQPPSASGTPGQRVSISCSGSSSNIGSNTVNWYQQFPGTAPKLLIHSNNQRPSGVPDRFSGSKSGTSASLAISGPQSEDEADYYCAAWDDSVNGYVFGTGTKVTVLG

SEQ ID NO: 4787 - protein, 134 aa, Artificial Sequence
  source: /note="Description of Artificial Sequence: Synthetic light chain variable domain"
MKKTAIAIAVALAGFATVAQAAELQPVLTQPPSASGTPGQRVTISCSGSSSNIGGNTVSWYQQVPGTAPRLLIFRNNQRPPGVPDRFSGSKSGTSASLAISGLRSEDEADYYCAAWDASRQGVFGGGTKLTVLG

SEQ ID NO: 4788 - protein, 135 aa, Artificial Sequence
  source: /note="Description of Artificial Sequence: Synthetic light chain variable domain"
MKKTAIAIAVALAGFATVAQAAELQSVLTQPPSASGTPGQRVTISCSGSSSNIGSNTVNWYQQLPGTAPKLLIYRNNQRPSGVPDRFSGSKSGTSASLAISGLRSEDEADYYCAAWDDSLSGRVFGGGTKLTVLG

SEQ ID NO: 4789 - protein, 111 aa, Artificial Sequence
  source: /note="Description of Artificial Sequence: Synthetic light chain variable domain"
QSVLTQPPSASGTPGQRVTISCSGSSSNIGSNYVYWYQQLPGTAPKLLIYRNNQRPSGVPDRFSGSKSGTSASLAISGLRSEDEADYYCAAWDDSLSGWVFGGGTKLTVLG

SEQ ID NO: 4790 - protein, 136 aa, Artificial Sequence
  source: /note="Description of Artificial Sequence: Synthetic light chain variable domain"
MKKTAIAIAVALAGFATVAQAAELQSVLTQPPSVSGAPGQRVTISCTGSSSNIGAGYDVHWYQQLPGRAPKLLIYGNSNRPSGVPDRFSGSKSGTSASLAITGLQAEDEADYYCQSYDSSLRGYVFGTGTKVTVLG

SEQ ID NO: 4791 - protein, 135 aa, Artificial Sequence
  source: /note="Description of Artificial Sequence: Synthetic light chain variable domain"
MKKTAIAIAVALAGFATVAQAAELQSVVTQPPSVSAAPGQRVTISCSGGSSNIGNNYVSWFQQLPRTAPKLLIYDNNKRPSGIPDRFSGSKSGTSAALDITVLQTGDEADYYCGTWDSSLRNWVFGGGTKLTVLG

SEQ ID NO: 4792 - protein, 135 aa, Artificial Sequence
  source: /note="Description of Artificial Sequence: Synthetic light chain variable domain"
MKKTAIAIAVALAGFATVAQAAELQSVLTQPPSASGSPGQSLTISCTGTSSDVGGYNHVSWYQQYPGKAPKLMIYEVTKRPSGVPDRFSGSKSGNTASLTVSGLQAEDEADYYCSSYAGSAHWVFGGGTKLTVLG

SEQ ID NO: 4793 - protein, 111 aa, Artificial Sequence
  source: /note="Description of Artificial Sequence: Synthetic light chain variable domain"
QSALTQPASVSGSPGQSITISCTGTSSDVGGYNYVSWYQQHPGKAPKLMIYDVSKRPSGVSNRFSGSKSGNTASLTISGLQAEDEADYYCSSYTRSSTEVFGGGTKLTVLG

SEQ ID NO: 4794 - protein, 135 aa, Artificial Sequence
  source: /note="Description of Artificial Sequence: Synthetic light chain variable domain"
MKKTAIAIAVALAGFATVAQAAELQAVLTQPPSASGTPGQRVTISCSGSSSNIGSNYVYWYQQLPGTAPKLLIYRNNQRPSGVPDRFSGSKSGTSASLAISGLRSEDEADYYCAAWDDSLSGRVFGTGTKVTVLG

SEQ ID NO: 4795 - protein, 110 aa, Artificial Sequence
  source: /note="Description of Artificial Sequence: Synthetic light chain variable domain"
SYVLTQPPSASGTPGQRVTISCSGSSSNIGSNTVNWYQQLPGTAPKLLIYRNNQRPSGVPDRFSGSKSGTSASLAISGLRSEDEADYYCAAWDDSLSGLFGTGTKVTVLG

SEQ ID NO: 4796 - protein, 112 aa, Artificial Sequence
  source: /note="Description of Artificial Sequence: Synthetic light chain variable domain"
QSALTQPPSASGSPGQSVTISCTGTSRDAGGYNYFSWYQQHPGKAPKLLIYEVTKRPSGVPDRFSGSKSGKTASLTVSGLQADDEAVYYCSSYGGSNNFRVFGGGTKLTVLG

SEQ ID NO: 4797 - protein, 113 aa, Artificial Sequence
  source: /note="Description of Artificial Sequence: Synthetic light chain variable domain"
QSVVTQPPSVSGAPGQRVTISCTGSSSNIGAGYDVHWYQQLPGTAPKLLIYGNSNRPSGVPDRFSGSKSGTSASLAITGLQAEDEADYYCQSYDSSLSGSYVFGTGTKLTVLG

SEQ ID NO: 4798 - protein, 111 aa, Artificial Sequence
  source: /note="Description of Artificial Sequence: Synthetic light chain variable domain"
QSVVTQPASVSGSPGQSITISCTGTSSDVGGYNYVSWYQQHPGKAPKLMIYDVSKRPSGVSNRFSGSKSGNTASLTISGLQAEDEADYYCSSYTSSSTLVFGGGTKLTVLG

SEQ ID NO: 4799 - protein, 111 aa, Artificial Sequence
  source: /note="Description of Artificial Sequence: Synthetic light chain variable domain"
QSVLTQPASVSGSPGQSLTISCTGTSNDVGAYKYVSWYQQYPGKAPKLILYDVFKRPSGVSNRFSGSKSDNTASLTISGLQAEDEADYYCFSLTSSNTYVFGTGTKVTVLG

SEQ ID NO: 4800 - protein, 113 aa, Artificial Sequence
  source: /note="Description of Artificial Sequence: Synthetic light chain variable domain"
NFMLTQPHSVSESPGKTVSISCTRTSGAIAGAYVQWFQQRPGSAPTTVIYDDNKRPSGVPDRFSGSIDKSSNSASLTISGLKTEDEADYYCQSYDYDSSNVLFGGGTKLTVLG

SEQ ID NO: 4801 - protein, 111 aa, Artificial Sequence
  source: /note="Description of Artificial Sequence: Synthetic light chain variable domain"
QSVLTQPPSASGTPGQRVTISCSGSRSNVGGNYVFWYQQVPGATPKLLIYRSNQRPSGVPDRFAGSKSGSSASLAISGLRSEDEADYYCATWDDSLSGFVFGTGTKVTVLG

SEQ ID NO: 4802 - protein, 110 aa, Artificial Sequence
  source: /note="Description of Artificial Sequence: Synthetic light chain variable domain"
SSELTQDPAVSVALGQTVRITCQGDSLRSYYASWYQQKPGQAPVLVIYGKNNRPSGIPDRFSGSSSGNTASLTITGAQAEDEADYYCNSRDSSGNPPVVFGGGTKLTVLG

SEQ ID NO: 4803 - protein, 111 aa, Artificial Sequence
  source: /note="Description of Artificial Sequence: Synthetic light chain variable domain"
QSVVTQPPSMSAAPGQQVTISCSGGNSNIERNYVSWYLQLPGTAPKLVIFDNDRRPSGIPDRFSGSKSGTSATLGITGLQTGDEADYYCGTWDSSLRGWVFGGGTKLTVLG

SEQ ID NO: 4804 - protein, 111 aa, Artificial Sequence
  source: /note="Description of Artificial Sequence: Synthetic light chain variable domain"
QSALTQPPSASGSPGQSVTISCTGTSSDVGGYNYVSWYQQHPGKAPKLMIYEVSKRPSGVPDRFSGSKSGNTASLTVSGLQAEDEADYYCSSYAGSNTLVFGGGTKLTVLG

SEQ ID NO: 4805 - protein, 111 aa, Artificial Sequence
  source: /note="Description of Artificial Sequence: Synthetic light chain variable domain"
QSALTQPPSASGSPGQSVTISCTGTSSDIGGYNYVSWYQQHPGKAPKLMIYEVNKRPSGVPDRFSGSKSGNTASLTVSGLQAEDEADYYCASFAGRKTLVFGGGTKLTVLG

SEQ ID NO: 4806 - protein, 111 aa, Artificial Sequence
  source: /note="Description of Artificial Sequence: Synthetic light chain variable domain"
QSALTQPPSASGSPGQSVTISCTGTSTDIGGYNYVSWYQHHPSKAPKLMIYEVNKRPSGVPDRFSGSKSGNTASLTVSGLQAEDEADYYCASFAGRKTLVFGGGTKLTVLG

SEQ ID NO: 4807 - protein, 111 aa, Artificial Sequence
  source: /note="Description of Artificial Sequence: Synthetic light chain variable domain"
QSVVTQPPSVSAAPGQKVTISCSGSSSNIGNNYVSWYQQLPGTAPKLLIYDNNKRPSGIPDRFSGSKSGTSATLGITGLQTGDEADYYCGTWDSSLSGVVFGGGTKLTVLG

SEQ ID NO: 4808 - protein, 111 aa, Artificial Sequence
  source: /note="Description of Artificial Sequence: Synthetic light chain variable domain"
QSALTQPASVSGSPGQSITISCTGTSSDVGGYNYVSWYQQSPGKAPRLMIYGVSKRPSGVPDRFSGSKSGNTASLTVSGLQAEDEADYYCSSYAGVNNLMFGGGTKLTVLG

SEQ ID NO: 4809 - protein, 112 aa, Artificial Sequence
  source: /note="Description of Artificial Sequence: Synthetic light chain variable domain"
DIQMTQSPSSLSASVGDRVTITCRASQNIATDVSTAVAWIQQKPGKAPKLLIYSASFLYSGVPSRFSGSGSGTDFTLTISSLQPEDFATYYCQQSEPEPYTFGQGTKVEIKR

SEQ ID NO: 4810 - protein, 107 aa, Artificial Sequence
  source: /note="Description of Artificial Sequence: Synthetic light chain variable domain"
DIQMTQSPSSLSASVGDRVTITCRASQGISNWLAWYQQKPGKAPKLLIYGASSLQSGVPSRFSGSGSGTDFTLTISSLQPEDFATYYCQQYSSFPTTFGQGTKVEIK

SEQ ID NO: 4811 - protein, 214 aa, Artificial Sequence
  source: /note="Description of Artificial Sequence: Synthetic light chain variable domain"
DIQMTQSPSSLSASVGDRVTITCRASQDVNTAVAWYQQKPGKAPKLLIVSASFLVSGVPSRFSGSRSGTDFTLTISSLQPEDFATYVCQQHYTTPPTFGQGTKLEIKRTVAAPSVFIFPPSDEQLKSGTASVVCLLNNFYPREAKVQWKVDNALQSGNSQESVTEQDSKDSTVSLSSTLTLSKADYEKHKVVACEVTHQGLSSPVTKSFNRGEC

SEQ ID NO: 4812 - protein, 233 aa, Artificial Sequence
  source: /note="Description of Artificial Sequence: Synthetic light chain variable domain"
NYHLENEVARLKKLGGGGSDIQMTQSPSSLSASVGDRVTITCRASQDVNTAVAWYQQKPGKAPKLLIVSASFLVSGVPSRFSGSRSGTDFTLTISSLQPEDFATVYCQQHYTTPPTFGQGTKLEIKRTVAAPSVFIFPPSDEQLKSGTASVVCLLNNFYPREAKVQWKVDNALQSGNSQESVTEQDSKDSTVSLSSTLTLSKADYEKHKVVACEVTHQGLSSPVTKSFNRGEC

SEQ ID NO: 4813 - protein, 242 aa, Artificial Sequence
  source: /note="Description of Artificial Sequence: Synthetic light chain variable domain"
NYHLENEVARLKKLGGGGSEVQLVESGGGLVQPGGSLRLSCAASGFNIKDTYIHWVRQAPGKGLEWVARIYPTNGYTRYADSVKGRFTISADTSKNTAYLQMNSLRAEDTAVYYCSRWGGDGFYAMDYWGQGTLVTVSSASTKGPSVFPLAPSSKSTSGGTAALGCLVKDYFPEPVTVSWNSGALTSGVHTFPAVLQSSGLVSLSSVVTVPSSSLGTQTVICNVNHKPSNTKVDKKVEPKSC

SEQ ID NO: 4814 - protein, 232 aa, Artificial Sequence
  source: /note="Description of Artificial Sequence: Synthetic light chain variable domain"
DYKDDDDKGGGGSGGGGSDIQMTQSPSSLSASVGDRVTITCRASQDVNTAVAWYQQKPGKAPKLLIVSASFLVSGVPSRFSGSRSGTDFTLTISSLQPEDFATYVCQQHYTTPPTFGQGTKLEIKRTVAAPSVFIFPPSDEQLKSGTASVVCLLNNFYPREAKVQWKVDNALQSGNSQESVTEQDSKDSTVSLSSTLTLSKADYEKHKVVACEVTHQGLSSPVTKSFNRGEC

SEQ ID NO: 4815 - protein, 246 aa, Artificial Sequence
  source: /note="Description of Artificial Sequence: Synthetic light chain variable domain"
DYKDDDDKGGGGSGGGGSEVQLVESGGGLVQPGGSLRLSCAASGFNIKDTYIHWVRQAPGKGLEWVARIYPTNGYTRYADSVKGRFTISADTSKNTAYLQMNSLRAEDTAVYYCSRWGGDGFYAMDYWGQGTLVTVSSASTKGPSVFPLAPSSKSTSGGTAALGCLVKDYFPEPVTVSWNSGALTSGVHTFPAVLQSSGLYSLSSVVTVPSSSLGTQTVICNVNHKPSNTKVDKKVEPKSCDKTHT

SEQ ID NO: 4816 - protein, 112 aa, Artificial Sequence
  source: /note="Description of Artificial Sequence: Synthetic light chain variable domain"
DIVMTQSPDSLAVSLGERATINCRASQSVSGSRFTYMHWYQQKPGQPPKLLIKYASILESGVPDRFSGSGSGTDFTLTISSLQAEDVAVYYCQHSWEIPPWTFGQGTKVEIK

SEQ ID NO: 4817 - protein, 219 aa, Artificial Sequence
  source: /note="Description of Artificial Sequence: Synthetic light chain variable domain"
DIVMTQSPDSLAVSLGERATINCRASQSVSGSRFTYMHWYQQKPGQPPKLLIKYASILESGVPDRFSGSGSGTDFTLTISSLQAEDVAVYYCQHSWEIPPWTFGQGTKVEIKRTVAAPSVFIFPPSDEQLKSGTASVVCLLNNFYPREAKVQWKVDNALQSGNSQESVTEQDSKDSTYSLSSTLTLSKADYEKHKVYACEVTHQGLSSPVTKSFNRGEC

SEQ ID NO: 4818 - protein, 219 aa, Artificial Sequence
  source: /note="Description of Artificial Sequence: Synthetic light chain variable domain"
DIVMTQSPDSLAVSLGERATINCRASQSVSGSRFTYMHWYQQKPGQPPKLLIKYASILESGVPDRFSGSGSGTDFTLTISSLQAEDVAVYYCQHSWEIPPWTFGQGTKVEIKRTVAAPSVFIFPPSDEQLKSGTASVVCLLNNFYPREAKVQWCVDNALQSGNSQESVTEQDSKDSTYSLSSTLTLSKADYEKHKVYACEVTHQGLSSPVTKSFNRGEC

SEQ ID NO: 4819 - protein, 214 aa, Artificial Sequence
  source: /note="Description of Artificial Sequence: Synthetic light chain variable domain"
DIQMTQSPSSLSASVGDRVTITCRASQDVNTAVAWYQQKPGKAPKLLIYSASFLVSGVPSRFSGSRSGTDFTLTISSLQPEDFATYYCQQHYTIPPTFGQGTKLEIKRTVAAPSVFIFPPSDEQLKSGTASVVCLLNNFYPREAKVQWKVDNALQSGNSQESVTEQDSKDSTYSLSSTLTLSKADYEKHKVYACEVTHQGLSSPVTKSFNRGEC

SEQ ID NO: 4820 - protein, 220 aa, Artificial Sequence
  source: /note="Description of Artificial Sequence: Synthetic light chain variable domain"
DIVMTQSPILLAVSLGERATINCKSSQSVLNSGNQKNYLTWYQQRTNGSPRLLIYWASTRESGVPDRFSGSGSGTDFTLTISSLQAEDIADYYCQSDYSYPYTFGQGTKLEIKRTVAAPSVFIFPPSDEQLKSGTASVVCLLNNFYPREAKVQWKVDNALQSGNSQESVTEQDSKDSTYSLSSTLTLSKADYEKHKVYACEVTHQGLSSPVTKSFNRGEC

SEQ ID NO: 4821 - protein, 220 aa, Artificial Sequence
  source: /note="Description of Artificial Sequence: Synthetic light chain variable domain"
DIVMTQSPILLAVSLGERATINCKSSQSVLNSGNQKNYLTWYQQRTNGSPRLLIYWASTRESGVPDRFSGSGSGTDFTLTISSLQAEDEADYYCQSDYSYPYTFGQGTKLEIKRTVAAPSVFIFPPSDEQLKSGTASVVCLLNNFYPREAKVQWKVDNALQSGNSQESVTEQDSKDSTYSLSSTLTLSKADYEKHKVYACEVTHQGLSSPVTKSFNRGEC

SEQ ID NO: 4822 - protein, 111 aa, Artificial Sequence
  source: /note="Description of Artificial Sequence: Synthetic light chain variable domain"
DIVLTQSPASLAVSLGQRATISCRASKSVSTSGYSYMHWYQQKPGQPPKLLIYLVSNLESGVPARFSGSGSGTDFTLNIHPVEEEDAATYYCQHSRELPRTFGGGTKLEIK

SEQ ID NO: 4823 - protein, 112 aa, Artificial Sequence
  source: /note="Description of Artificial Sequence: Synthetic light chain variable domain"
DIVITQTTPSVPVTPGESVSISCRSSKSLLHSNGNTYLYWFLQRPGQSPQLLISRMSSLASGVPDRFSGSGSGTAFTLRISRVEAEDVGVYYCMQHLEYPYTFGGGTKLEIK

SEQ ID NO: 4824 - protein, 110 aa, Artificial Sequence
  source: /note="Description of Artificial Sequence: Synthetic light chain variable domain"
QAVVTQESALTTSPGETVTLTCRSSTGAVTTSNYANWVQEKPDHLFTGLIGGTNNRAPGVPARFSGSLIGDKAALTITGAQTEDEAIYFCALWYSNHLVFGGGTKLTVLG

SEQ ID NO: 4825 - protein, 110 aa, Artificial Sequence
  source: /note="Description of Artificial Sequence: Synthetic light chain variable domain"
QAVVTQEPSLTVSPGGTVTLTCRSSTGAVTTSNYANWVQQKPGQAPRGLIGGTNNRAPWTPARFSGSLLGGKAALTLSGVQPEDEAEYYCALWYSNHLVFGGGTKLTVLG

SEQ ID NO: 4826 - protein, 113 aa, Artificial Sequence
  source: /note="Description of Artificial Sequence: Synthetic light chain variable domain"
DVVMTQTPLSLPVSLGDQASISCRSSQSLVHSNGNTYLHWYLQKPGQSPKLLIYKVSNRFSGVPDRFSGSGSGTDFTLKISRVEAEDLGVYFCSQSTHVPPYTFGGGTKLEIK

SEQ ID NO: 4827 - protein, 111 aa, Artificial Sequence
  source: /note="Description of Artificial Sequence: Synthetic light chain variable domain"
DIVLTQSPASLAVSLGQRATISCKASQSVDYDGDGYMDWYQQKPGQPPKLLIFAASNLKSGIPARFSGSGSGTDFTLNIHPVEEEDAATYYCQQTNEYPWTFGGGTKLEIK

SEQ ID NO: 4828 - protein, 108 aa, Artificial Sequence
  source: /note="Description of Artificial Sequence: Synthetic light chain variable domain"
DVQITQSPSYLAASPGETITINCRASKSISKYLAWYQEKPGKTNKLLIYSGSTLQSGIPSRFSGSGSGTDFTLTISSLEPEDFAMYYCQQHNEYPYTFGGGTKLEIKR

SEQ ID NO: 4829 - protein, 236 aa, Artificial Sequence
  source: /note="Description of Artificial Sequence: Synthetic light chain variable domain"
MDMRVPAQLLGLLLLWLRGARCDIQMTQSPSSLSASVGDRVTITCRASQEISGYLSWYQQKPGKAPKRLIYAASTLDSGVPSRFSGSGSGTEFTLTISSLQPEDFATYYCLQYDSYPYTFGQGTKLEIKRTVAAPSVFIFPPSDEQLKSGTASVVCLLNNFYPREAKVQWKVDNALQSGNSQESVTEQDSKDSTYSLSSTLTLSKADYEKHKVYACEVTHQGLSSPVTKSFNRGEC

SEQ ID NO: 4830 - protein, 238 aa, Artificial Sequence
  source: /note="Description of Artificial Sequence: Synthetic light chain variable domain"
MKLPVRLLVLMFWIPASSSDVLMTQIPLSLPVSLGDQASISCRSSQSIVHSNGNTYLEWYLQKPGQSPKSLIYKVSNRFSGVPDRFSGSGSGTDFTLKISRVEAEDLGVYYCFQGSYVPWTFGGGTKLEIKRADAAPTVSIFPPSSEQLTSGGASVVCFLNNFYPRDINVKWKIDGSERQNGVLNSWTDQDSKDSTYSMSSTLTLTKDEYERHNSYTCEATHKTSTSPIVKSFNRNEC

SEQ ID NO: 4831 - protein, 239 aa, Artificial Sequence
  source: /note="Description of Artificial Sequence: Synthetic light chain variable domain"
MRCLAEFLGLLVLWIPGAIGDIVLTQTAPSVPVTPGESVSISCRSSKSLLHSNGNTYLYWFLQRPGQSPQLLIYRMSNLASGVPDRFSGSGSGTAFTLRISRVEAEDVGVYYCMQHLEYPFTFGSGTKLEIKRADAAPTVSIFPPSSEQLTSGGASVVCFLNNFYPRDINVKWKIDGSERQNGVLNSWTDQDSKDSTYSMSSTLTLTKDEYERHNSYTCEATHKTSTSPIVKSFNRNEC

SEQ ID NO: 4832 - protein, 238 aa, Artificial Sequence
  source: /note="Description of Artificial Sequence: Synthetic light chain variable domain"
MKLPVRLLVLMFWIPASRSDVLMTQTPLSLPVSLGDQASISCRSSQSIVHSIGNTYLEWYLQKPGQSPKLLIYKVSNRFSGVPERFSGSGSGTDFTLKISRVEAEDLGVYYCFQGSHVPFTFGSGTKLEIKRADAAPTVSIFPPSSEQLTSGGASVVCFLNNFYPKDINVKWKIDGSERQNGVLNSWTDQDSKDSTYSMSSTLTLTKDEYERHNSYTCEATHKTSTSPIVKSFNRNEC

SEQ ID NO: 4833 - protein, 238 aa, Artificial Sequence
  source: /note="Description of Artificial Sequence: Synthetic light chain variable domain"
MKLPVRLLVLMFWIPASSSDVLMTQIPLSLPVSLGDQASISCRSSQSIVHSNGNTYLEWYLQKPGQSPKLLIYKVSNRFSGVPDRFSGSGSGTDFTLKISRVEAEDLGVYYCFQGSYVPWTFGGGTKLEIKRADAAPTVSIFPPSSEQLTSGGASVVCFLNNFYPRDINVKWKIDGSERQNGVLNSWTDQDSKDSTYSMSSTLTLTKDEYERHNSYTCEATHKTSTSPIVKSFNRNEC

SEQ ID NO: 4834 - protein, 234 aa, Artificial Sequence
  source: /note="Description of Artificial Sequence: Synthetic light chain variable domain"
MFSLALLLSLLLLCVSDSRAETTVTQSPASLSMAIGDKVTIRCITSTDIDDDMNWFQQKPGEPPKLLISEGNTLRPGVPSRFSGSGYGTDFIFTIENMLSEDVADYYCLQSDNLPYTFGGGTKLEIKRADAAPTVSIFPPSSEQLTSGGASVVCFLNNFYPRDINVKWKIDGSERQNGVLNSWTDQDSKDSTYSMSSTLTLTKDEYERHNSYTCEATHKTSTSPIVKSFNRNEC

SEQ ID NO: 4835 - protein, 238 aa, Artificial Sequence
  source: /note="Description of Artificial Sequence: Synthetic light chain variable domain"
MKLPVRLLVLMFWIPASSSDVLMTQTPLSLPVSLGDQASISCRSSQSIVHSNGNTYLEWYLQKPGQSPKLLIYKVSNRFSGVPDRFSGSGSGTDFTLKISRVEAEDLGVYYCFQGSYVPWTFGGGTKLEIKRADAAPTVSIFPPSSEQLTSGGASVVCFLNNFYPRDINVKWKIDGSERQNGVLNSWTDQDSKDSTYSMSSTLTLTKDEYERHNSYTCEATHKTSTSPIVKSFNRNEC

SEQ ID NO: 4836 - protein, 106 aa, Artificial Sequence
  source: /note="Description of Artificial Sequence: Synthetic light chain variable domain"
EIVLTQSPATLSLSPGERATLSCSASSSVSYMHWYQQKPGQAFRLLIYDTSKLASGIPARFSGSGSGTDFTLTISSLEPEDFAVYYCFQGSGYPYTFGQGTKLEIK

SEQ ID NO: 4837 - protein, 213 aa, Artificial Sequence
  source: /note="Description of Artificial Sequence: Synthetic light chain variable domain"
EIVLTQSPATLSLSPGERATLSCSASSSVSYMHWYQQKPGQAPRLLIYDTSKLASGIPARFSGSGSGTDFTLTISSLEPEDFAVYYCFQGSGYPYTFGQGTKLEIKRTVAAPSVFIFPPSDEQLKSGTASVVCLLNNFYFREAKVQWKVDNALQSGNSQESVTEQDSKDSTYSLSSTLTLSKADYEKHKVYACEVTHQGLSSPVTKSFNRGEC

SEQ ID NO: 4838 - protein, 107 aa, Artificial Sequence
  source: /note="Description of Artificial Sequence: Synthetic light chain variable domain"
ENVLTQSPAIMSASPGEKVTMTCSASSSVSYMHWYQQKSITSPKLWIYDTSKLASGVPGRFSGSGSGNSYSLTISSMEAEDVATYYCFQGSGYPYTFGGGTKLEIKR

SEQ ID NO: 4839 - protein, 213 aa, Artificial Sequence
  source: /note="Description of Artificial Sequence: Synthetic light chain variable domain"
EIVLTQSPATLSLSPGERATLSCSASSSVSYMHWYQQKPGQAPRLLIYDTSKLASGIPARFSGSGSGTDYTLTISSLEPEDFAVYYCFQGSGYPYTFGQGTKLEIKRTVAAPSVFIFPPSDEQLKSGTASVVCLLNNFYPREAKVQWKVDNALQSGNSQESVTEQDSKDSTYSLSSTLTLSKADYEKHKVYACEVTHQGLSSPVTKSFNRGEC

SEQ ID NO: 4840 - protein, 106 aa, Artificial Sequence
  source: /note="Description of Artificial Sequence: Synthetic light chain variable domain"
EIVLTQSPATLSLSPGERATLSCSASSSVSYMHWYQQKPGQAPRLLIYDTSKLASGIPARFSGSGSGTDYTLTISSLEPEDFAVYYCFQGSGYPYTFGQGTKLEIK

SEQ ID NO: 4841 - protein, 108 aa, Artificial Sequence
  source: /note="Description of Artificial Sequence: Synthetic light chain variable domain"
DIQMTQSPSSLSASVGDRVTITCRASQSISSYLNWYQQKPGKAPKLLIYAASSLQSGVPSRFSGSGSGTDFTLTISSLQPEDFATYYCQQSYSTPSTFGGGTKVEIKR

SEQ ID NO: 4842 - protein, 112 aa, Artificial Sequence
  source: /note="Description of Artificial Sequence: Synthetic light chain variable domain"
QASQSVLTQPPSVSAAPGQRVSISCSGSSSNIGNYHVSWYQHLPGRAPKLLIYDNSKRPSGIPDRFSGSKSGTSATLDITGLQTGDEGDYYCATWDTSLRWVFGTGTKVTVL

SEQ ID NO: 4843 - protein, 107 aa, Artificial Sequence [sequence omitted]

SEQ ID NO: 4844 - protein, 111 aa, Artificial Sequence
  source: /note="Description of Artificial Sequence: Synthetic light chain variable domain"
DIVLTQSPDSLSVSLGERATINCRASKSVDSYGNSFMHWYQQKPGQPPKLLIYLASNLESGVPDRFSGSGSGTDFTLTISSLQAEDVAVYYCQQNNEDPRTFGGGTKVEIK

SEQ ID NO: 4845 - protein, 109 aa, Artificial Sequence
  source: /note="Description of Artificial Sequence: Synthetic light chain variable domain"
DIQMTQFPSSLSASVGDRVTITCRASQGIRNDLGWYQQKPGKAPKRLIYAASRLHRGVPSRFSGSGSGTEFTLTISSLQPEDFATYYCLQHNSYPCSFGGINGTKLEIK

SEQ ID NO: 4846 - protein, 111 aa, Artificial Sequence; identical to SEQ ID NO: 4844
  source: /note="Description of Artificial Sequence: Synthetic light chain variable domain"

SEQ ID NO: 4847 - protein, 113 aa, Artificial Sequence
  source: /note="Description of Artificial Sequence: Synthetic light chain variable domain"
DIVMTQSPLSLPVTPGEPASISCRSSQSIVHSNGNTYLEWYLQKPGQSPQLLIYKVSNRFSGVPDRFSGSGSGTDFTLKISRVEAEDVGVYYCFQGSHVPRTFGGGTKVEIKR

SEQ ID NO: 4848 - protein, 113 aa, Artificial Sequence
  source: /note="Description of Artificial Sequence: Synthetic light chain variable domain"
DIVMTQSPLSLPVTPGQPASISCRSSQSITHSNGNTYLEWYLQKPGQSPQLLIYKVSNRDSGVPDRFSGSGSGTDFTLKISRVEAEDVGVYYCFQGSHVPRTFGGGTKVEIKR

SEQ ID NO: 4849 - protein, 113 aa, Artificial Sequence
  source: /note="Description of Artificial Sequence: Synthetic light chain variable domain"
DIVMTQSPLSLPVTPGEPASISCRSSQSITHSSGNTYLEWYLQKPGQSPQLLIYKVSNRASGVPDRFSGSGSGTDFTLKISRVEAEDVGVYYCFQGSHVPRTFGGGTKVEIKR

SEQ ID NO: 4850 - protein, 113 aa, Artificial Sequence
  source: /note="Description of Artificial Sequence: Synthetic light chain variable domain"
DIVMTQSPLSLPVTPGQPASISCRSSQSITHSSGQTYLEWYLQKPGQSPQLLIYKVSNRDSGVPDRFSGSGSGTDFTLKISRVEAEDVGVYYCFQGSHVPRTFGGGTKVEIKR

SEQ ID NO: 4851 - protein, 113 aa, Artificial Sequence
  source: /note="Description of Artificial Sequence: Synthetic light chain variable domain"
DVLMTQTPLSLPVSLGDQASISCRSSQSIVHSNGNTYLEWYLQKPGQSPKLLIYKVSNRFSGVPDRFSGSGSGTDFTLKISRVEAEDLGVYYCFQGSHVPRTFGGGTKLEIKR

SEQ ID NO: 4852 - protein, 108 aa, Artificial Sequence
  source: /note="Description of Artificial Sequence: Synthetic light chain variable domain"
DILLTQSPAILSVSPGERVSFSCRASQSIGTSIHWYQRRTNGSPRLLIKSASESISGIPSRFSGSGSGTDFTLSINSVESEDIADYYCQQSNSWPTTFGAGTKLELKR

SEQ ID NO: 4853 - protein, 112 aa, Artificial Sequence
  source: /note="Description of Artificial Sequence: Synthetic light chain variable domain"
DVVMTQTPLSLPVSLGDQASISCRSSQSLVHINGNTYLHWYLQKPGQSPKLLIYKVSNRFSGVPDRFSGSGSGTDFTLKISRVEAEDLGVYFCSQSTHVPWTFGGGTKLEIK

SEQ ID NO: 4854 - protein, 112 aa, Artificial Sequence
  source: /note="Description of Artificial Sequence: Synthetic light chain variable domain"
DVLMTQTPLSLPVSLGDQASISCRSSQSIVHSNGNTYLEWFLQKPGQSPKLLIYTVSNRFSGVPDRFSGSGSGTDFTLKISRVEAEDLGVYYCFQGSHVPPTFGGGTKLEIK

SEQ ID NO: 4855 - protein, 107 aa, Artificial Sequence
  source: /note="Description of Artificial Sequence: Synthetic light chain variable domain"
DIQMTQSPSSLSASLGERVSLTCRASQDIGSSLNWLQQEPDGTIKRLIYATSSLDSGVPKRFSGSRSGSDYSLTISSLESEDFVDYYCLQYASSPWTFGGGTKLEIK

SEQ ID NO: 4856 - protein, 111 aa, Artificial Sequence
  source: /note="Description of Artificial Sequence: Synthetic light chain variable domain"
DIVLTQSPTSLAVSLGQRATISCRASESVDKFGMSFLNWFQQKPGQPPKLLIFVASSQGSGVPARFSGSGSGTDFSLNIHPVEEDDTAMYFCQQSKDIPYTFGGGTKLEIK

SEQ ID NO: 4857 - protein, 111 aa, Artificial Sequence
  source: /note="Description of Artificial Sequence: Synthetic light chain variable domain"
DIVMTQSPDSLAVSLGERATINCRASESVDKFGMSFLNWYQQKPGQPPKLLIFVASSQGSGVPDRFSGSGSGTDFTLTISSLQAEDVAVYYCQQSKDIPYTFGQGTKVEIK

SEQ ID NO: 4858 - protein, 111 aa, Artificial Sequence
  source: /note="Description of Artificial Sequence: Synthetic light chain variable domain"
DIVMTQSPDSLAVSLGERATINCRASESVDKFGVSFLNWYQQKPGQPPKLLIFVASSQGSGVPDRFSGSGSGTDFTLTISSLQAEDVAVYYCQQSKDIPYTFGQGTKVEIK

SEQ ID NO: 4859 - protein, 111 aa, Artificial Sequence
  source: /note="Description of Artificial Sequence: Synthetic light chain variable domain"
DIVLTQSPASLAVSLGQRATISCRASESVDRYGISFMNWFQQKPGQSPKLLIYAASNQGSGVPARFSGSGSGTDFSLNIHPLEEDDAAMYFCQHSKEVPYTFGGGTKLEIK

SEQ ID NO: 4860 - protein, 111 aa, Artificial Sequence
  source: /note="Description of Artificial Sequence: Synthetic light chain variable domain"
DIQMTQSPSSLSASVGDRVTITCRASESVDRYGISFMNWFQQKPGKAPKLLIYAASNQGSGVPSRFSGSGSGTDFTLTISSLQPEDFATYYCQHSKEVPYTFGQGTKVEIK

SEQ ID NO: 4861 - protein, 107 aa, Artificial Sequence
  source: /note="Description of Artificial Sequence: Synthetic light chain variable domain"
DIQMNQSPSSLSASLGDTITITCHASQNINVWLSWYQQKAGNNPKLLIYAASKLHTGVPSRFTGSGSGTLFTLTISSLQPEDIATYYCQQGQSYPLTFGSGTNLELK

SEQ ID NO: 4862 - protein, 107 aa, Artificial Sequence
  source: /note="Description of Artificial Sequence: Synthetic light chain variable domain"
DIQMTQSPSSLSASVGDRVTITCHASQNINVWLSWYQQKPGKNPKLLIYAASKLHTGVPSRFSGSGSGTDFTLTISSLQPEDFATYYCQQGQSYPLTFGQGTKVEIK

SEQ ID NO: 4863 - protein, 107 aa, Artificial Sequence
  source: /note="Description of Artificial Sequence: Synthetic light chain variable domain"
DIQMNQSPSSLSASLGDTITITCHASQNIHVWLSWYQQKPGNIPKLLIYKASTLHTGVPSRFNGSGSGTGFTLTISSLQPEDIATYYCQQGQSSPLTFGAGTKLEVK

SEQ ID NO: 4864 - protein, 107 aa, Artificial Sequence
  source: /note="Description of Artificial Sequence: Synthetic light chain variable domain"
DIQMTQSPSSLSASVGDRVTITCHASQNIHVWLSWYQQKPGKAPKLLIYKASTLHTGVPSRFSGSGSGTDFTLTISSLQPEDFATYYCQQGQSSPLTFGQGTKVEIK

SEQ ID NO: 4865 - protein, 107 aa, Artificial Sequence
  source: /note="Description of Artificial Sequence: Synthetic light chain variable domain"
DIQMTQSPSSLSASVGDRVTITCRASQGIRNDLDWYQQKPGKAPKRLIYAASSLQSGVPSRFNGSGSGTEFTLTISSLQPEDFATYYCLQHDSYPLTFGGGTKVEIK

SEQ ID NO: 4866 - protein, 107 aa, Artificial Sequence
  source: /note="Description of Artificial Sequence: Synthetic light chain variable domain"
AIQMTQSPSSLSASVGDRVTITCRASQGIRNDLDWYQQKPGKAPKRLIYAASSLQSGVPSRFSGSGSGTDFTLTISSLQPEDFATYYCLQHSIYPPTFGQGTKVEIK

SEQ ID NO: 4867 - protein, 107 aa, Artificial Sequence
  source: /note="Description of Artificial Sequence: Synthetic light chain variable domain"
AIRITQSPSSLSASVGDRVTITCRASQGIRNDLDWYQQKPGKAPKRLIYAASSLQSGVPSRFSGSGSGTEFTLTISSLQPEDFATYYCLQHDSYPLTFGGGTKVEIK

SEQ ID NO: 4868 - protein, 111 aa, Artificial Sequence
  source: /note="Description of Artificial Sequence: Synthetic light chain variable domain"
EIVLTQSPATLSLSPGERATLSCRASESVAKYGLSLLNWFQQKPGQPPRLLIFAASNRGSGIPARFSGSGSGTDFTLTISSLEPEDFAVYYCQQSKEVPFTFGQGTKVEIK

SEQ ID NO: 4869 - protein, 111 aa, Artificial Sequence
  source: /note="Description of Artificial Sequence: Synthetic light chain variable domain"
DIVLTQSPGFLVVSLGQRATISCRASESVAKYGLSLLNWFQQKPGQPPKLLIFAASNRGSGVPARFSGSGSGTDFSLNIHPMEEDDTAMYFCQQSKEVPFTFGSGTKLEIK

SEQ ID NO: 4870 - protein, 119 aa, Artificial Sequence
  source: /note="Description of Artificial Sequence: Synthetic light chain variable domain"
EVQLVESGGGLVQPGGSLRLSCAASGFTFSSFSMSWVRQAPGKGLEWVATISGGKTFTDYVDAVKGRFTISRDNSKNTLYLQMNSLRAEDTAVYYCTRANYGNWFFEVWGQGTLVTVSS

SEQ ID NO: 4871 - protein, 108 aa, Artificial Sequence
  source: /note="Description of Artificial Sequence: Synthetic light chain variable domain"
EIVLTQSPGTLSLSPGERATLSCRASQSFSSSYLAWYQQKPGQAPRLLIYGASSRATGIPDRFSGSGSGTDFTLTISRLEPEDFAVYYCQQYDRSPLTFGGGTKVEIK

SEQ ID NO: 4872 - protein, 109 aa, Artificial Sequence
  source: /note="Description of Artificial Sequence: Synthetic light chain variable domain"
DIVLTQSPASLAVSPGQRATISCRASESVDNYGNTFMHWYQQKPGQPPKLLIYRASNLESGIPARFSGSDSRTDFTINPVEADDVATYYCQQSKEDPPTFGAGTKLELK

SEQ ID NO: 4873 - protein, 111 aa, Artificial Sequence
  source: /note="Description of Artificial Sequence: Synthetic light chain variable domain"
AIVLTQSPASLAVSLGQRATISCRASESVDNYGNTFMHWYQQKPGQPPKLLIYRASNLESGIPARFSGSGSRTDFTLTINPVEADDVATYYCQQSNEDPPTFGAGTKLELK

SEQ ID NO: 4874 - protein, 107 aa, Artificial Sequence
  source: /note="Description of Artificial Sequence: Synthetic light chain variable domain"
SIVMTQSPDSLAVSLGERATINCKASQSVTNDVAWYQQKPGQPPKLLIYYASNRYTGVPDRFSGSGYGTDFTLTISSLQAEDVAVYFCQQDYSSPYTFGQGTKVEIK

SEQ ID NO: 4875 - protein, 107 aa, Artificial Sequence
  source: /note="Description of Artificial Sequence: Synthetic light chain variable domain"
SIVMTQSPDSLAVSLGERATINCKASQSVTNDVAWYQQKPGQPPKLLIYYASNRYTGVPDRFSGSGYGTDFTFTISSLQAEDVATYFCQQDYSSPYTFGQGTKVEIK

SEQ ID NO: 4876 - protein, 107 aa, Artificial Sequence
  source: /note="Description of Artificial Sequence: Synthetic light chain variable domain"
DIVMTQSPDSLAVSLGERATINCKASQSVTNDVAWYQQKPGQPPKLLIYYASNRYTGVPDRFSGSGSGTDFTLTISSLQAEDVAVYYCQQDYSSPYTFGQGTKVEIK

SEQ ID NO: 4877 - protein, 107 aa, Artificial Sequence
  source: /note="Description of Artificial Sequence: Synthetic light chain variable domain"
SIVMTQSPDSLAVSLGERATINCKASQSVTNDVAWYQQKPGQPPKLLIYYASNRYTGVPDRFSGSGSGTDFTLTISSLQAEDVAVYFCQQDYSSPYTFGQGTKVEIK

SEQ ID NO: 4878 - protein, 111 aa, Artificial Sequence
  source: /note="Description of Artificial Sequence: Synthetic light chain variable domain"
QSVLTQPPSASGTPGQRVTISCSGSTSNIGTNTANWFQQLPGTAPKLLIHNNNQRPSGVPDRFSGSKSGTSASLAISGLQSEDEADYYCAAWDDSLNGHWVFGGGTKLTVL

SEQ ID NO: 4879 - protein, 109 aa, Artificial Sequence
  source: /note="Description of Artificial Sequence: Synthetic light chain variable domain"
EIVLTQSPVTLSLSPGERATLSCRASQSVSSYLAWYQQKPGQAPRLLIYDASNRATGIPARFSGSGSGTDFTLTISSLEPEDFAVYYCQQRSNWMYTFGQGTKLEIKRT

SEQ ID NO: 4880 - protein, 214 aa, Artificial Sequence
  source: /note="Description of Artificial Sequence: Synthetic light chain variable domain"
EIVLTQSPVTLSLSPGERATLSCRASQSVSSYLAWYQQKPGQAPRLLIYQASNRATGIPARFSGSGSGTDFTLTISSLEPEDFAVYYCQQRSNWMYTFGQGTKLEIKRTVAAPSVFIFPPSDEQLKSGTASVVCLLNNFYPREAKVQWKVDNALQSGNSQESVTEQDSKDSTYSLSSTLTLSKADYEKHKVYACEVTHQGLSSPVTKSFNRGEC

SEQ ID NO: 4881 - protein, 109 aa, Artificial Sequence; identical to SEQ ID NO: 4879
  source: /note="Description of Artificial Sequence: Synthetic light chain variable domain"

SEQ ID NO: 4882 - protein, 127 aa, Artificial Sequence; identical to SEQ ID NO: 771
  source: /note="Description of Artificial Sequence: Synthetic light chain variable domain"

SEQ ID NO: 4883 - protein, 214 aa, Artificial Sequence
  source: /note="Description of Artificial Sequence: Synthetic light chain variable domain"
DIVMTQSQKFMSTSVGDRVSVTCKASQNVGTNVAWYQQKPGQSPKALIYSTSYRYSGVPDRFTGSGSGTDFTLTISNVQSEDLAEYFCQQYNSYPYTFGGGTKLEIKRTVAAPSVFIFPPSDEQLKSGTASVVCLLNNFYPREAKVQWKVDNALQSGNSQESVTEQDSKDSTYSLSSTLTLSKADYEKHKVYACEVTHQGLSSPVTKSFNRGEC

SEQ ID NO: 4884 - protein, 125 aa, Artificial Sequence; identical to SEQ ID NO: 2374
  source: /note="Description of Artificial Sequence: Synthetic light chain variable domain"

SEQ ID NO: 4885 - protein, 107 aa, Artificial Sequence
  source: /note="Description of Artificial Sequence: Synthetic light chain variable domain"
DIQMTQSPSSLSASVGDRVTITCSSSQDISNYLNWYQQKPGKAPKLLIYYTSTLHLGVPSRFSGSGSGTDFTFTISSLEAEDAATYYCQQYYNLPWTFGQGTKVEIK

SEQ ID NO: 4886 - protein, 107 aa, Artificial Sequence
  source: /note="Description of Artificial Sequence: Synthetic light chain variable domain"
DIQMTQSPSSLSASVGDRVTITCSSSQDISNYLNWYQQKPGKAPKLLIYYTSTLHLGIPPRFSGSGYGTDFTLTINNIESEDAAYYFCQQYYNLPWTFGQGTKVEIK

SEQ ID NO: 4887 - protein, 107 aa, Artificial Sequence
  source: /note="Description of Artificial Sequence: Synthetic light chain variable domain"
EIVLTQSPATLPVTLGQPASISCSSSQDISNYLNWYQQKPGQAPRLLIYYTSTLHLGVPSRFSGSGSGTDFTFTISSLEAEDAATYYCQQYYNLPWTFGQGTKVEIK

SEQ ID NO: 4888 - protein, 107 aa, Artificial Sequence
  source: /note="Description of Artificial Sequence: Synthetic light chain variable domain"
DIQMTQSPSSLSASVGDRVTITCSSSQDISNYLNWYLQKPGQSPQLLIYYTSTLHLGIPDRFSGSGSGTDFTLTISRLEPEDFAVYYCQQYYNLPWTFGQGTKVEIK

SEQ ID NO: 4889 - protein, 107 aa, Artificial Sequence
  source: /note="Description of Artificial Sequence: Synthetic light chain variable domain"
EIVLTQSPATLSLSPGERATLSCSSSQDISNYLNWYQQKPGKAPKLLIYYTSTLHLGVPSRFSGSGSGTDFTFTISSLEAEDAATYYCQQYYNLPWTFGQGTKVEIK

SEQ ID NO: 4890 - protein, 107 aa, Artificial Sequence
  source: /note="Description of Artificial Sequence: Synthetic light chain variable domain"
DIVMTQTPLSLPVTPGEPASISCSSSQDISNYLNWYQQKPGQAPRLLIYYTSTLHLGVPSRFSGSGSGTEFTLTISSLQPDDFATYYCQQYYNLPWTFGQGTKVEIK

SEQ ID NO: 4891 - protein, 107 aa, Artificial Sequence
  source: /note="Description of Artificial Sequence: Synthetic light chain variable domain"
DIQMTQSPSSLSASVGDRVTITCSSSQDISNYLNWYLQKPGQSPQLLIYYTSTLHLGVPSRFSGSGSGTEFTLTISSLQPDDFATYYCQQYYNLPWTFGQGTKVEIK

SEQ ID NO: 4892 - protein, 107 aa, Artificial Sequence
  source: /note="Description of Artificial Sequence: Synthetic light chain variable domain"
EIVLTQSPDFQSVTPKEKVTITCSSSQDISNYLNWYQQKPGQAPRLLIYYTSTLHLGVPSRFSGSGSGTDFTLTISSLQPEDFATYYCQQYYNLPWTFGQGTKVEIK

SEQ ID NO: 4893 - protein, 107 aa, Artificial Sequence
  source: /note="Description of Artificial Sequence: Synthetic light chain variable domain"
DIQMTQSPSSLSASVGDRVTITCSSSQDISNYLNWYQQKPGKAPKLLIYYTSTLHLGVPSRFSGSGSGTDFTFTISSLQPEDIATYYCQQYYNLPWTFGQGTKVEIK

SEQ ID NO: 4894 - protein, 107 aa, Artificial Sequence
  source: /note="Description of Artificial Sequence: Synthetic light chain variable domain"
AIQLTQSPSSLSASVGDRVTITCSSSQDISNYLNWYQQKPGQAPRLLIYYTSTLHLGVPSRFSGSGSGTDFTLTISSLQPEDFATYYCQQYYNLPWTFGQGTKVEIK

SEQ ID NO: 4895 - protein, 107 aa, Artificial Sequence
  source: /note="Description of Artificial Sequence: Synthetic light chain variable domain"
EIVLTQSPDFQSVTPKEKVTITCSSSQDISNYLNWYQQKPGQAPRLLIYYTSTLHLGVPSRFSGSGSGTDFTFTISSLEAEDAATYYCQQYYNLPWTFGQGTKVEIK

SEQ ID NO: 4896 - protein, 107 aa, Artificial Sequence
  source: /note="Description of Artificial Sequence: Synthetic light chain variable domain"
DIVMTQTPLSLPVTPGEPASISCSSSQDISNYLNWYQQKPGQAPRLLIYYTSTLHLGIPDRFSGSGSGTDFTLTISRLEPEDFAVYYCQQYYNLPWTFGQGTKVEIK

SEQ ID NO: 4897 - protein, 451 aa, Artificial Sequence
  source: /note="Description of Artificial Sequence: Synthetic light chain variable domain"
QVQLVQSGAEVKKPGASVKVSCKASGFTLTNYGMNWVRQAPGQGLEWMGWINTDTGEPTYADDFKGRFVFSLDTSVSTAYLQISSLKAEDTAVYYCARNPPYYYGTNNAEAMDYWGQGTTVTVSSASTKGPSVFPLAPCSRSTSESTAALGCLVKDYFPEPVTVSWNSGALTSGVHTFPAVLQSSGLYSLSSVVTVPSSSLGTKTYTCNVDHKPSNTKVDKRVESKYGPPCPPCPAPEFLGGPSVFLFPPKPKDTLMISRTPEVTCVVVDVSQEDPEVQFNWYVDGVEVHNAKTKPREEQFNSTYRVVSVLTVLHQDWLNGKEYKCKVSNKGLPSSIEKTISKAKGQPREPQVYTLPPSQEEMTKNQVSLTCLVKGFYPSDIAVEWESNGQPENNYKTTPPVLDSDGSFFLYSRLTVDKSRWQEGNVFSCSVMHEALHNHYTQKSLSLSLG

SEQ ID NO: 4898 - protein, 214 aa, Artificial Sequence
  source: /note="Description of Artificial Sequence: Synthetic light chain variable domain"
DIQMTQSPSSLSASVGDRVTITCSSSQDISNYLNWYQQKPGKAPKLLIYYTSTLHLGVPSRFSGSGSGTDFTFTISSLEAEDAATYYCQQYYNLPWTFGQGTKVEIKRTVAAPSVFIFPPSDEQLKSGTASVVCLLNNFYPREAKVQWKVDNALQSGNSQESVTEQDSKDSTYSLSSTLTLSKADYEKHKVYACEVTHQGLSSPVTKSFNRGEC

SEQ ID NO: 4899 - protein, 214 aa, Artificial Sequence
  source: /note="Description of Artificial Sequence: Synthetic light chain variable domain"
DIQMTQSPSSLSASVGDRVTITCSSSQDISNYLNWYQQKPGKAPKLLIYYTSTLHLGIPPRFSGSGYGTDFTLTINNIESEDAAYYFCQQYYNLPWTFGQGTKVEIKRTVAAPSVFIFPPSDEQLKSGTASVVCLLNNFYPREAKVQWKVDNALQSGNSQESVTEQDSKDSTYSLSSTLTLSKADYEKHKVYACEVTHQGLSSPVTKSFNRGEC

SEQ ID NO: 4900 - protein, 214 aa, Artificial Sequence
  source: /note="Description of Artificial Sequence: Synthetic light chain variable domain"
EIVLTQSPATLPVTLGQPASISCSSSQDISNYLNWYQQKPGQAPRLLIYYTSTLHLGVPSRFSGSGSGTDFTFTISSLEAEDAATYYCQQYYNLPWTFGQGTKVEIKRTVAAPSVFIFPPSDEQLKSGTASVVCLLNNFYPREAKVQWKVDNALQSGNSQESVTEQDSKDSTYSLSSTLTLSKADYEKHKVYACEVTHQGLSSPVTKSFNRGEC

SEQ ID NO: 4901 - protein, 214 aa, Artificial Sequence
  source: /note="Description of Artificial Sequence: Synthetic light chain variable domain"
DIQMTQSPSSLSASVGDRVTITCSSSQDISNYLNWYLQKPGQSPQLLIYYTSTLHLGIPDRFSGSGSGTDFTLTISRLEPEDFAVYYCQQYYNLPWTFGQGTKVEIKRTVAAPSVFIFPPSDEQLKSGTASVVCLLNNFYPREAKVQWKVDNALQSGNSQESVTEQDSKDSTYSLSSTLTLSKADYEKHKVYACEVTHQGLSSPVTKSFNRGEC

SEQ ID NO: 4902 - protein, 214 aa, Artificial Sequence
  source: /note="Description of Artificial Sequence: Synthetic light chain variable domain"
EIVLTQSPATLSLSPGERATLSCSSSQDISNYLNWYQQKPGKAPKLLIYYTSTLHLGVPSRFSGSGSGTDFTFTISSLEAEDAATYYCQQYYNLPWTFGQGTKVEIKRTVAAPSVFIFPPSDEQLKSGTASVVCLLNNFYPREAKVQWKVDNALQSGNSQESVTEQDSKDSTYSLSSTLTLSKADYEKHKVYACEVTHQGLSSPVTKSFNRGEC

SEQ ID NO: 4903 - protein, 214 aa, Artificial Sequence
  source: /note="Description of Artificial Sequence: Synthetic light chain variable domain"
DIVMTQTPLSLPVTPGEPASISCSSSQDISNYLNWYQQKPGQAPRLLIYYTSTLHLGVPSRFSGSGSGTEFTLTISSLQPDDFATYYCQQYYNLPWTFGQGTKVEIKRTVAAPSVFIFPPSDEQLKSGTASVVCLLNNFYPREAKVQWKVDNALQSGNSQESVTEQDSKDSTYSLSSTLTLSKADYEKHKVYACEVTHQGLSSPVTKSFNRGEC

SEQ ID NO: 4904 - protein, 214 aa, Artificial Sequence
  source: /note="Description of Artificial Sequence: Synthetic light chain variable domain"
DIQMTQSPSSLSASVGDRVTITCSSSQDISNYLNWYLQKPGQSPQLLIYYTSTLHLGVPSRFSGSGSGTEFTLTISSLQPDDFATYYCQQYYNLPWTFGQGTKVEIKRTVAAPSVFIFPPSDEQLKSGTASVVCLLNNFYPREAKVQWKVDNALQSGNSQESVTEQDSKDSTYSLSSTLTLSKADYEKHKVYACEVTHQGLSSPVTKSFNRGEC

SEQ ID NO: 4905 - protein, 214 aa, Artificial Sequence
  source: /note="Description of Artificial Sequence: Synthetic light chain variable domain"
EIVLTQSPDFQSVTPKEKVTITCSSSQDISNYLNWYQQKPGQAPRLLIYYTSTLHLGVPSRFSGSGSGTDFTLTISSLQPEDFATYYCQQYYNLPWTFGQGTKVEIKRTVAAPSVFIFPPSDEQLKSGTASVVCLLNNFYPREAKVQWKVDNALQSGNSQESVTEQDSKDSTYSLSSTLTLSKADYEKHKVYACEVTHQGLSSPVTKSFNRGEC

SEQ ID NO: 4906 - protein, 214 aa, Artificial Sequence
  source: /note="Description of Artificial Sequence: Synthetic light chain variable domain"
DIQMTQSPSSLSASVGDRVTITCSSSQDISNYLNWYQQKPGKAPKLLIYYTSTLHLGVPSRFSGSGSGTDFTFTISSLQPEDIATYYCQQYYNLPWTFGQGTKVEIKRTVAAPSVFIFPPSDEQLKSGTASVVCLLNNFYPREAKVQWKVDNALQSGNSQESVTEQDSKDSTYSLSSTLTLSKADYEKHKVYACEVTHQGLSSPVTKSFNRGEC

SEQ ID NO: 4907 - protein, 214 aa, Artificial Sequence
  source: /note="Description of Artificial Sequence: Synthetic light chain variable domain"
AIQLTQSPSSLSASVGDRVTITCSSSQDISNYLNWYQQKPGQAPRLLIYYTSTLHLGVPSRFSGSGSGTDFTLTISSLQPEDFATYYCQQYYNLPWTFGQGTKVEIKRTVAAPSVFIFPPSDEQLKSGTASVVCLLNNFYPREAKVQWKVDNALQSGNSQESVTEQDSKDSTYSLSSTLTLSKADYEKHKVYACEVTHQGLSSPVTKSFNRGEC

SEQ ID NO: 4908 - protein, 214 aa, Artificial Sequence
  source: /note="Description of Artificial Sequence: Synthetic light chain variable domain"
EIVLTQSPDFQSVTPKEKVTITCSSSQDISNYLNWYQQKPGQAPRLLIYYTSTLHLGVPSRFSGSGSGTDFTFTISSLEAEDAATYYCQQYYNLPWTFGQGTKVEIKRTVAAPSVFIFPPSDEQLKSGTASVVCLLNNFYPREAKVQWKVDNALQSGNSQESVTEQDSKDSTYSLSSTLTLSKADYEKHKVYACEVTHQGLSSPVTKSFNRGEC

SEQ ID NO: 4909 - protein, 214 aa, Artificial Sequence
  source: /note="Description of Artificial Sequence: Synthetic light chain variable domain"
DIVMTQTPLSLPVTPGEPASISCSSSQDISNYLNWYQQKPGQAPRLLIYYTSTLHLGIPDRFSGSGSGTDFTLTISRLEPEDFAVYYCQQYYNLPWTFGQGTKVEIKRTVAAPSVFIFPPSDEQLKSGTASVVCLLNNFYPREAKVQWKVDNALQSGNSQESVTEQDSKDSTYSLSSTLTLSKADYEKHKVYACEVTHQGLSSPVTKSFNRGEC

SEQ ID NO: 4910 - protein, 214 aa, Artificial Sequence
  source: /note="Description of Artificial Sequence: Synthetic light chain variable domain"
EIVLTQSPATLSLSPGERATLSCRASQSISSYLAWYQQKPGQAPRLLIYDASNRATGIPARFSGSGSGTDFTLTISSLEPEDFAVYYCQQRSNWPLTFGQGTNLEIKRTVAAPSVFIFPPSDEQLKSGTASVVCLLNNFYPREAKVQWKVDNALQSGNSQESVTEQDSKDSTYSLSSTLTLSKADYEKHKVYACEVTHQGLSSPVTKSFNRGEC

SEQ ID NO: 4911 - protein, 108 aa, Artificial Sequence
  source: /note="Description of Artificial Sequence: Synthetic light chain variable domain"
DIVVTQSPASLAVSLGQRATISYRASKSVSTSGYSYMHWNQQKPGQPPRLLIYLVSNLESGVPARFSGSGSGTDFTLNIHPVEEEDAATYYCQHIRELTRSEGGPSWK

SEQ ID NO: 4912 - protein, 106 aa, Artificial Sequence
  source: /note="Description of Artificial Sequence: Synthetic light chain variable domain"
DIQMTQSPPVLSASVGDRVTLSCKASQNINKNLDWYQQKHGEAPRLLIYYTNNLQTGIPSRFSGSGSGTDYTLTISSLQPEDVATYFCYQYKSGNTFGAGTKLELK

SEQ ID NO: 4913 - protein, 106 aa, Artificial Sequence
  source: /note="Description of Artificial Sequence: Synthetic light chain variable domain"
EIVMTQSPATLSVSPGERATLSCKASQNINKNLDWYQQKPGQAPRLLIYYTNNLQTGIPARFSGSGSGTEFTLTISSLQSEDFAVYYCYQYKSGNTFGQGTKLEIK

SEQ ID NO: 4914 - protein, 106 aa, Artificial Sequence
  source: /note="Description of Artificial Sequence: Synthetic light chain variable domain"
DIQMTQSPPVLSASVGDRVTLSCKASQNINKNLDWYHQKHGEAPKLLIYYTNNLQTGIPSRFSGSGSGTDYTLIISSLQPEDVATYYCYQYNSGPTFGTGTKLELK

SEQ ID NO: 4915 - protein, 112 aa, Artificial Sequence
  source: /note="Description of Artificial Sequence: Synthetic light chain variable domain"
DIVMTQSPDSLAVSLGERATINCRASESVDNYGNSFMHWYQQKPGQPPKLLIYLASNLESGVPDRFSGSGSGTDFTLTISSLQAEDVAVYYCQQNYEDPFTFGQGTKVEIKR

SEQ ID NO: 4916 - protein, 112 aa, Artificial Sequence
  source: /note="Description of Artificial Sequence: Synthetic light chain variable domain"
DIVMTQSPDSLAVSLGERATINCRASESVDNYGNSFMHWYQQKPGQPPKLLIYLASNLESGVPDRFSGSGSRTDFTLTISSLQAEDVAVYYCQQNYEDPFTFGQGTKVEIKR

SEQ ID NO: 4917 - protein, 113 aa, Artificial Sequence
  source: /note="Description of Artificial Sequence: Synthetic light chain variable domain"
DVVMTQTPLSLPVSLGDQASISCRSSQSLVHSNGNTYLQWYLQKPGQSPKLLIYKVSNRFSGVPDRFSGSGSGTDFTLKISRVEAEDLGIYFCSQSTHFPYTFGGGTKLEIKR

SEQ ID NO: 4918 - protein, 114 aa, Artificial Sequence
  source: /note="Description of Artificial Sequence: Synthetic light chain variable domain"
DIVMTQSPSSLTVTAGEKVTMSCKSSQSLLNSGNQKNYLTWFQQKPGQPPKLLIYWASTRESGVPDRFTGSGSGTDFTLTISNVQAEDLAVYYCQNDYSFPFTFGQGTKVEIKR

SEQ ID NO: 4919 - protein, 108 aa, Artificial Sequence
  source: /note="Description of Artificial Sequence: Synthetic light chain variable domain"
DIQMTQSPSSLSASVGDRVTITCRASQDVSTAVAWYQQKPGKAPKLLIYSASFLYSGVPSRFSGSGSGTDFTLTISSLQPEDFATYYCQQSYTTPPTFGQGTKVEIKR

SEQ ID NO: 4920 - protein, 112 aa, Artificial Sequence
  source: /note="Description of Artificial Sequence: Synthetic light chain variable domain"
NIVLTQSPASLAVSLGQRATISCRASESVDNYGNSFMHWYQQKPGQPPKLLIYLASNLESGVPARFSGSGSRTDFTLTIDPVEADDAATYYCQQNYEDPFTFGSGTKVEIKR

SEQ ID NO: 4921 - protein, 107 aa, Artificial Sequence
  source: /note="Description of Artificial Sequence: Synthetic light chain variable domain"
DIQMTQSPSSLSASVGDRVTITCSASQDINNYLNWYQQKPGKAPKLLIYYTSSLHSGVPSRFSGSGSGTDFTLTISSLQPEDFATYYCQQFSNLPWTFGGGTKLEIK

SEQ ID NO: 4922 - protein, 213 aa, Artificial Sequence
  source: /note="Description of Artificial Sequence: Synthetic light chain variable domain"
DIQMTQTTSSLSASLGDRVTISCSASQDINNYLNWYQQKPDGTVKLLIYYTSSLHSGVPSRFSGSGSGTDYSLTISNLEPEDFATYYCQQFSNLPWTFGGGTKLEIKRADAAPTVSIFPPSSEQLTSGGASWCFLNNFYPKDINVKWKIDGSERQNGVLNSWTDQDSKDSTYSMSSTLTLTKDEYERHNSYTCEATHKTSTSPIVKSFNRNEC

SEQ ID NO: 4923 - protein, 110 aa, Artificial Sequence
  source: /note="Description of Artificial Sequence: Synthetic light chain variable domain"
DIQMTQTTSSLSASLGDRVTISCSASQDINNYLNWYQQKPDGTVKLLIYYTSSLHSGVPSRFSGSGSGTDYSLTISNLEPEDFATYYCQQFSNLPWTFGGGTKLEIKRAD

SEQ ID NO: 4924 - protein, 107 aa, Artificial Sequence
  source: /note="Description of Artificial Sequence: Synthetic light chain variable domain"
DIVMTQSQKFMSTSVGDRVSVTCKASQNVGINVAWYQQKPGQSPKSLISSASYRYSGVPDRFTGSGSGTDFTLTITNNQSEDLAEYFCQQYDTYPFTFGSGTKLEIK

SEQ ID NO: 4925 - protein, 445 aa, Artificial Sequence; identical to SEQ ID NO: 2417
  source: /note="Description of Artificial Sequence: Synthetic light chain variable domain"

SEQ ID NO: 4926 - protein, 107 aa, Artificial Sequence
  source: /note="Description of Artificial Sequence: Synthetic light chain variable domain"
DIQMTQSPSSLSASVGDRVTITCKASQNVGINVAWYQQKPGKAPKSLISSASYRYSGVPSRFTGSGSGTDFTLTISSLQPEDFATYFCQQYDTYPFTFGQGTKVEIK

SEQ ID NO: 4927 - protein, 107 aa, Artificial Sequence
  source: /note="Description of Artificial Sequence: Synthetic light chain variable domain"
DIQMTQSPSSLSASVGDRVTITCKASQNVGINVAWYQQKPGKAPKSLISSASYRYSGVPSRFSGSGSGTDFTLTISSLQPEDFATYFCQQYDTYPFTFGQGTKVEIK

SEQ ID NO: 4928 - protein, 107 aa, Artificial Sequence
  source: /note="Description of Artificial Sequence: Synthetic light chain variable domain"
DIQMTQSPSSLSASVGDRVTITCKASQNVGINVAWFQQKPGKAPKSLISSASYRYSGVPSRFSGSGSGTDFTLTISSLQPEDFATYYCQQYDTYPFTFGQGTKVEIK

SEQ ID NO: 4929 - protein, 132 aa, Artificial Sequence
  source: /note="Description of Artificial Sequence: Synthetic light chain variable domain"
MRCLAEFLGLLVLWIPGAIGDIVMTQAAPSVSVTPGESVSISCRSSKSLLHSNGNTYLYWFLQRPGQSPQFLIYRMSNLASGVPDRFSGSGSGTAFTLRISRVEAEDVGVYYCMQHLEYPYTFGGGTKLEIK

SEQ ID NO: 4930 - protein, 239 aa, Artificial Sequence
  source: /note="Description of Artificial Sequence: Synthetic light chain variable domain"
MRVPAQLLGLLLLWLPGARCDIVMTQTPLSLSVTPGQPASISCRSSKSLLHSNGNTYLYWFLQKPGQSPQFLIYRMSNLASGVPDRFSGSGSGTDFTLKISRVEAEDVGVYYCMQHLEYPYTFGGGTKVEIKRTVAAPSVFIFPPSDEQLKSGTASVVCLLNNFYPREAKVQWKVDNALQSGNSQESVTEQDSKDSTYSLSSTLTLSKADYEKHKVYACEVTHQGLSSPVTKSFNRGEC

SEQ ID NO: 4931 - protein, 106 aa, Artificial Sequence
  source: /note="Description of Artificial Sequence: Synthetic light chain variable domain"
DIQVTQSPSLLSASVGDRVTLNCKGSQNIYKSLAWFRLKRGEAPKLLIYDANSLQTGIPSRFSGSGSGTDFTLTITSLQPEDVATYFCQQYYSGYTFGAGTKLELK

SEQ ID NO: 4932 - protein, 106 aa, Artificial Sequence
  source: /note="Description of Artificial Sequence: Synthetic light chain variable domain"
DIQMTQSPSSLSASVGDRVTITCKGSQNIYKSLAWFQQKPGKVPKLLIYDANSLQTGIPSRFSGSGSGTDFTLTISSLQPEDVATYYCQQYYSGYTFGGGTKVEIK

SEQ ID NO: 4933 - protein, 106 aa, Artificial Sequence
  source: /note="Description of Artificial Sequence: Synthetic light chain variable domain"
DIQMTQSPSSLSASVGDRVTITCKGSQNIYKSLAWFQLKPGKVPKLLIYDANSLQTGIPSRFSGSGSGTDFTLTISSLQPEDVATYYCQQYYSGYTFGGGTKVEIK

SEQ ID NO: 4934 - protein, 106 aa, Artificial Sequence
  source: /note="Description of Artificial Sequence: Synthetic light chain variable domain"
DIQMTQSPSSLSASVGDRVTINCKGSQNIYKSLAWFQQKPGKVPKLLIYDANSLQTGIPSRFSGSGSGTDFTLTISSLQPEDVATYYCQQYYSGYTFGGGTKVEIK

SEQ ID NO: 4935 - protein, 106 aa, Artificial Sequence
  source: /note="Description of Artificial Sequence: Synthetic light chain variable domain"
DIQMTQSPSSLSASVGDRVTITCKASQNIYNSLAWYQQKPGKAPKVLIFNANSLQTGIPSRFSGSGSGTDFTLTISSLQPEDFATYYCQQFYSGYTFGQGTKLEIK

SEQ ID NO: 4936 - protein, 106 aa, Artificial Sequence
  source: /note="Description of Artificial Sequence: Synthetic light chain variable domain"
DIQMTQSPSSLSASVGDRVTITCKASQNIYNSLAWYQQKPGKAPKVLIFNANSLQTGVPSRFSGSGSGTDFTLTISSLQPEDFATYYCQQFYSGYTFGQGTKLEIK

SEQ ID NO: 4937 - protein, 106 aa, Artificial Sequence
  source: /note="Description of Artificial Sequence: Synthetic light chain variable domain"
DIQMTQSPSSLSASVGDRVTINCKASQNIYNSLAWYQQKPGKAPKVLIFNANSLQTGIPSRFSGSGSGTDFTLTISSLQPEDFATYYCQQFYSGYTFGQGTKLEIK

SEQ ID NO: 4938 - protein, 111 aa, Artificial Sequence
  source: /note="Description of Artificial Sequence: Synthetic light chain variable domain"
DIVLTQSPASLAVSLGQRATISCRASKSVSTSGYSYMYWYQQKPGQPPKLLIYLASNLESGVPARFSGSGSGTDFTLNIHPVEEEDAATYYCQHSRELPFTFGSGTKLEIK

SEQ ID NO: 4939 - protein, 112 aa, Artificial Sequence
  source: /note="Description of Artificial Sequence: Synthetic light chain variable domain"
DIVMSQSPSSLAVSAGEKVTMSCKSSQSLLNSSTRKNFLAWYQQKPGQSPKLLIYWASTRESGVPDRFTGSGSGTDFTLTISSVQAEDLAVYYCKQSYNRYTFGGGTKLEIK

SEQ ID NO: 4940 - protein, 107 aa, Artificial Sequence
  source: /note="Description of Artificial Sequence: Synthetic light chain variable domain"
DIVMTQSPATLSVTPGDRVSLSCRASQSISDYLHWYQQKSHESPRLLIKYASQSISGIPSRFSGSGSGSDFTLSINSVEPEDVGVYYCQNGHNFPRTFGGGTKLEIK

SEQ ID NO: 4941 - protein, 112 aa, Artificial Sequence
  source: /note="Description of Artificial Sequence: Synthetic light chain variable domain"
DIVMSQSPSSLAVSAGEKVTMNCKSSRSLLNSRIRKNYLAWYQQKPGQSPKLLIYWASTRESGVPDRFTGSGSGTDFTLTISSVQAEDLAVYYCKQSYNLLTFGAGTKLELK

SEQ ID NO: 4942 - protein, 106 aa, Artificial Sequence
  source: /note="Description of Artificial Sequence: Synthetic light chain variable domain"
DIRMTQSPSLLSASVGDRVTLNCKASQNIYNSLAWYQQKLGEGPKVLIFNANSLQTGIPSRFSGSGSGTDFTLTISSLQPEDFATYFCQQFYSGYTFGAGTKLELK

SEQ ID NO: 4943 - protein, 106 aa, Artificial Sequence
  source: /note="Description of Artificial Sequence: Synthetic light chain variable domain"
DIQVTQSPSLLSASVGDRVTLNCKASQNIYNSLAWYQQKLGEGPKVLIFNANSLQTGIPSRFSGSGSGTDFTLTISSLQPEDFATYFCQQFYSGYTFGAGTKLELK

SEQ ID NO: 4944 - protein, 106 aa, Artificial Sequence
  source: /note="Description of Artificial Sequence: Synthetic light chain variable domain"
DIVLTQSPSLLSASVGDRVTLNCKASQNIYNSLAWYQQKLGEGPKVLIFNANSLQTGIPSRFSGSGSGTDFTLTISSLQPEDFATYFCQQFYSGYTFGAGTKLELK

SEQ ID NO: 4945 - protein, 234 aa, Artificial Sequence
  source: /note="Description of Artificial Sequence: Synthetic light chain variable domain"
MRVPAQLLGLLLLWLRGARCDIQMTQSPSSLSASVGDRVTITCRPSQDISSYLNWYQQKPGKAPKLLIYAASSLQSGVPLRFSGSGSGTDFTLTISSLQPEDFATYYCQQSYSTPFTFGPGTKVDIKRTVAAPSVFIFPPSDEQLKSGTASVVCLLNNFYPREAKVQWKVDNALQSGNSQESVTEQDSKDSTYSLSSTLTLSKADYEKHKVYACEVTHQGLSSPVTKSFNRGEC

SEQ ID NO: 4946 - protein, 235 aa, Artificial Sequence
  source: /note="Description of Artificial Sequence: Synthetic light chain variable domain"
METPAQLLFLLLLWLPDTTGEFVLTQSPGTLSLSPGERATLSCRASQSVSSSYLAWYQQKPGQAPRLLIYGASSRATGIPDRFSGSGSGTDFTLTISRLEPEDFAVYYCQQYGSSPLTFGGGTKVEIKRTVAAPSVFIFPPSDEQLKSGTASVVCLLNNFYPREAKVQWKVDNALQSGNSQESVTEQDSKDSTYSLSSTLTLSKADYEKHKVYACEVTHQGLSSPVTKSFNRGEC

SEQ ID NO: 4947 - protein, 236 aa, Artificial Sequence
  source: /note="Description of Artificial Sequence: Synthetic light chain variable domain"
MDMRVPAQLLGLLLLWLRGARCDIQMTQSPSSLSASVGDRVTITCRASQSISGFLIWYQQKPGKAPKLLIYATSSLQSGVPSRFSGSGSGTDFTLTISSLQPEDFATYYCQQSYSTPFTFGPGTKVDIKRTVAAPSVFIFPPSDEQLKSGTASVVCLLNNFYPREAKVQWKVDNALQSGNSQESVTEQDSKDSTYSLSSTLTLSKADYEKHKVYACEVTHQGLSSPVTKSFNRGEC

SEQ ID NO: 4948 - protein, 223 aa, Artificial Sequence
  source: /note="Description of Artificial Sequence: Synthetic light chain variable domain"
METPAQLLFLLLLWLPDTTGEIVLTQSPGTLSLSPGERATLSCRASQSVSSSYLAWYQQKPGQAPRLLIYGASSRATGIPDRFSGSGSGTDFTLTISRLEPEDFAVYYCQQYGSSPLTFGGGTKVEIKRTVAAPSVFIFPPSDEQLKSGTASVVCLLNNFYPREAKVQWKVDNALQSGNSQESVTEQDTYSLSSTLTLSKKHKVYACEVTHQPVTKSFNRGEC

SEQ ID NO: 4949 - protein, 236 aa, Artificial Sequence
  source: /note="Description of Artificial Sequence: Synthetic light chain variable domain"
MDMRVPAQLLGLLLLWLRGARCDIQMTQSPSSLSASVGDRVTITCRPSQIISSLLNWYQQKPGKAPKLLIHAASSLQSGVPSRFSGSGSGTDFTLTISSLQPEDFATYYCQQSYSTPFTFGPGTKVDIKRTVAAPSVFIFPPSDEQLKSGTASVVCLLNNFYPREAKVQWKVDNALQSGNSQESVTEQDSKDSTYSLSSTLTLSKADYEKHKVYACEVTHQGLSSPVTKSFNRGEC

SEQ ID NO: 4950 - protein, 236 aa, Artificial Sequence
  source: /note="Description of Artificial Sequence: Synthetic light chain variable domain"
MDMRVPAQLLGLLLLWLRGARCDIQMTQSPSSLSASVGDRVTITCRASQSISGFLIWYQQRPGKAPKLLIYATSSLQSGVPSRFSGSGSGTDFTLTISSLQPEDFATYYCQQSYSTPFTFGPGTKVDIKRTVAAPSVFIFPPSDEQLKSGTASVVCLLNNFYPREAKVQWKVDNALQSGNSQESVTEQDSKDSTYSLSSTLTLSKADYEKHKVYACEVTHQGLSSPVTKSFNRGEC

SEQ ID NO: 4951 - protein, 234 aa, Artificial Sequence
  source: /note="Description of Artificial Sequence: Synthetic light chain variable domain"
MRVPAQLLGLLLLWLRGARCDIQMTQSPSSLSASVGDRVTITCRASQSISGFLNWYQQKPGKAPKLLIYATSSLQSGVPFRFSGSGSGTDFTLTISSLQPEDFATYYCQQSYSVPFTFGPGTKVDIKRTVAAPSVFIFPPSDEQLKSGTASVVCLLNNFYPREAKVQWKVDNALQSGNSQESVTEQDSKDSTYSLSSTLTLSKADYEKHKVYACEVTHQGLSSPVTKSFNRGEC

SEQ ID NO: 4952 - protein, 235 aa, Artificial Sequence
  source: /note="Description of Artificial Sequence: Synthetic light chain variable domain"
METPAQLLFLLLLWLPDTTGEFVLTQSPGTLSLSPGERATLSCRASQSVSSSYLAWYQQKPGQAPRLLIYGASSRATGIPDRFSGSGSGTDFTLTISRLEPEDFVVYYCQQYGSSPLTFGGGTKVEIKRTVAAPSVFIFPPSDEQLKSGTASVVCLLNNFYPREAKVQWKVDNALQSGNSQESVTEQDSKDSTYSLSSTLTLSKADYEKHKVYACEVTHQGLSSPVTKSFNRGEC

SEQ ID NO: 4953 - protein, 235 aa, Artificial Sequence
  source: /note="Description of Artificial Sequence: Synthetic light chain variable domain"
DMRVPAQLLGLLLLWLRGARCDIQMTQSPSSLSASVGDRVTITCRASQSISGFLIWYQQRPGKAPKLLIYATSSLQSGVPLRFSGSESGTDFTLTISSLQPEDFATYYCQQSYSTPFTFGPGTKVDIKRTVAAPSVFIFPPSDEQLKSGTASVVCLLNNFYPREAKVQWKVDNALQSGNSQESVTEQDSKDSTYSLSSTLTLSKADYEKHKVYACEVTHQGLSSPVTKSFNRGEC

SEQ ID NO: 4954 - protein, 236 aa, Artificial Sequence
  source: /note="Description of Artificial Sequence: Synthetic light chain variable domain"
MDMRVPAQLLGLLLLWLRGARCDIQMTQSPSSLSASVGDRVTITCRPSQIISSLLNWYQQKPGKAPKLLIYAASSLQSGVPSRFSGSGSGTDFTLTISSLQPEDFATYYCQQSYSTPFTFGPGTKVDIKRTVAAPSVFIFPPSDEQLKSGTASVVCLLNNFYPREAKVQWKVDNALQSGNSQESVTEQDSKDSTYSLSSTLTLSKADYEKHKVYACEVTHQGLSSPVTKSFNRGEC

SEQ ID NO: 4955 - protein, 466 aa, Artificial Sequence; identical to SEQ ID NO: 2447
  source: /note="Description of Artificial Sequence: Synthetic light chain variable domain"

SEQ ID NO: 4956 - protein, 218 aa, Artificial Sequence
  source: /note="Description of Artificial Sequence: Synthetic light chain variable domain"
DTTGEIVMTQSPATLSVSPGERATLSCRASQSVSSNLAWYQQKPGQAPRLLIYGASTRASGIPDRISGSGSGTEFTLIISSLQSEDFAVYYCQQSNNWPFTFGPGTKVDIKRTVAAPSVFIFPPSDEQLKSGTASVVCLLNNFYPREAKVQWKVDNALQSGNSQESVTEQDSKDSTYSLSSTLTLSKADYEKHKVYACEVTHQGLSSPVTKSFNRGEC

SEQ ID NO: 4957 - protein, 236 aa, Artificial Sequence
  source: /note="Description of Artificial Sequence: Synthetic light chain variable domain"
MDMRVPAQLLGLLLLWFPGSRCDIQMTQSPSSVSASVGDRVTISCRASQDISGWLAWYQQKPGKAPKLLISATSSLHSGVPSRFSGSGSGTDFTLTISSLQPEDFATYYCQQTNSFPFTFGPGTKVDIKRTVAAPSVFIFPPSDEQLKSGTASVVCLLNNFYPREAKVQWKVDNALQSGNSQESVTEQDSKDSTYSLSSTLTLSKADYEKHKVYACEVTHQGLSSPVTKSFNRGEC

SEQ ID NO: 4958 - protein, 236 aa, Artificial Sequence
  source: /note="Description of Artificial Sequence: Synthetic light chain variable domain"
MDMRVPAQLLGLLLLWFPGSRCDIQMTQSPSSVSASVGDRVTITCRASQDISSWLAWYQRKPGKAPKLQIYAASSLESGVPSRFNGSGSGTDFTLSISSLQPEDFATYYCQQTNSFPLTFGGGTKVEIKRTVAAPSVFIFPPSDEQLKSGTASVVCLLNNFYPREAKVQWKVDNALQSGNSQESVTEQDSKDSTYSLSSTLTLSKADYEKHKVYACEVTHQGLSSPVTKSFNRGEC

SEQ ID NO: 4959 - protein, 240 aa, Artificial Sequence
  source: /note="Description of Artificial Sequence: Synthetic light chain variable domain"
MVLQTQVFISLLLWISGAYGDIVMTQSPDSLAVSLGERATINCKSSQSILFFSNNKNYLAWYRQKPGQPPNLLIYWASTRESGVPDRFSGSGSGTDFTLTISSLQAEDVAVYYCQQYYSSPWTFGQGTKVEIKRTVAAPSVFIFPPSDEQLKSGTASVVCLLNNFYPREAKVQWKVDNALQSGNSQESVTEQDSKDSTYSLSSTLTLSKADYEKHKVYACEVTHQGLSSPVTKSFNRGEC

SEQ ID NO: 4960 - protein, 213 aa, Artificial Sequence
  source: /note="Description of Artificial Sequence: Synthetic light chain variable domain"
DIQMTQSPSSLSASVGDRVTITCRASQSISSYLNWYQQKPGKAPKLLIYAASSLQSGVPSGFSGSGSGTDFTLTISSLQPEDFATYYCQQSYSTPLTFGGGTKVEIKRTVAAPSVFIFPPSDEQLKSGTASWCLLNNFYPREAKVQWKVDNALQSGNSQESVTEQDSKDSTYSLSSTLTLSKADYEKHKVYACEVTHQGLSSPVTKSFNRGEC

SEQ ID NO: 4961 - protein, 206 aa, Artificial Sequence
  source: /note="Description of Artificial Sequence: Synthetic light chain variable domain"
RHQTQSPSSLSASVGDRTITCRASQSISSYLWYQQKPGAPKLLIYAASSLQSGVPSGFSGSGSGTDFTLTISSLQPEDFATYYCQQSYSTPLTFGGGTVEIKRTVAAPSVFIFPPSDEQLKSGTASWCLLNNFYPREAKVQKVDNALQSGNSQESVTEQDSDSTYSLSSTLTLSKADYEKHKVYACEVTHQGLSSPVTKSFNRGEC

SEQ ID NO: 4962 - protein, 106 aa, Artificial Sequence
  source: /note="Description of Artificial Sequence: Synthetic light chain variable domain"
DIELTQSPAIMSASPGEKVTMTCSASSSVSYMHWYQQKSGTSPKRWIYDTSKLASGVPGRFSGSGSGNSYSLTISSVEAEDDATYYCQQWSGYPLTFGAGTKLEIK

SEQ ID NO: 4963 - protein, 109 aa, Artificial Sequence
  source: /note="Description of Artificial Sequence: Synthetic light chain variable domain"
AYDMTQTPASVSAAVGGTVTIKCQASQSISNYLAWYQQKPGQPPKLLIYQASTLAPGVSSRFKGSGSGTEFTLTISGVECADAATYYCQQGYTSSNVENVFGGGTGVVV

SEQ ID NO: 4964 - protein, 215 aa, Artificial Sequence
  source: /note="Description of Artificial Sequence: Synthetic light chain variable domain"
DIQMTQSPILLSASVGDRVTITCQASQRISSYLSWYQQRTNGSPRLLIYGASTLASGVPSRFSGSRSGTDFTLTISSLQPEDEADYYCQSYFDSNWHAFGAGTKVEIKRTVAAPSVFIFPPSDEQLKSGTASVVCLLNNFYPREAKVQWKVDNALQSGNSQESVTEQDSKDSTYSLSSTLTLSKADYEKHKVYACEVTHQGLSSPVTKSFNRGEC

SEQ ID NO: 4965 - protein, 110 aa, Artificial Sequence
  source: /note="Description of Artificial Sequence: Synthetic light chain variable domain"
DVVMTQTPASVSEPVGGTVTIKCQASQRISSYLSWYQQKPGQRPKLLIFGASTLASGVPSRFKGSGSGTEYTLTISDLECADAATYYCQSYAYFDSNNWHAFGGGTEVVV

SEQ ID NO: 4966 - protein, 109 aa, Artificial Sequence
  source: /note="Description of Artificial Sequence: Synthetic light chain variable domain"
DVVMTQTPSPVSAAVGGTVTIKCQASQSINNGLAWYQQKPGQPPRLLIYSASNLESGVPSRFKGSGSGTEFTLTISDLECDDAATYYCQCIWDGNSYVNAFGGGTEVVV

SEQ ID NO: 4967 - protein, 106 aa, Artificial Sequence
  source: /note="Description of Artificial Sequence: Synthetic light chain variable domain"
DIELTQSPAIMSASPGEKVTMTCSASSSVSYMHWYQQKSGTSPKRWIYDTSKLASGVPGRFSGSGSGNSYSLTISSVEAEDDATYYCQQWSKHPLTFGAGTKLEIK

SEQ ID NO: 4968 - protein, 109 aa, Artificial Sequence
  source: /note="Description of Artificial Sequence: Synthetic light chain variable domain"
AYDMTQTPASVSAAVGGTVTIKCQASQSISTALAWYQQKPGQPPKVLIYAASNLASGVSSRFKGSGSGTEFTLTISDLECADAATYYCQQAATIINVDNVFGGGTEVVV

SEQ ID NO: 4969 - protein, 111 aa, Artificial Sequence
  source: /note="Description of Artificial Sequence: Synthetic light chain variable domain"
DIVMTQTPASVEVAVGGTVTIKCQASENMYNSLAWYQQKPGQPPKLLIYRASTLESGVPSRFKGSGSGTEYTLTISDLECADAATYYCQCTFYSHNNNYGGAFGGGTEVVV

SEQ ID NO: 4970 - protein, 108 aa, Artificial Sequence
  source: /note="Description of Artificial Sequence: Synthetic light chain variable domain"
DIQMTQSPSTLSASIGDRVTITCRASEGIYHWLAWYQQKPGKAPKLLIYKASSLASGAPSRFSGSGSGTDFTLTISSLQPDDFATYYCQQYSNYPLTFGGGTKLEIKR

SEQ ID NO: 4971 - protein, 214 aa, Artificial Sequence
  source: /note="Description of Artificial Sequence: Synthetic light chain variable domain"
DIELTQSPIIMSASPGEKVTMTCSASSSVSYMEIWYQQRTNGSPRRWIYDTSKLASGVPGRFSGSGSGNSYSLTISSVEAEDIADYYCQQWSKHPLTFGSGTKVEIKRTVAAPSVFIFPPSDEQLKSGTASVVCLLNNFYPREAKVQWKVDNALQSGNSQESVTEQDSKDSTYSLSSTLTLSKADYEKHKVYACEVTHQGLSSPVTKSFNRGEC

SEQ ID NO: 4972 - protein, 214 aa, Artificial Sequence
  source: /note="Description of Artificial Sequence: Synthetic light chain variable domain"
DIELTQSPIIMSASPGEKVTMTCSASSSVSYMEIWYQQRTNGSPRRWIYDTSKLASGVPGRFSGSGSGNSYSLTISSVEAEDEADYYCQQWSKHPLTFGSGTKVEIKRTVAAPSVFIFPPSDEQLKSGTASVVCLLNNFYPREAKVQWKVDNALQSGNSQESVTEQDSKDSTYSLSSTLTLSKADYEKHKVYACEVTHQGLSSPVTKSFNRGEC

SEQ ID NO: 4973 - protein, 108 aa, Artificial Sequence
  source: /note="Description of Artificial Sequence: Synthetic light chain variable domain"
DIQMTQSPSSLSASVGDRVTITCRASQNILSYLNWYQQKPGKAPKLLIYAASSLQSGVPSRFSGSGSGTDFTLTISSLQPEDFAVYYCQQYGSVPTFGQGTKVEIKRT

SEQ ID NO: 4974 - protein, 106 aa, Artificial Sequence
  source: /note="Description of Artificial Sequence: Synthetic light chain variable domain"
DIELTQPPSVSVAPGQTARISCSGDNLGSYYVHWYQQKPGQAPVLVIYDDNNRPSGIPERFSGSNSGNTATLTISGTQAEDEADYYCQSYDFGKVVFGGGTKLTVL

SEQ ID NO: 4975 - protein, 105 aa, Artificial Sequence
  source: /note="Description of Artificial Sequence: Synthetic light chain variable domain"
DIELTQPPSVSVAPGQTARISCSGDNLPDFYVHWYQQKPGQAPVLVISEDNKRPSGIPERFSGSNSGNTATLTISGTQAEDEADYYCSTYGYTYSYSVFGGGTKL

SEQ ID NO: 4976 - protein, 109 aa, Artificial Sequence
  source: /note="Description of Artificial Sequence: Synthetic light chain variable domain"
DIQMTQSPSSLSASVGDRVTITCRASQNISNYLNWYQQKPGKAPKLLIHKVSNLQSGVPSRFSGSGSGTDFTLTISSLQPEDFAVYYCLQYDDFPRTFGQGTKVEIKRT

SEQ ID NO: 4977 - protein, 107 aa, Artificial Sequence
  source: /note="Description of Artificial Sequence: Synthetic light chain variable domain"
DIQMTQSPSSLSASVGDRVTITCRASQDISNRLAWYQQKPGKAPKLLIYDANSLQSGVPSRFSGSGSGTDFTLTISSLQPEDFATYYCFQYSGPTFGQGTKVEIKRT

SEQ ID NO: 4978 - protein, 114 aa, Artificial Sequence
  source: /note="Description of Artificial Sequence: Synthetic light chain variable domain"
DIVMTQSPLSLPVTPGEPASISCRSSQSLVYSNGNTTLSWYLQKPGQSPQLLIYGVSNRASGVPDRFSGSGSGTDFTLKISRVEAEDVGVYYCQQYNSFPRTFGQGTKVEIKRT

SEQ ID NO: 4979 - protein, 109 aa, Artificial Sequence
  source: /note="Description of Artificial Sequence: Synthetic light chain variable domain"
DIQMTQSPSSLSASVGDRVTITCRASQDINNYLSWYQQKPGKAPKLLIYGASNLQSGVPSRFSGSGSGTDFTLTISSLQPEDFAVYYCQQYYGRPTTFGQGTKVEIKRT

SEQ ID NO: 4980 - protein, 114 aa, Artificial Sequence
  source: /note="Description of Artificial Sequence: Synthetic light chain variable domain"
DIVMTQSPLSLPVTPGEPASISCRSSQSLVHSNGYNYLSWYLQKPGQSPQLLIYLGSNRASGVPDRFSGSGSGTDFTLKISRVEAEDVGVYYCHQYGDFSDTFGQGTKVEIKRT

SEQ ID NO: 4981 - protein, 107 aa, Artificial Sequence
  source: /note="Description of Artificial Sequence: Synthetic light chain variable domain"
DIVLTQPPSVSGAPGQRVTISCSGSSSNIGSYYVNWYQQLPGTAPKLLIYADDKRPSGVPDRFSGSKSGTSASLAITGLQSEDEADYYCQSYDSTKDDSVFGGGTKL

SEQ ID NO: 4982 - protein, 103 aa, Artificial Sequence
  source: /note="Description of Artificial Sequence: Synthetic light chain variable domain"
DIELTQPPSVSVAPGQTARISCSGDNLGSYYVHWYQQKPGQAPVLVIYDDNNRPSGIPERFSGSNSGNTATLTISGTQAEDEADYYCQSYDFGKVVFGGGTKL

SEQ ID NO: 4983 - protein, 109 aa, Artificial Sequence
  source: /note="Description of Artificial Sequence: Synthetic light chain variable domain"
SYELTQETGVSVALGRTVTITCRGDSLRSHYASWYQKKPGQAPILLFYGKNNRPSGVPDRFSGSASGNRASLTISGAQAEDDAEYYCSSRDKSGSRLSVFGGGTKLTVL

SEQ ID NO: 4984 - protein, 113 aa, Artificial Sequence
  source: /note="Description of Artificial Sequence: Synthetic light chain variable domain"
DVLMTQTPLSLPVSLGDQASISCRSSQDIVYGNGNTYLEWYLQKPGQSPKLLIYKVSNRFSGVPDRFSGSGSGTDFTLKISRVEAEDLGVYYCFQGSHVPYTFGGGTKLEIKR

SEQ ID NO: 4985 - protein, 113 aa, Artificial Sequence
  source: /note="Description of Artificial Sequence: Synthetic light chain variable domain"
DIVMSQSPSSLAVSVGEKVTLSCKSSQSLLYSSDQKNYLAWYQQKPGQSPKLLIYWASTRESGVPDRFTGSGSGTDFTLTISSVKAEDLAVYYCQQYYRYPFTFGSGTQLEIK

SEQ ID NO: 4986 - protein, 89 aa, Artificial Sequence
  source: /note="Description of Artificial Sequence: Synthetic light chain variable domain"
VSFSCRASQSIGTSIHWYQQRTNGSPRLLIKFASESISGIPSRFSGSGSGTDFTLSINSVESEDIADYYCQQSNSWPITFGAGTRLELK

SEQ ID NO: 4987 - protein, 116 aa, Artificial Sequence
  source: /note="Description of Artificial Sequence: Synthetic light chain variable domain"
QVQLKESGPGLVAPSQSLSMTCTVSGFSLTTYGVHWVRQPPGKGLEWLVVIWSDGSTTYNSPLKSRLSISRDNSKSQVFLKMNSLQADDTAIYYCAKNYLGSLDYWGQGTSVTVSS

SEQ ID NO: 4988 - protein, 112 aa, Artificial Sequence
  source: /note="Description of Artificial Sequence: Synthetic light chain variable domain"
DVVLTQTPLSLPVSLGDQASISCRSSQSLVHNNGDTYLHWYLQKPGQSPKLLIYKVSNRFSGVPDRFSGSGSGTDFTFKISRVEAEDLGVYFCSQTTHVPLTFGAGTKLELK

SEQ ID NO: 4989 - protein, 120 aa, Artificial Sequence
  source: /note="Description of Artificial Sequence: Synthetic light chain variable domain"
DVVMTQTPLSLPVSLGDQASISCRSSQSLVHSNGNTYLHWYLQKPGQSPKLLIYKVSNRFSGVPDRFSGSGSGTDFTLKINRVEAEDLGVYFCSQGTHVPPTFGGGTKLEIKRADAAPTV

SEQ ID NO: 4990 - protein, 107 aa, Artificial Sequence
  source: /note="Description of Artificial Sequence: Synthetic light chain variable domain"
NIVMTQSPKSMSMSVGERVTLTCKASENVGTYVSWYQQKPEQSPKLLIYGASNRYTGVPNRFTGSGSATDFTLTISSVQAEDLADYYCGQSYSYPWTFGGGTKLEIK

SEQ ID NO: 4991 - protein, 107 aa, Artificial Sequence
  source: /note="Description of Artificial Sequence: Synthetic light chain variable domain"
SIVMTQTPKFLPVSAGDRVTVTCKASQSVGNYVAWYQQKPGQSPKLLIYFASNRYSGVPDRFTGSGSGTDFTFTISSVQVEDLAVYFCQQHYIFPYTFGSGTKLEIK

SEQ ID NO: 4992 - protein, 111 aa, Artificial Sequence
  source: /note="Description of Artificial Sequence: Synthetic light chain variable domain"
DIVLTQSPGSLAVSLGQSVTISCRASESVQYSGTSLMHWYQQKPGQPPKLLIYGASNVETGVPARFSGSGSGTDFSLNIHPVEEDDIAMYFCQQNWKVPWTFGGGTKLEIK

SEQ ID NO: 4993 - protein, 109 aa, Artificial Sequence
  source: /note="Description of Artificial Sequence: Synthetic light chain variable domain"
DIVLTQSPASLAVSLGQRATISYRASKSVSTSGYSYMHWNQQKPGQPPRLLIYLVSNLESGVPARFSGSGSGTDFTLNIHPVEEEDAATYYCQHIRELTRSEGGPSWKN

SEQ ID NO: 4994 - protein, 112 aa, Artificial Sequence
  source: /note="Description of Artificial Sequence: Synthetic light chain variable domain"
DIVMTQAAPSVSVTPGESVSISCRSSKSLRKSNGNTYLYWFLQRPGQSPQRLIYYMSNLASGVPDRFSGRGSGTDFTLRISRVEAEDVGVYYCMQSLEYPLTFGGGTKLKIK

SEQ ID NO: 4995 - protein, 112 aa, Artificial Sequence
  source: /note="Description of Artificial Sequence: Synthetic light chain variable domain"
DIVMTQAAPSIPVTPGESVSISCRSSKSLLHSNGNTYLYWFLQRPGQSPQRLIYYMSNLASGVPDRFSGRGSGTDFTLKISRVEAGDVGVYYCMQGLEHPLTFGGGTKLEIK

SEQ ID NO: 4996 - protein, 109 aa, Artificial Sequence
  source: /note="Description of Artificial Sequence: Synthetic light chain variable domain"
ELDMTQTPPSLSASVGETVRIRCLASEDIYSGISWYQQKPGKPPTLLIYGASNLESGVPPRFSGSGSGTDYTLTIGGVQAEDAATYYCLGGYSYSSTLTFGAGTNVEIK

SEQ ID NO: 4997 - protein, 112 aa, Artificial Sequence
  source: /note="Description of Artificial Sequence: Synthetic light chain variable domain"
DIVMTQAAPSVPVTPGESVSISCRSSKSLLHSNGNTYLYWFLQRPGQSPQRLIYYMSNLASGVPDRFSGRGSGTDFTLRISRVEAEDVGVYYCMQSLEYPLTFGGGTKLEIK

SEQ ID NO: 4998 - protein, 116 aa, Artificial Sequence; identical to SEQ ID NO: 4987
  source: /note="Description of Artificial Sequence: Synthetic light chain variable domain"

SEQ ID NO: 4999 - protein, 112 aa, Artificial Sequence; identical to SEQ ID NO: 4988
  source: /note="Description of Artificial Sequence: Synthetic light chain variable domain"

SEQ ID NO: 5000 - protein, 120 aa, Artificial Sequence; identical to SEQ ID NO: 4989
  source: /note="Description of Artificial Sequence: Synthetic light chain variable domain"

SEQ ID NO: 5001 - protein, 105 aa, Artificial Sequence
  source: /note="Description of Artificial Sequence: Synthetic light chain variable domain"
NIVMTQPKSMSMSVGERVTLTCKASENVGTYVSWYWKPEQSPKLLIYGASNRYTGVPNRFTGSGSATDFTLTISSVQAEDLADYYCGQSYSYPWTFGGGTKLEIK

SEQ ID NO: 5002 - protein, 107 aa, Artificial Sequence; identical to SEQ ID NO: 4991
  source: /note="Description of Artificial Sequence: Synthetic light chain variable domain"

SEQ ID NO: 5003 - protein, 111 aa, Artificial Sequence
  source: /note="Description of Artificial Sequence: Synthetic light chain variable domain"
DIVLTQSPGSLAVSLGQSVTISCRASESVQYSGTSLMHWYQQKPGQPPKLLIYGASNVETGVPARFSGSGSGTDFSLNIHPVEEDDIAMYFCGQNWKVPWTFGGGTKLEIK

SEQ ID NO: 5004 - protein, 107 aa, Artificial Sequence
  source: /note="Description of Artificial Sequence: Synthetic light chain variable domain"
DILLTQSPAILSVSPGERVSFSCRASQSIGTSIHWYQQRTNGSPRLLIKYASESISGIPSRFSGSGSGTDFTLSINSVESEDIADYYCQQSNNWPLTFGAGTKLELK

SEQ ID NO: 5005 - protein, 113 aa, Artificial Sequence
  source: /note="Description of Artificial Sequence: Synthetic light chain variable domain"
DIVMTQSPDSLAVSLGERATINCKSSQSVLYSSNNKNYLAWYQQKPGQPPKLLIYWASTRESGVPDRFSGSGSGTDFTLTISSLQAEDVAVYYCQQYYNTPFTFGPGTKVEIK

SEQ ID NO: 5006 - protein, 113 aa, Artificial Sequence
  source: /note="Description of Artificial Sequence: Synthetic light chain variable domain"
DIVMTQSPDSLAVSLGERATINCRSSQNLLYNSNKLNYLSWYQQKPGQPPKLLIYWASTRESGVPDRFSGSGSGTDFTLTISSLQAEDVAVYYCQQYYNTPFTFGPGTKVEIK

SEQ ID NO: 5007 - protein, 112 aa, Artificial Sequence
  source: /note="Description of Artificial Sequence: Synthetic light chain variable domain"
DIVMTQSPDSLAVSLGERATINCKSSQSVLYSSNNKNYLAWYQQKPGQPPKLLIYWASTRESGVPDRFSGSGSGTDFTLTISSLQAEDVAVYYCQQYYSTPFTFGQGTKLEI

SEQ ID NO: 5008 - protein, 113 aa, Artificial Sequence
  source: /note="Description of Artificial Sequence: Synthetic light chain variable domain"
DIVMTQSPDSLAVSLGERATINCKSSQSVLYSSNNKNYLAWYQQKPGQPPKLLIYWASTRESGVPDRFSGSGSGTDFTLTISSLQAEDVAVYYCQQYYSTPFTFGQGTKLEIN

SEQ ID NO: 5009 - protein, 112 aa, Artificial Sequence
  source: /note="Description of Artificial Sequence: Synthetic light chain variable domain"
DIVMTQSPDSLAVSLGERATINCKSSQSVLYSSNNKNYLAWYQQKPGQPPKLLIYWASTRESGVPDRFSGSGSGTDFTLTISSLQAEDVAIYYCQQYYSTPFTFGQGTKLEI

SEQ ID NO: 5010 - protein, 112 aa, Artificial Sequence
  source: /note="Description of Artificial Sequence: Synthetic light chain variable domain"
QSVLTQPPSVSGAPGQRVTISCTGSSYNIGAGYDVHWYQQVPGTAPKLLIYGNSNRPSGVPDRFSGSKSGTSASLAITGLQAEDEADYYCQSYDSSLSGSGVFGGGTKLTVL

SEQ ID NO: 5011 - protein, 112 aa, Artificial Sequence
  source: /note="Description of Artificial Sequence: Synthetic light chain variable domain"
QSVLTQPPSVSGAPGQRVTISCTGSSSNIGAGYDVHWYQQLPGTAPKLLIYGNSYRPSGVPDRFSGSKSGTSASLAITGLQAEDEADYYCQSYDSSLSGSGVFGGGTKLTVL

SEQ ID NO: 5012 - protein, 112 aa, Artificial Sequence
  source: /note="Description of Artificial Sequence: Synthetic light chain variable domain"
QSVLTQPPSVSGAPGQGVTISCTGSSSNIGAGYDVHWYQQLPGSAPKFFIYGSNNRPSGVPDRFSGSKSGTSASLAITGLQAEDEADYYCQSYDSSLSGSGVFGGGTKLTVL

SEQ ID NO: 5013 - protein, 112 aa, Artificial Sequence
  source: /note="Description of Artificial Sequence: Synthetic light chain variable domain"
DIVMTQSPLSLPVTPGEPASISCRSSQSLLHSNGYNYLDWYLQKPGQSPQLLIYFASNRASGVPDRFSGSGSGTDFTLKISRVEAEDVGVYYCMQALQTPEAFGGGTKVEIK

SEQ ID NO: 5014 - protein, 112 aa, Artificial Sequence
  source: /note="Description of Artificial Sequence: Synthetic light chain variable domain"
DIVMTQSPLSLPVTPGEPASISCRSSQSLLYSNGYNYLDWYLQKPGQSPQLLIYLGSNRASGVPDRFSGSGSGTDFTLKISRVEAEDVGVYYCMQALQTPEAFGGGTKVEIK

SEQ ID NO: 5015 - protein, 112 aa, Artificial Sequence
  source: /note="Description of Artificial Sequence: Synthetic light chain variable domain"
DIVMTQSPLSLPVTPGEPASISCRSSQSLLHSNGYNYLDWYLQKPGQSPQLLIYLGSNRASGVPDRFSGSGSGTDFTLKISRVEAEDVGVYYCMQALQTPEAFGGGTKVEIK

SEQ ID NO: 5016 - protein, 112 aa, Artificial Sequence
  source: /note="Description of Artificial Sequence: Synthetic light chain variable domain"
DIVMTQSPLSLPVTPGEPASISCRSSQSLLHSNGYNYLDWYLQKPGQSPQLLIYLGSNRASGVPDRFSGSGSGAHFTLKISRVEAEDVGVYYCMQALQTPEAFGGGTKVEIK

SEQ ID NO: 5017 - protein, 112 aa, Artificial Sequence
  source: /note="Description of Artificial Sequence: Synthetic light chain variable domain"
DIVMTQSPLSLPVTPGEPASISCRSSQSLLHSNGYNYLDWYLQKPGQSPQLLIYLGSNRASGVPDRFSGSGSGTDFTLKISRVEAEDVGVYYCMQALQTPETFGQGTKVEIK

SEQ ID NO: 5018 - protein, 112 aa, Artificial Sequence
  source: /note="Description of Artificial Sequence: Synthetic light chain variable domain"
DIVMTQSPLSLPVTPGEPASISCRSSQSLLHSNGYNYLDWYLQKPGQSPQLLIYLGSNRASGVPDRFSGSGSGTDFTLKISRVEAEDVGVYYCMQALQTPQTFGQGTKVEIK

SEQ ID NO: 5019 - protein, 112 aa, Artificial Sequence
  source: /note="Description of Artificial Sequence: Synthetic light chain variable domain"
DIVMTQSPLSLPVTPGEPASISCRSSQSLLHINGYKYLDWYLQKPGQSPQLLIYLGSNRASGVPDRFSASGSGTDFTLQISRVEAEDVGVYYCMQALQTPQTFGQGTKVEIK

SEQ ID NO: 5020 - protein, 112 aa, Artificial Sequence
  source: /note="Description of Artificial Sequence: Synthetic light chain variable domain"
DIVMTQSPLSLPVTPGESASISCRSSQRLLSSSGNNYLDWYLQKPGQSPQLLISLASNRASGVPDRFSGSGSGTDFKLEISRVEAEDVGIYYCMQALQTPQTFGQGTKVEIK

SEQ ID NO: 5021 - protein, 112 aa, Artificial Sequence
  source: /note="Description of Artificial Sequence: Synthetic light chain variable domain"
DIVMTQSPLSLPVTPGEPASISCRSSQSLLHSNGYNYLDWYLQKPGQSPQLLIYLGSNRASGVPDRFSGSGSGTDFTLKISRVEAEDVGVYYCMQALQTPQTFGQGTKLEIK

SEQ ID NO: 5022 - protein, 112 aa, Artificial Sequence
  source: /note="Description of Artificial Sequence: Synthetic light chain variable domain"
DIVMTQSPLSLPVTPGEPASISCRSSQSLLHSNGYKYLDWYLQKPGQSPQLLIYLGSNRASGVPDRFSGSGSGTDFTLKISRVEAEDVGVYYCMQALQTPQTFGQGTKLEIK

SEQ ID NO: 5023 - protein, 112 aa, Artificial Sequence
  source: /note="Description of Artificial Sequence: Synthetic light chain variable domain"
DIVMTQSPLSLPVTPGEPASISCRSSQSLLHSNGYNFLDWYLQKPGQSPQVLIYLGSNRASGVPDRFSGSGSGTDFTLKISRVEAEDVGVYYCMQALQTPQTFGQGTKLEIK

SEQ ID NO: 5024 - protein, 112 aa, Artificial Sequence
  source: /note="Description of Artificial Sequence: Synthetic light chain variable domain"
DIVMTQSPLSLPATPGEPASISCRSSQSLLHSNGYTYLDWYLQKPGQSPQVLIYLASNRASGVPDRFSGSGSGTNFTLKISRVEAEDVGLFYCMQALQTPQTFGQGTKLEIK

SEQ ID NO: 5025 - protein, 112 aa, Artificial Sequence
  source: /note="Description of Artificial Sequence: Synthetic light chain variable domain"
DIVMTQTPLSSPVTLGQPASISCRSSQSLVHSDGNTYLSWLQQRPGQPPRLLIYKISNRFSGVPDRFSGSGAGTDFTLKISRVEAEDVGVYYCMQATQFPLTFGGGTKVEIK

SEQ ID NO: 5026 - protein, 112 aa, Artificial Sequence
  source: /note="Description of Artificial Sequence: Synthetic light chain variable domain"
DIVMTQTPLSSPVTLGQPASISCRSSQSLVHSDGNTYLSWLQQRPGQPPRLLIYKISNRFSGVPDRFSGSGAGTDFTLKISRVEAEDVGVYYCTQATQFPITFGPGTKVDIK

SEQ ID NO: 5027 - protein, 112 aa, Artificial Sequence
  source: /note="Description of Artificial Sequence: Synthetic light chain variable domain"
DIVMTQTPLSSPVTLGQPASISCRSSQSLVHSDGNTYLSWLQQRPGQPPRLLIYKISNRFSGVPDRFSGSGAGTDFTLKISRVEAEDVGVYYCTQATQFPLTFGGGTKVEIK

SEQ ID NO: 5028 - protein, 112 aa, Artificial Sequence
  source: /note="Description of Artificial Sequence: Synthetic light chain variable domain"
DIVMTQTPLSSPVTLGQPASISCRSSQSLVHSDGNTYLSWLQQRPGQPPRLLIYKISNRFSGVPDRFRGSGAGTDFTLKISRVEAEDVGVYYCTQATQFPLTFGGGTKVEIK

SEQ ID NO: 5029 - protein, 112 aa, Artificial Sequence
  source: /note="Description of Artificial Sequence: Synthetic light chain variable domain"
DVVMTQSPLSLPVTLGQPASISCRSSQSLVYSDGNTYLNWFQQRPGQSPRRLIYTVSNRDSGVPDRFSGSGSGTDFTLKISRVEAEDVGVYYCMQGTHWPWTFGQGTKVEIK

SEQ ID NO: 5030 - protein, 112 aa, Artificial Sequence
  source: /note="Description of Artificial Sequence: Synthetic light chain variable domain"
DVVMTQSPLSLPVTLGQPASISCRSSQSLVYSDANRYLNWFQQRPGQSPRRLIYKVSSRDSGVPDRFSGSGSDTDFTLKISRVEAEDVGVCDCMQGTHWPWTFGQGTKVEIK

SEQ ID NO: 5031 - protein, 112 aa, Artificial Sequence
  source: /note="Description of Artificial Sequence: Synthetic light chain variable domain"
DVVMTQSPLSLPVTPGEPASISCRSSQSLLHSNAYNYLDWYLQKPGQSPQLLIYLGSNRASGVPDRFSGSGSGTDFTLKISRVEADDVGVYYCMQGTHWPWTFGQGTKVEIK

SEQ ID NO: 5032 - protein, 112 aa, Artificial Sequence
  source: /note="Description of Artificial Sequence: Synthetic light chain variable domain"
DVVMTQSPLSLPVTLGQPASISCRSSQSLVYSDGNTYLNWFQQRPGQSPRRLIYQVSNRDSGVPDRFSGSGSGTDFTLKIGRVEAEDVGVYFCMQGTHWPWTFGQGTKVEIK

SEQ ID NO: 5033 - protein, 112 aa, Artificial Sequence
  source: /note="Description of Artificial Sequence: Synthetic light chain variable domain"
DIVMTQTPPSLPVNPGEPASISCRSSQSLLHSNGYTYLHWYLQKPGQSPQLLIYRVSNHLSGVPDRFSGSGSGSDFTLKISWVEAEDVGVYYCMQATQFPLTFGPGTKVDIK

SEQ ID NO: 5034 - protein, 112 aa, Artificial Sequence
  source: /note="Description of Artificial Sequence: Synthetic light chain variable domain"
DIVMTQTPLSSPVTLGQPASISCRSSQSLVHSDGNTYLSWLQQRPGQPPRLLIYKISNRFSGVPDRFSGSGAGTDFTLKISRVEAEDVGVYYCMQATQFPVTFGQGTKVEIK

SEQ ID NO: 5035 - protein, 112 aa, Artificial Sequence
  source: /note="Description of Artificial Sequence: Synthetic light chain variable domain"
DIVMTQTPLSSPVTLGQPASISCRSSQSLVHSDGNTYLSWLQQRPGQPPRLLIYKISNRFSGVPDRFSGSGAGTDFTLKISRVEAEDVGVYYCMQATQFPFTFGQGTKLEIK

SEQ ID NO: 5036 - protein, 112 aa, Artificial Sequence
  source: /note="Description of Artificial Sequence: Synthetic light chain variable domain"
DIVMTQTPLSSPVTLGQPASISCRSSQSLVHSDGNTYLSWLQQRPGQPPRLLIYKISNRFSGVPDRFSGSGAGTDFTLKISRVEAEDVGVYYCMQATQFPITFGQGTRLEIK

SEQ ID NO: 5037 - protein, 112 aa, Artificial Sequence
  source: /note="Description of Artificial Sequence: Synthetic light chain variable domain"
DIVMTQTPLSLPVTLGQPASISCRSSQSLVRSDGNTYLSWLQQRPGQPPRLLIYKISNRFSGVPDRFSGSGAGTDFTLTISRVEAEDVGVYYCMQGTQFPLTFGGGTKVEIK

SEQ ID NO: 5038 - protein, 112 aa, Artificial Sequence
  source: /note="Description of Artificial Sequence: Synthetic light chain variable domain"
DIVMTQTPLSSPVTLGQPASISCRSSQSLVHSDGNTYLSWLQQRPGQPPRLLIYKISNRFSGVPDRFSGSGAGTDFTLKISRVEAEDVGLYYCLQATQFPLTFGQGTKLEIK

SEQ ID NO: 5039 - protein, 107 aa, Artificial Sequence
  source: /note="Description of Artificial Sequence: Synthetic light chain variable domain"
DIQMTQSSSYLSVSLGGRVTITCKASDHINNWLAWYQQKPGNAPRLLISGATSLETGVPSRFSGSGSGKDYTLSITSLQTEDVATYYCQQYWSTPFTFGSGTKLEIK

SEQ ID NO: 5040 - protein, 105 aa, Artificial Sequence
  source: /note="Description of Artificial Sequence: Synthetic light chain variable domain"
QSALTQPPSASGSPGQSISISCTGTSNRFVSWYQQHPGKAPKLVIYGVNKRPSGVPDRFSGSKSGNTASLTVSGLQTDDEAVYYCSSLVGNWDVIFGGGTKLTVL

SEQ ID NO: 5041 - protein, 105 aa, Artificial Sequence
  source: /note="Description of Artificial Sequence: Synthetic light chain variable domain"
QSALTQPPSASGSPGQSITISCTGTSNNFVSWYQQHAGKAPKLVIYDVNKRPSGVPDRFSGSKSGNTASLTVSGLQTDDEAVYYCGSLVGNWDVIFGGGTKLTVL

SEQ ID NO: 5042 - protein, 107 aa, Artificial Sequence
  source: /note="Description of Artificial Sequence: Synthetic light chain variable domain"
QIVLTQSPALMSASPGEKVTMTCSASSSVSYIYWYQQKPRSSPKPWIYLTSNLASGVPARFSGSGSGTSYSLTISSMEAEDAATYYCQQWSGNPYTFGGGTKLEIKR

SEQ ID NO: 5043 - protein, 214 aa, Artificial Sequence
  source: /note="Description of Artificial Sequence: Synthetic light chain variable domain"
DIQMTQSPSSLSASVGDRVTITCRASENIYSYLAWYQQKPGKAPKLLIYNAKTLAEGVPSRFSGSGSGTDFTLTISSLQPEDFATYYCQHHYGTPRTFGGGTKVEIKRTVAAPSVFIFPPSDEQLKSGTASVVCLLNNFYPREAKVQWKVDNALQSGNSQESVTEQDSKDSTYSLSSTLTLSKADYEKHKVYACEVTHQGLSSPVTKSFNRGEC

SEQ ID NO: 5044 - protein, 108 aa, Artificial Sequence
  source: /note="Description of Artificial Sequence: Synthetic light chain variable domain"
QPVLTQPSSVSVAPGETARIPCGGDDIETKSVHWYQQKPGQAPVLVIYDDDDRPSGIPERFFGSNSGNTATLSISRVEAGDEADYYCQVWDDNNDEWVFGGGTQLTVL

SEQ ID NO: 5045 - protein, 110 aa, Artificial Sequence
  source: /note="Description of Artificial Sequence: Synthetic light chain variable domain"
QSALTQPASVSGSPGQSITISCSGSSSNIGNNAVNWYQQLPGKAPKLLIYYDDLLPSGVSDRFSGSKSGTSAFLAISGLQSEDEADYYCAAWDDSLNGPVFGGGTKLTVL

SEQ ID NO: 5046 - protein, 239 aa, Artificial Sequence
  source: /note="Description of Artificial Sequence: Synthetic light chain variable domain"
MSVPTMAWMMLLLGLLAYGSGVDSQAVVTQEPSLTVSPGGTVTLTCRSSTGAVTTSNYANWFQQKPGQAPRTLIGGTNNRAPGVPARFSGSLLGGKAALTLSGAQPEDEAEYYCALWYSNHWVFGGGTKLTVLGQPKAAPSVTLFPPSSEELQANKATLVCLVSDFYPGAVTVAWKADGSPVKVGVETTKPSKQSNNKYAASSYLSLTPEQWKSHRSYSCRVTHEGSTVEKTVAPAECS

SEQ ID NO: 5047 - protein, 239 aa, Artificial Sequence
  source: /note="Description of Artificial Sequence: Synthetic light chain variable domain"
MSVPTMAWMMLLLGLLAYGSGVDSQTVVTQEPSFSVSPGGTVTLTCRSSTGAVTTSNYANWYQQTPGQAPRTLIGGTNNRAPGVPDRFSGSILGNKAALTITGAQADDESDYYCALWYSNHWVFGGGTKLTVLGQPKAAPSVTLFPPSSEELQANKATLVCLVSDFYPGAVTVAWKADGSPVKVGVETTKPSKQSNNKYAASSYLSLTPEQWKSHRSYSCRVTHEGSTVEKTVAPAECS

SEQ ID NO: 5048 - protein, 235 aa, Artificial Sequence
  source: /note="Description of Artificial Sequence: Synthetic light chain variable domain"
MVLQTQVFISLLLWISGAYGDIVLTQSPATLSLSPGERATLSCRASQSVRSNYLAWYQQKPGQAPRLLIYGASSRATGVPARFSGSGSGTDFTLTISSLEPEDFAVYYCQQYSNFPITFGQGTKVEIKRTVAAPSVFIFPPSDEQLKSGTASVVCLLNNFYPREAKVQWKVDNALQSGNSQESVTEQDSKDSTYSLSSTLTLSKADYEKHKVYACEVTHQGLSSPVTKSFNRGEC

SEQ ID NO: 5049 - protein, 214 aa, Artificial Sequence
  source: /note="Description of Artificial Sequence: Synthetic light chain variable domain"
DIQMTQSPILLSASVGDRVTITCRASQDVSTAVAWYQQRTNGSPRLLIYSASFLYSGVPSRFSGSGSGTDFTLTISSLQPEDIADYYCQQFYTTPSTFGQGTKVEIKRTVAAPSVFIFPPSDEQLKSGTASVVCLLNNFYPREAKVQWKVDNALQSGNSQESVTEQDSKDSTYSLSSTLTLSKADYEKHKVYACEVTHQGLSSPVTKSFNRGEC

SEQ ID NO: 5050 - protein, 214 aa, Artificial Sequence
  source: /note="Description of Artificial Sequence: Synthetic light chain variable domain"
DIQMTQSPILLSASVGDRVTITCRASQDVSTAVAWYQQRTNGSPRLLIYSASFLYSGVPSRFSGSGSGTDFTLTISSLQPEDEADYYCQQFYTTPSTFGQGTKVEIKRTVAAPSVFIFPPSDEQLKSGTASVVCLLNNFYPREAKVQWKVDNALQSGNSQESVTEQDSKDSTYSLSSTLTLSKADYEKHKVYACEVTHQGLSSPVTKSFNRGEC

SEQ ID NO: 5051 - protein, 112 aa, Artificial Sequence
  source: /note="Description of Artificial Sequence: Synthetic light chain variable domain"
DIVMTQSPLSLPVTPGEPASISCRASKSVSSSGYSYMHWYLQKPGQSPQLLIYLASNLESGVPDRFSGSGSGTDFTLKISRVEAEDVGVYYCQHSRALPLTFGAGTKLELKR

SEQ ID NO: 5052 - protein, 112 aa, Artificial Sequence
  source: /note="Description of Artificial Sequence: Synthetic light chain variable domain"
DIVLTQSLASLAVSLGQRATISCRASKSVSSSGYSYMHWYQQKPGQPPKLLIYLASNLESGVPARFSGSGSGTDFTLNIHPVEEEDAATYYCQHSRALPLTFGAGTKLELKR

SEQ ID NO: 5053 - protein, 114 aa, Artificial Sequence
  source: /note="Description of Artificial Sequence: Synthetic light chain variable domain"
VQLQESGPDLVKPSQSLSLTCTVTGYSITSGYSWHWIRQFPGNKLEWMGYIHYSGDTDYNPSLKSRFSITRDTSKNQFFLQLNSVTTEDTATYYCATPGGFVYWGQGTLVTVSA

SEQ ID NO: 5054 - protein, 105 aa, Artificial Sequence
  source: /note="Description of Artificial Sequence: Synthetic light chain variable domain"
LIQPPSASVTLGSTVSLTCVGDELSKTYAHWYQQKPDKTIVSVIYKDSERPSGISDRFSGSSSGTTATLTIHGTLAEDEADYYCLSTYSDDNLPVFGGGTKLTVL

SEQ ID NO: 5055 - protein, 111 aa, Artificial Sequence
  source: /note="Description of Artificial Sequence: Synthetic light chain variable domain"
SVTSYELIQPPSASVTLENTVSITCSGDELSNKYAHWYQQKPDKTILEVMYKDSERPSGISDRFSGSSSGTTAILTIRDAQAEDEADYYCLSTYSDDDLPVFGGGTKLTVL

SEQ ID NO: 5056 - protein, 113 aa, Artificial Sequence
  source: /note="Description of Artificial Sequence: Synthetic light chain variable domain"
DVVMTQTPVSLPVSLGGQASISCRSSQSLIHSNGNTYLHWFLQKPGQSPQLLIYRISNRFSGVPDRFSGSGSGTDFTLKISRVESEDLGLYYCLQGTHLPFTFGSGTKLEIKR

SEQ ID NO: 5057 - protein, 119 aa, Artificial Sequence
  source: /note="Description of Artificial Sequence: Synthetic light chain variable domain"
EVQLVQSGADVKKPGASVKVSCKASGYTFTNYVMHWVRQAPGQGLEWLGYINPYNDGTQYNERFKGRVTMTGDTSISTAYMELSRLTSDDTAVYYCAREVYGNYIWGNWGQGTLVSVSS

SEQ ID NO: 5058 - protein, 108 aa, Artificial Sequence
  source: /note="Description of Artificial Sequence: Synthetic light chain variable domain"
EIVLTQSPGTLSLSPGERATLSCSASSSISSNYLHWYQQKPGQAPRLLIYRTSNLASGIPDRFSGSGSGTDFTLTISRLEPEDFAVYYCQQGSSIPFTFGQGTKLEIK

SEQ ID NO: 5059 - protein, 215 aa, Artificial Sequence
  source: /note="Description of Artificial Sequence: Synthetic light chain variable domain"
EIVLTQSPGTLSLSPGERATLSCSASSSISSNYLHWYQQKPGQAPRLLIYRTSNLASGIPDRFSGSGSGTDFTLTISRLEPEDFAVYYCQQGSSIPFTFGQGTKLEIKRTVAAPSVFIFPPSDEQLKSGTASVVCLLNNFYPREAKVQWKVDNALQSGNSQESVTEQDSKDSTYSLSSTLTLSKADYEKHKVYACEVTHQGLSSPVTKSFNRGEC

SEQ ID NO: 5060 - protein, 125 aa, Artificial Sequence
  source: /note="Description of Artificial Sequence: Synthetic light chain variable domain"
DIQMTQSPASLSASVGETVTITCRASGNIHNYLAWYQQKQGKSPQLLVYNAKTLADGVPSRFSGSGSGTQYSLKINSLQPEDFGSYYCQHFWSTPFTFGSGTKLEIKRADAAPTVSIFPPSSKLG

SEQ ID NO: 5061 - protein, 106 aa, Artificial Sequence [sequence omitted]

SEQ ID NO: 5062 - protein, 129 aa, Artificial Sequence
  source: /note="Description of Artificial Sequence: Synthetic light chain variable domain"
METPAQLLFLLLLWLPDTTGEIVLTQSPGTLSLSPGERATLSCRASQSVSSSYLAWYQQKPGQAPRLLIYGASSRATGIPDRFSGSGSGTDFTLTISRLEPEDFAVYYCQQYDSSLTFGGGTKVEIKRT

SEQ ID NO: 5063 - protein, 214 aa, Artificial Sequence
  source: /note="Description of Artificial Sequence: Synthetic light chain variable domain"
DIQMTQSPSSLSASVGDRVTITCRATQSIYNALAWYQQKPGKAPKLLIYNANTLHTGVPSRFSASGSGTDSTLTISSLQPEDFATYYCQQYYDYPLTFGGGTKVEIKRTVAAPSVFIFPPSDEQLKSGTASVVCLLNNFYPREAKVQWKVDNALQSGNSQESVTEQDSKDSTYSLSSTLTLSKADYEKHKVYACEVTHQGLSSPVTKSFNRGEC

SEQ ID NO: 5064 - protein, 214 aa, Artificial Sequence
  source: /note="Description of Artificial Sequence: Synthetic light chain variable domain"
EIVLTQSPATLSLSPGERATLSCRASQSVSSYLAWYQQKPGQAPRLLIYDASNRATGIPARFSGSGSGTDFTLTISSLEPEDFAVYYCQQRSNWPPTFGGGTKVEIKRTVAAPSVFIFPPSDEQLKSGTASVVCLLNNFYPREAKVQWKVDNALQSGNSQESVTEQDSKDSTYSLSSTLTLSKADYEKHKVYACEVTHQGLSSPVTKSFNRGEC

SEQ ID NO: 5065 - protein, 214 aa, Artificial Sequence
  source: /note="Description of Artificial Sequence: Synthetic light chain variable domain"
EIVLTQSPATLSLSPGERATLSCRASQSVSSYLAWYQQKPGQAPRLLIYDASNRATGIPARFSGSGSGTDFTLTISSLEPEDFAVYYCQQRSNWPLTFGGGTKVEIKRTVAAPSVFIFPPSDEQLKSGTASVVCLLNNFYPREAKVQWKVDNALQSGNSQESVTEQDSKDSTYSLSSTLTLSKADYEKHKVYACEVTHQGLSSPVTKSFNRGEC

SEQ ID NO: 5066 - protein, 215 aa, Artificial Sequence
  source: /note="Description of Artificial Sequence: Synthetic light chain variable domain"
EIVLTQSPGTLSLSPGERATLSCRASQSVSSSYLAWYQQKPGQAPRLLIYGASSRATGIPDRFSGSGSGTDFTLTISRLEPEDFAVYYCQQYGSSPFTFGPGTKVDIKRTVAAPSVFIFPPSDEQLKSGTASVVCLLNNFYPREAKVQWKVDNALQSGNSQESVTEQDSKDSTYSLSSTLTLSKADYEKHKVYACEVTHQGLSSPVTKSFNRGEC

SEQ ID NO: 5067 - protein, 107 aa, Artificial Sequence; identical to SEQ ID NO: 4138
  source: /note="Description of Artificial Sequence: Synthetic light chain variable domain"

SEQ ID NO: 5068 - protein, 107 aa, Artificial Sequence
  source: /note="Description of Artificial Sequence: Synthetic light chain variable domain"
DIQMTQSPSSLSASVGDRVTITCRASQSISSYLNWYQQKPGKAPKLLIYAASSLQSGVPSRFSGSGSGTDFTLTISSLQPEDFATYYCQQSYSTPWTFGQGTKVEIK

SEQ ID NO: 5069 - protein, 107 aa, Artificial Sequence
  source: /note="Description of Artificial Sequence: Synthetic light chain variable domain"
EIVLTQSPATLSLSPGERATLSCRASQSVSSYLAWYQQKPGQAPRLLIYDASNRATGIPARFSGSGSGRDFTLTISSLEPEDFAVYYCQQRSNWPWTFGQGTKVEIK

SEQ ID NO: 5070 - protein, 108 aa, Artificial Sequence
  source: /note="Description of Artificial Sequence: Synthetic light chain variable domain"
EIVLTQSPGTLSLSPGERATLSCRASQSVSSSYLAWYQQKPGQAPRLLIYGASSRATGIPDRFSGSGSGTDFTLTISRLEPEDFAVYYCQQYGSSPWTFGQGTKVEIK

SEQ ID NO: 5071 - protein, 214 aa, Artificial Sequence
  source: /note="Description of Artificial Sequence: Synthetic light chain variable domain"
DIQMTQSPSSLSASVGDRVTITCRASQDISNYLNWYQQKPGKAPKLLIYYTSKLHSGVPSRFSGSGSGTDYTLTISSLQPEDFATYYCQQGSALPWTFGQGTKVEIKRTVAAPSVFIFPPSDEQLKSGTASVVCLLNNFYPREAKVQWKVDNALQSGNSQESVTEQDSKDSTYSLSSTLTLSKADYEKHKVYACEVTHQGLSSPVTKSFNRGEC

SEQ ID NO: 5072 - protein, 107 aa, Artificial Sequence
  source: /note="Description of Artificial Sequence: Synthetic light chain variable domain"
EIVLTQSPATLSLSPGERATLSCRASSSVSYYLAWYQQKPGQAPRLLIYATSNRATGIPARFSGSGSGTDFTLTISSLEPEDFAVYYCQQWSSNPWTFGQGTKVEIK

SEQ ID NO: 5073 - protein, 108 aa, Artificial Sequence
  source: /note="Description of Artificial Sequence: Synthetic light chain variable domain"
DIQMTQSPSSLSASVGDRVTITCRASQGISSWLAWYQQKPEKAPKSLIYAASSLQSGVPSRFSGSGSGTDFTLTISSLQPEDFATYYCQQYNSYPRITFGQGTRLEIK

SEQ ID NO: 5074 - protein, 219 aa, Artificial Sequence
  source: /note="Description of Artificial Sequence: Synthetic light chain variable domain"
DIVMTQSPDSLPVTPGEPASISCRSSQSLLHSNGYNYLDWYLQKAGQSPQLLIYLGSNRASGVPDRFSGSGSGTDFTLKISRVEAEDVGVYYCQQYYNHPTTFGQGTKLEIKRTVAAPSVFIFPPSDEQLKSGTASVVCLLNNFYPREAKVQWKVDNALQSGNSQESVTEQDSKDSTYSLSSTLTLSKADYEKHKVYACEVTHQGLSSPVTKSFNRGEC

SEQ ID NO: 5075 - protein, 107 aa, Artificial Sequence
  source: /note="Description of Artificial Sequence: Synthetic light chain variable domain"
DIQMTQSPSSLSASVGDRVTITCRASQDISNYLNWYQQKPGKAVKLLIYYTSKLHSGVPSRFSGSGSRTDYTLTISSLQPEDFATYYCQQGSALPWTFGQGTKVEIK

SEQ ID NO: 5076 - protein, 214 aa, Artificial Sequence
  source: /note="Description of Artificial Sequence: Synthetic light chain variable domain"
EIVLTQSPATLSLSPGERATLSCRASQSVSSYLAWYQQKPGQAPRLLIYDASNRATGIPARFSGSGSGTDFTLTISSLEPEDFAVYYCQQRSNWPPAFGGGTKVEIKRTVAAPSVFIFPPSDEQLKSGTASVVCLLNNFYPREAKVQWKVDNALQSGNSQESVTEQDSKDSTYSLSSTLTLSKADYEKHKVYACEVTHQGLSSPVTKSFNRGEC

SEQ ID NO: 5077 - protein, 107 aa, Artificial Sequence
  source: /note="Description of Artificial Sequence: Synthetic light chain variable domain"
EIVLTQSPATLSLSPGERATLSCRASQSVSSYLAWYQQKPGQAPRLLIYDASNRATGIPARFSGSGSGTDFTLTISSLEPEDFAVYYCQQRSNWPLTFGPGTKVDIK

SEQ ID NO: 5078 - protein, 106 aa, Artificial Sequence
  source: /note="Description of Artificial Sequence: Synthetic light chain variable domain"
EIVVTQSPATLSLSPGERATLSCRASQSVSSYLAWYQQKPGQAPRLLIYDASNRATGIPARFSGSGSGTDFTLTISSLEPEDFAVYYCQQRSNWPTFGQGTKVEIK

SEQ ID NO: 5079 - protein, 107 aa, Artificial Sequence
  source: /note="Description of Artificial Sequence: Synthetic light chain variable domain"
DIQMTQSPSSLSASVGDRVTITCKASQDVSTAVAWYQQKPGKAPKLLIYSASYLYTGVPSRFSGSGSGTDFTFTISSLQPEDIATYYCQQHYSTPRTFGQGTKLEIK

SEQ ID NO: 5080 - protein, 111 aa, Artificial Sequence
  source: /note="Description of Artificial Sequence: Synthetic light chain variable domain"
EIVLTQSPATLSLSPGERATLSCRASKSVSTSGYSYMHWYQQKPGQAPRLLIYLASNLESGVPARFSGSGSGTDFTLTISSLEPEDFAVYYCQHSRELPLTFGGGTKVEIK

SEQ ID NO: 5081 - protein, 233 aa, Artificial Sequence
  source: /note="Description of Artificial Sequence: Synthetic light chain variable domain"
MRPSIQFLGLLLFWLHGAQCDIQMTQSPSSLSASLGGKVTITCKSSQDINKYIAWYQHKPGKGPRLLIHYTSTLQPGIPSRFSGSGSGRDYSFSISNLEPEDIATYYCLQYDNLLTFGAGTKLELKRTVAAPSVFIFPPSDEQLKSGTASVVCLLNNFYPREAKVQWKVDNALQSGNSQESVTEQDSKDSTYSLSSTLTLSKADYEKHKVYACEVTHQGLSSPVTKSFNRGEC

SEQ ID NO: 5082 - protein, 127 aa, Artificial Sequence
  source: /note="Description of Artificial Sequence: Synthetic light chain variable domain"
METPAQLLFLLLLWLPDTTGEIVLTQSPGTLSLSPGERAILSCRASQSVSSSFLAWYQQKPGQAPRLLIYGAFSRATGIPDRFSGSGSGTDFTLTISRLEPEDFAVYYCQQYDSSRTFGQGTKVEIK

SEQ ID NO: 5083 - protein, 108 aa, Artificial Sequence
  source: /note="Description of Artificial Sequence: Synthetic light chain variable domain"
DIQMTQTTSSLSASLGDRVTISCRASQDISNYLNWYQQKPDGTVKLLIYYTSRLHSGVPSRFSGSGSGTDYSLTISNLEQEDIATYFCQQGNTLPWTFGGGTKLEIKR

SEQ ID NO: 5084 - protein, 127 aa, Artificial Sequence
  source: /note="Description of Artificial Sequence: Synthetic light chain variable domain"
MEAPAQLLFLLLLWLPDTTGEIVLTQSPATLSLSPGERATLSCRASQGVSSYLAWYQQKPGQAPRLLIYDASNRATGIPARFSGSGPGTDFTLTISSLEPEDFAVYYCQQRSNWHPTFGQGTKVEIK

SEQ ID NO: 5085 - protein, 108 aa, Artificial Sequence
  source: /note="Description of Artificial Sequence: Synthetic light chain variable domain"
DIVMTQSHKFMSTSLGDRVSITCKASQDVGAAVAWYQQKPGQSPKLLIYWASTRHTGVPDRFTGGGSGTDFTLTISNVQSEDLTDYFCQQYINYPLTFGGGTKLEIKR

SEQ ID NO: 5086 - protein, 127 aa, Artificial Sequence
  source: /note="Description of Artificial Sequence: Synthetic light chain variable domain"
MEAPAQLLFLLLLWLPDTTGEIVLTQSPATLSLSPGERATLSCRASQSVSSYLAWYQQKPGQAPRLLIYDASNRATGIPARFSGSGSGTDFTLTISSLEPEDFAVYYCQQRSNWPITFGQGTRLEIK

SEQ ID NO: 5087 - protein, 107 aa, Artificial Sequence
  source: /note="Description of Artificial Sequence: Synthetic light chain variable domain"
DIQMTQSPSSLSASVGDRVTITCRASQGISSWLAWYQQKPEKAPKSLIYAASSLQSGVPSRFSGSGSGTDFTLTISSLQPEDFATYYCQQYNSYPRTFGQGTKVEIK

SEQ ID NO: 5088 - protein, 108 aa, Artificial Sequence
  source: /note="Description of Artificial Sequence: Synthetic light chain variable domain"
DIQMTQSPSSLSASVGDRVTITCRASQDISNYLNWYQQKPGKAPKLLIYYTSRLHSGVPSRFSGSGSGTDYTLTISSLQPEDFATYYCQQGNTLPWTFGQGTKVEIKR

SEQ ID NO: 5089 - protein, 108 aa, Artificial Sequence
  source: /note="Description of Artificial Sequence: Synthetic light chain variable domain"
DIQMTQSPSSLSASVGDRVTITCRASQDISNYLNWYQQKPGKAVKLLIYYTSRLHSGVPSRFSGSGSGTDYTLTISSLQPEDFATYFCQQGNTLPWTFGQGTKVEIKR

SEQ ID NO: 5090 - protein, 108 aa, Artificial Sequence
  source: /note="Description of Artificial Sequence: Synthetic light chain variable domain"
DIQMTQSPSSLSASVGDRVTITCKASQDVGAAVAWYQQKPGKAPKLLIYWASTRHTGVPSRFSGSGSGTDFTLTISSLQPEDFATYYCQQYINYPLTFGGGTKVEIKR

SEQ ID NO: 5091 - protein, 108 aa, Artificial Sequence
  source: /note="Description of Artificial Sequence: Synthetic light chain variable domain"
DIQMTQSPSSLSASVGDRVTITCKASQDVGAAVAWYQQKPGKAPKLLIYWASTRHTGVPDRFSGGGSGTDFTLTISSLQPEDFATYYCQQYINYPLTFGGGTKVEIKR

SEQ ID NO: 5092 - protein, 120 aa, Artificial Sequence
  source: /note="Description of Artificial Sequence: Synthetic light chain variable domain"
EVQLVQSGGGLVHPGGSLRLSCAHSGFTFTSSAMHWVRQAPGKGLEWISAIGTGGDTYYADSVKGRFTISRDNAKNSLYLQINSLRAEDMAVYYCARDFYDILTGIFDYWGQGTLVTVSS

SEQ ID NO: 5093 - protein, 106 aa, Artificial Sequence
  source: /note="Description of Artificial Sequence: Synthetic light chain variable domain"
EIVLTQSPATLSLSPGERATLSCRASSSVSYMHWYQQKPGQAPRPWIYATSNRATGIPARFSGSGSGTDYTLTISSLEPEDFAVYYCQQWSSNPWTFGQGTKVEIK

SEQ ID NO: 5094 - protein, 126 aa, Artificial Sequence
  source: /note="Description of Artificial Sequence: Synthetic light chain variable domain"
MRPSIQFLGLLLFWLHGAQCDIQMTQSPSSLSASLGGKVTITCKSSQDINKYIAWYQHKPGKGPRLLIHYTSTLQPGIPSRFSGSGSGRDYSFSISNLEPEDIATYYCLQYDNLLTFGAGTKLELK

SEQ ID NO: 5095 - protein, 136 aa, Artificial Sequence
  source: /note="Description of Artificial Sequence: Synthetic light chain variable domain"
MEFVLSWVFLVAILKGVQCEIQLVQSGGGLVHPGGSLRLSCAGSGFTFSSDAMYWVRQAPGKGLEWVSAIGIGGDTYYTDSVMGRFTISRDNAKNSLYLQMNSLRAEDMAVYYCARLGMGYYFDYWGQGTLVTVSS

SEQ ID NO: 5096 - protein, 108 aa, Artificial Sequence
  source: /note="Description of Artificial Sequence: Synthetic light chain variable domain"
DIQMTQSPSSLSASVGDRVTITCRATQSIYNALAWYQQKPGKAPKLLIYNANTLHTGVPSRFSASGSGTDSTLTISSLQPEDFATYYCQQYYDYPLTFGGGTKVEIKR

SEQ ID NO: 5097 - protein, 117 aa, Artificial Sequence
  source: /note="Description of Artificial Sequence: Synthetic light chain variable domain"
EVQLVESGGGLVQPGGSLRLSCAASGFTFSSYDMHWVRQTTGKGLEWVSVIGTAGDTYYPGSVKGRFTISRENAKNSLYLQMNSLRAGDTAVYYCARGGMGNYFDYWGQGTLVTVSS

SEQ ID NO: 5098 - protein, 130 aa, Artificial Sequence
  source: /note="Description of Artificial Sequence: Synthetic light chain variable domain"
MDMRVLAQLLGLLLLCFPGARCDIQMTQSPSSLSASVGNRVTITCRASQDISSWLAWYQQKPEKAPKSLIYAASSLQSGVPSRFSGSGSGTDFTLTISSLQPEDFATYYCQQYNSYPLTFGQGTRLEIKR

SEQ ID NO: 5099 - protein, 106 aa, Artificial Sequence
  source: /note="Description of Artificial Sequence: Synthetic light chain variable domain"
QIVLTQSPAILSASPGEKVTMTCRASSSVSYMHWYQQKPGSSPKPWIYATSNLASGVPARFSGSGSGTSYSLTINRVEAEDAATYYCQQWSSNPWTFGGGTKLEIK

SEQ ID NO: 5100 - protein, 107 aa, Artificial Sequence
  source: /note="Description of Artificial Sequence: Synthetic light chain variable domain"
EIVLTQSPATLSLSPGERATLSCRASSSVSYYMAWYQQKPGQAPRLLIYATSNRATGIPARFSGSGSGTDFTLTISSLEPEDFAVYYCQQWSSNPWTFGQGTKVEIK

SEQ ID NO: 5101 - protein, 107 aa, Artificial Sequence
  source: /note="Description of Artificial Sequence: Synthetic light chain variable domain"
EIVLTQSPATLSLSPGERATLSCRASSSVSYYLAWYQQKPGQAPRLLIYATSNRATGIPARFSGSGSGTDYTLTISSLEPEDFAVYYCQQWSSNPWTFGQGTKVEIK

SEQ ID NO: 5102 - protein, 107 aa, Artificial Sequence
  source: /note="Description of Artificial Sequence: Synthetic light chain variable domain"
EIVLTQSPATLSLSPGERATLSCRASSSVSYYMAWYQQKPGQAPRLLIYATSNRATGIPARFSGSGSGTDYTLTISSLEPEDFAVYYCQQWSSNPWTFGQGTKVEIK

SEQ ID NO: 5103 - protein, 107 aa, Artificial Sequence
  source: /note="Description of Artificial Sequence: Synthetic light chain variable domain"
EIVLTQSPATLSLSPGERATLSCRASSSVSYYMAWYQQKPGQAPRPWIYATSNRATGIPARFSGSGSGTDYTLTISSLEPEDFAVYYCQQWSSNPWTFGQGTKVEIK

SEQ ID NO: 5104 - protein, 115 aa, Artificial Sequence
  source: /note="Description of Artificial Sequence: Synthetic light chain variable domain"
QVQLVESGGGVVQPGRSLRLSCAASGFTFSNYALHWVRQAPGKGLEWVALISYDGSRKHYADSVKGRFSISRDNSKNTLYLQMNSLRAEDTAVYYCASLTMVREGGQGTLVTVSS

SEQ ID NO: 5105 - protein, 107 aa, Artificial Sequence
  source: /note="Description of Artificial Sequence: Synthetic light chain variable domain"
QIVLTQSPATLSLSPGERATLSCRASSSVSYYMAWYQQKPGQAPRPWIYATSNRATGIPARFSGSGSGTDYTLTISSLEPEDFAVYYCQQWSSNPWTFGQGTKVEIK

SEQ ID NO: 5106 - protein, 106 aa, Artificial Sequence
  source: /note="Description of Artificial Sequence: Synthetic light chain variable domain"
EIVLTQSPATLSLSPGERATLSCRASSSVSYMAWYQQKPGQAPRLLIYATSNRATGIPARFSGSGSGTDYTLTISSLEPEDFAVYYCQQWSSNPWTFGQGTKVEIK

SEQ ID NO: 5107 - protein, 107 aa, Artificial Sequence
  source: /note="Description of Artificial Sequence: Synthetic light chain variable domain"
DIQLTQSPSSLSASVGDRVTITCRVSQGISSYLNWYRQKPGKVPKLLIYSASNLQSGVPSRFSGSGSGTDFTLTISSLQPEDVATYYGQRTYNAPYTFGGGTKVEIK

SEQ ID NO: 5108 - protein, 106 aa, Artificial Sequence
  source: /note="Description of Artificial Sequence: Synthetic light chain variable domain"
EIVLTQSPATLSLSPGERATLSCRASSSVSYMHWYQQKPGQAPRLLIYATSNRATGIPARFSGSGSGTDYTLTISSLEPEDFAVYYCQQWSSNPWTFGQGTKVEIK

SEQ ID NO: 5109 - protein, 106 aa, Artificial Sequence
  source: /note="Description of Artificial Sequence: Synthetic light chain variable domain"
EIVLTQSPATLSLSPGERATLSCRASSSVSYMAWYQQKPGQAPRLLIYATSNLASGIPARFSGSGSGTDYTLTISSLEPEDFAVYYCQQWSSNPWTFGQGTKVEIK

SEQ ID NO: 5110 - protein, 106 aa, Artificial Sequence
  source: /note="Description of Artificial Sequence: Synthetic light chain variable domain"
EIVLTQSPATLSLSPGERATLSCRASSSVSYMHWYQQKPGQAPRLLIYATSNLASGIPARFSGSGSGTDYTLTISSLEPEDFAVYYCQQWSSNPWTFGQGTKVEIK

SEQ ID NO: 5111 - protein, 107 aa, Artificial Sequence
  source: /note="Description of Artificial Sequence: Synthetic light chain variable domain"
EIVLTQSPATLSLSPGERATLSCRASQSVSSYLAWYQQKPGQAPRLLIYDASNRATGIPARFSGSGSGTDFTLTISSLEPEDFAVYYCQQRSNWPPTFGGGTKVEIK

SEQ ID NO: 5112 - protein, 214 aa, Artificial Sequence
  source: /note="Description of Artificial Sequence: Synthetic light chain variable domain"
EIVLTQSPATLSLSPGERATLSCRASQSVSSYLAWYQQKPGQAPRLLIYDASNRATGIPARFSGSGSGTDFTLTISSLEPEDFAVYYCQQRSNWPLTFGPGTKVDIKRTVAAPSVFIFPPSDEQLKSGTASVVCLLNNFYPREAKVQWKVDNALQSGNSQESVTEQDSKDSTYSLSSTLTLSKADYEKHKVYACEVTHQGLSSPVTKSFNRGEC

SEQ ID NO: 5113 - protein, 113 aa, Artificial Sequence
  source: /note="Description of Artificial Sequence: Synthetic light chain variable domain"
DIVMTQSPDSLAVSLGERATINCKSSQSLWDSGNQKNFLTWYQQKPGQPPKLLIYWTSTRESGVPDRFSGSGSGTDFTLTISSLQAEDVAVYYCQNDYFYPLTFGGGTKVEIK

SEQ ID NO: 5114 - protein, 107 aa, Artificial Sequence [sequence omitted]

SEQ ID NO: 5115 - protein, 111 aa, Artificial Sequence
  source: /note="Description of Artificial Sequence: Synthetic light chain variable domain"
DIVLTQSPASLTLSPGQRLTISCRASQSVSTSGYSYMHWYQQKPDQSPKLLIKFGSNLESGIPARFSGSGSGTDFTLTISSLEEEDFATYYCQHSWEIPYTFGQGTKLEIK

SEQ ID NO: 5116 - protein, 111 aa, Artificial Sequence
  source: /note="Description of Artificial Sequence: Synthetic light chain variable domain"
DIVLTQSPATLSLSPGQRLTISCRASQSVSTSGYSYMHWYQQKPDQSPKLLIKFGSNLESGIPARFSGSGSGTDFTLTISSLEPEDFATYYCQHSWEIPYTFGQGTKLEIK

SEQ ID NO: 5117 - protein, 111 aa, Artificial Sequence
  source: /note="Description of Artificial Sequence: Synthetic light chain variable domain"
EIVLTQSPATLSLSPGQRLTISCRASQSVSTSGYSYMHWYQQKPDQSPKLLIKFGSNLESGIPARFSGSGSGTDFTLTISSLEPEDFATYYCQHSWEIPYTFGQGTKLEIK

SEQ ID NO: 5118 - protein, 111 aa, Artificial Sequence
  source: /note="Description of Artificial Sequence: Synthetic light chain variable domain"
DIVLTQSPATLSLSPGQRLTISCRASQSVSTSGYSYMHWYQQKPDQSPKLLIKFGSNLESGIPARFSGSGSGTDFTLTISSLEPEDFAVYYCQHSWEIPYTFGQGTKLEIK

(The sequence listing continues in the following parts.)

1. An effector module comprising:
(a) a stimulus response element (SRE), wherein the SRE is a DD, said DD comprising at least one mutation relative to cGMP-specific 3′,5′-cyclic phosphodiesterase (hPDE5; SEQ ID NO:1);
(b) at least one payload, which is attached, appended or associated with said SRE; and
wherein the SRE is responsive to one or more stimuli.

2. The effector module of claim 1, wherein the SRE comprises at least one mutation selected from the group comprising T537A, E539G, V548E, D558G, F559S, E565G, C574N, R577Q, R577W, N583S, Q586R, Q589L, K591R, K591R, L595P, C596R, W615R, F619S, Q623R, K633I, Q635R, N636S, T639S, D640N, E642G, I643T, L646S, A649V, A650T, S652G, H653A, D654G, V660A, V660A, L672P, A673T, C677Y, M681T, E682G, H685R, F686S, Q688R, M691T, S695G, G697D, S702I, I706T, E707K, Y709H, Y709C, I715V, I720V, A722V, D724G, Y728C, K730E, R732L, L738I, I739M, K741N, K741R, F744L, D748N, K752E, K752E, K752E, E753K, L756V, M758T, M760T, A762V, C763R, D764N, D764N, I774V, L781F, L781P, E785K, R794G, M805T, R807G, K812R, I813T, I813T, M816R, Q817R, V818A, F820S, I821V, C825R, Y829C, E830K, L832P, S836L, C846Y, C846S, L856P, L856P, A857T, or E858G.

3. The effector module of claim 2, wherein the SRE comprises two mutations, said two mutations selected from the group consisting of E536K, I739W; H678F, S702F; E669G, I700T; G632S, I648T; T639S, M816R; Q586R, D724G; E539G, L738I; L672P, S836L; M691T, D764N; I720V, F820S; E682G, D748N; S652G, Q688R; Y728C, Q817R; H653A, R732L; and L595P, K741R.

4. The effector module of claim 2, wherein the SRE comprises three mutations, said three mutations selected from the group consisting of Q623R, D654G, K741N; A673T, L756V, C846Y; E642G, G697D, I813T; C677Y, H685R, A722V; Q635R, E753K, I813T; Y709H, K812R, L832P; N583S, K752E, C846S; K591R, I643T, L856P; F619S, V818A, Y829C; and F559S, Y709C, M760T.

5. The effector module of claim 2, wherein the SRE comprises four mutations, said four mutations selected from the group consisting of S695G, E707K, I739M, C763R; A649V, A650T, K730E, E830K; and R577W, W615R, M805T, I821V.

6. The effector module of claim 2, wherein the SRE comprises five mutations, said five mutations selected from the group consisting of V660A, L781F, R794G, C825R, E858G; and T537A, D558G, I706T, F744L, D764N.

7. The effector module of claim 2, wherein the SRE comprises six mutations said six mutations comprising R577Q, C596R, V660A, I715V, E785K, and L856P.

8. The effector module of claim 2, wherein the SRE comprises eight mutations, said eight mutations comprising V548E, Q589L, K633I, M681T, S702I, K752E, L781P, and A857T.

9. The effector module of claim 1, wherein the SRE comprises two mutations, said two mutations selected from the group consisting of R732D, F736S; R732E, F736D; R732V, F736G; R732W, F736G; R732W, F736V; R732L, F736W; R732P, F736Q; R732A, F736A; R732S, F736G; R732T, F736P; R732M, F736H; R732Y, F736M; R732P, F736D; R732P, F736G; R732W, F736L; R732L, F736S; R732D, F736T; R732L, F736V; R732G, F736V; and R732W, F736A.

10. The effector module of claim 1, wherein the at least one payload is a chimeric antigen receptor (CAR).

11. The effector module claim 10, wherein the CAR comprises:
(a) an extracellular target moiety;
(b) a hinge and transmembrane domain;
(c) an intracellular signaling domain; and
(d) optionally, one or more co-stimulatory domains.

12. The effector module of claim 11, wherein the SRE comprises the mutation H653A or R732L.

13. The effector module of claim 11, wherein the SRE comprises the mutations H653A and R732L.

14. The effector module of claim 11, wherein the CAR is a CD19 CAR.

15. The effector module of claim 12, wherein the CAR comprises the amino acid sequence of OT-001455, SEQ ID NO: 8282.

16. The effector module of claim 13, wherein the CAR comprises the amino acid sequence of OT-001456, SEQ ID NO: 8283.

17. The effector module of claim 1, wherein the one or more stimuli comprises a small molecule and wherein the small molecule is selected from Tadalafil, Vardenafil, Sildenafil, Avanafil, Lodenafil, Mirodenafil, Udenafil, Benzamidenafil, Dasantafil, and Beminafil.

18. The effector module of claim 17, wherein the small molecule is Vardenafil.

19. The effector module of claim 17, wherein the small molecule is Sildenafil.

20. The effector module of claim 17, wherein the small molecule is Tadalafil.

21. A pharmaceutical composition comprising the effector module of claim 1 and a pharmaceutically acceptable excipient.

22. A polynucleotide encoding the effector module of claim 1.

23. A pharmaceutical composition comprising the polynucleotide of claim 22.

24. A vector comprising a polynucleotide of claim 22.
